United States Patent Application Publication US 2004/0031072 A1 - sequence listing, part 38

SEQ ID NO: 221211 - protein, 212 aa, Glycine max
  unsure (1)..(212): unsure at all Xaa locations
  Clone ID: PAT_MRT3847_41784C.1.pep
MDLLHQYSDGDDPDSPSENPSSPPRLLPGRSAAPNVDDTMLALTVTSSSSAALSRPIDPTQHLVGFNPSYDQLWAPIQGPAHPFAKDGIAQGMRNHKLGFVEDASIEPFLFDEQYNTFHKFGYAADPAANNFVGDLDALRDNNAVSVYNIPRHEHKKRRIEAKEKKKSEEDDDXDVNEEIENPASEAWIMKNKKSPWAGKEGGVQGELTEEQ

SEQ ID NO: 221212 - protein, 491 aa, Glycine max
  unsure (1)..(491): unsure at all Xaa locations
  Clone ID: PAT_MRT3847_41785C.1.pep
MAETPKKKKGHVVMVPFMAQGHIIPFLALARQIQQSTSFTITIANTPFNIQYLRSALSSSTSPNHQIRLAELPFNSTLHDLPPNIDNTEKLPLTQLMKLCHASLTLEPPLRSLISQITEEEGHPPLCTISDVFLGWVNNVAKSLCIRNLSFTTCGAYGILAYISIWFNLPHRKTDSDEFYVPGFPSKLQIPXTQLHKFLLAADGTDDWSRFIVPQIALSMKSDGWICNTVEEIEPLGLQLLRNYLQLPVWPVGPLLPPASLMDSKHRAGKESGIALDACMQWLDSKDESSVLYISFGSQNTITASQMMALAEGLEESGRSFIWIIRPPFGFDINGEFIAEWLPKGFEERMRDTKRGLLVHKWGPQLEILSHSSTGAFLSHCGWNSVLESLSYGVPMIGWPLAAEQTFNLKMLVEKMGVAVELTQTVKTVISGKQVKKVIEIVMEQEGKGKAMKEKATEIAAHMREAITEEGKEKGSSVRAMDDLVRTILSP

SEQ ID NO: 221213 - protein, 79 aa, Glycine max
  Clone ID: PAT_MRT3847_41786C.1.pep
GLLGSLQFTKGPRLITPVLENMTFCVLISLDYPQHSSLWEEAVVRSKLGVVMDNENCVEDTGSDSLVRTLKRRAGGHLM

SEQ ID NO: 221214 - protein, 193 aa, Glycine max
  Clone ID: PAT_MRT3847_41787C.1.pep
RSRSASVGQRFPLSPSSSFPLRFVSPPDAVYPRLSASLPPPLRVRPPAFCPPWLCFGPPAMGPADSAHHHRPCFRQMLAVDIALLYEGSRRRVVRTKSLLYQLARLAGSASVEILSFFSYLHRAEWFVRAFSPAHALFPSSSALCGVLASKLVSDLPPPVRSTDRSSSSSSSAPPRLLRLSSPAALRLCRCTW

SEQ ID NO: 221215 - protein, 143 aa, Glycine max
  Clone ID: PAT_MRT3847_41788C.1.pep
EISSFGMHDGQNSAGPSSQTRREDRDLQGQDYSGIHSAQPLQRAPPTDVIHPSKVPIRGSRFGKENPNQLPFPMQGPLHKSLSRSMSLTHEDLSITSSNLSSIGSESLGWPSTESRNENDVPFGQPGSCSTFKLFGVSLIDRS

SEQ ID NO: 221216 - protein, 114 aa, Glycine max
  unsure (1)..(114): unsure at all Xaa locations
  Clone ID: PAT_MRT3847_41789C.1.pep
KSTCVTWSISTFTDTHPPIKADALXTEIEKDADNIKRLLQEWDLVIRAEGPACXEPFLSRGIALVAELTDRIVPSAIYTMLCAFYGSTVHGHTXLDPYCGFMNPVPTYAITSLN

SEQ ID NO: 221217 - protein, 260 aa, Glycine max
  Clone ID: PAT_MRT3847_4178C.1.pep
TLTTLTQMATRTGRLFQNQNLNVHVNGGGTVSEKADLTGQRKVRAGGRKPLGDLSNAGNLINHFDGKKGLDGSLYTGKPSVSQAQAPKLHKSKNLESDKRIPASEKSLTRSRKALSDISNSGKPQVPEIKNKKTLKPLEESLPPSAISEEQILHDHKKCIKSQFETADVHQFFKTVGLEDDDHMAISFELSAISKQKSESAYLELEEVPEWLPEVHSLSVLHGGSPAVHCKTPGLSSYRTMWNDSTVNFKLIETPKLSKK

SEQ ID NO: 221218 - protein, 129 aa, Glycine max
  Clone ID: PAT_MRT3847_41790C.1.pep
MSSLLQSVFRSPKKSKHADTLQGLKSPSNVHETPFFPSPLTPACVMAHGAEKMEASRQEVEDACRSFENYLVEMIVEEGKTRDLMDVEELLYCWKNLRCPVFIDLVSRFYGELCKDLFSPDSEEGDSSK

SEQ ID NO: 221219 - protein, 129 aa, Glycine max
  unsure (1)..(129): unsure at all Xaa locations
  Clone ID: PAT_MRT3847_41791C.1.pep
MPLLSCAGYAPPPCMWIFFSDPPLGVALVMQVVAMVLVGVCLRVPTQVSWGGHPLACTGVSKNLGPLAPPMRGEYMLQTFHMXXPNRLCQAVLLCSRASFSSRMFISIIRARRQQGVLFVSPGFTFYQS

SEQ ID NO: 221220 - protein, 48 aa, Glycine max
  Clone ID: PAT_MRT3847_41792C.1.pep
TPWINYFPHFLQLVLDLVSFVLFFTCNVLVLLTPSNKSIILIAFQERY

SEQ ID NO: 221221 - protein, 94 aa, Glycine max
  Clone ID: PAT_MRT3847_41793C.1.pep
CIGLSFLTVLVFYLPSNEGEKICLCTSVLVSLTVFLLVIEEIIPSSSKVIPLIGEYLVFTMIFVTLSIMVTVFAINIHHRSSSTHNAMAPLVRK

SEQ ID NO: 221222 - protein, 188 aa, Glycine max
  Clone ID: PAT_MRT3847_41794C.1.pep
MEQLKYKVVQGDDNNNKGPVVRSFFSSSSSEAGISSGSSLDSDSFEEVTSPASSSSSSAADQPATEPLSDMSSLFQQLPIKRGLSKYYEGKAQSFTSLAKVSSLEDLVKPENPYNKKLKTCSSYGGVMGETPLAGSCPSPSSMQGSQRGSCSFLIANRSSDNIMGRRPPIPPHRSTTTSSIPNQTALF

SEQ ID NO: 221223 - protein, 40 aa, Glycine max
  unsure (1)..(40): unsure at all Xaa locations
  Clone ID: PAT_MRT3847_41795C.1.pep
LGHIDLSNNFLNGSLTNTILNSSXYKLLPYXNNAISGELP

SEQ ID NO: 221224 - protein, 81 aa, Glycine max
  Clone ID: PAT_MRT3847_41796C.1.pep
MTHNNFGWISHITKQIHFPSHLIKNQMKKIRKKNHQLLINPSKTKNPYKSPKMKFLLQHQLPHRPRLCSKCSCIARVALPR

SEQ ID NO: 221225 - protein, 73 aa, Glycine max
  Clone ID: PAT_MRT3847_41797C.1.pep
NVKAFLSWNCFLKCSKSNSAHLACNYDLYFLTLAFFGLLACLHETHHQTPTTSPRLHQHRKANLPRLLTMDGA

SEQ ID NO: 221226 - protein, 69 aa, Glycine max
  Clone ID: PAT_MRT3847_41798C.1.pep
MEPRDGNKHRLGHKIGSGSFREINLGTNIQTNEEVADEQESVKTNHTEWLNESKLDKILQGGKRDVQNV

SEQ ID NO: 221227 - protein, 169 aa, Glycine max
  unsure (1)..(169): unsure at all Xaa locations
  Clone ID: PAT_MRT3847_41799C.1.pep
QLIPQDXXRMSXXNRRXXTYAXRISTTSTLSDGVSLSVGSPKIKKSGAETREELLNSLLLKSDISAPIESGSLPLTSGIISQPKASQPDAQGSSFTLQLFQRTLEETLDSFQKSIHEDMRNLHIEILRQFHMQETEMSAVMNSILENQAELMKEVKSLRQENQQLRQML

SEQ ID NO: 221228 - protein, 46 aa, Glycine max
  unsure (1)..(46): unsure at all Xaa locations
  Clone ID: PAT_MRT3847_4179C.1.pep
GCKMYPDXSYTESTTTETLVMGVAPVKAQFEGAEMGVPADNDGCKC

SEQ ID NO: 221229 - protein, 78 aa, Glycine max
  Clone ID: PAT_MRT3847_417C.1.pep
PRIRLKGPGQKFKYGAWISQIVAPKLFPQLKKRKRVLRPINRAIRSGFLPKKIWLNLQGYKNPPKCPGWKKMGLLGNF

SEQ ID NO: 221230 - protein, 70 aa, Glycine max
  Clone ID: PAT_MRT3847_41800C.1.pep
SEYEAAIVETLLLLGLSDSATIASPPNALLQIQPLYLESGRQQHFFSLNLFFFLFGCPIGLKDKVLFLEL

SEQ ID NO: 221231 - protein, 186 aa, Glycine max
  unsure (1)..(186): unsure at all Xaa locations
  Clone ID: PAT_MRT3847_41801C.1.pep
KALFPTKWYQSFKILKRXANGGFPFQMPMLTKNNYDNWSIKMKALLGAQDVWDTVENDFEEQDVASLSQGVKETLKESRKRDKKALFLIYQSVDEDTFDKISNASXAEESWDKLQTSNIGVEXVNQLKRNDEDVDEEKVMEKILQTLNPSFEFIVTNIEENKDLKTMTIEQLMGSLQAYEEKQKRK

SEQ ID NO: 221232 - protein, 89 aa, Glycine max
  unsure (1)..(89): unsure at all Xaa locations
  Clone ID: PAT_MRT3847_41802C.1.pep
PRPANGLTLFLNPAATMHGPNEXFGVAFNGGFNQPIMCGGERRXMTLQERGKADPPIYSIRIRVAQXAVSLIFSFSXGAEWDGPYPLKF

SEQ ID NO: 221233 - protein, 124 aa, Glycine max
  unsure (1)..(124): unsure at all Xaa locations
  Clone ID: PAT_MRT3847_41803C.1.pep
WTGVSLSCPRVLLNASASPQNVSYXKLSIPPSQAVCPGSKKMGRVMRIRTVRFAPECISXKVEESIKISQXACADDPPSDXCVAAWSXVEQLSAPSSPARDKQKEKDCDPFYKYCKVNPESIEF

SEQ ID NO: 221234 - protein, 246 aa, Glycine max
  Clone ID: PAT_MRT3847_41804C.1.pep
MTSASELFHSRRHRLGRNALDLGLDTELHAADSLRQLRLRHYYLRRHHPERASDRIDGRYRRSFVSESVDSEENVRSSLRGSSSERLPVGVVLARARLLQRLRGEPLSTNRQYDRDSFGEDPESESSNEDPSGASLVTELTSQMARSQFLQELSTKPPGLTQEALDCLHQEVFSSNASEIGLDSRVLQDCSICLESFTDGDELIRLPCGHKFHSVCLDPWIRCCGDCPYCRRCIVVNTHSSLNEDE

SEQ ID NO: 221235 - protein, 345 aa, Glycine max
  Clone ID: PAT_MRT3847_41805C.1.pep
MASETKVVNLAEEAKLAREGVTTPSYAFTTICKSLVAGGVAGGVSRTAVAPLERLKILLQVQNPHSIKYNGTIQGLKYIWRTEGFRGLFKGNGTNCARIVPNSAVKFFSYEQASKGILHLYRKQTGNEDAQLTPLLRLGAGACAGIIAMSATYPMDMVRGRITVQTEKSPYQYRGMFHALSTVLREEGPRALYKGWLPSVIGVIPYVGLNFAVYESLKDWLIKSNPLGLVQDSELSVTTRLACGAAAGTIGQTVAYPLDVIRRRMQMVGWNHAASVVAGDGRGKVPLEYTGMVDAFRKTVRYEGFGALYKGLVPNSVKVVPSIAIAFVTYEVVKDILGVEIRISD

SEQ ID NO: 221236 - protein, 236 aa, Glycine max
  Clone ID: PAT_MRT3847_41806C.1.pep
MTSASELFHSRRHRLGRSALDLGLDTELNAADSLRRHYHLRRLRHHPERASDRIDGRYRRSFASESVDSEENVRSSLRGSDSERLPVGVVLARARLLQRLRGEPLSTNRQYDRDSFGEDRESELSNEDPTRASLVSDLTSQMARSQFLQELNTKPPGLTQEALDCLHQEVFSSSGNEIGLESRVLADCSICLESFTDGDELIRLPCGHKFHSVCLDPWIRCCGDCPYCRRSIVVIN

SEQ ID NO: 221237 - protein, 205 aa, Glycine max
  unsure (1)..(205): unsure at all Xaa locations
  Clone ID: PAT_MRT3847_41807C.1.pep
MASENVKTGDSAVTTIVNLAEEAKLAREGVVKAPSYALASICKSLVAGGVAGGVSXSRTAVAPLERLKILLQVQNPHNIKYNGTVQGLKYIWRTEGFRGLFKGNGTNCARIVPNSAVKFFSYEQASKGILHLYKQQTGNEDAQLTPLLRLGAGACAGIIAMSATYPMDMVRGRITVQTEASPYQYRGMFHALSTVLKEEGARALY

SEQ ID NO: 221238 - protein, 42 aa, Glycine max
  Clone ID: PAT_MRT3847_41808C.1.pep
SHATATFATTESDGNNLGPANQMMVRSMDAYQALSFISDSKG

SEQ ID NO: 221239 - protein, 206 aa, Glycine max
  Clone ID: PAT_MRT3847_41809C.1.pep
MASETKVVNLAEEAKLAREGVTAPSYAFTTICKSLVAGGVAGGVSRTAVAPLERLKILLQVQNPHSIKYNGTIQGLKYIWRTEGFRGLFKGNGTNCARIVPNSAVKFFSYEQASKGILHLYQKQTGNEDAQLTPLFRLGAGACAGIIAMSATYPMDMVRGRITVQTEKSPYQYRGMFHALSTVLREEGPRALYKGWLPSVIGSIPY

SEQ ID NO: 221240 - protein, 204 aa, Glycine max
  Clone ID: PAT_MRT3847_4180C.1.pep
TSKTLTQMATRTGRLFQNQNLNVHVNGGGAVSGKADLTGQRKVGAGGRKPLGDQSNAGNLINQFDGKKALDGSLNTGKPSASVSQAPKLHKSKNLESDKRIPASEKLLTRGRKVLSDISNSGKPQVPEIKNKKTLKPIEESLPPSAIAEEQILHDHKKCIQSQFETADVHQFFKTVGLDDGTFIYSMWCIFLAFNYFILYYCFC

SEQ ID NO: 221241 - protein, 37 aa, Glycine max
  Clone ID: PAT_MRT3847_41810C.1.pep
YKFLNLALLQVYQHTKPGRVRSIFSAYELHIQTTGIA

SEQ ID NO: 221242 - protein, 352 aa, Glycine max
  unsure (1)..(352): unsure at all Xaa locations
  Clone ID: PAT_MRT3847_41811C.1.pep
MASETKVVNLAEEAKLAREGVTTPSYAFTTICKSLVAGGVAGGVSRTAVAPLERLKILLQVQNPHSIKYNGTIQGLKYIWRTEGFRGXLFKGNGTNCARIVPNSAVKFFSYEQASKGILHLYRKQTGNEDAQLTPLLRLGAGACAGIIAMSATYPMDMVRGRITVQTEKSPYQYRGMFHALSTVLREEGPRALYKGWLPSVIGVIPYVGLNFAVYESLKDWLIKSNPLXSSSRXSLSVTTRLXCGAAAGTIGQXVAYPLDVIRRRMQMVGWNHAAFVVTGDGKRKVPLEYTGMVYAFRKTVRYEGFGALYKGLVPNFVKVVPSIAIAFVTYEVVKDILGVEIRISDLRFACM

SEQ ID NO: 221243 - protein, 49 aa, Glycine max
  Clone ID: PAT_MRT3847_41812C.1.pep
KHIKYFFIRGVFKNCNTALVGNCNHQSSKKRSNLLKFLQKTSHLIFFWC

SEQ ID NO: 221244 - protein, 358 aa, Glycine max
  unsure (1)..(358): unsure at all Xaa locations
  Clone ID: PAT_MRT3847_41813C.1.pep
MASENVKTGDSAVTTIVNLAEEAKLAREGVVKAPSYALASICKSLVAGGVAGGVSRTAVAPLERLKILLQVQNPHNIKYNGTVQGLKYIWRTEGFRGLFKGNGTNCARIVPNSAXVKFFSNEQAAXGILHLFQQXTGNEDAQLTPLLRLGSGSCAGIFARTATYPIYMMAGCIXVVEFVLWDVSPLGIFHXALSVWLMESNPXVQVQDCLLASDRVFAYVGPTFAIYXSLNDCFNTSNPLGLVENSELSVTTRLACGAAAGTVGQTVAYPLDVIRRRMQMVGWNHAASVLTGDGRGKVPLEYTGMVDAFRKTVQHEGFGALYKGLVPNSVKVVPSIAIAFVTYEVVKDILGVEIRISD

SEQ ID NO: 221245 - protein, 102 aa, Glycine max
  unsure (1)..(102): unsure at all Xaa locations
  Clone ID: PAT_MRT3847_41814C.1.pep
EFELCTRGSSRVDLQMETSWYTXSPEEVAGTSLPSCASDVYQLGVLLFELFCPLISREEKRRTMSSLRHRVLPPQLLLKWPKEASFCLWLLHPEPNSRPTIG

SEQ ID NO: 221246 - protein, 61 aa, Glycine max
  Clone ID: PAT_MRT3847_41815C.1.pep
FQAKFSFANVLLAVTKHATKMSLLSKLCLDYSKRKTKHTLKPFATKRVFIPFNRVICLLTM

SEQ ID NO: 221247 - protein, 79 aa, Glycine max
  Clone ID: PAT_MRT3847_41816C.1.pep
PSVSLCMPTHSRLYAYPRLNPTFHRSIGPLGPLQLLYPSPSQTILVLKLLILPYWTCPISVMVQLHLSVNVIHSKSMCS

SEQ ID NO: 221248 - protein, 183 aa, Glycine max
  unsure (1)..(183): unsure at all Xaa locations
  Clone ID: PAT_MRT3847_41817C.1.pep
VAXXLLXXEPSDSAAYVLLSNVYAAANQWENVASARNMMRKANVKKDPGFSWVDLKNKVHLFVAGDRSHEETDVIYNKVEYIMKRIREEGYLRDTDFALVDVEEEDKECSLYYHSEKLAIAYGLMKTPXXSTTLRVIKNLRVCGDCHNAIKYISKVFEREVVLRDANRFHHFRSGVCSCGDYW

SEQ ID NO: 221249 - protein, 125 aa, Glycine max
  unsure (1)..(125): unsure at all Xaa locations
  Clone ID: PAT_MRT3847_41818C.1.pep
PISFCFTILPKEGILMNRQKPKISVRFIIMNRAKLISQADINPYSMYWTGLANTSLTXGHLFSXCHFPSFNGLITKQVLSMTAYMINSLCCVDEKLTLVMTHLLLACCSRTAIYNKDFWRVICDS

SEQ ID NO: 221250 - protein, 71 aa, Glycine max
  Clone ID: PAT_MRT3847_41819C.1.pep
LTTGITLKAVLCLQTACNIRTGSDKRHRKRPIYRLVCIRLKLHPQDKGNITFIKGAYLNVAAYLNKLNAIL

SEQ ID NO: 221251 - protein, 115 aa, Glycine max
  Clone ID: PAT_MRT3847_4181C.1.pep
RQKRFKKYVISSHCLLLTLPLEEEGTRPSLMRHDPLSVTPQDRGLLLGVYHAPTVAESAIQYWDRLARLDWVTILLLPEHVMDVLTPLTLYCLIMGSVQTDPSEEHDDLAHALQQ

SEQ ID NO: 221252 - protein, 123 aa, Glycine max
  unsure (1)..(123): unsure at all Xaa locations
  Clone ID: PAT_MRT3847_41820C.1.pep
IDPKKGNLGIIAPVAIGFIVGANXILLGGAFSGTAMNPAVTFGPPVVRWPWTNLWILWAGPLIGGGKAGRVFXVVFVSPTQEQVPVLWKVEGGQCPFHKTDCGLLNFYGIFFCAWVSFRVFSS

SEQ ID NO: 221253 - protein, 35 aa, Glycine max
  unsure (1)..(35): unsure at all Xaa locations
  Clone ID: PAT_MRT3847_41821C.1.pep
RAFDVSMHXAYVXARILRLRVNLDSNLVYIYCEPC

SEQ ID NO: 221254 - protein, 72 aa, Glycine max
  Clone ID: PAT_MRT3847_41822C.1.pep
SLICFLLLTVTRHLLYDQFLRVSLFVYYHFALRTLHICIHSPCTRTLIRYAKSIFYFFVVPPPPPKKEDVIQ

SEQ ID NO: 221255 - protein, 79 aa, Glycine max
  Clone ID: PAT_MRT3847_41823C.1.pep
SKYYVVVVQYTARFNAEAVKNFLYSLNNGSIAKKKFNMRLAPEETSMELTGYGHNAVTCIGMKTDIPVRMDMLIGIRFL

SEQ ID NO: 221256 - protein, 56 aa, Glycine max
  Clone ID: PAT_MRT3847_41824C.1.pep
PGQEETTYQVLEHSHYYLKPENYSPFFYHLYSFLSFAPLIVKPSMTMSVAKPLVRI

SEQ ID NO: 221257 - protein, 128 aa, Glycine max
  unsure (1)..(128): unsure at all Xaa locations
  Clone ID: PAT_MRT3847_41825C.1.pep
TQKNXGDAKKDXHKXPGTEHPTAPREEXKDQEDGEHNAKHTAEAGTNAQXGGEDPPETNPKRVFFFIDTKACNDLLLKANQIGSVTDSIEAVRMSKKSGWGVKASHISGETEDTSIADISVGLDTGLI

SEQ ID NO: 221258 - protein, 378 aa, Glycine max
  Clone ID: PAT_MRT3847_41826C.1.pep
KLLAFRAPDDTRQEAYAKLLALKKQLHEKSKNFWEYKDAATKAQELAAGGKKEELQCFCVDEVERIMELWNKNDEFRRDYVRCNTRSTLRRLQTLDGRSLGPDEEPLVMPNAITERASKNIPMVSNTTMEQEKKSPRESVNVKDEPDSKVVAQRTETSQTTKAKKPTKPAPLEKHVARWGDESDEDEDKDKNEEEPVRTKEEEELILKAEKARKEEEEAKLKEKRRLEEIEKAKEALQRKKRNAEKAQQRAALKAQKEAELKEKEREKRAKKKERRKTSSAVTAENTEQESAHTTETLTSVEESDLTEKPAEVTKKPQKPSQFTRQTKVKSVPAALRNRAKRRIQPWMWVLIAVVVVVALFYVGNSSSLRSSLEGFGY

SEQ ID NO: 221259 - protein, 121 aa, Glycine max
  unsure (1)..(121): unsure at all Xaa locations
  Clone ID: PAT_MRT3847_41827C.1.pep
WTEAPYCRSAKRTSDARVAYSAYSKLEAFSHNPTHGSFEPXLAYQPRAMAYCVNQRFLSXVGSITKXHCQQXGKTNMSHDGLNPAHVPXWWVNNPTHRQICFPTIVRADSEGSPSNVARTR

SEQ ID NO: 221260 - protein, 77 aa, Glycine max
  Clone ID: PAT_MRT3847_41828C.1.pep
KKKKWSKKNCSTKLGGIRGLPFIPNQKNFFFYSHKIFSLGLFLILRHFKYICFTSLKKFPNHDGGFPMPSLSCNLNN

SEQ ID NO: 221261 - protein, 310 aa, Glycine max
  Clone ID: PAT_MRT3847_41829C.1.pep
MGLSTARTSIGSVCVCAISKPLRRHCHFLPTSVSPVFSCLQKKCKLNFQKPVQDAADSKISCSLVNVEDGIDDEACELVSGVELSLEEGDENIRAYLFKAVKNNNGTGLLLLSDVFGFEDSFTRDFAYRVACNGYNILVPDLFRGNPWTKDQQDPDVFEKWIARQNPERIAEDITRWTKWLVDEFMAVGISKKLGIIGFCFGGGQVLKVLAKDQGACFGTGVSFYGTRIDPLAASDIKAPVLFILGDNDPLCQVSEIENVEKKIASGSKVVLFPGRGHGFAHRPGSPEEDVDAEQAYVIMRDWLYDRLVV

SEQ ID NO: 221262 - protein, 36 aa, Glycine max
  Clone ID: PAT_MRT3847_4182C.1.pep
GRQTEKYIKYQPEDIETYIDELFEGKPHQSIARRRT

SEQ ID NO: 221263 - protein, 36 aa, Glycine max
  Clone ID: PAT_MRT3847_41830C.1.pep
EEYENMDDVGTLQTCGHIYHVSCIIPWLTMKSFCPI

SEQ ID NO: 221264 - protein, 222 aa, Glycine max
  Clone ID: PAT_MRT3847_41831C.1.pep
MAAKIQTSFCLPTFSIPTSKPKPYLKSFTIKASKSISGRKLRAAVIGGGPAGSSAAEALASGGVETFLFERNPPSVAKPCGGAIPLCMLEEFDIPNHLIDRHVTHMRIFSPSNIAVDFGKTLKPHEFIAMLRREVLDSFLRSRAHAAGATAISGLVTALDLPASPDAPYTVHYTANGSSRRSLAVDVVIGADGANSRVAKAIGAGDYACAIAFQERIKFGRV

SEQ ID NO: 221265 - protein, 37 aa, Glycine max
  Clone ID: PAT_MRT3847_41832C.1.pep
MPFFFFCANVDMNGGDRILELLSKSSFTDLFGPIIIT

SEQ ID NO: 221266 - protein, 108 aa, Glycine max
  Clone ID: PAT_MRT3847_41833C.1.pep
MEFESGTQKQKGTFACLKMVALIALCLILISPAESFDPLDPTGNVTIRWDIMSWTSDGYLATVTLFNFQLYRNIMNPGWTLGWTWAKKEIIWAAMGAEATEQGGLGEG

SEQ ID NO: 221267 - protein, 157 aa, Glycine max
  Clone ID: PAT_MRT3847_41834C.1.pep
NYATQGHNLCAHNGRCLSLATMYVLHGNLTPTTSTRVPTKLPLTMDPLAPYPHYLTFWFWFIMFHVLSFARVPIIFGQLYVGLSVATFFIFPLFFPLFFNVLDPRGNCPSHYRTLSLFLDDMLGGLLGCPPPPSPPPPNEGRIVIHVMSGKRFLGIG

SEQ ID NO: 221268 - protein, 161 aa, Glycine max
  Clone ID: PAT_MRT3847_41835C.1.pep
DDLEEKEKEVFLHIACFFGQNASEHYVKGILGFRGFNPEIDLKVLVDKSLITISCGMISMPNLLRDLGNGIREKSHKEPRKWSRFRDWEVDALSKLKNLNLSIVEVEEDLKLLVHGKFDKVEKGLEDLELFMHDQIDEVEEKFELCASNIKDSWNSFLDNF

SEQ ID NO: 221269 - protein, 77 aa, Glycine max
  Clone ID: PAT_MRT3847_41836C.1.pep
MGLWTLLEGFLLLANALAILNEDRFLAPRGWGFQDFSGGRTKSFKGQLIGLIYATQYLRVPLILLNSICIFLKLVSG

SEQ ID NO: 221270 - protein, 40 aa, Glycine max
  Clone ID: PAT_MRT3847_41837C.1.pep
DHSVCFATMANFFAAMILALFAISILHTMVMSANEQVGHL

SEQ ID NO: 221271 - protein, 87 aa, Glycine max
  Clone ID: PAT_MRT3847_41838C.1.pep
VIKVFTEKWGESHSFIQKLKLGFPDFPVENFNIKGQRAKISCGKRQQDCRLLLSPKLDCPLERPGLFLHGEQTPQGLCENHGLHRQI

SEQ ID NO: 221272 - protein, 87 aa, Glycine max
  Clone ID: PAT_MRT3847_41839C.1.pep
MEMERVLWVGIAIGLVFSNWVVGYEQYHFNETELSLLEAHEASLSYAGTERNNLLLVGLTLIQNAAAKRAVCLDGTLPGYHWHRGYG

SEQ ID NO: 221273 - protein, 43 aa, Glycine max
  unsure (1)..(43): unsure at all Xaa locations
  Clone ID: PAT_MRT3847_4183C.1.pep
WFCKTHFKVHLMQKSGLIRPETKCQLNSKXWSGQLAWKKSGFR

SEQ ID NO: 221274 - protein, 95 aa, Glycine max
  Clone ID: PAT_MRT3847_41840C.1.pep
LSKYDSSFTTKLLPLTATHLSLSTLQLQWPSIPYSCTFYLPVQNHYCHLSSLPLPILTIYLTLHNILLTTSITPIRSPTTHIFASAPGGGTGRGH

SEQ ID NO: 221275 - protein, 92 aa, Glycine max
  Clone ID: PAT_MRT3847_41841C.1.pep
NHLKFPEEVRLTPEAKDLICRLLSGVPHRLGTRGAEEIKAHPWFTDVMWDKLYEMEAAFKPQVNGELDTQNFMKFDEVEQPKSTRSGSGPFR

SEQ ID NO: 221276 - protein, 63 aa, Glycine max
  Clone ID: PAT_MRT3847_41842C.1.pep
SHSHHSLTLLFSFLLPSSHTTPHPTILTRSAFSTLYLLNYLVLVFVSNRLEPVVPIYSKGRQS

SEQ ID NO: 221277 - protein, 97 aa, Glycine max
  unsure (1)..(97): unsure at all Xaa locations
  Clone ID: PAT_MRT3847_41843C.1.pep
IPGCDTIASRPTSFPFVLGTTIKWSYISFGWEAVGSQVXXGGXXQVSEXXVVFWALXXECTILILCXXEEGLAFSLLXXNTHFXPKGSLXSLILQNF

SEQ ID NO: 221278 - protein, 67 aa, Glycine max
  unsure (1)..(67): unsure at all Xaa locations
  Clone ID: PAT_MRT3847_41844C.1.pep
MEQXGXXXXANLAXXGXXTLNNXRSARXXXIGEXFAEXXVXXXGNSXWXXXXXXXGXGVESXXRXXX

SEQ ID NO: 221279 - protein, 73 aa, Glycine max
  Clone ID: PAT_MRT3847_41845C.1.pep
FHQRLVCNDHNLPETVISIIRSLDICLELLCEIIPSKLPSFLKRGTLILTSPTACDIISHATALPSLFSPKCG

SEQ ID NO: 221280 - protein, 224 aa, Glycine max
  unsure (1)..(224): unsure at all Xaa locations
  Clone ID: PAT_MRT3847_41846C.1.pep
LEAYNAYRRLSYLVSHALVALPALAFLSLAFAAATFWAVGLDGGISGFLFYFLIIFASFWAGNSFVTFLSGVVPHVMLGYTIVVAILAYFLLFSGFFINRDRIPSYWIWXHYLSLVKYPYEAVLQNEFDDPVKCFVRGVQIFDNTPLGSVPSXLKVKLLETMSSTLGTKITTSTCLTTGADILQQNGVTDLTKWNCFWITVAWGFFFRFLFYLSLLLGSKNKRR

SEQ ID NO: 221281 - protein, 78 aa, Glycine max
  Clone ID: PAT_MRT3847_41847C.1.pep
AVFGGFLAAVEGVLVLGEIFEGLGLRSGVVRGFGWGVVGCEGGAGRGSCSPSVLLGFRLRIVLFIILVYVSGLKPIHG

SEQ ID NO: 221282 - protein, 114 aa, Glycine max
  Clone ID: PAT_MRT3847_41848C.1.pep
HLGKVSLSRNPLIPNKKRTKGAFFLFFGKKMVEKKKKRGRAHLGGRKKFKFWARGFSRPWVGKTYKKNLSMFVWKKILNIPRGGGGTLCYLLIPPGLFFKKFVSLKCWVTPPFF

SEQ ID NO: 221283 - protein, 206 aa, Glycine max
  Clone ID: PAT_MRT3847_41849C.1.pep
YRPKKLYLPLSRIITTIIMSLSNGADSTATSKQQKPQLPNPFDLTDSEILEKVYLTHLHDEDKCDVEVLLDIVSSIVLKTRLAEGKASQTIFQPEFRTMKLISCQMITTPHGERYVHQTTMCILQHLRSYSWEAKALVTLAAFALEYGNLLHLSDVETPENQLTNSLKQLNQVQARKNPGTTLVELVMEVLHGIQELSRLSGLDYD

SEQ ID NO: 221284 - protein, 109 aa, Glycine max
  unsure (1)..(109): unsure at all Xaa locations
  Clone ID: PAT_MRT3847_4184C.1.pep
PIVLGRGGREGRTGQRDARAENTKHRERALRSILKTLRAVAETGATIDRCNQTQSIPQLQVVNXLIHHSLKESGDDDHNEKKNKGGEPSHKLLGDEPTKWTRPSTDAEE

SEQ ID NO: 221285 - protein, 90 aa, Glycine max
  Clone ID: PAT_MRT3847_41850C.1.pep
DLCPAEEALKAFLQHLADPVLPAQPSIQDNFPSPSQHQLVAKQGYILTLVSYSLTKINLRDLFVYPLTGCLLNVIITCLHGCRGCCVIIV

SEQ ID NO: 221286 - protein, 147 aa, Glycine max
  unsure (1)..(147): unsure at all Xaa locations
  Clone ID: PAT_MRT3847_41851C.1.pep
KEMNRIGSALSKSVFIPRLFCHRFFASGPTDARQNVLVVIVDFNGEQQLLVNGKYSELLGRSPDFPFPGNVKPLAEMQQQQQQKFPFPLDALPTKQLGNGLGAVMPLHKIVEPSFVVSDDRTAIPRALRHHRMWQMGEDDGRMXANT

SEQ ID NO: 221287 - protein, 190 aa, Glycine max
  Clone ID: PAT_MRT3847_41852C.1.pep
MTRNASAALFRHRAAILKSAHLHHECFTEIILRKCVPLDYRCSSFLWHRNSYSTGFTSVHGETPSAEYARMRRESLESKFGHALGTYSSKSFNAIYRFGPFLALYRATIISFHVLRLMIWQLFVQDMGKRAVKFRETLIRLGPFYIKLGQALSTRPDILPTVYCQELAKLQDQIPACSTDVAIKSIENPL

SEQ ID NO: 221288 - protein, 147 aa, Glycine max
  unsure (1)..(147): unsure at all Xaa locations
  Clone ID: PAT_MRT3847_41853C.1.pep
HSXAAARRRRVGTTGNYHPSKSLIRVMTKKEMKVIRVVIMILIMFDFSQANYNPSSMQIGSNYGSDGRFACQIKCQKKCQKYLLLPPGVIFYIICYHSCFRKCDKMPIDVAQDCVTSCVLTKPIDVNIDVRGLTDDMVDSCIQECYK

SEQ ID NO: 221289 - protein, 48 aa, Glycine max
  Clone ID: PAT_MRT3847_41854C.1.pep
ACFNPNKCLTYSPSQFHDKSMLANPYAFVLTRHPFIFLFPSDLDPRDV

SEQ ID NO: 221290 - protein, 63 aa, Glycine max
  Clone ID: PAT_MRT3847_41855C.1.pep
FFWGALGMCFKRVDAHDMIYPFYVCCVIYPTMSPLHSSPFFVIKKYFAMLTRSLIIMEDVGSN

SEQ ID NO: 221291 - protein, 80 aa, Glycine max
  Clone ID: PAT_MRT3847_41856C.1.pep
GKSYPTVSADYQKAVEKANNKLIGFIAEKRCAPLMLRLAWHSAGTFERISITGGPFVTIEYRLDLAHGAYNGLDIESTPK

SEQ ID NO: 221292 - protein, 66 aa, Glycine max
  Clone ID: PAT_MRT3847_41857C.1.pep
CPGQISKTKELRNKQLKSAKHSLAKRNYAFLREQKHRVRRIHRRRRRRTNVYSNEYMQQPTECKLS

SEQ ID NO: 221293 - protein, 115 aa, Glycine max
  Clone ID: PAT_MRT3847_41858C.1.pep
QVYKVSIVAACGLSWPSDRLVIQVLDDSTDTVIKEMVEQECLRWASKGINITYQIRENRTGYKAGALKEGLKRSYVEHCEYVAIFDADFKPEPDFLRRAIPFLVGNPEIALVQSS

SEQ ID NO: 221294 - protein, 69 aa, Glycine max
  Clone ID: PAT_MRT3847_41859C.1.pep
LSHVPSSTPTRFSRYVYAADTTVHAAPTTHHPEKLGADDEPSVQPRLAMKLIWMEMNIGNALDQMVPGT

SEQ ID NO: 221295 - protein, 43 aa, Glycine max
  Clone ID: PAT_MRT3847_4185C.1.pep
LVSGVSEHATPVDFLGPAIQGLICTLCSSSASRRSLCVVFSQP

SEQ ID NO: 221296 - protein, 43 aa, Glycine max
  Clone ID: PAT_MRT3847_41860C.1.pep
KKKKGFTRLHVARVKRTSATGEFSHSRGNKRKKEHRLVKPLLI

SEQ ID NO: 221297 - protein, 73 aa, Glycine max
  Clone ID: PAT_MRT3847_41861C.1.pep
WPSCGFRNPAQKISGATRSLFAGRALFFFFTHIFWNEPLNIDFGMAKGALALYQPTTSLYTMNMHIYSPLYSI

SEQ ID NO: 221298 - protein, 529 aa, Glycine max
  unsure (1)..(529): unsure at all Xaa locations
  Clone ID: PAT_MRT3847_41862C.1.pep
MASGSSGRGNSASKGFDFASDDILCSYDDYANRDSSSNGNHTDPDFHKSRRARTSMFPTTAYNPPEDSLSQDVIATVEKSMKKYADNLMRFLEGISSRLSQLELYCYNLDKSIGEMKSDINRDHVEQDSRLKSLEKHVQEVHRSVQILRDKQELAETQKELAKLQLAQKESSSSSHSQSNEERSSPSMDPKKTDNVSDTQNQXLALALPHQVAPPQPAVASSYQVPAPNVSQATQRPHYYLMPTPLPNPQAVNQLPQNQYWPSDPLYRIPQSTSSSQATQSPPVQQFLQYQQLQHQQQQWAPQLPPQQVQVPPPQPPSAQSQVRPPSTNVYTPYATSQATNPLPTETLPNSVPMQMPYSGIPPQGSSSGGGGSDAMPYGYSGAGRTVPQQPLLQHMRGSFSAQPGDVYGNSGTHTMRPPVSSYNVYDGENARAHYPPEPSHYAQAGYPPTSASLHNPASHNLMVPSPSQSQFIRSHPYNDLIEKFVSMGFRGNHVASIIQRMEETQQPIDFNSVHDRLNVHNPQRGWSG

SEQ ID NO: 221299 - protein, 234 aa, Glycine max
  Clone ID: PAT_MRT3847_41863C.1.pep
MASGSSGRGNSASKGFDFASDDILCSYDDYANRDSTSNGNHTDPDFHKSRMARTSMFPTTAYNPPEDSLSQDVIATVEKSMKKYADNLMRFLEGISSRLSQLELYCYNLDKSIGEMKSDINRDHVEQDSRLKSLEKHVQEVHRSVQILRDKQELAETQKELAKLQLAQKESSSSSHSQSNEERSSPTTDPKKTDNASDANNQQLALALPHQIAPQPQPAAPSAQAAAQNVTQAP

SEQ ID NO: 221300 - protein, 67 aa, Glycine max
  Clone ID: PAT_MRT3847_41864C.1.pep
MVGSPSQSQFIRSHLYNDLIEKFVSMGFRGDHVANIIQRMEETQLPIDFNSVHDRLDVHNPQRGWSG

SEQ ID NO: 221301 - protein, 71 aa, Glycine max
  Clone ID: PAT_MRT3847_41865C.1.pep
VSLQLGRVSGSTTGLALCFYVTVSSLRYYLMRRSSIRYMSLLPTSRALTVSLSEKYSEVDRSTSPKASSEL

SEQ ID NO: 221302 - protein, 105 aa, Glycine max
  unsure (1)..(105): unsure at all Xaa locations
  Clone ID: PAT_MRT3847_41866C.1.pep
VLTRETVFSVSDFYLLYELFNTGSGXLIDGRRELLIIXFQLALFKTTNKDSLFTDRVFYFFDTNHTGILDFKEFALALSSFHPNSSIDYYIDFSFQFYYLKQQIF

SEQ ID NO: 221303 - protein, 91 aa, Glycine max
  Clone ID: PAT_MRT3847_41867C.1.pep
EDGDKRCKLLLGIGILVLLIIVILGVPLIIFTIKANSEACRDGLRAVMECRNVTHLLQQELTEAQKGFQDVEAQAATCNHTVMALMASLDA

SEQ ID NO: 221304 - protein, 93 aa, Glycine max
  Clone ID: PAT_MRT3847_41868C.1.pep
RKKDLFKYASMEWLRRPLRHSSSIPITMYYLVVVAGTYPLSEKDYVLKSVLEDSKLSVLTLEPRCELLSLSRSSICCSHRTGIRRNFFCLEKA

SEQ ID NO: 221305 - protein, 109 aa, Glycine max
  Clone ID: PAT_MRT3847_41869C.1.pep
GAWVQKPRCFYPTFVQMRIFYFLNIHIFLKVPTFRGIARPPNVQTAYWEKKFYVGKQLFSKIHIPNKWTLSPKGTPSHQGVPSPQIFSFPAPLFTRRDLAGFFGIGKNS

SEQ ID NO: 221306 - protein, 70 aa, Glycine max
  Clone ID: PAT_MRT3847_4186C.1.pep
HQKGESSMSRYKEPNFHTLYLCYAASSRAFSSMTLISGLTILIPPINTTTRIVTEVLHMDLSQVGDPFYV

SEQ ID NO: 221307 - protein, 600 aa, Glycine max
  Clone ID: PAT_MRT3847_41870C.1.pep
MTSKQTYSVCFCWRRRFKLALAEAPSEIKTLFEEYSENEFMTPSHLKRFLVEVQRQEKATEEDAQAIIDSFRHFPRRGAGLNLETFFKYLFSDDNPPLLPSHGVHHDMTLPLSHYFIYTGHNSYLTGNQLSSDCSDVPIINALKRGVRVIELDIWPNASKDNIDVLHGRTLTTPVELIRCLRSIKDHAFVASEYPVVITLEDHLTPDLQAKVAEMVTETFGDLLFTPNSESVKEFPSPESLKKRIIISTKPPKEYLEAKEKEKGDDSQHEKEKGDDSQHGKALGEDEAWGKEVPSLKGGTIEDYKDYNVDEDLNDEEEFDESDKSHHNEAPEYRRLIAIHAGKPKGGLAECLKVDPDKVRRLSLSEQQLEKAAINHGQQIVRFTQRNILRVYPKGTRIDSSNYNPLIGWMHGAQMVAFNMQGYGRSLWLMHGMFRANGGCGYVKKPNFLLETGPDDEVFNPKAKLPVKTTLKVTVYMGEGWYYDFKHTHFDQYSPPDFYTRVGIAGVPNDTIMKRTKAIEDNWLPTWNEVFEFPLTVPELALLRIEVHEYDMSEKDDFGGQACLPIWELRSGIRAIPLHSQKGDKYNTVKLLMRFEFINN

SEQ ID NO: 221308 - protein, 379 aa, Glycine max
  Clone ID: PAT_MRT3847_41871C.1.pep
VCFCWRRRFKLALAEAPSEIKTLFNEYSENELMTPSHLKRFLVDVQRQEKATEEDAQAIIDSFRHFHRRGAGLNLETFFKYLFSDDNPPLLPSHGVHHDMTLPLSHYFIYTGHNSYLTGNQLSSDCSDVPIINALKKGVRVIELDIWPNASKDSIDVLHGRFTQRNILRVYPKGTRIDSSNYNPLIGWMHGAQMVAFNMQGYGRSLWLMHGMFRANGGCGYVKKPNFLLETGPDDEVFNPKAKLPVKTTLKVTVYMGEGWYYDFKHTHFDQYSPPDFYTRVGIAGVPNDTIMKRTKAIEDNWLPTWNEAFEFPLTVPELALLRVEVHEYDMSEKDDFGGQTCLPIWELRSGIRAIPLHSQKGDKYNTVKLLMRFEFINN

SEQ ID NO: 221309 - protein, 115 aa, Glycine max
  Clone ID: PAT_MRT3847_41872C.1.pep
LEPNRLEAPTPGESIAVLQQLEGPLSPAELAGILQRTLEEQGVAFGSDRAKQEEKIRADRRLREEQDAAYLAALQIDKEKDKPNSLPPRERLQKPGEAHNNRNYGKLLNNSINVT

SEQ ID NO: 221310 - protein, 167 aa, Glycine max
  Clone ID: PAT_MRT3847_41873C.1.pep
SVDDNPPFFLSHGVHHNMTLPLSHYFIYTGHNSYLTGNQLSSDCSDVPIINALKRGVRVIELDIWPNASKDNIDVLHGRTLTTPVELIRCLRSIKDHAFVASEYPVVITLEDHLTPDLQAKVAEMVTETFGDILFTPNSESVKEFPSPESLKKRIIISTKPPKEYLE

SEQ ID NO: 221311 - protein, 51 aa, Glycine max
  Clone ID: PAT_MRT3847_41874C.1.pep
LQNTNNFLVFILTSLTRQTSLLKKTKYTTHFISYIILRYHSATTNKLLLLT

SEQ ID NO: 221312 - protein, 591 aa, Glycine max
  unsure (1)..(591): unsure at all Xaa locations
  Clone ID: PAT_MRT3847_41875C.1.pep
MTSKQTYSVCFCWRRRFKLALAEAPSEIKTLFNEYSENELMTPSHLKRFLVDVQRQEKATEEDAQAIIDSFRHFHRRGAGLNLETFFKYLFSDDNPPLLPSHGVHHDMTLPLSHYFIYTXIITILTRNNLYRDXKVYLFSKNAXVVRLCPCLSASRQSQNYCFLRMYSCFLADREETRIAHATQSQKIIQAAVRAMEEILANNAPMVHQRDREIVFPTKFDAVTLCSGSVXLESRNMVPSKLIKAFVVEKETXHGDIADVFVEELPLSLGKAAAAEGKWRIGIXNYNGDSGEKDKNRYVEECFDDEEVFAESYESHHNEAXPEYRHLIAIHAGKPKGGLVECLKVDPEKVRRLSLSEQQLEKAAINYGQQIVRFTQRNILRVYPKGTRIDSSNYNPLIGWMHGAQMVAFNMQGYGRSLWLMHGMFRANGGCGYVKKPNFLLETGPDDEVFNPKAKLPVKTTLKVTVYMGEGWYYDFKHTHFDQYSPPDFYTRVGIAGVPNDTIMKRTKAIEDNWLPTWNEAFEFPLTVPELALLRVEVHEYDMSEKDDFGGQTCLPIWELRSGIRAIPLHSQKGDKYNTVKLLMRFEFINN

SEQ ID NO: 221313 - protein, 163 aa, Glycine max
  Clone ID: PAT_MRT3847_41876C.1.pep
MSKEEFLKIQKCVLKVNIHCDGCKHKVKKILQKIDGVFTTEIDAEQGKVTVSGNVDPNVLIKKLAKSGKHAELWGAPKPNNNNNNHNHNNQNHLADQLKNMQINNHPKSGGGGGNHNNKGQNQNQPKGGGGGGNSQAKGGGGGGQQHGPISQHNFSCSSTAAT

SEQ ID NO: 221314 - protein, 306 aa, Glycine max
  Clone ID: PAT_MRT3847_41877C.1.pep
MSKEEFLKIQKCVLKVNIHCDGCKHKVKKILQKIDGVFTTEIDAEQGKVTVSGNVDPNVLIKKLTKSGKHAKLWGAPKPNNNNNHNHNNQNHLADQFKNMHINHHKDAGGNHNNKGQHQIQNQPKGGGGNNQPKGGSGGGGGQQQGPTPQQQLQLQLQQQQRLQQQLEQLHRMKGLQDLNLPQFKDLKLTPHNPNLNPNAKAVKFDIPEEDDDFTDDELDDFDDDFDDFDDDFDDDEMDDLPPSKMKLPPMMMNAPPKGASNGGDGKKGGGPVPVPVQVHGIPGNGGGKKGGGGGGNNQNQGGGNK

SEQ ID NO: 221315 - protein, 85 aa, Glycine max
  Clone ID: PAT_MRT3847_41878C.1.pep
PNLPKSFISVIWKYLCSWFLNLIKGGMKTLPHTSQLCMIAQGLYLLAHKFQGCLLQHDKGTRKHTVHGLAFYAGIHPEEVWIEQV

SEQ ID NO: 221316 - protein, 43 aa, Glycine max
  Clone ID: PAT_MRT3847_41879C.1.pep
ARLQSFRYSLIHPSLLNNPYLVSWLISNTLLPTPSLYILSIST

SEQ ID NO: 221317 - protein, 48 aa, Glycine max
  Clone ID: PAT_MRT3847_4187C.1.pep
SLPPSFHGACRGLPLAYLYSTYHKCLLSAVECLSSEPFALYLLAVPSS

SEQ ID NO: 221318 - protein, 103 aa, Glycine max
  Clone ID: PAT_MRT3847_41880C.1.pep
MLTNSTPQGNGQANSTWIPNSGASFHVTGESQHIKQLSHFDGPDQIFIGNGEGLSISNTGSSSFLSPNDSHITFKLNKLLHVPSISKNLLSVSQFAKDNVFFE

SEQ ID NO: 221319 - protein, 54 aa, Glycine max
  Clone ID: PAT_MRT3847_41881C.1.pep
CQFCLPYAAFDWEVARPIRSLGNGSCEPVLKVVPYFIMQGRWVWASPFGFMGQL

SEQ ID NO: 221320 - protein, 44 aa, Glycine max
  Clone ID: PAT_MRT3847_41882C.1.pep
QIVLLVGLGTSVDLWNAINSQKPKLCDSLSYDGVRFVQSTTWVS

SEQ ID NO: 221321 - protein, 156 aa, Glycine max
  unsure (1)..(156): unsure at all Xaa locations
  Clone ID: PAT_MRT3847_41883C.1.pep
GLFTLQDETTYPVDPATLHKALVTDADNVIPKAVEAFMSDENLEGNGGPGTIKKITFVDDGQSKFEQHKIESVDDANLXYRSSGTGGVGMTDTEXKIASQCKXDAGTNRRCAGNLTVICQTDGDAHPRQDDVNICKVKTDAVHKDVDAYLVRVRNY

SEQ ID NO: 221322 - protein, 76 aa, Glycine max
  unsure (1)..(76): unsure at all Xaa locations
  Clone ID: PAT_MRT3847_41884C.1.pep
AVQAAILSGEXDEKVHDLLLLAVTPLILGLEMSGGVMSVLIPRNTTIPPKKEQFFSTYSDNQPWVLIHVFEGARAR

SEQ ID NO: 221323 - protein, 199 aa, Glycine max
  Clone ID: PAT_MRT3847_41885C.1.pep
FASQWPLSGPTTITLTPAASSSLGPLINAGEVFALLPLRRGSLTLHVIALEKVKQSLRNPPLDWNGDPCMPRQYSWTGISCSEGPRIRVVTLNLTSMDLSGSLSPFVANMTALTNIWLGNNSLSGQIPDLSSLKILETLHLEDNQFSGEIPSSLGDISSLQKVFLQNNNLTGQIPAILVGKPGLNIITSGNNFLSPPAP

SEQ ID NO: 221324 - protein, 144 aa, Glycine max
  Clone ID: PAT_MRT3847_41886C.1.pep
YVFVTTFFQSSSTRTASLFFPLPVLLLLVVHATTTPSWRRFPSLSINGKSLASSPSSSVAMRMQEQRFKEAKKAVVTPLMNHMATPSNFPQAEEEPWVEETLLESTEFGDRRLKKPLVELEEVVTAMKVAMLEIKATPRTKGSA

SEQ ID NO: 221325 - protein, 89 aa, Glycine max
  Clone ID: PAT_MRT3847_41887C.1.pep
IKECPKTKKRIVISPVIPESNNLHNVTIPKHHPPFISSQYHHHALRKLSHTHRIQRLYKSLHPRLDGAAPCSTMISPPPSEWTISQAEG

SEQ ID NO: 221326 - protein, 58 aa, Glycine max
  Clone ID: PAT_MRT3847_41888C.1.pep
GFQLGYASVFVVGMWSLLASSFHYGYAIGVAWTRLPDRWFFGCCRKKFPNLNEGWVDP

SEQ ID NO: 221327 - protein, 104 aa, Glycine max
  unsure (1)..(104): unsure at all Xaa locations
  Clone ID: PAT_MRT3847_41889C.1.pep
MGRRPARGYREIKNKPYPKARVWRGGPDPKIRIYDVGMKKKGVXDEVPFWGHLGRWEKENGSSGALEAGRIAWNKYMGKFAXKGAFHLRGMGDPLHVLRINKML

SEQ ID NO: 221328 - protein, 64 aa, Glycine max
  Clone ID: PAT_MRT3847_4188C.1.pep
LNSTKLLNAYSKLLFRATILCALILVYTLTFNYPPLVPYLTCDRHLHSHSHLLYYCSCFSSCEK

SEQ ID NO: 221329 - protein, 147 aa, Glycine max
  unsure (1)..(147): unsure at all Xaa locations
  Clone ID: PAT_MRT3847_41890C.1.pep
MDCAAITTHQYVSAEQIVNGMHQAKAEGADIVELTLDCITNFHSHHDLKIILQNKPLPVLIVNRPKWEGGLYEGDENKRVEALQLAVELSADFIDVELKAASCLTTLVEHMRNHNSHGKIIVSCYVDGTTPPHEVLLQLVELMXATG

SEQ ID NO: 221330 - protein, 97 aa, Glycine max
  unsure (1)..(97): unsure at all Xaa locations
  Clone ID: PAT_MRT3847_41891C.1.pep
EWYCRNSAPESYNDQPEPFSLPAPVPQWTRGAGFARGRISLGRLEVLKYSKTDRVLNCPSSDEKXRASAXYKPLERADGFFCLADYCQSNDQTLRGH

SEQ ID NO: 221331 - protein, 89 aa, Glycine max
  unsure (1)..(89): unsure at all Xaa locations
  Clone ID: PAT_MRT3847_41892C.1.pep
MKYIRSNSLKRLFSFGRRGFGEENDVGLVVSPCEEHPPRPSWKCFSYEELFDATNDCSSENVIERXGYADVYKGTLNGGDEVAVKTLTR

SEQ ID NO: 221332 - protein, 104 aa, Glycine max
  Clone ID: PAT_MRT3847_41893C.1.pep
MSKLQSDALREAISGIMADSKEKNRKFVETIELQIGLKNYDPQKDKRFSGSVKLPHIPRPKMKICMLGDAQHVEEAEKIGLDYMDVEALKKLNKNKKLASISCY

SEQ ID NO: 221333 - protein, 110 aa, Glycine max
  Clone ID: PAT_MRT3847_41894C.1.pep
LAMEKNKTRVNCEKYYSLLWSPSQSSNTQSTEAGPFGFLILCKTQSTLKFVTRVLKSPPPKFASLLRYLNDETSEHRTRRSCSKIFPKHKHKSMMLTQHEFTNKYTSTKA

SEQ ID NO: 221334 - protein, 216 aa, Glycine max
  Clone ID: PAT_MRT3847_41895C.1.pep
MSKLQSDALREAISGIMADSKEKNRKFVETIELQIGLKNYDPQKDKRFSGSVKLPHIPRPKMKICMLGDAQHVEEAEKIGLDYMDVEALKKLNKNKKLVKKLAKKYHAFLASEAVIKQIPRLLGPGLNKAGKFPTLVTHQESLESKVNETKAMVKFQLKKVLCMGVAVGNVSMEEKQIFQNVQLSVNFLVSLLKKNWQNVRCLYLKSTMGKSYRVF

SEQ ID NO: 221335 - protein, 216 aa, Glycine max
  Clone ID: PAT_MRT3847_41896C.1.pep
MSKLQSDALREAISGIMTDSKEKNRKFVETIELQIGLKNYDPQKDKRFSGSVKLPHIPRPKMKICMLGDAQHVEEAEKIGLDYMDVEALKKLNKNKKLVKKLAKKYHAFLASEAVIKQIPRLLGPGLNKAGKFPTLVTHQESLESKVNETKAMVKFQLKKVLCMGVAVGNVSMEEKQIFQNVQLSVNFLVSLLKKNWQNVRCLYLKSTMGKSYRVF

SEQ ID NO: 221336 - protein, 50 aa, Glycine max
  Clone ID: PAT_MRT3847_41897C.1.pep
KTNKTAYNLREVCFGQDNRESRTSYYLYCLKQYSISKSYHLIKVPYIKSQ

SEQ ID NO: 221337 - protein, 144 aa, Glycine max
  unsure (1)..(144): unsure at all Xaa locations
  Clone ID: PAT_MRT3847_41898C.1.pep
FTRDDNYMNKIKPNFYPDGYTIGPSVSSKPLILDSSIIPASTSGEDKLSLIKLASLMEVSAKKXTRELILQNKLMDQVDWLPDSIGKLSSLIKLDLSENRITVLPSTIGGLSSLTSLNLHSNKIAELPECVGDLLSLVYLNVGG

SEQ ID NO: 221338 - protein, 70 aa, Glycine max
  Clone ID: PAT_MRT3847_41899C.1.pep
MLSKMASFVSFPLPLLAVLIRMREWLATYYQAIKKPPVYMPPVYNPALYNPSVYQPKSPVYTAKPLVYAP

SEQ ID NO: 221339 - protein, 119 aa, Glycine max
  Clone ID: PAT_MRT3847_4189C.1.pep
QGVCLVHNAPGPSSSPHDEHSRHLIRRKHRLQDHLRHQEMKGLQLCRRKMLMPVWSSRQRLNIIPCQFLEGQAAEEMLIPCKKLLFHQPVFRVICESPLRTAYTSGVNGHERRVHTTAR

SEQ ID NO: 221340 - protein, 364 aa, Glycine max
  Clone ID: PAT_MRT3847_418C.1.pep
MDTFSHVPPGFRFHPTDEELVGYYLRKKVASKRIDLDVIKDVDLYKIEPWDLQELCKIGTDEQSDWYFFSHKDKKYPTGTRTNRATKAGFWKATGRDKAIYSKHCLIGMRKTLVFYKGRAPNGQKSDWIMHEYRLETNENGTSQEEGWVVCRVFKKRMTTTQKVGEYDQSPCWYDEQVSFMQDLESPRRNISQTYASYHHHQQQHHHHPCKPELMELQYNNIPHDAFLQLPQLESPKVTQSSCSVVPYGYESNNNNNGSTLQFSSLTQEEQLQYCNNQQSHHSLYGSNDHAVDQVTDWRVLDKFVASQLSHNNQDVSKETSYSNAPIFHVAEQISVAANGSKKEQVSQEYASTSTSSYQIDLWK

SEQ ID NO: 221341 - protein, 95 aa, Glycine max
  Clone ID: PAT_MRT3847_41900C.1.pep
GSSVSLFSAASSSDGSSTNGGGRHGPNINKPENVQLVDLRIAYNCEIMLSKIKIPLPDMLQDNFFWIIPPPIESLFFTATWSGNFDPFGELITLY

SEQ ID NO: 221342 - protein, 157 aa, Glycine max
  unsure (1)..(157): unsure at all Xaa locations
  Clone ID: PAT_MRT3847_41901C.1.pep
MFKMIDTHNSGQITXKKLKAGLKMLGANLSEPFYFDFLLQADVDNSGTIDYGEFIAATLHLNKVDREDHLVAAFSFFDRSGSGYITQDELQEACEEFGIENVCLEEMIQEADRNNDGRIDYNEFVAMMQRGNADLSKNGLKGGTDFSIAFREVLSVC

SEQ ID NO: 221343 - protein, 37 aa, Glycine max
  Clone ID: PAT_MRT3847_41902C.1.pep
SNLIKKPLVSFSPQLTLEFSPSLDSSTITISFEKRIQ

SEQ ID NO: 221344 - protein, 59 aa, Glycine max
  Clone ID: PAT_MRT3847_41903C.1.pep
MMYNSWLQKLNISSLCRQIEIDSKFLELQQIMDYSLLLSVHYRAPQQLHPYNQNRTADG

SEQ ID NO: 221345 - protein, 139 aa, Glycine max
  unsure (1)..(139): unsure at all Xaa locations
  Clone ID: PAT_MRT3847_41904C.1.pep
LVTEQIGATFAVDVEEIAAGHHVTPVDMTTATSXLQLEADEVQNPSTKPNWSSHXRSQLVPKIENNFIIALKNAINKHERDESIARDKTNSARGIINLITEVANDQLIRYVLTLFNDLLQDDKSRVVTVHDYARRQKRT

SEQ ID NO: 221346 - protein, 68 aa, Glycine max
  Clone ID: PAT_MRT3847_41905C.1.pep
SHSTTPQHQIPFLFSLPDSAEKAEEKSKLEPQPLILLFLNQTLSESDITTHTHANTLKGFLSPKITMI

SEQ ID NO: 221347 - protein, 172 aa, Glycine max
  unsure (1)..(172): unsure at all Xaa locations
  Clone ID: PAT_MRT3847_41906C.1.pep
MPNTYFPLRWESTGDQWWYASPIDCAAANGHYDLVRELLRIDNNHLFKLTSLRRIRRLEVVWDGEEEQQFSDVAKCRSQVAQKLLLECESKRGSSSSSKNSLIRAGYGGWLMYTAASAGDLSFVQLLLERNPFVVFGEGEYNVTDIFYAAXRGRNCEVFRLVFDFAVSPRFI

SEQ ID NO: 221348 - protein, 101 aa, Glycine max
  Clone ID: PAT_MRT3847_41907C.1.pep
VLTASLGSVWVSLKAIEDETQAYSLKCSNAYELNSQTKRDAFPIAQSSIKRLAQLYTLEDYRMDHVHQKPNTIFLLKHAAAICMRLDLSWRAILTLWNNDN

SEQ ID NO: 221349 - protein, 201 aa, Glycine max
  unsure (1)..(201): unsure at all Xaa locations
  Clone ID: PAT_MRT3847_41908C.1.pep
MMMQKPTLATTLFAVLLLIPSSLALKEGQTCVADKNCDSGLHCETCVANGNVRPRCTRVQPINPTSKIKGLPFNRYSWLTTHNSFAILGKKSMTGSVILSPTNQQDTITSQLNNGVRGLMLDMYDFQNDIWLCHSFGGQCYNYTAFQPAINVLKEIQVFLDANPSEIATIXIEDXCTIPKGLTKGFDAAGLXKYWFPKPKM

SEQ ID NO: 221350 - protein, 55 aa, Glycine max
  unsure (1)..(55): unsure at all Xaa locations
  Clone ID: PAT_MRT3847_41909C.1.pep
XAXPTXNENRKRVLDGQIFQIEQQSFFNSFXXSLFIXIYCMLRYXQKXXXXXXXL

SEQ ID NO: 221351 - protein, 67 aa, Glycine max
  Clone ID: PAT_MRT3847_4190C.1.pep
VLDLDSNPQKLSSKAVRTYPLIYYILHLSFYLLVRTVQLRSFVPSISNSENLMFLFVILLSSSAIRA

SEQ ID NO: 221352 - protein, 74 aa, Glycine max
  Clone ID: PAT_MRT3847_41910C.1.pep
AHCFFNFFIFVYLLSFFFFFFFFLVFYFRFGHLMRGVGDSFKRNLNKLQNLNIFLYLEEKYFSEHCFKIIDSQR

SEQ ID NO: 221353 - protein, 72 aa, Glycine max
  Clone ID: PAT_MRT3847_41911C.1.pep
DTTHRHTEDHIHIQLHNIHTVQHGLIDLSSNSLHSFYRYNNDFRREDNLAYRFTPQFPATPFKSVSWGYASN

SEQ ID NO: 221354 - protein, 57 aa, Glycine max
  Clone ID: PAT_MRT3847_41912C.1.pep
GVVVLTTTPVLANFFPPIYEPPPIEKPPIFEPPPTYEPPPTEKPPPLYKPPFYPPPL

SEQ ID NO: 221355 - protein, 59 aa, Glycine max
  unsure (1)..(59): unsure at all Xaa locations
  Clone ID: PAT_MRT3847_41913C.1.pep
MGLINERFLRGGGGTIGISVEHPNLTKPVNYFHSFKVCQYGCVEGYYTXHYQFPMQMMR

SEQ ID NO: 221356 - protein, 113 aa, Glycine max
  unsure (1)..(113): unsure at all Xaa locations
  Clone ID: PAT_MRT3847_41914C.1.pep
FDLAIKLLSKGNDILSGEYANFNGLITKHDMSMMAXMINSLCGGDELLLHERTHLLSACCSRMAIRKNDVWRVECLIPSAFSITDIGNTIYNEMVVRSSYXKLPTQAKASSLY

SEQ ID NO: 221357 - protein, 73 aa, Glycine max
  unsure (1)..(73): unsure at all Xaa locations
  Clone ID: PAT_MRT3847_41915C.1.pep
QTXXXXNHKRGPHFFINTPVFYNQNLTHHQPTNKPITFHKLKKHHHSFTHRNFLPPPSHSKSPIYHPLFLLIP

SEQ ID NO: 221358 - protein, 106 aa, Glycine max
  Clone ID: PAT_MRT3847_41916C.1.pep
MESGGPESASPMTHRVQSLSSADTRGKHRIHAELKRLEQEARFLEEELEQLEKTEKASTTCKVMPSNVETKPDPLLPSTVGPLSPAWDRWFEGPQDSKSCCRCWIL

SEQ ID NO: 221359 - protein, 95 aa, Glycine max
  Clone ID: PAT_MRT3847_41917C.1.pep
PPNTQTLISIQNTHHKRNFPTHSRPNLILNLHLHYTHAHKHLGPFLQDHISSFKILCQIAMLACQVRQMSSHKPKTKLKPVIIIQSICLYPHHQQ

SEQ ID NO: 221360 - protein, 55 aa, Glycine max
  unsure (1)..(55): unsure at all Xaa locations
  Clone ID: PAT_MRT3847_41918C.1.pep
DLXXLCTVWIVLQVXSPXXLTMTXPTLRECVHRHQIVSEEXEXLMAGACRIHGNG

SEQ ID NO: 221361 - protein, 83 aa, Glycine max
  unsure (1)..(83): unsure at all Xaa locations
  Clone ID: PAT_MRT3847_41919C.1.pep
FPNYNPSNSPNLTSFLIYNSIITHIIIKLYNPPSKLHNIKTYXPITIIHTPPITINHIISLLKTPPDLPTFNTLLSHLLNLLT

SEQ ID NO: 221362 - protein, 82 aa, Glycine max
  unsure (1)..(82): unsure at all Xaa locations
  Clone ID: PAT_MRT3847_4191C.1.pep
GAYLTNADPQSDGSYFKCSCCSQVQLESLNMSSSAAATVLIVNVDNGVSESRANXMNWRRMESLEKSIYPVADTLIRISNGE

SEQ ID NO: 221363 - protein, 69 aa, Glycine max
  Clone ID: PAT_MRT3847_41920C.1.pep
HEVLGVHFLPISQGLFRGALPRCRKVGGSFFTAWHPLPLKPKGLCACQLQSNYHSPRIFPPQNSVWVFR

SEQ ID NO: 221364 - protein, 143 aa, Glycine max
  Clone ID: PAT_MRT3847_41921C.1.pep
SHDSIQVAEGLPSSGFHDICRNEKSWYVNLNEQIGRICEPVPNRDLALPGQPVLEFVASVYDSSMKDNLEADALALDVIKMEDDSPGAQHLLPEVIMNDTRLSQVSTGSDQLASGGLRVKRSTPRGLPLFPFRRVLNPAPFKK

SEQ ID NO: 221365 - protein, 105 aa, Glycine max
  Clone ID: PAT_MRT3847_41922C.1.pep
GGLKGKRVWKNFFGLFIKITLGFKPPGFFVQRNVPRMAHNFPGGSPENDFTTTVFIQHFPGGSFRHPISAFPVYGCRRYMHGKHFRITSSASFRRLLGVFCIFIQ

SEQ ID NO: 221366 - protein, 88 aa, Glycine max
  Clone ID: PAT_MRT3847_41923C.1.pep
AEESALYRDLTRLFLQTRRFFGRGGWQPTAPPPPFDLLGGNNLKRFLSFFPKKIKGVGGPLLSEYFFFPPPKGPGRFPTQGLQFTPCS

SEQ ID NO: 221367 - protein, 408 aa, Glycine max
  unsure (1)..(408): unsure at all Xaa locations
  Clone ID: PAT_MRT3847_41924C.1.pep
MDSPPSNHHAVDGDANDLVRPFSHRDDDGKPQPLTGDGASPGKIFIGGLARETTIAQFIKHFGKYGEITDSVIMKDRKTGQPRGFGFITYADPSVVDTVIEDTHIINGKQVEIKRTIPRGAADSNSMDRRTKKMFVGLNFEYCEHGXSLRSSKFIVELFKIIIXCGTKVIDVYIIPSNLTKDELSVFFIRYGXVKALHIMRDLSTNRSRGFGFITYDSEEANDDLFSVGNKIEFAGAQVEIKKAEPKKPNPAAPSSKRYNDSRSSYGGGYGDAYDGFGGNFGMGGYRSGGAYGGRGSAYGGFGSEFGGYGGYAGAMGPYRGDPSLGYAGRYGGGYGRGYDLGGYGGPSEGYGAYGGGGGGGSSGSAYGSSSYDASLGGGYGAAAGGSFYGTRGGYGGAGTGRYHPYGR

SEQ ID NO: 221368 - protein, 49 aa, Glycine max
  Clone ID: PAT_MRT3847_41925C.1.pep
FGSPPPLCVGFLIFPVFLPLVDSAVSPAGFCSLGSFLTIMFFLFMVSVC

SEQ ID NO: 221369 - protein, 177 aa, Glycine max
  Clone ID: PAT_MRT3847_41926C.1.pep
LYPRNFLDLVLSNYPGPIDCRKIFIGGLARETTIAQFIKHFGKYGEITDSVIMKDRKTGQPRGFGFITYADPSVVDTVIEDTHIINGKQVEIKRTIPRGAAGSNSKDFRTKKIFVGGIPSTVTEDEFRDFFTRYGEVKDHQIMRDHSTNRSRGFGFITYDSEEAVDDLLSVGNKIEF

SEQ ID NO: 221370 - protein, 76 aa, Glycine max
  Clone ID: PAT_MRT3847_41927C.1.pep
PVFVFVPLPFIPFLLVCLVVHRLRNFCVLLVRGPPGWTSHGFRYLCELMDMCSPPPLLKWLCRRSKNVMFRLSCFA

SEQ ID NO: 221371 - protein, 41 aa, Glycine max
  Clone ID: PAT_MRT3847_41928C.1.pep
GYTPSTVGSYGLPADDRFNPVAGGPSGFAPFGSSYGMSLNF

SEQ ID NO: 221372 - protein, 245 aa, Glycine max
  Clone ID: PAT_MRT3847_41929C.1.pep
GLGLFDMMVKKYGLKARLQHYTCLVDLLGRSGCLEEAEAMIRSMPVKADAIIWKTLLSACKIHKNAEIARRVADEVLRIDPQDSASYVLLANIYSSANRWQNVSEVRRAMKDKMVKKEPGISWVEVKNQVHQFHMGDECHPKHVEINQYLEELTSEMKKRGYVPDTSYVLHDMDNEEKEHNLRHHSEKLAIAFALMNTPEGVPIRVMKNLRVCSDCHVAIKYISEIKNLEIIVRDSSRFHHFEGR

SEQ ID NO: 221373 - protein, 221 aa, Glycine max
  unsure (1)..(221): unsure at all Xaa locations
  Clone ID: PAT_MRT3847_4192C.1.pep
MSEVFEGYERQYCEQSANLSRQCTAASALDGEQKKQKLSDKSXGLDDADTLIRKMDLEARSLQPSVKAALLAKLREYKTDLSNLKSEVKRVTSASVNLTARDDLLESGRADTLAASNDQKGRLLMSTERLNQSSDRIKESRKTMLETEDLGEFILRDLHQQRESLLHAHKTIHGVDDNISKSKKILSAMSRRMSRNKWIVSSLMTALVLAILIILYFKLTH

SEQ ID NO: 221374 - protein, 160 aa, Glycine max
  Clone ID: PAT_MRT3847_41930C.1.pep
NLKKKKQKKKKKKKKKTKKKKKKKKKKKKKKKKKKKKRGAHIGGPFLRIPVFDPQISFLGLLKWNPWAHFLPRFYRKNLGETPLIPLAKPPLFPTCFKREGACKKGPSKRFSKIIGKWNRPWAPPLTGAFKGVPPGVTPKFASSFTPLFCAFFFSFFPPF

SEQ ID NO: 221375 - protein, 69 aa, Glycine max
  unsure (1)..(69): unsure at all Xaa locations
  Clone ID: PAT_MRT3847_41931C.1.pep
EARSKEGKKTETEHHEQQPRRXPKRPPEKRQXXXXXXNRXNKEETQRRKXXXPEXSHREAXSTAAKNRA

SEQ ID NO: 221376 - protein, 123 aa, Glycine max
  unsure (1)..(123): unsure at all Xaa locations
  Clone ID: PAT_MRT3847_41932C.1.pep
IKKSPDKFKRKLKKKRKKKTKKREGGGGKKKRKKIXRKGDTHKTNDKIGVKNGKGAEKKKKPKDLXEKLKKGKKKKKVDDKXEEHEKEKKSKGRLRWNWEVKLEYNLKKRLGGCFEEYWKLSD

SEQ ID NO: 221377 - protein, 313 aa, Glycine max
  unsure (1)..(313): unsure at all Xaa locations
  Clone ID: PAT_MRT3847_41933C.1.pep
MAKSIKFFELNTGAKIPSLGLGTWQAEPGVVAEALTTAIQVGYRHIDCASAYKNQAEIGSALKKLFDDGVVKREDLWITSKLWCSDHAPEDVPKALDKTLQELQLDYLDLYLIHWPVRMKSGTFGLNKEYLEQPDIPNTWRAMEALYDSDKARAIGVSNFSSKKLQDLLDIARVVPAVNQVELHPGWQQPKLRAFXESKEIHLSGYSPLGSPAALKSDILKNPVVTEIAERLGKTPAQVALRWGLQTGHSVLPKSTNESRIKENFDIFDWSIPEELLAKFSEIKQDRLIKGTAFVDETCGAFKTIEELWDGEL

SEQ ID NO: 221378 - protein, 313 aa, Glycine max
  Clone ID: PAT_MRT3847_41934C.1.pep
MAKLIKFFELNTGAKIPSVGLGTWQAEPGVVAKAVTTAILVGYRHIDCAQAYNNQAEIGSALKKLFDDGVVKREDLWITSKLWCSDHASEDVPKALDKTLQDLQLDYLDLYLIHWPVRMKSGSVGFKKEYLDQPDIPSTWKAMEALYDSGKARAIGVSNFSSKKLQDLMNIARVPPAVNQVELHPGWQQPKLHAFCESKGVHLSGYSPLGSPGVLKSDILKNPVVIEIAEKLGKTPAQVALRWGLQTGHSVLPKSTNESRIKGNFDVFDWSIPEEVMDKFSEIKQDRLIKGTFFVDETYGAFKTVEELWDGEL

SEQ ID NO: 221379 - protein, 190 aa, Glycine max
  Clone ID: PAT_MRT3847_41935C.1.pep
CHLASKGKSVSLTAKNNAHSRDTLISNDDIPCMKQKEKNEIKSNQLSRSHKPSTQKTMQQRPCSSRNSNVLGQNNQKQNSMTAKGKSTSKIDSNKLTTRASSSETSGIRKTTNKGTITANIQPKRSSTRATDNQKQFSRSKTVSISQKKKISKDVHEGRGPDNAVNNFGSKSIKCNFTTDGSFDQDAFNM

SEQ ID NO: 221380 - protein, 96 aa, Glycine max
  Clone ID: PAT_MRT3847_41936C.1.pep
DEINQVWQAATTRDGVGQSSGSGNRNDHQVEQCPQCGSKFSSVTALVDHVQKVHERNGNRLGVKKIDACPKCSRGFLDPVSLVEHVERDHGGGSRA

SEQ ID NO: 221381 - protein, 87 aa, Glycine max
  Clone ID: PAT_MRT3847_41937C.1.pep
RPSFCGPPQFHLNCQNGIVPELIISSVSYRVIHVNSEAHTLNLARLDLWNETCTNVYVNSTFDGPTFSYGSGNQNLTLFYDALFTDH

SEQ ID NO: 221382 - protein, 93 aa, Glycine max
  unsure (1)..(93): unsure at all Xaa locations
  Clone ID: PAT_MRT3847_41938C.1.pep
LTVSDVEGHDTIHTLGRVYFQSPQXLFFVVDNHDRYTVVEALDQIHNMLIDDDLTYALYLVFDHYWHLDTAXNAAAITDQLXCTRLRQRHCDL

SEQ ID NO: 221383 - protein, 149 aa, Glycine max
  unsure (1)..(149): unsure at all Xaa locations
  Clone ID: PAT_MRT3847_41939C.1.pep
MIPLLLCGGLKTYSAILLCPIFFSLAHLNHFLEIYAKQNYRIVKAAMVIGLQLGYTVVFGSYASFLFIRTGHLIAPLVAHIYCNFMGLPVLYSQRSTRIVSVTFIIXFLGFLWLLFPMTGPELYFYRLDNCSCWQSYCTWRETIRMTQM

SEQ ID NO: 221384 - protein, 68 aa, Glycine max
  unsure (1)..(68): unsure at all Xaa locations
  Clone ID: PAT_MRT3847_4193C.1.pep
FWLQHMKEWGLSVVYDSRXIDKFIDLLPVFVKFCLVNLYELFLTELYGQXGPIGPKGKTPWVGYQKCY

SEQ ID NO: 221385 - protein, 103 aa, Glycine max
  unsure (1)..(103): unsure at all Xaa locations
  Clone ID: PAT_MRT3847_41940C.1.pep
RAEIQAMLAKLRGEMKKAGYVPDANLSLFDLEEEEKASKVWYHSKKIALAFGLITLPRKVPIRITKNLXICIDCHSAIKFISKIVGREIIVKDNNRFHHFKDS

SEQ ID NO: 221386 - protein, 41 aa, Glycine max
  Clone ID: PAT_MRT3847_41941C.1.pep
PILDRVFSSCPFSKAAMNQKLILNDTPYTIKFLTQSLLKSC

SEQ ID NO: 221387 - protein, 46 aa, Glycine max
  Clone ID: PAT_MRT3847_41942C.1.pep
GDKTSNCRIWSAVHVGIMRAIFEYPLSWIDGLLSISHHLYSRPSSR

SEQ ID NO: 221388 - protein, 68 aa, Glycine max
  Clone ID: PAT_MRT3847_41943C.1.pep
YFERLFSGSSHIAAVPSLSTSLTYPPHSLFPIRTLQPKTLSCPLPSLPTLSPFHFKPLHFAISELLSL

SEQ ID NO: 221389 - protein, 74 aa, Glycine max
  Clone ID: PAT_MRT3847_41944C.1.pep
QFLILTSYNLLRNVRGIPSLWGAYRKYENLWLAPQLLQGSNGSVHALNPTHPSERVACVYERPMPDHDTTHWRT

SEQ ID NO: 221390 - protein, 69 aa, Glycine max
  Clone ID: PAT_MRT3847_41945C.1.pep
HKVGNTVSEQLPATMMIETFCYPHFQTSCRVCGLALWIFAAHSLIGRIMAMWIKENIQHLFSILMNERI

SEQ ID NO: 221391 - protein, 67 aa, Glycine max
  unsure (1)..(67): unsure at all Xaa locations
  Clone ID: PAT_MRT3847_41946C.1.pep
LKSVYFSRCLYLPVLASGMAKHFPVGVASHGCKTLYFNINISFSLFFXYPXXXXXXXXXXXXXXXXX

SEQ ID NO: 221392 - protein, 73 aa, Glycine max
  unsure (1)..(73): unsure at all Xaa locations
  Clone ID: PAT_MRT3847_41947C.1.pep
PFTISTINKLVAQTNSTRGTETLISNFELIXXLNLXKKLLKNDRXKPKARXHHQFIIMHVFSFLLLLDNNVAS

SEQ ID NO: 221393 - protein, 399 aa, Glycine max
  unsure (1)..(399): unsure at all Xaa locations
  Clone ID: PAT_MRT3847_41948C.1.pep
MACPAMANGNGSLKNLKLNDTKGKTITCKAAVVYGPGEPFVVENILVHPPQKMEVRIKILYTSICHTDLSAWRGVNEAQRAYPRIFGHEASGIVESVGEGVSEVEEGDXVVPIFNGECGECSMCKCEKTNXCEMFGVNAMKKVMEGDGTRRFSTVNGKPIFHFLNTSTFSEYTXVVDSACVVEVCEHRPQSXIKNLTLLSCGVSTGVGAAWNTANVHSGSTVAVFGLGAVGLAVAEGARARGASKIIGVDINPDKFIKAMGVTDFINPDDEEKPVYERIREITDGGVHYSFECTGNVDVLRDAFLSAHEGWGLTVVLGIHASPTLLPIHPMELFDGRNIVGCVFGGFKGRSHLPHFAKECGQGVVKLDNFITHELPLEEIDKAFDLLITGKSLRCLLHF

SEQ ID NO: 221394 - protein, 133 aa, Glycine max
  Clone ID: PAT_MRT3847_41949C.1.pep
GKKKRVVRGRSSLSLDISIRAPTPSSSLILTTPKPSSLSFNLTLTFSSAHSSFLHFSFLSYAYHLSSPSSTLGLSLELNFSYNTGTILRIGSVLFVRSSKAPLCLTNRSIPRKSLSRTHVFLKIIITPRLRSN

SEQ ID NO: 221395 - protein, 72 aa, Glycine max
  Clone ID: PAT_MRT3847_4194C.1.pep
LFCVSFICCSVFFFPFFFFVLSLVCCWCVESVEMGKEILENVKDDGGLEELEMLLNEIPQATSHNLYHGKSM

SEQ ID NO: 221396 - protein, 50 aa, Glycine max
  Clone ID: PAT_MRT3847_41950C.1.pep
ICVSVRSYIATNYHFYSVRIPFSSFSLPIFTVQVSSSISCFHNRHFLLCH

SEQ ID NO: 221397 - protein, 52 aa, Glycine max
  Clone ID: PAT_MRT3847_41951C.1.pep
AREAARGTMKDSAQKRKFSDFNGQLIPADTCLLSLRKLSFIQMGDVIPESND

SEQ ID NO: 221398 - protein, 89 aa, Glycine max
  Clone ID: PAT_MRT3847_41952C.1.pep
KRNNENGGDKGNGFGSEVEFGAHVALEMFGGSARRGLGLRLCKYMGLIPSSPSDLRLRFTSFASSSSTTLRSAQRMHLPFMFCGALTVV

SEQ ID NO: 221399 - protein, 62 aa, Glycine max
  Clone ID: PAT_MRT3847_41953C.1.pep
TVYAFSYQPSSPLTSQAPLLQMMFWSPPASTVQSRTYVHTVPDQTLAYMFNTPILFHHILLP

SEQ ID NO: 221400 - protein, 59 aa, Glycine max
  Clone ID: PAT_MRT3847_41954C.1.pep
HSGPILGQTSPVRFGLLFPPPPKLLPTPSLWLLEWSIQNVKLHYGMHPSIGFWNDKSGR

SEQ ID NO: 221401 - protein, 57 aa, Glycine max
  Clone ID: PAT_MRT3847_41955C.1.pep
IYQLFSLFLCHAYSQTHSNHHLAQPQTTKEKATTYFTKFSILQPHQTKIQENSKTYK

SEQ ID NO: 221402 - protein, 177 aa, Glycine max
  Clone ID: PAT_MRT3847_41956C.1.pep
LMPTKVPDLSHTHDPCMSIPRSHASPSKIRDVDYIPCFFSLSPIHTHIYLVNQPCVHVRGASSMLHSLQDKLQFLLSMVELEQFSADPAMLLQAQIWVCVLCVAPGSQEHDSPYGVLGGRAAAVGATARFTGRRCGGGGAVGAPEFLTEGLLDLVSPGALPGRQLRGFHGRQKRTRG

SEQ ID NO: 221403 - protein, 324 aa, Glycine max
  Clone ID: PAT_MRT3847_41957C.1.pep
MASSCSSFMITLALLVLVLGTSSANANPTLHTNFYYSSCPKLFDTVKRTVESAISKETRMGASLLRLFFHDCFVNGCDGSILLDDTSSFTGEKNAGPNRNSARGFEVIDQIKSAVEKVCPGVVSCADILAIAARDSVEILGGPTWDVKLGRRDSRTASQSAANNDIPRPTSNLNQLISRFNALGLSTKDLVALSGGHTIGQARCTTFRARIYNETNIDSSFARMRQSRCPRTSGSGDNNLAPIDFATPRFFDNHYFSSPSFRRRVSSIPHKLFNGGSTDSIVRTYSTNPASFFADFSAAMIRMGDISPLTGSRGEIRENCRRVN

SEQ ID NO: 221404 - protein, 285 aa, Glycine max
  Clone ID: PAT_MRT3847_41958C.1.pep
MAVVPYTTGSAPLLSPPSTSSVATKLYSGLKLQAASPFGAAKPNVTAEFYGKVHNTLHCRYANHNTSMARIRMMPIGTPKVPYRTPGEGTWQWVDVWNALYRERVIFIGQEIDEEFSNQILATMLYLDSIENSKKLYMYINGPGGDLTPSMAIYDTMQSLQSPVATHCVGYAYSLAAFLLAAGEKGNRSAMPLSRVALTSPAGAARGQADDIQNEANELLRIRDYLFNELAQKTGQPVEKITKDLSRMKRFNAQEALEYGLIDRIVRPPRIKADAPRKEAGTGLG

SEQ ID NO: 221405 - protein, 222 aa, Glycine max
  Clone ID: PAT_MRT3847_41959C.1.pep
MAYQVLVICVVSSIVFAYIVWRKERKKKLPPSPKGLPIIGHLHLVSPIPHQDFYKLSLRHGPIMQLFLGSVPCVVASTAEAAKEFLKTHEINFSNRPGQNVAVKGLAYDSQDFLFAFAPFGPYWKFMKKLCMSELLSGRMMDQFLPVRQQETKRFISRVFRKGVAGEPVDFGDELMTLSNNVVSRMTLSQKTSDNDNQAEEMKKLVSDIAELMGKFNVSDFI

SEQ ID NO: 221406 - protein, 91 aa, Glycine max
  Clone ID: PAT_MRT3847_4195C.1.pep
MYTTTTSTRAIPIPDRFILTRSLSIRMCVRLRLLYPTMDDSIGVHTAIFCLDSTHEQDVVKLVDTFTGQSIDLFGAQRDRVYDDEVRKRIS

SEQ ID NO: 221407 - protein, 200 aa, Glycine max
  unsure (1)..(200): unsure at all Xaa locations
  Clone ID: PAT_MRT3847_41960C.1.pep
MPAWWNRKWSKSKEEQEQPEEEDEEEEPRAAFQLNFMSGERDKNKGRSCSKKKTKSFDDKVKGVPLPLPSHSLSDPIQSFGSVSVSGGSSISSSTSYDDHPISPPNTNRGREEVRFNVRSKSPGPGSRGPTSPTSPLHQRLHALSLDSPTXSECHPLPLPPGSPXSPSSVLSNARANGHLENATXHVSKWRKGKLLGRGT

SEQ ID NO: 221408 - protein, 87 aa, Glycine max
  Clone ID: PAT_MRT3847_41961C.1.pep
ALLGPKLSGCNMSPAKPKVAGAMDIAQRTAPVAPSKPIMVVSPEKPPHAKLRRDSQRGGGVKGKSSLFWKETKEEEERTIGRVDGRV

SEQ ID NO: 221409 - protein, 509 aa, Glycine max
  unsure (1)..(509): unsure at all Xaa locations
  Clone ID: PAT_MRT3847_41962C.1.pep
MAYQVLLICLVSTIVFAYILWRKQSKKNLPPSPKALPIIGHLHLVSPIPHQDFYKLSTRHGPIMQLFLGSVPCVVASTAEAAKEFLKTHEINFSNRPGQNVAVKGLAYDSQDFLFAFAPFGPYWKFMKKLCMSELLSGRMMDQFLPVRXQETKRFISRVFRKGVAGEAVDFGDELMTLSNNIVSRMTLSQKTSENDNQAEEMKKLVSNIAELMGKFNVSDFIWYLKPFDLQGFNRKIKETRDRFDVVVDGIIKQRQEERRKNKETGTARQFKDMLDVLLDIGEDDSSEIKLTKENIKAFIMDIFVAGTDTSAATMEWAMAELINNPYVLEKARQEIDAVVGKSRMVEESDIANLPYLQAIVRETLRLHPGGPLVVRESSKSAVVCGYDIPAKTRLFVNVWAIGRDPNHWEKPFEFRPERFIRDGQNQLDVRGQHYHFIPFGSGRRTCPGASLAWQVVPVNLAIIIQCFQWKLVGGNGKVDMEEKSGITLPRANPIICVPVPRINPFPTI

SEQ ID NO: 221410 - protein, 50 aa, Glycine max
  Clone ID: PAT_MRT3847_41963C.1.pep
MDSVQVVGGSVVGELSAVGPVIVYVALCHNCGYERLPVEVDEEHVLIFGV

SEQ ID NO: 221411 - protein, 68 aa, Glycine max
  unsure (1)..(68): unsure at all Xaa locations
  Clone ID: PAT_MRT3847_41964C.1.pep
NRITLKSXKNTSDTTLTLQPYTHQYWLVQYMLQPISTSCNHSQISISXHTLFQXLYXLIXIHFTSQVS

SEQ ID NO: 221412 - protein, 30 aa, Glycine max
  Clone ID: PAT_MRT3847_41965C.1.pep
LKSYQLVIFFSYHVDFFFLSVVAQSEIDNG

SEQ ID NO: 221413 - protein, 172 aa, Glycine max
  unsure (1)..(172): unsure at all Xaa locations
  Clone ID: PAT_MRT3847_41966C.1.pep
KKVKRFPGGKFKKKVTPEVVFXKVVRTHRKCFPPVKGLDLFGVKPSDASKKLGKKFFPGPPVVKGPSEKNPIFVPGDIAFALVGFFPKPWPDVPKPPIFFLKNGKKVPPPFFFYPGLKTKARFLASAFSCNPPLPLFPLPISPKKNQSVALVTPPICFFCWPIFPLVGGVGA

SEQ ID NO: 221414 - protein, 56 aa, Glycine max
  Clone ID: PAT_MRT3847_41967C.1.pep
TPPQITHGPEGPLSGHLSAYELIMFTHQHHRFGLNQGELTCRIAGFTHCSGNPQSR

SEQ ID NO: 221415 - protein, 62 aa, Glycine max
  Clone ID: PAT_MRT3847_41968C.1.pep
FINVLLDDLRALHSYVFGERTIVSSLISQTLDQLKRCSSLTKKYHHQLQSFIKDLMERNELT

SEQ ID NO: 221416 - protein, 145 aa, Glycine max
  unsure (1)..(145): unsure at all Xaa locations
  Clone ID: PAT_MRT3847_41969C.1.pep
VTLKVSIMSKNVDAGDFYYDGQDMARTPYYHNARSNRSSYNKAIVDIRPDAAPLEVSPDFFGFLFGSKPATISSPSDRRLPDFPEIRNTSLEEPSLVSGSISDXESGIKCLSNRIDEYEAKLDEIEDEVVKSHNEDGAADLLVNE

SEQ ID NO: 221417 - protein, 52 aa, Glycine max
  Clone ID: PAT_MRT3847_4196C.1.pep
VRKKSLYSIFTRKKTRVDTPESRGGEPVQWKPKSTGSETRAGAWVHTADPRT

SEQ ID NO: 221418 - protein, 56 aa, Glycine max
  Clone ID: PAT_MRT3847_41970C.1.pep
SYIGFYVLIVCLYGEEEYVLTRISGCSLRGIFVDPVPTVMGLAHMDDILRCIVDVG

SEQ ID NO: 221419 - protein, 47 aa, Glycine max
  Clone ID: PAT_MRT3847_41971C.1.pep
LTYSIAISNARNPLPPQKLGRLPAGLLRRNLRKRLRLERRNDYARRH

SEQ ID NO: 221420 - protein, 61 aa, Glycine max
  Clone ID: PAT_MRT3847_41972C.1.pep
KNKKSPPPPMARAVPNPVGGQILSPKPLLENPTPNPRLRPPPPAGGKGPTPPRGWEPPGWK

SEQ ID NO: 221421 - protein, 138 aa, Glycine max
  unsure (1)..(138): unsure at all Xaa locations
  Clone ID: PAT_MRT3847_41973C.1.pep
PSLICWGQXLLSSLFGRPNKVWACLXTGFLEVIYSPPEENGGGSPFGKPYAKGKPIFFFLCRDNSVSMYELPSFSKRGRFFAQKKVALIEVGPGGLFFPGNESGFLMVWKRVEGPKGGSSLHVVPFNLGGGLSPLFPL

SEQ ID NO: 221422 - protein, 31 aa, Glycine max
  Clone ID: PAT_MRT3847_41974C.1.pep
NVNTLNPGCDFNLLYLHSLGSLYPTLSFTNS

SEQ ID NO: 221423 - protein, 75 aa, Glycine max
  Clone ID: PAT_MRT3847_41975C.1.pep
RGLGPRFQPGQGFLFLPQGFWFKPWEFRGVLKKLLVFSRGGAPFGFFCFVRGGQLNQRLKVRGPLFGFCQFGPFF

SEQ ID NO: 221424 - protein, 85 aa, Glycine max
  Clone ID: PAT_MRT3847_41976C.1.pep
QIVKRRGRIYVICSGNPKHKQRQGMATFASEGPSRPVSSETSSWKMGIKPAPIARPGLISNTPQRHSLSMLYGWRVGLAFILSMK

SEQ ID NO: 221425 - protein, 144 aa, Glycine max
  Clone ID: PAT_MRT3847_41977C.1.pep
MKVHFSVQLLLSLFLLSAFHVPHMVVGTVELRALMELKSSLDPEGKILGSWISDGDPCSGFFEGVACNEHRKVANISLQGKGLSGWLSPALAELKCLSGLYLHYNNLSGEIPPRISNLTELVDLYLDVNSLSGAIPPEISNMAS

SEQ ID NO: 221426 - protein, 62 aa, Glycine max
  unsure (1)..(62): unsure at all Xaa locations
  Clone ID: PAT_MRT3847_41978C.1.pep
SGVSQKENMELLQGLTIMRDDTLRIXRPEQEALIVTGEEDRIFPMYTALLLLEIISYKARLH

SEQ ID NO: 221427 - protein, 50 aa, Glycine max
  Clone ID: PAT_MRT3847_41979C.1.pep
FFFFFFFFIIIILYSGGFFKLLWSFSTIYRRDSLLKCAALFLKTPLFRTI

SEQ ID NO: 221428 - protein, 63 aa, Glycine max
  unsure (1)..(63): unsure at all Xaa locations
  Clone ID: PAT_MRT3847_4197C.1.pep
MRISEKKRVKERKEIARSTLEILYQIGEXGSTNPRFHQLELEINQRPKKEPERVYFDTKSYIK

SEQ ID NO: 221429 - protein, 43 aa, Glycine max
  Clone ID: PAT_MRT3847_41980C.1.pep
FPQRHVKTCSTINKLRDYHVMIIAQLPPKLGSYKSLTIGILSL

SEQ ID NO: 221430 - protein, 59 aa, Glycine max
  unsure (1)..(59): unsure at all Xaa locations
  Clone ID: PAT_MRT3847_41981C.1.pep
GNNMVLLTVCLLLLFLVEVTHAPMNLSFSTSDQSSRYADDQCSKTIXDLLCVPHSKPPQ

SEQ ID NO: 221431 - protein, 152 aa, Glycine max
  Clone ID: PAT_MRT3847_41982C.1.pep
MPVPFTTGYSTFEEINSPTKHYTNHTELQEKESEIPMATLDSDVPMVPAGEPSSSAGPSSKKPKRFEIKKWNAVALWAWDIVVDNCAICRNYIMDLCIECQANQASATSEECTVAWGVCNHAFHFHSISRWLKTRQVCPLDNSEWEFQKYGH

SEQ ID NO: 221432 - protein, 113 aa, Glycine max
  Clone ID: PAT_MRT3847_41983C.1.pep
MSPFRPLLLFAAVFFLLRPLAATDGDADPLYIGCVEQCKKTGCVGDRCFQHCKFSSDGKPIDGPWYMHEPLYLRWKQWDCCTDCRYYCMLAREEERTKLGDKPVKYHGKWPFH

SEQ ID NO: 221433 - protein, 57 aa, Glycine max
  Clone ID: PAT_MRT3847_41984C.1.pep
DMRAKVVHRTITIEVVLHDQAGIPVHVMYIAYHGHAKLQQRVPAQIATRHSKIYTQT

SEQ ID NO: 221434 - protein, 62 aa, Glycine max
  unsure (1)..(62): unsure at all Xaa locations
  Clone ID: PAT_MRT3847_41985C.1.pep
GDHASGHATAHPSVLIPTREXEARVXPSPGGSSYSLLPLTKHLSPPRFNYYPLLFFPPLISI

SEQ ID NO: 221435 - protein, 94 aa, Glycine max
  unsure (1)..(94): unsure at all Xaa locations
  Clone ID: PAT_MRT3847_41986C.1.pep
GPEFRVDPRVRFLIRQGYNIAVIIGDXWSDLLGGHRGEXSRTFKLANPXVLSFSYSFTCQQSSLXPIYLYGIGCVQIGALASLYAVSAVCQHVM

SEQ ID NO: 221436 - protein, 120 aa, Glycine max
  unsure (1)..(120): unsure at all Xaa locations
  Clone ID: PAT_MRT3847_41987C.1.pep
MSRGRRILPTMKDESLSSTQPEDWVIVPKMTTINNTSAYGLKSGMKGSRRKGTMTKSIXQGTVRREMAXTLRTPLNFDSSKQSSXQFTIDHISGGILVDKTGDRITLMRNSAISHLLKVA

SEQ ID NO: 221437 - protein, 59 aa, Glycine max
  Clone ID: PAT_MRT3847_41988C.1.pep
VQTLSSHYASPYNRGLNRSKLDKMTLNYNIYLDVSEVLTLILLFLLTVTELVEDQPLQS

SEQ ID NO: 221438 - protein, 71 aa, Glycine max
  Clone ID: PAT_MRT3847_41989C.1.pep
QKGKSDATGNAILKPCRIQVIIFPYNPDRSHSIFQQRYTILDVQYKDENIRVQSPLRRVFFFNFLKRKEND

SEQ ID NO: 221439 - protein, 106 aa, Glycine max
  unsure (1)..(106): unsure at all Xaa locations
  Clone ID: PAT_MRT3847_4198C.1.pep
LSFVLHQFDWKNPVVTHLNWLDPDXPFVSWRGTNEASTDXPFLTIXRLNGHWHPPCTLTLNGAAPWVTPIGTXYTLPFTLTPTRLACFPSFPGTFAFFPCLSLNWG

SEQ ID NO: 221440 - protein, 79 aa, Glycine max
  Clone ID: PAT_MRT3847_41990C.1.pep
LPNNILFCVLILTHTSYYHSYSHAILSFFNSHTSSIPLLLPSHPNLLLLTHSLQSSFMLFLITFIISSVNLLSLHQFFI

SEQ ID NO: 221441 - protein, 78 aa, Glycine max
  unsure (1)..(78): unsure at all Xaa locations
  Clone ID: PAT_MRT3847_41991C.1.pep
IGAFCITXTSARPLITSFMATWYTGYTYTYISPPFCYTIYYSHRRLCSHLVTVTFAGRLYRTPLVVRVVPTHLLVYCI

SEQ ID NO: 221442 - protein, 63 aa, Glycine max
  Clone ID: PAT_MRT3847_41992C.1.pep
THHSDSSLHCLLTKHAINTITVSLLFACDTHILEVEPARTKLTGKTRFHISQITVMGFVYCDC

SEQ ID NO: 221443 - protein, 74 aa, Glycine max
  unsure (1)..(74): unsure at all Xaa locations
  Clone ID: PAT_MRT3847_41993C.1.pep
SARVRKLGIRLEVGWNGSTFAXARASLTCTAVLRVLLHAPFCVYPPVMMATFRSGEINGLRPKKKKKKKKKKKK

SEQ ID NO: 221444 - protein, 65 aa, Glycine max
  Clone ID: PAT_MRT3847_41994C.1.pep
PTRPLLLKVFRSTLDHYQISARSRLFEEDFRKALMLKPERGRFYFYQESFGTSCYYFKISFYLFM

SEQ ID NO: 221445 - protein, 55 aa, Glycine max
  Clone ID: PAT_MRT3847_41995C.1.pep
AFPSFNIKFKICKPECLQTTVIGSDSILKFRFRLNLTTTLTHFRMCLFCIYIHYF

SEQ ID NO: 221446 - protein, 92 aa, Glycine max
  unsure (1)..(92): unsure at all Xaa locations
  Clone ID: PAT_MRT3847_41996C.1.pep
KKLDGAGGNSASHTFFFLKDRPIPWWEECNKPEVVKQRIKKAFKKGRFIFEAICHELNIAIDXDDTKLRTVILEKQKVAVFLWRLATDHFLS

SEQ ID NO: 221447 - protein, 91 aa, Glycine max
  unsure (1)..(91): unsure at all Xaa locations
  Clone ID: PAT_MRT3847_41997C.1.pep
LPDIVAXSKEVTVRFFKWVQSIQGFMXEXDKVSNKLKTLMTRGFTDVKKLRITNPCDLRMEAFXPCGITRVEPATVLRGWKEFASNGVCFQ

SEQ ID NO: 221448 - protein, 182 aa, Glycine max
  Clone ID: PAT_MRT3847_41998C.1.pep
HKCTYYFKIAVALAVAAIPEGLPAVITTCLALGTRKMAQKNAIVRKLPSVETLGCTTVICSDKTGTLTTNQMAVTEFFTLGGKTTASRLIGVEGTTYDPKDGGIADWGCYNMDVNSQVMAEICAVCNDAGIYFDGRLCRATGLPTEAALKALVEKMGVPDAKSRYIIRDNTELAANNMMNGN

SEQ ID NO: 221449 - protein, 65 aa, Glycine max
  Clone ID: PAT_MRT3847_41999C.1.pep
FTFKLSNCLSRNLVSEFVYGFTHVIMFASNYVSNELVKYMAVSISALLYTSSMNMYMHQAQKHPP

SEQ ID NO: 221450 - protein, 143 aa, Glycine max
  Clone ID: PAT_MRT3847_4199C.1.pep
HVSPRVMETYGYCAPEYASTGQLTTKSDIYSFGVVFLEMITGRRAIDQSRPSEEQNLVTWAQPLFKDRRKFSSMVDPLLKGNYPTKGLHQALAVAAMCIQEEADTRPLISDVVTALDVLAKRHIQVGRQQRSKETFFEHGECS

SEQ ID NO: 221451 - protein, 98 aa, Glycine max
  unsure (1)..(98): unsure at all Xaa locations
  Clone ID: PAT_MRT3847_419C.1.pep
KACNAFFLKVNPIGFLXKVFNXVRMSKKTGWGVLASPQNGETEDPFLAALFFGLAPGQIKTGAPSRSKGFFKYNQLFKIXEELGSEPVFFGANFRTPV

SEQ ID NO: 221452 - protein, 80 aa, Glycine max
  Clone ID: PAT_MRT3847_41C.1.pep
LTVAVVFVKDQDLFLPITTTGIPNKLELLFQRAPSKGIGRALAHLLHKDRVTIRAWVGFPAPSPAKPFSKEKSCFFLAIS

SEQ ID NO: 221453 - protein, 91 aa, Glycine max
  Clone ID: PAT_MRT3847_42000C.1.pep
PRRPSVRILGDDCHWIVVPATFISAASLFCIEEVGVLIEEPFATLALDDLCQKAQTDIQEAIASGNLIHARLVAKQKSHAEEHSPNGWPNL

SEQ ID NO: 221454 - protein, 79 aa, Glycine max
  unsure (1)..(79): unsure at all Xaa locations
  Clone ID: PAT_MRT3847_42001C.1.pep
CMGGVSGGVGAGSSGAKSELSLSLGCMTGGLPGCSSGINSVCRRFLAAWLYSQGLPLTPRYRDVSSPXFINTFTHLVPL

SEQ ID NO: 221455 - protein, 82 aa, Glycine max
  Clone ID: PAT_MRT3847_42002C.1.pep
YFLSLHYTTTKWLLIASVFFLPPKSHTFHCIIIHNMAHPTSSGFVTFLLSLSFPAHIFLFFMFLYCNYYDYYCFYYAFIHMS

SEQ ID NO: 221456 - protein, 130 aa, Glycine max
  unsure (1)..(130): unsure at all Xaa locations
  Clone ID: PAT_MRT3847_42003C.1.pep
MSSSSAATTTTTLPVLAFLLLTTTAITAAPIIGLDSFLSHQSRMDPHASNDSFLSLPSSVKKPLSHSSDFSLSVSLPISLSLHLLGDFPFDTPSLLSAFLSAASPTHFHVISPLEFHPFFHRXSLFHTLH

SEQ ID NO: 221457 - protein, 39 aa, Glycine max
  Clone ID: PAT_MRT3847_42004C.1.pep
FHMNYETLSTIQCLHQYVPTYPFPIDIILKPKNNKNNKK

SEQ ID NO: 221458 - protein, 58 aa, Glycine max
  Clone ID: PAT_MRT3847_42005C.1.pep
PTRSRTRVQTQTHALQIRRSRRAKFHLERIINQKHITISALLGRHIDKSIMSDSERIQ

SEQ ID NO: 221459 - protein, 139 aa, Glycine max
  Clone ID: PAT_MRT3847_42006C.1.pep
MRPIAGRMVKDPVRAPDTGAAGQNGHALVPKTARGVMMGPDQPVILHMLDIPPAAESLNGAKTELVDAAYPLLKGGAATTDAAEACTGVNTAETDGGFPRKEGTERKDVKTKNGPIYKTQASAPEKHAAANRKALVAAN

SEQ ID NO: 221460 - protein, 159 aa, Glycine max
  unsure (1)..(159): unsure at all Xaa locations
  Clone ID: PAT_MRT3847_42007C.1.pep
ELKPKPHLYLSLMRAFAFLGDYYLVKKIXISIWPDSAGTILLVAQEEADHLLMEAALNAGQVNVAVKTLTEIVSKWKGISWTSRGGMVAYRIEALLGFSKSLFSPHLLPQVSPSEPVENYMIQFEATRPLQGSIKLRKVVMRFFYEAVVPIVDEXGSCT

SEQ ID NO: 221461 - protein, 82 aa, Glycine max
  Clone ID: PAT_MRT3847_42008C.1.pep
MSGNSNCSVYIGNLDERVTDSVFVDILIQAGRVVDLHIPKDKESEKPKGFAFAEYETEEIADYAVRLFSGLITLYNRTLKFA

SEQ ID NO: 221462 - protein, 33 aa, Glycine max
  Clone ID: PAT_MRT3847_42009C.1.pep
VLVAVVKNQSKTPGFKRLLLIVEPRVWCLCALV

SEQ ID NO: 221463 - protein, 82 aa, Glycine max
  Clone ID: PAT_MRT3847_4200C.1.pep
RLIYGAYTPHQPQSRLSEPCAHLRRLNRFVWSPVMSGTQAEKGNHTLGQTATYQSVIIALVAGAILVIALFSIIWRRRRRMQ

SEQ ID NO: 221464 - protein, 46 aa, Glycine max
  Clone ID: PAT_MRT3847_42010C.1.pep
LPEDGYFITVFNRRVIISYRFRIYLPRVIGLKKTDSTMLQNMKFWN

SEQ ID NO: 221465 - protein, 100 aa, Glycine max
  unsure (1)..(100): unsure at all Xaa locations
  Clone ID: PAT_MRT3847_42011C.1.pep
LFGSEAFVSMEKDKPVSVKDAVFKLQMSLLEGIQNEDQLFAAGSLMSRSDYEDIVTERSIXNVCGYPLCSNALPSDRPRKGRYRISLKEHKVYDLHETYM

SEQ ID NO: 221466 - protein, 51 aa, Glycine max
  Clone ID: PAT_MRT3847_42012C.1.pep
MNISITIWQLISRMTLISTYTLNLFFLLHFKIIKIDNNLVNIHVIIIFLTF

SEQ ID NO: 221467 - protein, 44 aa, Glycine max
  Clone ID: PAT_MRT3847_42013C.1.pep
PIFASRDNNLTFELTHMVLKDYTLLPTEGHGPNRNTREETEARQ

SEQ ID NO: 221468 - protein, 128 aa, Glycine max
  Clone ID: PAT_MRT3847_42014C.1.pep
MEKENMLKTPPKVPIQDRTPEPECKTPTPVQQQDPNDHNSSNELRKPVTPDRLRVPKAFKYPERYTSPTDLMMSPVTKGLLARTRRGGGAVLPPGGKNRPKILDMPLKDVGPIQNKLPMLIDEKINSA

SEQ ID NO: 221469 - protein, 51 aa, Glycine max
  Clone ID: PAT_MRT3847_42015C.1.pep
PWLFFLGSLVLCCLLPFKCKQERKGYEQSTSQSDYEISLFVSKTIYNFFRT

SEQ ID NO: 221470 - protein, 110 aa, Glycine max
  unsure (1)..(110): unsure at all Xaa locations
  Clone ID: PAT_MRT3847_42016C.1.pep
QFTHXYXISXXGSSXSXXLXXXXPXPXXXXXAXXXRXXXXSXXXXXXRVCXXXXXXXXXLXVXXFXXXCXVLXXCXXXLXXXXGGXXXXXXXXXXRXXXXXVXXWXWCVX

SEQ ID NO: 221471 - protein, 55 aa, Glycine max
  Clone ID: PAT_MRT3847_42017C.1.pep
KGRPVINQGFGATIKAKAGQLECEGATPYTVKARVNNDPDYCSQLGVAPGENFTG

SEQ ID NO: 221472 - protein, 170 aa, Glycine max
  unsure (1)..(170): unsure at all Xaa locations
  Clone ID: PAT_MRT3847_42018C.1.pep
RFYHGHHNTITDGVDKTRATTQCRKXAHCDLLKRNSKQMSNVSWVAPEDKASLWTQLHYVACNNLEMQEAYLVNHVNVLREWYMHRPQEARQLRTKALSRIEWLQKADVPTRAQIEECHSTHRMMNAPETNDNIDLLMNIDSRGAQRARTAYANKRARDDKLGAANTTEI

SEQ ID NO: 221473 - protein, 46 aa, Glycine max
  Clone ID: PAT_MRT3847_42019C.1.pep
ENKILESLFLKTFLGLPRSGTLCNNTLIICTHLICKFYKLLLFLLK

SEQ ID NO: 221474 - protein, 64 aa, Glycine max
  unsure (1)..(64): unsure at all Xaa locations
  Clone ID: PAT_MRT3847_4201C.1.pep
NSLFHHNDGYXNTTTSPNNTIELAEEESIETDLLRGCVASTTSTAAEAHHHLQPSHDQNSPRGP

SEQ ID NO: 221475 - protein, 136 aa, Glycine max
  Clone ID: PAT_MRT3847_42020C.1.pep
AFPSCSVFLSLVFWLPASPSVSRPCSLGFWSGVAAWGLAGVWVHALVGVLAVPLASALCLLGGGLPLGVPPFFGALWAGLLGLALRGWVRWILGRGCFRPLFLLLCPLFAPSRPSVNTRSCGSSRWFRSGSPGVSA

SEQ ID NO: 221476 - protein, 145 aa, Glycine max
  Clone ID: PAT_MRT3847_42021C.1.pep
ERYQTDFGSQHTFIEGVEKPANEGIAQVVSSATLISNKEKTALPTYRRQQNSSQAQSITIELVQLDPPPQPLPQQTSSSSQTNINNIPEPPQPSPSNGPHQLQHVTSQNITSEQGQDKWNRFERFCKRNPSRSSLCSFSISNCPS

SEQ ID NO: 221477 - protein, 55 aa, Glycine max
  Clone ID: PAT_MRT3847_42022C.1.pep
ISHSGRAPVGNQDGCAPVRKDASCLHGNYPPRQKEGDLQGVYFGDVLDFPPVNFV

SEQ ID NO: 221478 - protein, 76 aa, Glycine max
  Clone ID: PAT_MRT3847_42023C.1.pep
ARERGRGIRMGVVFNPYIMLLALFCAFLVSSDPLLSTDLEDRVFKVICSYGPTREPGTPEPSFHRQRLWMIRLQNK

SEQ ID NO: 221479 - protein, 56 aa, Glycine max
  Clone ID: PAT_MRT3847_42024C.1.pep
MGCGFRVLHLGIPFLSFVPDVQTADWHVPCSEQVIYTVISLVICLVCSQLPLYGLH

SEQ ID NO: 221480 - protein, 66 aa, Glycine max
  unsure (1)..(66): unsure at all Xaa locations
  Clone ID: PAT_MRT3847_42025C.1.pep
SRRPFYHPTLTGCNGALAILKERTGSSHYAITNFIXGRPKELPPTYKKLVLVHLKKSVVAGKLVKV

SEQ ID NO: 221481 - protein, 161 aa, Glycine max
  unsure (1)..(161): unsure at all Xaa locations
  Clone ID: PAT_MRT3847_42026C.1.pep
PVSLSTGYPADELGDFTAELKLSIFQLGISPQIIXASIIMQVLCHVVPSLVKLRKEGLDGHEKIKSYXMVDVIWLCNFGSFNSCLLLTSIFNLCCHLXVKHVMVTSVLLVCGAMTITWICDTISESGFGQGSSLIICVGILTGYMETLYKMLTQLSRWFHY

SEQ ID NO: 221482 - protein, 119 aa, Glycine max
  unsure (1)..(119): unsure at all Xaa locations
  Clone ID: PAT_MRT3847_42027C.1.pep
GNQFIVMEWVASYKGVHFPARGSQSVEWPTPWSRTSEAFANAAGAQVFPPGALFVPFSLAGTIEDGVGIPDTDXLGRLILAHLWHGRPLMWPMLIVSLEAGQGQAPLGALGLSPGVFCR

SEQ ID NO: 221483 - protein, 40 aa, Glycine max
  unsure (1)..(40): unsure at all Xaa locations
  Clone ID: PAT_MRT3847_42028C.1.pep
RDRWVKDKRVSTSVIVVIGAHVRTXGGKXPTKXNWVQPWI

SEQ ID NO: 221484 - protein, 49 aa, Glycine max
  Clone ID: PAT_MRT3847_42029C.1.pep
ELAIVLKYAESYWRFRSAISKLGITFNPCHCPHSNRCQRSKTSPACARD

SEQ ID NO: 221485 - protein, 50 aa, Glycine max
  unsure (1)..(50): unsure at all Xaa locations
  Clone ID: PAT_MRT3847_4202C.1.pep
ENSAKEYHDLPPEDLFDPXELTQWIFYRVLIAEFIENLLFLYVTVLQIIG

SEQ ID NO: 221486 - protein, 123 aa, Glycine max
  Clone ID: PAT_MRT3847_42030C.1.pep
RKIVGQSMFRGMSVEAPMSWCLCFKPKPNITNKVRAPQHPRSRQGYTTSITASQTNAMALTFEVLGRFNRARAARLTLPHFVCQTPLFMPVGTQVCSRVFKVLLCSLEVFLLYQNIPFISLPH

SEQ ID NO: 221487 - protein, 80 aa, Glycine max
  Clone ID: PAT_MRT3847_42031C.1.pep
PTRSDQPEADIGNQPANDSPPGTLRLTLLQNMAMSMVGISVGALGSSSRRLPLDLSLAFSPGSTPIWLELYFASYKASRI

SEQ ID NO: 221488 - protein, 49 aa, Glycine max
  Clone ID: PAT_MRT3847_42032C.1.pep
CISPFNSWPSCKRFFVWTSVCILSIAFAVPSSVFFARRRLLMLPHSPPI

SEQ ID NO: 221489 - protein, 98 aa, Glycine max
  Clone ID: PAT_MRT3847_42033C.1.pep
VHASVELESVTGSCIFQRRRTRIHGIGIGPIHKLVLRVVSSARELLTIAFRWIRFVLAGKDLEADFSAAVSQGHVRTPRNFQIEYGEVRKWCCRFLEP

SEQ ID NO: 221490 - protein, 150 aa, Glycine max
  Clone ID: PAT_MRT3847_42034C.1.pep
MFRSSQQRNSRCKDFKVKHALQICVLLGVCIWMAYPARDSREKKRSYGEGTNADSEVVKLGRKDPDPNVEQSSSILHARDKEEKDEEENNHEKQKKTDDVNRVENEIQTQKNEQNNNEEKSEQRKDPVDQDTEENEHKANKESDSVIKEN

SEQ ID NO: 221491 - protein, 66 aa, Glycine max
  Clone ID: PAT_MRT3847_42035C.1.pep
AQWRASIFLSLNWPGSPSVTVSASHICSPSAIYTAFFIKPRASYEVGTECSCCSLAQLLGSAKNRK

SEQ ID NO: 221492 - protein, 113 aa, Glycine max
  Clone ID: PAT_MRT3847_42036C.1.pep
RVLVAGGGIGGLVLALAAKHRGYEVKVFEKDLSAVRGEGRHRGPIQLLSGALAVLETIDQSVARQIMEAGCVTANRTNGLADGLSGDWFSVFDLFTPASRKRLPFTLFICRMA

SEQ ID NO: 221493 - protein, 71 aa, Glycine max
  Clone ID: PAT_MRT3847_42037C.1.pep
WLVFFRRPAKFFLIYNIPFLYPYSLIFNFSWKKTIRPFLVIRGLLLNLQKLPRAPLKPRVARGLTYFREGA

SEQ ID NO: 221494 - protein, 107 aa, Glycine max
  Clone ID: PAT_MRT3847_42038C.1.pep
RASLSVNNKGDSLNASYYHTVNRLTNTAVGAEVTHQFSTNENTLTLGTQHALDPLTTVKARVNNLGKANALIQHEWRPRSFFTISGEVDTKAIEKSAKVGLGLALKP

SEQ ID NO: 221495 - protein, 204 aa, Glycine max
  unsure (1)..(204): unsure at all Xaa locations
  Clone ID: PAT_MRT3847_42039C.1.pep
GPPPKPPSLGPPPSGPAPPPGPPPXPSPPGPPPPGSPPXLPPPGPPPLGPAPLPGPPPPGPAPPPGPPPPGPTPPPGPPPXPPLPGPAPLPGSPPPGPAPPPGPPPPGPASPPGPPPXPPLPGPAPLPGSPPPGPISPPGPPPXPPLPGPALPPGPPPPGPASPPGPPPXLPPPDPAPDPGPPPXPPPTGPPPPGPTPPPGPPP

SEQ ID NO: 221496 - protein, 137 aa, Glycine max
  Clone ID: PAT_MRT3847_4203C.1.pep
MAKGEKKPAEKKPAEKAPAEKTKAEKKIPKEPASGEKKKKKRNKKSVETYKIYIFKVLKQVHPDIGISSKAMGIMNSFINDIFEKLAQESSRLARYNKKPTITSREIQTAVRLVLPGELAKHAVSEGTKAVTKFTSS

SEQ ID NO: 221497 - protein, 257 aa, Glycine max
  unsure (1)..(257): unsure at all Xaa locations
  Clone ID: PAT_MRT3847_42040C.1.pep
MSKGPGLYSDIGKKARDLLFKDYHSDQKFTITTYSPTGVAITSSGTKKGDLFVADVNTQLKNKNITTDIKVDTGSNLFTTITVNEPAPGLKTIFSFRVPDQRSGKVEVQHLHDYAGMLSSVGLIGNPILYISQAGVXMIGSTSLHVWWYYEFXVCRNDKGDALNASYYHAVNRLTNTAVGAEVTHRFSTNENTLTLGTQHALDPLTTMKARVNNFGKANALIQHEWRPKSFFTISGEVDTKAIEKSAKVGLGLALKP

SEQ ID NO: 221498 - protein, 116 aa, Glycine max
  unsure (1)..(116): unsure at all Xaa locations
  Clone ID: PAT_MRT3847_42041C.1.pep
LKTPVLTHPSHTPGEARAPTPKPLPQKQRPRTNPPPXPENEPARPPPRPPPPPPHAPPPPKPPPPRPPPAAPPTTPLQLLTPATPLNQPQQAVAAPSQPGTPPGRPTSTAPPTHRK

SEQ ID NO: 221499 - protein, 83 aa, Glycine max
  unsure (1)..(83): unsure at all Xaa locations
  Clone ID: PAT_MRT3847_42042C.1.pep
FKFINFNSNMYFYWCGKRGPTSLVCTLKFASFFLTELFPLETFIXXKKXKKKKKKKKKKKKKKKKKKKKKKKKKKKXKGAPVL

SEQ ID NO: 221500 - protein, 83 aa, Glycine max
  Clone ID: PAT_MRT3847_42043C.1.pep
HIIYIVVSFIIVPYTISLNKLTAIIGKKLTRKQDQLQLSQAQKVPEQPFTLPPKQQLTPTPVIKNITSPHSSGLTNPLPTKPT

SEQ ID NO: 221501 - protein, 39 aa, Glycine max
  Clone ID: PAT_MRT3847_42044C.1.pep
SRIGSTGYSNGSIIVFHYRSCCACLLDRYKEFRRSREAN

SEQ ID NO: 221502 - protein, 45 aa, Glycine max
  Clone ID: PAT_MRT3847_42045C.1.pep
TTHTYNCKALNFMSPKVPKPVREYKKTTVLLGFTILPTVYYKQAP

SEQ ID NO: 221503 - protein, 110 aa, Glycine max
  unsure (1)..(110): unsure at all Xaa locations
  Clone ID: PAT_MRT3847_42046C.1.pep
GRKFQLRGLAQDINLARATIGYTITASIPMGAWNRSNSLSKPGHHVKCYTVNNPXMILFACMTDRRLSRYQHGHKLWWLSIAAXFMCCAQSSIGLRLSKSNLSPGGQPCL

SEQ ID NO: 221504 - protein, 96 aa, Glycine max
  Clone ID: PAT_MRT3847_42047C.1.pep
ILPEWIQNKNGFDIEIYTNGITNKIFCLTHTDSKEKMVIRLYGANTEQIIDRDSEMVNFIRFHQAGLGPTVHALFINGFACSFLPGNVLDMKSVRE

SEQ ID NO: 221505 - protein, 66 aa, Glycine max
  Clone ID: PAT_MRT3847_42048C.1.pep
PSQAQKPPFVYVTWLMNVPKTLKGVSQGFSVETYPLVFSPLASRSRFFYWGSPYGSGGYYLAPYDN

SEQ ID NO: 221506 - protein, 79 aa, Glycine max
  Clone ID: PAT_MRT3847_42049C.1.pep
MEAILPPQGEVKSCLFQRQVRNVWKKPLREMAFPSNFAHMKESSALKALYKTNEILILTKIKKKKKGGARDPNAWADAW

SEQ ID NO: 221507 - protein, 166 aa, Glycine max
  unsure (1)..(166): unsure at all Xaa locations
  Clone ID: PAT_MRT3847_4204C.1.pep
TAFEGTDEHGNLGGFVGSKTETALLAFAKAAQWSDYRAVRSEAAVAQMVPFSSERKAMGVVVKLRDGRHRLFLKGASEILTKLSTSHVVVHNPRSQSIPDPRDDDDSDNVPTVEFDEETRGNISRTIIFYPSQSLRTIALCYRDYESWPPKGMRVXXDSQVAYEDM

SEQ ID NO: 221508 - protein, 33 aa, Glycine max
  Clone ID: PAT_MRT3847_42050C.1.pep
WKTHTHFRMMVPEPVLHSLSRQRVNHSRASAIE

SEQ ID NO: 221509 - protein, 85 aa, Glycine max
  Clone ID: PAT_MRT3847_42051C.1.pep
LHPSLLQKRKKKKNCIHLFRLYCAFLHHFSFLILCILDLYITYQISCVHFILNRKSREKYIIFVKIFKFYFCFFKKIILFLSLEI

SEQ ID NO: 221510 - protein, 35 aa, Glycine max
  Clone ID: PAT_MRT3847_42052C.1.pep
RAAVSAATHASVTRRNTMLSLLLHHYQPYKGLTAR

SEQ ID NO: 221511 - protein, 75 aa, Glycine max
  Clone ID: PAT_MRT3847_42053C.1.pep
PTFRVTFMISHSLLQNPLLLTKPSCPSPSIVHPCIFWPRSALQFAFSSLFWPASVYTLQAVLSFPCPVQRTLWYE

SEQ ID NO: 221512 - protein, 60 aa, Glycine max
  Clone ID: PAT_MRT3847_42054C.1.pep
LMLWTCICMAVFLVKTMKRVLFAEVRSYDSSKHHYLLLFIALAQFPLFTWLGNITVNWLI

SEQ ID NO: 221513 - protein, 201 aa, Glycine max
  Clone ID: PAT_MRT3847_42055C.1.pep
MEKMEQFIDNLPPMDLMRSEKMTFVQLIIPVESAHRAISYLGELGLLQFRDLNADKSPFQRTFVNQVKRCAEMSRKLRFFKDQISKAGLMSSSRTVLQPDIDLEDLEIQLAEHEHELIEMNSNSDKLQQSYNELQEFKIVLQKACGFLVSKHSLAVSDERELQENVYSNDAYVETGSLLEQEMRPQSSNSSGLRFISGIIC

SEQ ID NO: 221514 - protein, 74 aa, Glycine max
  unsure (1)..(74): unsure at all Xaa locations
  Clone ID: PAT_MRT3847_42056C.1.pep
LKIKACXEKRKRCALGSGRSTENQRREWRXRXXGKGSIFRSGGGYLRSIQGPGQGACPAWGCGRGQGGTGRWGG

SEQ ID NO: 221515 - protein, 305 aa, Glycine max
  unsure (1)..(305): unsure at all Xaa locations
  Clone ID: PAT_MRT3847_42057C.1.pep
EHHNHDQLDQREHHGHSQHDQHHQKCASQTCSSTCPPCSSXSSFGGIVNHCNTMKAHDQCKGSDEFHEHDHCHHGRCDKNHDEVHKHDTEDNHAVAEKRHGSCLGHKNHGTKHCHNQNLDKVTHDSASHSSPCHLNLPCKKESQQFTHNHCHLIHGCENLKDHESKDVLRSNHDIQHAKSGCHSDFEKHETGEISIDIITEYVELASSLEEKGKGSCREDCSDTCGNLAAVCGCESSNEREDIACCRNEDSSKECKESPIMHVCDGLNKREVGGCCKSYMKECCAKLGHSSRPRFVGGLSEIITE

SEQ ID NO: 221516 - protein, 98 aa, Glycine max
  Clone ID: PAT_MRT3847_42058C.1.pep
YMSFYNKQLLIVKYFPNEQRFLFSALFSRQDTWSATCFLIPFFMRSFEIKFSYENNPVSKIYADMNIRQWLKSDRCGAKSILLLLVSSQGPFCRLLQP

SEQ ID NO: 221517 - protein, 58 aa, Glycine max
  Clone ID: PAT_MRT3847_42059C.1.pep
LLYKKKKKKKKGGFNKEVPLITNKSKQKNNYYIETPKGAALLGVPHFLPLGSPWISPT

SEQ ID NO: 221518 - protein, 431 aa, Glycine max
  unsure (1)..(431): unsure at all Xaa locations
  Clone ID: PAT_MRT3847_4205C.1.pep
MRERENVLFCFTKLSLMALLTSLPEQFSSTPKRHKRKPQQQQQKQKQKQKQKQKPASSWDQIKNLLTCKQMEESRVHDPSKITGYSKLGSSCSSICSFRDVVHGNTRVVHRSDNSSPESSSLGQETNGLLTRKPVTTTTTRSAKSNGGATCTSSSSSSRGMQFRKLSGCYECHMIIDPSRLPIARSTVCACSHCGEVFPKMESLELHQAVRHAVSELGPEDSGRNIVEIIFKSSWLKKDNPICKIERILKVHNTQRTIQRFEECRDTVKNRALGSTKKNPRCAAXGNELLRFHCTTLTCALGARGSSSLCASVPGCSVCTIIRHGFQGGCGGGGDHARAKGVRTTASSGRAHDSVVCGDATRRAMLVCRVIAGRVKRVVEDAPSEEEHVSVASYDSVAGYAGIYSNLEELVVFNPKAILPCFVVIYKVPSC

SEQ ID NO: 221519 - protein, 46 aa, Glycine max
  Clone ID: PAT_MRT3847_42060C.1.pep
NVIPKQNSIFFTLVLLTSSIQISKKYHKVTTFHLEKGTENQSDSRS

SEQ ID NO: 221520 - protein, 95 aa, Glycine max
  Clone ID: PAT_MRT3847_42061C.1.pep
HPAALYRCYLADIMTDVAYYPDTTVDRPQRSSSRRCCWAVSRGCTACTVFFLNKACRCVLWGVSIPPTCHPNPTSSLVLQIPLPHPHPDLIYIVT

SEQ ID NO: 221521 - protein, 285 aa, Glycine max
  Clone ID: PAT_MRT3847_42062C.1.pep
MAKDLETEIQSGLPHKDYHDPPPAPFYDPAELRKWSFFRALIAEFVATLLFLYVTILTVIGYNHQTATAAEPCSGVGVLGIAWAFGGMIFVLVYCTAGISGGHINPAVTFGLFLARKVSLTRAVGYMVAQVLGAISGVGLVKALQKSYYNRYKGGVNMLADGYSKGTGLGAEIIGTFILVYTVFSATDPKRVARDSHVPVLAPLPIGFAVFMVHLATIPITGTGINPARSLGPAVIFNNEKAWDDQWIFWVGPFIGAALAAFYHQSVLRAQAAKALGSFRSSSNL

SEQ ID NO: 221522 - protein, 81 aa, Glycine max
  Clone ID: PAT_MRT3847_42063C.1.pep
QRDLVTQVACNASYESYNNCCTSGFQCPHPLANSRFSGKLSPSNLHKKSEDKVQHLKARAFHNSSTSASYWLRYFYSTCMT

SEQ ID NO: 221523 - protein, 112 aa, Glycine max
  Clone ID: PAT_MRT3847_42064C.1.pep
MAKDLETEIQSGLPHKDYHDPPPAPFYDPAELRKWSFFRALIAEFVATLLFLYVTILTVIGYNHQTATAAEPCSGVGVLGIAWAFGGMIFVLVYCTAGISGISTNFSYVQIF

SEQ ID NO: 221524 - protein, 106 aa, Glycine max
  Clone ID: PAT_MRT3847_42065C.1.pep
EFDKYLKGEHLKNGEDPFAPPLTYTTLFVSEWGKLGFNHVDYLWGPPVHVVPIQGSSIIPVAIVGSLPLPNRGIRLMTWCVEEAHRLPFLHHMHGVVNHVSGRIIK

SEQ ID NO: 221525 - protein, 46 aa, Glycine max
  Clone ID: PAT_MRT3847_42066C.1.pep
MNVLPIILSLTTRKFGKIIIILSIFICGAWYLCHYYSKCCFKICET

SEQ ID NO: 221526 - protein, 138 aa, Glycine max
  Clone ID: PAT_MRT3847_42067C.1.pep
ALFRSALFEEFAFYCSVMSLPALFTLGLARESFARDEDFRHAVWPNTPIPRSLRDLIKPDAARVEIDDHPTQMEESQFPKTSFYKEDLHSGKTMKVQFIKPAFLQPWGVGTWLKEIKDTTKEGYRSEELCITKDAIDG

SEQ ID NO: 221527 - protein, 95 aa, Glycine max
  unsure (1)..(95): unsure at all Xaa locations
  Clone ID: PAT_MRT3847_42068C.1.pep
KRGGLFLSGGGSKISLLLGTIFEEAHPRLLIYLEKRFAPLAGLXCPKDDKLPSLXIFGTPKTRLFTLLPMDLNFGEHCQFFTYVTIIIKKTDTHC

SEQ ID NO: 221528 - protein, 266 aa, Glycine max
  unsure (1)..(266): unsure at all Xaa locations
  Clone ID: PAT_MRT3847_42069C.1.pep
GSSSSRTIPNGFHCLSTRLTXESALPPEKRKFPGSENLENPSLYHYALFSDNVLAASVVVNSTIMNAKDPSKNVFHLVTDKLNFGAMSMWFLLNPPGKATIHVENVDDYKWLNSSYCPVLRQLESATLKEFYFKAGHPNSLSSGASNLKYRNPKYLSMLNHLRFYLPQVYPKLDKILFLDDDIVVQKDLTGLWAVDLNGKVNGAVETCGPSFHRFDKYLNFSNPHIARNFDPHACGWAYGMNMFDLKVWKKKDFTGIYHKWQNMNE

SEQ ID NO: 221529 - protein, 96 aa, Glycine max
  Clone ID: PAT_MRT3847_4206C.1.pep
NKCHVDIRRELFRAHLLPGGAAPMPPLKERLEKNLLEESPQTVRVKVFVSGKAPEKRFSVWIGGRTLASFGSFQHMWFSQSEYEKQGAFYIQRKGP

SEQ ID NO: 221530 - protein, 67 aa, Glycine max
  Clone ID: PAT_MRT3847_42070C.1.pep
DHKMARQLQEIGVVKSGEHVLVTRTRVQVLAAVVTFAAGDSGRCKARLRCCSVAQYLHPSHRRSDPD

SEQ ID NO: 221531 - protein, 63 aa, Glycine max
  Clone ID: PAT_MRT3847_42071C.1.pep
IRNFSPSLFQFCNVKSLPPKNTKRKKQKIHEVVEVTLTVKIAWPVSIIQKPKFDITTLPQSRC

SEQ ID NO: 221532 - protein, 65 aa, Glycine max
  unsure (1)..(65): unsure at all Xaa locations
  Clone ID: PAT_MRT3847_42072C.1.pep
GXGFFFFFGLFFGKTSQSVFNIKFLVSNFQQFCLIHNPFFWGARKNMPAATFFLNRPPVFFWPSF

SEQ ID NO: 221533 - protein, 51 aa, Glycine max
  unsure (1)..(51): unsure at all Xaa locations
  Clone ID: PAT_MRT3847_42073C.1.pep
VDNCRKSKILYIAWSPTASRIRAKMLYATTKDGLRRALDGISYXLQATDPL

SEQ ID NO: 221534 - protein, 148 aa, Glycine max
  unsure (1)..(148): unsure at all Xaa locations
  Clone ID: PAT_MRT3847_42074C.1.pep
KXSLYYLDXXLTGDYGFDPLGLXDPEGTGGFIEPKWLAYGEIINGRYAMLGADGAIFFEILGKGGVIRQEKALQWFRNGVVPPGGNYNYWEESYTLFVFEMELMGFAEQRRLQEWDETGSMGKEXFXGLEKGLGRVWGGKVTREGAVC

SEQ ID NO: 221535 - protein, 72 aa, Glycine max
  Clone ID: PAT_MRT3847_42075C.1.pep
MSSCGCGSSCNCGSNCGCNKYSFDLSYVEKTTTETLVLGVGPVKALPEVAALRCVDHFRQLNWISVGPNSWT

SEQ ID NO: 221536 - protein, 47 aa, Glycine max
  Clone ID: PAT_MRT3847_42076C.1.pep
ALEKDGMVIMMRAWEVTNILKQAPWGPLLTHQHAQTKPCWRPTLLGA

SEQ ID NO: 221537 - protein, 55 aa, Glycine max
  Clone ID: PAT_MRT3847_42077C.1.pep
QNEASSRCGHHSLSNFPPPIRNNQFLKKIEEPMGSMILFVLFQNVIHFPCSWELK

SEQ ID NO: 221538 - protein, 58 aa, Glycine max
  Clone ID: PAT_MRT3847_42078C.1.pep
LYSIGPDSPRLIKYDMLYYAKDIEYKMKSSSKLINPSTYIYVLSNTLILKNKSIYVNK

SEQ ID NO: 221539 - protein, 96 aa, Glycine max
  Clone ID: PAT_MRT3847_42079C.1.pep
LSKIKTAKYALNQQWHSHTLDQIKEVAFRNIINCLAQILRSWFRSKFHETKKKTAQTTGSKGWSASSLFETCTATYMHDIVTATFTSKNPQLLRAL

SEQ ID NO: 221540 - protein, 58 aa, Glycine max
  unsure (1)..(58): unsure at all Xaa locations
  Clone ID: PAT_MRT3847_4207C.1.pep
QVSNWFXINARVRLWKPMIEEMYAEMNKRKACRNEEGMQSNHGNRISMSNQRFNQCQL

SEQ ID NO: 221541 - protein, 50 aa, Glycine max
  Clone ID: PAT_MRT3847_42080C.1.pep
FRVGFFFSFYNFPRRQNNNLGDLFEWGFATIFPTTLSIHYSKPLLALLIY

SEQ ID NO: 221542 - protein, 66 aa, Glycine max
  Clone ID: PAT_MRT3847_42081C.1.pep
TSWAGSPGGFLAVFPRGFLLGNFFPLTVPPNGSPLGLFFHPFLPFHMCPKGGFLPHTWFSDLINGG

SEQ ID NO: 221543 - protein, 74 aa, Glycine max
  Clone ID: PAT_MRT3847_42082C.1.pep
MANQPESSDAKGTKRDFSTAILERKKAPNRLVVDEAVNDDNYVVVLHPDTMEKLQLLRGDTILLKGKKRKDTIC

SEQ ID NO: 221544 - protein, 87 aa, Glycine max
  unsure (1)..(87): unsure at all Xaa locations
  Clone ID: PAT_MRT3847_42083C.1.pep
LCPLFSPVAVVSVVSRRRRSSARVRSLLVALSPPLLLVGVVGVVXRFVRVPGGPLVRARALLXGSVLLRFHIQAGRVCFXPXXIRYS

SEQ ID NO: 221545 - protein, 65 aa, Glycine max
  Clone ID: PAT_MRT3847_42084C.1.pep
SGLEFGGEWEGKKIFSRKKIFSRLCERLKRLLKRKKGVASRTGVRKNSGGKRFKKGGGAFFMVYV

SEQ ID NO: 221546 - protein, 97 aa, Glycine max
  Clone ID: PAT_MRT3847_42085C.1.pep
RKKSLHAGTLITFVFWAINTMAKEGLYATLNGKKKKKIAARAAEFSKLYFSYNNFLLYFLQYFFFYLSISSPIFQTFCTIQMVTVFMPQVKGGCDER

SEQ ID NO: 221547 - protein, 201 aa, Glycine max
  Clone ID: PAT_MRT3847_42086C.1.pep
GITRSTHASANMYTRTALTSAVLCGLAAAAPKGSPSQYSSADGAYAENQQGTLPGYLNADATYLPDTPAAITPLASEFGTASDVAASFTTTVATGTAAAAPQRSSIVTGATSHGPYDGEAPTTTGAVSTNALGTAIPILPPNPTATYYNTDGKLTEPQPIPYTPAGGLGTNGSEPRYMGRVGFRLQVDHSWSLPEWIELDT

SEQ ID NO: 221548 - protein, 50 aa, Glycine max
  Clone ID: PAT_MRT3847_42087C.1.pep
YLVLVRQFIPRSECTVNLPQLSNELIIVHCSHNRVTMLLPGQLIKPSVRT

SEQ ID NO: 221549 - protein, 159 aa, Glycine max
  Clone ID: PAT_MRT3847_42088C.1.pep
LLICELDALHPSLLYSSSPLRLAWPCGSCNLSLFFFFLPSFVFPPLRLFSSKTKPKESCTIFFFSFFLNCPETKKKIERDLSSFFSFLLPYFVFLIILCARISRIYIFLCTRQYHIPQYPPFNETALTNKLQPEPSVSTWSLHVQGRPPFTNLPRIRIR

SEQ ID NO: 221550 - protein, 455 aa, Glycine max
  unsure (1)..(455): unsure at all Xaa locations
  Clone ID: PAT_MRT3847_42089C.1.pep
YCEIAKKGWFSMFKKLFLWDTHSSQEKEKRRAWIFGRVKTKRLPSITAPPPPFXETRLSEVEEEHSKHALTVAIASAAAAEAAITAAQVAVEVVKLQSAAHQQLKEKQEQLQPVKTSHDVPHSTHQCQRKIQESSAIKIQIAFRGYLARKASRALKGIVKLQAIIRGRAVRRQALNTLKCLESIVSIQSQVFARKLQMVEGRWDCGEHEEMQGSRDKIIRMDSNSERTWDDSILLKEEVDASCVSKKEAVLKREKVKEYSFNHRRSAESERNKINGRWRYWMEQWVDTQLSKSKELEDLDSVFSSHYSRPGEECGRRQLKLRNFQRQNQIEALDSPSLSSRNQTSGAEDHSVPSSPAIPTYMAATKSTQAKARSTSSPRARIGGNFDINSDSYSPCKNKLPIVTSINGEVLSNGRIGKLSSNQQRSPSLKGLPRPLKLSQTLRGLSINSDCPVPI

SEQ ID NO: 221551 - protein, 82 aa, Glycine max
  Clone ID: PAT_MRT3847_4208C.1.pep
YIMLRGGKHVIHMGFIEFQRCDDDDGQMVMTSDFEKKKESEFRGRWLLLLLLGVGGDLILFSIFLLSKVSIGVTLDWDWEEK

SEQ ID NO: 221552 - protein, 84 aa, Glycine max
  Clone ID: PAT_MRT3847_42090C.1.pep
YCCVLVRSHRAGQCSQNPLFAIFSPKFLLFFLPLSNGFILGFFFLGGGMTHFKIEIFFFFSPPPRQKTPPAHMLNCFYHINMMH

SEQ ID NO: 221553 - protein, 165 aa, Glycine max
  Clone ID: PAT_MRT3847_42091C.1.pep
LEDLDSFSSHYSRPGEECERSQLKLRNVHRQNQVEAFDSPPLASRNSFPHRSQTSEAEDHSVPSSPAIPTYMAATKSTQAKARSTSSPRARIGGSFDINSDSYSLCKKKLPIVTSINGEVFSNGRMGKLSSNQQRSPSLKGLPSPVKLSQTLRDLSINSDCSVPI

SEQ ID NO: 221554 - protein, 58 aa, Glycine max
  Clone ID: PAT_MRT3847_42092C.1.pep
IDNEEVDKGKKYITLQANSFRNYGYRYNSNSFDLEDEKPSLMVKKFGKFYMKKGLDPL

SEQ ID NO: 221555 - protein, 394 aa, Glycine max
  unsure (1)..(394): unsure at all Xaa locations
  Clone ID: PAT_MRT3847_42093C.1.pep
MRGNIWETKWLTVSITLTLTAVSISAYVLKRKWNHLNSKIEELEASLKSFSDNCASERQGRIRAQQALRKEVTQSQPNSQKLNLTSYPMMPIGVVHSCFSTRNGTPRQPLLVPLARACLVFNTTRVPPASLEGLEEYSHCWILYVFHLNTDLDKLWKHPSKSGFKAKVRVPRLKGGRKGLFATRSPHRPCPIGLTVAKVEAVLGNMILLSGVDLVDGTPXLPCDSIQEAAVPNWLMEDNLLSVAAFLLSSXSVSFSEHFTSALENIWIMVEKKSLYASPGELQSLIKQVLSWDIRSLSQRNRPHDTLLKKENDELLGNTADVDEHQDETTLAHEREQNALNSNEIIYHLILEGLDVSYRIDHDGYVIVEKISTSDVQDNKPNFCNYLTWKDKLQ

SEQ ID NO: 221556 - protein, 306 aa, Glycine max
  Clone ID: PAT_MRT3847_42094C.1.pep
MLGTPHTLILLLFLFLITTFSHSLVFNITNFDDPAAATAISYEGDGRTTNGSIDLNKVSYLFRVGRAIYSKPLHLWDRSSDLAIDFVTRFTFSIEKLNLTEVAYGDGFAFYLAPLGYRIPPNSGGGTFGLFNATTNSNLPENHVVAVEFDTFIGSTDPPTKHVGVDDNSLTSAAFGNFDIDDNLGKKCYTLITYAASTQTLFVSWSFKAKPASTNHNDNSSSFSYQIDLKKILPEWVNIGFSASTGLSTERNTIYSWEFSSSLNGSPADFENVKLKHQSSKLALILAVLCPLVLLFVLASLVAVFL

SEQ ID NO: 221557 - protein, 63 aa, Glycine max
  Clone ID: PAT_MRT3847_42095C.1.pep
KPTWNASRELWQTVQKCLTWHGENPVISVIGHQLTGGFFTYFLAPTIQIKVLLENKRNFCCFY

SEQ ID NO: 221558 - protein, 149 aa, Glycine max
  Clone ID: PAT_MRT3847_42096C.1.pep
TNKKAFRADGANEKEGKPGTREKKNTPRRPKNKRPPDGKRAHPGGQQGNKLPPRESGIKKTARKAGKPPGKEPPGSTQKKSGRAHGRKGRGDTIKPRARKKPGRARGKKAPPKGKKGHPQGPDPKKNPGGKKASRQEPPGNIFFGFSII

SEQ ID NO: 221559 - protein, 56 aa, Glycine max
  Clone ID: PAT_MRT3847_42097C.1.pep
INGTWSLFSVPKMPNICILDLKTKLFSLSCRIWETISNIPNNSSWGIIFYPTEIVN

SEQ ID NO: 221560 - protein, 58 aa, Glycine max
  Clone ID: PAT_MRT3847_42098C.1.pep
VNRFNTNSSSLSIEYICQHSFSCPTYASIFASMTDDLYGAMSMRYDSCYRNVSTCETS

SEQ ID NO: 221561 - protein, 45 aa, Glycine max
  Clone ID: PAT_MRT3847_42099C.1.pep
MFLEFDLVSKQKFDWLKSFNFFILKFLILKFLKFLIFKISLNKYK

SEQ ID NO: 221562 - protein, 52 aa, Glycine max
  Clone ID: PAT_MRT3847_4209C.1.pep
GQAVWLKAGSLIFSEGGLDYLSNPILVLTHSILFFCPSLVIPLAALEGHRLT

SEQ ID NO: 221563 - protein, 96 aa, Glycine max
  Clone ID: PAT_MRT3847_420C.1.pep
KIPKAFFFSGPHSSQGIARGFLPPLLAACVFGPLKGEVCPGPPPSACSPMGVRGGGPPGLIKGGGSSCFGSLVGDVVKGVLAPRILSPGVRLGFLA

SEQ ID NO: 221564 - protein, 100 aa, Glycine max
  Clone ID: PAT_MRT3847_42100C.1.pep
LKVYLRKSKTRPKPEKPQKKKDKTNPPKAPPNPKRPQKTPKSPQRLNHNPQKSTPKTPQDNPPKNPQKPKNTLAKPKEKSPAQKNPTPRIAFQARNSASP

SEQ ID NO: 221565 - protein, 40 aa, Glycine max
  Clone ID: PAT_MRT3847_42101C.1.pep
LLIKCCWSKMKKILISSIWTSLTCFDLFRLQQKKDLFRLQ

SEQ ID NO: 221566 - protein, 141 aa, Glycine max
  Clone ID: PAT_MRT3847_42102C.1.pep
IIETLDGIGCLGIVSTHLHGIFTLPLNKKNTVHKAMGTTSIDGQIMPTWKLTDGVCKESLAFETAKREGIPEHIVRRAEYLYQLVYAKEMLFAENFPNEEKFSTCINVNNLNGTHLHSKRFLSANQMEVREEVERAVTVIC

SEQ ID NO: 221567 - protein, 81 aa, Glycine max
  unsure (1)..(81): unsure at all Xaa locations
  Clone ID: PAT_MRT3847_42103C.1.pep
LFCFVIFCVWSFERRATVKRFPIYAVGHRISVLTILWFFLGGFIPVRTEQSSQHTTPVSCXLWGVISKGVERLSLILESTP

SEQ ID NO: 221568 - protein, 128 aa, Glycine max
  Clone ID: PAT_MRT3847_42104C.1.pep
SKRLHVLSLKLVKESKIYSVDKMAIRFLTWFLFVSCIQAISSSEQTLANANPSNSKTNIVHPVDKYGIITEDKHDLSYGSRTRRGQGAYGGQDVNHRPSHNSATSFLPCISTLSLALASILLLPFYLL

SEQ ID NO: 221569 - protein, 96 aa, Glycine max
  Clone ID: PAT_MRT3847_42105C.1.pep
MAAANAPIAMRETLTLPTIGINPQFITFTHVTMESDKYICVRETAPQNSVVIIDMNMPNQPLRRPITADSALMNPNSRILALKGWLLFRCILLMNL

SEQ ID NO: 221570 - protein, 405 aa, Glycine max
  Clone ID: PAT_MRT3847_42106C.1.pep
MLAIGLLFLFLQYKRKYGTSGGQLESRDSYSDSSSNPHGESSSEYFGVPLFLYEQLKEATNNFDHTKELGDGGFGTVYYGKLPDGREVAVKRLYEHNWKRVEQFINEVKILTRLRHKNLVSLYGCTSRHSRELLLVYEYISNGTVACHLHGGLAKPGSLPWSTRMKIAVETASALAYLHASDIIHRDVKTNNILLDNNFCVKVADFGLSRDVPNDVTHVSTAPQGSPGYLDPEYYNCYQLTSKSDVYSFGVVLIELISSKPAVDMNRSRDEINLSNLAVRKIQESAVSELVDPSLGFDSDCRVMGMIVSVAGLAFQCLQREKDLRPSMYEVLHELRRIESGKDEGKVRDEGDVDGVAVSHSCAHSPPPASPEWEEVGLLKNIKPTSPNTVTDKWESKCTTPNISG

SEQ ID NO: 221571 - protein, 55 aa, Glycine max
  Clone ID: PAT_MRT3847_42107C.1.pep
KGICCLYSTPLASMSMCRTPMLLSMRENELRRRSSSEGKEEGRHTYYRSRKVSRR

SEQ ID NO: 221572 - protein, 59 aa, Glycine max
  Clone ID: PAT_MRT3847_42108C.1.pep
CGLIISFKQFNFQNVLYFQYLVHMCTGLKCINGGDLWCFMIFCENFINIDTSIDWVVKH

SEQ ID NO: 221573 - protein, 99 aa, Glycine max
  Clone ID: PAT_MRT3847_42109C.1.pep
KKPFPGWAHVIKPKNSFFFKKKWRGKKWQVPKLLPPPKKKKKKGFVFAFLKQVFNVKGGKKVQGQNGKFPCDFLLRPPPPFLGFGAQFFLHVLDKKNFF

SEQ ID NO: 221574 - protein, 43 aa, Glycine max
  Clone ID: PAT_MRT3847_4210C.1.pep
RESHQTVRERVRVCVCVVELSIEERKKKERKQKKERKKEERGR

SEQ ID NO: 221575 - protein, 60 aa, Glycine max
  Clone ID: PAT_MRT3847_42110C.1.pep
TSSTNVRVSIHSMFRQSSVHLIFGTLYLHTCFVGEANRVRDDVTKVPISSYTCSNSCIRD

SEQ ID NO: 221576 - protein, 55 aa, Glycine max
  Clone ID: PAT_MRT3847_42111C.1.pep
TIHNSTTQFTKSPYISLVANISNYYTHIINQPKVFLQKINKHPNFLHYKTITFNT

SEQ ID NO: 221577 - protein, 59 aa, Glycine max
  unsure (1)..(59): unsure at all Xaa locations
  Clone ID: PAT_MRT3847_42112C.1.pep
KRHNLHKSVFINCLELALPSNKASTKVQCTILFLNYNAMIQPRTINKKRLLFSXGLYIN

SEQ ID NO: 221578 - protein, 79 aa, Glycine max
  Clone ID: PAT_MRT3847_42113C.1.pep
KERTLHTSFRTFKEGGEFSIWESILSKRGRPNFPFFFKQGCQRKKTQISYHSEGSPFLKDLGVSRGTKKAGLKKSPPIS

SEQ ID NO: 221579 - protein, 97 aa, Glycine max
  unsure (1)..(97): unsure at all Xaa locations
  Clone ID: PAT_MRT3847_42114C.1.pep
RPDPRXREELSPPHARRCQXXEXPSSTASLLRVEEEETSSDLRNSAEESSRAEVPVPACAHXSAGVALSERMLQTSSGSAPAHCAAAVGLGVWVVLL

SEQ ID NO: 221580 - protein, 399 aa, Glycine max
  Clone ID: PAT_MRT3847_42115C.1.pep
WWKEDFWGSPDGGRKICGEAPCGFADAGSISKDSEERSTSMRKLFMAVVLCVIFMTVEVVGGIKANSLAILTDAAHLPSDVASFAISLFSLWAAGWEATPRQSYGFFRIEILGALVSIQMIWLLAGILVYEAIDRIIAGPKNVDGFLMFLVSAFGLVVNIIMALLLGHDHGHRHAGHSHGHGHDGHGHSHGFTMSTHCDAKHTKDQHHHTHHHDENHPKDAHHHTEEDHLHHHAHKDVTEPLLGESKGGTKKKKQWNINVQGAYLHVLGDSIQSIGVMIGGAVIWYNPRWQIVDLICTLIFSIIVLGTTINMLRNILEVLMESTPREIDATKLERGLLDMEDVVAVHELHIWAITVGKVLLACHVKIRREADADVVLDKVIDYIKRVYNISHVTIQIER

SEQ ID NO: 221581 - protein, 356 aa, Glycine max
  Clone ID: PAT_MRT3847_42116C.1.pep
MLHMEAQSSQHTQVIEISGDFPDGGRKICAEAPCGFADAGSISKDSEERSTSMRKLFMAVVLCVIFMTVEVVGGIKANSLAILTDAAHLLSDVAAFAISLFSLWAAGWEATPRQSYGFFRIEILGALVSIQMIWLLAGILVYEAIDRIIAGPKSVDGFLMFLVAAFGLVVNIIMALLLGHDHGHGHDGHGHGHGHGHGHGHDGHGHSHGFTVSTHCDAKHTKDEHHHTHDDHAHHHDENLSKDAHHHTEEDHLHHHAHKDVTEPLLGESKGGTKKKKQWNINVQGAYLHVLGDSIQSIGVMIGGAVIWYNPRWQIVDLICTLIFSIIVLGTTINMLRNILEVLMESTPREIDATKL

SEQ ID NO: 221582 - protein, 67 aa, Glycine max
  Clone ID: PAT_MRT3847_42117C.1.pep
RVGTSSLIDILYASKTPSAVDPKLALARLTRTTSGRSKNLITPFIHTESAITRQLQRRYQISQYYNY

SEQ ID NO: 221583 - protein, 104 aa, Glycine max
  unsure (1)..(104): unsure at all Xaa locations
  Clone ID: PAT_MRT3847_42118C.1.pep
KTLGLRCKCLHSIIFSGDNRLTAKTFFTCRDLDILVVYYTIAAQFRKLLPQYIMWLLYTXMIDILPYILTAEMKYKRNLSHNHISGLSYDRRFXLWTKHDKTLA

SEQ ID NO: 221584 - protein, 117 aa, Glycine max
  Clone ID: PAT_MRT3847_42119C.1.pep
MGPRPARCYRQINNTPYHKSRFCRGAPDPKIRIHHVGMKNKGVAEFAFCVHLPRWEKENVSSEALEAARIACNTYMVKFDGQDRFHSTVRVHPFHVLRINNMLSRAGTDSLQTAMRG

SEQ ID NO: 221585 - protein, 492 aa, Glycine max
  Clone ID: PAT_MRT3847_4211C.1.pep
HASKASGGARGSGWFTEFGGPIHQRPVEDLSFAVARFIQKGGSYVNYYMYHGGTNFGRSAGGPFITTSYDYDAPIDEYGLIRQPKYSHLKELHKAIKRCEHALVSLDPTVLSLGTLLQAHVFSSGTGTCAAFLANYNAQSAATVTFNNRHYDLPPWSISILPDCKIDVFNTAKVRVQPSQVKMLPVKPKLFSWESYDEDLSSLAESSRITAPGLLEQLNVTRDTSDYLWYITSVDISSSESFLRGGQKPSINVQSAGHAVHVFVNGQFSGSAFGTREQRSCTYNGPVDLRAGANKIALLSVTVGLQNVGRHYETWEAGITGPVLLHGLDQGQKDLTWNKWSYKVGLRGEAMNLVSPNGVSSVDWVQESQATQSRSQLKWYKAYFDAPGGKEPLALDLESMGKGQVWINGQSIGRYWMAYAKGDCNSCTYSGTFRPVKCQLGCGQPTQRWYHVPRSWLKPTKNLIVVFEELGGNPWKISLVKRVAHTPAVHGQ

SEQ ID NO: 221586 - protein, 34 aa, Glycine max
  Clone ID: PAT_MRT3847_42120C.1.pep
INRAQQNLGALINNRNCATFMLHLAWHDTGTYYA

SEQ ID NO: 221587 - protein, 138 aa, Glycine max
  Clone ID: PAT_MRT3847_42121C.1.pep
VIITLINMLTSSLPSSDTLVPLPLRFHHRSCSAIQIFNTTIPLILSRKAFIFGLHRSGNCDGRNIAAGINLALLGWFPLHHAVAAAVAAAVVIFLRISAAELDELLRGFDLRLGKRNWVLGGLDLACRERCGHGLWNR

SEQ ID NO: 221588 - protein, 61 aa, Glycine max
  unsure (1)..(61): unsure at all Xaa locations
  Clone ID: PAT_MRT3847_42122C.1.pep
VIIIVIGNDFSKLYVLLISDGRMEKFYWVLIRDDCIGVCTAIFGMHSISEXDVXKIVDIFS

SEQ ID NO: 221589 - protein, 101 aa, Glycine max
  Clone ID: PAT_MRT3847_42123C.1.pep
MKKVVLKVDLNNDRIKKKAMKTASGLSGVESISVDVKDMKLVLLGEIDPVSAVSKLRKWCHTELISFGPAKEEKEKDPAIPLYEAYPLYYHMTPTLYGSNY

SEQ ID NO: 221590 - protein, 111 aa, Glycine max
  Clone ID: PAT_MRT3847_42124C.1.pep
QKVVLKLDLHGEKVVLKVDLNNDRIKKKAMKTASGLSGVESISVDVKDMKLVLLGEIDPVSAVSKLRKWCHTELISFGPAKEEKEKDPAIPLYEAYPLYYHMTPTLYGSNY

SEQ ID NO: 221591 - protein, 34 aa, Glycine max
  Clone ID: PAT_MRT3847_42125C.1.pep
SSGLNMALGSQTSDVKKALQDLNALLYQDICPLD

SEQ ID NO: 221592 - protein, 71 aa, Glycine max
  Clone ID: PAT_MRT3847_42126C.1.pep
GHVLMSLLSSVNKSHHYIKFFTEIELAAQRDWWNVFVPLISQICICPCISTSQICPCILRCIWKLVRKNAT

SEQ ID NO: 221593 - protein, 91 aa, Glycine max
  unsure (1)..(91): unsure at all Xaa locations
  Clone ID: PAT_MRT3847_42127C.1.pep
LXFFFFGPLFSWVFFNFFWGFLFFFKKQVTRLGTWPIKLKNQPRCFLKETTGAPAINFIGEKTSDWMKKFIGEDKPHWAMNLQERANNLFS

SEQ ID NO: 221594 - protein, 44 aa, Glycine max
  Clone ID: PAT_MRT3847_42128C.1.pep
NTINPWLFFAHYKVGSLTLVNGECPVKSAVTAFFHLKKKKKPPP

SEQ ID NO: 221595 - protein, 39 aa, Glycine max
  Clone ID: PAT_MRT3847_42129C.1.pep
SILFKKYKPKFQSQIYFIFLLTRIYTTIINKHLIKSNSQ

SEQ ID NO: 221596 - protein, 82 aa, Glycine max
  unsure (1)..(82): unsure at all Xaa locations
  Clone ID: PAT_MRT3847_4212C.1.pep
QLNXXLYDQVTSQCLXXTLXPLPWRQAXPXKQEAALLNANPHXXIXLQSSXFFANNHPILXXVPPNITXTTPPQPARDLPRQ

SEQ ID NO: 221597 - protein, 130 aa, Glycine max
  Clone ID: PAT_MRT3847_42130C.1.pep
IKMVAAGAEHSVAITKDGNLYGWGWGRYGNLGLGDRNDRLLPEKVTVDGDKMAMVACGWRHTICVSSSGGLYTNGWGKYGQLGHGDFEDHLVPRKVQALSDKFISQVSSGWRHSMALTSSGQLLGWGWNK

SEQ ID NO: 221598 - protein, 37 aa, Glycine max
  unsure (1)..(37): unsure at all Xaa locations
  Clone ID: PAT_MRT3847_42131C.1.pep
LKIHGISIIKLKVVVFHFRCLXAQTYITPIKSFQKVE

SEQ ID NO: 221599 - protein, 62 aa, Glycine max
  Clone ID: PAT_MRT3847_42132C.1.pep
MAAKTSLCSTTTNLVTLNAAWVLPYRTQNIREVYEVARKLRQGQLGTTLECTHRASGGQFAC

SEQ ID NO: 221600 - protein, 129 aa, Glycine max
  Clone ID: PAT_MRT3847_42133C.1.pep
VWLFKSTCYGDGFSRGLCRLTDLGCLGALAPCNVSTLAGWVAFLRVLSLFGSGLRTESLFRLSRSGYGGLETAIGSPWRLHFGALLFCLPFLVAPPAVLCAQIWMEQTSHLNNEQTTGQNRKKYNSNQL

SEQ ID NO: 221601 - protein, 55 aa, Glycine max
  Clone ID: PAT_MRT3847_42134C.1.pep
SQRKRYCEKKLGRPKNIKNSTPPVGFSCKKITVFYIKCLSWDGIDPKQKKFLVYV

SEQ ID NO: 221602 - protein, 514 aa, Glycine max
  unsure (1)..(514): unsure at all Xaa locations
  Clone ID: PAT_MRT3847_42135C.1.pep
NSARDKISEERLKLALDAESKIIQLKTTMQRLDEIFSDMETENQVLLKQSLLNSSSKTTSEHLSTHISEKLENGHHVLEDQNNAEAQSVTPVKKFGTESDGKLRRSFIERQHENVDALVNCVMKNIGFHHGKPVAAFTIYKCLLHWKSFEAERTSVFDRLIQMIGSAIENQDDNDLMAYWLSNLSALLFLLQQSLKSGGAADATPVKKPPNPTSLFGRMTMGFRSSPSSANLPTPSLDIVRKVEAKYPALLFKQQLTAYVEKIYGILRDNLKKELASMLSLCIQAPRTSKGVLRSGRSFGKDSPMGHWQSIIESLNTLLCTLKENFVPPVLIQKIFTQTFSYIXNVQLFNSLLLRRDCCTFSNGEYVKAGLAELELWCCQAKEEYAGSSWDELKHIRQAVGFLVIHQKYRISYDEIINDLCPIMSVQQLYRICTLYWDANYNTRSVSPDVLSSMRVLMAEDSNNAQSDSFLLDDSSSIPFSVDDFSTSLQEKDFSDMKPADELLENPAFRFLNE

SEQ ID NO: 221603 - protein, 400 aa, Glycine max
  Clone ID: PAT_MRT3847_42136C.1.pep
NDQRTNIESNIVVGVIDSGIWPNSYSFTDGGFGPPPRQLSCYNFTCNNKIIGAKYFRIGGGFEKEDIINPTDTSGHGSHCASTAAGNPVRSASLYGLGLGTARGGVPLARIAVYKVCWTKGCHDADILAAFDEAIRDGVDIISISVGPTIVLHLHYFEEVYAIGAFHAMKQGILTSKTADNLGPKPYTMSNYAPWYLSVAASTIDRKFFTNLQLGNGQTFQGISVNTFDPQYRGYPLIYGGDAPNIAGGYNSSISRYCPENSLDVALVKGKIVLCEDRPFPTFVGFVSGAAGVIISSTIPLVDAKVFALPAIHISQNDGRTVYSYLKSTRNPTATIFKSYEGKDSFAPYIAPFSSRGPNVITPDILKPDIAAPGVDILAAWSPISSISGVNGDVRVSNYN

SEQ ID NO: 221604 - protein, 65 aa, Glycine max
  Clone ID: PAT_MRT3847_42137C.1.pep
FTRGVFYIYQESSAWFTHHQNLHNKHKYSPQQSLLIIKYYHLPHKISISTNYDYKYYVIKLTLLQ

SEQ ID NO: 221605 - protein, 63 aa, Glycine max
  Clone ID: PAT_MRT3847_42138C.1.pep
KFLEPRGKSPVPGSGFGQKKGGFHFRPIIFPAKENNPDIMESFKKFNHEFWGQLEDDKGFSRL

SEQ ID NO: 221606 - protein, 68 aa, Glycine max
  Clone ID: PAT_MRT3847_42139C.1.pep
VYGHVQCSAQGLGDLCDLTRWEITVHVDNPFPFTCQRALNQKGCDSSSSSSSSCSLQTSRIHSTRSNY

SEQ ID NO: 221607 - protein, 46 aa, Glycine max
  Clone ID: PAT_MRT3847_4213C.1.pep
GALLGNHIVHSSSADFVYNSAKQINGIDMDHKWCHIKVSVNASKHN

SEQ ID NO: 221608 - protein, 144 aa, Glycine max
  unsure (1)..(144): unsure at all Xaa locations
  Clone ID: PAT_MRT3847_42140C.1.pep
PLIRPRVRPHVGVLTKQHGGLTNKHFLNKFSPNTLWQPYLNAYKYVGETDTLDCTLHGYTSAAITSTLFHQMIKGAATIVTHTFIYPVTINYPFEKGPLSTPFLSEHSLLRYPYGQEPCIACKLCXAICSAHAITIETETLPDS

SEQ ID NO: 221609 - protein, 40 aa, Glycine max
  Clone ID: PAT_MRT3847_42141C.1.pep
ILSRTSPACVWCVLRYSTHNCASFAPSAINFKCYAIIRSW

SEQ ID NO: 221610 - protein, 262 aa, Glycine max
  unsure (1)..(262): unsure at all Xaa locations
  Clone ID: PAT_MRT3847_42142C.1.pep
GRAGSPKIVSSKDYCVTANSKLVIITAGARQQEGESRLNLVQRNVNIFKFIIPNIVKYSPHCKLLIVSNPVDILTYVAWKISGFPKNRVIGSGCNLDSARFRYLMGERLGVHALSCHGWVLGEHGDSSVPVWSGVNVAGVSLKSLNPELGTDADKEQWKEVXKQVVDSAYEVIKLKGYTSWAIGLSVADLAESIMKNLXVHPIFTMIKGLYGINEDVFLSVPCILGQNGISDVVKVTLTPEEEARLKKSADTLWGIQKELQF

SEQ ID NO: 221611 - protein, 51 aa, Glycine max
  Clone ID: PAT_MRT3847_42143C.1.pep
CYIIFEKRYTCTRKYFSETWNAEKVNKFCLILTQCTTNIASCNQRAIVAKY

SEQ ID NO: 221612 - protein, 146 aa, Glycine max
  unsure (1)..(146): unsure at all Xaa locations
  Clone ID: PAT_MRT3847_42144C.1.pep
GTSLFSFGDSLTDTGNLYFIYPRQSPDCLLPPYGXHTHFHRPNGRCSDGRLILDFLAESLGLLYLKPYLGFKNGAVTRWNIEQGVNFAVARAMALDRGFFEEKGLIVDVTXKLFSLRVQLDCFKELLPSLCNSSSSKVIFSFLLFH

SEQ ID NO: 221613 - protein, 83 aa, Glycine max
  Clone ID: PAT_MRT3847_42145C.1.pep
SIHRFTSITHTAAQHYDFGTKIEFPPRRHMPYHINGTKTLNSLRINNGLQSSRQTRPMMGDTTAFSVFPHEVCQTGGWEPQQA

SEQ ID NO: 221614 - protein, 285 aa, Glycine max
  unsure (1)..(285): unsure at all Xaa locations
  Clone ID: PAT_MRT3847_42146C.1.pep
VAVKQLSXKSRQGNGEFLNEIGMISCLQHPNLVKLHGFCIEGDQLILVYEYMENNSLAHALFSSKDQLKLDWATRLRICIGIAKGLAFLHEESRLKIFHRDIKATNVLLDGNLNPKISDFGLARLDEEKTHVTTRIAGTIGYMAPEYALWGYLSYKADVYSYGVVVFEVVSGKNYKNFMPSDNCVCLLDKAFHLQRAENLIEMVDERLRSEVNPTEAITLMKVALLCTSVSPSHRPTMSEVVNMLEGRISIPNAIQQPTDFSEDLRFKAMRDIHQQRENHSLSTS

SEQ ID NO: 221615 - protein, 194 aa, Glycine max
  unsure (1)..(194): unsure at all Xaa locations
  Clone ID: PAT_MRT3847_42147C.1.pep
VGGKQKFPPSKKKGGENEIPSQTRFFSKTGPPKKTPGGGPPYRTPKSWGGRPKKPTPPGPVSRGPPTNQKGPLKRPGPKRPPRGGPPPPPGGGGAPPAXPPPRKKKGRGGPMGNPPPPFLKSPPGDPPPLPRGGRQNKNLGQTTPRAPGGPLGGVPPIALNPGVKKKAKPASHPCPETSCGEGLSKNWWARGGP

SEQ ID NO: 221616 - protein, 94 aa, Glycine max
  Clone ID: PAT_MRT3847_42148C.1.pep
FEASRTFSEASPSSTLFSLSTTVSLSFSFFFCCLEATLAFFAFLFSSDAGGATSAARAAAARVTLIGAAAAAAPSALRSPVAFLEMRNGKERKL

SEQ ID NO: 221617 - protein, 40 aa, Glycine max
  Clone ID: PAT_MRT3847_42149C.1.pep
LKNHSTIVVRDILSCEPGLVALRSTGVILCPCLALCLLWG

SEQ ID NO: 221618 - protein, 302 aa, Glycine max
  Clone ID: PAT_MRT3847_4214C.1.pep
MSSSGTIWSYEEEKAFENAIAMHWIEESSKEQWEKIASAVPSKSMEDVKQHYQVLVEDVSAIEAGHISFPNYAASEEITSSNKDFHGSSKATSSDKRSNCNYGRGFSGLGHDSTTHSSGKGGLSRSSEQERRKGIPWTEEEHRLFLLGLEKFGKGDWRSISRNFVISRTPTQVASHAQKYFIRLNSMNRDRRRSSIHDITSVNNGDVANNQAPITGQHSSTIPSNTMGVGQSLKHRVQGHIPPGLGMYGTPVGHPVAAPPGHMASAVGTPVMLPPGPHPHAHPHPPYVLPLAYPMAPPTMHQ

SEQ ID NO: 221619 - protein, 112 aa, Glycine max
  Clone ID: PAT_MRT3847_42150C.1.pep
SYRPTRMIHGPPRTGLYTLPSRSRTQTRSLASLLGNQPPTMAYVQKKLCQNLITKRTFLRTITWFCLPTLNLKTGGRTWRGNFFLAGSHANGGEGNQNFMRGPRPKMHILFY

SEQ ID NO: 221620 - protein, 210 aa, Glycine max
  unsure (1)..(210): unsure at all Xaa locations
  Clone ID: PAT_MRT3847_42151C.1.pep
MAAQTIAETAQKILTPETLRYAAKQSARCLVVPVRLRRAIKKYLREQEEPYMKRKVLRLSQTFNQIKDVNLQLASTTAKKIVEDPFEQSKRWKITSSYGDIGLIYRDEETNAYVASRMPAVYSACYRVLKEVRRRLPGFSPSKVLDFGAGTGSAFWSLQDDLXTSLIKVNLIVISLXWQRAVRSLMQGLKNLPLIHSYDSIQSXSKSITK

SEQ ID NO: 221621 - protein, 117 aa, Glycine max
  Clone ID: PAT_MRT3847_42152C.1.pep
MASMKVTWVVVIMCMAVVGAPMMAQAMTCNDVTVNMAQCLSYLMQGGTPSTLCCSGVKNILGSAVTTVDKQTVCNCLKADAARYNINDQYAQALPGFCKVNVPYKISRSTNCASIRF

SEQ ID NO: 221622 - protein, 174 aa, Glycine max
  Clone ID: PAT_MRT3847_42153C.1.pep
MVTIMRVAAQTQTQLQLKKHMIEGFGSKYMELKWVRRRTSKSSQLEKTKKLSSKPPFPIYISTDPRHVDPHRLRDLFADCNHSTHRFPTRPEPVDIRKLRTALSHSAVLVSVFYNPQHVNAVFHQNSSSSSIADIFMPVSPSRDQLVGFGRAVSDYGLTASIYDVMVMKKERKK

SEQ ID NO: 221623 - protein, 132 aa, Glycine max
  Clone ID: PAT_MRT3847_42154C.1.pep
TCWLFALFLPIIEAKLNQFRTILQIESTTPDKFSPRIVERKDDYIRVEYQSSILGFVDDVEFWEAYIRVEYQSSILGFVDDVEFWFPPGKGSTVEYRSASRLGNFDFDVYRKRIKALRQELEKKGWTSQDTI

SEQ ID NO: 221624 - protein, 110 aa, Glycine max
  unsure (1)..(110): unsure at all Xaa locations
  Clone ID: PAT_MRT3847_42155C.1.pep
TKVLDHPATACFGTHCSWNSTLVCEFNAVPFLCWPYYADQLIDKAYICNMRKVGVGFDXDDTRLISPCETKHKVDHVLGDENMKRMSEKLNEMVLNYIAEGGQSYANFNK

SEQ ID NO: 221625 - protein, 80 aa, Glycine max
  Clone ID: PAT_MRT3847_42156C.1.pep
VFDRTGDMMKRSSIYKSTKKALQTVHTKSPSISTPTPMMESLKVVHKLEALIIVKEVCMNKVFKYIGFVTPPPVNGFPLA

SEQ ID NO: 221626 - protein, 40 aa, Glycine max
  unsure (1)..(40): unsure at all Xaa locations
  Clone ID: PAT_MRT3847_42157C.1.pep
FPLSLLNAEVAAMPXHSDLQIHVNDEXSIPFGXEVHIXIL

SEQ ID NO: 221627 - protein, 90 aa, Glycine max
  Clone ID: PAT_MRT3847_42158C.1.pep
MNVEEERERERPRRNWESKSDILLCEMPYKSRKEWGFGSAVLGHSLNEDFAFSHSEREKKQRGKTPQIENRTKQQHEVYITSKWILKLST

SEQ ID NO: 221628 - protein, 53 aa, Glycine max
  unsure (1)..(53): unsure at all Xaa locations
  Clone ID: PAT_MRT3847_42159C.1.pep
GVXVTRPDYTVVSSSNKWYGLQFXKHNNLMVHNSSSGCVLCPLDLSHSLGITG

SEQ ID NO: 221629 - protein, 113 aa, Glycine max
  Clone ID: PAT_MRT3847_4215C.1.pep
KSKKEVEAFFFDESLTNGPFPLLGNKIENPYAASKEELRFQMGPPNFPPGKGKVNLVDPNVCPLEVFMSRIVPKMGYGEGFQWLSQALKKKTRVCSLLSPRKSSLPPRGSLLM

SEQ ID NO: 221630 - protein, 46 aa, Glycine max
  unsure (1)..(46): unsure at all Xaa locations
  Clone ID: PAT_MRT3847_42160C.1.pep
QCVGIVPAQPLSYXGTDDTLRMWDCVPDFDLPACVCHALLPLILHL

SEQ ID NO: 221631 - protein, 75 aa, Glycine max
  Clone ID: PAT_MRT3847_42161C.1.pep
LWAWILYVRCMRLQMQLKITYNHLLRNRLRIHLFRSPHRLCCYLWLYSNRLLRRLYVNLLLQRRSLRALVLLFRR

SEQ ID NO: 221632 - protein, 77 aa, Glycine max
  Clone ID: PAT_MRT3847_42162C.1.pep
GVVHVSSAFEFGAVFHDCLREGPQGNPPFSCFSGATWMNCVVIHVSSTFEFGAVFHDCLREDPQGNPPFSLFPEPHG

SEQ ID NO: 221633 - protein, 69 aa, Glycine max
  Clone ID: PAT_MRT3847_42163C.1.pep
TKCFICPFWRLLETVPFCGFFEAVPFCGFFKTIPFCGFLETIPFCGFFENVPFCRFFKTIPFCCFFATV

SEQ ID NO: 221634 - protein, 166 aa, Glycine max
  Clone ID: PAT_MRT3847_42164C.1.pep
MGAKHLTRTKEWSHVIKQRSPDEIRVTIKSPHANDLLFQNFTNCLMMGAKHLTRTKEWSHVIKQRMTKLGLCLSSGPPPLDDKRVRITVRMTKLGLCLSSGPPPLDDKRVRITVRMTKLGLCLSSGPPPLDDKRGQYDKDYGAADKSKALAPTYPPMRNSDLRSSG

SEQ ID NO: 221635 - protein, 133 aa, Glycine max
  Clone ID: PAT_MRT3847_42165C.1.pep
KFVMKPPQVVRVGTKKTSFVNFTDICKLLHRQPKHLLAFLLAELGTSGSIDGNNQLVIKGRFQQKQIENVLRRYIKEYVTCHTCRSPDTILQKDTRLYFLQCETCHSRCSVASIKTGFQAVTGKRAQLRAKAN

SEQ ID NO: 221636 - protein, 184 aa, Glycine max
  Clone ID: PAT_MRT3847_42166C.1.pep
PNLAVYNRLVDGLVKVGKIDEAKGFFELMVKKLKMDVASYQFMMKVLSDEGRLDEMLKIVDTLLDDNGVDFDEEFQEFVKGELRKEGREEELTKLMEEKERLKAEAKAKEIEAAEAAKRSARAAVASLLPSKLFGNKETDLESKREGEIQALNEENTNATASEAELVEETTETEGDRASEQLTG

SEQ ID NO: 221637 - protein, 99 aa, Glycine max
  unsure (1)..(99): unsure at all Xaa locations
  Clone ID: PAT_MRT3847_42167C.1.pep
GSSLRVGVESQRHEVVCGIIECLRQYTWDNRAETWTKSSRVEAKNVLSTVISPKEDNNRFRKLVFAXFLSAPDQVCSQESSKPRNLCCSGEDTPSQQKP

SEQ ID NO: 221638 - protein, 62 aa, Glycine max
  unsure (1)..(62): unsure at all Xaa locations
  Clone ID: PAT_MRT3847_42168C.1.pep
IRLEKNFRPALGKGKKIVFLXTRVDPFPVAKQAVLFGVKIEILSSTATNPMLQRLLENCKSH

SEQ ID NO: 221639 - protein, 37 aa, Glycine max
  Clone ID: PAT_MRT3847_42169C.1.pep
FGFKKNLHVISASTITLHPHISKQPAKPKTIRIHHEA

SEQ ID NO: 221640 - protein, 82 aa, Glycine max
  Clone ID: PAT_MRT3847_4216C.1.pep
SPPLVGVSGRGVTGMVGTASATGRQPHRPLLMSRSNVESLSLVEEDDNTDHSRARGAQQKVQVNPQHQSTLSVPITLARTGK

SEQ ID NO: 221641 - protein, 104 aa, Glycine max
  Clone ID: PAT_MRT3847_42170C.1.pep
MGRKLVRCYMQINNTPYSKSRLCRCVSYPKITIYYNIMKKNGADEFTFWVHLNSWQNENDGIEALDADLIPCLMFKDKFAGKYALHLRLKVHPLDDIRINKMLL

SEQ ID NO: 221642 - protein, 38 aa, Glycine max
  Clone ID: PAT_MRT3847_42171C.1.pep
MQIYDIPLQQQRKWTKTLWLLVNLKISDFYHQNKIQYS

SEQ ID NO: 221643 - protein, 479 aa, Glycine max
  unsure (1)..(479): unsure at all Xaa locations
  Clone ID: PAT_MRT3847_42172C.1.pep
ATPGLMIDHLRNAMSVDLDDLAVLILDEADRLLELGFSAEIQELVRLCPKKRQTMLFSATMTEEVDELVKLSLSKPLRLSADPSTKRPATLTEEVVRIRRMREVNQEAVLLAMCSKTFTSKVIIFSGTKQAAHRLKIIFGLAGLKAAELHGNLTQAQRLEALEQFRKQQVDFLVATDVAARGLDIIGVQTVINPATLTEEVVRIRRMAXVNQEAVLLAMCSKTFTSKVXLLKAIAKRAGSKLKSLIVAEQSIHKWSHISEQMPAQISFGTVQEAAKRFLRKDEMEATKAENMIAHREEIFSRPKRTWFVTEKEKKLASKASKASMDNXVTDSXPITFKSQAENRRFKAEKPYWREKHLPXKQRYKLEAAREMLEDEEEDGKQVEAKGGNKKDKGGMSLVDLAYRRAKAVKAVKKALDSGKIVEKNKKKSNNNSRKTPSRTEEMRELFQTDMKDKKPKRGVGGGKKSKSSFKSKSRYKRK

SEQ ID NO: 221644 - protein, 339 aa, Glycine max
  unsure (1)..(339): unsure at all Xaa locations
  Clone ID: PAT_MRT3847_42173C.1.pep
GSSLKAAELHGNLTQAQRLEALEQFRKQQVDFLVATDVAARGLDIIGVQTVINFACPRDLTSYVHRVGRTARAGREGYAVTFVTDNDRSLLKAIAKRAGSKLKSRIVAEQSIHKWSHIIEQMEDQISEVLHEEREERVLRKAEMEATKAENMIAHREEIFSRPKRTWFVTEKEKKLAAKASKASMDKCKSSGKEVISAEQAEDLRMKEKRKREREKHLPRKKRRKLEAAREMLEEEEDDKQVETKGGNKKEKGGMSLVDLXYRRAKAVKAVKKALDSGKIVEKNKKKSNNNSRKTSSRTEEMRELFQTDMKDKKSKRRGVGGGKKSKSSFKSKSRYKRK

SEQ ID NO: 221645 - protein, 102 aa, Glycine max [sequence omitted]

SEQ ID NO: 221646 - protein, 264 aa, Glycine max
  Clone ID: PAT_MRT3847_42175C.1.pep
APVAYASCPIETINYVSAHDNETLFDIVSLKTPMDISVSERCRINHLATSIIALSQGIPFFHSGDEILRSKSLDRDSYNSGDWFNRLDFTYNSNNWGVGLPPQEKNEKNWPLIKPRLANPSFRPQKTDILATVDNFLNLLCIRYSSPLFRLKTANTIQERVRFHNTGPSWVCGVIVMSIEDGHNGFPGLSQLDPIYSFIVVVFNASPKEVSFVSPALQLRNLQLHPIQVSSSDDLVKSSRYEASSGCFVVPRRTTAVFVEPRKT

SEQ ID NO: 221647 - protein, 46 aa, Glycine max
  Clone ID: PAT_MRT3847_42176C.1.pep
LLAIARSTSTPSLSLCFSSYFQNNTRSRDNALPSMARPHRSSPILS

SEQ ID NO: 221648 - protein, 114 aa, Glycine max
  unsure (1)..(114): unsure at all Xaa locations
  Clone ID: PAT_MRT3847_42177C.1.pep
MVLSASPCSLARSSLEEMLDSLRRRDEEEERKKDSPPALPARPASRARLPXRRRSLANNFKVSGSELAVAPEHGAGTNGENDLQKRRRNGFGSKRVNKDVESPYVGLSSVIHLG

SEQ ID NO: 221649 - protein, 63 aa, Glycine max
  Clone ID: PAT_MRT3847_42178C.1.pep
INQLSVMYVVRNNLLFFYFCTSSVAVICSAFLGCIYLFVSYCKTSSTCLHKTSLYKYLGMDNH

SEQ ID NO: 221650 - protein, 79 aa, Glycine max
  Clone ID: PAT_MRT3847_42179C.1.pep
MLVSAQRVLKWLTIFAPPLLVSSMTFLPLFLLLLLVVSSNFETRPSFFQPSPSTTLHYKTLLHVFLHEPIPEHLPPHAN

SEQ ID NO: 221651 - protein, 63 aa, Glycine max
  Clone ID: PAT_MRT3847_4217C.1.pep
EDKKTMGCKICESAGAPKARKHVCTASGLSKKHLQLLNPWSSNFLIRQGTRKYSLFPGVGLPP

SEQ ID NO: 221652 - protein, 59 aa, Glycine max
  Clone ID: PAT_MRT3847_42180C.1.pep
NNIPLQRCHGVLKVEIRIKERSPVKKKKLFTPQLLSHSGNLGCVLLKKDHYISPNIKDG

SEQ ID NO: 221653 - protein, 51 aa, Glycine max
  Clone ID: PAT_MRT3847_42181C.1.pep
QSVVRVAGGPLKGKEGRKEEWTVKMPLGRVLGVPRVGGGFGMGNSFLNIYW

SEQ ID NO: 221654 - protein, 154 aa, Glycine max
  unsure (1)..(154): unsure at all Xaa locations
  Clone ID: PAT_MRT3847_42182C.1.pep
MDDPKGSSSWLKILNISDIFGWKDHGEYGALAAIVISILVPVLFSALFFGXKKGKIRGVPVEVGGEECFAVRNARKTELVEVPWKGAPTMAHLFEQSCNKYTCNRFLGTRKLIQKEXVTFSDGRKFEKLHLGDYEWETYGXVXARVSNXASGLL

SEQ ID NO: 221655 - protein, 95 aa, Glycine max
  Clone ID: PAT_MRT3847_42183C.1.pep
MNTKPVFFLCFLCALLLISVVATEPSKDETQAEEPKTQPDAWGRGGSGGHDGSWGHGGDWGHGGGGHGGGHGGGGHGGGHGGGCRCCGRKGCKCC

SEQ ID NO: 221656 - protein, 44 aa, Glycine max
  Clone ID: PAT_MRT3847_42184C.1.pep
LNVSEYRIPGRMIKMESRSQEGPDDDSGERNESKPIWERARRVG

SEQ ID NO: 221657 - protein, 59 aa, Glycine max
  Clone ID: PAT_MRT3847_42185C.1.pep
DRATPNKHPFNPITSASHLPTSHSLFKIPMRWPSIPSTSYTKSHTNTHTPNPKKLGSSL

SEQ ID NO: 221658 - protein, 80 aa, Glycine max
  unsure (1)..(80): unsure at all Xaa locations
  Clone ID: PAT_MRT3847_42186C.1.pep
QAYSRHTGFSRRSAXXAVPXGNIXRTVIRVSPGIYRXPVYVXNTNNFIXXAALXPGDXXLXWNXTATGFGHHXXXXXXGM

SEQ ID NO: 221659 - protein, 142 aa, Glycine max
  Clone ID: PAT_MRT3847_42187C.1.pep
CVKLHAWLMENRSTYDSPSTDIDSMLLFLNSTYYTYYMEYTRNVCLQFMFVFFYFSNICSPFDRSICILRHVHRHVPSLHHVPSLHRVPRFHHVPHFHHVLHFHHFSRHLAVSLSPCLSFFLNLKTQTTLLSTIEFRFVSSI

SEQ ID NO: 221660 - protein, 61 aa, Glycine max
  Clone ID: PAT_MRT3847_42188C.1.pep
LGRQRIERSRRGVSWAVDLAALLAMFSYVLLKMCMAHAHRKVYRGFTRKCMDYIKKLYVDG

SEQ ID NO: 221661 - protein, 113 aa, Glycine max
  unsure (1)..(113): unsure at all Xaa locations
  Clone ID: PAT_MRT3847_42189C.1.pep
CGALASPGNPCSHLFTPPESSADFSTVEYLLQVPAAPPCCSWAKRGCATLPRSSAERGXGLGSARVCGSFRSLPHPGPSMPTQPTSAAWLVLAVEFFRDLPRLFVKKGQTASV

SEQ ID NO: 221662 - protein, 109 aa, Glycine max
  Clone ID: PAT_MRT3847_4218C.1.pep
VISITLRARPWADRSLVPTGFGVLQFNYPWLPRTCVYAHTPSTLLFLVLFLPAPPRSHTVPRMGRHSDVRSPTYWLRGLTPLLTLAIWYLCPPPPPKEGGRHTVMTGNL

SEQ ID NO: 221663 - protein, 284 aa, Glycine max
  unsure (1)..(284): unsure at all Xaa locations
  Clone ID: PAT_MRT3847_42190C.1.pep
XSPEVPFAQLLDPNNKNSETFQRFQISHYDFQSYQFHPGSPVGQLISPRSAISVSGTSSPLPDSEFNATFAHILDFQRADPPKLLNLDNKLSSCENQKSNHGSGSLTPDAARSTTQSGFLSNHWVSEIKMSPHPSNNRLNEISINHRVSFELSAQKVLKSLENKPAASAWTNVLPKLKNDAPTTDKEEKSEESALDDKQVVSEAHNDQPLETTLGGDKATTVHEKDQSLTLSSAKEFNFDNADGGDSLAPNIVADWWANEKVAGKEREASKDWSFFPMIQPGVS

SEQ ID NO: 221664 - protein, 122 aa, Glycine max
  Clone ID: PAT_MRT3847_42191C.1.pep
LAAQQPTANKPSSLLLYSLPIVPSPPLSHRRIATPPSSSSPLYILAVAVAVTVASSPGPRRCHRLSHKKGCNPIRFDQDPAASAPLSLLTPIIASISPACTPFAACRRPQKISWLPPNQPSP

SEQ ID NO: 221665 - protein, 64 aa, Glycine max
  Clone ID: PAT_MRT3847_42192C.1.pep
VFQARVIQSSQVLTLLTPLRKEILVWTRYRIVKFSPDPRRKRLPTLDAILFDKASTTSGTSQSS

SEQ ID NO: 221666 - protein, 77 aa, Glycine max
  Clone ID: PAT_MRT3847_42193C.1.pep
TMKYRAFVSGFWILPLFHGEIQARFPFNSKSLIINTKGLWTKTLRFHFTHNLKLTQLYLMAYQVEIMQEISIIASKG

SEQ ID NO: 221667 - protein, 93 aa, Glycine max
  Clone ID: PAT_MRT3847_42194C.1.pep
LHLVHVNIIGVVIDEARSSHLHAATAAEYSEAVIVLLNEKIGDLIDLVLDEVGGLLVLLIVFLLVVVVHATTTHATNANHRHSRMRVLVEPLA

SEQ ID NO: 221668 - protein, 40 aa, Glycine max
  Clone ID: PAT_MRT3847_42195C.1.pep
LLPYTLLINDNMISHDRPVILMSTLLKTFGYLHIQYLPPI

SEQ ID NO: 221669 - protein, 83 aa, Glycine max
  unsure (1)..(83): unsure at all Xaa locations
  Clone ID: PAT_MRT3847_42196C.1.pep
LLMWAPVSGISMALCLSTAGGDWDNAKKYTENGAIVDKQSEARKAARTVDTVADPFXYAAGLTIVVSIKIPAXITLVMAAVFI

SEQ ID NO: 221670 - protein, 72 aa, Glycine max
  Clone ID: PAT_MRT3847_42197C.1.pep
HGTLSHVIGNLAKPSLERILESSYYPVFGSFAFLKVFSFLFPPFFLFCFWLFAIYNFPSNVDTYGENGSEPF

SEQ ID NO: 221671 - protein, 125 aa, Glycine max
  unsure (1)..(125): unsure at all Xaa locations
  Clone ID: PAT_MRT3847_42198C.1.pep
VAQQTPTTKVSKTQETTPVTKAPATEQPAAEIPATEQPPAEAPAPELTTQAPKEETIEAPTETVEKTTTEVAPEEPKEVPVETEEVVAKETEEEXSRRESEEKTEEVXEEAEEPKETTETESAAV

SEQ ID NO: 221672 - protein, 95 aa, Glycine max
  Clone ID: PAT_MRT3847_42199C.1.pep
GGFFPSPKTRGLGKNRAFLGGKFQGPPFHFKGKLLIFAPGGAPYPQNFRTQAERGGPTLLSGPLKTKKGLLSPFNFALSRSPPCLLNPGGGGVKT

SEQ ID NO: 221673 - protein, 69 aa, Glycine max
  Clone ID: PAT_MRT3847_4219C.1.pep
IFFPFKLLLQEREKKKDCQHNRVETCHRKSNAYKKRNYICRLGTMKCYRNMSPTSEVNNNNSTNPVSSK

SEQ ID NO: 221674 - protein, 57 aa, Glycine max
  unsure (1)..(57): unsure at all Xaa locations
  Clone ID: PAT_MRT3847_421C.1.pep
EARAMHLVVFFSVEFFLCTCQEREKGQVKGVECNQISGLIARRVVNWSPYFTXGWGK

SEQ ID NO: 221675 - protein, 81 aa, Glycine max
  Clone ID: PAT_MRT3847_42200C.1.pep
VRRNGLAVVIVFGVYPNFSSCSISVLKICQILYNVEKVYVIATSGSVHLSVYGFMYSSSHVMVHTIPTLHYYDCFMFQASV

SEQ ID NO: 221676 - protein, 107 aa, Glycine max
  unsure (1)..(107): unsure at all Xaa locations
  Clone ID: PAT_MRT3847_42201C.1.pep
SSRVAALGVGFFFFFFFFFFFFFFFXKKGPTKKFIFSSFFQTTTRGGEEHITRGDWFFLRGGESGNRGKNKTGRSRATLLISTEFLHIWNPGKPSLPSRGRGGTGVP

SEQ ID NO: 221677 - protein, 87 aa, Glycine max
  Clone ID: PAT_MRT3847_42202C.1.pep
QSSLGISSSITLCFHVAICWLLVPKFGFGNLGAAFFIGTSYWLNVILLVLYMKFSIECKKTWVPISSELFHGIGEFFHCAIPSAGMI

SEQ ID NO: 221678 - protein, 114 aa, Glycine max
  Clone ID: PAT_MRT3847_42203C.1.pep
MLSIFLNLLVFSLSFQGSNSISPLFRFCFNRENYTDPSPYATNLNQLFDLLHTKVPPTGYGYGSIGQGMDQVNGLALCRGDVNATNCMACVNEATKKLQERCSKKKGAIVWYDY

SEQ ID NO: 221679 - protein, 64 aa, Glycine max
  Clone ID: PAT_MRT3847_42204C.1.pep
YVDGPNKTPSLTREQRLKNCMGIFSLREKRKECGSSLSHCWLVNEANNYSLWLTGLALWRKAKT

SEQ ID NO: 221680 - protein, 33 aa, Glycine max
  Clone ID: PAT_MRT3847_42205C.1.pep
SYIHKAPLKIQTIYSHLALRLTITRLQAINVIS

SEQ ID NO: 221681 - protein, 62 aa, Glycine max
  Clone ID: PAT_MRT3847_42206C.1.pep
RKPPKRKKGLWFYTNIYPIKDTNGGQSTFKMDFLKKKSRVAYIFKRELGEQNPGLRYTEPKI

SEQ ID NO: 221682 - protein, 72 aa, Glycine max
  Clone ID: PAT_MRT3847_42208C.1.pep
PQVSTTAVMDPDVLNMLDDAANVTEREPNMQGVDSDIDSTLGNRDLPLWKDDINVYTCVAHTGPRTLVGSIR

SEQ ID NO: 221683 - protein, 208 aa, Glycine max
  Clone ID: PAT_MRT3847_42209C.1.pep
KFRCLPSDFANNPSRWRRTLKGIKERHGRERKGWMIMIHDLSGSPVAAASVITPFVPSPGSDRVSRSNPGAWLILRTNNGASVSSWKPWGRLEAWRERGPVDGLGYKFELVTENGPANGIPIAEATMNVKKGGQFCIDYKVMRDSGLGSRLKGKGFVMGSTVEGEGKVSKPVVQVGAQHVTCLADAALFIALSAAIDLSMDACKLFFA

SEQ ID NO: 221684 - protein, 53 aa, Glycine max
  Clone ID: PAT_MRT3847_4220C.1.pep
MPENKREVAENMMIGKNDADHQKRVLVFTDDRQEYTQVLRMLDNARSKAMCIH

SEQ ID NO: 221685 - protein, 147 aa, Glycine max
  Clone ID: PAT_MRT3847_42210C.1.pep
MTSSSAAARKNLSKIACNRLQKELVEWQVNPPTGFKHKVTDNLQRYQILLNPHPKYYRFRSSIIPLHSFALFLSGRWVVEVTGAPGTLYANETYQLQVDFPENYPMEAPQVIFLHPAPLHPHIYSNGHICLDILYDSWSPAMTGSSI

SEQ ID NO: 221686 - protein, 253 aa, Glycine max
  Clone ID: PAT_MRT3847_42211C.1.pep
TGSEPTHRKPVPRLHVVVRSEPDPRFVFQFGGEPECSPVVFQIQENNIRQPVFSCKFSADRNSRSRSLPSDFAKNPSRWRRTLKGVRERHGRERKGWMIIIHDLSGSPVAAASMITPFVPSPGSDRVSRSNPGAWLILRPNGACVSSWKPWGRLEAWRERGPVDGLGYKFELVIENGPTNGIPIAEATMNVKKGGQFCIDYKVMRDSGLLGSRLQGKGVVMGSTVEGEGKVSKPGVQVGAQHVTCMADAALFI

SEQ ID NO: 221687 - protein, 187 aa, Glycine max
  Clone ID: PAT_MRT3847_42212C.1.pep
MASAIAASFLVLLLAFPTVFGADHEVGDTSGWALGVNYNTWASGKTFTVGDTLVFKYDSTHQVDEVDESGYNSCSSSNSIKNYQDGNSKIELTSPGKRYFLCPISGHCAGGMKLQINVAAASGTPPTTPSGTPPTTPSNPSPSPPSESGSTNTTSPPKPSGAVTVSSGIGLLVGSFFVSAIMFGFMG

SEQ ID NO: 221688 - protein, 74 aa, Glycine max
  Clone ID: PAT_MRT3847_42213C.1.pep
ALVPDAFYNQRTHRTLVATVSFLIDLQPFFYTLNKGANTYLQKGVIQWRGESTVFIESTRVCGFLTVNIKKALL

SEQ ID NO: 221689 - protein, 52 aa, Glycine max
  Clone ID: PAT_MRT3847_42214C.1.pep
MSGDAVNSIVTDMLRWPHRIGVPLGGIPVDTIELDLRPYGRLALPVLNATAL

SEQ ID NO: 221690 - protein, 80 aa, Glycine max
  Clone ID: PAT_MRT3847_42215C.1.pep
QKISSPLLILFLLYISYLVYALILILSTILFFHPPPKLRILKLINFEMNQIDLFSLLRSYIFLPFVFPIYPYPPIPLHVL

SEQ ID NO: 221691 - protein, 232 aa, Glycine max
  Clone ID: PAT_MRT3847_42216C.1.pep
MASSSDSWVKEYNEALKLADDISGMISEQSSFPASGPETQHHSSAIRRKITILGTRLDSLQSLLSKLPGKQPISEKEMNRRKDMLSNLRSKVNQMASTLNMSNFANRDSLLGPERKPDAMTRMVGLDNNGLVGLQRQIMKEQDDGLEQLEETVASTKHIALAVNEELDLHTRLIDDLDQHVDVTDSRLRRVQKNLAVLNKRTKGGCSCMCMLLSVVGIVALIVVIWLLVKYL

SEQ ID NO: 221692 - protein, 73 aa, Glycine max
  Clone ID: PAT_MRT3847_42217C.1.pep
MFINDRDHTRKSFRGRRLIKVENSVTPLTQSTRKKQNPKHNITNFVGPTKSGTETKHIISMENLFSSTAMFAV

SEQ ID NO: 221693 - protein, 130 aa, Glycine max
  Clone ID: PAT_MRT3847_42218C.1.pep
MGKKSLKLPSLFKTKEPPRNQHHHHHHHNHNPNHPWQFMPSCGHSKTLSFRGGDDDMFKTVNSVFFDPSAESTIETPKSWFTTSSESASISTESEDYHYCDGESLEMLVRGVRSERLFFEPGDTSSILEK

SEQ ID NO: 221694 - protein, 41 aa, Glycine max
  Clone ID: PAT_MRT3847_42219C.1.pep
DNVSTQSQLYINGGFLRRMCECILIVNFPQPNITSWYKLPF

SEQ ID NO: 221695 - protein, 72 aa, Glycine max
  Clone ID: PAT_MRT3847_4221C.1.pep
RTREWKYKGTTHRTHWKKFPQRQRGGKHRKKPAPQIMKLWGGHRIKQGLLRPTNGGTDRKTLPPTLPTKKDT

SEQ ID NO: 221696 - protein, 69 aa, Glycine max
  Clone ID: PAT_MRT3847_42220C.1.pep
MIWILLLAFCVMMNTMTAGFIAMYATLASSYVDCCLIPEWRCYIGGKGVLIPLIHILLKCTAYMVIVIA

SEQ ID NO: 221697 - protein, 73 aa, Glycine max
  Clone ID: PAT_MRT3847_42221C.1.pep
VRNRASTRYELFEGGFFSRATSQKSACTSLIFHLSTYSTLLTKNISYMLKTESYALLGPLTAYCITCPERATE

SEQ ID NO: 221698 - protein, 120 aa, Glycine max
  Clone ID: PAT_MRT3847_42222C.1.pep
SFGSWGTHPSQSQWLGPLPPTCARPAALRPKLKPKLWGAGTTTIGCGTTRQHQESGRGVGPESLFGSLTLSLFLLYALSLGWPTSWGCPIRGAETRSESKEQADTKLECSWSSTKSAAPP

SEQ ID NO: 221699 - protein, 124 aa, Glycine max
  Clone ID: PAT_MRT3847_42223C.1.pep
KVNVVTSFSVYNRSGLCESSTPWLNLLILPFSLSQHSHSHLFPQNLSFSPTFTPSFTLYALHAYQSHSFVWHCASAAAECDRPTVIFVPHFVVKEDYQKLLLYLQQKIPSCENLSEPAGEYSLF

SEQ ID NO: 221700 - protein, 37 aa, Glycine max
  Clone ID: PAT_MRT3847_42224C.1.pep
KSHLIRVSGTLDCGVATTNKSLTGKERSRKENFKHIT

SEQ ID NO: 221701 - protein, 55 aa, Glycine max
  Clone ID: PAT_MRT3847_42225C.1.pep
YPENEYLDSLICISCNKFKLIPITLEKITLYSLGGEELENLIIACIRNHLLYSSS

SEQ ID NO: 221702 - protein, 65 aa, Glycine max
  Clone ID: PAT_MRT3847_42226C.1.pep
LSSQSSSLLRLMLMTLRVCALALSRAKNRGRLVYVLCGKVVFTISPSSGFLICKVPHPLSAAEKQ

SEQ ID NO: 221703 - protein, 115 aa, Glycine max
  unsure (1)..(115): unsure at all Xaa locations
  Clone ID: PAT_MRT3847_42227C.1.pep
IQHNNHTPGCSSKCRSLRINILSRWPLSDRRDALKSQAIKIHPAPSFSEGQKFQLAELYNSSVLXDILKAIIEDARYLANVAIDSTGGHTVKGDLMATLLYEPPTKTRLSFDPAV

SEQ ID NO: 221704 - protein, 38 aa, Glycine max
  unsure (1)..(38): unsure at all Xaa locations
  Clone ID: PAT_MRT3847_42228C.1.pep
QEEPXPGLRSXGLCXVPVSCPLXVXSDTGADHWAPALG

SEQ ID NO: 221705 - protein, 94 aa, Glycine max
  Clone ID: PAT_MRT3847_42229C.1.pep
QTNTNFTFTFAIQGDYFVFIYKGMENSPSPQKHQTFTLRVQAYNSIFYNFLMHPYKDTIYLHTMRQFYRYCTISESIDYGYPNSLSIFKNSTFG

SEQ ID NO: 221706 - protein, 47 aa, Glycine max
  Clone ID: PAT_MRT3847_4222C.1.pep
AHSNAIILLFTESFYNSLNNILSKSHHIAINLINSMFPAFFPYSSSP

SEQ ID NO: 221707 - protein, 140 aa, Glycine max
  unsure (1)..(140): unsure at all Xaa locations
  Clone ID: PAT_MRT3847_42230C.1.pep
GKPFFFFFFFLFFFFFFFFFFLTGKGQPLNFPQGPKQKWGPGDNKKTEKAPIKGFKKEKPPKKKNPPRGGAGGRPNWWHPPPEKHRPGQNKGAGNAGEKKPPPPPISHQRXHPQPPLWAPPKRRPPHPHNNHPRVKAPPT

SEQ ID NO: 221708 - protein, 169 aa, Glycine max
  Clone ID: PAT_MRT3847_42231C.1.pep
MSVAFTNLSWWLWSGKHQEPRIPNGPSINSSADSNLWESDVLRFPLVQANVGSSSRKVKRKWHSRGERKVDREYDVVLVPSDVGCVSGSESDDSDWSIGWLEPHGPGFPSDDETDNRFAVIVPCYGRDYGRIVEDPKGNLLRGVGNFPDSYSDESKKFVEDWLSSLRNT

SEQ ID NO: 221709 - protein, 59 aa, Glycine max
  Clone ID: PAT_MRT3847_42232C.1.pep
KTEDKQKIFICKRHHNLLSNDTLSFNRGFLLTPSATTDLTMSVYQKLNKLSWMPGDERC

SEQ ID NO: 221710 - protein, 114 aa, Glycine max
  Clone ID: PAT_MRT3847_42233C.1.pep
TFQHILNRLDLIFLEDYIPIYLPLPVPHLLYLLAFYTAHLFLLRWTLASFCRCYLYFVRVLNAPPLYLFLFFSFPFLVKYILIGCDSQLLIRYRSNLISPQIKFRTLNQASGLF

SEQ ID NO: 221711 - protein, 41 aa, Glycine max
  Clone ID: PAT_MRT3847_42234C.1.pep
LHLVNMQTHSTDYQTDYLRLQFMSLKPKFAQVENVSSNSSI

SEQ ID NO: 221712 - protein, 226 aa, Glycine max
  Clone ID: PAT_MRT3847_42235C.1.pep
HEQIFIHRDLKSSNILLGDDFRAKVSDFGLVKLAPDGKKSVVTRLAGTFGYLAPEYAVTGKVTTKADVFSFGVVLMELLTGLMALDEDRPEETQYLASWFWHIKSDKEKLMSAIDPALDIKEEMFDVVSIIAELAGHCSAREPNQRPDMSHAVNVLSPLVQKWKPLSDETEEYSGIDYSLPLNQMVKDWQETEGKDLSYVDLQDSKSSIPARPTGFAESFTSVDGR

SEQ ID NO: 221713 - protein, 63 aa, Glycine max
  Clone ID: PAT_MRT3847_42236C.1.pep
AKSVPGPHRVGLKNPNKTIVVAIPRVRKPWCVWNLSSPVCQVCLRLILWTPPALLYTEAAVML

SEQ ID NO: 221714 - protein, 298 aa, Glycine max
  Clone ID: PAT_MRT3847_42237C.1.pep
MALSKATFLTHLRTLSNSHRRPSSCVSIRLLSFSSPEEAAAERRRRKRQLRMEPPLSALNRTQTAPKPLQSPYYLNPNNPKLPEHVSALTGNRLNLHNRILTLIRENDLDEAALYTRHSIYSNCRPTIFTINAVLAALLRQSRYSDLLSLHRFITQAGVVPNIITHNLVFQTYLDCRKPDTALEHYKQFLNDAPMNPSPTTYRVLIKGLIDNSKLERAMDIKTEMDSKGFAPDPLVYHYLMLGHARVSDGDAILRLYDELTERLGGVVQDGIVFGCLMNGFFVKGMEKEAIDGYKELL

SEQ ID NO: 221715 - protein, 148 aa, Glycine max
  Clone ID: PAT_MRT3847_42238C.1.pep
MPSLTKEETNGSPSKADAILDKPVEADLLLTSETKDYRSVRWKYVLWKSFVYIITLGMLIAMLLGLNMSWTAISAALALVVLDFQDARPSLEKVSYSLLIFFCGMFITVDGFNKTGIPGALWDVMEPYSQVDRASGVAILALVILILS

SEQ ID NO: 221716 - protein, 165 aa, Glycine max
  unsure (1)..(165): unsure at all Xaa locations
  Clone ID: PAT_MRT3847_42239C.1.pep
MAHFNSLNSQEWNARIDSFNIPNSPQVQTLRNRSAAIDGEIDRVLSNTLDSTRNSNASKEETNGMPPLTKEEINGSPSKDDGIVDKPVEAHVLLTLEEKDYTSVRWKYILWKSCVYIITLGMLIAMLLGLNMSWTAISAALALVVLDFKDARPSLEKXSYSLLIF

SEQ ID NO: 221717 - protein, 73 aa, Glycine max
  Clone ID: PAT_MRT3847_4223C.1.pep
MRILKVATCNLNQWAMDFDCNAKQIKESIAKAKEAGAAIRLGPELEIPGYGCEDHFLELDTVNHSWECLKDLL

SEQ ID NO: 221718 - protein, 571 aa, Glycine max
  Clone ID: PAT_MRT3847_42240C.1.pep
MEKRKGGRIEESDEEKWVHDASVDYKGRIPLRASTAIEFSERIAHFGISSNLIMYLTEVMHEDLKTATNNANLWKGATTLLPMIGGFLGDAYTGRFRMVVFSSLVYFKGLSLLTMSQFIPNLKPCNNDICHQPRKVHEVVFFLALYCIALGTGGFKPCLESFGGDQFDGDNLEERKKKMSFFNWWTFTFSIALLLATTVVVYVQDFVSWGVAYLILAMFMALTIIAFYVGIPFYRYRMRPNANPFIPILQVLIASIRKRNLSCPSNPALLCEVPMSENSQGRLLNHTSRLRFLDKAAIVEEKYIEKKAGPWRLATVTRVEETKLILNVVPIWLTSLMIGVCIAQGSTLFVKQAAAMNLKISDNFKIPPASMASLSAFSTIISVPIYDRIIVPILRKVRGNERGISILGRIGIGLIFLVILMVVAALVENMRLRMPGHETMSVMWLIPQYLILGIGNSFYLIALQEYFYDEVPDSMRSVGMALYLSVIGIGFFLSSFLIIIVDHVTGKNGKGWIAKDVNSSRLDKFYWMLAVISALNLCLFLFLAKRFTYKTARRKATEIDCSNCDGVDTVA

SEQ ID NO: 221719 - protein, 61 aa, Glycine max
  Clone ID: PAT_MRT3847_42241C.1.pep
DSCLGTHLDYLRIVDWAGRDNSISRVFQYAFRAWDVYSPPGMYVWLEFISYIGLCLSVVHC

SEQ ID NO: 221720 - protein, 55 aa, Glycine max
  Clone ID: PAT_MRT3847_42242C.1.pep
AMASKMATTGMWVTDECTNSSMEMKWKKVHIYIFLKIDDNSRLVTVDKVGGPVKS

SEQ ID NO: 221721 - protein, 585 aa, Glycine max
  Clone ID: PAT_MRT3847_42243C.1.pep
MKQEMEKRKGGRIEESDEEKWVHDASVDYKGRIPLRASTGVWKASLFVLAIEFSERIAHFGISSNLIMYLTEVMHEDLKTATNNANLWKGATTLLPMIGGFLGDAYTGRFRMVVFSSLVYFKGLSLLTMSQFIPNLKPCNNDICHQPRKVHEVVFFLALYCIALGTGGFKPCLESFGGDQFDGDNLEERKKKMSFFNWWTFTFSIALLLATTVVVYVQDFVSWGVAYLILAMFMALTIIAFYVGIPFYRYRMRPNANPFIPILQVLIASIRKRNLSCPSNPALLCEVPMSENSQGRLLNHTSRLRFLDKAAIVEEKYIEKKAGPWRLATVTRVEETKLILNVVPIWLTSLMIGVCIAQGSTLFVKQAAAMNLKISDNFKIPPASMASLSAFSTIISVPIYDRIIVPILRKVRGNERGISILGRIGIGLIFLVILMVVAALVENMRLRMPGHETMSVMWLIPQYLILGIGNSFYLIALQEYFYDEVPDSMRSVGMALYLSVIGIGFFLSSFLIIIVDHVTGKNGKGWIAKDVNSSRLDKFYWMLAVISALNLCLFLFLAKRFTYKTARRKATEIDCSNCDGVDTVA

SEQ ID NO: 221722 - protein, 51 aa, Glycine max
  Clone ID: PAT_MRT3847_42244C.1.pep
PMTSGFGESTTSSAPIPSCSDNILNYAFDFQFNIFFNLSQDPLITLCCHLF

SEQ ID NO: 221723 - protein, 182 aa, Glycine max
  Clone ID: PAT_MRT3847_42245C.1.pep
MIDSNNNVNMSHHNPNFTGTKEVVVEDEESPLLALPLLRNREEDEQGSGSKASVTGSVFNLSTTIIGAGIMALPAAIKVVGVGVGVVAIVFLAFLTHTSLEILLRFTRVAKASTYANLMGDAFGSSGTLLFHLSVLINNFGILVVYVIIIGDVLSGTSSSGVHHFGVLEGWFGQCWWTARTF

SEQ ID NO: 221724 - protein, 178 aa, Glycine max
  unsure (1)..(178): unsure at all Xaa locations
  Clone ID: PAT_MRT3847_42246C.1.pep
IIKDIKESKESTHVHYEVVLWTHNTXRYINLIVGLNYTMENLFSSLYKNEAEISPYTLYAIACVMEKVPFINGSCXSILLPRLIDLAIMRNSXIVGYDFKSGQTKMKSVMMDTLAGACIKPSSIVTCIHLSNIYGMILSSPHTYRYNEIYMSNDADHIVNSTSILYDPRVHPYHVAVI

SEQ ID NO: 221725 - protein, 284 aa, Glycine max
  Clone ID: PAT_MRT3847_42247C.1.pep
VDPRVRPRVRAKRNSELQASRSSFAKTLSKLQILEAQVQTSNQQKGSPQSIIHINHESIYSQNASNAPSFISLSEDGNDDVGSCAESWSTAIISELSQFPKEKNTEELSKSDATKKLELMDDFLEVEKLARLSNDFSGVSVTSNNMANEIVVNDLSEVSTGKDVPSNTQENSEPNPLPSEVSSAEELSAPDPQSDVPAGLSLAELQSRISSVFESLAKDADMEKILKDIKHALEEACGTSIQDSVSAIPHDVKPSDTTCDELGNAEDAAGSNAEKEIISSQRPI

SEQ ID NO: 221726 - protein, 157 aa, Glycine max
  unsure (1)..(157): unsure at all Xaa locations
  Clone ID: PAT_MRT3847_42248C.1.pep
SGVRIKXAVGRXGYVKDIYVKRMTMXPMKWVFWMTGNYGSHADSHYDPKALPEINGINYRDVVADNVTMAARLEGISNDPFTGICIANVTINMAAKAKKQPWACTDIEGITSGVTPTSGNSLPDQGPEKIKACDFPQGNLPIDMLELKKCAYIMKHA

SEQ ID NO: 221727 - protein, 197 aa, Glycine max
  unsure (1)..(197): unsure at all Xaa locations
  Clone ID: PAT_MRT3847_42249C.1.pep
MMNHDSNNEQHQILHVSQDDEIMESLILDDDGSSVQQHHRPTSPQSPNSPFNSFLDPPSYADAIFTSFDSNGHDQAIESPAARSGSEDYLHISVTDPQKEQDIATSLVPGAAAFYTYLITTRTNLPEYGGIGAEFAVRRRFRDVVTLSDRLSEAYRGFFIPGAXPDKSTVESQVMQKQEFVEQRRVAXLEKYLKKLA

SEQ ID NO: 221728 - protein, 43 aa, Glycine max
  Clone ID: PAT_MRT3847_4224C.1.pep
SMEFLLISITQPLIRMPLPPPSTNISAPAAFNSFSSTSNSIIT

SEQ ID NO: 221729 - protein, 53 aa, Glycine max
  Clone ID: PAT_MRT3847_42250C.1.pep
TMVIIHREFRSVPCCESLLVQCLFQPLRLSSFSRLWIMWGHAETGTAAWFLRR

SEQ ID NO: 221730 - protein, 116 aa, Glycine max
  Clone ID: PAT_MRT3847_42251C.1.pep
NIRYKCQITWAVKCLTRIILQYTNNSPTSIFPTNPTPLIAPSDAPTIITVPSTIPVTMFLASPAATPMTDPVSSKHMLKPIHNHKNCLQHKHKPKTQKPKPLLSLKSQFHTYQSDQ

SEQ ID NO: 221731 - protein, 114 aa, Glycine max
  Clone ID: PAT_MRT3847_42252C.1.pep
DSGFSIGGCNTLPVNVLCQTVSNDARQEFLQDAEVKERSPEKRMIYIEWRRISNLRFRRTRVHESAFYLNIGSSGLSGSVRKLYRSMNVPVPQPLPSLRDLINSRKRAKRGIKY

SEQ ID NO: 221732 - protein, 94 aa, Glycine max
  Clone ID: PAT_MRT3847_42253C.1.pep
RHISESVTLTSLWPIIPTGHNDSAHCHLMEARTEGRHKKEQMLRCCRCCIALGTVHNNGSGDVDGCTEHGHAPDGQRCRFTTDTTHMVRKCQLI

SEQ ID NO: 221733 - protein, 81 aa, Glycine max
  unsure (1)..(81): unsure at all Xaa locations
  Clone ID: PAT_MRT3847_42254C.1.pep
LPFIQILFFFFSISXTPNYKFFFFLNKQHKNNTNTNNLYLLHNNLKKLYYTHSSPPPFTALDFYSSTSSNSSTFYHYRSFI

SEQ ID NO: 221734 - protein, 82 aa, Glycine max
  Clone ID: PAT_MRT3847_42255C.1.pep
DPGQGVLKKLIGDTLAKDMLRSFLFNGVDELGSKTFNDYFPRYCCQEGTLNKKGNVIGKSFENRPWNARGEFIGNRFSNWPV

SEQ ID NO: 221735 - protein, 64 aa, Glycine max
  unsure (1)..(64): unsure at all Xaa locations
  Clone ID: PAT_MRT3847_42256C.1.pep
PMDRSTSYXGRCTQSDDFSTRQSNSVVVCFEHHCFVTATSFNHILRSGYVIHSLYDVNLLEDQP

SEQ ID NO: 221736 - protein, 90 aa, Glycine max
  Clone ID: PAT_MRT3847_42257C.1.pep
LERVSFSSLTANSKRNLNLVLSIHVLHAALSTRTQIPDFPLVDYPPFVTFRGQQPIHDRYNAALNRVPSCFPEHICMLDDIDIWSSRVDE

SEQ ID NO: 221737 - protein, 158 aa, Glycine max
  Clone ID: PAT_MRT3847_42258C.1.pep
RDLAPSESSPLLIAMAAALECWSRRATTTVDEDHAVLMQPPEQDPTIPQPRDSSSSSIVHKKLQKLTRNVSEAIASLKNSLNSSSTVSVESSKPDAPRSLVWTTVLRHLIHLYPGSQLPEKLVCNIRKHYDSLPLRFGSQPASFVCLLRLRCFRYMSL

SEQ ID NO: 221738 - protein, 46 aa, Glycine max
  Clone ID: PAT_MRT3847_42259C.1.pep
KNGGSIFQYLNMNSLERTHLGKIEIYYCFSLSLRERDRETRIYFLY

SEQ ID NO: 221739 - protein, 58 aa, Glycine max
  Clone ID: PAT_MRT3847_4225C.1.pep
GSHGRDTLRTSRAHQFQKVQQLCLTSPNANDSWDMHEATLTNSEDFYKASNLPYQAAS

SEQ ID NO: 221740 - protein, 83 aa, Glycine max
  Clone ID: PAT_MRT3847_42260C.1.pep
IFYENLFIDFIFILIHAKLGPLVHKYMHITCNIFGQTKTCFRDKKDQNTITMFGCMLEREYMHIGHGNQKQHTLTFTLIWNLT

SEQ ID NO: 221741 - protein, 38 aa, Glycine max
  Clone ID: PAT_MRT3847_42261C.1.pep
LLSQLHTSPTDLTKTVELITYTKMKNRDFNKGMKKSSQ

SEQ ID NO: 221742 - protein, 71 aa, Glycine max
  unsure (1)..(71): unsure at all Xaa locations
  Clone ID: PAT_MRT3847_42262C.1.pep
VPTIGFNVEAVEYKNIFFTVWDVGGHDKICSLXRNYFEIPQGLIFVVATISRTRFVLARDKLPCLFIAEEL

SEQ ID NO: 221743 - protein, 66 aa, Glycine max
  Clone ID: PAT_MRT3847_42263C.1.pep
RTLMLITCFTISIYLVSGKEASAEGLLLVACAIVAATQLQLSLMVGSNCSFRFLFNSSIIAATVPP

SEQ ID NO: 221744 - protein, 276 aa, Glycine max
  Clone ID: PAT_MRT3847_42264C.1.pep
MEIRLEIRGVETAKEAWNRLGALYSSQLKADPDIEQGVVDDSLHEYKPLHRYVESGDWKNAKSMINKDVKAIFSTSSTGRTVLHVAVIAGYENIVRNLVKIGKEKLVKMQDNYDYTALALAAEYTGNVNMAKCMVDQKKGGKDLLLIKTKGGEIPVLLSAAKGYKDMTRYLYSQTQLEAFIDKNSHIGVLLLARCITAEIFDVALSLIHRIPKLPLTHESDGQRPLYALAHMPCAFPSGSGFGRLQQLLYDRRFCDMALNFPPVKLLGRLLIFLYL

SEQ ID NO: 221745 - protein, 424 aa, Glycine max
  unsure (1)..(424): unsure at all Xaa locations
  Clone ID: PAT_MRT3847_42265C.1.pep
MGSACCVAAKDHTIPSTSRTGGESLNRNAXRVAGEIEDPSFHTSRRVSRNVSMELKGSLSSERGNLSDWGSTLDNSVTPLSLKSPVREHLVTSQMTPSSGLSMSSNCSAVVKNLIESPEIAESSIPNRSVPSVFSIPTTDPMTNHNYHNLPNSTPSRWAHCSPGHPLLTQISDSRILGLKSPDNSISEGRPSFVLSNCSNDMATASQCGPVIGWSMRTFSGWVAPSQVEGCPLATVFSGSARPKIRGSSSRFSYSPSMDLQSCGACSKLLTDRSAWGSQKFIASSDLSVVAVLVCGHVYHAECLETITPEADSYDPACPICMVGEKYMSKLSKKGLWTESETKTKNYKISRNRVVDSYVDGGNDVFDRLKDIVSKMEPSSSSTRSSFGKPFLRRHFSLGSKWSRSLLENDSARKKGFWARCRRD

SEQ ID NO: 221746 - protein, 130 aa, Glycine max
  unsure (1)..(130): unsure at all Xaa locations
  Clone ID: PAT_MRT3847_42266C.1.pep
TLTETLTGVRIKTWQGGAGYARRITFEKIRFVRANNPIIIDQFYCPHRSDCQNQTXAIKISDVTYKGIVGTSLTDKAINLSCGQNVGCSNIVVDHVYITPSVPGQKVFSYCHNAHGIAPHTKPSVKCLFK

SEQ ID NO: 221747 - protein, 203 aa, Glycine max
  Clone ID: PAT_MRT3847_42267C.1.pep
RFPGRPRVRSAVARGSACCVAAKDHTIPSTSRTGGESLNRNAVCSPTWSFQWDSWGRVAGEIEDPSFHTSHRVSRNVSMELKGSLSSERGNLSDWGSTLDNSVTPMSLKSPVREHLVTSQMTPSLDLFMSSNCSAVVKNLIESPEIAESSIPKYSVFSTPMSDPMTNHNYHNLTNSTPSRWAHRSSGHPLLTQISDSRILGLK

SEQ ID NO: 221748 - protein, 279 aa, Glycine max
  unsure (1)..(279): unsure at all Xaa locations
  Clone ID: PAT_MRT3847_42268C.1.pep
MVIINRLLQVRGRPGKQVQLSEAEIRQLCAVSRDIFLKQPNLLELEAPLKMCGDIHGQYSDFLSLLEHAGXNFFLLRGNLGCASIYRVYGFYDECNRRVNVRLWKIFADCFNCMPVAAFCEPRIRRLRRGLSPTELVGESQISSLPRPTEVPESGLLCDLLWSDPSKDIEGWGENDRGVSYTFGASRVTEFLGKHDLDLICRAHQVVEDGYEFFANRQLVTIFSAPNYCGEFDNAGAMMSVDETLMCSFQILRPAEHRKPKFAFGSKTTFKAILDAARV

SEQ ID NO: 221749 - protein, 30 aa, Glycine max
  Clone ID: PAT_MRT3847_42269C.1.pep
VTLVSNSTNSYLFYQYHYFLLVKLIFYYHT

SEQ ID NO: 221750 - protein, 111 aa, Glycine max
  unsure (1)..(111): unsure at all Xaa locations
  Clone ID: PAT_MRT3847_4226C.1.pep
MVGDAAHTVAKKATLPAAVLAREPALIAAFLYEMGRTPDVLANTTMWARRSTILAEAVGTTVEMYHVEATIRXRITEGEVCHRTGEIAVTRKRMTREHADADLVHQLRKEK

SEQ ID NO: 221751 - protein, 236 aa, Glycine max
  Clone ID: PAT_MRT3847_42270C.1.pep
MERGVLDGIINRLLQVRGRPGKQVQLSEAEIRQLCAVSRDIFLKQPNLLELEAPIKICGDIHGQYSDLLRLFEHGGLPPRSNYLFLGDYVDRGKQSLETICLLLAYKIKYPENFFLLRGNHECASINRVYGFYDECKRRFNVRLWKIFADCFNCMPVAAIIEEKIFCMHGGLSPELHNLSQISSLPRPTEVPESGLLCDLLWSDPSKDIEGWGDNERGVSYTFGASRVTEFLGKHD

SEQ ID NO: 221752 - protein, 46 aa, Glycine max
  Clone ID: PAT_MRT3847_42271C.1.pep
STMQHGFRKFLKIQDIIQLKYITINQINIFYINAQYICTKTLIISQ

SEQ ID NO: 221753 - protein, 66 aa, Glycine max
  Clone ID: PAT_MRT3847_42272C.1.pep
VNISDITKSYVHDPVCSNDHIISCSLSVSSCVVIHHSPPVVDQVVNILCPSACVANHNHNSLRPQD

SEQ ID NO: 221754 - protein, 103 aa, Glycine max
  Clone ID: PAT_MRT3847_42273C.1.pep
TQGRKVLEIRPTIKWDKGKALEFLLESLGLANCSDVFPVYIGDDRSDEDAFKKLRDRGQGFGILVSKFPKDTSASYSLQEPNEVMNFLQRLVEWKHVSLRARS

SEQ ID NO: 221755 - protein, 74 aa, Glycine max
  Clone ID: PAT_MRT3847_42274C.1.pep
VFNQTRQKGNRLWFPVKPPFTLCVSVLWKGGFYQSKPGHFRETFNAQRLFLLGGSRNYFRFFGLFPPLFASSRA

SEQ ID NO: 221756 - protein, 65 aa, Glycine max
  Clone ID: PAT_MRT3847_42275C.1.pep
KGGGGFPAALFQGIKNLFFSPPPHFGGNQLFWGPNPLPNGVLLLAGNAVPGGVFPNPFFLKKVFF

SEQ ID NO: 221757 - protein, 59 aa, Glycine max
  Clone ID: PAT_MRT3847_42276C.1.pep
KKQLKKVHKKKTCRRKTCRERSTTCFSCNCAVSYTPATPQQGVRRHKKCRNIARQAGIW

SEQ ID NO: 221758 - protein, 72 aa, Glycine max
  Clone ID: PAT_MRT3847_42277C.1.pep
NKLPYRYDREGSHPNKWTYHMLKVLGFHATIIHLGYMWPCAFEFCLKNPYFLSRSPICAIQFSQRKIIFLLY

SEQ ID NO: 221759 - protein, 292 aa, Glycine max
  unsure (1)..(292): unsure at all Xaa locations
  Clone ID: PAT_MRT3847_42278C.1.pep
FRPLQHQACKAALAKQDSFILMPTGGGKSLCYQLPATLQPGVTVVVSXPLLSLIQDQIITLNLKFGIPSTFLNSQQTASQVTAVLQELRKDKPSCKLLYVTPERIAGNQSFLEILKFMHQKGQLAGFVVDEAHCVSQWGHDFRPDYRGLGSLKLHFPDVPVMALTATATHAVREDIMKXLXIPHALVLERSFDRPKIEIRCVLLSXEPLKQLGQLLIDRFRNQCGIVYCLSKSECVEVSKFLNEKCKIKTVYYHAGLAARQRVAVQKKXRFVIHNTMSKSIESYYQECGRAG

SEQ ID NO: 221760 - protein, 63 aa, Glycine max
  Clone ID: PAT_MRT3847_42279C.1.pep
RYAFETLSRAHSREYSAEFCARFVLQPVSVRIRDFQFISCCVCFHLYFVHFRLYFLPFLTSFN

SEQ ID NO: 221761 - protein, 68 aa, Glycine max
  Clone ID: PAT_MRT3847_4227C.1.pep
RWLFALPNLTYEPAIVDTLLLSGLYDAATMASPSNACLPIQPLYLESERQHHHSPSDHPSTLCGHPTA

SEQ ID NO: 221762 - protein, 73 aa, Glycine max
  Clone ID: PAT_MRT3847_42280C.1.pep
FLIILFKDILIILLLFCLFWFNRGYNVIDRLDFALTVIKRDYNANDRLEFILSFFRRDNGLNDQLKLVKKGRK

SEQ ID NO: 221763 - protein, 92 aa, Glycine max
  unsure (1)..(92): unsure at all Xaa locations
  Clone ID: PAT_MRT3847_42281C.1.pep
SVVRVFLTNSISAEHFDACKWAKSEPHSWELIFPIEVCGPKNGFKKWSFEWAKQTSXHLVSRNDNPQTGLQFFDFLVGIFSKHFANGWVNTF

SEQ ID NO: 221764 - protein, 87 aa, Glycine max
  unsure (1)..(87): unsure at all Xaa locations
  Clone ID: PAT_MRT3847_42282C.1.pep
KKRGNSPGLNSTRKAPPLLRIEGEKKFFHHRPVKNQFSGFLAGAQRIIEGPNLKPKDEXPPSSPITPFRGGKKNPKRFLSPPKKKEA

SEQ ID NO: 221765 - protein, 33 aa, Glycine max
  Clone ID: PAT_MRT3847_42283C.1.pep
VFYFEVPHGAFMKLPGIKRLPVKIMLLYIFLLV

SEQ ID NO: 221766 - protein, 77 aa, Glycine max
  unsure (1)..(77): unsure at all Xaa locations
  Clone ID: PAT_MRT3847_42284C.1.pep
MGGFKLGMGGLKISIAAIEEALLAVREKETDQRGNTRRRCALTEXGTAEMKASIMDGPXRRCSALSGLTTVKNPISL

SEQ ID NO: 221767 - protein, 105 aa, Glycine max
  Clone ID: PAT_MRT3847_42285C.1.pep
LHKPHGHLEQCYISLVGAQDGNPTGVLPGRHEFLVTGKAMWRKGIPGVVPLCRRVIWISHFAPTEVCSCKLVINFPWEGPVSRAFFLVKIRTSPLLCGNYHCPQP

SEQ ID NO: 221768 - protein, 58 aa, Glycine max
  Clone ID: PAT_MRT3847_42286C.1.pep
RGVAFHHSNSDHSFLLECQSAPQVQFLQLAGVLRRMLGKVVVRSYRLSLVCCQMYKNT

SEQ ID NO: 221769 - protein, 105 aa, Glycine max
  Clone ID: PAT_MRT3847_42287C.1.pep
IKDMMMFVLGGTSEGPLSCVGRSSASHRFAPPLFSMKPVLSFCMSLAICCYRLCSLENCDGRRFYRENPACTNEALLWQAWGGIGNAGKKLAKDKICGKDPPVEF

SEQ ID NO: 221770 - protein, 166 aa, Glycine max
  unsure (1)..(166): unsure at all Xaa locations
  Clone ID: PAT_MRT3847_42288C.1.pep
MERGDCQFTVVPPRQYDEAQFMHQLMVAGDQQDPAGAGRGAAAAGGERKRRFTEEQVRSLETTFHARRAKLEPREKAELARELGLQPRQVAIWFQNKRARWRSKQLEHDYAALRAQFDAMHARVESLRQEKIALAAQVDELXGRLNERQDQSGSCEVNDAEAAADD

SEQ ID NO: 221771 - protein, 64 aa, Glycine max
  Clone ID: PAT_MRT3847_42289C.1.pep
VFPFFFFFMVFFFLGASSLFAHKGNCGLNPFPDYKHMGFNRLGMIALSFDPKPGGIGMQNLPPY

SEQ ID NO: 221772 - protein, 60 aa, Glycine max
  Clone ID: PAT_MRT3847_4228C.1.pep
LVSMLMLTVQINEQSLTMLLERVKKECKCKDYIVLMSLIFYIINQLQIVIIFKMIIVKIN

SEQ ID NO: 221773 - protein, 134 aa, Glycine max
  Clone ID: PAT_MRT3847_42290C.1.pep
KAHRGAQFPAVFSSRVGPCIYTLFMSGFPFGIRAVSRTLLILVCALVSPPYFFPFFFPLVFCLGFCAGFFFPPDLALAFFPPSFFPPPFRAPWCASRFRSGFPGGTPGSAPGSVLTPKKFKKPPKKKKKKKKKE

SEQ ID NO: 221774 - protein, 114 aa, Glycine max
  unsure (1)..(114): unsure at all Xaa locations
  Clone ID: PAT_MRT3847_42291C.1.pep
MALMGFSDPQNFQGWAHPGFLGHQFFFGLKKGFGGFGXPPFPGGPFFTPLGFGKDXNPLKVFNPQEVKNGRLAFLPILGSFVQALFPGVGPSQTLLVLLGGPGPNNFFARFKFP

SEQ ID NO: 221775 - protein, 78 aa, Glycine max
  unsure (1)..(78): unsure at all Xaa locations
  Clone ID: PAT_MRT3847_42292C.1.pep
LEERRLMKGVQASHXLLTQASNKKNPKGKVVPSPFVETIRXDISEKPGIVDYKTQSSDTSLTEYISLXHQKRVTRXXS

SEQ ID NO: 221776 - protein, 328 aa, Glycine max
  Clone ID: PAT_MRT3847_42293C.1.pep
MAEKEEAMHAVLKEAVDLENVPLEEVFQTLRCDSNGLTTESAEERLVIFGHNKLEEKKESKVLKFLGFMWNPLSWVMEAAAIMAIALANGGGKPPDWQDFVGIITLLIINSTISFIEENNAGNAAAALMARLAPKAKFLRDGKWVEEDASILVPGDIISVKLGDIIPADARLLEGDPLKIDQSALTGESLPVTKGHGDSVYSGSTCKQGEINAVVIATGVHTFFGKAAHLVDSTNQVGHFQKVLTAIGNFCICSIAVGMIVEIIVMYPIQHREYRPGIDNLLVLLIGGIPIAMPTVLSVTMAIGSHRLAQQGAITKRMTALEEMAGMD

SEQ ID NO: 221777 - protein, 229 aa, Glycine max
  Clone ID: PAT_MRT3847_42294C.1.pep
VELLIRHETAFTLTTAINEWSSTLYSIIYSSLPTIIVGILDKDLGKRTLLKYPQLYGAGQRHEAYNKKLFLLTMLDTLWQSMVIFWAPLFAYWSSTIDVASIGDLWTLGVVILVNLHLAMDVIRWYWVTHVVIWGSIVATFISVMIIDSIPNLPGYWAFFDAAGTGLFWLLLLGIIVTALLPHLVVKFVYQYYFPNDIQICREAEKIGYDRVVESGQVEMLPISDNPSR

SEQ ID NO: 221778 - protein, 80 aa, Glycine max
  Clone ID: PAT_MRT3847_42295C.1.pep
KGWSQTDGEFHGRINTGTVIRRTHGSSFLEGPWNTTYKRKRRSHNLATCYAFRQKHRISNWLCHLGERLFTNVSWGRLPN

SEQ ID NO: 221779 - protein, 84 aa, Glycine max
  Clone ID: PAT_MRT3847_42296C.1.pep
NPIMKLPWFFKIKKEKWAFFCHSKFLLFIKEMPNFCFIKVPKGKRKRRNLISRGSFFAIFSNIGQPSNSFGGLGEFGKGWPPHS

SEQ ID NO: 221780 - protein, 98 aa, Glycine max
  Clone ID: PAT_MRT3847_42297C.1.pep
VCLYANSHFWNIFLHNLSMLEYGNGSAENSGIADDMLLTRNMKLNSKALISYNPYTTYCHTLYLTVADSQDMLDQSFTNTTKLVVHSAGTNRTFEYYT

SEQ ID NO: 221781 - protein, 33 aa, Glycine max
  Clone ID: PAT_MRT3847_42298C.1.pep
RFLFFFKMAMTTTTEIDSQLLATMSQAYPNRFH

SEQ ID NO: 221782 - protein, 363 aa, Glycine max
  Clone ID: PAT_MRT3847_42299C.1.pep
MEHAFLAIVAATASFFVVMLLLAAAILLCQHHRNSTKAPTRSTSHIRTRSAPHRDASSRSVLDNWSSDPNLIKISWEELARATDNFSPHLIVGDGSFGLVYKARLSNGATVAVKKLSPDAFQGFREFTAEMETLSRLRHPNIVKILSYWASGPERLLVYEFIEKGNLDQWLHEPDLSRSPLPWPTRVNIIRGVAHGLSYLHGLDKPVIHRDIKASNILLDSNFQAHIADFGLARRIDNTRTHVSTQFAGTMGYMPPEYIEGSNVANTKVDVYSFGILMIETASSHRPNLPMKLGTDDIGMVQWARKMKENNAEMEMVDVNIGLRGEVITVKEYVRIACECTREMQKERPQMPQVVQWLDSMPL

SEQ ID NO: 221783 - protein, 50 aa, Glycine max
  Clone ID: PAT_MRT3847_4229C.1.pep
SRSDPVNGPLDVNTICISNAGVRSYYSPTEMIFSAVKHRHWNAHPYHFVN

SEQ ID NO: 221784 - protein, 87 aa, Glycine max
  unsure (1)..(87): unsure at all Xaa locations
  Clone ID: PAT_MRT3847_422C.1.pep
FNVTFNGTHVNMYYIYPVAVRVQTKVHAIDEELLYKYWANVNHIWVLHERSKXINXTLTILDRVNNMTVLWICVFKIARSPLLELPS

SEQ ID NO: 221785 - protein, 95 aa, Glycine max
  unsure (1)..(95): unsure at all Xaa locations
  Clone ID: PAT_MRT3847_42300C.1.pep
PTRIETASSHRPNLPMKLGTDDIGMVQWARKMKENNAXWMVDVNIGLRGEEESVKEYVRIACECTREMQKERPEMPQVVQWLDSMSLSTKPFHLV

SEQ ID NO: 221786 - protein, 25 aa, Glycine max
  Clone ID: PAT_MRT3847_42301C.1.pep
KLSVLHRGHQTNKSNILTKRSSVQT

SEQ ID NO: 221787 - protein, 32 aa, Glycine max
  unsure (1)..(32): unsure at all Xaa locations
  Clone ID: PAT_MRT3847_42302C.1.pep
ESIXXDIKVVLVAIILIISYSNQIMKVXKICF

SEQ ID NO: 221788 - protein, 91 aa, Glycine max
  Clone ID: PAT_MRT3847_42303C.1.pep
PGFFRRARFFFLVGANPFSRGGFPCEGVIGAPRFPMNLPLKSRCFWRFCQTPLFFFFCLFLSPPGFFNPFFFSKPGVPPQNWLIRNNTKNS

SEQ ID NO: 221789 - protein, 37 aa, Glycine max
  Clone ID: PAT_MRT3847_42304C.1.pep
SCFSAWCAKTELGPGSTRCICKLVIYRTLAKARHMPE

SEQ ID NO: 221790 - protein, 65 aa, Glycine max
  unsure (1)..(65): unsure at all Xaa locations
  Clone ID: PAT_MRT3847_42305C.1.pep
FIPQKRQXYNIXIEXXILXXXKKXPQKRKKTMIHSYKQAGGGCTXFPENLIRLDACPLCSQGHRL

SEQ ID NO: 221791 - protein, 106 aa, Glycine max
  Clone ID: PAT_MRT3847_42306C.1.pep
ILKPATMVKWLPIGNYYQPPFGRGGLEFLVFLAPPKWKNRIKTSHDPQEGPTLGTFFLFPFLWLNLRNLRRAGRGGLNFVFWAEILAPQWLLKWLNGRLVHPKILG

SEQ ID NO: 221792 - protein, 84 aa, Glycine max
  unsure (1)..(84): unsure at all Xaa locations
  Clone ID: PAT_MRT3847_42307C.1.pep
RLACPACTRHLLLFVLLSIYLNCVIWCASYGHLLVIFRYCRHVGSGRSAXTRNSGRFCTRLSPSSTVSTWVCSAGERPCLRHPG

SEQ ID NO: 221793 - protein, 72 aa, Glycine max
  unsure (1)..(72): unsure at all Xaa locations
  Clone ID: PAT_MRT3847_42308C.1.pep
TSVRGLTASAAFSWILNYIRKTQPVWXNLAAAVXHHLADAAXYVGHTTMEERLKTIEVAQDVQSMAHDTRKA

SEQ ID NO: 221794 - protein, 99 aa, Glycine max
  Clone ID: PAT_MRT3847_42309C.1.pep
KIIPGRKQVDKMVPEGLINIPLPTPVNAKKHPDLKVANDLHFETKMEEVKEDLNNIKQQYKTSTKRIQESQPPNKSDDGFKEINHVQSNGRRVFIRSRL

SEQ ID NO: 221795 - protein, 130 aa, Glycine max
  unsure (1)..(130): unsure at all Xaa locations
  Clone ID: PAT_MRT3847_4230C.1.pep
VNTNFTVTSKAADDGEXADLYIFKWTSLLIPPLTLLIINIIGVIVGVSDAINNGYDSWGPLFGRLFFALWVIVHLYPFLKGVMGKQEGVPTIILVWAILLSSILTLLWVRINPFLAKSDVVLEICGLNCD

SEQ ID NO: 221796 - protein, 333 aa, Glycine max
  unsure (1)..(333): unsure at all Xaa locations
  Clone ID: PAT_MRT3847_42310C.1.pep
METNLDYSKMLFLLLLGSTSLIFLSHLASAATPKLNTQEVKALKEIGSKIGKKDWNFGVDPCSGKGNWNVPDARKAFVMSSVICDCSFNHNSSCHVVSIYWKAQNLSGSLSPEFSKLHYLQKLDLSRNIITGSIPPQWGTMRLVELSLMGNKLSGPFPKVLTNITTLRNLSIEGNQFSGHIPTEIGKLTNLEKLVLSSNGFTGALPPVLSKLTKLIDLRISDNNFLGKIPDFISNWTLIEKLHMHGCSLEGPIPSSISALTRLSDLRITDLKGSKSSAFPPLNNLKSMKTLVLRKCMIKGEIPEYIGRMEKLXILDLSYNGLSGEIPRSFANL

SEQ ID NO: 221797 - protein, 92 aa, Glycine max
  Clone ID: PAT_MRT3847_42311C.1.pep
VSFFEAMKMACLKIKGFFWPWMVIFSQLCWKKHNACVSSVKLRVRSKLVLSFPVMLAEKWTYRMSLYKAKVLYSCPPSPLVCMKIKVQKLRC

SEQ ID NO: 221798 - protein, 140 aa, Glycine max
  unsure (1)..(140): unsure at all Xaa locations
  Clone ID: PAT_MRT3847_42312C.1.pep
PQRGVRSLFQRSGGQHPSWGSRCRCPVHLRPRPAPHVRQGLQVNVSPPNTLATPSRRKXRHAGLQAYEECSQKRKEAVEWRCSERLGPTEGGKQWDFPHARLFDTNRCVPFLWAWAFKTGITIGCPFSIQGVKMKKKKQK

SEQ ID NO: 221799 - protein, 53 aa, Glycine max
  Clone ID: PAT_MRT3847_42313C.1.pep
GHGIYAMNRLSGTICMYVLIELHRVFLCYFLFHLTNSASVVLMPLLLLLLHHM

SEQ ID NO: 221800 - protein, 49 aa, Glycine max
  Clone ID: PAT_MRT3847_42314C.1.pep
LFVRLPICRIRMTRCKCMHVYDRTLNVTIKHVLSCSILLKRLQHLVDRA

SEQ ID NO: 221801 - protein, 70 aa, Glycine max
  Clone ID: PAT_MRT3847_42315C.1.pep
MMMMGNNVHSIGVIGVMVSGLVLMMVSKGVSVRAQNCGCEAELCCSKYGYCGSGDDYWRYRLLAGLCSGI

SEQ ID NO: 221802 - protein, 105 aa, Glycine max
  unsure (1)..(105): unsure at all Xaa locations
  Clone ID: PAT_MRT3847_42316C.1.pep
LVIATATQQPGWSGILPSKHYAAYETEDERHGRNXHYYSVESEGQPTEDPVALRLKGGPGCSSSKGXIHDHGPNNFEGLKWLKRFRWFKRFWWLRWFRRYWRLRW

SEQ ID NO: 221803 - protein, 47 aa, Glycine max
  Clone ID: PAT_MRT3847_42317C.1.pep
YKNRFEDYMWYCYYFAKGRLCSYNIDPPLTSFYNLACRKVITLHIMH

SEQ ID NO: 221804 - protein, 91 aa, Glycine max
  unsure (1)..(91): unsure at all Xaa locations
  Clone ID: PAT_MRT3847_42318C.1.pep
IYGSLQVHAFSVXXDPDYFXNFAQGLLDGLKAGVSSRDIVHIQNAKGLGYAMNTSEELNFVKEVAATIFVVLDPVYRYLFVPYIVYSLSAL

SEQ ID NO: 221805 - protein, 79 aa, Glycine max
  Clone ID: PAT_MRT3847_42319C.1.pep
VNVPLMPMRRHHHREFDDDDGNEDAAEEEMLPPHEIVARNSAQSPMLAYSVLEGVGRTLKGRDLRQVRNAVWPQTGFLD

SEQ ID NO: 221806 - protein, 132 aa, Glycine max
  Clone ID: PAT_MRT3847_4231C.1.pep
LEPNRLEYGCEKTTEGGEFADLYIFKWTSLLIPPLTLLIINIIGVIVGVSDAINNGYDSWGPLFGRLFFALWVIVHLYPFLKGVMGKQEGVPTIILVWAILLSSILTLLWVRINPFLAKSDVVLEICGLNCD

SEQ ID NO: 221807 - protein, 167 aa, Glycine max
  Clone ID: PAT_MRT3847_42320C.1.pep
MRAVSALMVARMLTRDHSLPVLCSESIPFRSVWWFVYAGISCFLVLFAGIMSGLTLGLMSLGLVDLEILERSGSPVEKMQAAVILPVVKKQHQLLVTLLLCNAVAMEALPLYLDKLFNQFVAIILSVTFVLFFGEVIPQAICSRYGLAVGANFAWLSLGLHPCMAYF

SEQ ID NO: 221808 - protein, 31 aa, Glycine max
  Clone ID: PAT_MRT3847_42321C.1.pep
HPYCGTLLRLSSHALRHVIKCSPTISDPRKY

SEQ ID NO: 221809 - protein, 90 aa, Glycine max
  Clone ID: PAT_MRT3847_42322C.1.pep
LKLHLRIYTHKYINICITDNVVSLCLLLSAAFKVINHRHLDVRQKFEHVYVVLSLLCFLSCKLEQKLSNVLHARIQFHYLPSISQSMIMH

SEQ ID NO: 221810 - protein, 70 aa, Glycine max
  Clone ID: PAT_MRT3847_42323C.1.pep
KLHKIYAEQQFPSANQKKKDCHEGNYFHRKLFPQTVILLHQFPKCKHDALYGVTMYAIQQISVLNLAFTR

SEQ ID NO: 221811 - protein, 61 aa, Glycine max
  Clone ID: PAT_MRT3847_42324C.1.pep
STKSGKENDSRSLWPAQRVIFFPLRNRPQRSRKKLRDSCTQVTTAFVSGFKVRPPVIAVCK

SEQ ID NO: 221812 - protein, 124 aa, Glycine max
  Clone ID: PAT_MRT3847_42325C.1.pep
KVVPGYGRVPPAIAPVIVSGYGRVLVRVYFQCYKGASHVCRHTISLLCSRMTAHSPVVSPALEGQCHELSCLEEWSHLSFLAFIVQNHISSLYSYPSPCVFFVCNRSSCPFFPILGSRWAPALG

SEQ ID NO: 221813 - protein, 113 aa, Glycine max
  Clone ID: PAT_MRT3847_42326C.1.pep
VTLPATPNSEATPMEWPLDRPRDIPRSVLTTAVATSVGTLHGAYHAGFDGFLEGATTMTPLVEHIVDKVAHKVAQDMVEGWDEGDAFEEASVEAALNAALGGDYVESYTVGTS

SEQ ID NO: 221814 - protein, 137 aa, Glycine max
  Clone ID: PAT_MRT3847_42327C.1.pep
FRFCTSRRGKRLPLSIGGGAGAKNAILMNMPNAVLSMWGCFVGDLVYEVSKMTGPYIKGTDSVLIAFGNWADDTMNYEASPHKLVQIGEIQDTVVWTFSQEELFTACSTQVRSATTLVADGSPYLYAMVHDSSPSTI

SEQ ID NO: 221815 - protein, 54 aa, Glycine max
  Clone ID: PAT_MRT3847_42328C.1.pep
GKIEDSAFWIPHPRTGIYFPKGHEWVMDDVPEDAARLNQTYWFRNVDGVDHPRH

SEQ ID NO: 221816 - protein, 46 aa, Glycine max
  Clone ID: PAT_MRT3847_42329C.1.pep
LTICEDGAPAGTAPDCIARPTRAVVSMRCRLARYCGTSRNMAYVQI

SEQ ID NO: 221817 - protein, 628 aa, Glycine max
  unsure (1)..(628): unsure at all Xaa locations
  Clone ID: PAT_MRT3847_4232C.1.pep
LQLASWKCSGEVSVYTTGGGVSGSGSLVQHGPISLRTNVRDHPGMIQVFQGQNGIHKIEGNELPRLVYVSREXKRPGYALHKKAGAMNALVRVSAIITNAPYVLNVDCDHYINNSKALREAMCFMMDPTSGKKICYVQFPQRFDGIDRHDRYSNRNVVFFDINMKGLDGIQGPIYVGTGCVFRRQAFYGYDAPTSKKAPRKTCNCWPKWCCCLCCGSKKKKIKAKSSVKKKIXNMDDIKQMPALENIEEGIEGIDNEKSSLMSQSKFEKKFGQSSVFIASTLLEDGGVPKAASSATLLKEAIHVISCGYEDKTEWGKEVGWIYGSVTEDILTGFKMHCHGWRSVYCMPKRPAFKGSAPINLSDRLHQVLRWALGSVEIFFSRHCPIWYGHGGGLKSLERFSYINSVVYPLTSIPLIAYCALPAVCLLTGKFIVPEISNYASIIFMALFISIAATGILEMQWGGVGIHDWWRNEQFWVIGGASSHLFALFQGLLKVLAGVNTNFTVTSKAADDGEFADLYIFKWTSLLIPPLTLLIINIIGVIVGVSDAINNGYDSWGPLFGRLFFALWVIVHLYPFLKGVMGKQEGVPTIILVWAILLSSILTLLWVRINPFLAKSDVVLEICGLNCD

SEQ ID NO: 221818 - protein, 80 aa, Glycine max
  Clone ID: PAT_MRT3847_42330C.1.pep
IASCRLLLLYTLFTISIYSLSLDIYIIERSKEIEFSSEPGSCNHIKSKRSLSFVVTMGPDTVADSIASVRHAAFFFNGLV

SEQ ID NO: 221819 - protein, 59 aa, Glycine max
  unsure (1)..(59): unsure at all Xaa locations
  Clone ID: PAT_MRT3847_42331C.1.pep
KLSHVSKKQLLFMXTQLGFKTMTKVMQVTQWSITQLPTTTVXXQSLFKQHRASMKTECN

SEQ ID NO: 221820 - protein, 56 aa, Glycine max
  Clone ID: PAT_MRT3847_42332C.1.pep
NEVLITLTIIILELYPKLPLFKMPKLIVKDSKVPVNYIENHREGKKMFFKGFFKLK

SEQ ID NO: 221821 - protein, 232 aa, Glycine max
  unsure (1)..(232): unsure at all Xaa locations
  Clone ID: PAT_MRT3847_42333C.1.pep
PRVRAIPSLVNQPLAFSFSFLLFLALCTPLAANNTDFGGSACLKVSPTHFAGSVTEVITAIRQVASILSRFSPPFANFRLATALADCLDLLDLSSDVLSWALSASQNPKGKHNSTGNLSSDLRTWLSAALAHPETCMEGLEGTNSIVKGLVSAGIGQVVSLVEQLLAQVGPYRINXDDASSKGQFPLWVKPKEKKLLQSIGMTAADVTVALDGSGNYAKIMDAVPAAPDYSM

SEQ ID NO: 221822 - protein, 185 aa, Glycine max
  unsure (1)..(185): unsure at all Xaa locations
  Clone ID: PAT_MRT3847_42334C.1.pep
MSEEENKGCAFLGTNSTYSGFLLDPEKCDMLSLPDKQRLVREIARQSKDASSMLQSFTRRELLEIICAELGKERKYTGYTKSQMIEHLLKIISKNSNLHINGNTPPQSPAKSCIGTKRXKTCDSGFTSCSSXNSKETVKTFLCQNVACKAKLNPEDSFCRRCSLXICHHYDDNXDPSLWLTCSSD

SEQ ID NO: 221823 - protein, 44 aa, Glycine max
  unsure (1)..(44): unsure at all Xaa locations
  Clone ID: PAT_MRT3847_42335C.1.pep
FVGFFGAYESWKPYFLFLFPILRNFEQFYFRRNXXXCLXLLLFF

SEQ ID NO: 221824 - protein, 114 aa, Glycine max
  Clone ID: PAT_MRT3847_42336C.1.pep
QTQTQKVHRIWAHTSTKLSQLSRILLPLEKTTEGDQQQRRKSSSLSLSHNPIVTFSSFCHFFSVFNGCPHQNSALNNRGPVQVSIFLIFWDVKKIPNRKSLFSSSFGVLFFCQI

SEQ ID NO: 221825 - protein, 114 aa, Glycine max
  Clone ID: PAT_MRT3847_42337C.1.pep
MEGDTFSGLGNGTQIDSKILQTFKKSFVQVQNILDQNRVLINEINQNHESKVPDNLSRNVGLIRELNNNIRRVVDLYADLSSSFTKSMEVSSEGDSSGAVKSDGKAGHKRHRPL

SEQ ID NO: 221826 - protein, 137 aa, Glycine max
  unsure (1)..(137): unsure at all Xaa locations
  Clone ID: PAT_MRT3847_42338C.1.pep
NGETIKADLHFLCTXKPLGSTWIRETLLKNDLDADGRIKVDEHLRVKGKSNIFAIGDITDVQEIKQGMYASAHAQVVAKNLKLLIEGGGKERKLGTYKAQPPISIVSLGRKIAVAQSWKASWGICFWENQKGIRTRA

SEQ ID NO: 221827 - protein, 88 aa, Glycine max
  Clone ID: PAT_MRT3847_42339C.1.pep
MCVWMLVLALVVATGARYVPNPMDAGLRDQMNFISYGGVGVYSRIGINGLPFVGTGARLCDGFGGRGGLGGGLGGGLVGGLGILQWEL

SEQ ID NO: 221828 - protein, 194 aa, Glycine max
  unsure (1)..(194): unsure at all Xaa locations
  Clone ID: PAT_MRT3847_4233C.1.pep
MKSSSRLFTIGLVSAWYSSNIGVLLLNKYLLSNYGFKYPIFLTMCHMTACSLFSYVAIAWLKMVPMQTIRSRLQFLKIAALSLVFCVSVVFGNVSLRYLPVSFNQAVGATTPFFTAVFAYIMTFKREAWLTYLTLVPVVTGVVIASGGEPSFHLFGFIVCIAATAARALKSVLQGILLSSEGEKXNSMNPSFYM

SEQ ID NO: 221829 - protein, 38 aa, Glycine max
  Clone ID: PAT_MRT3847_42340C.1.pep
DKSDASCEHIPIVIVDVLTQQSYRWYVSSHNHSDPQAF

SEQ ID NO: 221830 - protein, 360 aa, Glycine max
  Clone ID: PAT_MRT3847_42341C.1.pep
MAEKKVVILGGGVAGANLAKTIQHQANVTLIDPKEYFEIPWASLRGLVEPTFAERIVINHREYFKKGNLVVSSAVNITETAVVTEDGQQIAYDYLVIATGHTEPIPKTRSERLDQYKGENAKIKSASSVLIVGGGPTGVELAAEIAVDFPDKKVTIVHKGTRLLEYIGTKASSKTLKWLKSKKIDVKLEQSVDLSSSSEENKTYQTSNGETIKADLHFLCTGKPLGSTWIRETLLKNDLDADGRIKVDEHLRVKGKSNIFAIGDITDVQEIKQGMYASAHAQVVAKNLKLLIEGGGKERKLGTYKAQPPISIVSLGRKIAVAQFPFMTVLGRLPGMIKSGDLFVGKTRKELGLEPNVKKS

SEQ ID NO: 221831 - protein, 75 aa, Glycine max
  Clone ID: PAT_MRT3847_42342C.1.pep
DERRGLPRLKSSSKPSFVISTLSLIFTRSGFIVRFHDSVCILATSAVMDPTLPGLEESQELIDQMEIILSSRQVC

SEQ ID NO: 221832 - protein, 85 aa, Glycine max
  unsure (1)..(85): unsure at all Xaa locations
  Clone ID: PAT_MRT3847_42343C.1.pep
LHTMLIMHIIEDSDMLQCDIVAPYLCFNDRQTLSFCVTDLIMSQRAHDHPRAWICSEVECRFLRTASCQCVCCYGXRIVLGSQAS

SEQ ID NO: 221833 - protein, 42 aa, Glycine max
  Clone ID: PAT_MRT3847_42344C.1.pep
LRFPYMFYLPLYIYLITNLIIQQIQSHTYTYTHINSHFISHN

SEQ ID NO: 221834 - protein, 88 aa, Glycine max
  unsure (1)..(88): unsure at all Xaa locations
  Clone ID: PAT_MRT3847_42345C.1.pep
LNNIEKXXSLSWICHRRXLXQRHQXXHXXXXSVPXPLPPKKPXFSXYHNXREXTXKEXMXXGGDIGGCSREKXVREREKGKSVSCRLI

SEQ ID NO: 221835 - protein, 173 aa, Glycine max
  Clone ID: PAT_MRT3847_42346C.1.pep
ARAGLQDGFQQRVDLVGGYYDAGDHVKFGLPMAYSVTMLAWGAIEFNKEITDLNQMGHALWAIKWGTDYFIKAHTQPNVLWGQVGDGVSDHYCWERAEDMTTSRGAYKIDEQHPGSDLAGETAAALAAAAIAFRPYNSSYSNLLLVHAKQLFTFADRFRGLYDNSISSAQQFY

SEQ ID NO: 221836 - protein, 96 aa, Glycine max
  Clone ID: PAT_MRT3847_42347C.1.pep
MHYQAAAAAWWGSYVAAPRNAAAAVVGDPLERIERLASESAVVIFSVSTCCMCHAVKRLLCGMGVNPTVHELDEDPRGKDLERALMRLLGTPLGVP

SEQ ID NO: 221837 - protein, 114 aa, Glycine max
  Clone ID: PAT_MRT3847_42348C.1.pep
QNLSIIFQNLERKMAKLSFCFCTLLLLLSFSLSETRPLRNHDPFSSHFPPSPLFFSTIKHYLYPESEGSSLAKKSVKVSYSIGFRNSNATGSHYYRPSRVSPGGPDAHHHFEAP

SEQ ID NO: 221838 - protein, 59 aa, Glycine max
  Clone ID: PAT_MRT3847_42349C.1.pep
GSATSWIWTSFQTLILNPYKTLLKFWQPPVIFSPHITTFLFFFLDTPQALFFYTNKLSK

SEQ ID NO: 221839 - protein, 72 aa, Glycine max
  Clone ID: PAT_MRT3847_4234C.1.pep
NRPVFSSPSFSTSNVSLQFSITFLYPCNHIYVKKSHHQAMSIFLKMILSLDSYLYIYISIYKSKKMILYITI

SEQ ID NO: 221840 - protein, 79 aa, Glycine max
  Clone ID: PAT_MRT3847_42350C.1.pep
DLFVPSAVSLAVPLALMSLTSEVNGKGQNSPNVLASEQIAPRGQLVFSVGLGALIFVPVFKALTGLPSYMGMLLGLGVL

SEQ ID NO: 221841 - protein, 52 aa, Glycine max
  Clone ID: PAT_MRT3847_42351C.1.pep
TTYSPYSTTFSYPLLSQLSCGGRCLNPRIIALHYHSFAYPPPPPPKKADVIQ

SEQ ID NO: 221842 - protein, 223 aa, Glycine max
  Clone ID: PAT_MRT3847_42352C.1.pep
MSSFRKPFVAILWVVLFLGLHEAAEPEKSTYIVHVAKSEMPESFEHHALWYESSLKTVSDSAEIMYTYDNAIHGYATRLTAEEARLLETQAGILAVLPETRYELHTTRTPMFLGLDKSADMFPESSSGSDVIIGVLDTGVWPESKSFDDTGLGPVPSTWKGACETGTNFTASNCNRKLIGARFFSKGVEAILGPINETEESRSARDDDGHGTHTASTAAVSVV

SEQ ID NO: 221843 - protein, 80 aa, Glycine max
  Clone ID: PAT_MRT3847_42353C.1.pep
PTFFFSLGATNKSPSDLLRNLIGDWKPPCSPPLNAPFTAVARAVTATLTRALPPALSPFFPTFFPTFAAFPRESLNQGLN

SEQ ID NO: 221844 - protein, 170 aa, Glycine max
  Clone ID: PAT_MRT3847_42354C.1.pep
SECFKQLWGVTAAAPTVLQAIMSQENKLQEVMIGLAASVFSFMTSSESSTVFEESGITEAELANKLIHILKKHRYPPTKVPRIRRFVIELAIWMMKEREENIHTFKDLGMEEVLEGVLETTSELESFNGFSGTVGLNRHNLTIHSLVETALKVLEDREINEAQNHVCKIS

SEQ ID NO: 221845 - protein, 131 aa, Glycine max
  unsure (1)..(131): unsure at all Xaa locations
  Clone ID: PAT_MRT3847_42355C.1.pep
GEKIQGPPIFFPPRKGARAPPKNTFFPPGLGGPPICPPPXRGPEPNFPNPTKETGNPPRKRGAPPSPNVKQPPFFPRNPGRVAPPDPPGGFVFSPPPGDNSCKRTYLCKNSKGSLSGPLFRGKGFFFQRTK

SEQ ID NO: 221846 - protein, 49 aa, Glycine max
  unsure (1)..(49): unsure at all Xaa locations
  Clone ID: PAT_MRT3847_42356C.1.pep
HLIHPFYPNHNNFSPHTYIIKYFPYTETDLILTXFHPYIQYLLYNSFYN

SEQ ID NO: 221847 - protein, 53 aa, Glycine max
  Clone ID: PAT_MRT3847_42357C.1.pep
CEIEYSKITILSQQSFRVRMNFLHQFTTTGAIRQKAIQVHHSFKSHALHDKNK

SEQ ID NO: 221848 - protein, 91 aa, Glycine max
  unsure (1)..(91): unsure at all Xaa locations
  Clone ID: PAT_MRT3847_42358C.1.pep
SDTATPPPSTSTKPARSKKGTMKETLLTARVHTTDCDEQGTLSSTGINXNLNQDELEAPLQERKTDFNQTHFARIKEVKEAGRKLEGPLRQ

SEQ ID NO: 221849 - protein, 185 aa, Glycine max
  Clone ID: PAT_MRT3847_42359C.1.pep
QPKPWVLRLIAVSCISLAVKMMRTEYPFTDVQALLNQSDGGIIFETQTIQRMEALILGALQWRMRSITPFSFVAFFIALMGLKDLPMGQVLKNRASEIIFKSQREIRLWGFKPSIIAASALLCASHELFPFQYPSFLKAISDSSYVNKESVEQCYKVIQDIAIEEEYSSALNGVSSSDTPINVLD

SEQ ID NO: 221850 - protein, 55 aa, Glycine max
  Clone ID: PAT_MRT3847_4235C.1.pep
WWSFSNMLLYGPRIILVHSCSPWYSIMKHWGSGKIVGINNIIIAYPKCGEGHYFS

SEQ ID NO: 221851 - protein, 39 aa, Glycine max
  Clone ID: PAT_MRT3847_42360C.1.pep
VAVCQYNEDKPRCVISFSHDRSPSLTFSSIDLAFLSIGN

SEQ ID NO: 221852 - protein, 72 aa, Glycine max
  Clone ID: PAT_MRT3847_42361C.1.pep
HSRLSRGTLRVKPVPSLCRKRQRECSGVSGSPCDIMGRVMMCIRAMGVRVDKPVSIVAYFGLGVRQLPVTEH

SEQ ID NO: 221853 - protein, 129 aa, Glycine max
  unsure (1)..(129): unsure at all Xaa locations
  Clone ID: PAT_MRT3847_42362C.1.pep
AGGPVSRRTAANESTTPQAAQAVLRPRPASICGIVRAKQPPPGGSHDQDFEWTGGSTSRDADAQPQGASAAASRPHNRVTTGGLEREFTLNQSPPLILLADREXRVGVRPASWWPLGAGASLWRRPGAV

SEQ ID NO: 221854 - protein, 85 aa, Glycine max
  unsure (1)..(85): unsure at all Xaa locations
  Clone ID: PAT_MRT3847_42363C.1.pep
IDGTQDTHTAGYRNFNANAXTVSAGTTPCGANNPHSYNKAGHSEELDATNQERLXKWLKKNNMNYRDCSDTQRKPQGLTPEWNTD

SEQ ID NO: 221855 - protein, 76 aa, Glycine max
  Clone ID: PAT_MRT3847_42364C.1.pep
VIIQPRGNIMERFLLVGILCSHVTVASRPTILNALKMLEGDIEVPPIPDRPLSHGNYVLYSGDCSGMSSGCGFVSS

SEQ ID NO: 221856 - protein, 125 aa, Glycine max
  Clone ID: PAT_MRT3847_42365C.1.pep
MAGRFRELMKKYGKVALGVHLSVSTVSITGLYVAIRNNVDVEAILEKLHMGTVSEEQNPNPNPSDDVAAPPKNRTAQLAASAGGAFTLAILCNKALFPVRVPITVALTPPIARFLARRKIIKTGL

SEQ ID NO: 221857 - protein, 50 aa, Glycine max
  Clone ID: PAT_MRT3847_42366C.1.pep
NRCGHFLIARAYSAIGSRLISFIQSSKRTNETKDTCQISHRMPHFQKTRQ

SEQ ID NO: 221858 - protein, 102 aa, Glycine max
  unsure (1)..(102): unsure at all Xaa locations
  Clone ID: PAT_MRT3847_42367C.1.pep
MAGRFRELMKKYGKVALGVHLSVSTVSITGLYVAIRNNVDVEAILEKLHMGTVSEEQNPNPNPSDDXRCAAKNRTAQLAVSAGGAFTLAILLHKALFPVRVP

SEQ ID NO: 221859 - protein, 48 aa, Glycine max
  Clone ID: PAT_MRT3847_42368C.1.pep
GLRPQPRTTLSSSIRSRRERTLHQHHYALRTMSLEEELGFTSHSACAK

SEQ ID NO: 221860 - protein, 336 aa, Glycine max
  Clone ID: PAT_MRT3847_42369C.1.pep
ATHALEGKTFTPNNNICKSLEAASEVSSCEYEYGTAWGKQVGWMYGSTSEDLLTGLKIHTKGWRSEVCSPELSPFMGCSPQDILVVIGQQKRWISGLLDILLSKHCPIFGTLFGKLQFRQCLGYLWITTWSLRPVPEICYAALPAYCIINNSSFLPKELGQWIPATLLVIYNVSTLLENLKIGLSIRTWCNNQRMARITTMNSWFFGFLAILLKRLRISNIGFEITRKDETFSNEGANENDGRFIFNKSPVFIPGTTILLIQLTALVTMWLGWQPPVRNNGHGSGVGEVFCSTYLVVCYWPFLKGLFEKGKYGIPLSTICKSMALAFLFVYLCKAN

SEQ ID NO: 221861 - protein, 71 aa, Glycine max
  Clone ID: PAT_MRT3847_42370C.1.pep
HCIQSQSICRICYIDMEQYWDRQSSQEEPAMPDHLRVHPIILDLLLQHTGSHTIEGLALQDIQLLDFTSVL

SEQ ID NO: 221862 - protein, 48 aa, Glycine max
  Clone ID: PAT_MRT3847_42371C.1.pep
ENLRSEYDYLQRKRVVANYSTHDVGHLFTASYFILSTIHYISSTSRFS

SEQ ID NO: 221863 - protein, 54 aa, Glycine max
  Clone ID: PAT_MRT3847_42372C.1.pep
NDTTDPSTRADAGLRKVTVSDHTLSQTHLISDGCQSRLYSHTIGHGFHRCLSYY

SEQ ID NO: 221864 - protein, 96 aa, Glycine max
  Clone ID: PAT_MRT3847_42373C.1.pep
KFPSAGKSNGQSQPPPPKQVQPPITPAQQKGTLKGPNDQCKAPFEPPKLLKTGTTPNFWEPPILMPRLGVLSRANSISKNPGPAQNQKISNPNKNF

SEQ ID NO: 221865 - protein, 53 aa, Glycine max
  Clone ID: PAT_MRT3847_42374C.1.pep
LDSCLLNSDSSFRTLVVECGGFNFLGKTMTRDYSEYGHFTALNLACSGFRGPL

SEQ ID NO: 221866 - protein, 455 aa, Glycine max
  Clone ID: PAT_MRT3847_42375C.1.pep
QLCEEKYHRSCIEANDANTDDSRDVFFCGNRCQELSERLEMLLGVKHEMEDGYSWTFIRRSDVGFDASQIKPQMVECNSKLAVAVSIMDECFMPYIDHRSGINLIHSILYNRGSNFNRLNYSGFVTAILERGDEIISAASIRIRGNQLAEMPFIGTRYMYRRQGMCRRLLNAVEWGLGSLNVELLVIPAISELRETWTSVFGFESLESTSKQILHNKNLLVFPHVDMLQKKISKHKLAGQNLNPSEGQINDETISIESGCHLPDGSLNKVPDIASNAKDHRKSSTDDTCQVVCQAAPEILVMEDNNSIENARDYVTGTCCRAGDSQLNSCWVPCEERQCLTSCIRSEATEGNCVSVSLEVTENFLNQVKVANEAISNSSAENSASCGAERIPLDSQIAFDTRDSKDSGDSIHQDSYKISDSCELRSKTDCGEPNFIGTKEVHAEPVRVSGFHSRP

SEQ ID NO: 221867 - protein, 156 aa, Glycine max
  Clone ID: PAT_MRT3847_42376C.1.pep
MAASGSWKSGSGSSMGLERMSVEQLKAVKEQADLEVNLLQDSLSNIRTATTRLEIASSALNDLSLRPQGNHILVPLTASLYVPATLHDSQHVLVDVGTGYFIEKTMPEGKDYCDRKINLLKSNFDQLVEVASKKKNVADEAGVILQAKLKQLESSS

SEQ ID NO: 221868 - protein, 80 aa, Glycine max
  Clone ID: PAT_MRT3847_42377C.1.pep
LWELTTTRIPWQGLNPMQVVGAVGFQNKRLEIPEDVNPVVAQIIRDCWQTEPHLRPSFSQLMSRLYRLQNLIVPKTGATH

SEQ ID NO: 221869 - protein, 90 aa, Glycine max
  unsure (1)..(90): unsure at all Xaa locations
  Clone ID: PAT_MRT3847_42378C.1.pep
YRSFYKHPWHCPNQITSKFSNVICYXHIIDPTGKYNXECNIIIQLERINVYYNDASDQRYIPPSMLMYLXPATMDTIKSGPYRKIFLSDN

SEQ ID NO: 221870 - protein, 95 aa, Glycine max
  unsure (1)..(95): unsure at all Xaa locations
  Clone ID: PAT_MRT3847_42379C.1.pep
DSLLXPSVHIXKGVKASKKLXXNXNGAIQQNDSNNNSSLTQDRSSVENQTTDDGHVKSSVEFISEVKTGSVASSSPYPNYPDLKPPSSPTPSKPQ

SEQ ID NO: 221871 - protein, 77 aa, Glycine max
  Clone ID: PAT_MRT3847_4237C.1.pep
MGAETESSQEKPAQERPKAALSQEQFLSWKRHKDAAVSARKAEVSRKRAEDIAAGTVQMNGRELFLHEPWVFDNSRY

SEQ ID NO: 221872 - protein, 49 aa, Glycine max
  Clone ID: PAT_MRT3847_42380C.1.pep
NDHTFVFCKATMIDTLIQVVVTTPWCERTAAQVSHHYERVIYKQPWSVA

SEQ ID NO: 221873 - protein, 78 aa, Glycine max
  Clone ID: PAT_MRT3847_42381C.1.pep
MDHPSYNGDLNYNHQEGQVQHQQQHGQWAAAAHPHQYEQRWMGMQYPATDMDMMQQQTLMYPQNCMTYANPYYTTTST

SEQ ID NO: 221874 - protein, 46 aa, Glycine max
  Clone ID: PAT_MRT3847_42382C.1.pep
ASLCDIVVQLPDYKRLRVHVFRRACYSWSINSFFSQFIVSRSGVSN

SEQ ID NO: 221875 - protein, 62 aa, Glycine max
  Clone ID: PAT_MRT3847_42383C.1.pep
TNDSSSFQNMTSIYKHVSKHDHRNNTQFSCIGNALFQNRRAKIQPMYFPPQNTKIIFHYHNS

SEQ ID NO: 221876 - protein, 114 aa, Glycine max
  unsure (1)..(114): unsure at all Xaa locations
  Clone ID: PAT_MRT3847_42384C.1.pep
LQKLRCFSLIGLNYYALINTFAGGEAKYTRLCSTKSVSTLNGEFPRPTIIADRGHTISIYAYNKGNYNITLHWHXVNPARNSWTDRPSYIIQCPIQPGKKFTPKLIFTSHVRTI

SEQ ID NO: 221877 - protein, 60 aa, Glycine max
  Clone ID: PAT_MRT3847_42385C.1.pep
PIFKPQKVDISLDLSFSAVGEVCVFPEPLSIHFSATQKSCSQKALEDKNTALLSGDLLLG

SEQ ID NO: 221878 - protein, 112 aa, Glycine max
  Clone ID: PAT_MRT3847_42386C.1.pep
LPVFFFGVCCLGGGFLLFVVVGCACLSRARSLCVPFPALVALGLVCSALVVLVRALRLLFWGALLGCLLRLGGVPGRGFPFGAALLFLGVGWGSLPVWTPARGVGFVGRVFN

SEQ ID NO: 221879 - protein, 371 aa, Glycine max
  Clone ID: PAT_MRT3847_42387C.1.pep
RAEKAIGQSNPFRRWDTASSKSEVPQLTEARMFSFEELKKYTKNFSQVNGIGSGGFGKVYKGNLPNGQVIAIKRAQKESMQGKLEFKAEIELLSRVHHKNLVSLVGFCFEHEEQMLVYEYVQNGSLKDALSGKSGIRLDWIRRLKIALGTARGLAYLHELVNPPIIHRDIKSNNILLDDRLNAKVSDFGLSKSMVDSEKDHVTTQVKGTMGYLDPEYYMSQQLTEKSDVYSFGVLMLELISARRPLERGKYIVKEVRNALDKTKGSYGLDEIIDPAIGLASTTLTLSGFDKFVDMTMTCVKESGSDRPKMSDVVREIENILKSAGANPTEESPSISSSYEEVSRGSSSHPYNSNDTFDLSAGLPYPKVDPK

SEQ ID NO: 221880 - protein, 97 aa, Glycine max
  Clone ID: PAT_MRT3847_42388C.1.pep
NKNSGPGNKSALVPEGICFGAPPMTPKGLGEKKFSLIPVFIQKGGQIIFEAKSLVPGTKPQNFLKFETSSEFPLGKKVSKLGRKVKALFTRYPKPGV

SEQ ID NO: 221881 - protein, 52 aa, Glycine max
  Clone ID: PAT_MRT3847_42389C.1.pep
HLNGPTNTPLMSKPHLTELPASHIVSCIRARRNHVQSCLRRETVKRTQPNTP

SEQ ID NO: 221882 - protein, 50 aa, Glycine max
  Clone ID: PAT_MRT3847_4238C.1.pep
QIKGNISNTGERVKSNMVQNTNLIKSIYNDGHNSNQISTLTYPENNEDKT

SEQ ID NO: 221883 - protein, 47 aa, Glycine max
  Clone ID: PAT_MRT3847_42390C.1.pep
GLKKIGRPRISFRWRKKASVDNPLVSGLKRGAVTQKIIIVKKNNHCF

SEQ ID NO: 221884 - protein, 46 aa, Glycine max
  Clone ID: PAT_MRT3847_42391C.1.pep
PYNRFFILITNPKVLYQTHHSLATTWRPILLTLQPLILIMLYKLPC

SEQ ID NO: 221885 - protein, 146 aa, Glycine max
  Clone ID: PAT_MRT3847_42392C.1.pep
LLSNLKISRKHGPKNGPAGKRKAKRGRKKTGGKGKICRQKADKRKKKRGPKPKQKKDNQKHSNHKQKKRKRGTTKKRTNRNPRGNHPPPTGRRKKARRNKGQKCCLKKEEIRSPVHTTNDPRSLTGKAWGAERGSQLGKIGGGKRP

SEQ ID NO: 221886 - protein, 62 aa, Glycine max
  Clone ID: PAT_MRT3847_42393C.1.pep
KPLGFQSLKARFYGTPIIGMIPIKNPYFKSPKKKAWVFPQKKKEKRVEAPLSPHKLLDPKWE

SEQ ID NO: 221887 - protein, 194 aa, Glycine max
  Clone ID: PAT_MRT3847_42394C.1.pep
MCGGAIIADFIPRQRPRTLTASELWPKRSEPQPQPPPPPVKRQRKNLYRGIRQRPWGKWAAEIRDPRKGVRVWLGTFNTAEEAARAYDKEARKIRGKKAKVNFPNEDDPLPQYGSCKSLNLEFGYDLNQTGLFPSSNADENCGSHVAYSVTEANNKVEKLSEELMAYENLMRFYQIPENVVGDLWAFPDTSPPL

SEQ ID NO: 221888 - protein, 194 aa, Glycine max; identical to SEQ ID NO: 221887
  Clone ID: PAT_MRT3847_42395C.1.pep

SEQ ID NO: 221889 - protein, 101 aa, Glycine max
  unsure (1)..(101): unsure at all Xaa locations
  Clone ID: PAT_MRT3847_42396C.1.pep
KEVSFYLKKVGYNPDKIPFVPISGFEGDNMIVRCTYLDWYKGPTLLEALDQINEPKRPLNKTLKLSLQDVYKIGEIGTAPMDMFXTGVQKPGIVVTFGPPG

SEQ ID NO: 221890 - protein, 89 aa, Glycine max
  Clone ID: PAT_MRT3847_42397C.1.pep
ESRGNSLSKPITNKSTATAFTSFFIQILTTQHVHVSLQPLRHRAWTEVEIFLSLHRVENHQKRFEWIITRRTQAKPAQVCAGVGWLALL

SEQ ID NO: 221891 - protein, 37 aa, Glycine max
  unsure (1)..(37): unsure at all Xaa locations
  Clone ID: PAT_MRT3847_42398C.1.pep
KSFLNLPKNQYLNTKTNPSSLNHQHSSXIPSLHSYHK

SEQ ID NO: 221892 - protein, 55 aa, Glycine max
  Clone ID: PAT_MRT3847_42399C.1.pep
KRKYLRGTRRAVFFKFSPQGKQFSKKSNQKLPRVPRGPHFFVSLAQVKKKRHFFT

SEQ ID NO: 221893 - protein, 49 aa, Glycine max
  Clone ID: PAT_MRT3847_4239C.1.pep
ATRTPPIRLTIEDTNRGLEQMPTTLISTTTHITLRNRYTFNILIKSKGI

SEQ ID NO: 221894 - protein, 241 aa, Glycine max
  unsure (1)..(241): unsure at all Xaa locations
  Clone ID: PAT_MRT3847_423C.1.pep
VILTYQYQQQQQQSTTTDYYPSVRDDEEGEGISKIRVPRQKHIPVSKSQLLDAIILSIQDDIDAHHFRLLTSXVLTINLFSLSASHFLFLNRCLDSILHAEHKTILRRCVDYQLTDSLQQLVSNPNVKEEGNLYDYQPALDLTALLRSLDIPTKKDYDTGSRVTIATRFQRAFMQLLSNAQFEELSARDLMLTSALNTDYLLTLPIYVDWKRAYESNAHIFKGGYATEKQKGLLIGENWIT

SEQ ID NO: 221895 - protein, 71 aa, Glycine max
  Clone ID: PAT_MRT3847_42400C.1.pep
DPYCCPRRGWGLVSAGIRAHRECTYPGTRTRAGVRGGYFNYFLLVSLLYTLVIKCLFLMFVHNNPSILACI

SEQ ID NO: 221896 - protein, 55 aa, Glycine max
  Clone ID: PAT_MRT3847_42401C.1.pep
NLRPGHSVTSWFVRGRTCRSILASTVSHSLLDKVVALGSSPCPAPVLVSFETHTR

SEQ ID NO: 221897 - protein, 67 aa, Glycine max
  Clone ID: PAT_MRT3847_42402C.1.pep
LEAADADDVGFEGTHCSGLCNGSKFQTAFWLAPVQGLGFWKFFIYFFLLISSSVESLLRPKILLQDT

SEQ ID NO: 221898 - protein, 243 aa, Glycine max
  unsure (1)..(243): unsure at all Xaa locations
  Clone ID: PAT_MRT3847_42403C.1.pep
GPEFPRRPTRPVRFCXQLSAEQWAIVDVSIDKVEDNIDASLVKCRKRPSGCIIEDKSNGHCKVIWVEHLECQKSAVHSMYRTIVNSGLAFGARHWIATLQLQCERLVFFMATNVPMKDSTGVATLAGRKSILKLAQRMTWSFCHAIGASSFHTWTKFTSKTGEDIRISSRKNLNDPGEPLGLILCAVCSVWLPVSPNVLFDFLRDETRRTEWDIMSSGGTVQSIANLAKGQDRRNAVAIQTIK

SEQ ID NO: 221899 - protein, 534 aa, Glycine max
  Clone ID: PAT_MRT3847_42404C.1.pep
TVAVSRGRFRAVLGKYAPGSTSPSCSSGHDQENRSSLDFYTGIFGLDKSRIMDTVNQAMEELIKMATVGEPLWLRSFETGREILNYDEYVREFAVENSSSGKPRRSIEASRDTAVVFVDLPRLVQSFLDVNQWKEMFPCLISKAATVDVICNGEGPGRNGAVQLMFAELQMLTPMVPTREVYFVRFCKQLSAEQWAIVDVSIDKVEDNIDASLVKCRKRPSGCIIEDKSNGHCKVIWVEHLECQKSAVHSMYRTIVNSGLAFGARHWIATLQLQCERLVFFMATNVPMKDSTGVATLAGRKSILKLAQRMTWSFCHAIGASSFHTWTKFTSKTGEDIRISSRKNLNDPGEPLGLILCAVCSVWLPVSPNVLFDFLRDETRRTEWDIMSSGGTVQSIANLAKGQDRGKATIKSKENSVWILQDSYTNPYESMVVYASVDITGTQSVMTGCDSSNLAILPSGFSIIPDGLESRPLVISSRQEEKNTEGGSLFTMAFQILTNASPAAKLTMESVDSVNTLVSCTLRNIRTSLQCEDG

SEQ ID NO: 221900 - protein, 342 aa, Glycine max
  unsure (1)..(342): unsure at all Xaa locations
  Clone ID: PAT_MRT3847_42405C.1.pep
MAASAAFDDAKHGFSRPEMYKENLAGTLDAYDRHVFLCYKNHLAWPPRLEASDADPLPKRVATVWRARKNDIAVKQTKITVCEAREEAGFSDGDALIFPDMIKYRGVEESNVDVFFNDVIVSGKEWSGGKQGKXXLKGSHIFVCAHGSRDVRCGVCGPVLMDKFNEEIQLRGLKDQISVLACSHIGGHKYAGNVIIFSPGSDGKIMGHWYGYVTPDDVAALLDRQIAKGEVIKKLWRGQMGPPGAEIKVADDHKLANGVYNNKANLSNNENVTGCCQGVNGVSCCRTASFDDKTAEAYKKQGSNNISWCLPVLKKRDILTAGGILGALAAVAVAFRFYRRAS

SEQ ID NO: 221901 - protein, 119 aa, Glycine max
  unsure (1)..(119): unsure at all Xaa locations
  Clone ID: PAT_MRT3847_42406C.1.pep
LNPKNKPVRITGIVRMGAENMRVELSHHIRSGRRACQKGTWVSVPMHGNTIKASSVLKTRFFDAIRAELSAFFDVHDQKRSYPRRVYLEMAGQNVTXCVGGLRTFTXDDLSSRFHTHWD

SEQ ID NO: 221902 - protein, 50 aa, Glycine max
  Clone ID: PAT_MRT3847_42407C.1.pep
FWNIIITINSNTPKCVLTRFHEHFHRVPLIRIFIFKECYRMFFRSQLKYK

SEQ ID NO: 221903 - protein, 70 aa, Glycine max
  Clone ID: PAT_MRT3847_42408C.1.pep
PTKTRPGNNTAASKARPPSSPPAGAIVVPTESSPTKSDYLLSHDDDEHLKFRPHSRTRICLTFPQRTPQD

SEQ ID NO: 221904 - protein, 48 aa, Glycine max
  Clone ID: PAT_MRT3847_42409C.1.pep
IGPYSLEKLHFMGVFFTKKVLWGFYYRIYFWIDIPQGETLNPKKCYDF

SEQ ID NO: 221905 - protein, 106 aa, Glycine max
  unsure (1)..(106): unsure at all Xaa locations
  Clone ID: PAT_MRT3847_4240C.1.pep
GRYQRHDVQYEIGQDNSMTADNDARIDRHAYYVKILFGSAMRNWDEVQEKSYDIDKITDWENTSAELVQIPFKPARVLLDDFTAVPAXVDLXCMLDALKQLAGDSN

SEQ ID NO: 221906 - protein, 159 aa, Glycine max
  unsure (1)..(159): unsure at all Xaa locations
  Clone ID: PAT_MRT3847_42410C.1.pep
EFSAEWLPKGFEESMXTPKRGLLVHKWGPQLEILSHTSTGAFLSHCGWNSVLESLSYGVPMIGWPIVADQPYNVKMLVEEMGVAVELTRSTETVVSREKVKKTIEIVMDYEGKGKEMKEKANEIAADIRAAETEKGKEKGSSVRAMDELVTTILSPKVL

SEQ ID NO: 221907 - protein, 76 aa, Glycine max
  unsure (1)..(76): unsure at all Xaa locations
  Clone ID: PAT_MRT3847_42411C.1.pep
PKAGLEVGLYLDPISPGAAGSKSLYLAXKRIFNRDLEPGFFVNPFVKELGICFKEGQKNGNSFPGLALRPQPLIVP

SEQ ID NO: 221908 - protein, 89 aa, Glycine max
  Clone ID: PAT_MRT3847_42412C.1.pep
MFSVPGVSGILNRGGGHKIKGTVVLMRKNVLDFNSVADLTKGNVGGLIGTGLNVVGSTLDNLTAFLGRSVALQLISATKPLGSFLLPST

SEQ ID NO: 221909 - protein, 106 aa, Glycine max
  Clone ID: PAT_MRT3847_42413C.1.pep
MAPRVSSLEAAQKAINSIGLGFDITQDIAFDNCKKGSRLIFVNEKQCRNLEIPGGVSIPNVPNSIKCVRGESIRVHSEVLTLQQMLEHFNQEMCLGGQTASGHFCA

SEQ ID NO: 221910 - protein, 74 aa, Glycine max
  unsure (1)..(74): unsure at all Xaa locations
  Clone ID: PAT_MRT3847_42414C.1.pep
VEMRWVDTYIPFTNPPFELEIYFKEKWLEVLRCGVTAPESLEXDGKPNNVAWAXGLWLETSAMVLFDIPDIRLI

SEQ ID NO: 221911 - protein, 126 aa, Glycine max
  unsure (1)..(126): unsure at all Xaa locations
  Clone ID: PAT_MRT3847_42415C.1.pep
YAWVFAWESLGLAWALNCSLRARAIPELYTIXLKTGNYGILIATQAMTVSFNPNPCSDAWSREFLNRTGFHCDIICVTAWTATPMQDVXQAPIDWLISFQECAPRTYCVLNPQYSFVLNRCMGKLT

SEQ ID NO: 221912 - protein, 57 aa, Glycine max
  Clone ID: PAT_MRT3847_42416C.1.pep
SRNISHNELVLIMLSLFVMHYHCKHHLPIRNHCWNNSLGIVIIITVNELTCKRYVPI

SEQ ID NO: 221913 - protein, 69 aa, Glycine max
  Clone ID: PAT_MRT3847_42417C.1.pep
LFPLISSIHIPKNEGCPGKKCNLGKDESFQTYAGYVVRNMRVIFVFVQLNFVFWGGSGMLLIKPVQFFS

SEQ ID NO: 221914 - protein, 66 aa, Glycine max
  unsure (1)..(66): unsure at all Xaa locations
  Clone ID: PAT_MRT3847_42418C.1.pep
QKISLEEINGMFGMXVGSIKFDSKITLYLKLLVDALENSRIHRDFIGSTTIFGGIQTCCKLVFVLV

SEQ ID NO: 221915 - protein, 96 aa, Glycine max
  unsure (1)..(96): unsure at all Xaa locations
  Clone ID: PAT_MRT3847_42419C.1.pep
XXRIPVMXXXWMKLXXRXXRAPXTLISSSNVPXXXXXEEKLKXXPXRSXXNXXXTXXXXPXTXPXXXXXXLXXNXXXXXRXXXLEPNSELTYACXR

SEQ ID NO: 221916 - protein, 35 aa, Glycine max
  Clone ID: PAT_MRT3847_4241C.1.pep
LICIHLNFNFCKTKIIYINSLSNICNSLLSSSRSR

SEQ ID NO: 221917 - protein, 69 aa, Glycine max
  Clone ID: PAT_MRT3847_42420C.1.pep
DHRSIDPRDGTSTVGERGRLSQIPDCARSNSPHKWASANDQYQRRELACVRRESSLPSYTIDYASIRRP

SEQ ID NO: 221918 - protein, 154 aa, Glycine max
  unsure (1)..(154): unsure at all Xaa locations
  Clone ID: PAT_MRT3847_42421C.1.pep
LEPLEPLVSFEEATNTGSAEDIDRFNKRLVRATPHHIEDCKELLKLMGVPHITAPCEAEASCAALAKGGRVYAASTVDMDALTSGGPVLYRRFDXHPAKKVPILEIRLERALQELDLTNEQIVDLCILCGCDYXDSIRGVAPKKASAGIKEHNN

SEQ ID NO: 221919 - protein, 103 aa, Glycine max
  unsure (1)..(103): unsure at all Xaa locations
  Clone ID: PAT_MRT3847_42422C.1.pep
KDAKGPLSHEARDHGIDHYIAECSAWGNICGNHADDRELIHWRYMTYARGPDQPADVYGVRTXYSTMPPRQRIVKVYTGETMDRVQVPDVAYAAKLSDIMVLK

SEQ ID NO: 221920 - protein, 84 aa, Glycine max
  unsure (1)..(84): unsure at all Xaa locations
  Clone ID: PAT_MRT3847_42423C.1.pep
MCVWFKCHVRLVRLLASTFRGGINSSTDALNKISPLPELKDIFRTDGEHLLKFAPPHVSEVSKXAWMTDDXSGREMLDGVDACL

SEQ ID NO: 221921 - protein, 133 aa, Glycine max
  Clone ID: PAT_MRT3847_42424C.1.pep
SSSVQLWRVNFGVDFFLLFTFFAEMEEHKSVISTCEQDQHVVAAAQHILKALAASKNVSDDLRKTLLDIETQLSSISIVNERKGREIKHLERQLKCVEDKVMRWEANPSNESSEYLKVVGEIQVLIHNLESFS

SEQ ID NO: 221922 - protein, 52 aa, Glycine max
  Clone ID: PAT_MRT3847_42425C.1.pep
TTIGTVQSTTLSFSSHQHLSPLICRLAPRITVYLSIYPDNDSYFMDRFFTFI

SEQ ID NO: 221923 - protein, 132 aa, Glycine max
  Clone ID: PAT_MRT3847_42426C.1.pep
GIGSSLRIGNVTLQHSIKRRIKRIRQRLMALKYEFLEPLLGGESASLGYRVAVGAARAKVGRWLQELQRLRQARKEGATSIGLIISEMIKYLEGKDPELQASRQAGLLDFIASPCLHLTHQNLKHARLCCTC

SEQ ID NO: 221924 - protein, 102 aa, Glycine max
  Clone ID: PAT_MRT3847_42427C.1.pep
SFPSGHSSRVWFVASVFSLSRNSLLADFSRPRVAILVCRWFAKNHALPVDLLLPPAWAWAVIPVISRVALGRHYVIDVFFGACFGVLEAMFPFRVLDFQGLI

SEQ ID NO: 221925 - protein, 169 aa, Glycine max
  Clone ID: PAT_MRT3847_42428C.1.pep
MYVKTACGFTHSLRKMLYCVSDINLKFTVMQITSALVNGSALRFHLPRFLCVRHHSSTKLFVTGLSYDTNEPILRDAFGQHGEIIEVKVICDHVTGKSRGYGFVRFVSETTAAAARKEMNGQILDGRRIRVSYAHKGERLSLPYHPSDTAWLPHIHFLTVILEVYSFGF

SEQ ID NO: 221926 - protein, 247 aa, Glycine max
  Clone ID: PAT_MRT3847_42429C.1.pep
MMRSKIVLFGDSITEQSIRENGWGVPLANAYSRRADVLVRGYGGYNTRWAMFLLGHLFPLDSTKPPTATTIFFGANDAALLGRTSERQHVPIEEFKENLRKFVRHLKDCSPTMVIVLITPPPLSEEGRLAYARSVYGENATKIPERTNEVTGQYANACVEVAKEMGVWYINLWSKMQETDGWQTKFLWDGLHLTTEGNAVVYEEVINVFNEAGLSADNMPMDFPHHSKIDSKHPERAFQQNVCDIPL

SEQ ID NO: 221927 - protein, 149 aa, Glycine max
  Clone ID: PAT_MRT3847_4242C.1.pep
MAGVKRRLCSDSDIHALHKELDEVSCPICMDHPHNAVLLLCESYEKGWGSYICDTSYRHSNCLDRFKKMRDNFKENQNLPSSLVNTNNSGNSFDINLTVQSDMHDVNELHQNEINALLSVGLAQGSRQGDAQDPSWTARGFSISHPCNN

SEQ ID NO: 221928 - protein, 55 aa, Glycine max
  unsure (1)..(55): unsure at all Xaa locations
  Clone ID: PAT_MRT3847_42430C.1.pep
PILRDAFGQHGEIIEVKVICDHVTGKSRGCGFVRFVSETTAVCXLAKNEWPDLPG

SEQ ID NO: 221929 - protein, 84 aa, Glycine max
  Clone ID: PAT_MRT3847_42431C.1.pep
VFIGNQEWNGLEEMYVKTACGFTHSLRKMLYCVSDINLKFTVMQITSALVNGSALRFHLPRFLCVRHHSSTKLFVTGLSYDTNE

SEQ ID NO: 221930 - protein, 188 aa, Glycine max
  unsure (1)..(188): unsure at all Xaa locations
  Clone ID: PAT_MRT3847_42432C.1.pep
FGSRLNLSRNRLTGNMPDSMMNCTKLLALDISHNHLAGHVPSWIFKMGVQSISLSGDGFSKGNYPSLKPTPASYHGLEVLDLSSNAFSGVLPSGIGGLGSLQVLNFSTNNISGSIPVGIGDLKSLYIVDLSDNKLNGSIPSEIEGATSLSELRLQKNFLGGRIPAXIDKCSSLTXLILSHNKLTGSIP

SEQ ID NO: 221931 - protein, 91 aa, Glycine max
  unsure (1)..(91): unsure at all Xaa locations
  Clone ID: PAT_MRT3847_42433C.1.pep
MAVRKNKRIFKGKKGXGKKNAADPLAKKDWDDINAPAIYQVKNEGKTLDSRTHGTKIACEGLTHRVIEVSLADLDSDDDHACNTIMLRAED

SEQ ID NO: 221932 - protein, 44 aa, Glycine max
  Clone ID: PAT_MRT3847_42434C.1.pep
GFRYTMKCLCLVPAFAASADLGLRAYGRPSNRKCCYEPPHLHSR

SEQ ID NO: 221933 - protein, 131 aa, Glycine max
  Clone ID: PAT_MRT3847_42435C.1.pep
LAQGGHRGGGRSRTSGSPGLQEFGTSTYPDFCPQSELTKLAGVVVTNGNDLLSCQTASGWTFIPPTAEPTATQEITMCNTQSCKNLLTAVQALQPSDCFLSLSNNEKGINAKKLVDEFPTFCAVFANATRF

SEQ ID NO: 221934 - protein, 62 aa, Glycine max
  Clone ID: PAT_MRT3847_42436C.1.pep
KPNELEQKSAMQLQNRLMYHRDEDITKETKMTLNNNILQKASTTQHIFSYIRLQHETSTLKL

SEQ ID NO: 221935 - protein, 88 aa, Glycine max
  unsure (1)..(88): unsure at all Xaa locations
  Clone ID: PAT_MRT3847_42437C.1.pep
LICISLTNNMVVLNVCFFLPFRVGVIAACIXPTFFMIDQSSTYDDDEYSQPFIDLCIYTHSMPPQCYLXHSTLHSTHSDCNICIYTHS

SEQ ID NO: 221936 - protein, 126 aa, Glycine max
  unsure (1)..(126): unsure at all Xaa locations
  Clone ID: PAT_MRT3847_42438C.1.pep
WQIPHIENDDKMLRLSEFLKAVGCHLPPFNLPLTKAMASAKFQEVKLQQISNPPKLVSPYPPILPTPPDFTVTKPVTTIGDHLSSTLTTHNTHISNTPXQPKQTIQXLTQAXXQXXCEXXLRFYXE

SEQ ID NO: 221937 - protein, 50 aa, Glycine max
  Clone ID: PAT_MRT3847_42439C.1.pep
FCIHITGPWGCLPYMLLSYPMKPLKRMSLGGPNHSNRAAQYFNFFFKRGG

SEQ ID NO: 221938 - protein, 773 aa, Glycine max
  Clone ID: PAT_MRT3847_4243C.1.pep
MRPPSPSIHFLLQILLVCLLHRPSFAVKKSYVVYLGAHSHGPELSSVDFNQVTQSHHDFLGSFLGSSNTAKDSIFYSYTRHINGFAATLDEEVAVEIAKHPKVLSVFENRGRKLHTTRSWDFMELEHNGVIQSSSIWKKARFGEGVIIGNLDTGVWPESKSFSEQGLGPIPSKWRGICDNGIDHTFHCNRKLIGARYFNKGYASVAGPLNSSFDSPRDNEGHGTHTLSTAGGNMVARVSVFGQGQGTAKGGSPMARVAAYKVCWPPVGGEECFDADILAAFDLAIHDGVDVLSVSLGGSSSTFFKDSVAIGSFHAAKRGVVVVCSAGNSGPAEATAENLAPWHVTVAASTMDRQFPTYVVLGNDITFKGESLSATILAHKFYPIIKATDAKLASARAEDAVLCQNGTLDPNKAKGKIVVCLRGINARVDKGEQAFLAGAVGMVLANDKTTGNEIIADPHVLPASHINFTDGSAVFNYINSTKFPVAYITHPKTQLDTKPAPFMAAFSSKGPNTMVPEILKPDITAPGVSVIAAYTEAQGPTNQVFDKRRIPFNSVSGTSMSCPHVSGIVGLLRALYPTWSTAAIKSAIMTTATTLDNEVEPLLNATDGKATPFSYGAGHVQPNRAMDPGLVYDITIDDYLNFLCALGYNETQISVFTEGPYKCRKKFSLLNLNYPSITVPKLSGSVTVTRTLKNVGSPGTYIAHVQNPYGITVSVKPSILKFKNVGEEKSFKLTFKAMQGKATNNYAFGKLIWSDGKHYVTSPIVVKALLTRN

SEQ ID NO: 221939 - protein, 43 aa, Glycine max
  Clone ID: PAT_MRT3847_42440C.1.pep
YQSSPFFLELYIIINISCAIFSLVRSWLLFVMLLLMNLVLKKA

SEQ ID NO: 221940 - protein, 82 aa, Glycine max
  unsure (1)..(82): unsure at all Xaa locations
  Clone ID: PAT_MRT3847_42441C.1.pep
SSVHEYVKXYFSGSKLKSFLAGHNITITDGIDTTSAAVXCRTLADCDSLRRNCEQMSDDLCVASEDKASVWSRLRLVTSYNL

SEQ ID NO: 221941 - protein, 164 aa, Glycine max
  Clone ID: PAT_MRT3847_42442C.1.pep
AELAAVERGLKAGEAGYDPFPTRSTRSRNYYAAKPGEKAAAGNNSANGNVAGAGSNGTGAPVTAEAGMVATAAALEAAAGAGKLVDTSAPVDQGTESNMLHNFELPISLALLQKYGGAPGAQAGFMARKQRIESTVGFRVSENDGRRHALTLTVSDYKRRRGLL

SEQ ID NO: 221942 - protein, 38 aa, Glycine max
  Clone ID: PAT_MRT3847_42443C.1.pep
IKTYSIKSNKTLKFKSNMLQLNHNSIKAILNAHYKQVS

SEQ ID NO: 221943 - protein, 153 aa, Glycine max
  Clone ID: PAT_MRT3847_42444C.1.pep
EHFLFSFPTIVLLLFLQQHFNSIQLTNCSTGLVRFCLFFFNCSVTENHPLPVLNLLFLVLVTVFPSLAIHYCPSNRIDLDTALHVNQEIMTTSTRDISDNEADEQQQSEPQMQHLSANGISHAGIGTQNVQYATPPQLGTGHAVVPPTYPYPD

SEQ ID NO: 221944 - protein, 216 aa, Glycine max
  Clone ID: PAT_MRT3847_42445C.1.pep
MAVASSFIIIIVVIIALIFFSLNPPPAPSRRSLLLTTSSSCSNESNGLLNYHCIFPQTSSFSIPSLSLFLLLHFYILITTAQHHFSLVTTKLASHLNLSPSMAAVTLLSLGNGAPDVFSSLAALRAGQYRTGFGAILSAGAFVSALVVGFVAIYAAPFSVDPAPFVRDVLFYLTAAMFLFYVYLSAEIFLWQAVGFVGFYLFFVGFVFYMDLGMAD

SEQ ID NO: 221945 - protein, 222 aa, Glycine max
  Clone ID: PAT_MRT3847_42446C.1.pep
MQAAKKAIETFKETAANIGASAKSGLEKTKATIQEKNEKMNAEDQTQMDMATKRKEEKINQAEMEKQQARKYYAAAKQYAMAEHMAKGNHDTAGPRIETATHITSGPGTDNAMYSNTGPGTETATYTTSGLGHDNAIPTSTGPGTATYTTRPGHDNAIPIRTGPGPGPETATYPTGDYGQMGANQGHEHGPRQGGLTEDVTAQNTLVAGGSAPSSGPGPTFN

SEQ ID NO: 221946 - protein, 80 aa, Glycine max
  Clone ID: PAT_MRT3847_42447C.1.pep
MSGAQLQSASPALTIQGSQKNVGSVAVATAAESKPKKKICCACPDTKRLRDECIVEHGESACTKWIEAHRLCLRAEGFNV

SEQ ID NO: 221947 - protein, 56 aa, Glycine max
  unsure (1)..(56): unsure at all Xaa locations
  Clone ID: PAT_MRT3847_42448C.1.pep
AGTRKQNGAGPLWAPHARLMGVIQGIFXTLPRGSSSSGMLQGKPLLWKPQVNVVPR

SEQ ID NO: 221948 - protein, 79 aa, Glycine max
  Clone ID: PAT_MRT3847_42449C.1.pep
IKQNCLMGVGASHLFFSPKKVFSLHLLGDLCYKNPKNKILAVPANKEKIWGAPFKVPKFGRASFSTQTKNFPFGGGEGK

SEQ ID NO: 221949 - protein, 816 aa, Glycine max
  Clone ID: PAT_MRT3847_4244C.1.pep
MRPPSPSIHFLLQILLVCLLHRPSFAVKKSYVVYLGAHSHGPELSSVDFNQVTQSHHDFLGSFLGSSNTAKDSIFYSYTRHINGFAATLDEEVAVEIAKHPKVLSVFENRGRKLHTTRSWDFMELEHNGVIQSSSIWKKARFGEGVIIGNLDTGGAKNGAKVGIVQGSDDKVTNKKIEMCIHQHHFQNAPQTVGVKSVWPESKSFSEQGLGPIPSKWRGICDNGIDHTFHCNRKLIGARYFNKGYASVAGPLNSSFDSPRDNEGHGTHTLSTAGGNMVARVSVFGQGQGTAKGGSPMARVAAYKVCWPPVGGEECFDADILAAFDLAIHDGVDVLSVSLGGSSSTFFKDSVAIGSFHAAKRGVVVVCSAGNSGPAEATAENLAPWHVTVAASTMDRQFPTYVVLGNDITFKGESLSATKLAHKFYPIIKATDAKLASARAEDAVLCQNGTLDPNKAKGKIVVCLRGINARVDKGEQAFLAGAVGMVLANDKTTGNEIIADPHVLPASHINFTDGSAVFNYINSTKFPVAYITHPKTQLDTKPAPFMAAFSSKGPNTMVPEILKPDITAPGVSVIAAYTEAQGPTNQVFDKRRIPFNSVSGTSMSCPHVSGIVGLLRALYPTWSTAAIKSAIMTTATTLDNEVEPLLNATDGKATPFSYGAGHVQPNRAMDPGLVYDITIDDYLNFLCALGYNETQISVFTEGPYKCRKKFSLLNLNYPSITVPKLSGSVTVTRTLKNVGSPGTYIAHVQNPYGITVSVKPSILKFKNVGEEKSFKLTFKAMQGKATNNYAFGKLIWSDGKHYVTSPIVVKALLTRN

SEQ ID NO: 221950 - protein, 127 aa, Glycine max
  Clone ID: PAT_MRT3847_42450C.1.pep
KEAGGHPGNSGPAPGGVQIFLKGGALKVGRKKGKSCFRGKKVIPQKFQKKNDPKKKREKRGGPKGGANPNKGGGPKGPFSKGKTWGPTHLKKTPTPRGKGVGFWGPRGVFFSPKETGKKGLPSPPGP

SEQ ID NO: 221951 - protein, 75 aa, Glycine max
  unsure (1)..(75): unsure at all Xaa locations
  Clone ID: PAT_MRT3847_42451C.1.pep
EKIVFKNNPGFPXPVLFSEGEISTGVGAGKIPLREEALFNAGGGASTVSLDAKGTPSFFFFPPQGTGMVGKTPLN

SEQ ID NO: 221952 - protein, 57 aa, Glycine max
  Clone ID: PAT_MRT3847_42452C.1.pep
SHMFDNYFVFGGGVGSGEMFINYLYSFLLICTVTLFYLTNIDGYFTLKFPSYLSIFL

SEQ ID NO: 221953 - protein, 51 aa, Glycine max
  Clone ID: PAT_MRT3847_42453C.1.pep
LDFSTLRVLVFSHPLSEKTIGFNCIFFIIIGGFNCQISFFFIVLFIVNCGV

SEQ ID NO: 221954 - protein, 43 aa, Glycine max
  Clone ID: PAT_MRT3847_42454C.1.pep
WLLMNNEATSITTISNMEVEVSRVTNTHYNTRGHVSRPNTTLP

SEQ ID NO: 221955 - protein, 90 aa, Glycine max
  Clone ID: PAT_MRT3847_42455C.1.pep
NNTKILKGSNSNGTYKKKKKNETNPTLTMIGSLKPFVPGIATNSMPKAEVSAPEGVFHLGATAAAGKVFGGKNPVKPGAVFRPALAGNVE

SEQ ID NO: 221956 - protein, 145 aa, Glycine max
  Clone ID: PAT_MRT3847_42456C.1.pep
MKRSPASSCSSSTSSVGFEVHHPIEKRRPKHPRRNNLKSQKCKQNQTTTGGRRSSIYRGVTRHRWTGRFEAHLWDKSSWDNIQSKKGKQVYLGAYDTEESAARTYDLAALKYWGKDATLNFPIETYTKDLEEMDKGSREGILASL

SEQ ID NO: 221957 - protein, 58 aa, Glycine max
  Clone ID: PAT_MRT3847_42457C.1.pep
RLLIRSFLVNVTIVIIQHCAVTLMSIEVCCIMITNIDRVNHVCLTLKTILIITIVRVD

SEQ ID NO: 221958 - protein, 84 aa, Glycine max
  Clone ID: PAT_MRT3847_42458C.1.pep
IKQRFIIGKVDLGLFHNAAERFGISLSGSMGQLPTFILFENAAEVARFPELDFEAAYFHPKITKGLLSRHFELDRHLLEYVSGK

SEQ ID NO: 221959 - protein, 262 aa, Glycine max
  Clone ID: PAT_MRT3847_42459C.1.pep
MGKESSKDTVPVTQWLNRMVSEPYYLFHFLTFFSYFVVRSSATQILAPHLTHHLLRREIQTLLVFAILAFIKGIKEETWEAFIADVLFLAKICLFLLAFTMDRRLAVWYILVFLVIHMLTQQPPFQGLGTSSKLTPLQLESLLTEGTTTRLWLVEFRSSYSPACIRSSQQFPELSITYSSKNLSFGIVDLGLFPNAAERFGISLSGSMGQLPTFILFENAAEVARFPELDFEAAYFHPKITKGLLSRHFELDRHLLEYVSGK

SEQ ID NO: 221960 - protein, 83 aa, Glycine max
  Clone ID: PAT_MRT3847_4245C.1.pep
SPLFFWGFPQNFPGGQAQYLLFSKAILGHPQKIIWEKGGSFPPSKFLEKIAPFMVSIPPTKRPNKKKGGGLFLKFKFVPLGFG

SEQ ID NO: 221961 - protein, 64 aa, Glycine max
  Clone ID: PAT_MRT3847_42460C.1.pep
NLTNKSTHTKEKLQLCNYVSLKTDFITKTHGFKKTAISAVTSLFLCIMTAIVTASVIFVHNCLQ

SEQ ID NO: 221962 - protein, 209 aa, Glycine max
  Clone ID: PAT_MRT3847_42461C.1.pep
RLERLEPVWAIVVNNFTFHYALYVLMNSLPTFFNLDLKLSLQDMGSSKMMPYLNMFLFSNIGGVVADYLITRRILSVTKTRKFLNTLGFLVASLALVVIPSFRTSGGAVFCSSVALGFLALGRAGFAVNHMDVAPRYAGIVMGVSNTAGTLAGIVGVDLTGKLLEAAKAANSDLSSPESWRIVFFIPGFLCVFSSFVFLLFSTGERIFD

SEQ ID NO: 221963 - protein, 35 aa, Glycine max
  Clone ID: PAT_MRT3847_42462C.1.pep
RPALASCLCTIRVPSMADSHAVGCKSQRILILLEP

SEQ ID NO: 221964 - protein, 47 aa, Glycine max
  Clone ID: PAT_MRT3847_42463C.1.pep
SGVVHHLSSPGNKGSDSIKRIRSTIRLQIPRLRKNNGIKPCIKAKTF

SEQ ID NO: 221965 - protein, 98 aa, Glycine max
  Clone ID: PAT_MRT3847_42464C.1.pep
NGDTSNHIFTKVKKFSKKYFISKNIYPTHKFKNFFPTTHHMNSFINIITITIFQQKTIFGTTQSQLYSLFQTHFYQHVTLKTRLIFTQKTPTFFVFIF

SEQ ID NO: 221966 - protein, 286 aa, Glycine max
  Clone ID: PAT_MRT3847_42465C.1.pep
MPVSASPAPLLGDRLCENGFECVKILPATNDAHGGVIVDLKEPLHSEVFATLLRSSLLHWKQQGKDGVWIKFPIELVNLVETAVKEGFWYHHAEPNYLMLVYWIPKTDCTIPPNASHCVAVGAIVLNDNKEVLVVLEKKGGFHGIGVWKIPTGVVDAGEEIFEAVIREVKEETGIDTEFVELLAFRHTHNSFFGKSDLSFICMLRPLSDDCKNQGVEIEAAQWMPFEEFADQPFNQMHEPFKYMIELCLAKVEKVYNGFSPRPISSYFVEELNYLYLNSHCLDKSS

SEQ ID NO: 221967 - protein, 73 aa, Glycine max
  unsure (1)..(73): unsure at all Xaa locations
  Clone ID: PAT_MRT3847_42466C.1.pep
RSFFGGDIDRSPAFPPNGAFEAQPLNLLIYGRTGWIGGLLGCLCRAQGFFLHYGXGRLENRAYLETDIGLLKP

SEQ ID NO: 221968 - protein, 54 aa, Glycine max
  Clone ID: PAT_MRT3847_42467C.1.pep
FGFRIVYSCQSVHRPCMVYPSDVEPRVNRYVIAICPVSCSVLLLMVNNLSSYIG

SEQ ID NO: 221969 - protein, 150 aa, Glycine max
  unsure (1)..(150): unsure at all Xaa locations
  Clone ID: PAT_MRT3847_42468C.1.pep
LVTQNLSFVVAGATVVALLLNSSLKLTNFSAFILMVLTINICGGIGVLSTLAGTILIEREWLLVISEGQPPEFLTKMNSVTRRIDLTCKLLAPVVTGFIISFVSLKASAITLALWNTVSVWXEYWLFTSVYKGIPALGQSSQRRMARLLK

SEQ ID NO: 221970 - protein, 77 aa, Glycine max
  unsure (1)..(77): unsure at all Xaa locations
  Clone ID: PAT_MRT3847_42469C.1.pep
ITMDSHSHXXPSTTSTXMXXKVPCPSQNPRAENNLGKVEPRLEAFLSLSHVASLTLDLSFERLLQSIPSDSDYDLID

SEQ ID NO: 221971 - protein, 55 aa, Glycine max
  Clone ID: PAT_MRT3847_4246C.1.pep
LLRKNWLSRPWILTHGSMPILIPYREWMIDYSETTVPIYRGFHNCYLHSYLKLIS

SEQ ID NO: 221972 - protein, 124 aa, Glycine max
  Clone ID: PAT_MRT3847_42470C.1.pep
PIAKSLIGLLQEANQEVPSWLNQYAEGSSSGGGSQGYGAQRYNSGGSYGGRDFPNVIEAKVENNNCYSTNVNADHAVESYYPADDASYDIQNSNIDSSFDPLNIASAGSYNPPDFCELNGAGRV

SEQ ID NO: 221973 - protein, 134 aa, Glycine max
  Clone ID: PAT_MRT3847_42471C.1.pep
TRGRAGGSKTPKPPHPAKPAKRTRNPTQAEPSTDASRNTTRPEDEPNPTRETKAKTTTKKKKPPAARTSPPTGNPQKGRKPSHPKKQPQDRRKHARTTHRRKRQQATNRKTPHDKGTTHHQTKKGNTAQGGEHA

SEQ ID NO: 221974 - protein, 53 aa, Glycine max
  Clone ID: PAT_MRT3847_42472C.1.pep
RRSSAKWLNDPSYILIVSSFFKRSVLSNLKLCPGISILMVRGVLLLHHNSHQI

SEQ ID NO: 221975 - protein, 57 aa, Glycine max
  unsure (1)..(57): unsure at all Xaa locations
  Clone ID: PAT_MRT3847_42473C.1.pep
MCLQALGFPMPYFAHVSLILAPDRSKXSKRHGATSVGQVRVIHHFVSISILKLCYDL

SEQ ID NO: 221976 - protein, 66 aa, Glycine max
  unsure (1)..(66): unsure at all Xaa locations
  Clone ID: PAT_MRT3847_42474C.1.pep
IGQFGRTRTSQGDAIPLAIGGPLXATAQRSQTPTQGRSPAGTGNGATSATAPPHTTETPPTENRGA

SEQ ID NO: 221977 - protein, 154 aa, Glycine max
  Clone ID: PAT_MRT3847_42475C.1.pep
MVLKFVYIIIILMIWCMYPLTSAQYLDETIISAQYENTTIAQPGCDSKCGNVFIPFPFGMGKGHCYAGSWFEIDCRNNTTTTNSSGEQKPYLKYIDLEVKFIDNWGGQVLIIMNPIYQSGKNCERNKTGGINLKGESPVYSEDYNSFLAEVAET

SEQ ID NO: 221978 - protein, 68 aa, Glycine max
  unsure (1)..(68): unsure at all Xaa locations
  Clone ID: PAT_MRT3847_42476C.1.pep
RKALRASKITAANSDKATDSNKPNSRSSRAEIQFPVGRIHRQLRQMVQSNXHVEATAALYLASTLEYL

SEQ ID NO: 221979 - protein, 38 aa, Glycine max
  Clone ID: PAT_MRT3847_42477C.1.pep
GEVPFIFFFFIFFFFFFFFFFFFFFFFFFFFLNLNYFI

SEQ ID NO: 221980 - protein, 54 aa, Glycine max
  Clone ID: PAT_MRT3847_42478C.1.pep
KMPLSRLSANTQRFFAQGTSLPPELRGVHQSFWVSCSIGISMCSLPFELNPLKT

SEQ ID NO: 221981 - protein, 50 aa, Glycine max
  Clone ID: PAT_MRT3847_42479C.1.pep
STKLNEFQLSNLPDIMLPIFQSKEEAIRLVTTYQLDILKMHRYGKITEVL

SEQ ID NO: 221982 - protein, 61 aa, Glycine max
  Clone ID: PAT_MRT3847_4247C.1.pep
GRSPHFLPEMQHGPNLTRIGLARFQYNREPMTRLGTYQPTIRTCTVILCYWKTSPKPQART

SEQ ID NO: 221983 - protein, 92 aa, Glycine max
  unsure (1)..(92): unsure at all Xaa locations
  Clone ID: PAT_MRT3847_42480C.1.pep
KKVSRVVNQESKVYEKTRKKVEMTMEKLNXIKNRVEQKLEGKKXLMIGVATXSLDMHEQXKIVEEIKSRKDQMGQRVVVXMIERRGVEACQS

SEQ ID NO: 221984 - protein, 665 aa, Glycine max
  Clone ID: PAT_MRT3847_42481C.1.pep
MEDGIDHLAFERNKAQFDVEDMKIIWAGSRQDFELSDRISRLVASDPAFRKDDRTTLDRKELFKNTLRKAAYAWKRINELRLNEQEAYKLRSFVDQPAFTDLHWGMFVPAIQGQGTDEQQQKWLPLAYRMQIIGCYAQTELGHGSNVQENPTTATFDPKTDEFVIHSPTLTSSKWWPGGLGKISTHAVAYARLIIGGEDHGVHGFIVQLRSLDDHLPLPGITIGDIGMKFGNAAYNTMDNGVLRFDHVRIPRNQMLMRVSQVTREGKYVSSNVPRQLVYGTMVNVRQKIVADASVALSRAVCIATRYSAVRRQFGSHNGGLETQVIDYKTQQARLFPLLASAYAFRFVGGWLKWLYMDVTERLQANDFSTLPEAHACTAGLKSLTTTATADGIEECRKLCGGHGYLCSSGLPELFAVYVPACTYEGDNVVLLLQVARHLMKTVSQLGSGNKPVGTTAYMARVEQLMQYHSDVEKAEDWLKPNVVLEAFEARASRMSVACAQNLSKFANPEEGFQELAADLVDAAVAHCQLIVVSKFIEKLQQDIPGKGVKKQLEVLCSIYALFLLHKHLGDFLSTGCINPKQGSLASEQLRNLYSQVRPNAIALVDAFNYTDHYLGSILGRYDGNVYPKMHEEAWKDPLNDSVVPDGFKEYIQPMLKQQLRNARL

SEQ ID NO: 221985 - protein, 175 aa, Glycine max
  Clone ID: PAT_MRT3847_42482C.1.pep
GSRWLPLAYRMQIIGCYAQTELGHGSNVQGLETTATFDPKTDEFVIHSPTLTSSKWWPGGLGKISTHAVAYARLIIGGEDHGVHGFIVQLRSLDDHLPLPGITIGDIGMKFGNAAYNTMDNGVLRFDHVRIPRNQMLMRYFYFTYCPFSSLTITDFMVLIIHNTRMICGGKMTKN

SEQ ID NO: 221986 - protein, 280 aa, Glycine max
  unsure (1)..(280): unsure at all Xaa locations
  Clone ID: PAT_MRT3847_42483C.1.pep
ARNSAREKIVADASVALSRAVCIATRYSAVRRQFGSHNGGLETQVIDYKTQQARLFPLLASAYAFRFVGEWLKWLYMDVTKRLQANDFSTLPEAHACTAGLKSLTTTATADGIEECRKLCGGHGYLCSSGLPELFAVYVPACTYEGDNVVLLLQVARHLMKTVSQLGSGNKPVGTTAYMARVEQLMQYHSDVEKAEDWLKPNVVLEAFEARASRMSVACAQNLSKFANPEEAGFQELAADLADAAVAHSQLIVVSKFIEKLQQDIPXKGVKKXLEVLCSI

SEQ ID NO: 221987 - protein, 106 aa, Glycine max
  Clone ID: PAT_MRT3847_42484C.1.pep
YALFLLHKHLGDFLSTGCINPNKGSLQSEQLRNLYSQVRPNAIALVDAFNYTDHYLGSILGRYDGNVYPKLYEEAWKGPLNHSDVPDGFKEYIQPMLKQQLRNARL

SEQ ID NO: 221988 - protein, 212 aa, Glycine max
  Clone ID: PAT_MRT3847_42485C.1.pep
KKCVCAWTAIIGGLAIHGKGREALDWFTQMQKAGINPNSITFTAILTACSHAGLTEEGKSLFESMSSVYNIKPSMEHYGCMVDLMGRAGLLKEAREFIESMPVKPNAAIWGALLNACQLHKHFELGKEIGKILIELDPDHSGRYIHLASIYAAAGEWNQVVRVRSQIKHRGLLNHPGCSSITLNGVVHEFFAGDGSHPHIQEIYGMPNLLAN

SEQ ID NO: 221989 - protein, 61 aa, Glycine max
  Clone ID: PAT_MRT3847_42486C.1.pep
ARANIKGNVRSSLLNPINVAISTSEVRVHVWGILIAISTSSYAAMLSAPSDLIKFKAMCRL

SEQ ID NO: 221990 - protein, 61 aa, Glycine max
  unsure (1)..(61): unsure at all Xaa locations
  Clone ID: PAT_MRT3847_42487C.1.pep
KRMLQELKDXRKDPPTSCRAATETNDMLHCRATILIPAGSTYAGGXMTXTRIHFPPDYPIK

SEQ ID NO: 221991 - protein, 76 aa, Glycine max
  Clone ID: PAT_MRT3847_42488C.1.pep
EREMSCQSIITTKNTNRRKTIAKFIPTKHPYRNKLSPLNSTSPMYDHYTNNQNPKLDLMRCTTHTQLLLASFNTFI

SEQ ID NO: 221992 - protein, 70 aa, Glycine max
  Clone ID: PAT_MRT3847_42489C.1.pep
HQTRYRPLIFILRLHSAQLLSLGRYGCDLLCTGCLLCWLLLVCYPVAMVASLLSQQGSEVPVVNVGVHCR

SEQ ID NO: 221993 - protein, 58 aa, Glycine max
  Clone ID: PAT_MRT3847_4248C.1.pep
FAVLYEARANTGVDRMEIIDAVAKSVPGPHKVDLKNPDKTIVVEIARVRKPCCVWNLS

SEQ ID NO: 221994 - protein, 207 aa, Glycine max
  unsure (1)..(207): unsure at all Xaa locations
  Clone ID: PAT_MRT3847_42490C.1.pep
MEEPQPGPSPLRKMILVSSMAAGIQFGWALQLSLLTPYVQTLGVPHAWASFIWLCGPISGLLVQPIVGYSSDRCQSRFGRRRPFIXAGDEKKTKAANAFFSFFMAVGNILGYAAGSYDGLHRLFPFTETEACNVFCANLKSCFFFAIVLLVVLTTLVLITVKRXPYTPKAEKETKDAEKTHFSCFCGELCLAFKGLKRPMGMLMFGD

SEQ ID NO: 221995 - protein, 99 aa, Glycine max
  Clone ID: PAT_MRT3847_42491C.1.pep
PLVRTAARGPQKERVSLIIMDIPCMTCDISWLVVHPIPNNIFLLLLELHMGSTTQNLSPLTLFLQQNSSLLLAPPKSRIPIIVVEYLVFLLPNIIRCLL

SEQ ID NO: 221996 - protein, 40 aa, Glycine max
  Clone ID: PAT_MRT3847_42492C.1.pep
VFDILLEISQDFDMAGKFLMPAFSVPQAFARSSENAESFA

SEQ ID NO: 221997 - protein, 83 aa, Glycine max
  Clone ID: PAT_MRT3847_42493C.1.pep
LPGGGGGPDMMPGGNSYQQQQYMAAMMNQQRAMGNDRFQPMMYARPPMAVNYMYPPPYSYPPPPHEPYSNYFSDENTSSCSVM

SEQ ID NO: 221998 - protein, 499 aa, Glycine max
  unsure (1)..(499): unsure at all Xaa locations
  Clone ID: PAT_MRT3847_42494C.1.pep
MSKEEFLKIQKCVLKVNIHCDGCRNKVKKILQKIDGVFTTEIDAEQGKVTVSGNVDPNVLIKKLAKSGKHAELWGAPKGNSNNIQNNMANQFKNMQIDNNGKGGGNNKGQKGGGGNNQPKGNNQQEQNPQQQLQQHLQQLQHMKGFQDLKLPQFKDMKLPNPNPNPNPKAVKFSLPEEDDLSDDELNEFDDEFDDEFDDDEMDDPQHPLNKMMMMKPPMGGKPPVGNVPMGNGASMMLNSMMNAQKGGNGGGGNGKKGGGGGGGGPVPVQVHNMGGGNEGKNGNGGKKGGGGNNQNQGGGNKNNGGKNGGGMPEGKNGTSKNNGGGGXRIPNNNGNGGKKGNNGMAEGVQAMNMFPNMGGHNPSLVGANVGPMNNMSIPMGNMPMTQMGNIPAVQGLPAAAAMNGGAGAGGGCFQGGVGGGGGPDMMPGNPYQQQQYMAAMMNQQRAMGNDRFQPMMYARPPMAVNYMYPPPYSYPPPPPHEPYSNYFNDENTSSCSVM

SEQ ID NO: 221999 - protein, 59 aa, Glycine max
  Clone ID: PAT_MRT3847_42495C.1.pep
DVIDHERKEVVVFIVESLMRKRAIGKGRRRLEEIVTGKVGKTCISCDRRRGRTGGSNRN

SEQ ID NO: 222000 - protein, 59 aa, Glycine max
  Clone ID: PAT_MRT3847_42496C.1.pep
YGCEKTTEGPPILARTHPIWYTNSIIISLCYINCYNYDSFVLQIHPGTESQISLYVILL

SEQ ID NO: 222001 - protein, 116 aa, Glycine max
  Clone ID: PAT_MRT3847_42497C.1.pep
GSSSHKQSPGAQVNGSNILTSTTMELQSQKRQTSLSHLRKHETEMGGGNAPSVANRTSYSQKNVHGQNFTIPVQPVNFSFKPSATSDIVGNGGCFGDKQQQQQALKGGDKGGGGGY

SEQ ID NO: 222002 - protein, 50 aa, Glycine max
  Clone ID: PAT_MRT3847_42498C.1.pep
LPHLGGFFSICLFFPNSHSSYFFGRFLRDRNPSCAGHRLRIHFLSHFSYL

SEQ ID NO: 222003 - protein, 107 aa, Glycine max
  unsure (1)..(107): unsure at all Xaa locations
  Clone ID: PAT_MRT3847_42499C.1.pep
RPPSLGGGGGEKGSSQSSMARIGGNRRCCAKEELIDTLIAESQGPSVGYTRVNRKIYLTSRWTLPNPCGSWVMWAIGXFETRDVGDICVTSSSWYXDLPRGLITPDQ

SEQ ID NO: 222004 - protein, 110 aa, Glycine max
  unsure (1)..(110): unsure at all Xaa locations
  Clone ID: PAT_MRT3847_4249C.1.pep
TVPKLKAMANPPPVRPWVRLASIRSTPAPAPSPAQESRTTLGLPAFRTASAPSSPQTQPTQVQEHSQPNRVYISSSSSLPTSLVHNAKFATSPPEKHTRVPVSSXTHSXK

SEQ ID NO: 222005 - protein, 340 aa, Glycine max
  unsure (1)..(340): unsure at all Xaa locations
  Clone ID: PAT_MRT3847_424C.1.pep
MSRRKGTSMTISLLWTSPLFYDLSTYLPRKIMIRAPRVTIATRFQRAFMQLLSNAQFEELSARDLMLTSALNTDYLLTLPIYVDWKRAYESNAIIFRRGYATEKQKGLLIVEKLDYLQSKFLRXPFFAISEPLTKLGTWISELYENACQKHEVQNWTERLRLWLKELSLFQKSLLYNDPASDEQIGVDQVPNAELPIWLAAQRAVARYEGILSPVGPRGRLLRRLLSWIGLIPPMPETPFEVHNDNNAPEPYLRPTFLSRISLSDIWRPASRKYCRNDTWKMLKTSISILFSQSVLQEPAFEELILLYYQEVEETNAKDKAEVPSLQLXIYERIPIPDLP

SEQ ID NO: 222006 - protein, 213 aa, Glycine max
  Clone ID: PAT_MRT3847_42500C.1.pep
VIGGRFKKKENPFIEEAYQRVALDQLLRIAGIEDDDLLIMSDVDEIPSAHTINLLRWCDGIPPVLHLQLKNYLYSFEFFLDNKSWRASIHRYQTGKTWYAHYRQADVLLADAGWHCSFCFRHINEFIFKMKAYSHYDRVRFPHYLNPDRIQDVICKGADLFDMLPEEYTFKEIIGKLGPIPHSYSAVHLPAYLLNNAERFRRLVPGNCIRERG

SEQ ID NO: 222007 - protein, 54 aa, Glycine max
  unsure (1)..(54): unsure at all Xaa locations
  Clone ID: PAT_MRT3847_42501C.1.pep
LFFIIXKXHKNNKRTRCMKTTTTGADSDIIHLIHTHHSDKDGITRLQTPCIKFT

SEQ ID NO: 222008 - protein, 76 aa, Glycine max
  Clone ID: PAT_MRT3847_42502C.1.pep
EEEIFLSVSSAKFRYGFRSSFSYRAPGFFFFFFFFFFFFFFFFFFADKQEVIQINIKDHENIRGEQKTRTKFLNKN

SEQ ID NO: 222009 - protein, 98 aa, Glycine max
  Clone ID: PAT_MRT3847_42503C.1.pep
SQTLLIPGLGIYLAFFSVISGYNKAFRSSLLCFFLSKFFLKNSLLGGYEVRSLAEEDADRTNPPPGCDGFRYSFGNHGKNTNKRCYFVIVTQSYVAYW

SEQ ID NO: 222010 - protein, 99 aa, Glycine max
  unsure (1)..(99): unsure at all Xaa locations
  Clone ID: PAT_MRT3847_42504C.1.pep
MSRSWSNLKKVILLRRFIKXIEKVRKFNPRGTRYLPLEPDSEAEKVNLRHQDMEERKGTEEWMLDYALRQVVSKLTPARKRKVELLVEAFETVMPTIKT

SEQ ID NO: 222011 - protein, 70 aa, Glycine max
  Clone ID: PAT_MRT3847_42505C.1.pep
KNTHPCEPTALVSAFDPMTKCLGTRWSFLIPFSKWYFPNSLNIVYGYVLESPNPLLKKKTTQKPQNARPP

SEQ ID NO: 222012 - protein, 141 aa, Glycine max
  unsure (1)..(141): unsure at all Xaa locations
  Clone ID: PAT_MRT3847_42506C.1.pep
FRYYLIRAHEYVKPYFRGSKLXSFLTGHNITITDGIDKTGGTLQFRKLADWGCLKRNSKHTSNGMRGAPCYKASLWSQLCYVSCNNLAMQEAYLVNLINVLRESHLPSAEEARRLRRKALSTIAWLQRASVPTIAQIEKLH

SEQ ID NO: 222013 - protein, 234 aa, Glycine max
  Clone ID: PAT_MRT3847_42507C.1.pep
METHKNGEPTTGTYLRDTATSAIQNFAPINKIHQHLCAFHFYSYDMSRQVEAHHFCAHQNEEMRQCLIYDSPEKKARLIGLEYIISENLYLTLPDQEKRLWHSHLYEVKSGLFFMPKVPALIQRPDMETVCTTYGKVFHFWQVDKGHSLPFGIPQLMMALTRDGQIYDHLLQSSAERMGIDYEEERKAREYMTGPVHGIHPLANGGGKGLELRLREVELKHDPSPPSVKARILF

SEQ ID NO: 222014 - protein, 55 aa, Glycine max
  Clone ID: PAT_MRT3847_42508C.1.pep
CRDLGSTFTCVKHRKNIRPMFVRVPNTVRLTKEKIACKYLLFCPQSNKYHLTDGY

SEQ ID NO: 222015 - protein, 42 aa, Glycine max
  Clone ID: PAT_MRT3847_42509C.1.pep
EIVFHFFSPSSATSPISLVANSEFPDSLPKFSKHKKTGEAEN

SEQ ID NO: 222016 - protein, 139 aa, Glycine max
  unsure (1)..(139): unsure at all Xaa locations
  Clone ID: PAT_MRT3847_4250C.1.pep
QWGWAQYAHPIRXIWVYNCEFFYIRPTIPSIKFLDRVATHLSKEKAWDQPVFNEELFYPSFPGYDGLHAARRTMDMYLFMNSKVLFKTVRNDANLSKLKPVIIHVNYQPDKLPRMKAIVEYYVNGKQDALKPFPDGSDW

SEQ ID NO: 222017 - protein, 208 aa, Glycine max
  Clone ID: PAT_MRT3847_42510C.1.pep
MEVHSPVVAKRLWNVLRVTFFMIRKGLISKRKMIMDMNLMMKKGKVVRKSLSNLMSSHHHHHNHKSVTHGGGLGVHYEFSCNNSPNLNFFNMPKRKHHFNFPCIHAPEVLEEELEEHDFSFEVESDVVPNKAVVTVPKTPEYMYNFFVEKKSPLLSPFSVRVSNYSALDENEDIGNGHVDDQAEDFIKRFYEQLRTQSPVQFLRFQEM

SEQ ID NO: 222018 - protein, 90 aa, Glycine max
  Clone ID: PAT_MRT3847_42511C.1.pep
QVLPTNQFSVTEYFVPKRATDRSAWPAVYFLYDLSPITVTIKEERRNFLHFLTRLCAVLGGTFAMTGMLDRWMYRLIESVTKSKTRSVLR

SEQ ID NO: 222019 - protein, 42 aa, Glycine max
  Clone ID: PAT_MRT3847_42512C.1.pep
PMRSHKSRGSEEHVKIKSSQILYRWEGNGTPPSCKKRLVYLW

SEQ ID NO: 222020 - protein, 105 aa, Glycine max
  Clone ID: PAT_MRT3847_42513C.1.pep
KNLSTQLICLIFASLEIPKEHINKTGPSQEPNETCTNLHSNFYPRLPDTNRTMDIFTHTRLHAFTMLQHIHFYPLHILNLQQISVRYPPFPRDGVSSVTILFTFH

SEQ ID NO: 222021 - protein, 250 aa, Glycine max
  Clone ID: PAT_MRT3847_42514C.1.pep
MADHQRLRIHPMEGEAPPPPPTTPLVPPGSSKSEKRIPLHHPPQLRAMPAAYPTAHKRSCCCKCICWIITLLVLLLIILAASVGILYLVFKPKLPDYSVDTLRISDLRLNFDMSLYARFDVKITATNPNKKIGIYYKKGGRLSVWYTNTRLCEGSLPQFYQGHENKTMLNVSLSGQVQSGSTLMNALQQQQQTGRIPLDLKVHAPIAIKLGRLKLMKVRVLGECLLVVDSLSSNNLISIKASNCKFRLKL

SEQ ID NO: 222022 - protein, 80 aa, Glycine max
  Clone ID: PAT_MRT3847_42515C.1.pep
IHCSRASYSEVCISKGHEIDGRKRMTFSPHKILYPSYVALCFCGGGPLLSMKSQLDAAGYSHDAQKKQEDLHFWSTRCQK

SEQ ID NO: 222023 - protein, 83 aa, Glycine max
  Clone ID: PAT_MRT3847_42516C.1.pep
STWDPIKHNNHSYNSASLSQPLHHESFTQITRPTYSTRCSLQSPTNAKTNSSCFCTPSNHSPFVSAFAFLLSSQQINRTTVFA

SEQ ID NO: 222024 - protein, 63 aa, Glycine max
  Clone ID: PAT_MRT3847_42517C.1.pep
PVTWRTNYISNTHNRGCRIEFRQQKQQQQPHCSDALYPYTLIYQNSQTISLQKCLPITFGYAE

SEQ ID NO: 222025 - protein, 36 aa, Glycine max
  Clone ID: PAT_MRT3847_42518C.1.pep
NFSSYRTRRFITWSGNNYKTKNIKTEPETEKCYDNE

SEQ ID NO: 222026 - protein, 121 aa, Glycine max
  unsure (1)..(121): unsure at all Xaa locations
  Clone ID: PAT_MRT3847_42519C.1.pep
MADEVVLLDFWPSPFGMRVRIALAEKGIKYEYKEEDLRNKSPLLLQMNPVHKKIPVLIHNGKPICESLIAVQYXRKVGIARNPWWPFDLNQKVKLKSWPNMVIRRYLNLERRIXTFKGEEK

SEQ ID NO: 222027 - protein, 118 aa, Glycine max
  Clone ID: PAT_MRT3847_4251C.1.pep
KTLFFSQNGPRILGPTKSFSLLKNLRGGKFKKGGGYLITVYHQYKPFFLEKKKPQGFGAKPPPNFGWQKTPFFKKTQRLGNPPPILKNLGVIKRGTFPPIFFFANKLGFLKKSFLIFF

SEQ ID NO: 222028 - protein, 88 aa, Glycine max
  Clone ID: PAT_MRT3847_42520C.1.pep
LKEAIIAYTGLFPATLYTLVALILALYYVLSVLSPSFYHRHNTALCDLEPQKDPVRPPVQILEDTEDHLKAYNGTDPDKAILMAIDGH

SEQ ID NO: 222029 - protein, 82 aa, Glycine max
  Clone ID: PAT_MRT3847_42521C.1.pep
NIFFMTVFKKIFFKCSNFYIFKINKNSKIISMQINIKTYYLRQFKNLYRKSTLFHEDRFKYSSKSCSKVSKILNLKAFFSST

SEQ ID NO: 222030 - protein, 136 aa, Glycine max
  unsure (1)..(136): unsure at all Xaa locations
  Clone ID: PAT_MRT3847_42522C.1.pep
LWDPRRSTFDLIGXSHADXAGWIPDTRTDPSRTCQLLRRSLTSWASKKXHSVALSTTDAEYIAVGHCWAQLLWRNQTLRLYGYXPSNDPHLCDKESAPRMAAXPVEHRRTNHIDILHHFLRDHQQGGDLEIAYASS

SEQ ID NO: 222031 - protein, 63 aa, Glycine max
  unsure (1)..(63): unsure at all Xaa locations
  Clone ID: PAT_MRT3847_42523C.1.pep
LEKASNLDPTLXYPXTYRAASLMRTQNAQAALAEINRILGFKLSPECLXVRXFIXXSXEDXKA

SEQ ID NO: 222032 - protein, 101 aa, Glycine max
  Clone ID: PAT_MRT3847_42524C.1.pep
SIGVNFAANFATSLRILANRPSIGSSNWQGSCIRCRGRSESCSNSCSSRRSVRRITHAKAQVYPAVFHGSFDRRTGLIKRANERREDLRRSIFREAFCQAC

SEQ ID NO: 222033 - protein, 122 aa, Glycine max
  Clone ID: PAT_MRT3847_42525C.1.pep
VCIKFQFIGAYSERRVTNPGIGSAPFPLTKEYIELQFAINYIGQFLLTNSLVVTIKKALSLSYASVIVFAASSTGSPIMTWAAIKFSTISSPSKLHQLVVPMANPSSAPLLHCQRTLQGCRG

SEQ ID NO: 222034 - protein, 52 aa, Glycine max
  unsure (1)..(52): unsure at all Xaa locations
  Clone ID: PAT_MRT3847_42526C.1.pep
ESNLSFTYSXIPPFWQSQCHFRRHHMIMIILSIPLIFSFFFSLFFTLYWINT

SEQ ID NO: 222035 - protein, 61 aa, Glycine max
  unsure (1)..(61): unsure at all Xaa locations
  Clone ID: PAT_MRT3847_42527C.1.pep
XXXXEXNEXXTETXXNYMQFRTQYXXFMNXLFXSFDNXNXXXXRSXXXFARAEFRXYVRVX

SEQ ID NO: 222036 - protein, 71 aa, Glycine max
  Clone ID: PAT_MRT3847_42528C.1.pep
NLTCISGGKNAFSCSEIPGSYRSYMISSLQPQIIFKIHIKMFCSISYRPWTGYIITKYNSQKMINSLSFFA

SEQ ID NO: 222037 - protein, 68 aa, Glycine max
  Clone ID: PAT_MRT3847_42529C.1.pep
GRVMDYAFESIFNNASFDSDDDYPYRAGDGKSHASKEHAKDTPIDDYEDVPAYDEVALKNADASQSVS

SEQ ID NO: 222038 - protein, 58 aa, Glycine max
  Clone ID: PAT_MRT3847_4252C.1.pep
HSFALSLSLYTTGYTKGAGLANSLDYSSQYSTSYTSALLATLFTKVTLHIHNKLAPIN

SEQ ID NO: 222039 - protein, 106 aa, Glycine max
  Clone ID: PAT_MRT3847_42530C.1.pep
GKKNFIIGGKLNSQILNLGKQVHKLVNRLKVSLFDTKSFIIITKYLSPSCFQGIPEPQTLVFLNAGRTNNGIVNPRGGKPMINLKANPAKAKANFLAASNQSPGIE

SEQ ID NO: 222040 - protein, 89 aa, Glycine max
  unsure (1)..(89): unsure at all Xaa locations
  Clone ID: PAT_MRT3847_42531C.1.pep
PQNWIEGLLLECIKNQRTLKPMPXNRLLHDGSYNNPFLRVSFYTSDRGRHASILLVPAEHSPHLLMIGIFELCAALQHDSLCLGHHRSP

SEQ ID NO: 222041 - protein, 150 aa, Glycine max
  Clone ID: PAT_MRT3847_42532C.1.pep
MSTVPGQLIWEIVKKNNSFLVKEFGRGTQSVQFSREPNNLYNLNTFKYSGLANQKTVTVQPAGKDQSVLLATTKTKKQNKPAALLHKSVMKKEFRRMAKAVQNQVADNYYRPDLSRAALARLSAVNRSLRVAKSGVKKRNRQAVKVPSRK

SEQ ID NO: 222042 - protein, 150 aa, Glycine max
  Clone ID: PAT_MRT3847_42533C.1.pep
MATVPGQLIWEVVKKNNSFLVKEFGRGTQSVQFSREPNNLYNLNTFKYSGLANKKTVTVQPAGKDQSVLLATTKTKKQNKPAALLHKSVMKKEFRRMAKAVQNQVADNYYRPDLKKAALARLSAVNRSLRVAKSGVKKRNRQAVKVPSRK

SEQ ID NO: 222043 - protein, 48 aa, Glycine max
  Clone ID: PAT_MRT3847_42534C.1.pep
YLENRNFYYLTFKARIKQLLIFMHKKYYFHMVIFVFRFRNENCFYEHK

SEQ ID NO: 222044 - protein, 110 aa, Glycine max
  Clone ID: PAT_MRT3847_42535C.1.pep
TRPVIITMLGFTQADHYNPSYVQVEPNSESNGISCKTICKLECAPLVIIAQLYLKCVKDCSAKCLTKSIVAANDCMTSCGLVKSINVNNDVRDRTTYVVNSCMQECLNKK

SEQ ID NO: 222045 - protein, 60 aa, Glycine max
  Clone ID: PAT_MRT3847_42536C.1.pep
KILSSIEYYNIKYVDLLLKIRIFTLIDTKHLHILLIILTIPYDISFPQILTLLLESRWIH

SEQ ID NO: 222046 - protein, 127 aa, Glycine max
  Clone ID: PAT_MRT3847_42537C.1.pep
HQIMLVGIDERIKGLEKKPERLEYKGENAGIHNLNLTDANDLCANCDYTIRCYNTNSRICIHYDTVEESERHKDQTLATNAAQPFTQSHKNVTRLDVGLTGQCGARYESAPKDLTRERSYGDIEYDV

SEQ ID NO: 222047 - protein, 76 aa, Glycine max
  Clone ID: PAT_MRT3847_42538C.1.pep
TDSRILDRSHVEMVHDSFSKGQFVVHVRLALLRKGLLGLSCIGSGLGADVLPPNSASWDLIIPKFHHYMICFIRRF

SEQ ID NO: 222048 - protein, 142 aa, Glycine max
  unsure (1)..(142): unsure at all Xaa locations
  Clone ID: PAT_MRT3847_42539C.1.pep
TWGLRAAERHVVXFSISDFPSGLRALVKTGYGARVTPYVDDSIVIDVNPDNKDMSPEFLRWLRERNLSSDDRLMQLKEGYIKEGSTVSVMGVVQRNDNVLMIVPPPEPLTTGCQWAKCIFPASLEGIILRCEDTSKIDVIPV

SEQ ID NO: 222049 - protein, 71 aa, Glycine max
  Clone ID: PAT_MRT3847_4253C.1.pep
IPGVKRCRHYGYSKSVSLSYSCSNWTTGDKVRNWHQPFAGRWAWCFGFWKGEAFKLGLLNLWGVCWLLTSS

SEQ ID NO: 222050 - protein, 64 aa, Glycine max
  Clone ID: PAT_MRT3847_42540C.1.pep
SDCRMKKPKLRFSNFRFHIEAIKIRARCPPRKKVRDKNIKVTSGIIGAARIPFCRLLAAVRTRG

SEQ ID NO: 222051 - protein, 40 aa, Glycine max
  Clone ID: PAT_MRT3847_42541C.1.pep
GPPSEPLTTGCQWAKCIFPATLEGIIFRCEDSSKIDVIPV

SEQ ID NO: 222052 - protein, 95 aa, Glycine max
  Clone ID: PAT_MRT3847_42542C.1.pep
HLILKTPKSIRAVYKDSCIRLGEEVSKVLRELANSIRNKRQFSPQTLSNNLNEALQDLDNALKSQPQLVLGSRNGRTPNTPVQKLEEDTASARTP

SEQ ID NO: 222053 - protein, 53 aa, Glycine max
  unsure (1)..(53): unsure at all Xaa locations
  Clone ID: PAT_MRT3847_42543C.1.pep
IGVVQRNTNVLXIVPLPEPLNTGCQWAKCIFPASLEGIILRCEDPSKIDVIPV

SEQ ID NO: 222054 - protein, 79 aa, Glycine max
  Clone ID: PAT_MRT3847_42544C.1.pep
RGKRYPLNLFKKMAPLCFFKRWGPTPANRVKVSAHWKAFPILLMVSCMARGQRLGKQIVTDHNPFFSQKVFRPGGIGRV

SEQ ID NO: 222055 - protein, 170 aa, Glycine max
  Clone ID: PAT_MRT3847_42545C.1.pep
MADDSAKGIENASLNSTQLENPQIEPIRLPSVEEIRGQDIWNNCAVRSVVSGVMGGGLGIFMGLFLGALDNPLMQEEMTGRQQFIYQAKQMGRRSWSSAKAFAVMGFIFSAAECVVEKARAKHDITNTVVAGCATGGAISAKGGPKAACAGCAGFAAFSVVIEKFLERHQ

SEQ ID NO: 222056 - protein, 170 aa, Glycine max
  Clone ID: PAT_MRT3847_42546C.1.pep
MADDSAKGIENASLNSTRLENPQIEPIRLPSVEEIRGQDIWNNCAVRSVVSGVMGGGLGIFMGLFLGALDNPLMQEEMTGRQQLIYQAKQMGRRSWSSAKAFAVMGFIFSAAECVVEKARAKHDITNTVVAGCATGGAISAKGGPKAACAGCAGFAAFSVVIEKFLERHQ

SEQ ID NO: 222057 - protein, 68 aa, Glycine max
  Clone ID: PAT_MRT3847_42547C.1.pep
EEGFGHGLPGTLEFLKGEPAEHFQDFNAEAQGCLTIPNLKANLPGEPQPPSSNSPICDEAEVRFLPGD

SEQ ID NO: 222058 - protein, 126 aa, Glycine max
  unsure (1)..(126): unsure at all Xaa locations
  Clone ID: PAT_MRT3847_42548C.1.pep
PRKKAHPYVINEIGDTYKEVIXETHTGGPAESYDEFTAXLCSENDCLSAVFDXDFLTYHNCQKSKMXTIAWASSVARIRPNMLYATSNDRFXRELQGIHYEIHATDPTQMDLELLRERLTEQTPTQ

SEQ ID NO: 222059 - protein, 659 aa, Glycine max
  unsure (1)..(659): unsure at all Xaa locations
  Clone ID: PAT_MRT3847_42549C.1.pep
MTSKSRPNLSENSNKGSMATPRASKASKVVSKSESESPSPLQNSRLSVERSPRSVNSKPAVERKSPRPSATPLDKQPPRAAKGSDLQNQLNLAQEDLKKAKELLIQAEKEKLKAIDDLKEAQRVAEEANEKLREALVAQKLAEENSEIEKFRAVELEQAGIETVKTKEEEWQKEIESVRNQHALDMAALLSTTQELQQVKQELAMTCDAKNQALNHADDATKIAEIHAEKAEFLSAESMRVKALLDSKLETEAREVKXEIRGNQVIFKLKTEIEALKAELEKAKDYDDKLSEKETFIEQLNVELEASMMAESYSRSLLEEWHKKVEELEMRIEEANKLERXSASESLESVMKQLEGNNDLLQEAKNDFGPLEAIGFFLTFFGHFVRVSLLLVNWPFYATKSVLKSXGVVEARKSGLIFFTKEQAHALNDEKLAASSVHALLEEKNKLISELENSRDEEEKSKKAMESLASALHEVSAEAREAKENLLNIQAERESYDAQIEDLKLVLKATNEKYESMLNEARHEIDVLVCSIENSKSAFENSKAEWEHRELQLVSCIKKNEEEKVSLEKEIKRLLYLLKETEEEANANREEEAQLKENLKEVEAEAIQLQEALKETTAENMKLXENLLDKENELQCMFQENDELRIREAESIKKVEELS

SEQ ID NO: 222060 - protein, 234 aa, Glycine max
  unsure (1)..(234): unsure at all Xaa locations
  Clone ID: PAT_MRT3847_4254C.1.pep
MKIEVLELLKNNYAARNIPKGVFLLPFTFLVVVILLLITNLNESYSYLYGSSVESTENFSCNIFSGNWVPHSKGPYYSNESCPFITYKQNCFMHGRPDREFLKWRWKPDECELPLFDAKQFLKLVRGKSMAFVGDSNGRNQMESLLCLLNSVARPEDITARYTSNDDKYFKWWYYADYKFTVTILWSPFLVKSSQTYLNDTSFXNAENLYVDEADKAWASHIENXDYVIFSGRQ

SEQ ID NO: 222061 - protein, 300 aa, Glycine max
  Clone ID: PAT_MRT3847_42550C.1.pep
SLTTQELQRVKQELAMTCDAKNQALNHADDATKIAEIHAKKAEFLSAELVRLKALLDSKVETEARENQVILKLKTDIEALKEELEKAKGYDDKLSERESFIEQLNVELEASKMAESYARSLLEEWHKKVEELEMRIEEANKLERSASVSLESVMKQLEGNNDLLHEAESEVATLKEKVGLLEMTIGRQRADLEDSERQLRMAKEESLEKSKEVEALKSELETVKEEKAQALNDEKLAASSVQALLEEKDKLINELEILRDEEEKTKTMESLASALHEVSAEARDSKENLLNNHVAHENYE

SEQ ID NO: 222062 - protein, 85 aa, Glycine max
  unsure (1)..(85): unsure at all Xaa locations
  Clone ID: PAT_MRT3847_42551C.1.pep
WKVASWISASSTVGRVTQGIDTTXLTGIVTGAISGLGLEIILRLAFRGVHVVIAVRSLDSGMNVVVTILNEIPXAKIDVMELDLS

SEQ ID NO: 222063 - protein, 50 aa, Glycine max
  Clone ID: PAT_MRT3847_42552C.1.pep
FQIILYRLIYQPCVLVTLVSTLRVRFNYRPLGSLASSGPCTSGSLSFVTV

SEQ ID NO: 222064 - protein, 57 aa, Glycine max
  Clone ID: PAT_MRT3847_42553C.1.pep
VSSFTPPCSPPTSFISITPSSPSSANTPPTSNEHITLSSTSYNPMITMPSISSTFSA

SEQ ID NO: 222065 - protein, 41 aa, Glycine max
  Clone ID: PAT_MRT3847_42554C.1.pep
ESDMISKGRGLILLQSVTETSLSHSHAKTYITTMHAQLSYA

SEQ ID NO: 222066 - protein, 91 aa, Glycine max
  Clone ID: PAT_MRT3847_42555C.1.pep
EGFSFESSLRLLLTTLILIPQRLATSSKPIKKPPVYKPPVYKPPGYKPPVYKPKPPAYKPKPPVYKPPYKKPPYKKPPYGKYPPVEDNTHA

SEQ ID NO: 222067 - protein, 121 aa, Glycine max
  Clone ID: PAT_MRT3847_42556C.1.pep
SRKHPLIVITQFFYGLQTHAGEVNFETRDAYYLTKIYNFNRNIIWFHLSQHRISHQHTNLYRIQHTVAIIQLVLKQLKVPVYVRTTQKLFHYINFIDTNLRRFIFPFPRHVHTLHPKIAQH

SEQ ID NO: 222068 - protein, 60 aa, Glycine max
  Clone ID: PAT_MRT3847_42557C.1.pep
MSDSSRDENVYNAKLADHVDRYDEMVEFMDNVPDTVEVEELTVDETNLLSVAYNNVIGAM

SEQ ID NO: 222069 - protein, 41 aa, Glycine max
  Clone ID: PAT_MRT3847_42558C.1.pep
AGENSKWVFAQNDNHCPQIFLAGVEINSLRRNKLLWGSTGA

SEQ ID NO: 222070 - protein, 269 aa, Glycine max
  Clone ID: PAT_MRT3847_42559C.1.pep
MAGPSRRHAWVAGEKLWGEVESGKVKSFAKIKVENGSDSCPNSVSVAGTEFRDKGVLVLPCGLTLWSHVTVVGTPRWAHAESDPKIAVVRDGGEAVMVSQFMMELQGLKAVDKEEPPRILHFNPRLRGDWSGKPVIEQNTCYRMQWGSALRCEGWKSRADEETVDGHVKCEKWIRDDNNRSEEWKATWWLNRLIGRKKKVTVDWPYPFAEGKLFVLTISAGLEGYHVSVDGRHVTSFPYRTGFALEDATGLSINGDVDVHSIFFASLPT

SEQ ID NO: 222071 - protein, 42 aa, Glycine max
  Clone ID: PAT_MRT3847_4255C.1.pep
QEIVFSIIYDFSNVMMKMISDLCPASIKPWLNHCEGVYSVMN

SEQ ID NO: 222072 - protein, 546 aa, Glycine max
  Clone ID: PAT_MRT3847_42560C.1.pep
MAPSPQEIIFRSPLPDIPIPTHLPLYSYCFQNLSKFHDRPCLIDGDTGETLTYADVDLAARRIASGLHKIGIRQGDVIMLVLRNCPQFALAFLGATHRGAVVTTANPFYTPAELAKQATATKTRLVITQSAYVEKIKSFADSSSDVMVMCIDDDFSYENDGVLHFSTLSNADETEAPAVKINPDELVALPFSSGTSGLPKGVMLSHKNLVTTIAQLVDGENPHQYTHSEDVLLCVLPMFHIYALNSILLCGIRSGAAVLILQKFEITTLLELIEKYKVTVASFVPPIVLALVKSGETHRYDLSSIRAVVTGAAPLGGELQEAVKARLPHATFGQGYGMTEAGPLAISMAFAKVPSKIKPGACGTVVRNAEMKIVDTETGDSLPRNKHGEICIRGTKVMKGYLNDPEATERTVDKEGWLHTGDIGFIDDDDELFIVDRLKELIKYKGFQVAPAELEALLIAHPNISDAAVVGMKDEAAGEIPVAFVVRSNGSEIAEDEIKKYISQQVVFYKRIGRVFFTDSIPKAPSGKILRKVLTARLNEGLVVAN

SEQ ID NO: 222073 - protein, 107 aa, Glycine max
  Clone ID: PAT_MRT3847_42561C.1.pep
REFPGSTHASANRHGQQHSHLPLSFYATPRAPCCFFLRFRFPLLLHSPLPISPPNLLRAWPSSPFFIPPPSTTTPTPPPPLKTWPSFSKVQGVLRDFDPGGKSPRLH

SEQ ID NO: 222074 - protein, 101 aa, Glycine max
  Clone ID: PAT_MRT3847_42562C.1.pep
MAYVKAHKSKSYGKIYEVIITIRRQVKTDYPAKIRLINHDNNTYNTPKYRFVVRFNNNDIDAQIISASIASDLVLATSYSHELPRYCLQLRLTNYATTYCT

SEQ ID NO: 222075 - protein, 73 aa, Glycine max
  Clone ID: PAT_MRT3847_42563C.1.pep
FEKNLLKCGWSPDGSKVTAGSSDRMVYIWDTTSRRILYKLPGHNGSVNECVFHPNEPIIGSCSSDKQIYLGEI

SEQ ID NO: 222076 - protein, 130 aa, Glycine max
  unsure (1)..(130): unsure at all Xaa locations
  Clone ID: PAT_MRT3847_42564C.1.pep
HHTRPHLWQIQFSPFSCWPSSASSPWLTPIPNFLFFFGNPQKNQPLRRTSSLSXSPPFFFPIQPAPFFPTPFFPFPPXIPTPPNPFFFLKXPPNSPFPSPPPFFFFFSPPPSTNFLTXLLPPSLSSPPPP

SEQ ID NO: 222077 - protein, 247 aa, Glycine max
  Clone ID: PAT_MRT3847_42565C.1.pep
MQVFSIEGESALSVVGPRPMEWSTVPYNAPQAPGPNGKQRTSSLESPIMLLSGHQSAIYTMKFNPAGSVIASGSHDREIFLWNVHGDCKNFMVLKGHKNAVLDLHWTTDGTQIVSASPDKTVRAWDVETGKQIKKMVEHLSYVNSCCPSRRGPPLVVSGSDDGTAKLWDGHQHNFEKNLLKCGWSPDGSKVTAGSSDRMVYIWDTTSRRILYKLPGHNGSVNECVFHPNEPIIGSCSSDKQIYLGEI

SEQ ID NO: 222078 - protein, 55 aa, Glycine max
  Clone ID: PAT_MRT3847_42566C.1.pep
KKESLLPCMDQEILLVTFLVLYCRIKLIYFLGVIIRNIDSFSNINGYFLYIINLL

SEQ ID NO: 222079 - protein, 77 aa, Glycine max
  Clone ID: PAT_MRT3847_42567C.1.pep
ATRTSTCTEDAAITDGIMGPAIVGNSQIIPTSDPSLILVTSAKCVIHTRTNMFGGWPDSCSDWGSYSSLPSVPWHNS

SEQ ID NO: 222080 - protein, 122 aa, Glycine max
  unsure (1)..(122): unsure at all Xaa locations
  Clone ID: PAT_MRT3847_42568C.1.pep
GNPGLYKGSCFQRVIPSLMCHGGHFTAGNGTGGESIYGAKSVYYNFLKNLTGPGILSMANAGPGTNGSQFFICSEKTQWLDGKHGVLRQVIKGLNVGKYIETVXSISCWTSKHVVIGNCGQL

SEQ ID NO: 222081 - protein, 38 aa, Glycine max
  Clone ID: PAT_MRT3847_42569C.1.pep
LESLQVSNIKPNCTNFTHNIMHKFCQVLLLGNNSYHPH

SEQ ID NO: 222082 - protein, 62 aa, Glycine max
  Clone ID: PAT_MRT3847_4256C.1.pep
ERERGSKNPKPIHALCHSQGMYGQQLVLGLMGIDRALSLLMCILRLYSPDWELLYTCWIING

SEQ ID NO: 222083 - protein, 97 aa, Glycine max
  unsure (1)..(97): unsure at all Xaa locations
  Clone ID: PAT_MRT3847_42570C.1.pep
YVSAVRLFNGGATRNRRFNVRATLPFPQQNAKHYKELQAAIDVVQRACRLCLNVKSSLFSTDGKVLEKNDQTPVTVADFGVQAXISXELNKLFPSIP

SEQ ID NO: 222084 - protein, 128 aa, Glycine max
  unsure (1)..(128): unsure at all Xaa locations
  Clone ID: PAT_MRT3847_42571C.1.pep
ALAAAPAPKNQREXETREKHTAEERATXTDGARKEGTRQKRNRKEEXEQKTQEGAHPKTKQADKTKGEPEAKKANTEQEHERPAAENGAPPRTGHERANKPTKASEEKAHAEAENDAPKGNTEAGEKE

SEQ ID NO: 222085 - protein, 39 aa, Glycine max
  Clone ID: PAT_MRT3847_42572C.1.pep
KEKVLNQEIIYYRHVPYLKPRLGSPSTVSERSLASRKTW

SEQ ID NO: 222086 - protein, 43 aa, Glycine max
  unsure (1)..(43): unsure at all Xaa locations
  Clone ID: PAT_MRT3847_42573C.1.pep
MPKNKEKEGKNRNPXKNQADQQKPELVFKEERQEYPQVLRMLG

SEQ ID NO: 222087 - protein, 138 aa, Glycine max
  Clone ID: PAT_MRT3847_42574C.1.pep
RCILFMLKTMELHVMQLSTSVSLLIHLGIASSRLRALSYAEQVVKLMDSLVMAGKATVEMNKELNTRKWEHPCCTKLLFSQICYFDTAQTSLMHGFKLLKDDGHIYNQINAPSLSGTRILNHQVTCCCFLQKCTSVRS

SEQ ID NO: 222088 - protein, 221 aa, Glycine max
  Clone ID: PAT_MRT3847_42575C.1.pep
MGQQSLIYSFVARGTVILAEYTEFTGNFTSVAAQCLQKLPSSNNKFTYNCDGHTFNYLVDNGFTYCVVAVESAGRQIPIAFLERIKEDFTKKYAGGKAATAAAQSLNREFGPKLKEQMQYCVDHPEEISKLAKVKAQVSEVKGVMMENIEKVLDRGEKIELLVDKTENLRSQAQDFRQQGTKIRRKMWFQNMKIKLIVLGIIIALILIIVLSVCGGFNCGK

SEQ ID NO: 222089 - protein, 181 aa, Glycine max
  Clone ID: PAT_MRT3847_42576C.1.pep
MPTWWGKKSSKSKDQQPQEDHHHPPHGGGGGAATSVLNFNFNKLNKPRPDRPSKSFDDVVRNSPRCSRDFSSSAAAAVDQGLPLPRPSVSSTQSFGIEQGLVFGSGSVSGSSVSSSGSYDDHPTCHSQINASRGQGDTKFYARSKSPGPGSRGPTSPTSPLHPKLHVLSLDSPTGRQEGEC

SEQ ID NO: 222090 - protein, 134 aa, Glycine max
  unsure (1)..(134): unsure at all Xaa locations
  Clone ID: PAT_MRT3847_42577C.1.pep
YRVCGRVVSDGSCLRRWVDTILPDEVYNLVDQLYVGRSFEIPDYTVDVVATVAVRLLEAVRYHMGVSGRSHIRYYQADCCEMLGGTPPSEYETTNCXPRSTYAASXCADHWYTENYREAYSLFDCNGILFNHES

SEQ ID NO: 222091 - protein, 169 aa, Glycine max
  Clone ID: PAT_MRT3847_42578C.1.pep
MDNNEEIPSTPATPGTPGAPLFGGFSNGRNNNSKKSLLKSCRCFSVEEWSLEDGGLPAVSCSLPLPSPPPVVPLARKIGAEFIGTFILMFAGTAAAIVNQKTNGSETLIGCAATTGLAVMIVILATGHISGAHLNPAVTISFAALKHFPWKHVPMYIGAQVLASICAGF

SEQ ID NO: 222092 - protein, 33 aa, Glycine max
  Clone ID: PAT_MRT3847_42579C.1.pep
SLALHCSQNLLGAIKHGVTLDGKAGTGPAKASW

SEQ ID NO: 222093 - protein, 129 aa, Glycine max
  unsure (1)..(129): unsure at all Xaa locations
  Clone ID: PAT_MRT3847_4257C.1.pep
MSNVMWVAPDDKASLWSQLHYVTSNNLXMPETYLVNPTNVLPKSYWHKTEXARQLQRKALSRIEWLRKADVXTIVQIEEFHSMQTMMNAPESNDNIELLMCIDLLVLQRAMNAFSDKIVLXDKLVLANT

SEQ ID NO: 222094 - protein, 99 aa, Glycine max
  unsure (1)..(99): unsure at all Xaa locations
  Clone ID: PAT_MRT3847_42580C.1.pep
MDRAFFLLLGVPLLGVCSDLFSLFTHHPPPSPHHHHHHHYPHSTYHHHHPPHHHXHPPDHHHNYPPHHHPQPLTIYYPSENPTTTILMGVPGNTLHINP

SEQ ID NO: 222095 - protein, 85 aa, Glycine max
  Clone ID: PAT_MRT3847_42581C.1.pep
ALVLAPDGKLDSGECCRVYVAAGSSIYGSADANGVHEVKIADLLESRKAQSYHEHSRSHDDYQGDAARSPTRGSSRLSTVAVSIY

SEQ ID NO: 222096 - protein, 115 aa, Glycine max
  Clone ID: PAT_MRT3847_42582C.1.pep
HAASTLPLRSVSVGFAIKFKNLLGSIPVRGAYADGDYIDKSCHHIPTVGDTAAGAYIAPTGAGSSHRHPLSVDYWKSGLWNSHATSIWMIADSKLTTCHHYHQQGREHYPAGAQR

SEQ ID NO: 222097 - protein, 157 aa, Glycine max
  unsure (1)..(157): unsure at all Xaa locations
  Clone ID: PAT_MRT3847_42583C.1.pep
TRDNTGVSVVCPKYXGXRGXGXXDIYIIRYKDWDLMNTAXTPSMTMSFNPSPCPYSRNLQFVKSTVFHSEISSAPVRTATLMHDVQVTAERKSSSQECIPKTCSALNPRDHCVSKRGKGILNFPQSTSRNVRRMTLSNRVTACVNNAIHVSTPKSGS

SEQ ID NO: 222098 - protein, 93 aa, Glycine max
  unsure (1)..(93): unsure at all Xaa locations
  Clone ID: PAT_MRT3847_42584C.1.pep
FXIHYXXSLCYNIMFIRENFKWCECXXNVXSTXADLGDSXXVYQSTDNPSESLFIDEPRNXAPNXSVIGHNPYICRNTDXLKPXHPXVPKLKG

SEQ ID NO: 222099 - protein, 56 aa, Glycine max
  Clone ID: PAT_MRT3847_42585C.1.pep
KNLQLNHPYFKELTKSQTKQKNKSPNFTHKINDYPDLKKRPLPWNSRLSHSIQKPL

SEQ ID NO: 222100 - protein, 94 aa, Glycine max
  Clone ID: PAT_MRT3847_42586C.1.pep
DRGKLRREGSAHCVFGLNEATMNFFLWRLDRKQEQPVQPVGERRTGCMDHLLRPTPSRRTRTPRASFRDNGFALQGTNNTSGHGTTYAHHSARY

SEQ ID NO: 222101 - protein, 116 aa, Glycine max
  unsure (1)..(116): unsure at all Xaa locations
  Clone ID: PAT_MRT3847_42587C.1.pep
IYNSQQHTTGYCYISPNQTTSHTHIHISFIVEQSRLLKIIHXQRKRFRIRYFKTTHPYILLKLTNHTANTNIINNCFNPLWNEXLNFTLTKPFRISNFQLIYKHLFNAYYNIANSF

SEQ ID NO: 222102 - protein, 56 aa, Glycine max
  Clone ID: PAT_MRT3847_42588C.1.pep
TKSIELFKQVRRVRTDPLPTNLIMLLTRKHEMKSSIIILENYLSFLQEWNKVQSLV

SEQ ID NO: 222103 - protein, 59 aa, Glycine max
  Clone ID: PAT_MRT3847_42589C.1.pep
GNSAYRAGLSIIGGKTLVPSDLEGAIMGPFITPGTIALKDLFVAFVLRGPKGKSKHTGS

SEQ ID NO: 222104 - protein, 82 aa, Glycine max
  Clone ID: PAT_MRT3847_4258C.1.pep
LTPSTSTTCNGCLIRAPILVPVFDSLKFLPNPRRSGATLCNHATLALIRVYLSGLFWFAILVVLTYCFLYDQYNTLFFFFFP

SEQ ID NO: 222105 - protein, 100 aa, Glycine max
  Clone ID: PAT_MRT3847_42590C.1.pep
PWKEGVKISILYICPKYNSVSNSEEPPMNQNLWQTKIKTFYKSSLILVRYAFIHSQADNYPAMCHHKNLIKQSFRIPPPSVVFRSRTDAWVDRGTRKRYL

SEQ ID NO: 222106 - protein, 81 aa, Glycine max
  Clone ID: PAT_MRT3847_42591C.1.pep
FQVQAGEIMDYCSHSPMWYRTSGGDYSTFSPFFDWLHLTDPHCRTKLSHMPNTGAMQQMLASLICSGDNRFTATTISNCGD

SEQ ID NO: 222107 - protein, 51 aa, Glycine max
  Clone ID: PAT_MRT3847_42592C.1.pep
NPWGYIINSNMLISHNKFEMNVHPILLVHKPYMEDHSPKQRGLNRFVFHMG

SEQ ID NO: 222108 - protein, 82 aa, Glycine max
  Clone ID: PAT_MRT3847_42593C.1.pep
PYYLLPRILETYFTLTQNPNLFHLTYHLTLYTLQLTPNLLKTIFSKLQMLLLPQPQIPNPNQNILIFILTLIHHYHYTIIIY

SEQ ID NO: 222109 - protein, 71 aa, Glycine max
  Clone ID: PAT_MRT3847_42594C.1.pep
HPLLFMRPSIKIGPICVASMVGICQGSYLLNPPMGPPYLFLHFFFSKNNINGTLFWVKKAIYKTMQKAQVI

SEQ ID NO: 222110 - protein, 260 aa, Glycine max
  Clone ID: PAT_MRT3847_42595C.1.pep
MCGYGVGAASNQPMEILNCSQPSRLNIPVNQSLLPGKKMFQAQVKEKNSAGYTIETVIDGKPLHGVLFKNQPNTLIPVPNTSSRKRPVSEILSPASNGIHSQNVTAYKVLGQDRMQDKRELRGESSESHECHKDADTIVVSSNPTTVAESFKVSVNPEPEAVNRNGDEKNDTPKSLIESLKNDGSNDVTSSKGEIQIGVQINVPVSNYEIPTQMSDAPNCNADVLKPAAAEIIVCLPNEGVTGDCTTPRTEGHNEQAKLT

SEQ ID NO: 222111 - protein, 84 aa, Glycine max
  unsure (1)..(84): unsure at all Xaa locations
  Clone ID: PAT_MRT3847_42596C.1.pep
PLLLAXFLAFXASLXASWLXLVXGLLGXASLFGCFXLXCAFVRARAXGFRWSXWGXXGSXSXGAAXGRCSPXPFFPXXXSAFGV

SEQ ID NO: 222112 - protein, 97 aa, Glycine max
  unsure (1)..(97): unsure at all Xaa locations
  Clone ID: PAT_MRT3847_42597C.1.pep
MNMKVRVFIVAILWVTWQCYASDMYPLGMSTGYXARTPDVRCAXLRHAVEAHNIFGFETIREECVEATQEYIYGEQDRXHSTRLIQQAHLYATHLEV

SEQ ID NO: 222113 - protein, 239 aa, Glycine max
  Clone ID: PAT_MRT3847_42598C.1.pep
MGENKPAEVKDFQIVVAENKEESKKQQQQLAPKRSSNKDRHTKVEGRGRRIRMPALCAARIFQLTRELGHKSDGETIQWLLQQAEPSIIAATGTGTIPASALAAAGNSLSPQAASLSSSLHQHQQKIDELGGSGGSSSRASWQMVGGNLGRPHLGVGVATAAGLWPPHVSGFGFQTPPTTTTPTTTTSSSGPSNATLATESSNYLQKIAFPGFDLPTSATNMMGHMSPAKDDSQGSGGQ

SEQ ID NO: 222114 - protein, 55 aa, Glycine max
  Clone ID: PAT_MRT3847_42599C.1.pep
TLQPTYYILFYIYVTLKCYLCEFKYVTLTSLNSLLLMSLHNNFIGCLHTYKLFIC

SEQ ID NO: 222115 - protein, 68 aa, Glycine max
  Clone ID: PAT_MRT3847_4259C.1.pep
GSSTGTHGAYILSRTDLDVGPGAIRLIVMTQCIAYHSACMASYCLVRAIVLLPGLALIWSAGLRSTPT

SEQ ID NO: 222116 - protein, 187 aa, Glycine max
  Clone ID: PAT_MRT3847_425C.1.pep
MGIDLKAGGKSKKTKRTAPKSNDIYLKLLVKLYRFLVRRTGSNFNAVILKRLFMSKVNKPPISLSTLIKYTKGKEDKIAVIVGTVTDDIRVYEVPALKITALKFTERARARIEKAGGECLTFDELALRAPLGQNTVLLRGPKNAREAVKHFGPAPGVPHSHTKPYVRAKGRKFERARGRRNSRGFRV

SEQ ID NO: 222117 - protein, 54 aa, Glycine max
  unsure (1)..(54): unsure at all Xaa locations
  Clone ID: PAT_MRT3847_42600C.1.pep
RLVVQGFIYYITLXHKTVKHKNVYETKVWVTSWLNSKEVLEFKPISINPISVTV

SEQ ID NO: 222118 - protein, 127 aa, Glycine max
  unsure (1)..(127): unsure at all Xaa locations
  Clone ID: PAT_MRT3847_42601C.1.pep
APPXTXLXIXXXXXPIXSXSIXXPXYPXQXXXXCPAPPXXPPXHHXLXXSPPXXXXXPSXPXLXXXCLXLLXXXXXXVXPXXXXAXXXXXVXHXAXQXSXXXLXPXVXGRRXXTXXXXXXXXXLLXX

SEQ ID NO: 222119 - protein, 111 aa, Glycine max
  Clone ID: PAT_MRT3847_42602C.1.pep
MAVPATVAAVPASIYVGDLHPDVQEHHLFAAFVEFGSIASVRVCRDRVTMNSLCYGYVNFRSQQDAIRAIKLRNNSYLNGKVIRVMWVHRDPNARKSGRRNVFGKNLAESI

SEQ ID NO: 222120 - protein, 162 aa, Glycine max
  Clone ID: PAT_MRT3847_42603C.1.pep
IGSLMYLLATRPDLTFSVCLIARYMDRPTELHLAAAKRVLRYLKGTMEFGVWYKKQNGRVNLQGWTDSDYAGDLDDRKSTSGYVFTFGSGPISWSSKKQAIVTLSTTEAEFVAAASCACQAVWLKRILDQLGKPQDSGVVIWCDNSSSVKLSKNPVMHGRCK

SEQ ID NO: 222121 - protein, 96 aa, Glycine max
  unsure (1)..(96): unsure at all Xaa locations
  Clone ID: PAT_MRT3847_42604C.1.pep
TSSSTTSRSISLSLSTIIVIGLKEDFEQYAEKAKTLPPTQSNQDLLILYGLDQPGTRGPGNTNPPGMVNIXTKLNWMHWKVVKGKSKXQTMGEYLI

SEQ ID NO: 222122 - protein, 180 aa, Glycine max
  Clone ID: PAT_MRT3847_42605C.1.pep
MATPFPIPVTAAQVGTYFVGQYYQVLQSQPEFVHQFYSDASTMLRIDGNARETAAAMLQIHALIMSLSYARIEIKTAQSLESWSGGVLVMVSGSVQVKDYSRRRKFMQTFFLAPQEKGFFVLNDIFHFVEEDPVHQQQPVLLPQSNLDSKLNASSATNKPVSNYLLGGDIQARDYVATNE

SEQ ID NO: 222123 - protein, 57 aa, Glycine max
  unsure (1)..(57): unsure at all Xaa locations
  Clone ID: PAT_MRT3847_42606C.1.pep
ADRSGLLLKQKVSDDIXYVATATHPNNCRAGGNGPKDFVCQGVADAYITLVTLPKSS

SEQ ID NO: 222124 - protein, 95 aa, Glycine max
  Clone ID: PAT_MRT3847_42607C.1.pep
WSASSTASALARKSSRVIISLSSSSSSSRASSLHSRRSPVTISCHTSSTVLGAAAAGMGMKLVVVNCGAGEGEVSDFRELEDAIIFPRVLGFGRL

SEQ ID NO: 222125 - protein, 90 aa, Glycine max
  Clone ID: PAT_MRT3847_42608C.1.pep
TDFLLSLLDFVPEKRPTAAQCLQHPWFSAGPQTLEPSLTAVKHDAIEGEISEKMQREKAEQEAVEVGMGNMAIDGNPKPLKEFQSMKPSE

SEQ ID NO: 222126 - protein, 154 aa, Glycine max
  unsure (1)..(154): unsure at all Xaa locations
  Clone ID: PAT_MRT3847_42609C.1.pep
MDAYLTTERPPHNWDPSKHSFSQCSIDLLGGGRVVDKTGDRITLIQNSPISNSLRVAARKKGXLMDKIVMSGNAGVKRRDWAXLEQVLLTNSNSAEHFDACKWTKSEPHFWELILPIEVCGSNKGLEMWSSEWANXTSWRLSCLIDNPMQSTGF

SEQ ID NO: 222127 - protein, 307 aa, Glycine max
  unsure (1)..(307): unsure at all Xaa locations
  Clone ID: PAT_MRT3847_4260C.1.pep
GSSSRYAMQKISAEQKKGEDDADMHLARKIMHGKRLRASALAVDAXVCEDGPCSYCSRWHGGGGRSCRRRQTRRFLTHRVRCRWCLEVPTRPMLLLVSVPTFSYLLPPLGMEEQVGDLSPLPVQHESAPRTVDDNAWTEIRNFKKCLIMMFAKQEKEVVLLETVMGLAQQRRHCMVECIPLPQXIAKEAPLYFKKAIDEAEDEWSQHNAKKLIDTSQKGLRNSIPKHFPYFHVEFGLNKGFVHVIDDEKQFNISLGLNVIRGMLHLAEEDMYRRRRYEAVEVQKQAVESFSKEWKHFDWTKQLHETS

SEQ ID NO: 222128 - protein, 44 aa, Glycine max
  Clone ID: PAT_MRT3847_42610C.1.pep
GFPSPVLGESSPPRPTPPPLPPPPRHPPPPPAPPPNRQDGRSYT

SEQ ID NO: 222129 - protein, 43 aa, Glycine max
  Clone ID: PAT_MRT3847_42611C.1.pep
EWRNHFYLTLLNYYKILIMPDNIYHEGHELTFCVLYILFGTVN

SEQ ID NO: 222130 - protein, 46 aa, Glycine max
  Clone ID: PAT_MRT3847_42612C.1.pep
ANDSTCHIIVEIRVCSVLCCMHTISIMLRTVNVDRAFIMHAETRCD

SEQ ID NO: 222131 - protein, 101 aa, Glycine max
  unsure (1)..(101): unsure at all Xaa locations
  Clone ID: PAT_MRT3847_42613C.1.pep
STLITTTPPPHDLSTNPAGPFVSLSAHEARSRHVISPGKLWGIRFTSIFRFKLWWSSGXSTHWSGSNGEGNANDDPMMIRQNDAVVGRPYXLLLPLLEGTF

SEQ ID NO: 222132 - protein, 40 aa, Glycine max
  Clone ID: PAT_MRT3847_42614C.1.pep
SHHLGTESLDGDGDLVLKLCSGRCVQYSPGPHCHCHVHSS

SEQ ID NO: 222133 - protein, 49 aa, Glycine max
  Clone ID: PAT_MRT3847_42615C.1.pep
YLGSYLLSQPRLIKPVKIFPLIWTRFLLKPSSLSLNCGSAVISCGMRKI

SEQ ID NO: 222134 - protein, 67 aa, Glycine max
  Clone ID: PAT_MRT3847_42616C.1.pep
TAARRRQKGEIERVCFVLIGGVIDKKRASRLTRERNGFTDIKDCVSNCGGGALAYSFLLHSSTLCIG

SEQ ID NO: 222135 - protein, 70 aa, Glycine max
  Clone ID: PAT_MRT3847_42617C.1.pep
SFILIINIIKVHYQSKTLVCIQDKHTLSKFCIPFLLRCIMFAPSYEKFSFTYFNTFSIEICFLFLNKERN

SEQ ID NO: 222136 - protein, 34 aa, Glycine max
  unsure (1)..(34): unsure at all Xaa locations
  Clone ID: PAT_MRT3847_42618C.1.pep
CVVLKIHLIHLFIXYNNILGSSTIVVQLXQLVQT

SEQ ID NO: 222137 - protein, 61 aa, Glycine max
  Clone ID: PAT_MRT3847_42619C.1.pep
LVNFYSFLLAYSYFFLLLKIIVMLYGAIYGFRSAQIVVRGNFKNFNFYYFYNVIIIEIIKC

SEQ ID NO: 222138 - protein, 123 aa, Glycine max
  Clone ID: PAT_MRT3847_4261C.1.pep
MCNECELPPPPPQPKECSPPPSPTVIIKCATAPKPLPPPPPVVIECPPPAKPPRGGGADCLLPTLPETPEEPQYLQPPSHLSSAPGTIDLDDIISGANMINPLLRYFTLNYFTFLPPLWLPYY

SEQ ID NO: 222139 - protein, 99 aa, Glycine max
  Clone ID: PAT_MRT3847_42620C.1.pep
YEQLRCLPLYNNSVLHLLLVLLQSPNRWHKKQANYSAVPQDTNGIYICIQDPRATYIGICPHAIEYIVYMMPPTHYDILFISACPGACSNMVHARISGN

SEQ ID NO: 222140 - protein, 59 aa, Glycine max
  Clone ID: PAT_MRT3847_42621C.1.pep
QKSYQVPKKNHQGLLWYMSMSTQKRWIPKCTIMVSHSIPHYTRKLRLLEGGINLETTSA

SEQ ID NO: 222141 - protein, 64 aa, Glycine max
  Clone ID: PAT_MRT3847_42622C.1.pep
KLAHRRFDIQPLTQVVERLKFPNRFPAPFFPELIQSRLKNASHRSVEGLNHNKMVMLSNAEESF

SEQ ID NO: 222142 - protein, 121 aa, Glycine max
  unsure (1)..(121): unsure at all Xaa locations
  Clone ID: PAT_MRT3847_42623C.1.pep
MGILTSLQRNRWRPTWDPIGDTWGGMTMDMTVEAIEERSEGILGYALKEAFXEFVLVSGYNFGINLVLIGYNKDYPKDVMIQDTLIDQDSKEGSKAVHNALNNEVHLRANRVAPGLIPEMY

SEQ ID NO: 222143 - protein, 280 aa, Glycine max
  Clone ID: PAT_MRT3847_42624C.1.pep
MTIKTVKVSNVSLGATEQDIKEFFSFSGDIEYVELQSHDERSQIAFITFKDSQGAETAVLLSGATIVDMPVTISLDPDYQLPPAALASPVRETRTPGGGADSAFRKAEDVVSGMLAKGFILGKDAVNKAKTFDEKHQLSSTASAKVASFDQKIGLSEKISAGATVVGDRVREVDQKFQVSEKTKSAFAAAEQTVSNAGSAIMKNRYVLTGASWVTGAFSKVSKAAGEVGQKTKEKVESAEERQKRKVEDQYAQVLSESPKAAEASEQKSSKPAPAQGLIL

SEQ ID NO: 222144 - protein, 148 aa, Glycine max
  unsure (1)..(148): unsure at all Xaa locations
  Clone ID: PAT_MRT3847_42625C.1.pep
LEAVNKAKTFDEKHQLSSTASAKVASFDQKIGLIEKISAGPLLELYHSXTVAPALAAAEQTVSNAGSALMKNRYVLTGASWVTGAFSKDSKAAGEVGQKTKEKVEGAEEHPERKGEDQFAQVLSESPKAAEASEQKSFKPAPAQGLIL

SEQ ID NO: 222145 - protein, 235 aa, Glycine max
  unsure (1)..(235): unsure at all Xaa locations
  Clone ID: PAT_MRT3847_42626C.1.pep
DRSSWLRSSTYSISPENEKNSLMSCSVAITQDPDYQLPPAALASSVRETQTPGGADSALRKAEDVVSGMLAKGFILGKDAVNTAXTFDEKHQLSSTASAKVASFDQKIGLSEKISAGATVVSDRVREVDQKFQVSEKTISAFAAAEQTVSNAGSALMKNRYVLTGASWVTGAFSKVSKAAGEVGQKTKEKVEGAEEHQKRKVEDQYAQVLFESPKAAEASEQKSSKPAPAQGLIL

SEQ ID NO: 222146 - protein, 37 aa, Glycine max
  unsure (1)..(37): unsure at all Xaa locations
  Clone ID: PAT_MRT3847_42627C.1.pep
VVITCFQLFKCLLMIILVXKKKKKKKKKKKKKKKKKK

SEQ ID NO: 222147 - protein, 504 aa, Glycine max
  Clone ID: PAT_MRT3847_42628C.1.pep
MGGSLLTCCLSMENHHPSTLLSMDSSAPSHQDLDLHMNGKVTLSCPPDINLPLSAERSPPPQPWNQDPSDTVLDVGLGGTQGLDTQSFVQLPKVGRKCAKRLDSIWGAWFFFRFYFKPALVEKSKAKVVRDSNGVLGFDKSDIKLDVFLVQHDMENMYMWVFKEKPDNALGKMQLRSYMNGHSRQGERPFPFSALRGFVRSHRMQRKHYRGLSNPQCVHGIEVVPSPNLMSLDKDERRKWIELTGRDLNFTIPPEASDFSSWRNLPNREFELERPLPLIKSTLNPHPKKLLNGSVLNLSTYLSSLSNGNGTVLSSVSSKKRKDFFLYEKDEECCLAINPPPDQIPDLVMHPSESHWLNDFRGVMKNVCGPVTAAKTVYEDERGFLIIISLPFVDLPTVKVSWRNTVTHGIIKVSCVSVSRKPFIKRNDRTFKLTEPLSEHCPPGEFVREIPLSTRIPEDANIEAYYDEPGSVLEIMVPKLLPGAEEHEVCVCLRPNVGNELMLN

SEQ ID NO: 222148 - protein, 63 aa, Glycine max
  unsure (1)..(63): unsure at all Xaa locations
  Clone ID: PAT_MRT3847_42629C.1.pep
RTQTIFTTLAAVYIPHRIVHAHHMKCIWWAWLNVIAGVFVVLIFGYLCCIIWRKCKIXAGCQR

SEQ ID NO: 222149 - protein, 75 aa, Glycine max
  unsure (1)..(75): unsure at all Xaa locations
  Clone ID: PAT_MRT3847_4262C.1.pep
LSHVPIWDLPTPIKTLEHIVRFVQRNGFLWGVFKLVFVGXGIKKLYIMFTPVGAYAFVDIFIPEIFIAGSINEYV

SEQ ID NO: 222150 - protein, 52 aa, Glycine max
  Clone ID: PAT_MRT3847_42630C.1.pep
DEFSQRSIKSVGVSSLLRNLDGDVYDRHLLKFKQRQYDVYQVRTVEKKKEEK

SEQ ID NO: 222151 - protein, 75 aa, Glycine max
  Clone ID: PAT_MRT3847_42631C.1.pep
THLNKLLEKFSTIFCVIFFIFTFFSIDLFTHLNKLIEKFSTSFFSVYIYPITHIFYFISLIFLFVYIIHFYLFHH

SEQ ID NO: 222152 - protein, 52 aa, Glycine max
  Clone ID: PAT_MRT3847_42632C.1.pep
VKKKKDICKDWALSYDISRILKRIGLHFSLSNEYPQPAISKTGPAHLRNSNI

SEQ ID NO: 222153 - protein, 75 aa, Glycine max
  Clone ID: PAT_MRT3847_42633C.1.pep
HQSDLSSAYHIPFCSLFSVCLIYKRWAHLGLLLAYIAECIYHNERCSVPTTIRADLSTGPGSWASYDTESIDTMT

SEQ ID NO: 222154 - protein, 71 aa, Glycine max
  unsure (1)..(71): unsure at all Xaa locations
  Clone ID: PAT_MRT3847_42634C.1.pep
PHLLSTCFLYKKSLRDNRNIFIYRRDTPVXSEKYKQEQMEIDEAEEKNKNLSAWMETVKNKEQKXNDNKST

SEQ ID NO: 222155 - protein, 54 aa, Glycine max
  Clone ID: PAT_MRT3847_42635C.1.pep
EELKKLIGAPAYIECRAKTQQNVKAGCDAAIKEDLQPAEQKRKKRKGQRACTIM

SEQ ID NO: 222156 - protein, 99 aa, Glycine max
  Clone ID: PAT_MRT3847_42636C.1.pep
YHSQRNILPERNVQNYHTKLDEFKVELERRNLHKCLTNLQDGSIDVAVVKDFYANLYTIEDQSPKQARVRGHLLKIDEDSLNEFLQTPVVLEEGESLST

SEQ ID NO: 222157 - protein, 244 aa, Glycine max
  unsure (1)..(244): unsure at all Xaa locations
  Clone ID: PAT_MRT3847_42637C.1.pep
SEHELDTGITRRKTRMSPKLPSHLFPWLILLTFASFYFFSSFLSLSTFSSSSSSSSPTSQSLSISNTCNLFRGHWVSDPNHTPLYDQTCPFHRNAWNCLRNERQNMTLINSWRWVPRNCHLPRIDPVRFLGMMKNTNIGFVGDSLNENFLASFLCILSVADKGAKKWKKKGAWRGAYFPKFNVTVAYHRAVLLSRYQWQPKQSEAGVKDGSEGFYRVDVDVPADDXAKIAGFFEGFVFNTCHCW

SEQ ID NO: 222158 - protein, 60 aa, Glycine max
  Clone ID: PAT_MRT3847_42638C.1.pep
LLYAVVFVQVVITPSPRCVAIVPLSSRVLVLLFSYRFSTFYLPPPPPPPPPPPPPPSRRH

SEQ ID NO: 222159 - protein, 121 aa, Glycine max
  Clone ID: PAT_MRT3847_42639C.1.pep
RGETFRFKVEKRKSPLSFPNKGREDPPPNKSLLKKIWGPLRPQEKKPAPLGGIFKRDSPPWGKGNFFLLCGAVKKRGGGPPPQKVEGGPPFLGKTPKRPFLFPERGVLKRMWPRFLNRFWG

SEQ ID NO: 222160 - protein, 157 aa, Glycine max
  Clone ID: PAT_MRT3847_4263C.1.pep
MALNFSLVFTLYSIIFLLTTASSTTTTQTTTSTVGKDQVPRIMCNECELPPPPPQPKECPPPPSPPPPIPPSPPPPLPASPPPPVIIKCPPPPKPLPPPPPVVIECPPPPKPPCGGGADCLLPTLPETPEEPQYLQPPPQLSSSPGTIDLDDIISRC

SEQ ID NO: 222161 - protein, 173 aa, Glycine max
  Clone ID: PAT_MRT3847_42640C.1.pep
MAVSKMFLSWSWALQRSQSHPVQLPKTSSRSSAVAVTASASASARAIGIDNDVSVKSILYPALSLSNILHFKSTYNVQIVVGEDEPEDRIVNRFKKEVLKAGVLQECRRRRFFENKHDKIKRKAREASRRNRKRKPQSRAWAQNKHGSEKKKKDADDDDIDNWELPHVDIPYT

SEQ ID NO: 222162 - protein, 156 aa, Glycine max
  Clone ID: PAT_MRT3847_42641C.1.pep
SFLSYLVRGYTAPEYAIRGELSEKADIYSFGVLVLEIISCRKNTDLTLASEKQYLPEYAWKLYEKSMLMEIVDPKLQEQGIEEKDVMQAFHVALLCLQPHADLRPAMSEIVAMLTFKVEMVTAPMRPIFVDRRRVMDDEHHSWETIYEAFTTAGRL

SEQ ID NO: 222163 - protein, 107 aa, Glycine max
  Clone ID: PAT_MRT3847_42642C.1.pep
SELVRPTRVGVTPLSRLVQALIFSKPFYSVLKLAARMALISAADKNNIPSGLLANEILESVVDRELDIIQNQYLPYPDYYQNPFHAYDEGDLTWLAAAYAEAATLSI

SEQ ID NO: 222164 - protein, 69 aa, Glycine max
  Clone ID: PAT_MRT3847_42643C.1.pep
DKDDHYAKRFDNCENQKSVGTKAETKKSKTNPGSEVGGREPREEPESNRGKVCVTGQTCRWQARWRSYK

SEQ ID NO: 222165 - protein, 68 aa, Glycine max
  Clone ID: PAT_MRT3847_42644C.1.pep
TSDFLKVSDITRSPHTDTPYANTFRTTDWRMEALPDSSQLHAAALAITPKMTVSLCSISNGSSFRLLS

SEQ ID NO: 222166 - protein, 182 aa, Glycine max
  unsure (1)..(182): unsure at all Xaa locations
  Clone ID: PAT_MRT3847_42645C.1.pep
MDKMRAIEITEFLIYMSIIAXTVRIALLTKDEAYVSPKLKEVIAPCTSHXAETCSTTSGSESEASTAEPGRGGSLPIQFDGEMLAIPCCAKFXSTNDTNLLDEPSEVFPRNNTPQGGRKTXLHDRGVQPLSYQLPPFRLSPMSQLXPSRPMIRTIPSPPIAPRDLSPLETIQLXTVLRTCTH

SEQ ID NO: 222167 - protein, 147 aa, Glycine max
  Clone ID: PAT_MRT3847_42646C.1.pep
PFDRNQTTEGGGGGTSKDATQPTKAATDPDKKTDKADKQTRPRPTRRRAERKSATEQHRAGSTRDKRSQGPRKSQKSTMRKPTKGQEKQPPPREADQTQGTPQPHTQRNQQNGKKPRTPNQRHTNKKPRGGDHNQQKKHKQQEPKPR

SEQ ID NO: 222168 - protein, 125 aa, Glycine max
  Clone ID: PAT_MRT3847_42647C.1.pep
LFLSKNFFFLASSLRSKNFFRLPRLSLVLFKPLVVPKRPPKIRVRPPPKPLSRPKVLALKKRVFARPRAKIGAPRPRARPLRAPPKRFPLNLRKKLPLRPLKSPKGLLRNLKGGNFPRKRARVKN

SEQ ID NO: 222169 - protein, 39 aa, Glycine max
  Clone ID: PAT_MRT3847_42648C.1.pep
VVMQPLSHVGTTRLNLVPLVLWLTFNFKNTFFFGFQNSF

SEQ ID NO: 222170 - protein, 64 aa, Glycine max
  Clone ID: PAT_MRT3847_42649C.1.pep
TPGNSPGVGHKKFEEDKVMKVMGALVHSPDVKTSVAEGSFENDFKPTDPGHSPGVGHPRQNKRN

SEQ ID NO: 222171 - protein, 74 aa, Glycine max
  Clone ID: PAT_MRT3847_4264C.1.pep
TFYPPGVPFNPSGVKPPQPPWFSYPLPFKKKGPPPPPPPLPPTPPPPPPPPPPPPPQRRRTSYSDDGKPSLERN

SEQ ID NO: 222172 - protein, 70 aa, Glycine max
  Clone ID: PAT_MRT3847_42650C.1.pep
LDSYILSSTKSRSFKHESFLCPSLIYSLPTPIPSSFLWHNHTLYFSPFNPSHSYLFSSPHFLLQPGFLFS

SEQ ID NO: 222173 - protein, 71 aa, Glycine max
  Clone ID: PAT_MRT3847_42651C.1.pep
CISVLEQCLCLLVSGVPHPWRSNLRSMIVWIIRDSIIACWLSSVNRVIHPTECLSHLFIIMAFVFDIPPSV

SEQ ID NO: 222174 - protein, 94 aa, Glycine max
  unsure (1)..(94): unsure at all Xaa locations
  Clone ID: PAT_MRT3847_42652C.1.pep
LPLVFHLTYHLHSSQLRRIFINTNDFLFEFQIPINAAGLIEYRCHPFWSQKYCPSHEYDNTARCCSCERLEPLNIKYYRLXDGRSLCLECMESA

SEQ ID NO: 222175 - protein, 52 aa, Glycine max
  Clone ID: PAT_MRT3847_42653C.1.pep
EIILYFRIKYVFILSLYIYIPKFVFWSLIFCKCVKSLYHIKHHLFLVPCLWK

SEQ ID NO: 222176 - protein, 114 aa, Glycine max
  Clone ID: PAT_MRT3847_42654C.1.pep
MEFDRILRGKNGLICESVLTEFKELGSMCGGPNEKLRADWLINCLRVVPDTSSERMMGLPSTRKLALKNKGVFGTGDHWHAPTLTANMAFVRAVSQTGMSLSTIEHRPRALTGD

SEQ ID NO: 222177 - protein, 50 aa, Glycine max
  Clone ID: PAT_MRT3847_42655C.1.pep
NLIKFCILLRARCLQGFPDLQVGTLRSNLWINLNFDVVDIISDPMPNYNI

SEQ ID NO: 222178 - protein, 199 aa, Glycine max
  Clone ID: PAT_MRT3847_42656C.1.pep
MTQSVVVDFNNLPEGCIANILSFTSPRDVCRLSLLSSTFRSAAQSDAVWNKFLPSDFHTILSQSSSLSLPSKKDLFLYLCQKPLLIDDGKKSFQLDKVYGKKCYMLSARNLFIVWGDTPRYWRWTSLPDARFSEVAELRSVCWLEIRGWINTGMLSPETLYGAYLVFKPNPSGFYGFDYQLVEVSIRAAGGDPGKRPVF

SEQ ID NO: 222179 - protein, 71 aa, Glycine max
  unsure (1)..(71): unsure at all Xaa locations
  Clone ID: PAT_MRT3847_42657C.1.pep
PFRVLGPKGHLIFFKGLXLRGFGLLGFQKEVIYTLDDDLFGATDPSXHKINALXQGIENLLCAYTPFFFNT

SEQ ID NO: 222180 - protein, 114 aa, Glycine max
  Clone ID: PAT_MRT3847_42658C.1.pep
MMIQSFQLDKVYGKKCYMLSARNLFIVWGDTPRYWRWTSLPDARFSEVAELRSVCWLEIRGWINTGMLSPETLYGAYLVFKPNPSGFYGFDYQLVEVSIGIAGGENRKRNVFLD

SEQ ID NO: 222181 - protein, 53 aa, Glycine max
  Clone ID: PAT_MRT3847_42659C.1.pep
ETCLHSLFKPCIQAWWIMQMMLAILLDHLNFLLFSHDTCKFDADECYILYRHI

SEQ ID NO: 222182 - protein, 95 aa, Glycine max
  unsure (1)..(95): unsure at all Xaa locations
  Clone ID: PAT_MRT3847_4265C.1.pep
RHTYSSEFGSSCACLEKWIRHQCSCXFISKEEKSWKGSREFCASQNSSLLQLQTRNELSFMSSSQAFFWIGIHYNEERSXWLWEDGTFPSKDLFP

SEQ ID NO: 222183 - protein, 54 aa, Glycine max
  Clone ID: PAT_MRT3847_42660C.1.pep
RYLRFSFLSCKCHISLSFSAKHISLFRFQFPLLLTHLFRLPCVSLSLQIKARYG

SEQ ID NO: 222184 - protein, 54 aa, Glycine max
  Clone ID: PAT_MRT3847_42661C.1.pep
VKLVKTPNHLHSMALWQQLVALDRVAVQIMFNYIDQFRFKIVKKHNISKQFSIF

SEQ ID NO: 222185 - protein, 117 aa, Glycine max
  Clone ID: PAT_MRT3847_42662C.1.pep
THWWFVFCSCKGGCWARPRHKNSFFGSRNFVLGDRRSSPMGAFETPLGWFLHPLSWAFFITFLRLPFTIPLPPIKIRFCFFFIGAPPFFSWGAKPVLFGRDGFFFPPEPLFRPPASF

SEQ ID NO: 222186 - protein, 56 aa, Glycine max
  unsure (1)..(56): unsure at all Xaa locations
  Clone ID: PAT_MRT3847_42663C.1.pep
ISGRLSFFIDNPDQXRVFDILLGISQNFKNVGNAFRPAFYVPQAWARFSENANSSA

SEQ ID NO: 222187 - protein, 52 aa, Glycine max
  Clone ID: PAT_MRT3847_42664C.1.pep
GPTTSWADARSMTTTCHPTLHRTYGCVISIPCSFSCLHLQMILQRLRRATVT

SEQ ID NO: 222188 - protein, 79 aa, Glycine max
  Clone ID: PAT_MRT3847_42665C.1.pep
SCYALNMLIQYIYLSRSSSRRFTFSQAIPYQQSLFLDLVLESPDIQAVQVSYNSVPSFFTKLYNKRWVAPTSVILSRRN

SEQ ID NO: 222189 - protein, 49 aa, Glycine max
  unsure (1)..(49): unsure at all Xaa locations
  Clone ID: PAT_MRT3847_42666C.1.pep
LVFFNKKGLRVCPPSWDAFSIRKANFGYWFSNLVHKXHTRVRTCVRTRV

SEQ ID NO: 222190 - protein, 182 aa, Glycine max
  Clone ID: PAT_MRT3847_42667C.1.pep
MALHVHSFFYFWFVVMIFVVVFFTAPSVSQPQATGSCNGILLSYAYTGGLQLPPNVSDPAEQPYRFSSTLTVLNNGLEELRSWRVFVGFQHGEWLVSASNAVLADGTSLPGSVENGTVLSGETVRDLKTAVATAGDLNQMQVRVDMVGTLLAVAPPSVPMPSYVTLANEGFLEWSTLWPREQ

SEQ ID NO: 222191 - protein, 356 aa, Glycine max
  Clone ID: PAT_MRT3847_42668C.1.pep
MSSFLHQRSSLQNPFSNPFPASTPSSSNSKKSLSIMGPTTLLALISLIVILGVFCPWVGFPQGFPFTPTPTSKWAHYTLEQALSFVAKNGSSVIVCIVSQPYLPFLNNWLISISMQKRQDMVLVIAEDYASLDRVNLLWPGHAVLIPPVLDAEAAHKFGSQGFFNFTARRPSHLLKILELGYSVMYNDVDMVWLADPFPYLQGNHDVYFTDDMTAIKPLNHSHDLPPPGKKGRPYICSCMIFLRPTNGAKLILRKWIEELQIQPWSKTVKSNDQPAFNWALMKNAKEVDLYLLPQAAFPTGGLYFKNKAWVKETKGMHVIIHNNYIVGFEKKIKRFRDYGLWLVDDHAHESPLGGL

SEQ ID NO: 222192 - protein, 93 aa, Glycine max
  Clone ID: PAT_MRT3847_42669C.1.pep
MVTGWRRAFCTSIPKDREPKVLTEKQQQQPQQQHCENTTTTTNNNNNNHSSKFGFFSNPSRPRCESQPSSTPSLRCQTTCSVPNSPKLQCKTK

SEQ ID NO: 222193 - protein, 70 aa, Glycine max
  unsure (1)..(70): unsure at all Xaa locations
  Clone ID: PAT_MRT3847_4266C.1.pep
LRSKSVNEGQAEALCDQISGAVFESWVEHEPDSIVHCEPFIKTYLIMXYEKSQSEPISECIKIVRDTCMN

SEQ ID NO: 222194 - protein, 49 aa, Glycine max
  Clone ID: PAT_MRT3847_42670C.1.pep
MNDTCDYLLSSLFLGRSFLIIHPSFQNILRELHTSKFCRCTHQGRSFGD

SEQ ID NO: 222195 - protein, 71 aa, Glycine max
  Clone ID: PAT_MRT3847_42671C.1.pep
FDRDPGLFERKFSLLKKGGPQIYFSKRGKQLIAPSLFRGTFFFWFQKAKKQARGPQKKKENQGVFFSFSRV

SEQ ID NO: 222196 - protein, 94 aa, Glycine max
  Clone ID: PAT_MRT3847_42672C.1.pep
MRVTIDLGFWSLVLVAVVGLSVPAVAFFVRHGCRRTAARAEEIKRLLVLANEESVRAETETEALYYHQYRVVSGELPRDKVCAVCYSPTTTRCA

SEQ ID NO: 222197 - protein, 65 aa, Glycine max
  Clone ID: PAT_MRT3847_42673C.1.pep
PETKILKSSLRSHIWCSTTLRWGLIKYPRVNALLVMRFIVSQNKSTFFESTTHEHHQEQVDIRNI

SEQ ID NO: 222198 - protein, 72 aa, Glycine max
  Clone ID: PAT_MRT3847_42674C.1.pep
ATFTIPIEEQAGSGLTQNAKEMGKVLRSSDFLNEQLQKLEEGLQEKKGPSSTKAGVMLSISTLFHEGGFCSW

SEQ ID NO: 222199 - protein, 58 aa, Glycine max
  Clone ID: PAT_MRT3847_42675C.1.pep
ILLAVGFNRATIGSWFDGPGREVILGTIWGKMLIMVHWITDGVGLGGTLMFKTIGGPN

SEQ ID NO: 222200 - protein, 82 aa, Glycine max
  unsure (1)..(82): unsure at all Xaa locations
  Clone ID: PAT_MRT3847_42676C.1.pep
FQASEKILSNPMRDINEHKLLLNISVGDSGYRLTIAAKVXTNLTDHTPETATTRYTDHSFEIRRNEXIACYSTGRGDKAMHL

SEQ ID NO: 222201 - protein, 38 aa, Glycine max
  Clone ID: PAT_MRT3847_42677C.1.pep
LVPFLSTLATIYLCPWLSNGASPYPMEMVLYAPCLDEL

SEQ ID NO: 222202 - protein, 199 aa, Glycine max
  Clone ID: PAT_MRT3847_42678C.1.pep
MKITALLVLKCTGEGSDPVILANASDVSHFGYFQRSSVKEFIVFVGRTVASRTPQGQRQSVQHEEYKVHTYNRNGLCALGFMDDHYPIRSAFSLLNQVIDEYQKNFGESWRNAQEDSTQPWPYLNEALAKFQDPAEADKLMKIQRELDETKIILHKTIDSVLARGEKLDSLVEKSSDLSAASQMFYKQAKKTNQCCTIL

SEQ ID NO: 222203 - protein, 78 aa, Glycine max
  Clone ID: PAT_MRT3847_42679C.1.pep
KNPLPFFYFFFSPFKLRFFFPNSLSFFPPCWANYLGFLRWKVLISMGNPCKKKGFKFKEIYKRPPSIGCPKKKNKKIN

SEQ ID NO: 222204 - protein, 65 aa, Glycine max
  Clone ID: PAT_MRT3847_4267C.1.pep
MSELDYQIPTGLNACADANSDYSGAGSKEFEHIRVQHGNGRKSLTTAHGLKKEFIYNKILKDVKK

SEQ ID NO: 222205 - protein, 50 aa, Glycine max
  Clone ID: PAT_MRT3847_42680C.1.pep
VMDFPVNKRQAKALGGLFIIIIIIYWGLALLPKRQKWGVTYKKGFKPQLF

SEQ ID NO: 222206 - protein, 63 aa, Glycine max
  Clone ID: PAT_MRT3847_42681C.1.pep
ESHVKHALVVKVMGCTGSRRQVTQVTVKLLDDQSLHIMTNVKGPVREGDIVTLLESEREAIRL

SEQ ID NO: 222207 - protein, 63 aa, Glycine max
  Clone ID: PAT_MRT3847_42682C.1.pep
THNKNYLRHQLLSTLIYSKGENRQQGAGGPGRGGGGAKAGLGGQVRERTHWKHKGAWLTKRLF

SEQ ID NO: 222208 - protein, 77 aa, Glycine max
  Clone ID: PAT_MRT3847_42683C.1.pep
RTLADYNIQKESTLHLVLRLRGGMQIFVKTLTGKTITLEVESSDTIDNVKAKISLCSDLVGYLLSPESLASHCLWCI

SEQ ID NO: 222209 - protein, 259 aa, Glycine max
  Clone ID: PAT_MRT3847_42684C.1.pep
GKMGTHASEHLVAKGCKKMVVVNRTEERVAAIREELKDIEIIYKPLSEMLTCAGEADLVFTSTASENPLFLKEHVKDLPPASQEVGGRRFFIDISVPRNVGSCVSDLESVRVYNVDDLKEVVAANKEDRLRKAMEAQAIIAEESKQFEAWRDSLETVPTIKKLRAYAERIRLAELEKCLGKMGDDIPKKTRRAVDDLSRGIVNKLLHGPMQHLRCDGNDSRTLSETLENMNALNRMFNLETEISVLEEKIRAKVEQNQK

SEQ ID NO: 222210 - protein, 49 aa, Glycine max
  Clone ID: PAT_MRT3847_42685C.1.pep
LQNINSVKKLYIHLISHFSCTIIFTYERHEYSIILRYCLILLANYVCVI

SEQ ID NO: 222211 - protein, 72 aa, Glycine max
  unsure (1)..(72): unsure at all Xaa locations
  Clone ID: PAT_MRT3847_42686C.1.pep
IHVRLEHVKRSVCTKKIRLRKIKNDKLKAEAKDKGEXISIRRQRQGSKPGFMCRGGNVXPVTPITYEVVYDL

SEQ ID NO: 222212 - protein, 84 aa, Glycine max
  Clone ID: PAT_MRT3847_42687C.1.pep
RKPCYFFQLWISRYLSYCVLLCFSHIFFKSNNVIVSRCPSPSTVSQSLTVFSHSHKSNIPHFPPNYPKLNYTTSPYYPYSNFPS

SEQ ID NO: 222213 - protein, 56 aa, Glycine max
  unsure (1)..(56): unsure at all Xaa locations
  Clone ID: PAT_MRT3847_42688C.1.pep
PSSGNXVNREHRLLFLKTGNKSTRYLISRIFQVLPTIGRTISQGKENHSLCWPQTW

SEQ ID NO: 222214 - protein, 83 aa, Glycine max
  unsure (1)..(83): unsure at all Xaa locations
  Clone ID: PAT_MRT3847_42689C.1.pep
PPPKANNLVFNVDGAIGPLFLDFLAGSGMFPHQEVDEIVEIGFLNGLFVLAPPLGLIGHPFAPKRFKQPXLFPPPWGDVFFPK

SEQ ID NO: 222215 - protein, 505 aa, Glycine max
  unsure (1)..(505): unsure at all Xaa locations
  Clone ID: PAT_MRT3847_4268C.1.pep
MGRVVVGVAVTVAVATCALAAVVVGRRVRSRRKWKKVANVVRELEEGCDTRVGRLRQVVDAMAVEMHAGLASEGGSKLKMLITFVHNLPNGTEKGTYYALDLGGTNFRVLRVHLHGQQSSVLEHEVERQPIPQHLMTSTSEDLFDFIASSLKEFIEKEGNASELSLDRRRELGFTFSFPVKQMSVSSGILLKWTKGFSIVDMVGIDVAACLQEALTRKGLDVRVAALANDTVGTLALGHYNDSDTVXAIIIGTGTNACYLERVDAIIKCQGLLMIRXEYMVVNMEWGNFWSSHLPRTSYDIDLDSESPNPNDQGFEKMISGMYLGDIVRRVILRMSLESDMFGPISSKLSMPFMLRTPMMAAMHEDDSPDLREVARILKDILEIPDIPLKVRKVVVKVCDVVTRRAARLAAAGIVGILKKIGRDGSGGITGGRRSEMKMKRKVVAIEGGLYSSYTLFREYLHEALNDILGEDIAKHVTLKVTEDGSSVGAALLAASHSSYDVDTV

SEQ ID NO: 222216 - protein, 58 aa, Glycine max
  Clone ID: PAT_MRT3847_42690C.1.pep
YEGLEIMVWSTRALWPGFLLYIAGFFHENIPSIEELSIHESRHLNLMFAVVVILGVVH

SEQ ID NO: 222217 - protein, 73 aa, Glycine max
  Clone ID: PAT_MRT3847_42691C.1.pep
TKAGGGGFQESLNIFLLLCVQFLKGKKITLCAGHRLRESFSLPLLVYLLNTLLFDIGLRVKFKLLLSLSQFSV

SEQ ID NO: 222218 - protein, 128 aa, Glycine max
  Clone ID: PAT_MRT3847_42692C.1.pep
FWGGTQIFVKTLPGGPLPLGGESFDPIPHVKAKIPAKEGSPPDPQGFIFFGNQLENGCPLADSKIQREPPWHLALPLRGGCQGEPLLRRVPQSPTRLSRVPPELGLCTSGLRAPVYYVLKRCIELVSA

SEQ ID NO: 222219 - protein, 54 aa, Glycine max
  Clone ID: PAT_MRT3847_42693C.1.pep
SMHPWIIVVPAPAIQLTILLIESSTLAFPNVLFIQCRVLRRQVMMYAFVYKHLS

SEQ ID NO: 222220 - protein, 52 aa, Glycine max
  Clone ID: PAT_MRT3847_42694C.1.pep
FMLLSLFRSDISVSHQYRSCRVRRFSAWVFLVKWFGQKEGTCSVMENTVQQI

SEQ ID NO: 222221 - protein, 58 aa, Glycine max
  Clone ID: PAT_MRT3847_42695C.1.pep
PGHLSGNNSQYGSGLGGLGHQNPAGHQQQSGYGGYGGFGGGYGGGSYNRGWGGNYGQH

SEQ ID NO: 222222 - protein, 66 aa, Glycine max
  unsure (1)..(66): unsure at all Xaa locations
  Clone ID: PAT_MRT3847_42696C.1.pep
PSPTIXRGLSPIHLXIYQPRSFCFLSHSNPFALDNMXPLVXSHXIIXXXXIXXXXCGXXKXXXRAC

SEQ ID NO: 222223 - protein, 65 aa, Glycine max
  Clone ID: PAT_MRT3847_42697C.1.pep
LSFTVFELLCCFVLLFLNSKPNPMSSAGFKNPFLGCILIGMAQYIYTQTSHFSQMLLHPYANCCK

SEQ ID NO: 222224 - protein, 84 aa, Glycine max
  Clone ID: PAT_MRT3847_42698C.1.pep
KINMHRITELEFTRVRSRTDACCVRANHPRAEPTRPVIANKYDTQIITIFLLSMLWLCALDLSKEENCYYLCVIFVNYDRTRGS

SEQ ID NO: 222225 - protein, 66 aa, Glycine max
  Clone ID: PAT_MRT3847_42699C.1.pep
TFTRKATITIHEGGDGPLHRKKKRFLFPLKPRLPVGLALDSLHIHSSKALSLLETFHYKVIWGLEW

SEQ ID NO: 222226 - protein, 33 aa, Glycine max
  Clone ID: PAT_MRT3847_4269C.1.pep
FPEGNGSHYTDFPCQHCSIDHRHVQPRRPIIER

SEQ ID NO: 222227 - protein, 165 aa, Glycine max
  Clone ID: PAT_MRT3847_426C.1.pep
ARIDRSSDDESTDDENEAVVSQGYGDMDVDDVLRTNEDLVVKSGSKLLPGHLEYSRLVNANIQDPANGPINSVQFHPNAQLFLAAGLDRKLRFFQIDGKRNTKIQSVFLEDCPIRKASFLPDGSQVIVSGRRKFFYSFDLVKARVDKIGPLVGREEKSLEAFEVS

SEQ ID NO: 222228 - protein, 262 aa, Glycine max
  unsure (1)..(262): unsure at all Xaa locations
  Clone ID: PAT_MRT3847_42700C.1.pep
TVRAAVAYLSMFLQSAETQREHRLKIQLQAAKCMSLAANIEEIQVPLLSDLQVKDTKXLFESXLSQRMEILVLKTXYSRCFSGAVSSFFXSVLRNSRFGGCLPSVFATACEHLLLSVLLDKGCVGCLPSVLAAAKMLHVIDQIQHSGGIEYKTQLLSVLKISKEKVDECYNAILQLSKANKYGHNNINNTSKRKYEQIPSSPSGXVIDAAFCSDGSNDSWAVGSSLLYSPPEPLFKKSRTQGQQMNLSPLKRFIIGIVGTSP

SEQ ID NO: 222229 - protein, 70 aa, Glycine max
  Clone ID: PAT_MRT3847_42701C.1.pep
SKRKYEQIPSSPSGVIDAAFCSDGSNDSWAVGSSLYSPPEPLFKKSRTQGQQMKLSPLNRVIVGIVGTSP

SEQ ID NO: 222230 - protein, 101 aa, Glycine max
  Clone ID: PAT_MRT3847_42702C.1.pep
MNTDITASTKPEYPVIDRNPPFTKVVGNFNTLDYLRFVTITGVSVTVGYLSGIKPGIRGPSMVTGGLIGVMGGFMYAYQNSAGRLMGFFPNDDEVARYNKK

SEQ ID NO: 222231 - protein, 101 aa, Glycine max; identical to SEQ ID NO: 222230
  Clone ID: PAT_MRT3847_42703C.1.pep

SEQ ID NO: 222232 - protein, 55 aa, Glycine max
  Clone ID: PAT_MRT3847_42704C.1.pep
LEPSRLEVAYHSHRKWDHARGLINSFLCEIAKKQRHLLSSPTLALPFSTMLALFL

SEQ ID NO: 222233 - protein, 117 aa, Glycine max
  Clone ID: PAT_MRT3847_42705C.1.pep
DERHADIYSTFFPSHYHCLFGENKFTADTLQTLTNNLCYTYARCTRSVSIVPPAYYAHLAAFRARFYLEPDTSYSGSMAGTGRGGPLGGRNTRAPNNTAVRPVPALKENVKRVMFYF

SEQ ID NO: 222234 - protein, 56 aa, Glycine max
  Clone ID: PAT_MRT3847_42706C.1.pep
KKPLHYTILLALISLFFPINLRLYRFGEWQFERTRQSPSLPHDFNSYKFSKGNSKP

SEQ ID NO: 222235 - protein, 121 aa, Glycine max
  Clone ID: PAT_MRT3847_42707C.1.pep
MTFFSIVGSPTTFLATVIFLFWTYVPESWLQSNVISYYPSRYWALAVPTYVMVTIVLMLGFYIGLNFISTPSPASLNTVFDEFSRDPLSLECTLEDEKPIEPISDIGIDRINDIMFKNNAA

SEQ ID NO: 222236 - protein, 53 aa, Glycine max
  Clone ID: PAT_MRT3847_42708C.1.pep
ELYYKVNRAQGEELRRKIFLLYRQGLFGCLGFSFKGYGAMSGFARALNPVSSR

SEQ ID NO: 222237 - protein, 284 aa, Glycine max
  unsure (1)..(284): unsure at all Xaa locations
  Clone ID: PAT_MRT3847_42709C.1.pep
HSFSFCPSSLYRLHHHHLLLLLLLPLMXVKSSTIIHQFKEAPEFYNSPECASLTDNEEDSSHRYICSEEAVHVAMTLDTTYIRGSMAAILSVIQHSSCPQNTFFHFVCSSSASLLRAAISHSFPYLNFQLYTFDDSQVSGLISSSIRSALDCPLNYARSYLANLLPICVRRVVYLDSDLILVDDIAKLAATPLGENKVLAAPEYCNANFTSYFTPTFWSNPSLSLTFADRRPCYFNTGVMVIDLERWREGDYTTKIEEWMELQKRMRIYXLGSLPPFLLVFAGN

SEQ ID NO: 222238 - protein, 66 aa, Glycine max
  Clone ID: PAT_MRT3847_4270C.1.pep
LHQVITSLTRARRSHQLTECYRRSRARTHRCLKGRPNGPVRTKDRERNDVCSTHSNQPAATPHCPL

SEQ ID NO: 222239 - protein, 77 aa, Glycine max
  Clone ID: PAT_MRT3847_42710C.1.pep
LPSIFPSVQLFGTSRCPLYHMCLHNPDTVYDLRTLAELTIRCLMDNFYDDSQPYATNPAASLLLRHVSILGLRLLMN

SEQ ID NO: 222240 - protein, 61 aa, Glycine max
  Clone ID: PAT_MRT3847_42711C.1.pep
HVTYILEKWKSTFVSKFTAIQFLYMNYDPKEVDRLKKMSKYHCSIFIKKTKRCQCFIFYCT

SEQ ID NO: 222241 - protein, 104 aa, Glycine max
  unsure (1)..(104): unsure at all Xaa locations
  Clone ID: PAT_MRT3847_42712C.1.pep
ITVDYFSIGKETSGRLLMGAGRFPLSSFLVQNKDASISSLPFDELIDNSYGFAXLFPEHKYXIVKRLXEMKHIFXITGDFVNYTPSLKKSYIGIFCFRCLHILF

SEQ ID NO: 222242 - protein, 40 aa, Glycine max
  Clone ID: PAT_MRT3847_42713C.1.pep
MEVSDMELNETSVEIIWIFMDATPPMFAAQSCGDFVIPDK

SEQ ID NO: 222243 - protein, 60 aa, Glycine max
  unsure (1)..(60): unsure at all Xaa locations
  Clone ID: PAT_MRT3847_42714C.1.pep
TXHXTLXATQXXXRXFAILXXXXXXMPXXXLXXFLAPRAPNGIQKXXKSTGXRXDADNAS

SEQ ID NO: 222244 - protein, 44 aa, Glycine max
  Clone ID: PAT_MRT3847_42715C.1.pep
LGQATHTVLAKKPSPCLTVYLLQSEDKKICLNSSGRGEILTNTF

SEQ ID NO: 222245 - protein, 62 aa, Glycine max
  unsure (1)..(62): unsure at all Xaa locations
  Clone ID: PAT_MRT3847_42716C.1.pep
HDPPPLPYPPPXDPPATAPRPPPLPPPPPAHAPPTPPRPXPHPPPPAHASAHASAKTSKNAW

SEQ ID NO: 222246 - protein, 96 aa, Glycine max
  Clone ID: PAT_MRT3847_42717C.1.pep
ITKEMGVAGPVYKIEFMIERRDSKAAQLRTSEAVEIDAWSDDVKRHCRDMQKPNLLLCSHTIEINGLVMLGQSSPSFVADPTSMELDTLVRNRELW

SEQ ID NO: 222247 - protein, 55 aa, Glycine max
  Clone ID: PAT_MRT3847_42718C.1.pep
GLCYFFYPTSTRHPISYSLSNQTSFTGKRRPLTVSCSLQHDGLELIMSRLHLFHS

SEQ ID NO: 222248 - protein, 40 aa, Glycine max
  Clone ID: PAT_MRT3847_42719C.1.pep
KKGGYYYIGYNHLPINHPSPPFMNNLGRYCVLDPPQTLPE

SEQ ID NO: 222249 - protein, 108 aa, Glycine max
  Clone ID: PAT_MRT3847_4271C.1.pep
KFDSVRNRLWNILRNRDLTLTTPMTEVFQSFSQVNPLDKQCPFLCACPSVWCTNLCPFVFASPHKEFWILVFSEYLFFNRPSYSYPISSTLYSSYNYCRLTCLSFWRL

SEQ ID NO: 222250 - protein, 66 aa, Glycine max
  Clone ID: PAT_MRT3847_42720C.1.pep
NSLSLLFLSSTFSLTKAPPHTLRARGIHFLQGRFFFLAQMVGLCSALYQRAWSHRPTRLSKTVHCT

SEQ ID NO: 222251 - protein, 72 aa, Glycine max
  Clone ID: PAT_MRT3847_42721C.1.pep
IHGVFVGVRMSPSFWRSADSCVVLQLVRLIQLWHKLHFCIAPGFFLPCPASEFVDKCPWVVALAPGWVGIMY

SEQ ID NO: 222252 - protein, 39 aa, Glycine max
  Clone ID: PAT_MRT3847_42722C.1.pep
NLKKTKPPQFIFSHLIKNFHPLLQMLNLLIPSLFIKTTS

SEQ ID NO: 222253 - protein, 48 aa, Glycine max
  unsure (1)..(48): unsure at all Xaa locations
  Clone ID: PAT_MRT3847_42723C.1.pep
QRMIKLKNSSNPHVKHPNRKYPQNITCVNASSKTQVNVAYVFSILQKX

SEQ ID NO: 222254 - protein, 65 aa, Glycine max
  Clone ID: PAT_MRT3847_42724C.1.pep
RCEECDRWILSTDPILRVISEGTIPEGGNQSRIQYVVVAGHRLFHRIKILRTDRFLIIEGSEPRV

SEQ ID NO: 222255 - protein, 104 aa, Glycine max
  Clone ID: PAT_MRT3847_42725C.1.pep
QGFFPWPPRPPLSAGGVRALGLLSRNPFFLGPFFSRGFFFPKWVYAWGPFFFLGGKRTPWLGAPQWFPTPPLGGRGNLCAHIWGVSPPGGPPPFLIFGAFGPLL

SEQ ID NO: 222256 - protein, 75 aa, Glycine max
  Clone ID: PAT_MRT3847_42726C.1.pep
GFVFSERDRSHGFYDARLWPMWTLQMLGRTNASQVLKKLREANHAYPNGFIRIIVFPYVRQVQCIIFIAYKPPGL

SEQ ID NO: 222257 - protein, 57 aa, Glycine max
  Clone ID: PAT_MRT3847_42727C.1.pep
LGSLKIMIFNMCLWRVPAIVYCSCKGSGPVRPQCIFPLLESVSLESYVIKNRLVLSC

SEQ ID NO: 222258 - protein, 53 aa, Glycine max
  unsure (1)..(53): unsure at all Xaa locations
  Clone ID: PAT_MRT3847_42728C.1.pep
IVMNFYKESCPQAEDIIKEQVKLLYKRHKNTAFSXLKHIFHKCTSQTQGSPLL

SEQ ID NO: 222259 - protein, 457 aa, Glycine max
  Clone ID: PAT_MRT3847_42729C.1.pep
MREILHVQGGQCGNQIGSKFWEVICDEHGIDPTGKYTGDEASDLQLERINVYYNEASGGRYVPRAVLMDLEPGTMDSIRSGPYGKIFRPDNFVFGQSGAGNNWAKGHYTEGAELIDSVLDVVRKEAENCDCLQGFQVCHSLGGGTGSGMGTLLISKIREEYPDRMMLTFSVFPSPKVSDTVVEPYNATLSVHQLVENADECMVLDNEALYDICFRTLKLTTPSFGDLNHLISATMSGVTCCLRFPGQLNSDLRKLAVNLIPFPRLHFFMVGFAPLTSRGSQQYVSLTVPELTQQMWDAKNMMCAADPRHGRYLTASAMFRGKMSTKEVDEQMINVQNKNSSYFVEWIPNNVKSSVCDIPPKNLKMSCTFIGNSTSIQEMFRRVSEQFTAMYRRKAFLHWYTGEGMDEMEFTEAESNMNDLVAEYQQYQDATADEDEYDDEDEYDDEDEDGEHAFEDP

SEQ ID NO: 222260 - protein, 44 aa, Glycine max
  Clone ID: PAT_MRT3847_4272C.1.pep
YPSISDTCSASSVLVSLALTKNHSYSARMSLLLPMRDATRYSAL

SEQ ID NO: 222261 - protein, 62 aa, Glycine max
  Clone ID: PAT_MRT3847_42730C.1.pep
FWGVMTFCRALVLYPSVEGLPHPSSISNISPTPLTIFLMFSKSHACNGIPQQRIQTNLKSCL

SEQ ID NO: 222262 - protein, 48 aa, Glycine max
  Clone ID: PAT_MRT3847_42731C.1.pep
VNNLFWDLCNIRKISITYTWLNNCHKYLFFATKLKYISIKTKGVPCFQ

SEQ ID NO: 222263 - protein, 115 aa, Glycine max
  Clone ID: PAT_MRT3847_42732C.1.pep
MLGLNFKQVPQTYDEGQHEGRQAVSKEDIQIRKGCLKIKVGQGEEQQKVTVPVNYLKHPLFVQLLKEAEEEYGFSQKGTITIPCQVAEFKNVQHLIHTERSLHHHHHLVATCFKA

SEQ ID NO: 222264 - protein, 228 aa, Glycine max
  Clone ID: PAT_MRT3847_42733C.1.pep
LHKNQICGSCPAPVSTRKSIQMVLQFSSEQKRLLGLGRVPSLRRGLLPRTSLSDQLYHCLKTFLTDPDSGWFLVHGLVGTGKSELVTKVLWERPELCFALVDRILWITDRRFHPAELSQLAADTLLLAVSLNSTTNFSQMDECDAFFGCSQSAGKSRELSYVAHSLHSLLNDNFAKTLLIVDGVQMADSVKFFDQIKGHMCKILATSTSRTLLMGWKYTTFRNRRHSS

SEQ ID NO: 222265 - protein, 86 aa, Glycine max
  Clone ID: PAT_MRT3847_42734C.1.pep
YKIVVAYDSRFPEGWDFTLFFFASGNVGIKIWFSIILNFKCNYLGLYYGLIYLLDLGFDISFLKTLKYIWITIVGNSLFGTLAPCF

SEQ ID NO: 222266 - protein, 58 aa, Glycine max
  Clone ID: PAT_MRT3847_42735C.1.pep
MAPIGKIYSYSNNPRISKGLVAFLYNSLLIYVPTDFTIVSFKNPQYLKKFPTRKVPPF

SEQ ID NO: 222267 - protein, 190 aa, Glycine max
  unsure (1)..(190): unsure at all Xaa locations
  Clone ID: PAT_MRT3847_42736C.1.pep
MALCMQSQQRDSASNKLLMDCGKYVRYTPEQVEALERVYIECPKPSSSRRQQIIRECPLLANIETKQIKVWFQNRRCREKQRKEASRLQTVNRKLSAMNKLLMEENDRLQKQVSQLVYDNGFMKQQIHTASATTTTDNSCESVVVSGQRQHQNPKIQHPQWDANNPAGLLAIAQETLAAXLSKATGTAVN

SEQ ID NO: 222268 - protein, 130 aa, Glycine max
  unsure (1)..(130): unsure at all Xaa locations
  Clone ID: PAT_MRT3847_42737C.1.pep
MRVKEMHPLCCISLESPGIGSDSPEPEAAALSRTRSLPAGGSDGIARRGSEATVAGVLYKWTNYGKGWRSXRWFLLRNGVLSYAKIRWPENLNLLSPVDDVRLIGEKSPATVSPEKPHPPCAHLVVQKRA

SEQ ID NO: 222269 - protein, 43 aa, Glycine max
  Clone ID: PAT_MRT3847_42738C.1.pep
LRLLPSSTCALALHQRYSRLWCRICLSPSRKSTHPRRTLGFLC

SEQ ID NO: 222270 - protein, 123 aa, Glycine max
  unsure (1)..(123): unsure at all Xaa locations
  Clone ID: PAT_MRT3847_42739C.1.pep
QILVYPKNNQKKKTKKRKKKTKRKNQQRTWKEQKKTKTKGRPPQRTQPKEPDPPRANAFDAGHQTRIHGPRIDSPQTGKPRGTPNXKSPAQTPLXPVGQQNRGPGPGALPNHTPPRKGKGDPP

SEQ ID NO: 222271 - protein, 90 aa, Glycine max
  Clone ID: PAT_MRT3847_4273C.1.pep
AESATLLGRKRIQNPDPTDSPQTLLYKCSEILSHYFTFSNCNVQEPHTWLELANNLALANTATPAGIGTHPNLQACKELQNQVYIEGARI

SEQ ID NO: 222272 - protein, 197 aa, Glycine max
  Clone ID: PAT_MRT3847_42740C.1.pep
YQLITIHARGLAENCKWLEMFEDVELAIFCVSLSNYDQFSVDGNGCRTNKMISSRKLFEAIVIHPTFEQMDFLLILNKLDEFEEKIKRIPLTKCDWLSDFCPVISRHRCGINSNSINNSPSLSQLASYYIGVKFKRLYSSLTGRNLYVSLVKGLEPDSVVEALQYAKEILKWNEERPNFSLSDNNSMYSIEASSFSH

SEQ ID NO: 222273 - protein, 60 aa, Glycine max
  Clone ID: PAT_MRT3847_42741C.1.pep
TSLKLRIWDGDSSATNGGKTKTDWSYAPFTASLQGSDVTGSQATTSSINQNCNSDKYWWN

SEQ ID NO: 222274 - protein, 51 aa, Glycine max
  unsure (1)..(51): unsure at all Xaa locations
  Clone ID: PAT_MRT3847_42742C.1.pep
KVVKIFKYHETKKPSNKQTQAASKPLVILSPLQLIHTMYLHANHINIXDIL

SEQ ID NO: 222275 - protein, 74 aa, Glycine max
  unsure (1)..(74): unsure at all Xaa locations
  Clone ID: PAT_MRT3847_42743C.1.pep
LEGAQNILFNNLQCNNSHLGKIAAPXWRKLDESKVVAVDPRTAGRADRKRSQDSHELTEGQRGLPRHRDWPFSK

SEQ ID NO: 222276 - protein, 55 aa, Glycine max
  Clone ID: PAT_MRT3847_42744C.1.pep
RFPPNPVLLGLCKDCSLFLLLIQIRNFDLEPSSSTTRILKSLCRTSNMILECHTT

SEQ ID NO: 222277 - protein, 104 aa, Glycine max
  Clone ID: PAT_MRT3847_42745C.1.pep
VRPQIPEMALLSRITTSSLLLSLSSKPICNAFLLSRSTATTCTKHQNKKKKENAKAALAKEKRRTRSDKQFNHDAIIERCNINDTDTDTKFSHVPVMLGEVLDV

SEQ ID NO: 222278 - protein, 144 aa, Glycine max
  Clone ID: PAT_MRT3847_42746C.1.pep
PVLVTAVPWTFSPETHLHEPMTLKIIRDAFCAILVVPHFELLAMGFSNSKGPRHLFGDIRVDFYGDVDLELVLDKSDHMCLFFLKRHDIIADFHLKHRYLGRWVSRYDGVLKESYAEVKKYGYRWVYKGDIEQRKRKFGEIEEK

SEQ ID NO: 222279 - protein, 43 aa, Glycine max
  Clone ID: PAT_MRT3847_42747C.1.pep
PTRPGRITPSFIATPHHGLNRRFGYILNSTLSQPPDSDPNSEP

SEQ ID NO: 222280 - protein, 127 aa, Glycine max
  unsure (1)..(127): unsure at all Xaa locations
  Clone ID: PAT_MRT3847_42748C.1.pep
CLPLELHDYSFPAIPKILQRNLFVYNHNWGGAEITDGHTFACVIXACANNYDLGMLRLLHGVPXAGGLGRDPVSCNELVVAYSKLGVVHESRRIFEGIAEPDLAIENFVVYGYYGFGMGDEGIVIVT

SEQ ID NO: 222281 - protein, 62 aa, Glycine max
  unsure (1)..(62): unsure at all Xaa locations
  Clone ID: PAT_MRT3847_42749C.1.pep
ARXXXKLIYISILGFXPYTDQVTRPFPNSMDLLFPKVISTLTYKLLPQLTHFFTSVQQYLTL

SEQ ID NO: 222282 - protein, 99 aa, Glycine max
  Clone ID: PAT_MRT3847_4274C.1.pep
IKLKEIFNPPLKGIATVQVHFHATKKIFFFKKKRGGEEKGAPRVRFPPTCEKLGGIGPKRVNDPRDVSACRFGIPYPPTESNLKGFLCLTGAGGELHTF

SEQ ID NO: 222283 - protein, 38 aa, Glycine max
  Clone ID: PAT_MRT3847_42750C.1.pep
TFCFNPPPFHVFLKKKKKKKGYGRHHRQRVQGRKGVLK

SEQ ID NO: 222284 - protein, 68 aa, Glycine max
  Clone ID: PAT_MRT3847_42751C.1.pep
ILITSSMAYIPRRIIQYLIMSLVCITAFHSTRYCMILSRQSQMIGTIGTCVFSLVLQCSILSLTLHRF

SEQ ID NO: 222285 - protein, 89 aa, Glycine max
  Clone ID: PAT_MRT3847_42752C.1.pep
RPALTFKFFWLKPYNRTLDKVYPDYFPTYYISDPRSLLQKTNTNFMVCIHLFSTPMGALNLTLMETSKYHPVIVDNMGGRHRILWDIHS

SEQ ID NO: 222286 - protein, 59 aa, Glycine max
  Clone ID: PAT_MRT3847_42753C.1.pep
LVLKVRFSLQIRLFPYKLNYPNLTGIKETHFKKIKTIHTLPHLITKGYSTPGKVSFNEN

SEQ ID NO: 222287 - protein, 196 aa, Glycine max
  Clone ID: PAT_MRT3847_42754C.1.pep
MANNGDVVKINIEEMLEMLEGAKAPLITECCIYKVPFSIRRHNEKAYTPEVVSIGPFHHGHPRLQDMEKHKLFYSKAFLKRTQTTLDTLIGNIQEMEPEFRRSYSHTLEFSMEQLVKIIFMDCAFILELFCRYHYREWKEDDMCLPKPWLTSNIVYDLLLLENQVPFFVLESLFNLPSLSGVVTSSCFLSFRLTFL

SEQ ID NO: 222288 - protein, 49 aa, Glycine max
  unsure (1)..(49): unsure at all Xaa locations
  Clone ID: PAT_MRT3847_42755C.1.pep
TMVKCLLGVMIHSILVGLYISIFMLGCVDRIKXSISPFDFSRCSCISYK

SEQ ID NO: 222289 - protein, 125 aa, Glycine max
  Clone ID: PAT_MRT3847_42756C.1.pep
MGKSVVEKLLWMAIVCLVLGVISITPKAQAAVTCNQVVSNLTPCISYVLNGGKTVPGPCCNGIKTLFNLAHSTPDRQTVCKCIKNAVSAFHYGKSNVDRAAALPKQCGVNIPYQISPSTDCTRVQ

SEQ ID NO: 222290 - protein, 172 aa, Glycine max
  Clone ID: PAT_MRT3847_42757C.1.pep
MKLASLISGFTDYTHLLSIKDNVMREEKTIPTRKNEVKFFKSLAPPLVAAFLVLSPICSTPVSSAQTVDIQRGTTLFRQACIGCHDAGGNIIQPGATLFAKDLQRNGVDTEEAIYGVTYYGKGRMPGFGKECMPRGQCTFGARLEDEDIQILAEFVKLQADQGWPSIETKEE

SEQ ID NO: 222291 - protein, 112 aa, Glycine max
  unsure (1)..(112): unsure at all Xaa locations
  Clone ID: PAT_MRT3847_42758C.1.pep
YSVTFSSEAVXQSLGPRSLQYPCGFSRIASFLVKAAANAPVKXGSYRPLWFASKQRLSYSDGTLPGDYGFDPLGLSDPEGTXGFIEPKWLAYGEIINGRYAMLGANGAIAPE

SEQ ID NO: 222292 - protein, 96 aa, Glycine max
  Clone ID: PAT_MRT3847_42759C.1.pep
PSAKAPKKTSAPKKPAAHPPYIEMISEAISTLKERGGSSQYAISKFIEDKHKAHLTGNFKKLLLVQLRKSTAAGKLTKVKNSYKVAVKPAAAKKPT

SEQ ID NO: 222293 - protein, 51 aa, Glycine max
  Clone ID: PAT_MRT3847_4275C.1.pep
FQHIPQIIYSHFASYDVHRNLVYSLILFFFFVNNSHRIILQMAIKSRKNPL

SEQ ID NO: 222294 - protein, 211 aa, Glycine max
  unsure (1)..(211): unsure at all Xaa locations
  Clone ID: PAT_MRT3847_42760C.1.pep
LHASKQKVTAIESMLRGLDLFDKHGSSALRSSSLDLVXGVDPPSSRDPPFPAAVTASNHLTSSLTTESTASGANKASNRNGGLGMSDIITQIQASKDSGRLSHNTNVGIEPLSTFSSYSSKRVTEKLQERGSIDENSDMRETRCYMNPNIDRQCMDTHYRDGNYRDSQHSYVPNFQRPLLRKNVAGRVTTGSRRSFDDSQLSLGEKSNYVD

SEQ ID NO: 222295 - protein, 64 aa, Glycine max
  Clone ID: PAT_MRT3847_42761C.1.pep
STSYCSVELSCSYLLALINIGSISTVYQCYLVQEGMNNSTSYCSVELRRRTTSSSPERDTGLGT

SEQ ID NO: 222296 - protein, 206 aa, Glycine max
  unsure (1)..(206): unsure at all Xaa locations
  Clone ID: PAT_MRT3847_42762C.1.pep
MELESGVSASQKNPSQLSWVNLSKDLLLAYQSFGVVYGDLSTSPLYVYTSTLSGKLQSHLNEEVIFGIFSLIFWTLTLIPLLKYVVIILNADDNGEGGTFALYSLLCRHANISLLPNQQAADEEMSCYKNGLSPEAAESSSLKRFLENHRSLKTALLVVVLLGACMVIGDGVFSPAISILAAVSGVRVTKTXFTDGESNFCLFKIL

SEQ ID NO: 222297 - protein, 44 aa, Glycine max
  Clone ID: PAT_MRT3847_42763C.1.pep
IRKVIKFSQCIDLESCIVGWGLIKTIYRYINNSRCEVRRWVDGN

SEQ ID NO: 222298 - protein, 339 aa, Glycine max
  Clone ID: PAT_MRT3847_42764C.1.pep
MEKIYLGGKEHHIRTGCGIVSVIVYGDPDKPALITYPDLALNYMSCFQGLFFCPEAASLLLHNFCIYHISPPRQEFLQLGAAAICVKDPVPSAEDLADQIIEVLNYFGLGAVMCMGVTAGAYILTLFAMKYRERVLGLILVSPLCKAPSWTEWFYNKVMSNLLYFYGMCGLLKECLLQRYFSKEVRGNVEVAESEIVQACRKLLDERKRTNVLRFLEAINQRLDISDGLKRLKCRTLIFVGDSSPFHSEALYMTSKLDRRYSALVEVQACGSMVTEEQPHAMLIPMEYFFMGYGLYRPTQFSDSPRSPLSPSCISPELLSPESMGLKLKPIKTRVSLQV

SEQ ID NO: 222299 - protein, 176 aa, Glycine max
  Clone ID: PAT_MRT3847_42765C.1.pep
ARPHFFSLSQPIVFFPVGIPFCSPPAFFLPPLFPPFPPPHAGPPGFFVFFAHANALIGLPPPAAGGFFFWPPPFFWFNPNSEPSFVDFRGWAPNPKLLFLAPFCCPPPSFFYPFWVFKKKKNRGFWLGSFCFCRKGGFVFYCPKNGKFFGPPNFAPKFPLWVLASRGGWPLFFFCP

SEQ ID NO: 222300 - protein, 184 aa, Glycine max
  unsure (1)..(184): unsure at all Xaa locations
  Clone ID: PAT_MRT3847_42766C.1.pep
IYSILPFIHGRRIQIRRQSPSFLRSRGYINFGLPFQEHHIQTGCGIMSIIVYDDPDKLALITYPDLALNYISCFQGLFXCPEAASLLLHNFCIYHISPPGHEFSLXKLPQEFLKLGATANCAEDPIPSAEDLADQIIEVLNYFGCWMREKEQMSCGFLKQLIIEPEWVWSWSFNSSSTFFWSSL

SEQ ID NO: 222301 - protein, 351 aa, Glycine max
  unsure (1)..(351): unsure at all Xaa locations
  Clone ID: PAT_MRT3847_42767C.1.pep
MFTTAMPESNDSVSVDMEKIYLGGKEHHIRTGCGTVSVIVYGDPDKPALITYPDLALNYMSCFQGLFFCPEAASLLLHNFCIYHISPPGHESSCXLGAAAICVKDPVPSAEDLADQIIEXLGAVMCMGVTAGAYILTLFAMKYRERVLGLILVSPLCKAPSWTEWFYNKVMSNLLYFYGMCGLLKECLLQRYFSKEVRGNVEVAESFFVMFLFQLLDERKRTNVLRFLEAINQRLDISDGLKRLKCRTLIFVGDSSPFHSEALYMTSKLDRRYSALVEVQACGSMVTEEQPHAMLIPMEYFFMGYGLYRPTQFSDSPRSPLSPSCISPELLSPESMGLKLKPIKTRVSLQV

SEQ ID NO: 222302 - protein, 58 aa, Glycine max
  Clone ID: PAT_MRT3847_42768C.1.pep
VLQVAKPSNQIPLVGPLLTPPVSVTAVAKVAVTAATATDPVFPPGIIDAYGIRRLLSE

SEQ ID NO: 222303 - protein, 95 aa, Glycine max
  Clone ID: PAT_MRT3847_42769C.1.pep
TKFYGGWDHRSVSTSNNSKINVTRRQKFRFLLLLPTPVSSIINHHPLASSRSLPQSVHQLPLQLDHDRCIHTDLKSTGAQNSSTLILNHIFRCLS

SEQ ID NO: 222304 - protein, 58 aa, Glycine max
  Clone ID: PAT_MRT3847_4276C.1.pep
GFPHKQVPFIQILGKFVLKFSHDEFLTSWATQVLSSTTLLAYGCPYFYATAHDFSSPT

SEQ ID NO: 222305 - protein, 55 aa, Glycine max
  unsure (1)..(55): unsure at all Xaa locations
  Clone ID: PAT_MRT3847_42770C.1.pep
ISPSPLNXISXCSHXXNLXXPSLQXLXSVXXKLXLIFHHKXHQSFILLTLIXPFL

SEQ ID NO: 222306 - protein, 43 aa, Glycine max
  Clone ID: PAT_MRT3847_42771C.1.pep
ASINGSNYIKSSTSQLEVELHMDHVQTLDWLKHEMKNLPLSVL

SEQ ID NO: 222307 - protein, 142 aa, Glycine max
  Clone ID: PAT_MRT3847_42772C.1.pep
MADEDYEDIDMGYEDEPPEPEIEEGAEEDVENKNDEITGEPIDTEDKEEEQPVKRPRKTSKYMTKYERARILGTRALQISMNAPVMVELEGETDPLEIAMKELRERKIPFTIRRYLPDGSYEDWGVDELIVEDSWKRQVGGD

SEQ ID NO: 222308 - protein, 142 aa, Glycine max
  Clone ID: PAT_MRT3847_42773C.1.pep
MADDDYEDIDMGYEDEPPEPEIEEGAEEDLENKNDELTGEPIDTEDKEEEQPVERPRKTSKYMTKYERARILGTRALQISMNAPVMVELEGETDPLEIAMKELRERKIPFTIRRYLPDGSYEDWGVDELIVEDSWKRQVGGD

SEQ ID NO: 222309 - protein, 92 aa, Glycine max
  Clone ID: PAT_MRT3847_42774C.1.pep
HIFFMTLTGKTIILEVESSDTFDNVKAKIHVMEGIPPDHEHLIFAGQQLDDCRTLADYNIQKESTLHLVLPLRSGMHILIKTLSCSTITLEV

SEQ ID NO: 222310 - protein, 44 aa, Glycine max
  Clone ID: PAT_MRT3847_42775C.1.pep
KKKKKKKKKKKKKKKKKKKKKKKKKKKKKKKKKKKKKKKKGRPF

SEQ ID NO: 222311 - protein, 60 aa, Glycine max
  unsure (1)..(60): unsure at all Xaa locations
  Clone ID: PAT_MRT3847_42776C.1.pep
RQXSLIYTFVXRKTVILAKYTEFSKNFDSITFQYLQKLPTTNDEFTYNYNTHTLNYLVDN

SEQ ID NO: 222312 - protein, 64 aa, Glycine max
  unsure (1)..(64): unsure at all Xaa locations
  Clone ID: PAT_MRT3847_42777C.1.pep
HGLLAFYGLPLKHSLGHGSKQPLASLPEGXLVXMDTLPVDAYAVAYGYTIAVYVSTSFAMESAS

SEQ ID NO: 222313 - protein, 143 aa, Glycine max
  unsure (1)..(143): unsure at all Xaa locations
  Clone ID: PAT_MRT3847_42778C.1.pep
VNSMIFYPTLTTAYRALACMVAPFAGHPFMGVFPTKETINDVTCIARYSGRVRCMLVWSPADHNRIETLSYMRYLVDAQLDHEDKYHLMMGWIPCLQXSXQHGCLLWEHYVSPGYYYGLYCTMXKLPMFVSTDASDVLNELAQ

SEQ ID NO: 222314 - protein, 184 aa, Glycine max
  Clone ID: PAT_MRT3847_42779C.1.pep
MGYRGNKVSTNSDGEFAFAASGRVKSLSQRLEANFGSPESNWVYSGKGMGNNNPALGSFGSMRVEKEWRRTLACKLFEERHNADGSEGMDMLWETYETESNNKVLKKSNTKKGKKKGEVENSEEDEEEEEEDMEAKLCCLQALKFSTGKMNLGMGRPNLLKFSKALKGIGWLHHVGKNGRKSNH

SEQ ID NO: 222315 - protein, 61 aa, Glycine max
  unsure (1)..(61): unsure at all Xaa locations
  Clone ID: PAT_MRT3847_4277C.1.pep
KSYNIDMDEHKVTQNGNVETDEGVEAVXKCVKKTVFIMDEAALSINKPIESGTLTSQRTNL

SEQ ID NO: 222316 - protein, 56 aa, Glycine max
  Clone ID: PAT_MRT3847_42780C.1.pep
STSFMHPIKQPEYMMYMPHQIKAIFINQCSSRKSRFHQVSRLLIMRCIKGMLYSIS

SEQ ID NO: 222317 - protein, 34 aa, Glycine max
  Clone ID: PAT_MRT3847_42781C.1.pep
VRRLISLRYCLGKGGQIITFFIEGNSFIEPIRLE

SEQ ID NO: 222318 - protein, 59 aa, Glycine max
  Clone ID: PAT_MRT3847_42782C.1.pep
QNIITLTTHISLFLPITSYHISYLYFSLFSFSFTRCILAIFGCQNIFFLLQIPCFFCTH

SEQ ID NO: 222319 - protein, 263 aa, Glycine max
  unsure (1)..(263): unsure at all Xaa locations
  Clone ID: PAT_MRT3847_42783C.1.pep
MEATKQVVNFGPGPAKLPHSVLLEIQKQLLDYRGLGISVLEMSHRSSDFAKIIGNTENLVRELLAVPNNYKVIFVQGGGSGQFSAVPLNLIGLKAGRSADYVVTGAWSAKAAEEAKKFGTVNIVHPKLGSYTKIPDPSTWNLNPDASYVYFCANETVHGVEFDFVPDVKGAVLVCDMSSNFLSRPVDVSKFGVIFAGAQKNVGSAGVTVVIVRDDLXGFSLRECPSVLDYKVQAGNNSLYXTPPCFSIYVMGMVLEWIKNNGG

SEQ ID NO: 222320 - protein, 48 aa, Glycine max
  Clone ID: PAT_MRT3847_42784C.1.pep
FLEIMKCNRVRSRMLMLPWNHCIIDMCGFDQIDWMLRWFVCRVFDKKK

SEQ ID NO: 222321 - protein, 60 aa, Glycine max
  Clone ID: PAT_MRT3847_42785C.1.pep
MLFPNKCTTKNQCPIFHFIEINQFDAYWTKKKKEKKEEKRKRKKKKKKKKKKKKKKKKKK

SEQ ID NO: 222322 - protein, 68 aa, Glycine max
  unsure (1)..(68): unsure at all Xaa locations
  Clone ID: PAT_MRT3847_42786C.1.pep
TFYYHHPPTLPFSFHYSXLLFFNLYLSLLCCNITLVLPNTGAIATSSSMNSSSLSXXIIIGAHCYCGC

SEQ ID NO: 222323 - protein, 55 aa, Glycine max
  Clone ID: PAT_MRT3847_42787C.1.pep
SRSGSFRDLIIRRTHVHHGSLRSLEVMCPVNFPRLRLSQRTVVLTFFAKWDPLLA

SEQ ID NO: 222324 - protein, 227 aa, Glycine max
  Clone ID: PAT_MRT3847_42788C.1.pep
MEAVCGSGSSVWVTSSLTRSPKITLPLFRASYQHLTAFPSQSLLFSYHPSRYANARTLRARTSSKPIFLPHLIASLEQVDQTYIMVKPDGVQRGLVGEIISRFEKKGFKLTGLKLFQCSKELAEEHYKDLKQKSFFPKLIDYITSGPVVCMAWEGVGVVASARKLIGATDPLQAEPGTIRGDLAVQTGRNVVHGSDSPENGKREIALWFKEGEVCDWTPVQSPWLRE

SEQ ID NO: 222325 - protein, 225 aa, Glycine max
  Clone ID: PAT_MRT3847_42789C.1.pep
MEAVCGSVWVTSSLPRSPKSTLSLFRSTHQHLTAFPSQSHLFLYHPPPYANAKTLRARTSSKPAIFLPHLIASLEQVDQTYIMVKPDGVQRGLVGEIISRFEKKGFKLTGLKLFQCSKELAEEHYKDLKQKSFFPKLIDYITSGPVVCMAWEGVGVVASARKLIGATDPLQAEPGTIRGDLAVQTGRNVVHGSDSPENGKREIALWFKEGEVCEWTPVQAPWLRE

SEQ ID NO: 222326 - protein, 42 aa, Glycine max
  Clone ID: PAT_MRT3847_4278C.1.pep
YLTRSTRILRRTVIRRLKEWNRRKKVLDNIAKCHRKAAYTRY

SEQ ID NO: 222327 - protein, 113 aa, Glycine max
  unsure (1)..(113): unsure at all Xaa locations
  Clone ID: PAT_MRT3847_42790C.1.pep
SPITYWGLNPQNTFVLNRGVGKLTFPQGTSGGGXRMPISIGGGAGAKNAMSMNLPNAALXMWRYFVGELVFEVSXRTSPYIKCTVSLFIASXKLADYTINFGDFSHITVHEWR

SEQ ID NO: 222328 - protein, 148 aa, Glycine max
  Clone ID: PAT_MRT3847_42791C.1.pep
MVFQRSLTMAFNLVLLFCLVAVINNVVIPTSARQLMMTASPNEKEVMNIGTENRGHDEHDHQAQVLDDPTSKNNVEKKEERFDKNQLFPPFFPLPPFTLPFPRAAFPFPRFPLPGLPWPIGPAGASLFTYPTVDMPASPYLPKPTPLN

SEQ ID NO: 222329 - protein, 74 aa, Glycine max
  Clone ID: PAT_MRT3847_42792C.1.pep
MPMKQRGENKPAAQPHASRTVLEENIVLGVALEGSQRTLPIDEEIDNVTSREAKEMAALQSGNGSPKAPDGNDN

SEQ ID NO: 222330 - protein, 54 aa, Glycine max
  Clone ID: PAT_MRT3847_42793C.1.pep
TDARGSMSRRPEAARDGEALTPSNRAATLLSPRCAWSKKGPCPPSNSAPLCRLR

SEQ ID NO: 222331 - protein, 151 aa, Glycine max
  unsure (1)..(151): unsure at all Xaa locations
  Clone ID: PAT_MRT3847_42794C.1.pep
EIPQLVVDDLTETLFRNMVALEQCHYLFQSYITDYVGFLDFLVNTNRDVDILVQERVFINWLGDTDSVATMINGLMKNITTPNNTSSQYLDVSEKLNAFHKNXLAXSLKSGLLRAXYCRGPWQTAASIAAIILLILSFVQTVCSILQVIRQ

SEQ ID NO: 222332 - protein, 137 aa, Glycine max
  Clone ID: PAT_MRT3847_42795C.1.pep
VQSAKIRKLQLETEGAIREAEETRRKVQELKQEVEKSRAVAEEAEEKLELVLVEAKEAKAAEQRAVKEMKILSEVGRVPYSKFNGKIKMSNEEFEALRAKAKECEDLVEKKEAIVMAELQEIYARKNEVDRKVETNL

SEQ ID NO: 222333 - protein, 85 aa, Glycine max
  Clone ID: PAT_MRT3847_42796C.1.pep
KNFKRNFLAFGAGPHQCVGQRYAFNHLVLFIALFTTLIDFKRDESDGCDDIVYVPTICPKDDCRVFLSKRCARYPSFPSVEDFVK

SEQ ID NO: 222334 - protein, 57 aa, Glycine max
  Clone ID: PAT_MRT3847_42798C.1.pep
LTKGTQPHKILKIPSLNKNFIYALPPNSSLFKPTYIKLFLPPLSQTQLLKHHLPNDR

SEQ ID NO: 222335 - protein, 99 aa, Glycine max
  unsure (1)..(99): unsure at all Xaa locations
  Clone ID: PAT_MRT3847_42799C.1.pep
MKGRVRWDEANIGEIEANKPVRQKITEPKTPYHPMIDDDSTLSHVRXSFDACIDNENPAEAIWSALNDVAVTNSVGTGISRGWTSSEDEPDAMEQDDDD

SEQ ID NO: 222336 - protein, 43 aa, Glycine max
  Clone ID: PAT_MRT3847_4279C.1.pep
QASPDIGSSSLSLLNCGATLEPKTGTGQDQIAFQPLNSTIIIC

SEQ ID NO: 222337 - protein, 63 aa, Glycine max
  unsure (1)..(63): unsure at all Xaa locations
  Clone ID: PAT_MRT3847_427C.1.pep
PWFCNFLLTPSAKSKAIRHLPTPPSPKPRRPFIGQLHLLKDKLLHXAIIDPPKEHGPLLPAPP

SEQ ID NO: 222338 - protein, 184 aa, Glycine max
  unsure (1)..(184): unsure at all Xaa locations
  Clone ID: PAT_MRT3847_42800C.1.pep
MDPNQPVGENYANPRTCFFHVLFKAAALAFYILSALFIDNFVIIFVVTVLLAALDFWVVKNVSGRILVGLRWWNEINDLGESVWKFECLDPRXSLARMNKKDSWLFWWTLYLTAVLWIVLAIFSLIRLQADYLLVVGVCLTLSIANIVGFTKCKKDAKKQIQQFASQTIASRFSSTLQSAFSVV

SEQ ID NO: 222339 - protein, 55 aa, Glycine max
  Clone ID: PAT_MRT3847_42801C.1.pep
KETGYFGTESGVTGRFTPNHLLRFYHLNSEENVMAELQKGNNTRATSCWLNTFLY

SEQ ID NO: 222340 - protein, 91 aa, Glycine max
  Clone ID: PAT_MRT3847_42802C.1.pep
ARPPLCSPPSLFFFFLSHHKTMYNGGGVWFTPRSHSILLILTYNLSTPPRTLHPIPPLNVSFPTRGPFCFSSPDFFCQTTPLSFLRSKFFP

SEQ ID NO: 222341 - protein, 88 aa, Glycine max
  unsure (1)..(88): unsure at all Xaa locations
  Clone ID: PAT_MRT3847_42803C.1.pep
ARXXXIEHFHLVYFLIPRSSQNGTPHLYVLRLIHWSGSVFVFNFKRSTKWLWYRRISGFYYTKNELIXAHSRPILIVSLKFFKTAPGF

SEQ ID NO: 222342 - protein, 60 aa, Glycine max
  Clone ID: PAT_MRT3847_42804C.1.pep
CIHQTDQSHSRPWADQQWSILSSLASKGIQSITYKPSSSANYGTSIHQPVFEMASSALCV

SEQ ID NO: 222343 - protein, 110 aa, Glycine max
  unsure (1)..(110): unsure at all Xaa locations
  Clone ID: PAT_MRT3847_42805C.1.pep
IDRFSCPDCNIXGAMLLVDTYDTNPXNAGRSIFVAPFIGRMPIQVVTFPNTIVQIEPDMNSRFQLLSTTTNGDVFQSEDLPMVKGNRACAAVGLTFNYTPTSLLEICLQK

SEQ ID NO: 222344 - protein, 94 aa, Glycine max
  Clone ID: PAT_MRT3847_42806C.1.pep
DVKRRSRCQSLQSSYELSQRCSGEVVYHSPRNYGPVVFFPPSNFVSSEAACIQWLRLSPMPGPSLLVIPPLVKPASQSTRCVPQVQAHMLCDSV

SEQ ID NO: 222345 - protein, 38 aa, Glycine max
  Clone ID: PAT_MRT3847_42807C.1.pep
IVYNVPLYNSTILMLKVTIHVIRPAMLLLRKSKRIFKP

SEQ ID NO: 222346 - protein, 73 aa, Glycine max
  Clone ID: PAT_MRT3847_42808C.1.pep
HSARSRELGFRFESNNNMRHTHSLNLKPSSISLHLPWHGIRSKCRQHLRHVEWITTGYTGTMDRQSCVAAVRL

SEQ ID NO: 222347 - protein, 107 aa, Glycine max
  unsure (1)..(107): unsure at all Xaa locations
  Clone ID: PAT_MRT3847_42809C.1.pep
WLRTDKPELSTTVTLAAAAILRKKRPRAVTQTRPFMKDKECVVIKVGAPXVTTEEGRLAVGRXGALCEHNKQLNSVGYDTIMATTGTNKMIRTRLPYQKMINRTMIT

SEQ ID NO: 222348 - protein, 69 aa, Glycine max
  Clone ID: PAT_MRT3847_4280C.1.pep
PTFGDLNHLISATMSGVTCCLRFPGQLNSDLRKLAVNLIPFPSVHYFIGWVCPLNIKGSHNSLPLLVLN

SEQ ID NO: 222349 - protein, 262 aa, Glycine max
  Clone ID: PAT_MRT3847_42810C.1.pep
EDCRCIYYKNWYKSKKKAFTKTSKKWQDELGRKSIERNFKKLVRYCTVIRVICHTQMKLLRHRQKKAHIMEIQLNGGSIEDKVKWAREHLEKPIPVSNVFSADEMIDCIGVTKGHGMKGVTSRWHTKKLPRKTHKGLRKVACIGAWHPSRVSFTVARAGQKGYHHRTEMNKKIYRIGQGIHIKDGKVVKNNASTEYDLTEKTITLMGGFPHYGEVNNDYLMINGCVVGPKKRAITLRKFLITHTKRVALEKINLKFIDTSSK

SEQ ID NO: 222350 - protein, 72 aa, Glycine max
  unsure (1)..(72): unsure at all Xaa locations
  Clone ID: PAT_MRT3847_42811C.1.pep
QGPELHHCEGDDESFTGYRDDANVADESFHTYDTNITGSSNEFKNYSSNSNIPKCXFTTYSNITNRRTQSLR

SEQ ID NO: 222351 - protein, 68 aa, Glycine max
  unsure (1)..(68): unsure at all Xaa locations
  Clone ID: PAT_MRT3847_42812C.1.pep
MKNMASLSSSLVLLRAAPSATRQVPADYEMPIIYKPPAYTRPVYKRPVEELPVWLPPVXKPRVDKPPV

SEQ ID NO: 222352 - protein, 67 aa, Glycine max
  unsure (1)..(67): unsure at all Xaa locations
  Clone ID: PAT_MRT3847_42813C.1.pep
XXXTQQQPIQQYXLPSQHNXXPXXSQFXLMRSWXKIVNFGVPHXXIKTENEEGXDXKTFNPYXXKXR

SEQ ID NO: 222353 - protein, 34 aa, Glycine max
  Clone ID: PAT_MRT3847_42814C.1.pep
PIHASVIVHLISALRKSFNGSCSPAAAIGVAKCS

SEQ ID NO: 222354 - protein, 58 aa, Glycine max
  Clone ID: PAT_MRT3847_42815C.1.pep
MSSIVQGFTKSLAITILSDIGVKAFSSAEILAMRHAIRLLLSSCLSALIVITILSVLV

SEQ ID NO: 222355 - protein, 41 aa, Glycine max
  Clone ID: PAT_MRT3847_42816C.1.pep
IIYFSLSYSFKYKGSGKGRKFKLMELIVNTLLPYQPVLLQL

SEQ ID NO: 222356 - protein, 49 aa, Glycine max
  Clone ID: PAT_MRT3847_42817C.1.pep
FLLSSVCQCYRLLLIMDLDELPYIGLKIGLICHYVGISMSIFCEPLLNF

SEQ ID NO: 222357 - protein, 77 aa, Glycine max
  Clone ID: PAT_MRT3847_42818C.1.pep
SDFYDKDKRIRTALGKGKKIVSLTRVDPFPVALLAVLYGVKNEILSSNATNPMLTRLIENCKSLKYVDDECPLAFVN

SEQ ID NO: 222358 - protein, 51 aa, Glycine max
  unsure (1)..(51): unsure at all Xaa locations
  Clone ID: PAT_MRT3847_42819C.1.pep
STLISVVLYVIIRKISHCTSAVRILQTISGLGRNTMVASPHTLDARYAVTX

SEQ ID NO: 222359 - protein, 68 aa, Glycine max
  Clone ID: PAT_MRT3847_4281C.1.pep
TYGHADAQFGVLSAFSPFLVAFGGCWRSYALVFMPQSFFCDDAACRSLLLVLLILVVMVFAPHCFFVF

SEQ ID NO: 222360 - protein, 52 aa, Glycine max
  Clone ID: PAT_MRT3847_42820C.1.pep
DQYIALKGLDTDRAIQAIEGVEMKLKDIMLPLMREGSNGINPYEEILDAERA

SEQ ID NO: 222361 - protein, 92 aa, Glycine max
  Clone ID: PAT_MRT3847_42821C.1.pep
AVSQLLARSACWAAFLIDHDGASRCSNVYAMVIKAFVFPVVMVEGSKEGRSACKCCSSVFTLVLGAATPMEGVVFFHRSGSTYVSGSCLVPL

SEQ ID NO: 222362 - protein, 52 aa, Glycine max
  Clone ID: PAT_MRT3847_42822C.1.pep
TSLQTLIFHILNKHSKQRQTVIFKTTTTIHTIYSHQALTLTITRFYSINDNI

SEQ ID NO: 222363 - protein, 108 aa, Glycine max
  Clone ID: PAT_MRT3847_42823C.1.pep
KRKPDLNPLKANLGPQKGGGAFNPGFNPKKKMARPMAPKKVGGEGRQNGPPPKKGPGWVTQKVWNSQEKKGGAHNYLYHGSKRPGGNNQLALKRAWKQTQKTRGGKNF

SEQ ID NO: 222364 - protein, 431 aa, Glycine max
  Clone ID: PAT_MRT3847_42824C.1.pep
MWRCINGRIARRFLSTSSASARGWWDHVRPAPKDPIVRVNEAFLADPFPHKINLGIGTYKGDDGKAFIPQSVREAETKIQRCKLEESNASAVRSKFVQECVRLAYGNDSNVVREGLFAGVPTLSGTGACRLFAEFQRHFYPDSQMYLPDPTWSNHHNIWRQAEIPVKTFHYYHPDTKGLDFAALLNDVKNAPDCSFFLLHPCAHNPTGVDPTEEQWREISYQFQVKNHFPFFDMAYQGFSSGDLDKDAIALRIFLEDGHLIGCAQSFAKNMGLSEHKAGCLSVLCQSIKQVAALKSQLQLMSHAMYSSIPFQGISLVTMILSEPDTEALWRKEIKVMAKRIQTMRTTLRHCLENLHSSFNWEHITDQVGMFCFSGLTPDQVQQMEKLFHIYMTPDGRMSMSGVTSSNVDYLANAIHQVTRIDEEALRSCYV

SEQ ID NO: 222365 - protein, 107 aa, Glycine max
  unsure (1)..(107): unsure at all Xaa locations
  Clone ID: PAT_MRT3847_42825C.1.pep
ALETMTATHQLKXAVMSVAFVGRSLFYTSVSVSSMKPIDXGGGDEAFIDLVGVSLSNALLGMDANDPPKTLATMQLIGSIFSNLALLDDKIDYLSFIPIIRFSQWLD

SEQ ID NO: 222366 - protein, 293 aa, Glycine max
  Clone ID: PAT_MRT3847_42826C.1.pep
MHIQFFNICKKFVCCSHHNIWRQAEIPVKTFHYYHPDTKGLDFAALLNDVKNAPDCSFFLLHPCAHNPTGVDPTEEQWREISYHFQVKNHFPFFDMAYQGFSSGDLDKDAIALRIFLEDGHLIGCAQSFAKNMGLSEHKAGCLSVLCQSIKQVAALKSQLQLMSHAMYSSIPFQGISLVTMILSEPDTEALWRKEIKVMAKRIQTMRTTLRHCLENLHSSFNWEHITDQVGMFCFSGLTPDQVQQMEKLFHIYMTPDGRMSMSGVTSSNVDYLANAIHQVTRIDEEALRSCYV

SEQ ID NO: 222367 - protein, 760 aa, Glycine max
  Clone ID: PAT_MRT3847_42827C.1.pep
MGPFRKPFLAFLSVVLFLGLYEAAAEQTQTHKSTYIVHVAKSEMPESFEHHAVWYESSLKTVSDSAEMIYTYDNAIHGYATRLTAEEARLLQRQTGILAVLPETRYELFTTRTPLFLGLDKSADLFPESSSGSDVIVGVLDTGVWPESKSFDDTGLGPVPSTWKGACETGTNFTASNCNRKLIGARFFAKGVEAMLGPINETEESRSARDDDGHGTHTSSTAAGSVVSGASLLGYASGTARGMATRARVAAYKVCWKGGCFSSDILAAIERAILDNVNVLSLSLGGGISDYYRDSVAIGAFSAMEKGILVSCSAGNSGPGPYSLSNVAPWITTVGAGTLDRDFPAYVALGNGLNFSGVSLYRGNALPDSSLPLVYAGNVSNGAMNGNLCITGTLSPEKVAGKIVLCDRGLTARVQKGSVVKSAGALGMVLSNTAANGEELVADAHLLPATAVGQKAGDAIKKYLVSDAKPTVKIFFEGTKVGIQPSPVVAAFSSRGPNSITPQILKPDLIAPGVNILAGWSKAVGPTGLPVDNRRVDFNIISGTSMSCPHVSGLAALIKSAHPDWSPAAVRSALMTTAYTVYKTGEKLQDSATGKPSTPFDHGSGHVDPVAALNPGLVYDLTVDDYLGFLCALNYSAAEISTLAKRKFQCDAGKQYSVTDLNYPSFAVLFESSGSVVKHTRTLTNVGPAGTYKASVTSDTASVKISVEPQVLSFKENEKKTFTVTFSSSGSPQHTENAFGRVEWSDGKHLVGSPISVNWG

SEQ ID NO: 222368 - protein, 121 aa, Glycine max
  unsure (1)..(121): unsure at all Xaa locations
  Clone ID: PAT_MRT3847_42828C.1.pep
NQHFSQXKFQCDAGKQYSVTDLNYPSFAVLFESSGSVVKHTRTLTNVGPAGTYKASVTSDTASVKISVEPQVLSFKENEKKTFTVTFSSSGSPQHTENAFGRVEWSDGKHLVGSPISVNWG

SEQ ID NO: 222369 - protein, 441 aa, Glycine max
  unsure (1)..(441): unsure at all Xaa locations
  Clone ID: PAT_MRT3847_42829C.1.pep
PRVREELTWRLHLEKXMRVSNEEAKKVEISKLQKMLEALNLELDAAKLAKINECNKNAVLQNQFELSVKEKSALKRELVAVDELRKENAQLKVPLDAFEKKCTTLELELMNAQKGRDETMEKLRESEQKCSQLEQNEKRLEEKLLNLEDENHVLRQKALSTPLKSNRPCFAKSISEKYSSAIASRTERKTIFESPTPTKLIAPFTLGLSDSRRSKLTAERQQDNYEFLSKCIKENLGFKNGKPIAARIIYKCLLHWHSFESERTTIFDSIIEGINEVLKVREDDIILPYWLSNTSALLCLLQRNLRSNGFLTTTAQRYPGSSGLTSRAGHGPKSPLKFIGYDDGVLHVEARYPAILFKQQLTACVEKIFGLLRDNLKKELSPLLGSCIQAPKTGRGLHGGKSSRFPGGIPQQSSSGQWSNIVKFLDSLMSKLRQNHVCNCN

SEQ ID NO: 222370 - protein, 73 aa, Glycine max
  unsure (1)..(73): unsure at all Xaa locations
  Clone ID: PAT_MRT3847_4282C.1.pep
LPIIQVAXASGSGPHLSIVSQAQLGIDLLILITVHAHGLPLQADRLHLSPPVQAHRGHIMATASSQSDPSSNV

SEQ ID NO: 222371 - protein, 70 aa, Glycine max
  Clone ID: PAT_MRT3847_42830C.1.pep
LILLCIGNVWVLRFSSHNWAGFNFFFGIIMYHFEFILMLLLLTLCMAIPSIHALIWIYCRLKDDVVEPQR

SEQ ID NO: 222372 - protein, 123 aa, Glycine max
  Clone ID: PAT_MRT3847_42831C.1.pep
LELEPFEKKCTTLELELMNAQKGRDETMEKLRESEQKCSQLEQNVKRLEEKLLSLEDENHVLRQKALSTPLLKSNRPSFAKSISEKYSSAIAFRTERKTIFESPTPTKLIAPFTLCYFKDNFF

SEQ ID NO: 222373 - protein, 209 aa, Glycine max
  unsure (1)..(209): unsure at all Xaa locations
  Clone ID: PAT_MRT3847_42832C.1.pep
LELEPFEKKCTTLELELMNAQKGRDETMEKLRESEQKCSQLEQNVKRLEEKLLSLEDENHVLRQKALSTPLLKSNRPSFAKSISEKYSSAIASRTERKTIFESPTPTKLIAPFTLGLSDSRRSKLTAERQQSGIFMLNLEEMKRNENIFLMIEKXEDNYEFLSKCIKENLGFKNGKPIAARIIYKCLLHWHSFESERTTIFDSIIRGIN

SEQ ID NO: 222374 - protein, 69 aa, Glycine max
  Clone ID: PAT_MRT3847_42833C.1.pep
WGCVLNSWFGKVRSLAYRGSLFLGNRACLVHFYIVPGLFCLIHSIMWFFYSVMWLRGFAWDWVSYGMLL

SEQ ID NO: 222375 - protein, 81 aa, Glycine max
  Clone ID: PAT_MRT3847_42834C.1.pep
ISLDDCLSYKKKKKKKKKKKKKKKKKEEQSKKNQNKKTQTKKKKKSPMGGGRFKGTSFPSPALQPKNFFMGPPKLNSGAGV

SEQ ID NO: 222376 - protein, 53 aa, Glycine max
  Clone ID: PAT_MRT3847_42835C.1.pep
LERDIKSANILIDKNFRGKVADFGLTKLTEVGSSSLPTGRLVGTFGYMPPEYG

SEQ ID NO: 222377 - protein, 39 aa, Glycine max
  Clone ID: PAT_MRT3847_42836C.1.pep
VIVVYKRMYKLTTPLLKFERSVLYEWLKNMIMYYKADVW

SEQ ID NO: 222378 - protein, 99 aa, Glycine max
  unsure (1)..(99): unsure at all Xaa locations
  Clone ID: PAT_MRT3847_42837C.1.pep
XEXSFSXXXXXSXSXXXPXXLSYLXMXCHVNXWCMXRXFXLPXTSTSSLSXXXSXXXSXYSXXSXXFRIFSXPXTXXXXXXSXXXYLTXXYSXXFXSXL

SEQ ID NO: 222379 - protein, 56 aa, Glycine max
  Clone ID: PAT_MRT3847_42838C.1.pep
LVLAVTHLGPDDPDALFLVNHRPTPLVNPIMPCVESTRLNCPLPSLPLDNFLFHGS

SEQ ID NO: 222380 - protein, 109 aa, Glycine max
  unsure (1)..(109): unsure at all Xaa locations
  Clone ID: PAT_MRT3847_42839C.1.pep
VLKCCTQKEEWYGDAVIFVSVPAFIDSPXIVRSACKRFNLRLDRGMTKFAGKVFRIGHIDHLNALLGLGCLAGVDMTLKXVGYPVKLENEVAHASAXLQISIHMIPSKI

SEQ ID NO: 222381 - protein, 65 aa, Glycine max
  Clone ID: PAT_MRT3847_4283C.1.pep
LNGVGDIPSREQRKFTKTLYLLVNYKILPFYHKYITTLLIYYKLPRLFYLFSRTHFLRLLLLKIL

SEQ ID NO: 222382 - protein, 414 aa, Glycine max
  Clone ID: PAT_MRT3847_42840C.1.pep
MAMDVKGITWVGNIFQTFEDIYVDVEDTMLEETVKYIGNQMQTVGESVKKIYSDVMQDLLPPSSYDLDETSASELPIDQYVDAGFSNKSFQGSKKITVKDDTNQTTEDSRIKHDVDNDVIHAKFGDSDALFTSASCNSVKGNSFIAHARQYVGSTDIRSNLGGDENRQNKSIPASKTVSEITLSKADTCSTSQSCELSRVNQNHAATVSKAAFAEVTTITSVADCCNEIENASTEEIPDVLVLAAESAEEKEMHIISYSSSVLLGDPYGVTMVRTFEPDNYSYHSIIASHPEITETWDLNVPMIGTIIVEQGHKTMHQDDELKLEETCVMVARDELQSVPNARGNLITSKNKKRQPFSLSKKATRRQEYEELAILHRNNEKEKVDFAENLCSTLQDDHKKLLLPDIYEPEWELL

SEQ ID NO: 222383 - protein, 85 aa, Glycine max
  Clone ID: PAT_MRT3847_42841C.1.pep
GTLPCHHPPLQNLNQASRFPYPQLSSRVLADMVTGRIQHSSSKRYRSIFHFGNFRASWLWEVITEDVSTYFHSNLYEVTRLLAER

SEQ ID NO: 222384 - protein, 312 aa, Glycine max
  unsure (1)..(312): unsure at all Xaa locations
  Clone ID: PAT_MRT3847_42842C.1.pep
MAAPFSAASLFAIREEDQNQMKQQQHSSTPSSSTTPAAPPQKKRRNQPGTPYPDAEVIALSPKTLMATNRFLCEVCNKGFQREQNLQLHRRGHNLPWKLKQXTNKEPKRKVYLCPEPTCVHHDPFRALGDLTGIKKHYYRKHGEKKGKCEKCSKKYAVQSDWKAHSKTCGTREYRCDCGTLFSRRDSFITHRAFCDALAQESARFPGGLNPLGTHLFGTNHTTSLSLSQVGNQLSQVQKQNQTATNYNSILRLGNNNVGAAATKFEHLIPPLNHSSFGHSPQSMPSSAFFMNDNTNQALFEEHQSQLQGLMQ

SEQ ID NO: 222385 - protein, 87 aa, Glycine max
  Clone ID: PAT_MRT3847_42843C.1.pep
HIEYNIVSRFFFFFSFASCWSFSSKAICSPLLFPIQLLCLRMPVFLLGQKFRTWEDSIPGSQTFLLSNTASKDQDKEEPTWKSRPRC

SEQ ID NO: 222386 - protein, 148 aa, Glycine max
  Clone ID: PAT_MRT3847_42844C.1.pep
KSSVNVDIMFWAYKNPPPAHLFLISSDIGFAGLLHRISLNNYNILLAVSTNAPVLSTEATITWQWYKLLKGENLIGKHFNHPPDDPYGSWYGNFRVPLENPFPAKTKPDSLKMSSKGSSDDDIVGSEDASRKSQERYTTSMNRSAGND

SEQ ID NO: 222387 - protein, 108 aa, Glycine max
  Clone ID: PAT_MRT3847_42845C.1.pep
FLGDNSEEYTPSLPKIIFAQATGGIIAGATASCITNPLDTIKTRLQVLGLEKKIPVKQVVKDLIAEDGWKGVYRGFGPRLFSTSAWGTSMILAYEYLKRLCAKDGGSN

SEQ ID NO: 222388 - protein, 51 aa, Glycine max
  unsure (1)..(51): unsure at all Xaa locations
  Clone ID: PAT_MRT3847_42846C.1.pep
TXXXRXXXXLXIXLEXXXXXDFEXVXXXXXDGRXTTLDVXXRLPQXGLCNS

SEQ ID NO: 222389 - protein, 293 aa, Glycine max
  Clone ID: PAT_MRT3847_42847C.1.pep
NCLKSPPQLLQAITAYTLRLKSLISREIEKIDVRADAETLRYKYENNIVMDVSSSDGSSPLQYQLYGNGKIGVDVPPGGSQNQLLDRQKAHVQQFLATEDALNKAAEARDMCEKLMKRLHGGTDVSSRSLGIGSNSQNVGSLRQLELDVWAKEREVAGLKASLNTLMSEIQRLNKLCAERKEAEDSLKKKWKKIEEFDARRSELETIYMALLKANMDAASFWSQQPLTAREYALSTIIPACAAVAKASNNAKDLIEKEVSTFYRSPDNSLYMLPSSPQALLEAMGASGPPGQE

SEQ ID NO: 222390 - protein, 49 aa, Glycine max
  Clone ID: PAT_MRT3847_42848C.1.pep
EGRFCISKRHPALVCTEHIIIFLLNVRRSIECFSNRESLTEKAFILRSN

SEQ ID NO: 222391 - protein, 40 aa, Glycine max
  unsure (1)..(40): unsure at all Xaa locations
  Clone ID: PAT_MRT3847_42849C.1.pep
ENAGNFAHRLEMVRILLQQLHMIVFMLSFRXYGSSDDYPS

SEQ ID NO: 222392 - protein, 189 aa, Glycine max
  unsure (1)..(189): unsure at all Xaa locations
  Clone ID: PAT_MRT3847_4284C.1.pep
RLVGPLQTVVQISKIKLGKLYAASIMXGILLKRIDDGFQLERSMXTLPKDFGKAKSFDEPSPGIKLWDPDSLIIVHDYDNDSDHMDTDEGRSFRLRAYVMQLDAETLQRLATVRSKEAISLIEKQTQALFGRPDIRVSEDGSIETSNDELLSLTFSGLTMLVLEALAFGSFLWDKENYVESKYPFLDID

SEQ ID NO: 222393 - protein, 66 aa, Glycine max
  Clone ID: PAT_MRT3847_42850C.1.pep
CRIDGLFKSNLDVMFEISPIGLQLWKHFPPPDKKHKRTTLFFYCGNNVKNVFGPAFSFWGQPIVDI

SEQ ID NO: 222394 - protein, 101 aa, Glycine max
  Clone ID: PAT_MRT3847_42851C.1.pep
FWICAWAGVRQRVLRVAKYVWAAPMGCPLWGGGFLIIGISELFHVALSLCGAFFAWAFFLSPAFCVGFPSLVAPLFIVLYHHRFSFPFFQPSPTFKNFFKN

SEQ ID NO: 222395 - protein, 88 aa, Glycine max
  unsure (1)..(88): unsure at all Xaa locations
  Clone ID: PAT_MRT3847_42852C.1.pep
TLHTRAELLLLDNPPSNMARQPISAQAWFRLASSTXRTSTSPVSPFVQARFAPLLSRTLRNSLAPLAPYVTRPEQXQXLDHSRPFLAP

SEQ ID NO: 222396 - protein, 64 aa, Glycine max
  Clone ID: PAT_MRT3847_42853C.1.pep
ERVVHNQLLARGRDHKHEPLSDYILLVIIGARCCILLYKLMASCILLGSGQGMNMQDPEVLGSS

SEQ ID NO: 222397 - protein, 43 aa, Glycine max
  unsure (1)..(43): unsure at all Xaa locations
  Clone ID: PAT_MRT3847_42854C.1.pep
SPIFLEITAYSNPSGWTFTHRGSVXNTFNRISDLCPPSNLSLT

SEQ ID NO: 222398 - protein, 86 aa, Glycine max
  Clone ID: PAT_MRT3847_42855C.1.pep
CIHASNTKRLGRMKWRSHVFGISEEVLRGGKLRLALSKHALITLLTAEEVKISTPFAALGESIIHSFENWTAYTKFKNRFILGIKN

SEQ ID NO: 222399 - protein, 61 aa, Glycine max
  Clone ID: PAT_MRT3847_42856C.1.pep
PDPQGFFPKKKGGPTLGPPGAPGKTPRAPIKLGANREIPWLKRVKPPVCPPGVTRAPRGQK

SEQ ID NO: 222400 - protein, 191 aa, Glycine max
  unsure (1)..(191): unsure at all Xaa locations
  Clone ID: PAT_MRT3847_42857C.1.pep
STTLRLDMEGVPKDKPTXSNLAQHTYWNLAGHNSGNILDHSIQLWANHITPVDENTVPTGKIMPVKGTPFDFTSENRIGNTISQVGLGYDHNYVLDCGEEKEGLRHAAKVRDPSSSRVLNLWTNAPGVQFYTANYVNGVQGKGGAIYGKHAGLCLETQGFPNAINQPNFPSVVVRPGEKYQHTMLFEFSLE

SEQ ID NO: 222401 - protein, 379 aa, Glycine max
  Clone ID: PAT_MRT3847_42858C.1.pep
MLFQFPHVSSPVVVVALIEVALIRSHQNIHSHSYPLSPIPMADESPKPETFELNNGSMQVLLTNLGCTIISLSVPGKDGVLSDVVLGLESVESYQKGLAPYFGCIVGRVANRIKDGKFTLDGIHYSLPINNPPNSLHGGNVGFDKKVWEVVEHKKGETPSITFKCHSHDGEEGYPGDITVTATYTLTSSTTLRLDMEGVPKGKPTIVNLAQHTYWNLAGHNSGNILDHSIQLWANHITPVNENTVPTGEIMPVKGTPFDFTSFNRIGSTISQVGLGYDHNYVLDCGEEKEGLRHAAKVRDPSSSRVLNLWTNAPGVQFYTANYVNGVQGKGGAIYGKHAGLCLETQGFPNAINQPNFPSVVVRPGEKYQHTMLFEFSLE

SEQ ID NO: 222402 - protein, 197 aa, Glycine max
  Clone ID: PAT_MRT3847_42859C.1.pep
MGRGKADGKPRKRLFTTVLLLAIVGALFFLYSRKSGSSSIEYGSKSLKFGGDDSAIPKTIPVCDDRLSELIPCLDRNFIYQTRLKLDLTLMEHYERHCPMPERRYNCLIPPPPGYKIPIKWPKSIDQVWRANIPHTHLATEKSDQRWMVVKGEKIVFPGGGTHFHYGADKYIASIANMLNFPNNVINNERRLSHGFD

SEQ ID NO: 222403 - protein, 408 aa, Glycine max
  unsure (1)..(408): unsure at all Xaa locations
  Clone ID: PAT_MRT3847_4285C.1.pep
MLVSGAISDVLVVLPPSTSLRLPEFRHLHVFAVSDAKGFVSGGFLKSCPSSYNPKHYHELYNFRARGLVARASADSRDNLVPFAPLQLESPVGQLLEKISNTHPHLLTAVIDQQLENLQDARDASLDSGLAQDTHYEKRAEVKDKEKRITLEEIIYCSIVHKFLENNISMIPKISATSDPTGRVDLWPNQELKLEAVHSPEALEMIQSHLSLVLGDRLVGTLNSEVQISKIXTGKVFLKRNNEWIQLERSMGTLPKDFGKAKSFDEPGKAKSYDEPSPGIKLWDPDSLITVQDYDDEGYNDSDYMDTDEDKSFRLRAYVMQLDAETLQRLATVRSKEAISLIEKQTQALFGRPDIRVSDDGSIETSNDELLSLTFSGLTMLVLEAIAFGSFLWDKENYVESKYPFLNE

SEQ ID NO: 222404 - protein, 434 aa, Glycine max
  Clone ID: PAT_MRT3847_42860C.1.pep
GGTHFHYGAGKYIASIANMLNFPNNVINNEGRLRNVFDVGCGVASFGGYLLSSDVIAMSLAPNDVHENQIQFALERGIPAYLGVLGTLRLPYPSRSFELAHCSRCRIDWLQRDGILLLELDRILRPGGYFAYSSPEAYAQDEEDRRIWKEMSALVGRMCWKIASKRNQTVIWVKPLTNDCYLKREPDTHPPLCSPSDDPDAVWGVKMKACITRYSDQMHRAKGADLAPWPARLTTPPPRLADFNYSTEMFEKNMEYWQQEVANYWKMLDNKIKPGTIRNVMDMKANLGSFAAALKDKDVWVMNVVPENGPNTLKIIYDRGLLGTVHNWCEAFSTYPRTYDLLHAWTIFSDIIEKECSPEDLLIEMDRILRPKGFIIVYDKRSVVLSIKKFLPALHWVAVATSNLEQDSNQGKDDAVLIIQKKMWLTSESIQVSE

SEQ ID NO: 222405 - protein, 73 aa, Glycine max
  Clone ID: PAT_MRT3847_42861C.1.pep
MDPEAARTARESLDLAFHMSNILDTGLDRHTLSVLIALCDLGVNPEALAAVVKELRKEKPSLSSSLPVAPSLP

SEQ ID NO: 222406 - protein, 593 aa, Glycine max
  unsure (1)..(593): unsure at all Xaa locations
  Clone ID: PAT_MRT3847_42862C.1.pep
MGRGKADGKPRKRLVTTVLLLAIVGALFYLYSRKNGSSSIEHGSKSVKFGDDSAIPKTIPVCDDRXSELIPCLDRNFIYQTRLKLDLTLMEHYERHXCPMPERRFNCLIPPPPXYKIPIKWPKARDQVWRANIPHTHLATEKSDQRWMVVKGEKIGFPGGGTHFHYGAGKYIASIANMLNFPNNVINNEGRLRNVFDVGCGVASFGGYLLSSDVIAMSLAPNDVHENQIQFALERGIPAYLGVLGTLRLPYPSRSFELAHCSRCRIDWLQRDGILLLELDRILRPGGYFAYSSPEAYAQDEEDQRIWKEMSALVGRMCWKIASKRNQTVIWVKPLTNDCYLKREPDTRPPLCSPNDDPDAVWGVKMKACISRYSDQMHRAKGAGLAPWPARLTTPPPRLADFNYSTEMFEKDTEYWQQEVTNYWKMLGNKIKPDTIRNVMDMKANLGSFAAALKDKDVWVMNVVPENGANTLKIIYDRGLLGTVHNRCEAFSTYPRTYDLLHAWTIFSDIIEKECSPEDLLIEMDRILRPKGFIIVHDKRSVVLSIKKFMSALHWVAVVTSNVEQDSNQGKDDAVLIIQKKMWLTSESIRISE

SEQ ID NO: 222407 - protein, 85 aa, Glycine max
  unsure (1)..(85): unsure at all Xaa locations
  Clone ID: PAT_MRT3847_42863C.1.pep
FEFQQWCTSKAQKFKRLLQGILSQVSKXRKSGEKRITVARIXVGLIXXQXTNISTSXNTGFXGFGFSKQGXLXAPINIXLALXAX

SEQ ID NO: 222408 - protein, 101 aa, Glycine max
  Clone ID: PAT_MRT3847_42864C.1.pep
PVFKPPVYKPPVYEPPVYKPKPPVCKLNLPVSEPPYKKPPYKKPPYGKYPSVEDNYPCIKQAMRCIIYLINKRICFVFSNIVIYNFVAKHILESCMHFNPW

SEQ ID NO: 222409 - protein, 74 aa, Glycine max
  Clone ID: PAT_MRT3847_42865C.1.pep
MDPEAARTARESLDLAFHMSNILDTGLDRHTLSVLIALCDLGVNPEALAAVVKELRKEKPSLSSSLPAAPSSLP

SEQ ID NO: 222410 - protein, 43 aa, Glycine max
  Clone ID: PAT_MRT3847_42866C.1.pep
LTKNHIQNVHVQFCGHLLYLEYHRPLILNIFLKRTACQTYSIS

SEQ ID NO: 222411 - protein, 124 aa, Glycine max
  Clone ID: PAT_MRT3847_42867C.1.pep
MATRYMTLRTSAKTLFHHLQPPVQDSRCAFHLIRTLHSFVARDSDPRKFRNSFFSGTFRGMVSAPNPNFDEAASLALDNRVPATVITGFLGSGKTTLLNHILTSQHGKRIAVIENEFGEVDIDG

SEQ ID NO: 222412 - protein, 65 aa, Glycine max
  unsure (1)..(65): unsure at all Xaa locations
  Clone ID: PAT_MRT3847_42868C.1.pep
PEEFNAAWSNXVRPASTLSADGWAYLYDMVHDNSVYTISRDFVIGAMTTTLNYLGAYVLNLGILG

SEQ ID NO: 222413 - protein, 277 aa, Glycine max
  unsure (1)..(277): unsure at all Xaa locations
  Clone ID: PAT_MRT3847_42869C.1.pep
AREKAHAEAEIDLLKGNIESCEREINSLKYELHVISKELEIRNEEKNMSMRSAEAANKQHMEGVKKIAKLEAECQRLRGLVRKKLPGPAALAQMKLEVESLGREYGETRLRKSPVKPATPHMSTLPDFSLDNVQKFHKDNEFLTERLLAMEEETKMLKEALXAKRNSELQASRSLCAKTLSKLQSLEAQSQNQLKGSPKSIVQLTHERIYNQNSSSAPSLISMSEDGNDDAESCAESWATAIVSGLSQFPREKCNEESNKSEVTNKLELMDDFLEVE

SEQ ID NO: 222414 - protein, 65 aa, Glycine max
  unsure (1)..(65): unsure at all Xaa locations
  Clone ID: PAT_MRT3847_4286C.1.pep
VAVKPQLLVEAPKANDAXSIGQYQEGEGVKHQVLNXFXKADHQLPLILYAQLKNIVFWNGHFKHP

SEQ ID NO: 222415 - protein, 93 aa, Glycine max
  Clone ID: PAT_MRT3847_42870C.1.pep
RQNLHFPALPYTRFTRMNVGRIKFRLSHVQFNRCSSCGISSSTDIVIKAFQDEYIVNQAPVGDVQAPCVNQHYTHRKRSVHMQSCVSCTNDAH

SEQ ID NO: 222416 - protein, 59 aa, Glycine max
  Clone ID: PAT_MRT3847_42871C.1.pep
LCDIFVFNYFVLSSMNNQFLLLTCEKNLPPIFIICKVISCFYSNLLPFWWPNKQKFNLV

SEQ ID NO: 222417 - protein, 127 aa, Glycine max
  Clone ID: PAT_MRT3847_42872C.1.pep
PTRGMTSFPYYPMSICLQPGQIPNPHSWQSFGNSSSSEAKLSKVDRREAALMKFRQKRKERCFDKKIRYVNRKRLAERRPRVRGQFVRKLKGANADLNGQPASIDYDEDDEEDEDDQGARDSSPEDA

SEQ ID NO: 222418 - protein, 90 aa, Glycine max
  unsure (1)..(90): unsure at all Xaa locations
  Clone ID: PAT_MRT3847_42873C.1.pep
TPVGWVTPVKALETAQEKGALGILPPLVIGLVGGPKIXEYGPLTGGLINPVGTCGPVLVNGNFLAKWFYWVGPXSQGGLAALIYEDVFIG

SEQ ID NO: 222419 - protein, 58 aa, Glycine max
  unsure (1)..(58): unsure at all Xaa locations
  Clone ID: PAT_MRT3847_42874C.1.pep
DYSLEGRRTEILAEHTGYSGNXNYIACQRLQKLDGTNNKFTYNCDAHTFNYLVHTDYT

SEQ ID NO: 222420 - protein, 65 aa, Glycine max
  Clone ID: PAT_MRT3847_42875C.1.pep
QAGGACRGRPGLTDATHACEFLTNRIDRKAKLELANTQEFSGGKESVNSWLPICVRCLKAVRNTL

SEQ ID NO: 222421 - protein, 124 aa, Glycine max
  Clone ID: PAT_MRT3847_42876C.1.pep
DTFSLTGFFSTTESARVQVIRLFPLQGKQNTTHSRSHATHSNGIASAHHRGHHAKYISSLSRIYFYPIFGTAYLTIYWTTACYNHFNFIIYRLIILYTALYFLNFTKIMRSNTYKFALDLMEDD

SEQ ID NO: 222422 - protein, 200 aa, Glycine max
  Clone ID: PAT_MRT3847_42877C.1.pep
HASAEEKLLQKVVFTWMEGGSSANTVENCLDHSQVRCSLNPLTHQNGKIKCACESTATGKRKYSGSIIDVSDTMRTHPIDEILLWHNAIKKELNEIAAQTRKIQLSGDFTNLSAFNERLQFIAEVCIFHSIAEDKVIFPAVDGKFSFFQEHAEEESQFNEFRSLIESIQSEGATSSSETEFYSTFVFTCLIIYLETIQRH

SEQ ID NO: 222423 - protein, 124 aa, Glycine max
  unsure (1)..(124): unsure at all Xaa locations
  Clone ID: PAT_MRT3847_42878C.1.pep
ALVNTPSRTDYVEAVRKTGLLSNCLSETILIPTVPLLDSLTRDXTPNIYHTGDXLSLAITDQKKVCDXSLDLTPFKGRFLDPTRLRWLKRCNCIHSNAGAYSPKXHVTISSKCTVFPYQVDARS

SEQ ID NO: 222424 - protein, 49 aa, Glycine max
  Clone ID: PAT_MRT3847_42879C.1.pep
CIHVLDLWRCPSEVLSAMGMHAHYSPDERGCLACRITLTRDCWKHLISN

SEQ ID NO: 222425 - protein, 76 aa, Glycine max
  Clone ID: PAT_MRT3847_4287C.1.pep
LRVPLLVYLLNTLLYDIGLGVRLKLILTLSQSSAQFQVQAGEIADENSHSHIRYRIWWRDSWIDFLTFTLSFTLIR

SEQ ID NO: 222426 - protein, 63 aa, Glycine max
  Clone ID: PAT_MRT3847_42880C.1.pep
LNDKNTLPNKTFLTFTRIREGEKTNETPEFLATLTSRDDILTDLLAPIQTLFSYRKTNFTKLA

SEQ ID NO: 222427 - protein, 66 aa, Glycine max
  Clone ID: PAT_MRT3847_42881C.1.pep
DVMLEPISIASSELALRATCTQMNLTVQFMHWQQVAEHAPRPHKSLCQFTVSAGVSKHRHLYYGMT

SEQ ID NO: 222428 - protein, 96 aa, Glycine max
  Clone ID: PAT_MRT3847_42882C.1.pep
SNVHSITPSLGIYAFVLHSILPVLRFTPLGEEPILFWSASSKISYLYAHLNLSVCGLQDSTHYLNPQNVHIPWFYKPELSFIENSAHKVKQKLLRA

SEQ ID NO: 222429 - protein, 39 aa, Glycine max
  Clone ID: PAT_MRT3847_42883C.1.pep
MSVIDILTRVDSICKKYDKYDVEKQRDSNLSADDAFAKL

SEQ ID NO: 222430 - protein, 58 aa, Glycine max
  unsure (1)..(58): unsure at all Xaa locations
  Clone ID: PAT_MRT3847_42884C.1.pep
SPASFLNHSCRAXEEASLAQKNALTPYAXKTLCYLCAWRICTTLLVYAGNSPALNIRL

SEQ ID NO: 222431 - protein, 86 aa, Glycine max
  Clone ID: PAT_MRT3847_42885C.1.pep
CRSCMSPRYSCFYSSSSIISWRLPPLVVSFWPLAYSQLEPCLSSVDLLWNAGLFFAGMLCAFRPLKNTNKKKKGAARDLELAGRVG

SEQ ID NO: 222432 - protein, 93 aa, Glycine max
  Clone ID: PAT_MRT3847_42886C.1.pep
CIHKHMSTLANMVVSLRKRERRDDVSEPIAAQMTTTKKPTPWLCANRGTLKEHTDCTSATAPAVRTAAYYLPLSDYVGFSSNEFTCTVGEVMV

SEQ ID NO: 222433 - protein, 179 aa, Glycine max
  Clone ID: PAT_MRT3847_42887C.1.pep
PRAASCRIRHEAIILTAAQTLGEIATHLMRQSSDGILKWQRKTSLKAMKSCHYKSDEKLEETSSRPISMIGSDMVARSVEQIMPSKKPRLSIVENKNSGHSNIAKKGHIVWPISKSSRSFPSKQIRDSFVENKRTNASILKQHYMMPPPARDLDKAHDGQKQVGKVVAMDWKRGRDNTD

SEQ ID NO: 222434 - protein, 87 aa, Glycine max
  unsure (1)..(87): unsure at all Xaa locations
  Clone ID: PAT_MRT3847_42888C.1.pep
PLACGXISGLDLPLLGYYRHYILSIQSIMCYGGGYTGIVSPLGSKLVSQYYSVAPGGISCHPSFPYSRLLGPVLNQDLAQAAGELIA

SEQ ID NO: 222435 - protein, 193 aa, Glycine max
  unsure (1)..(193): unsure at all Xaa locations
  Clone ID: PAT_MRT3847_42889C.1.pep
QQEIFGLKGGRVGGRVGGRVGVCKSKGRKKKKKEDGEVEEKEETGCWFTLRFIGSCISSRSKVDSSVSGTSTNYAESKSTIDTSRDQPTVPVVSSTTTSNAESNSSTSKLEEEFKVSSRLRKFTFNDLKLATRNFRPESLLGEGGSGCVFKGWIEKNGTAPVKPGTVLTVAVKTLTXDGLQGHKEWLAEVNFL

SEQ ID NO: 222436 - protein, 122 aa, Glycine max
  unsure (1)..(122): unsure at all Xaa locations
  Clone ID: PAT_MRT3847_4288C.1.pep
ELXGIPPGPAGNXRHRGVXXGGGHRXGGGLQRXXLISLGQSTPLAQQIXPVQSXXLPCGGATXLLTYLHTXNHAVWPPFRTSAHFHPPPTYHFDEGRVFLATTSTEEEKTRKGMEFKFSLAE

SEQ ID NO: 222437 - protein, 80 aa, Glycine max
  unsure (1)..(80): unsure at all Xaa locations
  Clone ID: PAT_MRT3847_42890C.1.pep
MIRVYNHFQTKLDARCSEYEHFWIHNQLMKHSTVYRTHEQVVAXTLHHLXTLQTIDANEKSPYEIYVSLKPLDDCNELLA

SEQ ID NO: 222438 - protein, 127 aa, Glycine max
  Clone ID: PAT_MRT3847_42891C.1.pep
QGLGQCSSIILERFPAISTEVSSLTCILAPQQHLIHFPHMGHRLQDLHMEVHLLTRRIQEDMPLSVQDNSNCYVDSACPPDCLYINVVKGNKASLPLTAKICIYVYLFMYLIFIILFNYVREWKVIK

SEQ ID NO: 222439 - protein, 94 aa, Glycine max
  unsure (1)..(94): unsure at all Xaa locations
  Clone ID: PAT_MRT3847_42892C.1.pep
GIKKHXXGGEGGGHADDGKNMITGAAQMDGAMLVVSGADGAMPQTKEHXLGAKQVGGPNIGXVRNKQDQDDDEEPGQRGEREGRDRGNWDEWPG

SEQ ID NO: 222440 - protein, 63 aa, Glycine max
  Clone ID: PAT_MRT3847_42893C.1.pep
NTNQREKKHQNRKLYVLVKIELARGMDIYSIMVNTTTQDTKQKEQEMRLETSKAQPMPLPYIL

SEQ ID NO: 222441 - protein, 52 aa, Glycine max
  unsure (1)..(52): unsure at all Xaa locations
  Clone ID: PAT_MRT3847_42894C.1.pep
XXXXXVVEVSVXHCXHXRSPXXXSPXEXXPCRXXXLXXLRSRXPSXXTXACN

SEQ ID NO: 222442 - protein, 54 aa, Glycine max
  Clone ID: PAT_MRT3847_42895C.1.pep
APFSGDETEPLFGFLGAAAALDFYCLGAAYGTPKSGAAVPSLVVMRPEVLMNRI

SEQ ID NO: 222443 - protein, 97 aa, Glycine max
  Clone ID: PAT_MRT3847_42896C.1.pep
ELFSLSLERRTLNHEAFMQCDQMHYHIQYSSPDACEIYNVTHQEFILESRWLSMTSLPTVMSLLRLLLRKSDSHAIFKSEIISLLGMLMFINHIQCM

SEQ ID NO: 222444 - protein, 93 aa, Glycine max
  unsure (1)..(93): unsure at all Xaa locations
  Clone ID: PAT_MRT3847_42897C.1.pep
TKGSTLPPWREDFGGENKILVKTFMGKTITPEGEKFYPLVIFKANIXGKRGIPPAHQSLIFVGKQLKNERTPPDISNQKRSTLPLVPGFRGGI

SEQ ID NO: 222445 - protein, 237 aa, Glycine max
  Clone ID: PAT_MRT3847_42898C.1.pep
SSRLERLEHIKQAAALVVKLEGNSVFSSGNIGGAASKYSEALALCPMRSRKERVVLYSNRAQCHLLLQQPLAAISDATRALCLHRPVNRHAKSLWRRAQAYDMLGLAKESLLDAILFINECSQSNDPDLSLRQNKVPDYAERLVKKQMRSAWLFREAAIKHGGVHSQGDGGDMYGPETDDSEWETASESDIGNDGRDDMGEDDDGDWNNDDERKNYDKPSMKDIKHGYNVQLAEEEP

SEQ ID NO: 222446 - protein, 73 aa, Glycine max
  Clone ID: PAT_MRT3847_42899C.1.pep
VLEGTEKKSLYKITPSEESCRSVWNLCDRCWFDCVDLGVNSLIYAHGRKRRLQFWGYSDRGRSSISLSYGTKE

SEQ ID NO: 222447 - protein, 41 aa, Glycine max
  Clone ID: PAT_MRT3847_4289C.1.pep
VQTKMIFDLKTEFKMDPKNSICFFFLQNMDIDFQSNSFNRV

SEQ ID NO: 222448 - protein, 152 aa, Glycine max
  unsure (1)..(152): unsure at all Xaa locations
  Clone ID: PAT_MRT3847_428C.1.pep
LLVKLYRFLVRRTGSNFNAVILKRLFMSKVNKPPISLXKEDKIAVIVGTVTDDIRVYEVPALKITALKFTERARARIEKAGGECLTFDELALRAPLGQNTVLLRGPKNAREAVKHFGPAPGVPHSHTKPYVRAKGRKFERARGRRNSRGFRV

SEQ ID NO: 222449 - protein, 88 aa, Glycine max
  Clone ID: PAT_MRT3847_42900C.1.pep
NFQVVLNFWSKRFFTFFCSFSFFLCFFFLISFSLSGLSEQVKFWRELKRNLYTRLHLQKSLAEVCGIFVTGHDLCILSSIQSLMLMLV

SEQ ID NO: 222450 - protein, 79 aa, Glycine max
  unsure (1)..(79): unsure at all Xaa locations
  Clone ID: PAT_MRT3847_42901C.1.pep
XXXXXXXXXXVXXXTXXSXLXXVXMSXDXNXXVXPXXTYXEXXXXEVXXXXXXXDSQSXXXXXXIQXRAEFRAYVRVXR

SEQ ID NO: 222451 - protein, 38 aa, Glycine max
  Clone ID: PAT_MRT3847_42902C.1.pep
TKKTGRANLLIISRTAPHQIDIILNPTFPHYKRVRLFL

SEQ ID NO: 222452 - protein, 53 aa, Glycine max
  Clone ID: PAT_MRT3847_42903C.1.pep
SNALLLQGQITLHWRYRFSNLNTCYFHGTGNVIIKHDADTDERPREATGDFNS

SEQ ID NO: 222453 - protein, 86 aa, Glycine max
  Clone ID: PAT_MRT3847_42904C.1.pep
HRHTPTGYSKANYSTALDTEFVSVVKMRTLNTCDLLRRTSIELVFQIHTVQLNCSKLIQINAKGINTYIGVMNINRHLWNDVGKHL

SEQ ID NO: 222454 - protein, 92 aa, Glycine max
  Clone ID: PAT_MRT3847_42905C.1.pep
LRCFLLFFFFLVFLLFFFFVVVFWSFHGACFFLCFFFFRKKKNARRRSTRLFSGGAQLSATWGSSEATSTPCILCSAGRLKKAAMTFCGGAT

SEQ ID NO: 222455 - protein, 110 aa, Glycine max
  unsure (1)..(110): unsure at all Xaa locations
  Clone ID: PAT_MRT3847_42906C.1.pep
MDLQQFLMCLSLCTAXALSKPTEKKDRVHHEPQLSDKVHNDAQSFDYDHDAFLGAEEAKTFDQLTPEESKERLGMIVDKIDADKDGFVTEGELKSWIKHAQKKYIYDNVE

SEQ ID NO: 222456 - protein, 175 aa, Glycine max
  Clone ID: PAT_MRT3847_42907C.1.pep
MMSSRTSFSVVHGEPELVVPAGPTPRELKNLSDIDDQEGLRFQHQVIMFYQKSHVMEGKHPATVIKYGLAEALVHYYPLAGRLREWPNRKLTVDCSGEGILFVEAEAHVSLKELGNSILPPCPHMKELLLDVPGSQGILGCPLLLFQVTRLTCGGFAFAARMNHTICDSLGLVQF

SEQ ID NO: 222457 - protein, 30 aa, Glycine max
  unsure (1)..(30): unsure at all Xaa locations
  Clone ID: PAT_MRT3847_42908C.1.pep
GRLLKAXQLLSSSLGIIGCNISSYVKGIKG

SEQ ID NO: 222458 - protein, 70 aa, Glycine max
  unsure (1)..(70): unsure at all Xaa locations
  Clone ID: PAT_MRT3847_42909C.1.pep
PMLRLXXFEPXGSLPRPFSXHXSPTTRPTLYXXVVRTCVYYSCQXXXXXXXTSALLAIKTMXPIVGYLVA

SEQ ID NO: 222459 - protein, 146 aa, Glycine max
  Clone ID: PAT_MRT3847_4290C.1.pep
MRISSSRIQNEDSTSNYSSMLKASADISVSHPHNFSKTLNTTKGTVDNAYTILLPETNSEEKVSFPSKIKHYVRMISSHLNFKSMFAPSTLGAIAGFIIGVVPQILNFMISNNAPLHVVEDSASMLSEAAIPTVTLIMGANLLKGL

SEQ ID NO: 222460 - protein, 323 aa, Glycine max
  unsure (1)..(323): unsure at all Xaa locations
  Clone ID: PAT_MRT3847_42910C.1.pep
MAKQRQEDGKKGVVDLMPLFAKELLAGGVAGGFAKTVVAPLERVKILFQTRRTEFQSTGLIGSAVRIAKTEGLLGFYRGNGASVARIIPYAAIHYMSYEEYRRWIIXPFPHVWKGPTLDLVAGSLSGGTAVLFTYPLDLTRTKLAYQIVSPKKLNASGMVNNEQVYRGILDCLAKTYKEGGIRGLYRGVAPTLVGIFPYAGLKFYFYEEMKRHVPEEYNKSIMAKLTCGSVAGLLGQTITYPLEVVRRQMQVQKLLPSDNAELKGTLKSVVFIAQKQGWKQLFSGLSINYIKVVPSVAIGFTVYDSMKSYLRVPSRDEAAVEN

SEQ ID NO: 222461 - protein, 54 aa, Glycine max
  Clone ID: PAT_MRT3847_42911C.1.pep
PLVARCNCYSIDIDMSTEHIFPRKDMFDLHKTLPISERMNGGVESDNLKNYQRS

SEQ ID NO: 222462 - protein, 109 aa, Glycine max
  Clone ID: PAT_MRT3847_42912C.1.pep
GGSYQFQRHCVSPKRCIGITCQCAARDIFDPSFFHSYQDGPSSTAGKTGSFSIDALAKAKKALQMQKELSEKLKKIPQLNKSSTQTLQGSSNLGSKTESTMPSSMLEWH

SEQ ID NO: 222463 - protein, 85 aa, Glycine max
  Clone ID: PAT_MRT3847_42913C.1.pep
VSPLYDGFHEVPQQWFPVPQASRGKTEIIMNYELLYKFDYMSPDFNKTKPTRPHSQILTQVFMYIAKCLGQDQMFQGKVDHSLLW

SEQ ID NO: 222464 - protein, 50 aa, Glycine max
  unsure (1)..(50): unsure at all Xaa locations
  Clone ID: PAT_MRT3847_42914C.1.pep
KRFXELKVETSSIFTMAEKLXLREFLXEDQEPFXLKXYIXERRSQXXRVT

SEQ ID NO: 222465 - protein, 105 aa, Glycine max
  Clone ID: PAT_MRT3847_42915C.1.pep
CFNQGQLFYVRGDKIGVFRPPLCVCLEKMGGGIFFCCSERFNFFFFICKFFVSVCKLGVKYPLNLPLRFLGKDLLAWLILILSQLGAFFINHVCFAYENLRQFVF

SEQ ID NO: 222466 - protein, 109 aa, Glycine max
  Clone ID: PAT_MRT3847_42916C.1.pep
MMRLHKLYHRFTLVPLSLPSNPSLLPLAPPLRLTLRHRTCVNFASMASSRLRNLSPLAAAPTEDADAASISCSPNAVASVDYDDESTVGVKDRVPPSVISDLVDAPPVP

SEQ ID NO: 222467 - protein, 54 aa, Glycine max
  Clone ID: PAT_MRT3847_42917C.1.pep
TADQYDALYVFQRSVMNIMARCSTTRCQASLCNRQSPNASSCTQRSLYHASKFL

SEQ ID NO: 222468 - protein, 210 aa, Glycine max
  Clone ID: PAT_MRT3847_42918C.1.pep
MERDMLDGLLISCVSSCCNLWALIMDAGTGFTAQVYKLSTFFLHKEWIMEQWDKNFYITSIAGSNNGSSLVVMSKGTQYTQQSYKVSESFPFKWINKKWREGFHVTSMATAGSRWGVVMSRNAGFSKQVVELDFLYPSEGIHKRWDKGYRITATAATLDQSALILSIPRRKLSDETQETLRTSQFPGTHVKEKWSKNLYLACLCYGRTVC

SEQ ID NO: 222469 - protein, 129 aa, Glycine max
  Clone ID: PAT_MRT3847_42919C.1.pep
RRRAPIARKSSEPPSLAGRYVKTRAAVAREAAAAAERPRTRLAAKKEEKPLTVISDHAKKDAAAMADESGGLSANKGVAQEDDTNAAPFPERVFVGRRVIGGNDRSTGAGATKVDLLKHGISDPSLMTS

SEQ ID NO: 222470 - protein, 367 aa, Glycine max
  Clone ID: PAT_MRT3847_4291C.1.pep
MEYGRLGPSDPGGSSRLNNVPPTSSGRKKIVLLSLFSVLLIAASAVTAVVVRSRIQQNTRAHETRLGKPTQAISRTCSKTRFKTLCVKSLLDFPGSEEASEKDLVHISFNVTLQHFSKALYSSAAMSYTAMDPRVRAAYDDCLELLDDSVDALARSLNTVSVGAVGSANDDVLTWLSAALTNQDTCAEGVTDAVGTVKDHMSSNLRDLSELVSNCLAIFSGAGAGDDFAGVPIQNRRRLMEMREDNFPTWLSGRDRKLLSLPLSQIQADIVVSKDGNGTVKTIAEAIKKVPEYSSRRIIIYIRAGRYEEDNLKLGRKKTNVMFIGDGKGKTVITGGRNYYQNLTTFHTASFGKFFLFVLSLMFITVL

SEQ ID NO: 222471 - protein, 137 aa, Glycine max
  unsure (1)..(137): unsure at all Xaa locations
  Clone ID: PAT_MRT3847_42920C.1.pep
MPELRSGVRRGRGRGQKASEPARKEVKARAAPRGRPRTRLAAKELELQEPLIPIPPTPIPEPLIPILEPAKEEKKEVGVGVNMGDESGGLSGNKPEEDATTPPFPDRGQVGGSPMYKVERKLXKGGICQVFVGRRER

SEQ ID NO: 222472 - protein, 150 aa, Glycine max
  Clone ID: PAT_MRT3847_42921C.1.pep
MDPAELKRVFQLFDRNGDGRISLKELSDSLENLGILIPDKDLAQMIERIDMNGDGCIDVDEFGDLYESIMEEPDEEEDMREAFNVFDQNRDGFITVEELGTVLASLGLKQGRTLDECKKMIMKVDVDGDGMVNYKEFRQMMKGGGFTVLN

SEQ ID NO: 222473 - protein, 673 aa, Glycine max
  unsure (1)..(673): unsure at all Xaa locations
  Clone ID: PAT_MRT3847_42922C.1.pep
MSELRSGPRRRRAPIARKSSEPPSPAGRYVKTRAAVAREAAAAAERPRTRLAAKKEEKPLKVISDHTKKDDAAMADESGGLSANKGVAQEDDTNAAPFPERVQVGGSPVYKVERKLGKGGFGQVFVGRRVXGGNDRSTGAGATXVAXLKFEHRNSKGCNYGPLYEWQVFFTLGGSHGIPKVHYKGRQGEYYVMVMDMLGPSLWDVWNSSSQTMTAEMVACIAVESLSILEKMHARGYVHGDVKPENFLLGQPFTPQEKKLFLVDLGLATKWRDTSSGQHVEYDQRPDMFRGTVRYASVHAHLGRTASRRDDLESLAYTLIFLHKGRLPWQGYQGDHKSFLVCKKKMGTSPEMLCCFCPAPFRQFLEIVVNMKFDEEPNYSRLISLFDGMLGPNPALRPINTEGAQKVGQKRGRLNIEEEDDSQPKKKVRLGVPATQWISVYNARLPMKQRYHYNVADARLAQHVERGIADGLLISCVASCSNLWALIMDAGTGFSSQVYKLSPFFLHKEWIMEQWEKNYYITSIAGANNGSSLVVMSKGTQYTQQSYKVSDSFPFKWINKKWREGFHVTSMATAGSRWGVVMSRNAGFSDQVVELDFLYPSEGIHRRWDNGYRITATAATWDQSALILSIPRRRPGDETQETVRTCEFASTHVKEKWGKNLYLAGWSYGRTGC

SEQ ID NO: 222474 - protein, 74 aa, Glycine max
  unsure (1)..(74): unsure at all Xaa locations
  Clone ID: PAT_MRT3847_42923C.1.pep
MPNPKVFFDMTIGGQSAGRIVMELYADVTPRTADXFCXXCXGDNXVXRXXXPLHXKGSXFXRVIPSFMCQGATS

SEQ ID NO: 222475 - protein, 84 aa, Glycine max
  Clone ID: PAT_MRT3847_42924C.1.pep
KAKNQAWGTLMKNFQRVAPRRLFFLFTPQKMFFSFFSPLPFFFVPFIDQVLFGLKENFLKGLGFFRWIKKFFLSPYRGSTLFCK

SEQ ID NO: 222476 - protein, 657 aa, Glycine max
  Clone ID: PAT_MRT3847_42925C.1.pep
SRYWSRRKKEVKARAAPRGRPRTRLAAKELELQEPLIPIPPTPIPEPLIPILEPAKEEKKEVGVRPRTRGESGGLSGNKPEEDATTPPFPDRVQVGGSPMYKVERKLGKGGFGQVFVGRRERATGAGAMEVALKFEHRNSKGCNYGPPYEWQVYNTLGGSYGIPKVHYKGRQGEYYVMVMDILREPIGSSWNTSSQMMSSEMVSCIAVESLSILEKMHSKGYVHGDVKPENFLLGQPATAQEKKLFLVDLGLATKWRDTSSGQHVDYDQRPDMFRGTVRYASVHAHLGRTASRRDDLESLAYTLVFLHKGRLPWQGYQGDSKSFLVCKKKMGTSPETLCCLCPPPFRHFLEIVVNMKFDEEPNYSKLISLFDGTIGPNPALRPINTEGAQKVGQKRGRLNVEDDESQPRKKVRLGVPATQWISIYNARLPMKQRYHYNVSDARLEQHVERGVADGLLISCVSSCCNLWALIMDAGTGFTAQVYKLSTFFLHKEWIMEQWDKNFYITSIAGSNNGSSLVVMSKGTQYTQQSYKVSESFPFKWINKKWREGFHVTSMATAGSRWGVVMSRNAGFSKQVVELDFLYPSEGIHKRWDKGYRITATAATLDQSALILSIPRRKLSDETQETLRTSQFPSTHVKDKWSKNLYLACLCYGRTVC

SEQ ID NO: 222477 - protein, 178 aa, Glycine max
  Clone ID: PAT_MRT3847_42926C.1.pep
IGRRSFPDNDLGAANRLHGFGECRSFVVDRDDVVLRLLVKAPNHRLWRGDTSRPALQSPGRQRRRRRGQELVWRPKKEEKPLTVISDHAKKDAAAMADESGGLSANKGVAQEDDTNAAPFPERVFVGRRVIGGNDRSTGAGATKAREAAMTVQRKMVDSQCKKSKGFSWCLDNHFGIS

SEQ ID NO: 222478 - protein, 39 aa, Glycine max
  Clone ID: PAT_MRT3847_42927C.1.pep
IIRLHFLITKFFKNRTPRKIASLWIHHLQGKAQRHAKPR

SEQ ID NO: 222479 - protein, 94 aa, Glycine max
  Clone ID: PAT_MRT3847_42928C.1.pep
IKIIITQVYHTSDHVKCIHKICRNVSSFIEKRALPINKPRSLPTFALLTLRIYHLSLNCHSSLTSLVCTNTGVAMYSSCSRSLSFLSPELELCG

SEQ ID NO: 222480 - protein, 58 aa, Glycine max
  Clone ID: PAT_MRT3847_42929C.1.pep
LVCRVIAGRVKKNAQGGMEEYDSVVVAGAVVAYSNLDELLVFNPKAILPCFVVIYRGF

SEQ ID NO: 222481 - protein, 57 aa, Glycine max
  unsure (1)..(57): unsure at all Xaa locations
  Clone ID: PAT_MRT3847_4292C.1.pep
TDIRFLDVFFLTLRIETVGGVMTKSLRTNTAILTKRCQVXTTYHDQQTTFSIHALEG

SEQ ID NO: 222482 - protein, 47 aa, Glycine max
  Clone ID: PAT_MRT3847_42930C.1.pep
GGAPLKFGWTPPPPFLHYFKSLKERIENPKWNSGQDRRLDGGALIRP

SEQ ID NO: 222483 - protein, 85 aa, Glycine max
  Clone ID: PAT_MRT3847_42931C.1.pep
TVSWQLIHHAMRHYQSKQKHAATPRKQLRFRTWKYRREFLNKRRQAIKRQAACKGLQARKQCRKIGWSAGVLETVNQRWLLKRKG

SEQ ID NO: 222484 - protein, 146 aa, Glycine max
  Clone ID: PAT_MRT3847_42932C.1.pep
HINCPFREPLESSPCRWLSSCLSGLDLWMANAEPFTKYIHMQLSHTCINAPGEMTEVLNLILRANNSLLLFGAIHTEDEMWAALLLAKHLQWPVVADILSGLRLRKLLTSFPDIERNFIFVDNLDHALLSDSVKGWLEVDVVIQVL

SEQ ID NO: 222485 - protein, 335 aa, Glycine max
  Clone ID: PAT_MRT3847_42933C.1.pep
PRRKIIAASPDVLLEDVAFMGKFPLTESPPKNISLEVVVEPQQQNPKRKNDSEKLNHKTECSAENAVAKRTSFSSPKNGSHLANHTPFSGTPHQANVASDNKTSPWCFNQTPGHQWLIPVMSPSEWLYYKPYPQPGFMRTMHGGWHKPLVLAPLSATFMNPVYQFPATHALVRVSPFVPELSHTYFALFGMRVVNQATSGSAVEQVNQFAAQGSHGQNGHSSVEGADFNTHHNQSSSNLPVQKNGARLHVKKSQALKERGLQGSTRSSPSEMAQGIRAGKIADGSDAQSLSLHAVETRQQTQAIKVVPHNRKSATESAARIFQSIQEERKQHDLV

SEQ ID NO: 222486 - protein, 99 aa, Glycine max
  Clone ID: PAT_MRT3847_42934C.1.pep
KTDLERSSRPLYPMMLHSPELLWSDIRNMYSIISIQLLATILCGTDPFTARPISVFFATTGAGLALYIILILAPFITLCPLYYYSQKHTVNYLLLEYFT

SEQ ID NO: 222487 - protein, 140 aa, Glycine max
  Clone ID: PAT_MRT3847_42935C.1.pep
KRWSLGPFESEDTKRWLEFEFKRWSLGSFESEDTKRFQQRLKTSSLVGRPSPTESIQRWPRLLAGTCGLLHGGGYAISICTLFLWFLFHFLPSLIFVRSGCRCKVSTNNALIIVLPHIHKLMMIHNMLIWPWRMFPNKFI

SEQ ID NO: 222488 - protein, 42 aa, Glycine max
  Clone ID: PAT_MRT3847_42936C.1.pep
LNLGDIVEELRGRMHGYVGMDPVERPLLYLTAVPLFALNVVV

SEQ ID NO: 222489 - protein, 64 aa, Glycine max
  Clone ID: PAT_MRT3847_42937C.1.pep
ALVTFWDPENVEASAADMSNSDNDCYIRGSSCQCCSKESLMSDCVFIVNVLPGKNKLKKKKKKK

SEQ ID NO: 222490 - protein, 32 aa, Glycine max
  Clone ID: PAT_MRT3847_42938C.1.pep
ARLVKKPGFDKLADQISGSSFKRVTFIPYKNH

SEQ ID NO: 222491 - protein, 53 aa, Glycine max
  unsure (1)..(53): unsure at all Xaa locations
  Clone ID: PAT_MRT3847_42939C.1.pep
MAQETFLFTSESVNEGHPDKHXDQNIEAAHEAVLEQDPXSKAVRVTSTKTNQV

SEQ ID NO: 222492 - protein, 581 aa, Glycine max
  unsure (1)..(581): unsure at all Xaa locations
  Clone ID: PAT_MRT3847_4293C.1.pep
MEYGRLGPSDPGGSSRLNPPRSSGRKNIVFLSLFAVLLIAASAVTAVAVRSRTKNTGGDGTSLGKFTQAISRTCSKTRFKMLCMKSLLDFPGSQGASEKDLVHISFNVTLQHFSKALYSSATISYTAMDPRVRAAYHDCLELLDDSVDALARSLNTVSVGAVGYANDDVLTWLSAALTNQDTCADGFADAGSTVTYLGRPYLLYARELYMLCFAIFSGDPAGEDXGGISIQNRRRLMDMREDNFPTWLNGRDRRLLSLPLSQIQADIVVSKDGNGTVKTIAEAIKKVPEYSSRRIIIYIRAGRYEEDNLKLGRKKTNVMFIGDGKGKTVITGGRNYYQNLTTFHTASFAASGSGFIAKDMTFENYAGPGRHQAVALRVGADHAVVYRCNIIGYQDTMYVHSNRQFYRECDIYGTVDFIFGNAAVVFQNCTLWARKPMAQQKNTITAQNRKDPNQNTGISIHNCRIMATPDLEASKGSYPTYLGRPWKLYARTVFMLSYIGDHVHPRGWLEWNTSSFALDTCYYGEYMNYGPGSALGQRVNWAGYRAINSTVEASRFTVGQFISGSSWLPSTGVAFIAGLST

SEQ ID NO: 222493 - protein, 50 aa, Glycine max
  unsure (1)..(50): unsure at all Xaa locations
  Clone ID: PAT_MRT3847_42940C.1.pep
GFGRYAGGGRPIYFWVVLVFLVGGGPPFFPLFFPFFFFXIVNTQSYRIIP

SEQ ID NO: 222494 - protein, 720 aa, Glycine max
  Clone ID: PAT_MRT3847_42941C.1.pep
MIEDNDARALMAATALNSCKETLAKLQETQAQSSEEAKESYQRVKEARDMFETIRGQFISKLNSQEDQGTEPKSIEEEDMSSLEEERHEPDVELLRDTIKEKLEKDSGSSLSMTEMTEKIDELVNKVITLEIAVSSQTGLVKRLRSEADKLQKNILSLEEDKEVLTEDSEGTKKKLEEVEEELRRVKILYQSANRQDNSLQTHFAEASCDLEHLSGKLNDVKLDEEGENLQLHKNKSAHDGEIKVEFEKSGDNTEHMKDVETAKEDCSVNFGDVENEDNKSNSKENIDFRTEEIPEQMLQNKDDLSEARSNLDTESLDQGTGEEENQSNRSQMMASGLDDGEKILTEFTSVLKNYEDVKDELNDVVKKNQDSIFQLALQVRELRDTVETKDQEINILQQMLTCSKTNPDESPSTPLTDYKHTPQEALLGTAAQGTDPQDPENPSSNTNASAVTTSYAGQHQKYVENKARIGILMKVRSNQLDRTHSLSTLEKKFRSNMDDLLEENLEFWLRFSTSVHQVQKFQSSIQDLKFELKTIRDNMSQENSSSIQSEIKPIFRHLREIRTELSLWLEHSEELHEELQCRHPSLCTLQDEIARAANPNSASSNNMAKLSGYQAAKFQGEILNMKQESIKVSSELQACVSFVKELKGEVEKMVEELSQEVGVNNHDHMKHSTSRPRIPLKSFLFGIKLRKQKQTVLSCVTPTKKQHRDLALAEEDAPI

SEQ ID NO: 222495 - protein, 70 aa, Glycine max
  Clone ID: PAT_MRT3847_42942C.1.pep
GGTITQTKRCQTITCLGMSSIMCTWAFYTVLHDGSDALSMTHPWKGDHLDYCWAHYHCSCMSLKNMKYRI

SEQ ID NO: 222496 - protein, 74 aa, Glycine max
  Clone ID: PAT_MRT3847_42943C.1.pep
QHRIWIHFLAAGVGFGASGDCEAKAHASFSKFIYHLIGLVWKKKYIFLFYNSTYTQSNFIVLNFLLYRMYHYRF

SEQ ID NO: 222497 - protein, 140 aa, Glycine max
  unsure (1)..(140): unsure at all Xaa locations
  Clone ID: PAT_MRT3847_42944C.1.pep
YGCEKTTEGVLQKFTSPFLFPISSEPEPVKWIYSTRTVSATASNPPSPRGNASSASHPTRRDSKTLPPTTSFSPTTTTXSKTTSFSPTTLTPPNPLLPLLQSLITTTTTTIATTKALHTVPPTRRSASSPRCRRTTTLLR

SEQ ID NO: 222498 - protein, 72 aa, Glycine max
  Clone ID: PAT_MRT3847_42945C.1.pep
GGPGLPSFPFKLVFYYISPPPRQVCGGFSLEPNPQMGFLEKKNVREPKGGTSPKFLGLRGPKNRGFQRFIIH

SEQ ID NO: 222499 - protein, 39 aa, Glycine max
  Clone ID: PAT_MRT3847_42946C.1.pep
GLRLSSFVRPRCSAHLANSKKPPYIRSFRSKKCRKSLCR

SEQ ID NO: 222500 - protein, 70 aa, Glycine max
  Clone ID: PAT_MRT3847_42947C.1.pep
LEHEIILMKYPGNFNTHLLEPFPSIITWLHVKIPYFNLNKSSDHAHIKHLKLEFTSSFFLQFASHWFNSH

SEQ ID NO: 222501 - protein, 49 aa, Glycine max
  Clone ID: PAT_MRT3847_42948C.1.pep
GDQVGVCKQQATQVAAHDQVVSQWKARTLEDSHSYQDLQVIELRVHGSV

SEQ ID NO: 222502 - protein, 48 aa, Glycine max
  Clone ID: PAT_MRT3847_42949C.1.pep
ILRSKIHQKTSSTTYLFSNLNLNTPPYQTNYLHSPPFKKKLLIFLTQS

SEQ ID NO: 222503 - protein, 109 aa, Glycine max
  Clone ID: PAT_MRT3847_4294C.1.pep
RILLWRHMLLPLLAHDLVRLLRRVRVLRIALEHFVRRREPAPSFLPHRRGNNLLLVQRPMLVSGLYSAYLRFMRNTCLVLQSVNAHEERHKLTDTGWCEDCAEPRKVWT

SEQ ID NO: 222504 - protein, 103 aa, Glycine max
  unsure (1)..(103): unsure at all Xaa locations
  Clone ID: PAT_MRT3847_42950C.1.pep
GVLSGPPPRKNPVGADYPPEKEAPLVRGGSGLVGKNQASRGLGPKNRRPGAKGPRGGALXIGFLGPGGLPSQRPGRPQKGGLFKEIYPFAHWPGGNARGVVFL

SEQ ID NO: 222505 - protein, 292 aa, Glycine max
  Clone ID: PAT_MRT3847_42951C.1.pep
HLKDFEFEELEEVLQHYPQGYHGVDKEGRPVYIERLGKAHPSRLMRITTIDRYLKYHVQEFERALQEKFPACTIAAKRRISSTTTVLDVQGLGMKNFSPTAASLLAAISKIDNSYYPETLHRMYIINAGPGFKRMLWPAAQKFLDAKTIAKIQVLEPKSLCKLLDIIDSSQLPDFLGGTCTCPGEGGCLRSSKGPWNDPDIMKMVHSVEATFERQIARMSNEQQNLDSFWICPQKGQCSDTSTAESGSDLDDSFSSIGQSRFTFPRLAAVHEEVRVSDNYYSCDDSAPAAEK

SEQ ID NO: 222506 - protein, 73 aa, Glycine max
  Clone ID: PAT_MRT3847_42952C.1.pep
LSEFLPEALSCLPCVPWEVPLKEIQSRIDLRNLCIFTIDPSTATDLDDALSIEGVPNGNYRVGGHIADVANLV

SEQ ID NO: 222507 - protein, 55 aa, Glycine max
  Clone ID: PAT_MRT3847_42953C.1.pep
RRLLSSFVFCISQVRTHPMDFYPPLADPSSLTLIYYFHVLFSLHCFIFGCHLKFL

SEQ ID NO: 222508 - protein, 35 aa, Glycine max
  Clone ID: PAT_MRT3847_42954C.1.pep
GGFFFYFFTFFSNIYGIKKYLCGLPIGLGGRSNFT

SEQ ID NO: 222509 - protein, 50 aa, Glycine max
  Clone ID: PAT_MRT3847_42955C.1.pep
ANDLVWMIIIMHQLYSLGRSSDETDYLHSYSLMIAIINIGTVLSLNIAML

SEQ ID NO: 222510 - protein, 34 aa, Glycine max
  unsure (1)..(34): unsure at all Xaa locations
  Clone ID: PAT_MRT3847_42956C.1.pep
YXYPLNHAANFPIERHPQLCKNWNRIVTCLSIKQ

SEQ ID NO: 222511 - protein, 136 aa, Glycine max
  Clone ID: PAT_MRT3847_42957C.1.pep
DSSSAQREHEDDKRGIYYHRARQNKRRSICLTKTAARSMSQDSGPGTDSDHSTDLSSSGAALSTDELSGSTSGRATTRLKLSSAYRQDTTDDNVPISSAGRPATKRAGPLRMTARDKKELKKQAQKAARKQRQQES

SEQ ID NO: 222512 - protein, 46 aa, Glycine max
  Clone ID: PAT_MRT3847_42958C.1.pep
GALEHGNTCSTSPDHVGPLDPDHRDTEHRNIEISEESEKERERLEP

SEQ ID NO: 222513 - protein, 81 aa, Glycine max
  Clone ID: PAT_MRT3847_42959C.1.pep
YKFFCLLPLLLPFPVGTMICYVYPSLLYNSCFCNTTCMKALLYLSFFLLSFCSIGFLVYCIDYVQLAWPGKKKNKKSLLVS

SEQ ID NO: 222514 - protein, 66 aa, Glycine max
  Clone ID: PAT_MRT3847_4295C.1.pep
NRRLQNEVLELRALKLSPQFYMHMTPPITLTMCPSSERVAVSPSSARDLDTHDYYVPSSYPWAFPI

SEQ ID NO: 222515 - protein, 98 aa, Glycine max
  Clone ID: PAT_MRT3847_42960C.1.pep
MTTRDAYQYFVLKAQEMAVSKNWSPVNWEETFNTFPSKLHPNTIVHNWLGPGVCPKVVAKGFRCIYSNQGVWYLDHLDVPWDEVYTTEPLQGIHIASE

SEQ ID NO: 222516 - protein, 94 aa, Glycine max
  unsure (1)..(94): unsure at all Xaa locations
  Clone ID: PAT_MRT3847_42961C.1.pep
RAQFSQGLGEKNKKTAAPVSPLWGIHRNAVVFLLXSQLGRLKEIFLAFYFXWSPEDTEVSVSIDRKNRPPPPPVFLGTDMYARECPPPECVMAV

SEQ ID NO: 222517 - protein, 120 aa, Glycine max
  Clone ID: PAT_MRT3847_42962C.1.pep
MAVHSDSASSEKKSSNGVNELLTFNAENMQSNMKIIYYSRTFLSIIGGVVAGILGFTGLKGFVFYLLLMAFTSLGLVAKAKFSTHTYFDSWNRVLLDGFLGGLMSFVLFWTFAYDIVHIF

SEQ ID NO: 222518 - protein, 369 aa, Glycine max
  Clone ID: PAT_MRT3847_42963C.1.pep
MSFLLPLPTLLLCLFVVLIYSLQSKADEFDFDESLFNAKNASSGRKLAGRCNLFRGKWVYDPSYPLYDPSTCPFIDPQFNCQKYGRPDKQYQKYRWQPFSCPLPRFNAFDFLAKYRGKKIMFVGDSLSLNQFNSLACMIHSWVPNTRTSFIKQDALSKITFEDYGLQLFLYRTAYLVDLDRENVGTVLKIDSIKSGDAWRGMDVLVFNTWHWWTHTGSSQPWDYIQEGNKLYKDMNRLILFYKGLTTWARWVNINVNPAQSKVFFLGISPVHYEGKDWNQPAKSCMSETKPFFGLKYPAGTPMALVIVNKVLSRIKKPVHFLDVTTLSQYRKDAHPEGYSGVMPTDCSHWCLPGLPDTWNVLLHAALFD

SEQ ID NO: 222519 - protein, 53 aa, Glycine max
  Clone ID: PAT_MRT3847_42964C.1.pep
PNSYMLNLTSTIQHNVSRIRLDRTKSIESPFQFASTRFTVKPEYQTTLQTTKG

SEQ ID NO: 222520 - protein, 66 aa, Glycine max
  Clone ID: PAT_MRT3847_42965C.1.pep
METQRHRLVLIPPPFQGHLTPMLQLATILHLKGFSITISHAHFTSPDPSNYPNFSFLPLFYDLSDT

SEQ ID NO: 222521 - protein, 375 aa, Glycine max
  Clone ID: PAT_MRT3847_42966C.1.pep
MGGGFLLPLPTLLLCLFVVLIYYSLQTKAEEFDESLLFNGKNVSSFSSGRKLGAGRCNLFRGKWVYDPSYPLYDPSTCPFIDPQFNCQKYGRPDKQYQKYRWQPFSCPLPRFNAFDFLAKYRGKKIMFVGDSLSLNQFNSLACMIHSWVPNTRTSFIKQDALSKITFEDYGLQLFLYRTAYLVDLDRENVGRVLKIDSIKSGDAWRGMDVLVFNTWHWWTHTGSSQPWDYIQERNKLYKDMNRFILFYKGLTTWARWVNINVNPAQTKVFFLGISPVHYEGKDWNQPAKSCMSETEPFFGLKYPAGTPMAWVIVNKVLSRIKKPVQFLDVTTLSQYRKDAHPEGYSGVMPTDCSHWCLPGLPDTWNVLLHAALFD

SEQ ID NO: 222522 - protein, 228 aa, Glycine max
  Clone ID: PAT_MRT3847_42967C.1.pep
MELKKGKLARFYTDGKKHKQSFWGARATEPPALKPSNLLPLGKNRIAETFRIGGSKVFPEDHEPWRKRILDPGSDIVLKWNRVFIVSCLVALFVDPLYFYLPSVIENTGSTCVRTDLTLRIVVTFLRTIADLFYLLHLIIKFRTAYVAPSSRVFGRGELVMDPKKIARRYIRSDFFIDFIATLPLPQMVIWFIIPATRSPQTDHKNNALALIGLLQYVPRLYLIFPLS

SEQ ID NO: 222523 - protein, 50 aa, Glycine max
  Clone ID: PAT_MRT3847_42968C.1.pep
HLPYDFINSFEWSFCSLPQISHPSFMPAPDLRSDSRSTYSFIFLNLPSYL

SEQ ID NO: 222524 - protein, 56 aa, Glycine max
  Clone ID: PAT_MRT3847_42969C.1.pep
INGLKCSNELGCECIQSTKNNMQRIDKKEKRKGVVFVRKGERRQRNSLNIEIEESV

SEQ ID NO: 222525 - protein, 63 aa, Glycine max
  Clone ID: PAT_MRT3847_4296C.1.pep
TGFCTPASLYAYSLVHNSLAATVAASGWRPPFTHRHLVRNCNVRNYRKPNNLAVCVGVGPTIW

SEQ ID NO: 222526 - protein, 77 aa, Glycine max
  unsure (1)..(77): unsure at all Xaa locations
  Clone ID: PAT_MRT3847_42970C.1.pep
LAFPPPGRGPKNQKNPPPPHKSPAGAKGQPKXPGWPFPGVLFGNPPPPPGDSGAKVKTPPPPQGNGGAGNPGGLGGG

SEQ ID NO: 222527 - protein, 92 aa, Glycine max
  Clone ID: PAT_MRT3847_42971C.1.pep
DWYFLPSTFFFINVFLIYKEFTKKRRDANARGQAILKKYTKNERKQKKTMNMKYVIQHVNLSVYLPKTLPKRTISRTPQIDPKLTQEATINQ

SEQ ID NO: 222528 - protein, 152 aa, Glycine max
  Clone ID: PAT_MRT3847_42972C.1.pep
MEVLQFNSRAKMKTKMNKKCSTRNKEDSMGEELDEEDEEEKKVEETKAEVNIVSKKRARGSALMEGSRCSRVNGRGWRCCQQTLVGYSLCEHHLGKGRLRSMTSPFGDEEKKPEIIMTKKRMKLGMVKARSISSLLGQTNTQIAAVAHENSK

SEQ ID NO: 222529 - protein, 83 aa, Glycine max
  Clone ID: PAT_MRT3847_42973C.1.pep
RGFEDICINKDAFEGDEKFCAIFLGTVIGFVILKLGKNIQVLLSSFVDKQELYSVDGVRILADKTMMCHGLNFRTALFYCHKV

SEQ ID NO: 222530 - protein, 179 aa, Glycine max
  Clone ID: PAT_MRT3847_42974C.1.pep
PPPKKNLKKKKTQKHKKKRKGKKKQKPCNNPKEGEPQKKAPPSPEKKPPGPPPQPKNPNNNTGKKQNQKKAPPRWPRNPPRNPWGGKQIYSGQQNALQLFDKRPPPQQPWFWKDKKQNPLGPPQHPRSFGPPKPQKPPPFGGFRGKGTQFHHQTPQDTKKQGPRGPPLGAPLKLQHPPG

SEQ ID NO: 222531 - protein, 461 aa, Glycine max
  Clone ID: PAT_MRT3847_42975C.1.pep
PFLIPQRFVWPYGGTTVFLTGSFTRWSNHIAMSPMEGCPAVFQVVCNLMPGFHQYKFNVDGEWRHDEQQPFVNGSCGVVNTIYIVREPDILPSILNTETPGRSHMEVDNMEANPRMTVSDLEVSRHRISVFLSTHTSYDLLPESGKVIALDINLPVKQAFHVLYEQGISMAPLWDFCRSQFVGVLSAMDFILILKELGNHSSNLTQEQLETHTIAAWKEGKFQQFRTLDSNGGSYPWRFVHAGPHECLKDVALKVLQNKVSTVPIIHSSSEDGSYPQLLHLASLSGILKGICRHFKHSLSSLPILQLPVASIPLGTWMPRVGEPNGRPLAMLMPSASLGAALSMFVQAEVSSIPIVDANDSLLDIYSRSDITALAKDKAYARISLDEISIHQALLLGQDATSPYGLYNGHRCHMCLRSDSLYKVMERLANPGVRRLVAVEAGSKRVEGIISLSDVFRFLLG

SEQ ID NO: 222532 - protein, 598 aa, Glycine max
  Clone ID: PAT_MRT3847_42976C.1.pep
RTRGLGEGNTAVVKYLDEHLSLIMEESYAHNESARGRTKKPTIFRATEQWFASVEGFRHTAMDAIGHVKWVPPQAANRISSMTSIRSDWCISRQRTWGVPIPVFYHLQSREPLMNEETIDHIKSIIAQKGSDAWWYMTVEDLLPTKYRDKAAEYEKGTDTMDVWFDSGSSWAAVLGKRDSLSYPADLYLEGTDQHRGWFQSSLLTSVATKGKAPYLSVLTHGFVLDEKGLKMSKSLGNVVDPRLVIEGSKNQRESPAYGADVLRLWVSSVDYTSDVMIGPQILRQMSEVYRKLRGTLRYLLANLHDWKTEYTVPYHELPRIDQHALFQLENVVKAIQGNYENYQFFKIFQILQRFVIVDLSNFYFDVAKDRLYVGGSTSYTRKSCQTVLAAHLLSIVRIIAPILPHLAEDVWQNLPFQYITQDGSIAEYVFESRWPISNERRLALPVEEINFWENILELRTEVNRVLEVARTGKLIGASLDARVHIYTSDARLASQLCELSAAKNDADTLRRLLITSQAEILPSLDDEQIVNIPYSGECLIQGKNKIWIGISRAVGSKCERCWNYSEQVGSFLDHPTLCSRCHDVVAVQMPPQVAAVS

SEQ ID NO: 222533 - protein, 128 aa, Glycine max
  Clone ID: PAT_MRT3847_42977C.1.pep
KCGDVNTARLVFDKMPNRDRISWNAMISGYFENGVCLEGLRLFGMMIKYPVDPDLMTMTSVITACELLGDDRLGRQIHGYVLRTEFGRDPSIHNSLIPMYSSVGLIEEAETVFSRTECRDVVSWTAMI

SEQ ID NO: 222534 - protein, 338 aa, Glycine max
  unsure (1)..(338): unsure at all Xaa locations
  Clone ID: PAT_MRT3847_42978C.1.pep
MHLCSFFCRVHSVIDKFAERGLRSLAVAYQEVPDGKKESQGGPWQFIGLLPLFDPPRHDSAETIRRALNLGVNVKMITGDQLAIGKETGRRLGMGTNMYPSSALLGQNKDEAIATLPVDELIEKADGFAGVFPEHKYEIVXKRLQARKHICGMTGDGVNDAPALKKADIGIAVADATDAARSASDIVLTEPGLSVIISAVLTSRAIFQRMKNYTIYAVSITIRIVLGFMLLALIWQFDFPPFMVLIIAILNDGTIMTISKDRVKPSPYPDSWKLAEIFTTGIILGGYLAMMTVIFFWAAYKTDFFPQTFGVSSLQKKDRDDFRKLASAIYLQVSTISQ

SEQ ID NO: 222535 - protein, 121 aa, Glycine max
  Clone ID: PAT_MRT3847_42979C.1.pep
NDHFCESVNSYAKKLVELDHIVKRMVFENYGIETKKFDTLLESTEYVLRAYKYRIPQVGESNLGVAPHSDTAFITILNQKVEGLGVKLKDGKWFEVGASPSLYLVMGGDALMVSHFCSILW

SEQ ID NO: 222536 - protein, 102 aa, Glycine max
  unsure (1)..(102): unsure at all Xaa locations
  Clone ID: PAT_MRT3847_4297C.1.pep
DFVEFDPTVRFFFYNALLGKXAFKTSYSSFDECQRIXDGRKQAILFVFLQSPEDGERLYCEDHLLRIFXYRSIMKLYTCLPDTVNRAIIFATEMLTSVSLIQ

SEQ ID NO: 222537 - protein, 176 aa, Glycine max
  Clone ID: PAT_MRT3847_42980C.1.pep
HYDHYKIYNLCIEESYDPDNFYGRVEAYPFDDNHVPSLEMIKAFCESVDSWLSSDPKNIAVIHCMAGKGRTGLMVSAYLTYCGMSADEALQLYADRRTTNNEGVSIPSQRRYVAYWDSLLSNSVPRGTGNGPTKVNLPQPCGRELRRIRLYDTINIDTIFFVISELHEVSSPQVVI

SEQ ID NO: 222538 - protein, 72 aa, Glycine max
  unsure (1)..(72): unsure at all Xaa locations
  Clone ID: PAT_MRT3847_42981C.1.pep
AEKRLAEYGEDRPSMVDVLWNLEYALQLQETXSSLMEPEDDSTNHITGIELARIEPFDNTVSMMRWRHLFHR

SEQ ID NO: 222539 - protein, 120 aa, Glycine max
  Clone ID: PAT_MRT3847_42982C.1.pep
GAGFSGPFPGSSPWSGGTRGFWVCPPFLPSFTSGGCAPRGGFFFFGGCVFLFGGGLSRAAGGVSAPGPFFWGARLFVAPFLAVRVVRAPPVRFLCAPLSFFFLKIKFLFFFFCSDAWLVP

SEQ ID NO: 222540 - protein, 82 aa, Glycine max
  unsure (1)..(82): unsure at all Xaa locations
  Clone ID: PAT_MRT3847_42983C.1.pep
FGWAKRGKKGVFLKVLRXGSGLNPSLNPPKTPFQDFLGKVQALFKPGAXCPNFTKAFGTCFSKSFLKGLPPDPLKKGPNWPP

SEQ ID NO: 222541 - protein, 50 aa, Glycine max
  Clone ID: PAT_MRT3847_42984C.1.pep
YLFRCHWVPEPNHTLLYNQHCPYHRNPWNCLRTDRLNMTLINLWRWRPRN

SEQ ID NO: 222542 - protein, 58 aa, Glycine max
  Clone ID: PAT_MRT3847_42985C.1.pep
PVGHGDLKNSLIASYARVRLHTITLPFKFHITRSLRALGYVSIFLGLDHKETGSASKW

SEQ ID NO: 222543 - protein, 54 aa, Glycine max
  Clone ID: PAT_MRT3847_42986C.1.pep
SVVFFFFFFFGSKILFYFYVGLLWQGTITLPQSAMLHNKHLMTVLNGGSRKEPG

SEQ ID NO: 222544 - protein, 89 aa, Glycine max
  unsure (1)..(89): unsure at all Xaa locations
  Clone ID: PAT_MRT3847_42987C.1.pep
LCTNLWSAELSKLAANAFLTARISYVNAMSXALYEATGAEVSQVXRHSIGTDSXVGPKFLNARLCYGGSCYQRDIWNLDYFCEINSLTE

SEQ ID NO: 222545 - protein, 60 aa, Glycine max
  Clone ID: PAT_MRT3847_42988C.1.pep
IPHQCSCAFRVVLTTQAPGCRVELYSAGKLNDFLRNVATIFFHTRILFSRKGPLYYCDIL

SEQ ID NO: 222546 - protein, 132 aa, Glycine max
  unsure (1)..(132): unsure at all Xaa locations
  Clone ID: PAT_MRT3847_42989C.1.pep
MGKRQIPDPPNFKKYGVPXYSVAWIPQHVVKSRQIETAGNYLLFAGGGGAGHSGIPNASVIAHFDVASNSLSDQPVCKLGTDSELPYRMALNSNGDGLICAMETPMVCRWFDWDQNKSSEIHKLSLKLSEKV

SEQ ID NO: 222547 - protein, 76 aa, Glycine max
  unsure (1)..(76): unsure at all Xaa locations
  Clone ID: PAT_MRT3847_4298C.1.pep
LAYNLLDRAGSWVPWGGYDDFTASLPEKDCPVALVVSRSSYHEPRKGVLSIRFVRSEFMTENVPPNYYICQWCXCL

SEQ ID NO: 222548 - protein, 111 aa, Glycine max
  Clone ID: PAT_MRT3847_42990C.1.pep
ELSFPSSLPATSTKIIIPIITTSVIPSATTLIVVIIIVTIVTTINVNTSPNITTAIIIASISITAIVAATAIFLYHHFCFYFLCNFSYGNFFFFDRNYKSNKPEMKHRTEQ

SEQ ID NO: 222549 - protein, 400 aa, Glycine max
  Clone ID: PAT_MRT3847_42991C.1.pep
MGKRQIPDPPNFKKYGVPFYSVAWIPQHVVKSRQIETADESSDSDHSTSPATEAEKEPATVAGNYLLFAGGGGAGHSGIPNALVIAHFDVASNSLSDQPVCKLGTDSELPYRMALNSNGDGLICAMETPMVCRWFDWDQNKSSEIHKLSLKLSEKVLSQLEDVGQQLALAFNNDGTALAAGGEDGNLRVFKWPSEEIILNETNAHSSLKDLHFSSDGKLLASLGSGGPCKVWDVSSSMVLSSLSNENRETFSSCRFSQTNDETLILYIAAMTDKGGSILTWNTQTWERMASKHIIRDPISAFNVSADGKFLACGTPSGDIVVVNSTNMQIHTMIKKAHLGIVTALAFSPDSRAVASVSMDSSARVTIIEEKKTNGLSLWIALFIILLAVAAYFLRQEIEK

SEQ ID NO: 222550 - protein, 110 aa, Glycine max
  Clone ID: PAT_MRT3847_42992C.1.pep
GRVGIIRDPISAFNVSADGKFLAGTPSGDIVVVNSTNMQIHTMIKKAHLGIVTALAFSPDSRAVASVSMDSSARVTIIEEKKTNGLSLWIALFIILLAVAAYFLRQEIEK

SEQ ID NO: 222551 - protein, 72 aa, Glycine max
  Clone ID: PAT_MRT3847_42993C.1.pep
KHSVRFNQSRYVHTGRRVNGLMLACNNRVRYFFSDILSKYQKFPKKLAYIAAEREFSKFDNNDLSEFDESIM

SEQ ID NO: 222552 - protein, 86 aa, Glycine max
  Clone ID: PAT_MRT3847_42994C.1.pep
CGPPPLKTNFTGGLKNKLVFFKKHFPFPLKKTNFLKILPSFSFGVFPHLGKTCLQFFPQKPALLFLFGLFPCFFPPGPLKSLNKFG

SEQ ID NO: 222553 - protein, 72 aa, Glycine max
  Clone ID: PAT_MRT3847_42995C.1.pep
AGGFCILPKKTISLNFIQKGLDLFDILKKNWVFGPFPRLIAIDRFRTNSLQLTGTVIFGEGYGCIPETKITI

SEQ ID NO: 222554 - protein, 151 aa, Glycine max
  Clone ID: PAT_MRT3847_42996C.1.pep
NADGPVVTYIVQDQVEVEGNQRDARDYKVCYNEAEMEVLCICGLFNFRGYLCRHALFILSQNGIKEIPAQYILSRWRKDMKRSNVDDHNGGGIHISNPVHRYDHLYRQVVKVVEEGKKSHDHYRTAVHALENILSKLHLVNVEDPNIMYKY

SEQ ID NO: 222555 - protein, 54 aa, Glycine max
  Clone ID: PAT_MRT3847_42997C.1.pep
ACLLYYCFLDVMVLQMAGKVVNIKLHTRRSQRVVEGSRSQCTCECRPGFITNTA

SEQ ID NO: 222556 - protein, 133 aa, Glycine max
  Clone ID: PAT_MRT3847_42998C.1.pep
VSWSRGNNSFVVWDPQAFSITLLPRYFKHNNFSSFVRQLNTYGFRKVDPDKWEFANEGFLRGQKHLLKNIRRKKTLTNQQQALPIDHCVEVGRFGSLDGEVDALRRDKQVLMVELVKLRQQQQNTRSFLHSLC

SEQ ID NO: 222557 - protein, 315 aa, Glycine max
  Clone ID: PAT_MRT3847_42999C.1.pep
VDAMVKMRFFDYNTRSWWTPVGGGANVPALNDLLAPFGIAFGDKILDGDFSLLGEQNRYASGTDIVRFPRGGYVHSFPFLDSSESGATQNVLQASGSTKADSPILGLTVMGEGRIAVYGDSNCLDSSHMVTNCFALLRKLLDFTNEDVRDPELFSDSNKQDSPLYEPDNQLPSRRTDVNFSAFSAIVGKELICRTDTRFEIWGTKGYNLQVRGRNRRLPGYPAIDLGRGLNSTSDASNIRRPRLTVRSNKDDFLGNRYLGLFYGDEPDAPMLVGGHWLIPFVVAVTGILLLSFWRIRQKRRRRRKGSNSGRLANI

SEQ ID NO: 222558 - protein, 111 aa, Glycine max
  Clone ID: PAT_MRT3847_4299C.1.pep
MHCFSYDCVYLRCIQCWCPVKTLYVQYSPGNIRLMKCENCKAVADEYIECEIMILVIDLILHKPKAYRHLLHNVINQETMKFHGLLWKLAVIFLLFESCMHSFGRYPFLML

SEQ ID NO: 222559 - protein, 209 aa, Glycine max
  unsure (1)..(209): unsure at all Xaa locations
  Clone ID: PAT_MRT3847_429C.1.pep
MNMEGGVLLVRKAEIDTRAPFRSVKEAVSLFGEKVLAGEVYASANKLKKIQSGANENGVDFWRIENVEAELEETRENLQRAKEESMVMAHCLSSLQEELERTKQELQQLKQRETEKHPVESEIEDVKFVENLTTFGVQSSRFDQENMEFQKKRYVTFANPPSVSHHVMLPQHXVEKLERHPSLRKKNKKSFIPLIGGIFSRKKGSQEIP

SEQ ID NO: 222560 - protein, 62 aa, Glycine max
  unsure (1)..(62): unsure at all Xaa locations
  Clone ID: PAT_MRT3847_42C.1.pep
SLYTYINYTAADHTLTLQHIKHCSLHMVNKLFNNHKQSXSKLNNTFLSLLYPIENYKLYVYL

SEQ ID NO: 222561 - protein, 128 aa, Glycine max
  unsure (1)..(128): unsure at all Xaa locations
  Clone ID: PAT_MRT3847_43000C.1.pep
MFSHQLVTQGSEVRKMGSGRLGLPGADNDPLHEQEGLTRIKHAVSLGXTFVATADDYGAHANEQASGKVLKHVYTDKSXIATEMGFAMLGRPDMKIKLMLESVLSCCEASLKRXDDEYIDLSTEHSVL

SEQ ID NO: 222562 - protein, 89 aa, Glycine max
  Clone ID: PAT_MRT3847_43001C.1.pep
IICSILNIFYRYCQYLLFKNHVKEIHSNLYRILTVHLFMERLMKENKILLVENRNNKCLGEKMRVKAGRFIYYLRAVKFCSGDGKKIQY

SEQ ID NO: 222563 - protein, 191 aa, Glycine max
  unsure (1)..(191): unsure at all Xaa locations
  Clone ID: PAT_MRT3847_43002C.1.pep
MEPSLLLSSPSSSTPLPFFISNTLLCHPKPKLSTKLNCTLQKSQVWGTNLSWVPSQSHHGRPKLDAVRPIITAAVKRRKEIPFDNVIQRDKKLKFVVKVRNILVTQPDRVMSLKTLGKFKRDLGLDKKRRLIAVLKKFPAVFQIMEEGVYSLKFKMTPEAERLYFEEMRVRNEMEDWWVVKLKXLLMMSLE

SEQ ID NO: 222564 - protein, 105 aa, Glycine max
  Clone ID: PAT_MRT3847_43003C.1.pep
ASLYCVQDTLLGAPFGPYTAKCKGLRCIVSDLTPLPEPLLEPKYTAACRGLATLTTTTVLTCFARTTTGTSRPGDASSLPVTCPARLLNTLEMGMPTLLGMFGVF

SEQ ID NO: 222565 - protein, 192 aa, Glycine max
  unsure (1)..(192): unsure at all Xaa locations
  Clone ID: PAT_MRT3847_43004C.1.pep
MEPSLLLSSPSSSTPLPFFLSNTLPFHSKPKLSTKFNCTLQKSHFWGSNLSWVPSQSHHGRPKLDAVRPIITAAVKRRKELPFDNVIQRDKKLKFVLKVRNILVTQPDRVMSLKTLGKFKRDLGLDKKRRLIAVLKKFPAVFQIMEEGVFSLKFKMTPEAERLYFEETRVRNEMEELVVVKLKKXLMMSLEN

SEQ ID NO: 222566 - protein, 86 aa, Glycine max
  Clone ID: PAT_MRT3847_43005C.1.pep
IHNPPSHSETYEHNTNTHTCWMEHLFRGTNIYHQGALFLSTCVFLSTIMRLQKLLQKPSYQLVLITPLLIISWDKYKTKIFCRKPG

SEQ ID NO: 222567 - protein, 116 aa, Glycine max
  Clone ID: PAT_MRT3847_43006C.1.pep
GAPPNNYFTFLAHVWRLWTEESPLELIDDMLDDDTPISSEILRRIHVGLLCVQENPENRPNMSSVVLMLNGGTLLPKPRQPGFYTGKDNTIDTASCSKHHERCSVNEISISLLEAR

SEQ ID NO: 222568 - protein, 35 aa, Glycine max
  Clone ID: PAT_MRT3847_43007C.1.pep
GGWNEYEGVLPTTLAWHVNVRARSAENVPGQGCRD

SEQ ID NO: 222569 - protein, 70 aa, Glycine max
  unsure (1)..(70): unsure at all Xaa locations
  Clone ID: PAT_MRT3847_43008C.1.pep
MNYCYLHRKLEMDAYAGRIVKKKIETIFYLTDLADAQSAMDVESLLRKGWIPCLELXLEHGFVYREHKCS

SEQ ID NO: 222570 - protein, 63 aa, Glycine max
  Clone ID: PAT_MRT3847_43009C.1.pep
FVVCRGRSFFSFALCLRLFGLVSVISCLLCRTLGFPPFGLFFLVWGLVFRLCVLFMLSFGLGA

SEQ ID NO: 222571 - protein, 78 aa, Glycine max
  Clone ID: PAT_MRT3847_4300C.1.pep
SCRGNWYGTQRYGPRGKQLMRVDEVKPKNALTLQIKIVLIFMCIGHVSKPRTSQTTLTVLYNYFPFIFISYILEFHNN

SEQ ID NO: 222572 - protein, 63 aa, Glycine max
  Clone ID: PAT_MRT3847_43010C.1.pep
IGHRPAYRSIHKIAMSPFIEWWHFVASVLRWHHGPLLLECSLITRHKIRRVRLLIAIMCVFIQ

SEQ ID NO: 222573 - protein, 64 aa, Glycine max
  Clone ID: PAT_MRT3847_43011C.1.pep
HCPNLSAHRSSFSVLQFYCVCLKGSLIFLLLLVVLKLSATSPLSVWCCSRQSRINMFIQCDVCK

SEQ ID NO: 222574 - protein, 71 aa, Glycine max
  unsure (1)..(71): unsure at all Xaa locations
  Clone ID: PAT_MRT3847_43012C.1.pep
MQGGKKAGESIKETAANIGASAKAGMEKTXATVQEKAERMTALIRCKGVGTQRRETRTGTYRRSWHLYSDA

SEQ ID NO: 222575 - protein, 56 aa, Glycine max
  unsure (1)..(56): unsure at all Xaa locations
  Clone ID: PAT_MRT3847_43013C.1.pep
XCSXXXLVFHXMRRXLXSXXXRNXVQTSXSLGTCXLRCXXPXLGQRNRXGSQLGYI

SEQ ID NO: 222576 - protein, 40 aa, Glycine max
  Clone ID: PAT_MRT3847_43014C.1.pep
LVLDCSISVIDYTDVYNEQLCPLILKMYAKHSVSEGPDSI

SEQ ID NO: 222577 - protein, 70 aa, Glycine max
  Clone ID: PAT_MRT3847_43015C.1.pep
MDKLVLSLYDLLTSRCFALSLQVPQSECQIHKLTALKPVQRIEPEGGFIATWNPSANPFQHRGHRLSRCT

SEQ ID NO: 222578 - protein, 49 aa, Glycine max
  Clone ID: PAT_MRT3847_43016C.1.pep
GGRKTLSAELGLGFDGEKIVLDPQSKRGLDQIFYKPAHPRSLLKPDIPT

SEQ ID NO: 222579 - protein, 166 aa, Glycine max
  Clone ID: PAT_MRT3847_43017C.1.pep
AERPQKKEEEFEAKQTPTMLTKVKTAERPQKGEEEFEAKSTPAMLTKAKTAERPQKGEEEFEAKQTPTMLTKVKTAERPHKGVEEEESRPSITNVTRKPSVKEQLEEKKTEETSAEDAKKERISNKEVKEESSESRKPMKDKEEGDFEEKETKAEKLLAKEAETSA

SEQ ID NO: 222580 - protein, 63 aa, Glycine max
  Clone ID: PAT_MRT3847_43018C.1.pep
MGGEEKRHQMMQNLFGDQSEEEEELDVDSEHESNPQLNYPSDEGEGVGEHEGEVEGQGEVEIE

SEQ ID NO: 222581 - protein, 112 aa, Glycine max
  Clone ID: PAT_MRT3847_43019C.1.pep
MLEGKAVVRETDMPEGMQSYVMELAHQALDAHEVSDCQSIAHFIKQKLDEAYGPAWNSVVGKDFGSCITHLCGSFIFFRVEMMEFLIFKDGKNFTESREEAIGVLQKARNCD

SEQ ID NO: 222582 - protein, 76 aa, Glycine max
  unsure (1)..(76): unsure at all Xaa locations
  Clone ID: PAT_MRT3847_4301C.1.pep
LLRFKMMNFQFVEERKWSKDAETIELKSILGQAQALDLXAKLAQLAKGKAALDINPHLLEITERVVIIEKLKDHIP

SEQ ID NO: 222583 - protein, 81 aa, Glycine max
  Clone ID: PAT_MRT3847_43020C.1.pep
EDDLTQTRYLHSTQSILTFSCQSRLVAKTTQLEGEKMQKEAEVQKLMEENVRLSALLDKKEAQLLALNEQCKVMALNASNM

SEQ ID NO: 222584 - protein, 121 aa, Glycine max
  Clone ID: PAT_MRT3847_43021C.1.pep
MADSQVTLRTRKFIRNPLLGRRQMVVDVLHPNRANVSKDELRGKLGELYKAKKDDVSVFGFKTHFGGGKSTGFALIYDSAEAMKKFEPRYRLVRYGMATKVEKASRQQRKQRKNRMKEFRG

SEQ ID NO: 222585 - protein, 99 aa, Glycine max
  Clone ID: PAT_MRT3847_43022C.1.pep
ELSRVKQEFESLKSYVSGLITVRETLLSSEKQFRTIERLFEKLVAKTTQLEGEKMQKEAEVQKLMEENVRLSALLDKKEAQLLALNEQCKVMALNASNM

SEQ ID NO: 222586 - protein, 336 aa, Glycine max
  unsure (1)..(336): unsure at all Xaa locations
  Clone ID: PAT_MRT3847_43023C.1.pep
MATDEKLSQSHETWKQEIARIQSQVDVLQKELTELKACNQASDGNAKKELEVLWRRVKTASTLLTYLKSKARLMAVPHLAHTSCGIKQLEGVCFVDKNGIPLSGWSSNVDFSSFDDADEESWNGIRHQHGSLDEQDAAYIGEMLKSVQMVTDVMGSPCQKGFIXHESETAIEEEKVSISQEEIMRKSTQLENMSMKLQEMEHFALNTNSILTEMRQRVEDLVEETTRQRERAAENEEELSRVKQEFESLKSYVSSLITVRETLLSSEKQFQTIERLFEKLVAKTTQLEGEKMQKEAEVQKLMEENVRLNALLDKKEAQLLALNEQCKVMALNASNM

SEQ ID NO: 222587 - protein, 129 aa, Glycine max
  unsure (1)..(129): unsure at all Xaa locations
  Clone ID: PAT_MRT3847_43024C.1.pep
MQAGHQDTGLQAWWKEAEEKGHGDSKEKPWWPKXMTTEDLIQSCSIIGRTAQDIHAAVNCGQYPDGGLILNRATIGRRLIPAEGTPEYDEMGKNSQKVYMRTITPEVETLTDLLVIDILSRHANDETYL

SEQ ID NO: 222588 - protein, 68 aa, Glycine max
  Clone ID: PAT_MRT3847_43025C.1.pep
TGLYMRHTQYLCDTPITAHGFTFSTLPSLSFRRSYASTVKGAAPFAGGYIDAYLSFGAISTAVPYMLS

SEQ ID NO: 222589 - protein, 58 aa, Glycine max
  Clone ID: PAT_MRT3847_43026C.1.pep
IQNSMEFTLMPLNSNNIPIESLRNGALKRRSCNTRIEPICTHVVKGRQVSVQSHNHRG

SEQ ID NO: 222590 - protein, 67 aa, Glycine max
  Clone ID: PAT_MRT3847_43027C.1.pep
FSFTNTRHNTFYDLDVASNNKRGTLKSCSGMRGGGYFLRSLGTYDCFILGDNWTSALLSELRTGLIS

SEQ ID NO: 222591 - protein, 71 aa, Glycine max
  Clone ID: PAT_MRT3847_43028C.1.pep
RADSAREPLCHFHLTVLYLCTNDTIEPLNENGVGTVPLLRLVTDDAARRRRGRRSHGVESGAAVCIVINQS

SEQ ID NO: 222592 - protein, 72 aa, Glycine max
  unsure (1)..(72): unsure at all Xaa locations
  Clone ID: PAT_MRT3847_43029C.1.pep
MALNITSIKTSSNGLWQGDNPLDFAFPLLILQITLIILLSRSLAFLLKPIRQPXVIAQIIVSSIKYNLFQSL

SEQ ID NO: 222593 - protein, 206 aa, Glycine max
  unsure (1)..(206): unsure at all Xaa locations
  Clone ID: PAT_MRT3847_4302C.1.pep
MGYRCIQCWCPVKTLYVQYSPGNIRLMKCENCKAVADEYIECEIMILVIDLILHKPKAYRHLLHNVINQETMKFHGLLWKLAVIFLLFESCMHSFVDVILFXCFRCLILESSKGKLGSSNSVSSLVSICWKVLMDVIXGNLMFLLTFFFXGKMFFHVSITISRCIDLLLTLMISSYFKIFLIAMMVWDFPSSVIFIIELFCLSSNA

SEQ ID NO: 222594 - protein, 63 aa, Glycine max
  Clone ID: PAT_MRT3847_43030C.1.pep
IACNMKLHHVMLHEQQDDQIPRPVFPTIESDCSRSTLHDTQTPNYLTIYSIYETSTILRSYAT

SEQ ID NO: 222595 - protein, 448 aa, Glycine max
  Clone ID: PAT_MRT3847_43031C.1.pep
MITIVASYNVTPNQPTPSDPIWLSDSDQIGHLRHVNTIYAYKSRPNNTIDIERMKNSLSKILVPYYPIAGRLKLTKNGRMEVDCNAKGVTLIEAESTATFGDYGDFAPSDSTMELVPKVDYTRPSEDMPLMLVQLTRFCGGEGLAIGVAFSHPLVDGTAAIFFINRWAKLVRGEELDPNEVPFLDRTLLKFPEPSEPCVDLPEWKPVRFMPDNIAEQNKISAILLKLSSSQVEKLKKKANEQPSKEGVRPYSRFEAISSHIWRCASKAHHAHASDENHQPTVVMFSVDIRSRLNPPLPHNYFGNALAKTVTPKCSVGDILLNPLSYGAQKIRDAVYAVTYEYIRSHISYVLGQEQLDNIRAFFSGQGDIINEPYSGNPHNILITSWMSLPVYDADFGWGKPVHFGLAKVFREVRAHIIISPDGDGVLISMNFLTALMDLFKKFFYEDI

SEQ ID NO: 222596 - protein, 196 aa, Glycine max
  Clone ID: PAT_MRT3847_43032C.1.pep
MQTPKARTGTSEVPQRKSPASPQNARKLKTPGSDTDSVSSSPKPGSKTPKNRSPKVTERKSPRSPISEKKRPGRVQELESQLAQLEEDLKRTKDQLNSSESWKRKAQQEAEEANKQLLAVSKELEESQQQLLELSASEEERLQELRKISQDRDRAWQSELEAVQKQHSMDSTALVSAMNEIQKLKIQLERVRESEA

SEQ ID NO: 222597 - protein, 66 aa, Glycine max
  Clone ID: PAT_MRT3847_43033C.1.pep
VRSFWSIIWMLSFESFGKLVIRKNEYLKASLLSYDDYGILLILSVKNHISSPFHPLGGTHNSCFHF

SEQ ID NO: 222598 - protein, 44 aa, Glycine max
  Clone ID: PAT_MRT3847_43034C.1.pep
WNHTCPVRNPCLITYYACRQDRSTLIGLKYGFDDQSLKDPFPCF

SEQ ID NO: 222599 - protein, 98 aa, Glycine max
  Clone ID: PAT_MRT3847_43035C.1.pep
MPKNIISALGTFFFFFTLILLFLTAPDEEAQWRGLYCGINYGQIANNLASASSGADLIKCLNESRITLYDAEPTVLSAFCTIDGSFMIRVGNEYHTSM

SEQ ID NO: 222600 - protein, 76 aa, Glycine max
  Clone ID: PAT_MRT3847_43036C.1.pep
PFVLPPEPWVRFERPSSQVPLVQRTMIKARPPAAKNNPLKASSYPAMALALLRSFQQTDHSWTAQETANKVTVAVV

SEQ ID NO: 222601 - protein, 72 aa, Glycine max
  unsure (1)..(72): unsure at all Xaa locations
  Clone ID: PAT_MRT3847_43037C.1.pep
GRGKGGKGLGNGXAKRHRKVWLDNIQGITWPAIQRLARRGGVKRIIGLIYEETRRELRIELENTIRDDRTNT

SEQ ID NO: 222602 - protein, 77 aa, Glycine max
  Clone ID: PAT_MRT3847_43038C.1.pep
IRRQPRQPRPFIKTGNPHSSTESPSHILPKTRPPPNYPHPNIAQNPCPQPHPPSTSKPSKFTPSKNPSFHGTTTRPQ

SEQ ID NO: 222603 - protein, 47 aa, Glycine max
  Clone ID: PAT_MRT3847_43039C.1.pep
HPRGLCFSSKDLFHVFGVPMIVPSGSWGPPSHFCTVSSMCSGVVFNS

SEQ ID NO: 222604 - protein, 65 aa, Glycine max
  Clone ID: PAT_MRT3847_4303C.1.pep
FFFFLDSGKQRISNNIQVTTWSRLSSDFPILLFVWCSATWTLINLSYFLHVLDFFYKKNISVNHK

SEQ ID NO: 222605 - protein, 46 aa, Glycine max
  Clone ID: PAT_MRT3847_43040C.1.pep
LSSTPSKKLPKGLKPTTNPFSFTLETLYTPRYRLSSRPQRKSPRHP

SEQ ID NO: 222606 - protein, 498 aa, Glycine max
  Clone ID: PAT_MRT3847_43041C.1.pep
MTPFYFLLFAFILFLSINFLIQTRRFKNLPPGPFSFPIIGNLHQLKQPLHRTFHALSQKYGPIFSLWFGSRFVVVVSSPLAVQECFTKNDIVLANRPHFLTGKYIGYNNTTVAVSPYGDHWRNLRRIMALEVLSTHRINSFLENRRDEIMRLVQKLARDSRNGFTKVELKSRFSEMTFNTIMRMVSGKRYYGEDCDVSDVQEARQFREIIKELVTLGGANNPGDFLALLRWFDFDGLEKRLKRISKRTDAFLQGLIDQHRNGKHRANTMIDHLLAQQQSQPEYYTDQIIKGLALVMLLAGTDTSAVTLEWAMSNLLNHPEILKKAKNELDTHIGQDRLVDEPDIPKLPYLQSIVYETLRLHPAAPMLVPHLSSEDCTIGEYNIPQNTILLVNAWAIHRDPKLWSDPTHFKPERFENESEANKLLPFGLGRRACPGANLAQRTLSLTLALLIQCFEWKRTTKKEIDMTEGKGLTVSKKYPLEAMCQVCQSLTVKDIYNF

SEQ ID NO: 222607 - protein, 99 aa, Glycine max
  Clone ID: PAT_MRT3847_43042C.1.pep
ASNQKAPPAKSITLLYTTTTNAPTSTTIGKIKERNPLEGVTKSHNISIRKIKKKPSSLFHRETGCDPFAEKASAQRSKQENRERKTQSTHHSPRADSAR

SEQ ID NO: 222608 - protein, 127 aa, Glycine max
  unsure (1)..(127): unsure at all Xaa locations
  Clone ID: PAT_MRT3847_43043C.1.pep
XXWVYVVYGXLFYGXXGWVXXAFLKKKGLKVFFSRRPLSLFGNPLKPKGLSNRERGFFLSGLKQKKLSFLGGSPGEHKSKRGFFGKNHGGGIQLFSEGGVFFNREVWGLKKIAGLLKGANFFSPPFF

SEQ ID NO: 222609 - protein, 66 aa, Glycine max
  Clone ID: PAT_MRT3847_43044C.1.pep
INLALALFQCYRWDLETPGAAVLYPDREDFRWLVFGIKRTITQNLFLLTVHMFQGCWDFYENSIFL

SEQ ID NO: 222610 - protein, 166 aa, Glycine max
  Clone ID: PAT_MRT3847_43045C.1.pep
KENSSSAMSSEELSPRRPAIGDDVALSGFASKLRPINIPWRWNSSTVMPEAEEYPSKLGVPLFACKDQSFEIQHQDNEYKENFRSPHLGSSRRVSSPETISLESNSYQSIKVFTDDWELNSPFSDVSSLYQEPGAKFSVHDRVLSEQIIEGDDDDDDDDEIMSSYV

SEQ ID NO: 222611 - protein, 81 aa, Glycine max
  Clone ID: PAT_MRT3847_43046C.1.pep
VGGGHFPPIPPPHLARQQGRFHPRPPQHPTNTNSASISSSHTIQCILDRLNILPTPIEDRFEYGCRVEAAVARSSSPGLLG

SEQ ID NO: 222612 - protein, 69 aa, Glycine max
  unsure (1)..(69): unsure at all Xaa locations
  Clone ID: PAT_MRT3847_43047C.1.pep
PFWRIVDAGLGNVNLTGCXNLTYNILSALARLPGGTLXVLYLDGCWKITDANLVAIANNCLLLTDLDVS

SEQ ID NO: 222613 - protein, 45 aa, Glycine max
  Clone ID: PAT_MRT3847_43048C.1.pep
VQYEVNGSRKRGIPLPSIKRRQISRAKVLGIDPKNVIHISAEVEL

SEQ ID NO: 222614 - protein, 97 aa, Glycine max
  Clone ID: PAT_MRT3847_43049C.1.pep
RRLRKRVRRGQGIRGQRFCIMLKNVGDGDGYEIFEFYDSAGFARNRYRGGASRNRDNLVNSGHVLGVGFFNFSAVLNIRKRVKFVDDEMCPVGKKNE

SEQ ID NO: 222615 - protein, 191 aa, Glycine max
  unsure (1)..(191): unsure at all Xaa locations
  Clone ID: PAT_MRT3847_4304C.1.pep
MGYRCIQCGCPVKTLYVQYSPGNIRLMKCENCKAVADEYIECEIMILAIDLILHKPKAYRHLLHNVINQETMKFQXRCLILESSKGKLDSSMSVSPSVSICWKVLMDVLFGNLMFLLTFFFMVMMLFHVSITITRCIDLLLALMISSYFKIFFIAMMVIFTMKKSKLVLLVLLLITSGACLNVDVKSNTYL

SEQ ID NO: 222616 - protein, 104 aa, Glycine max
  Clone ID: PAT_MRT3847_43050C.1.pep
NGCEKTTEGINRVGESPKVNARACSVIRPRAVLSSPENDGLIGSINDLNHSVSSAHRKNNAKVKIEGQAKVLSIQVKEGKYSDKEECEAFNKGRTPSKVHVRNF

SEQ ID NO: 222617 - protein, 53 aa, Glycine max
  Clone ID: PAT_MRT3847_43051C.1.pep
YNTYAWPRYNDHYISSSHPESSMMFTHTPLSHEDYDIQQHSPERSHGSGNVCY

SEQ ID NO: 222618 - protein, 199 aa, Glycine max
  Clone ID: PAT_MRT3847_43052C.1.pep
PGKPPPPGKPPPTTPGKPPPPPTPGKPPPTPGKPPPPPKKLPPTPGKPPPPPGKLPPTPEKPPPIPGKPPPPPWKPPPPPGKPPPPPPPPPGKPPPPPGKPPPTRGKPPAPSPAGKLPPPGKPPRPRGEPPRPAPDNPPPTPRLPPPPAVANSNTSEEIKRSMASIETIAIFEPIFHFFTSKLQVYNRSLLKLMRSRAE

SEQ ID NO: 222619 - protein, 66 aa, Glycine max
  Clone ID: PAT_MRT3847_43053C.1.pep
MGLDISNLLGEYTEYAQVNRYLTETMLSDQINSHNAVTVLALDDARMAYLYGMSHDAVKAILSTHV

SEQ ID NO: 222620 - protein, 47 aa, Glycine max
  Clone ID: PAT_MRT3847_43054C.1.pep
VLGIDGFCKRERKVVMVVEMDADTVLKVPRSESAPLNYGFIKRKYFL

SEQ ID NO: 222621 - protein, 69 aa, Glycine max
  Clone ID: PAT_MRT3847_43055C.1.pep
GVFLVAGGKWEQNFVFLSWPNKNFGFAFKVLSLVSSKLGDKNKNVKKLMEKRSLPCIKIQRDYIFLCPW

SEQ ID NO: 222622 - protein, 285 aa, Glycine max
  unsure (1)..(285): unsure at all Xaa locations
  Clone ID: PAT_MRT3847_43056C.1.pep
FCRQVRVIFEISSFDLVNWLMNRPEWKIMNGRDHFLVAGRITWDFRRLTEEESDWGNKLLFLPAAKNMSMLVVESSPWNANDFGIPYPTYFHXAKDDDVFIWQERMMRLERKWLFLFAGAPRPDNLKSIRGQIIEQCRRSKVGKLLECDFGESKCHSRSVXICTCFNGSLFCLQPSRGFVSRRSXFDSMLAGCIPVFFHPGSAYTQYTWHLPKNYTKYSVFIPEDDLRKRNVSIEERLSQIPEEEVRIMREEVIGLIPRLVYANPRSKLETLDDAFDVFVQAVID

SEQ ID NO: 222623 - protein, 86 aa, Glycine max
  Clone ID: PAT_MRT3847_43057C.1.pep
ISLFKNQRKIRLIVTMMIREEKGVKPVLLKFGLALALSFAGFIYSRLRTRRIKPSKSRKGCSFSHDSEVTFIGSIGAALSTCNAIS

SEQ ID NO: 222624 - protein, 611 aa, Glycine max
  Clone ID: PAT_MRT3847_43058C.1.pep
MMIREEKGVKPVLLKFGLALALSFAGFIYSRLRTRRIKPSKSRKGCSFSHENEDNLGGGIGSALSTCNAISEGNFLCSSFVAQEEACINRVISDESRIALSSDSTQKGDKDEFLLPEFNDLVKDMDFGAIIVRNSFKEDMEAPWLKVGSSIAYASPEKDDYEQEISQLRSMIRMLQDRGRSLEVQLLEYCRLREQETAVIELQNRLKASTMEVKIFNLKVKTLQSENWRLKEQVAGHAKVLAELETAKAQVKLLNKKIRHEAEHNREQIITLKQKVSRLQDQECKDVACDPDIQITMQKQKYLESEAEELRKSNLRLQIENSDLARRLDSTQILANAFLEDPEAGAVKQESECLKQENVRLMKEIEQFQSDRCSDLEELVYLRWINACLRYELRNYQAPPGKTVAKDLSRSLSPMSEKKAKQLILEYANANGPGNIVDFDIDQWSSSQASSITDFGECDDFSSADNSSAARTNTNPTKLFGKLRQLIQGKGSSHHHSHASSQEKSGYQDSNPPHLSTSTRTEGLRSEFATPIGTSRTSLDFSSLTSVKEGDRRNSDSIVVGSSNKFSACKKGSFSDSLGLEKNNLEKYAEALKDSSVSATHERCRRSASCS

SEQ ID NO: 222625 - protein, 459 aa, Glycine max
  Clone ID: PAT_MRT3847_43059C.1.pep
MDTSLVFTVRRSEAELIAPAKPTPREVKLLSDIDDQDGLRFQIPVIQFYRHDPSMAGKDPVDVIRKAVAKTLVFYYPFAGRLREGLGRKLMVDCTGEGVLFIEADADVTLKQFGDALQPPFPCWEELLYDVPGSQGVLNTPLLLIQVTRLKCGGFILAVRLNHTMSDAAGLVQFMSALGEIARGRQEPSIPPVWRRELLNARDPPRVTCTHREYEHVPDTKGTIIPLDHMAHRSFFFGPSEVAAIRSLIPQTDQRCSNFEVLTACLWRCRTIALQPDKDEEVRILCIVNARSKFDPPLPSGYYGNAFAFPVAVTTAGKLCDNPLGYALELVRKAKADVTEEYMHSVADLMVTKGRPHFTVVRSYLVSDVTRAGFGNIEFGWGKAVYGGPAKGGVGAIPGVASFYIPFKNAKGEEGLVIPVCLPSEAMERFQKELDCVLNHHIVQPSAIAPNSRFIVSSL

SEQ ID NO: 222626 - protein, 251 aa, Glycine max
  unsure (1)..(251): unsure at all Xaa locations
  Clone ID: PAT_MRT3847_4305C.1.pep
MGYRCIQCGCPVKTLYVQYSPGNIRLMKCENCKAVADEYIECEIMILAIDLILHKPKAYRHLLHNVINQETMKFQGLLWKLAVIFLFFEYYRLILESSKGKLGSSNSVSSLVSICWKVLMDVIIGNXCFPRVLTFFFMVKMFFHVSITISRCIDLLLTLMISSYFKIFLIAMMVWDFPSSVIFIIELFCLSSNAAALKVMTESTMRRCVWTCFSAYAIKFIVTRILELILLGQLMQGWSQMPFTFSKATMI

SEQ ID NO: 222627 - protein, 169 aa, Glycine max
  Clone ID: PAT_MRT3847_43060C.1.pep
ILCIVNARAKFDPLLPSGYYGNAFAFPAAVTTAGKLCENPLGYAVELVRKAKADVTEEYMHSVANLMVAKGRPHFTVVRSYVVSDVTRAGFGNVEFGWGKAVYGGPAKGGVGAIPGVASFYIPFKNAKGEEGLVIPVCLPSEAMERFQKELNSVLNNHIVQPSIIVSSL

SEQ ID NO: 222628 - protein, 76 aa, Glycine max
  Clone ID: PAT_MRT3847_43061C.1.pep
FYLHFTKLCILLPPYTLLFTCWPRCSPRFSHGRPYFYVLLVTFLRHGSVPKLIPFICHPNAHSSFILTLSTFGLYF

SEQ ID NO: 222629 - protein, 57 aa, Glycine max
  Clone ID: PAT_MRT3847_43062C.1.pep
LHQKFLVMLESKLSLTSLSSIIACYRIKHMPFFYIPASFIDSQNIWIYAAATHRQCK

SEQ ID NO: 222630 - protein, 50 aa, Glycine max
  Clone ID: PAT_MRT3847_43063C.1.pep
AFSDWGTVFFFFQLSCRISLLIEMWVLPGSLKVPCFPTRVFFGLGGRFLF

SEQ ID NO: 222631 - protein, 84 aa, Glycine max
  unsure (1)..(84): unsure at all Xaa locations
  Clone ID: PAT_MRT3847_43064C.1.pep
IWATSTKARVNSWTVRNSTNEKKHTSSIGLNEDGNRNLICTGADTIIFDRPAQTGKMCMDTTTQHXSAIRKAGLRTLAQAYKRL

SEQ ID NO: 222632 - protein, 85 aa, Glycine max
  unsure (1)..(85): unsure at all Xaa locations
  Clone ID: PAT_MRT3847_43065C.1.pep
MSLITNMLVLNVCLLLPFLVWDTPACNSPSFFMXTQSSSYEHDEYSQPYISPCTYTXSLPPPCFCDHSRLNSYHSHCPICMYTHS

SEQ ID NO: 222633 - protein, 85 aa, Glycine max
  Clone ID: PAT_MRT3847_43066C.1.pep
IGQRGDTPRGKGAPPFIYPPWERPNKHSKWVGVPPGKGPCLKGLLSLQGRQLIFFGGSFCRNRANRWGPSGDPHWGLRNFNCGVK

SEQ ID NO: 222634 - protein, 69 aa, Glycine max
  Clone ID: PAT_MRT3847_43067C.1.pep
LRCSKVLPLYARASGTLGSEQCPPSHHCMIMACAFIGAPTSAMHMITSLHVTYMLAIIYSDGNNVSHDH

SEQ ID NO: 222635 - protein, 45 aa, Glycine max
  Clone ID: PAT_MRT3847_43068C.1.pep
YISTTKTYFDPPFKSGSMKKNILSCITLLHSYSLNCSSFNYITFT

SEQ ID NO: 222636 - protein, 55 aa, Glycine max
  Clone ID: PAT_MRT3847_43069C.1.pep
HSISDYLRYQNSSTLKKIPITCNKFTGFTVKNMTGLSGKICLILFQFLLKYLLSC

SEQ ID NO: 222637 - protein, 89 aa, Glycine max
  Clone ID: PAT_MRT3847_4306C.1.pep
MNGIELWQESLCLGLIGVSCVSDFRKNSISGSGGNKRVDQELQLLIYSATFRLVSCFWLFSVFLYHRVVNIATKLEGEKERVRTYSCGS

SEQ ID NO: 222638 - protein, 67 aa, Glycine max
  unsure (1)..(67): unsure at all Xaa locations
  Clone ID: PAT_MRT3847_43070C.1.pep
MXRKFFVXGGNWKCNGTXXDVXKXXXTLNXXKVPGXDVVXXVVSPPXVXLPXVKXXLRXDFXVSAXN

SEQ ID NO: 222639 - protein, 118 aa, Glycine max
  Clone ID: PAT_MRT3847_43071C.1.pep
NSARASSSIRFRSSNDSPTNELFESKPDTVFFSRITGSINHPYTVERISDLIMHKLSTQDADDVQAYCVLWILFHQIFKLQPSGMSMIVDKYLLSKVFHISCLKCIHQFAGHECPPGT

SEQ ID NO: 222640 - protein, 70 aa, Glycine max
  Clone ID: PAT_MRT3847_43072C.1.pep
ESLNSRDNHLQSSKKEGNVCKLGVIHNADKRHQSISQDKSHVFVQTMPQSTSTYTGRHSQLDQHFTNHTI

SEQ ID NO: 222641 - protein, 90 aa, Glycine max
  Clone ID: PAT_MRT3847_43073C.1.pep
RSSLALGGGWVGADNRRAPRQASIANKYRRETYNDICVYNKQKTDAPDTYVENVDVNDPKGIKVYYSKLLELKMRTERWTDTLSIVSGWF

SEQ ID NO: 222642 - protein, 58 aa, Glycine max
  Clone ID: PAT_MRT3847_43074C.1.pep
HLQQSIYIRASSVWSRSQRASNMERPPLQFEWQDEFVLYIPALPQSPMPMSIRQPEAI

SEQ ID NO: 222643 - protein, 69 aa, Glycine max
  unsure (1)..(69): unsure at all Xaa locations
  Clone ID: PAT_MRT3847_43075C.1.pep
LRQCSVTCVLFPAKVHVSVQVNLGHVVENGVCTGLLSGFALYGLMGALGDXSSALVRLWHKAFFVVKQQ

SEQ ID NO: 222644 - protein, 40 aa, Glycine max
  Clone ID: PAT_MRT3847_43076C.1.pep
FFFYFFLLNLINIKGGFYQKEPPVTKPIIFHNNLPQKFNS

SEQ ID NO: 222645 - protein, 62 aa, Glycine max
  unsure (1)..(62): unsure at all Xaa locations
  Clone ID: PAT_MRT3847_43077C.1.pep
QVXAVGKWGPLISEAPRKLGESKGQRIPKPEGLKTASVRNPGTCSPEFWFRPSVRLPRPSRT

SEQ ID NO: 222646 - protein, 79 aa, Glycine max
  Clone ID: PAT_MRT3847_43078C.1.pep
PTRPPTRPPTRPPTRPLRAEDSWLKSSDKYLAKCAVTSILFSGIWKRCMMSIIKCLFPCYCSRCRYMVMLRGRFRKFFR

SEQ ID NO: 222647 - protein, 53 aa, Glycine max
  unsure (1)..(53): unsure at all Xaa locations
  Clone ID: PAT_MRT3847_43079C.1.pep
RSRDGVLGLGHFXLLNMLGCGDIDIVYLSEWTGTRLCFCMKVMARGLLLVAQK

SEQ ID NO: 222648 - protein, 52 aa, Glycine max
  Clone ID: PAT_MRT3847_4307C.1.pep
SQACRLRKPSVVKSIVFRSCPEDKSSCILSGQSEFNLRAKSSTSLHQKVPPK

SEQ ID NO: 222649 - protein, 367 aa, Glycine max
  unsure (1)..(367): unsure at all Xaa locations
  Clone ID: PAT_MRT3847_43080C.1.pep
TIDMKLKRLVLQELCATRSKGEISRDTELASQKGAQAQQQNVAMENTALEMSVTDRAGLLSELSAVLVELGYSVTSATAWTHNDRVACIIFLEDASSPGPISDPKRLGLVEEQLENVVAAHGETGQKNSVRVTTLGTGRTHTERRLHQLMYADRDYESCRACDRTHVSVGRCEDKGYLVVNVRSRDRPKLLFDTVCVLTDMQYVVFHAAISSKRSMADQEYFIRHCKGSLALPSESETERTHXCLIAAIERRVSRXIRTENRMGLLSNVTRVFRENGLSISRFEIGTEGEKAVGSFFVTDSSGEQVNPNIVELVRQASGGSVVTDHKSPHRVRQSQSDIEAKPKFSLGSLLWSRLERLSGGFGPIRS

SEQ ID NO: 222650 - protein, 51 aa, Glycine max
  Clone ID: PAT_MRT3847_43081C.1.pep
MGIAVSLRHSLQPSPSLKCKSQSLMQYDESLGTFQLKRKWNRRNPAHHRTC

SEQ ID NO: 222651 - protein, 53 aa, Glycine max
  Clone ID: PAT_MRT3847_43082C.1.pep
ANEKCTRHKWHCMHVSRPSLIEHVFFGCLPQSCDSMNQRFSRPDKIVNRFSPF

SEQ ID NO: 222652 - protein, 50 aa, Glycine max
  Clone ID: PAT_MRT3847_43083C.1.pep
SDALKVLRLPKGHKLCVLHMLSSEVALIYYDTIRELEKKRKEKAAVVYER

SEQ ID NO: 222653 - protein, 58 aa, Glycine max
  Clone ID: PAT_MRT3847_43084C.1.pep
PLFPFLLTLFPSRSNHIFSTRTLNSNLLKIYTTLQFFSNFIIPTPYSRIFYAHKIISP

SEQ ID NO: 222654 - protein, 146 aa, Glycine max
  Clone ID: PAT_MRT3847_43085C.1.pep
MDGDGSSESPIETKKAKSKTPRKPKETILKQKSPAEFFAENKNIAGFDNPGKSLYTTVRELVENSLDSAESISELPVVEITIEEIGKSKFNSMIGLVDRERVDAALYDDYETEKAREKRLAKEARAQEMQAKNAALGKKVKDTPAS

SEQ ID NO: 222655 - protein, 71 aa, Glycine max
  Clone ID: PAT_MRT3847_43086C.1.pep
KTNKQRPSSFSIYHSPLFSFVLSLSCQFLSSVAPIYSQLVTVSSLSLSLSSLLLTIFFFVSKITGISIMSH

SEQ ID NO: 222656 - protein, 67 aa, Glycine max
  Clone ID: PAT_MRT3847_43087C.1.pep
CPTEMFPKREKSSFTPTSTKYSSLQPFSSPSSFKSWSLPSATSKQNMLQHLKLQILKSLIYSYLRWS

SEQ ID NO: 222657 - protein, 54 aa, Glycine max
  Clone ID: PAT_MRT3847_43088C.1.pep
ASTSPSTDFRTTSLFIERLQAPVCLKHFLPCICRDCLKIDPPGGHRTTDVLYPR

SEQ ID NO: 222658 - protein, 72 aa, Glycine max
  Clone ID: PAT_MRT3847_43089C.1.pep
MEEVPDTAANRSDPGLRAEIDTSAPFESVREAVTRFGGVGYWKPILNGLSNKHFAAPEVTHFVFFFFSLKAF

SEQ ID NO: 222659 - protein, 60 aa, Glycine max
  Clone ID: PAT_MRT3847_4308C.1.pep
IYAVDTRVGNWHNTAAEGTVLDFILYRRSFNYEFHWRVNCKYMWSSLHPSTHTQRKNRCH

SEQ ID NO: 222660 - protein, 78 aa, Glycine max
  Clone ID: PAT_MRT3847_43090C.1.pep
SSYSTFQEVSTDFLSGLIEDHVLESLDLFIEGKASGRDSVNFLSLIGWPSFEEDPFPGSLRHPNIAPVLAIFKTSDHV

SEQ ID NO: 222661 - protein, 42 aa, Glycine max
  Clone ID: PAT_MRT3847_43091C.1.pep
TMSISIVPCFFYIWIFPFHWQSTTLLAIRQFHEAFVRLQIVD

SEQ ID NO: 222662 - protein, 134 aa, Glycine max
  Clone ID: PAT_MRT3847_43092C.1.pep
VFQDLIANMSAKCQRPACGKTVYHAEKIEHDGKTFHSRCLNLWKKEMEEQARNERNAVNYDKPADVSPAYYRTGDVTTGSTPTMLSGKEERERGLAPKPSTTSSGGSSAPPKFCPDCGAANAGGKFCGECGFKW

SEQ ID NO: 222663 - protein, 191 aa, Glycine max
  unsure (1)..(191): unsure at all Xaa locations
  Clone ID: PAT_MRT3847_43093C.1.pep
MTTPLEHDYIGLSEAPSMEKSCDKISSSVSSNLSSEDENTTSSLNFKETELRLGLPGCDSPENNNKSGVSLFGKDLQKKNNGYSSASSTPSNKNLKRGFPDAISSSSSSSGKWIFSASDAATEADLESGSNISGGCNKEVGMVPHYEKPAQVAATNEHAPAPAPKAQVVGWPXPIRSFSKEHDDGLLFGKM

SEQ ID NO: 222664 - protein, 78 aa, Glycine max
  Clone ID: PAT_MRT3847_43094C.1.pep
MAFQAHHQHFLLVPFMSQSHLIPFTHLAKLLASNGVSVTIVLTPLNAAKFNTLIDQAKALKLKIQFHVLPFASAEAGV

SEQ ID NO: 222665 - protein, 44 aa, Glycine max
  Clone ID: PAT_MRT3847_43095C.1.pep
QDITGAVRCTPLILLHDIDKYMFLALLHNTRHYLIFIILFPHNI

SEQ ID NO: 222666 - protein, 162 aa, Glycine max
  Clone ID: PAT_MRT3847_43096C.1.pep
RILNEAVSFVAFCVLDLVDFLLCFVFKAVDLWVEAEFKPCYCSSAKEAITSSGKILVSEQGGESKIVSLLSSTKLQLEDISDTLYSRPSLVSEVSRLTINELKKLKLEDPVLQSKRGNSRCSTFTVNTTIVEMLQGKIGRHLTHPIPRWSDCECKLCTRWIS

SEQ ID NO: 222667 - protein, 87 aa, Glycine max
  unsure (1)..(87): unsure at all Xaa locations
  Clone ID: PAT_MRT3847_43097C.1.pep
LHKVYKNGTKKLKRYCYILIKGTDLKPSRNXRHVRKYNKKSGEIVIEEEQSVISKRVHQDPTRHPSFTRPALNSLPAAQLPPRANPT

SEQ ID NO: 222668 - protein, 50 aa, Glycine max
  unsure (1)..(50): unsure at all Xaa locations
  Clone ID: PAT_MRT3847_43098C.1.pep
XKSXYTPQDRHTKWRXXSXXHXXVSTGPXANXAASXRRSAXXGLXAXTXC

SEQ ID NO: 222669 - protein, 63 aa, Glycine max
  Clone ID: PAT_MRT3847_43099C.1.pep
SHIQTQKKIPLRGGANFDVTNKQTSKRKLTVILSSVLKSLSSTLRRKPRMEFSEWKESYRLKH

SEQ ID NO: 222670 - protein, 46 aa, Glycine max
  Clone ID: PAT_MRT3847_4309C.1.pep
SHVLFGLRQGLTSIDLSNFHFPSKLSKLYQYIYSLFEQIKWMMLMR

SEQ ID NO: 222671 - protein, 201 aa, Glycine max
  unsure (1)..(201): unsure at all Xaa locations
  Clone ID: PAT_MRT3847_430C.1.pep
MSLDFGAVPSPIAAMGIDLKAGGKSKKTKRTAPKSNDIYLQFXVKLYRFLVRRTGSNFNAVILKRLFMSKFNKPPISLSRLIKYTKGKEDKIAVIVGTVTDDIRVYEVPALKITALKFTERARARIEKAGGECLTFDELALRAPLGQNTVLLRGPKNAREAVKHFGPAPGVPHSHTKPYVRAKGRKFERARGRRNSRGFRV

SEQ ID NO: 222672 - protein, 68 aa, Glycine max
  Clone ID: PAT_MRT3847_43100C.1.pep
TTQKKINKIKIKKTAATKKCPNSLGNTSRQISGGPPTIHLFYLGFNSGLFHAGLKAFPKMIPTKTWRN

SEQ ID NO: 222673 - protein, 48 aa, Glycine max
  unsure (1)..(48): unsure at all Xaa locations
  Clone ID: PAT_MRT3847_43101C.1.pep
QSTYAGTGAAVEYAVXHLKVSQIVVIEHSACGGIKGLLSLPYDGTYST

SEQ ID NO: 222674 - protein, 116 aa, Glycine max
  Clone ID: PAT_MRT3847_43102C.1.pep
HLALLIIRPRGMAQCWNQAWLWRHNVSRTIWTTVEPVAAVPDVIANNRTGLEVTPEKQKTTDIIMGPWTKIEAEDIGVNTTLVTVINVTLLHPHTIRSIPYGRVRLGWFMSIVVGS

SEQ ID NO: 222675 - protein, 234 aa, Glycine max
  Clone ID: PAT_MRT3847_43103C.1.pep
MNQKGHEKKIEKPDDESESYGRSWRLTVEANNARPWRIVPDNCYNHLQNYMSGGQYQLDLNLVVQHILSYAHEIPLAADGMDAWILDVDDTCISNIDYYKGRRFGCDPFDSAIFKAWIMKGKCPANPAVLELFNALIKKGFKVFLLTGRDQATLAQITTNNLRNQGFIGYQRLILRSAQYKGQSAVRYKSAIRKEIEGEGYRIRGNVGDQWSDLQGECLGNRTFKLPNPMYFIS

SEQ ID NO: 222676 - protein, 95 aa, Glycine max
  Clone ID: PAT_MRT3847_43104C.1.pep
ANVNVTWEDVIMYMVGVGAPMMAQGLSCNDETVNMAQSLSYLTHGGTPSTLCCSGVKNILSSAVTTKDRQTACNCLKADADTYNINDQYAQALPA

SEQ ID NO: 222677 - protein, 46 aa, Glycine max
  Clone ID: PAT_MRT3847_43105C.1.pep
MGKSYPTVSADYQKAVEKAKKKLIGFIAEKRCAPLMLRLAYALLSI

SEQ ID NO: 222678 - protein, 46 aa, Glycine max
  Clone ID: PAT_MRT3847_43106C.1.pep
MAIPAEIKPSCTIEPNEARVKVPDERREWLSQLFHPQSEVLEYLNI

SEQ ID NO: 222679 - protein, 140 aa, Glycine max
  Clone ID: PAT_MRT3847_43107C.1.pep
MSKRGRGGSAGNKFRMSLGLPVAATVNCADNTGAKNLYIISVKGIKGRLNRLPSACVGDMVMATVKKGKPDLRKKVLPAVIVRQRKPWRRKDGVYMYFEDNAGVIVNPKGEMKGSAITGPIGKECADLWPRIASAANAIV

SEQ ID NO: 222680 - protein, 104 aa, Glycine max
  Clone ID: PAT_MRT3847_43108C.1.pep
RKVAKIYKGKRGKQTSIFGAPSVSSASFLSENRDFKNRVKCLMGLRANYSCAHCLGIMGPRSYKRKAMDIVHIFLQTHTLKLKHSLLYFERNFCMYSLLHRSKL

SEQ ID NO: 222681 - protein, 55 aa, Glycine max
  Clone ID: PAT_MRT3847_43109C.1.pep
ISMIRNASESLIIHSWPIFIYHCRRLYFIHLYSKKLFINHKSGIILADNLWKLLM

SEQ ID NO: 222682 - protein, 51 aa, Glycine max
  Clone ID: PAT_MRT3847_4310C.1.pep
YIAWSTASFFVSCKHIMSAPSFCIIIVIAALFTPICHILSYTFHALVLFFQ

SEQ ID NO: 222683 - protein, 114 aa, Glycine max
  Clone ID: PAT_MRT3847_43110C.1.pep
MVAEWLDCVDEEDSFAEAPLTAALNGVEGLDYMERIPLATSEGSPHVLPRTNGDKGKRRFVSGDGDEMTLIPGTSDDEAYNKLIDELEKSCPTMTGIERPQAEKLPRRRNCDKP

SEQ ID NO: 222684 - protein, 78 aa, Glycine max
  Clone ID: PAT_MRT3847_43111C.1.pep
NKNPKPSLCCHTHQIYTTTSKFRNYVSLAMSDSVPKTRNRPVPWPPAPDAKAMPPAFCAKKTGSSPVLREAMQRLADS

SEQ ID NO: 222685 - protein, 56 aa, Glycine max
  Clone ID: PAT_MRT3847_43112C.1.pep
GLRCKIKPEKARLLLRNNAYLHNVPIVFSLQKGQQPLRASCNPLLTLNCCSLSVTL

SEQ ID NO: 222686 - protein, 82 aa, Glycine max
  unsure (1)..(82): unsure at all Xaa locations
  Clone ID: PAT_MRT3847_43113C.1.pep
SATESREENCDVGRTGSRHDRQKMYHSSAXALARYHRQRYLRDQCGIGYPTGQGRWSCVMVHCGNYSICSPPSCLSNPLFFF

SEQ ID NO: 222687 - protein, 554 aa, Glycine max
  Clone ID: PAT_MRT3847_43114C.1.pep
MPTLSYSQTTPMSTSSPLFLLLIIIIIIPILHFHAAEAAAKGQWQLLHKNIGIVAMHMQLLHNDRVIIFDRTDFGLSNLTLPDGRCRNNPNEMVVKTDCTAHSVEYDVVANTFRALFVQTNVWCSSASASPDGTLVQTGGFNDGDRAVRTFTPCRTCDWKEIDDGLAARRWYATGHILPDGRQIIIGGRRQFNYEFYPKTQAKNTYSLPFLAQTNDANAENNLYPFVFLNVDGNLFIFANNRAILFDGNKNSVVRTYPQIPGGDPRCYPSTGSAVLLPLREPNVEAEVLICGGAPRGAFRNTLSGKFVGALRTCARIKITDPKANWVMETMPGARVMSDMVLLPNGDVLIVNGAAVGTAGWELGRNPVLNPFLYKPNKRVGMRFEVQNPSHIPRMYHSGAVLLRDGRVLLAGSNPHTYYNFTKVLFPTELRLEAFSPWYLEPGFSNVRPAIVSPASQTKLKYGQTLRLRFKVSATLVGDSVSVTMLAPPFNTHSFSMNQRLLVLKPHHLSGVGESTHEVEVTAPASAVLAPPGFYLLFVVHQEVPSHGIWVQMV

SEQ ID NO: 222688 - protein, 155 aa, Glycine max
  Clone ID: PAT_MRT3847_43115C.1.pep
MWVSLSSPAMASEEPMDAPPAPNLLSETLSAAELVADLGGDYALFPPGGGSTEFRQLDDDVSSSLWSSALVSNSRVSAVAPESWIAPQGNWLLPENEGSDNAESASEVVPSKMGAGLVNLGNTCFLNAILQCFTHTVPLVQGSLFQHSFYPLFWH

SEQ ID NO: 222689 - protein, 254 aa, Glycine max
  Clone ID: PAT_MRT3847_43116C.1.pep
MTLLLLLILLFHAAEAKGQWQLLHKNIGIVAMHMQLLHNDRVIIFDRTDFGLSNLTLPDGRCRNNPNELVVKRDCTAHSIEYDVAANTFRALFVQTNVWCSSGSVSPDGTLVQTGGFNDGYRAVRTFTPCRSCDWAEVQHGLAAQRWYATNHILPDGRQIIIGGRRQFNYEFYPKTQAKNTYSLPFLNSSNDAVALRFKRLLVLKPPHLSGVGESTPEVEVTAPASAVLAPPGFYLLFVVHQEVPSPGIWVQMV

SEQ ID NO: 222690 - protein, 60 aa, Glycine max
  Clone ID: PAT_MRT3847_43117C.1.pep
MGAFGSTVGAGNKTLLNPNGSGAGALASNLAFFWTHLEKGIGFRVPNNKGFGGSFKNVAF

SEQ ID NO: 222691 - protein, 94 aa, Glycine max
  Clone ID: PAT_MRT3847_43118C.1.pep
LNLDIRSQWIKHSLTVLRVVTLATPVELIRCLGSIKDHAFVASEYPVVIALEDHLTPDLQAKVAEMVTQAFGDILFTPNSESVKEFPSPESLKK

SEQ ID NO: 222692 - protein, 353 aa, Glycine max
  unsure (1)..(353): unsure at all Xaa locations
  Clone ID: PAT_MRT3847_43119C.1.pep
MAAITTKEQQVVVNYMSEELQTIFLSNLDEAPARRRAREAFKDIQLAIDHCLFRLSSDGVKTKEVYEVNSRGLKIFSKSWLPESSHLKAIICYCHGYADTCTFYFEGVARKLASSGYGVFALDYPGFGLSDGLHGYIPSFESLVNDVIEHFSKIKEQKKYQDVPSFLLGESMGGAIALNIHFKQPAAWNGAALIAPLCKLAGDMIPHWLVKQILIGVAKVLPKTKLVPQKEEVKDNIFRDVNKRKLXYNVLLYKDKPRLGTALELLKATQELEQRLEEVSLPLLIMHGEADIITDPSASKALYEKAKVKDKKLCLYKDAFHTLLEGEPDETIFHVLGDIISWLDEHSSRKNKY

SEQ ID NO: 222693 - protein, 95 aa, Glycine max
  unsure (1)..(95): unsure at all Xaa locations
  Clone ID: PAT_MRT3847_4311C.1.pep
FRGNXXXCKLXXWLHKLLXSCIHXLXXSAEATRQSLGTRSLQXSIWXSXEKPXXLLRXLXTPPVXSRXXDRXLXFCXXXKXXPTWDGXLSRXXXD

SEQ ID NO: 222694 - protein, 116 aa, Glycine max
  Clone ID: PAT_MRT3847_43120C.1.pep
LVNIFFILFFSIFFFFSLFYLLLPQKRGKPPPPPQKKTSTKPQKLSPGNPPPPKKLPPTTGGRKTKTPFAAPTPSFSTRGRKPPNFYSAAPKTQKRGVFSITPGKRRAGPLSANPP

SEQ ID NO: 222695 - protein, 73 aa, Glycine max
  Clone ID: PAT_MRT3847_43121C.1.pep
PHWSKFSWSEDMWRIKNLEVSKKDIQESDWFAFRSSSPVIFVDPRDFCHYLIHQGKKERDTLLLVKMAFLLPL

SEQ ID NO: 222696 - protein, 41 aa, Glycine max
  Clone ID: PAT_MRT3847_43122C.1.pep
MDVLPNNFSFTTRKFGKIIIILSIFYLRCLVSFSLLFKMLF

SEQ ID NO: 222697 - protein, 115 aa, Glycine max
  Clone ID: PAT_MRT3847_43123C.1.pep
EIITPVYRTGVSAQVQKRRARELCLGRHDNAIKYLGQDYEQLWVRCLQSGTLFRDEALPPVPESLGYKDLGPNSSKTYGIKWKRTTELMSNPQFIVDGATRTDMCQGALGDCWLL

SEQ ID NO: 222698 - protein, 92 aa, Glycine max
  Clone ID: PAT_MRT3847_43124C.1.pep
GSPCNHTTSTKRWWSRRLRLLSGRSGHHIRSQPFEYSGRKNDVRPFVTKKHDKNVSKEEQIAPTRWSRPVCLRKRTRGKTGKCGPARAGGPR

SEQ ID NO: 222699 - protein, 93 aa, Glycine max
  Clone ID: PAT_MRT3847_43125C.1.pep
PGLAIAPKPKKAILEGGENTIWTLLWPAFKGRNMPLPSPKPRTFPKQKALIPQLALKESIPKMRPFYGKGLVRTLETLCNSLIAQLKLLRPFG

SEQ ID NO: 222700 - protein, 66 aa, Glycine max
  unsure (1)..(66): unsure at all Xaa locations
  Clone ID: PAT_MRT3847_43126C.1.pep
PRPTRPAVHNTTTTHDNSFQNTLNRILWNSMTASEEYNIXNDYKIIQSLNTKFQASIASNSFFFIF

SEQ ID NO: 222701 - protein, 164 aa, Glycine max
  Clone ID: PAT_MRT3847_43127C.1.pep
NMVGGVVSPLFFSRKEGGVFFLSRGGFWGGCFFRTPLRLLWGGGGPYFFLGGGGFSSGGCLPFWGAQKGGPAYRLFTPPVGFIFCFPPLRAVFFFLWGGGGFPPGFFFFFRGGGFFVLSVDGGGGSSFNSGGVFFSGRGGFFFFFARCFVCLLGGFSPRLWVVI

SEQ ID NO: 222702 - protein, 119 aa, Glycine max
  Clone ID: PAT_MRT3847_43128C.1.pep
RHVFSAKSFCANGITFSKSFIESVIGFTGIYYELTILSIFFCTHGMSAFSFCYDISECCWSYTHDESVVPKPLYMGSSVSGSGLYAATCHQMNIIRFLSVLLLAPLEQLVYCMPLAVPT

SEQ ID NO: 222703 - protein, 61 aa, Glycine max
  Clone ID: PAT_MRT3847_43129C.1.pep
ASFLQQTMVFFSFAYPAYFLSILALIVALLKLPSPTQIKSLKILLGPHCVPEKKKKKKKPN

SEQ ID NO: 222704 - protein, 83 aa, Glycine max
  Clone ID: PAT_MRT3847_4312C.1.pep
SSWETPLKRKSPILSYPRSPPQMTPSEPSRELSSPIHLSDKFLIPIPYLLIYIGDNVRFKFGIPNLRIMHFLVLLGTLFAFAF

SEQ ID NO: 222705 - protein, 88 aa, Glycine max
  unsure (1)..(88): unsure at all Xaa locations
  Clone ID: PAT_MRT3847_43130C.1.pep
MVHYMAQQYSSSSWSCNLSKMAGLALCLLVMLSYASSSYARLLLNRTRGGFMVSREAHRRNLLDNGLGHTPXMGWNSWNHFACNIKED

SEQ ID NO: 222706 - protein, 155 aa, Glycine max
  Clone ID: PAT_MRT3847_43131C.1.pep
MSSAKKITLKSSDGEAFEVEEAVALESQTIKHMIEDDCADSGIPLPNVTSKILAKVIEYCKKHVEAANPEDKPSEDDLKAWDAEFVKVDQATLFDLILAANYLNIKSLLDLTCQTVADMIKGKTPEEIRKTFNIKNDFTPEEEEEVRRENQWAFE

SEQ ID NO: 222707 - protein, 70 aa, Glycine max
  Clone ID: PAT_MRT3847_43132C.1.pep
GLKILKWWFITLFLKPPKISNGQLKLPRIQKKAKKTFFGNTKGKKNFSTPFLRKPRLNKRAPQKNPDRFS

SEQ ID NO: 222708 - protein, 89 aa, Glycine max
  Clone ID: PAT_MRT3847_43133C.1.pep
QTGRLQRKFARPLTLRMTSPLRRKRKFVGKTNGHLNDFVNLKKSESKICHVDLCYACLFIKDLSCRFAYAIYLVVLYSRLFPLTGVTTT

SEQ ID NO: 222709 - protein, 208 aa, Glycine max
  unsure (1)..(208): unsure at all Xaa locations
  Clone ID: PAT_MRT3847_43134C.1.pep
MKTTQQPEAPQGDPCEEKKKSINPELWQACAGPLVNLPPSGTHVIYFPQGHSEQVAASLNKDPHSQIPNYPNLPSKLLCLLHNLTLLADPETDEVYAQITLQPVPSFDKDALLRSDLALKSSKPQPDFFCKQLTASDTSTHGXGFSVPRRAADKIFPPLDYSMQPPAQELVARDLHDTVWTFRQFYRGQPKRHLLTXGWSLFVSGKRL

SEQ ID NO: 222710 - protein, 57 aa, Glycine max
  Clone ID: PAT_MRT3847_43135C.1.pep
AGYVGEKGDAIGDDHEHADPDIIGNWVPPLLKPKKRDLDGGGSGLSSQLSNMSVNCC

SEQ ID NO: 222711 - protein, 256 aa, Glycine max
  unsure (1)..(256): unsure at all Xaa locations
  Clone ID: PAT_MRT3847_43136C.1.pep
MCVLTTIIILVGAEKKKSINPELWQACAGPLVNLPPSGTHVIYFPQGHSEQVAASLNKDPHSQIPNYPNLPSKLLCLLHNLTLLADPETDEVYAQITLQPVPSFDKDALLRSDLALKSSKPQPDFFCKQLTASDTSTHGGFSVPRRAADKIFPPLDYSMQPPAQELVARDLHDTVWTFRHIYRGQPKRHLLTTGWSLFVSGKRLLAGDSVLFIRDEKQHLLLGIRRANRGTHHISSSVVSSDSMHIXXLAAAAHAA

SEQ ID NO: 222712 - protein, 138 aa, Glycine max
  Clone ID: PAT_MRT3847_43137C.1.pep
NIPHKFHFLKLPHLKPPNSIFYSTGTGCSMNSMFCLGLRLSHVFFCSLCFQDILRSDGDTACEAKVLKCVLKHMRGRKGAEKTTSLSRWLVMRMKMDGLNASICHTSWATSLGCPAGGSFFLCLFSTSNSIFVTPYSN

SEQ ID NO: 222713 - protein, 42 aa, Glycine max
  Clone ID: PAT_MRT3847_43138C.1.pep
LGHIINSTKDLSPFHNQKYPLLPSCELPCFKTQSRSSYLLSR

SEQ ID NO: 222714 - protein, 155 aa, Glycine max
  Clone ID: PAT_MRT3847_43139C.1.pep
MSSAKKITLKSSDGEAFEVDEAVALESQTIKHMIEDDCADSGIPLPNVTSKILAKVIEYCKKHVEAANPEDKPSEDDLKAWDADFVKVDQATLFDLILAANYLNIKSLLDLTCQTVADMIKGKTPEEIRKTFNIKNDFTPEEEEEVRRENQWAFE

SEQ ID NO: 222715 - protein, 73 aa, Glycine max
  Clone ID: PAT_MRT3847_4313C.1.pep
ITRFTRVLLIHLQQTCDGTPWLFQGNCDAVGHGTRRCKCAGSHLVQGLDTCCGMVGAILALRQIDTMLRNVSM

SEQ ID NO: 222716 - protein, 131 aa, Glycine max
  unsure (1)..(131): unsure at all Xaa locations
  Clone ID: PAT_MRT3847_43140C.1.pep
QSCSFCRASLKTTEHLFRQCNYNSLIWQRVFEWLDIIVVIPNDLQAIYNLFGSLILXGKGEEMKIFNMALXTCWCMWKHRNGIIFKSHTFDGGKLLEEIKINSWEWFLYKKQNTNKIFSSWMLTPLLCLNS

SEQ ID NO: 222717 - protein, 103 aa, Glycine max
  unsure (1)..(103): unsure at all Xaa locations
  Clone ID: PAT_MRT3847_43141C.1.pep
MRVVPHVEKKKREEGKKKRPTRPPTRPETQNKPAALLHKSVMKKEFRRMGKAVEKQGAKNYYRPDRKKAALARLSGVQRKPQSVXRSGVRNRNRQGVRVAGRE

SEQ ID NO: 222718 - protein, 392 aa, Glycine max
  unsure (1)..(392): unsure at all Xaa locations
  Clone ID: PAT_MRT3847_43142C.1.pep
MTESEKMNPIDHLPLRLLRSDTVPPAPTFSESTVDFLPHFSGYSWIAYAASSLLTISHFPSPLSPHQTRIGPFFRQSFQLSAHPVAAVAWSPSSPSSGDLAAAADDCIWLFRHDSAAGKGSFCWSQNAVLVQHMKVANIKWTGSGDGIISVGMEVVFWKKSNTCPEVRWKFKADQPQTLVCATWSIEGPSATAAHPSREHIEGTLTNEESKCVLVCQSNGLSEYSKVKLHHPLPVVMIQWRPSRGKLSNRYGKCSVRHVLLTCSLDGTARLWSEIDNAKARRTAKDINDQKNAGCSFCVVAVIEINQSLNATLSSDIFVRWGTEFEGLFQTDKEAKQVFSKEGFEHDVRNCDWLVGXGPGMLLSFXAVHCLDDVSPLRFPXVTLWKNMNSRP

SEQ ID NO: 222719 - protein, 56 aa, Glycine max
  Clone ID: PAT_MRT3847_43143C.1.pep
SCALKNNTPFFSRIVVRPCQHSSRRAKNSVTFNVPVGCYYLIPHPTIYTMFMVHVT

SEQ ID NO: 222720 - protein, 251 aa, Glycine max
  unsure (1)..(251): unsure at all Xaa locations
  Clone ID: PAT_MRT3847_43144C.1.pep
MKVWRWVVSLMLVGLLPVSTMGRFVVEKNSLRVTSPEKIRGTHDSAIGNFGIPQYGGSMAGNVIYPKDNKKGCKEFDEFGISFKSTPGALPTIVLLDRGSCFFALKVWNAQKAGASAVLVADDVEEPLITMDTPEEDGSSAKYVENITIPSALVGKSFGLKLKDAFSGGDMVNLNLDWRESVPHPDDRVEYELWTNSNDECGVKCDMLMEFVKDFKGAAQILDKGXXYTQFTPHYITWXYCPHAFTLSKQC

SEQ ID NO: 222721 - protein, 53 aa, Glycine max
  Clone ID: PAT_MRT3847_43145C.1.pep
PRTKFSSLLRTRILQLGWDVVIPQQTEAWISSFYIQKPQNDYVVRTDPMDSER

SEQ ID NO: 222722 - protein, 105 aa, Glycine max
  Clone ID: PAT_MRT3847_43146C.1.pep
RRLVQLSIQTAVVGEIYAILIFSTSAISEMEVPIGSSRCEIKEHRRWRLRVSFSGGCHHGQSLDETCHWLGEAQRLLLTRPIQKFLRWMLWSSEGRIKKEASRLC

SEQ ID NO: 222723 - protein, 68 aa, Glycine max
  Clone ID: PAT_MRT3847_43147C.1.pep
DSCRETLAHSAPARMKTRHLLNDLWLVMLGVTLRCATDEDSTFTGSIIFTTLGRSFYAFDIYFLPMPS

SEQ ID NO: 222724 - protein, 121 aa, Glycine max
  Clone ID: PAT_MRT3847_43148C.1.pep
KFTFWGYFKGANSVDLECGIPNKRVCTCRHFGVPNGESEDISRVWHGKEAYSEVFVWREKGFVLCWEPWRVLDVEGCELLLGNRRLKIQEQQVEGEKEGEEEVRCAESHGFKRGWNWSNLV

SEQ ID NO: 222725 - protein, 262 aa, Glycine max
  unsure (1)..(262): unsure at all Xaa locations
  Clone ID: PAT_MRT3847_43149C.1.pep
MADNLVLRGTMRAHTDVVTAIATPIDNSDMIVTASRDKSIILWHLTKEDKTYGVPRRRLTGHSHFVQDVVLSSDGQFALSGSWDGELRLWDLAAGTSARRFVGHTKDVLSVAFSIDNRQIVSASRDRTIKLWNTLGECKYTIQDGDAHSDWVSCVRFSPSTLQPTIVSASWDRTVKVWNLTNCKLRNTLAGHNGYVNTVAVSPDGSLCASGGKDGVILLWDLAEGKRLYSLDAGSIIHALCFQPXRYWLCAATEQSIKIWDL

SEQ ID NO: 222726 - protein, 117 aa, Glycine max
  unsure (1)..(117): unsure at all Xaa locations
  Clone ID: PAT_MRT3847_4314C.1.pep
SSSAPSDPRRTAATPREASASSPPPYPSAPPERPPAPSASPPEPAPRGASPAEGPXALDRRISAGAAGDPGRTSATPQAAAAASPGGKPAAPAGAAAGPSASPLAPAPRGVSPPEAP

SEQ ID NO: 222727 - protein, 86 aa, Glycine max
  Clone ID: PAT_MRT3847_43150C.1.pep
TADSSSPKHCARKTLGRRQKSHCRMAFRNQPIINHPSHGGLTPFSPPSPLFQTPPKNNTATYSFYSFSTQLVNYTSKMQTTHTQQK

SEQ ID NO: 222728 - protein, 137 aa, Glycine max
  unsure (1)..(137): unsure at all Xaa locations
  Clone ID: PAT_MRT3847_43151C.1.pep
GLMSVRGEKEIDFGNKIALLFHFNIKKWPIRSVVWQTQFCVTFYLCLNQRSCCKQRSLQAMGASLALSSHSRLRRTQLPQAELFPFGPTPQKTPPLXSLFSXQXRRXQSMARGRRGXSCXPWIIXLPXAFAKGLXFC

SEQ ID NO: 222729 - protein, 323 aa, Glycine max
  unsure (1)..(323): unsure at all Xaa locations
  Clone ID: PAT_MRT3847_43152C.1.pep
VVQEVVPVFSGAHEGLCLCSSRLLFPLWELPVMVVKGSLGPSGTLSENGVVVCRLSVGAMQVLEQKLRSLEKFLRSRRNQRRGLYGCVAGLGDLSGSILYGNGSALGAGDRNMVRNLFGAYSRNMESNGGRTSNKRQRLPYSPAELAAMEVRAMECIRQLLLRSGEALFLLQLLSQHHVTRLIQGFDSNLQQALVQLTFHQLVCSEEGDHLATRLISALMEYYTGPDGRGTVDDISRRLRDGCPSYYKESDYKFFLSVEALERSAMTIDADDKENLAREXAFNSLSKVPESVDLRTVCKRFEDLRLYEAVVRLPLQKAQALDP

SEQ ID NO: 222730 - protein, 140 aa, Glycine max
  Clone ID: PAT_MRT3847_43153C.1.pep
ITLGLPVVGGISSEFSNLRKAAVTDYKSFVGSISSLSARIVEIRELVSQCGNGKGGNFVREMNNFLENAEEELRLVREEQTRVMQLVKRTTDYYQGGSSKESAENPLYLFVIVKDFLGMVDQACIEIARNMQKRKTKTSL

SEQ ID NO: 222731 - protein, 52 aa, Glycine max
  Clone ID: PAT_MRT3847_43154C.1.pep
DSFPRLSELIVIKGPSWNCILRSFGSRYILLHMGCCQVHAKWYPRLPQLAAV

SEQ ID NO: 222732 - protein, 77 aa, Glycine max
  Clone ID: PAT_MRT3847_43155C.1.pep
RRSVFLLMHLTIFMMTALRCISIMMRAFQLCLDLTRTNPVLRTFHKPRLCNSLPNSSSHTSPFHLRYCHHDARMMLD

SEQ ID NO: 222733 - protein, 40 aa, Glycine max
  Clone ID: PAT_MRT3847_43156C.1.pep
IRLERLFCGDLGNEVNDDVLSKAFSRFPSFNLARVSGFLI

SEQ ID NO: 222734 - protein, 51 aa, Glycine max
  Clone ID: PAT_MRT3847_43157C.1.pep
TFFYITTTFHGSSLWDHHRLQDSFPNIFFSLKSCAGFFSNPCSKKTKGNGL

SEQ ID NO: 222735 - protein, 59 aa, Glycine max
  Clone ID: PAT_MRT3847_43158C.1.pep
KGREPIITILTNLYFFSLNSPAIGTKFEPGQNPNFLSLPHLYLHVLGTFRHAQIVNSSS

SEQ ID NO: 222736 - protein, 54 aa, Glycine max
  Clone ID: PAT_MRT3847_43159C.1.pep
RSHSIKGIMLSSLVGLTPGINDLICSVICTSSLSIYSGCSCVASLGRGSFIIKE

SEQ ID NO: 222737 - protein, 84 aa, Glycine max
  Clone ID: PAT_MRT3847_4315C.1.pep
CTSIGPYFMHRLSSRLSTHGMASILYDTIQMPHALWTYASHDVRHEPHNTHNGKWAWLDLVATQRCLIIYCLSGSDLVCYLRCR

SEQ ID NO: 222738 - protein, 98 aa, Glycine max
  Clone ID: PAT_MRT3847_43160C.1.pep
GEKKLYSGGKLNSQILNLGKQGLKLVNKLKVGLFAPKSFLIIPKSLSPGGLHGITEPQNLVFLNGGRTKNGLVNPRGGKPLINLKANTAKAKANFLAA

SEQ ID NO: 222739 - protein, 204 aa, Glycine max
  Clone ID: PAT_MRT3847_43161C.1.pep
EEVIQSGGQIEPPGMHMIYLPYSDDIRFVEERYSDTSGMVNIASDDQIKKAANLIKRIDLKDFSVCQISNPALQRHYAVLQALALEEDDIPEMKDESLPDEEGLARPGVVRALEEFKTSVYGDNYDEENEPGTEKPTEASKKRKANAEFATKECENYDWGDLADTGKVNLVSFFMSGFFYGDLDQIWYRKRKFSIGRILTHTAK

SEQ ID NO: 222740 - protein, 190 aa, Glycine max
  Clone ID: PAT_MRT3847_43162C.1.pep
MGEEVSYKTEPESELHSVPQEHNSSAQEKELEKPEPPNDKVTPPSPVAAQEVADHASKKDTEESVDKDAMLAKVLTEKRLALIKAWEESEKTKAENRAYKKHSAVGLWEDSKKASVEAQLKKIEESMEKKKAEYVEKMKNKIAEIHRLAEEKKAIVEAQKREEFIDLEETASKFRSRGDVPRKFFACFGG

SEQ ID NO: 222741 - protein, 89 aa, Glycine max
  unsure (1)..(89): unsure at all Xaa locations
  Clone ID: PAT_MRT3847_43163C.1.pep
TLYHIKYFNNCSYIQLHLNKNTFTFFHSKNSYFFFHFIIYIKIFPLYSSYTITSFYXSSQNSYHYYIYFLFFLNITIQPYILQTNFFTQ

SEQ ID NO: 222742 - protein, 81 aa, Glycine max
  Clone ID: PAT_MRT3847_43164C.1.pep
MTNKVGKEIFQRAGELNVPVGFMCMKGLDLHISEIEQLCTEFPSTVVLLDHLGFCKPPINDEEGLVFSQLLNLSRFPQVSV

SEQ ID NO: 222743 - protein, 45 aa, Glycine max
  Clone ID: PAT_MRT3847_43165C.1.pep
LPIQSYSSTNQLIFFSYIISKLYFTTSTTGICIQHNLSISIFLYT

SEQ ID NO: 222744 - protein, 140 aa, Glycine max
  unsure (1)..(140): unsure at all Xaa locations
  Clone ID: PAT_MRT3847_43166C.1.pep
MSKNATPKDSGDETATHLDFFKKFKRFNPFESSLAVLAFFFVAFVFIASFFYLDXKRLPLQGTATVLHLDLSSSSSSSVSSSYPVQFLSQDGDKCDVFDGDXVWDETYPLYYSANCSFLDQGCRCSQDGRPDAFYTKWRW

SEQ ID NO: 222745 - protein, 58 aa, Glycine max
  unsure (1)..(58): unsure at all Xaa locations
  Clone ID: PAT_MRT3847_43167C.1.pep
GHRVTLFTRGKPPVTXQLPGVSDCDISDCSAMILHLTXDRKDCDFVESGLFLDGFVVL

SEQ ID NO: 222746 - protein, 53 aa, Glycine max
  Clone ID: PAT_MRT3847_43168C.1.pep
FPSFNHFQLLTLCRSLFPFLSVSRTPFIGKSPSHLLSRRFFYTRILSSKSVYS

SEQ ID NO: 222747 - protein, 160 aa, Glycine max
  Clone ID: PAT_MRT3847_43169C.1.pep
KTVYKAFDEVDGIEVAWNMISVEDVVQTPQQLEKLYSEIHLLKSLKHDNVIKLYNSWVDDTTGTINMITELFTSGSLRQYRNKHKNVDMKAIKNWARQILRGLCFLHCHSPPIVHRDLKCDNIFVNGNSGLVKIGDLGLAIVMQQPTARSVIGTTEFMAP

SEQ ID NO: 222748 - protein, 521 aa, Glycine max
  Clone ID: PAT_MRT3847_4316C.1.pep
MAPSKLNSSGNTSMPCSQAENGFVNSFSLFPEKVVQELLQSPVQGSDDHLIEFSEALRTVAKALRLVAEGKASAQAEAAEWKRKYELERDRNLKFEHAEKSCIEHQAEHEDVRTNNPAKQPVLCNEANGQSEKCCSRNGICSHEVLRDGTPGSDSKMVKKASFKLSWFSKGDQSDQYKHDIVSFERGNITTAERSSKQISLKWESCPQTVLILTKPNSVSVQILCAEMITWLSQQKNLHIYVEPHVRVELLTESSYFNFVETWNDDKELLRLHTKVDLVVTLGGDGTVLWAASMFKGPVPPIVPFSLGSLGFMTPFYSEQYKECLESILKGPISITLRHRLQCHVIRDAAKNEYETEEPILVLNEVTIDRGISSFLTNLECYCDNSFVTCVQGDGLILSTTSGSTAYSLAAGGSMVHPQVPGILFTPICPHSLSFRPLIFPEHVTLRVQVPFNSRSPAWASFDGKDRKQLAPGDALVCSMAPWPVPTACLDDSTNDFLRSIHEGLHWNLRKTQSFDGPRET

SEQ ID NO: 222749 - protein, 214 aa, Glycine max
  Clone ID: PAT_MRT3847_43170C.1.pep
MHHQCAMRNSFKKTMFGARSSLRVFISSTIYSHHSRKICSFSQDHDPGSWESMEGLLRCPANFVPLSPISFLERAAKVCRDRTSLVYGSLEYNWGETHQRCLKLASAITHLGISRGDVVATLSPNVPAMYELHFAVPMAGAILCTLNSRLDAAIVSVLLEHSQAKVLFVDYQLLEIARGALDLLSKKARELPILVLIADNDCTSHIDITSVSYE

SEQ ID NO: 222750 - protein, 607 aa, Glycine max
  unsure (1)..(607): unsure at all Xaa locations
  Clone ID: PAT_MRT3847_43171C.1.pep
ERSNLQYDELLGKGAFKTVYKAFDEVDGIEVAWNMISVEDVVQTPQQLEKLYSEIHLLKSLKHDNVIKLYNSWVDDTTGTINMITELFTSGSLRQYRNKHKNVDMKAIKNWARQILRGLCFLHCHSPPIVHRDLKCDNIFVNGNSGLVKIGDLGLAIVMQQPTARSVIGTPEFMAPELYEEEYNELVDIYSFGMCILEMVTCEYPYSECKNPAQIYKKVTSGIKPAALAKVNDPEVKQFIEKCLVPASMRLSASELLKDPFLATENTKEINHDTLQLPNPHIKLVNLPKCEPHPMEIDXHNPGXSPGSSMGRIEETSQVSFFDLVRMTENNKFMLRGEKNAESTISLTLRIANACGGARNIHFPFYINSDTAISIAEEMVEHLELTNEDVSVIAELINDMIAKLVPNLKPLSEKLSSGTDQLYRPSSEVQNGEQFNCHWPLQSSDYDMKPVFKDLVHSWPVDGDDLEKQESVMSDISVECGITVASDSKVVEPDIFIFDEFWEGFDAFNSTSDVRFCGQEDGHKNQSENSSGSLINSCCCPFKNFDISSICSLTLADKDPSEGLRLEIEAIDTYFEQRFRELEMMRVAAIESLKRRHGEKHTCDVMH

SEQ ID NO: 222751 - protein, 105 aa, Glycine max
  unsure (1)..(105): unsure at all Xaa locations
  Clone ID: PAT_MRT3847_43172C.1.pep
XXTEXXGIXSXXDXTQHXXXXXXQXXLXXXXXXNXXXXXXXGXXXXXIQEXXXXXNXXTGXSXXXXXXXPXXXRXXXTXXXXXXXXXXXXKXXXXXXXXXGPRXX

SEQ ID NO: 222752 - protein, 195 aa, Glycine max
  unsure (1)..(195): unsure at all Xaa locations
  Clone ID: PAT_MRT3847_43173C.1.pep
TRPRACSNIAATGAACLASNVPVNVSEKQPEMASNMDNLEGKASLDMPTTGEHSLTSDVKEKAEQMQHSVESSTTSCKIALDTTLNAVQKIDGSSERLPTGSALNDLNIDSSSHQMCSSSGAEPLAVLDRKLKNQSDSLEKCSRSSPLDIGGTGCPPTPLEPDSFSNNPVTSQADTCTRSHSFSNKPXDTTEHIF

SEQ ID NO: 222753 - protein, 598 aa, Glycine max
  Clone ID: PAT_MRT3847_43174C.1.pep
HDTAHWEELYNTRERARQLLANGSSEIPEETTFTNVEQFLEPLELCYRSLCACGDQPIADGSLLDFLRQVSTFGLSLVRLDIRQESDRHTDVMDAITNHLEIGSYREWPEEKRQEWLLSELSGKRPLFGHDLPKTEEITDVLETFRVISELPSDNFGAYIISMATSPSDVLAVELLQRECHVKQPLRVVPLFEKLADLEAAPAAVARLFSIDWYRDRIDGKQEVMIGYSDSGKDAGRFSAAWALYKAQEELIKVAKEFGVKLTMFHGRGGTVGRGGGPTHLAILSQPPDTIHGSLRVTVQGEVIEQSFGEEHLCFRTLQRFTAATLEHGMHPPVAPKPEWRALMDEMAVIATEEYRSIVFQEPRFVEYFRCATPELEYGRMNIGSRPSKRKPSGGIESLRAIPWIFAWTQTRFHLPVWLGFGAAFSHVIKKDPKNLQMLQDMYNQWPFFRVSLDLVEMVFAKGDPGIAALYDKLLVSEELWPFGERLRSMFEETKSLLLQVAGHKDLLEGDPYLKQRLRLRDSYITTLNVLQAYTLKRIRDPDYHVKLRPHLSKDYMESNKPAAELVKLNPTSDYAPGLEDTLILTMKGIAAGMQNTG

SEQ ID NO: 222754 - protein, 149 aa, Glycine max
  Clone ID: PAT_MRT3847_43175C.1.pep
PRVRDLVEMVFAKGDPGIAALFDKLLVSEELRPFGENLRAKYEETKSFLLQVAGHKDILEGDPYLKQRLRLRDSYITTLNVLQAYTLKRIRDPDYHVKLRPHLSKDYMESSKPAAELVKLNPKSEYAPGLEDTLILTMKGIAAGMQNTG

SEQ ID NO: 222755 - protein, 108 aa, Glycine max
  Clone ID: PAT_MRT3847_43176C.1.pep
VREQFSGKIRKSSRLFQSILELLEAEDAAEDSNHVNGNQNFSRTTIITNGGGNSGGDRNRSNTPNRYGVCTINNTCTFSATSGNINRGFIRRMYLTNTPSGTTSIIYY

SEQ ID NO: 222756 - protein, 122 aa, Glycine max
  unsure (1)..(122): unsure at all Xaa locations
  Clone ID: PAT_MRT3847_43177C.1.pep
QEVNVAYDACTVTCDWAXLLAGKAGTHKPXAGLHAPCINGRLTFASLIPYGEPAVXAPTAVVYYDLSPAEADCQEGGAHIGAHEPEVYDPLATKTCWGKTPKEWLLYLPCVTTSTESTTTVE

SEQ ID NO: 222757 - protein, 174 aa, Glycine max
  Clone ID: PAT_MRT3847_43178C.1.pep
MSMDSMATSIGVSVPVLRFLLCFAATVPLSFLCRFLPRGLGKHLYSSVVGVALSYLSFGFSSNLHFLVPMFLGYASMLLYRPRCGILTFFLGFGYLIGCHVYYMSGDAWKEGGIDATGALMVLTLKVISCAVNYNDGLLKEEGLREAQKKYPLIKLPSLIEYIGYCLCCGSHFA

SEQ ID NO: 222758 - protein, 463 aa, Glycine max
  Clone ID: PAT_MRT3847_43179C.1.pep
MSMDSMATSIGVSVPVLRFLLCFAATVPLSFLCRFLPRGLPKHLYSSVVGVALSYLSFGFSSNLHFLVPMFLGYASMLLYRPRCGILTFFLGFGYLIGCHVYYMSGDAWKEGGIDATGALMVLTLKVISCAVNYNDGLLKEEGLREAQKKYRLIKLPSLIEYIGYCLCCGSHFAGPVYEMKDYLDWTEGKGIWGTEAKGPSPSPYGATLRALLQAGFCMAMYLNLVPHFPLSKFTDPTYHEWCFWKKLSYQYMSGFTARWKYYFIWSISEASIIISGLGFSGWTDSSPPKPRWDRAKNVDIIGVEFAKSAVTIPAVWNIQVSTWLRHYVYERLIQTGKKPGFFQLLATQTVSAVWHGLYPGYIIFFVQSALMIAGSRVIYRWQQAVPPTMSLVKNVLVFTNFAYTLLVLNYSCVGFMVLSLHETLASYGSVYYIGTIVPVVMILLGKVIKPGKPARSKARKEQ

SEQ ID NO: 222759 - protein, 60 aa, Glycine max
  Clone ID: PAT_MRT3847_4317C.1.pep
LDPPSFKERKRWAIEPLGGVMTPENSRKHGWTMTFRRLGWKKKILHWKITPNNPCNDAGI

SEQ ID NO: 222760 - protein, 57 aa, Glycine max
  Clone ID: PAT_MRT3847_43180C.1.pep
YVGPSFKITHPPKTEFPIARGQDKSDDCAPMRHHSFIKLQLKKTPFFNKKNISLLIN

SEQ ID NO: 222761 - protein, 53 aa, Glycine max
  Clone ID: PAT_MRT3847_43181C.1.pep
GADQSRYHFLQYFFSPTIVLLEPGSTVQSPVPCSGQLRELVTIVKACIERFCY

SEQ ID NO: 222762 - protein, 164 aa, Glycine max
  Clone ID: PAT_MRT3847_43182C.1.pep
RTEAANEQLRKELEEKIDQVKTYYNKHQLEKQANKEKICFGCLEVHDIAAFVLTPAGHYEAITRNCSNYYLSDESVALFADHLPTRPNYIVGQIVHIERQIVKTLPPRPEHGRADKFTPDKGTDWLTLNSGSTPNPYGLPVGCEYFLVTVAMLPDTPIHSSSPS

SEQ ID NO: 222763 - protein, 63 aa, Glycine max
  Clone ID: PAT_MRT3847_43183C.1.pep
RILDQNRRFNRKKKDRTCDLTEQEKRVMVQNEIKTRGGVLRVSKVTKAGMRKLRLFVVSTKFN

SEQ ID NO: 222764 - protein, 78 aa, Glycine max
  unsure (1)..(78): unsure at all Xaa locations
  Clone ID: PAT_MRT3847_43184C.1.pep
KKKRGPGIKTVLVSTINCTHGLPIFCHGTMDKVIYSFTMHFHINVVLDLFICFCFCFKDCKCNIHNRISGLLVAXFSN

SEQ ID NO: 222765 - protein, 71 aa, Glycine max
  Clone ID: PAT_MRT3847_43185C.1.pep
IDENHPIILTHLFDSSIDVLGLLDGFHQFTYLIFLNFLVVNLHTICILLHFWIDFGLIGYNCHTNSLSIAP

SEQ ID NO: 222766 - protein, 43 aa, Glycine max
  Clone ID: PAT_MRT3847_43186C.1.pep
GTPIYTPFEEVHVISLSFPLSSPFRCRIDACSKAWLTREFSTG

SEQ ID NO: 222767 - protein, 126 aa, Glycine max
  Clone ID: PAT_MRT3847_43187C.1.pep
VCSLFVEYAQENNLTSLYYAIAVTYICAIAPAMVVYAAYAYRTTGILGRRAILGLAVAALAAPLTCLSALAWVYHRGGPVVVLRYKLPICNTNNNYKPPHRPEHNQQRFAAQATSVCLAILCPHTS

SEQ ID NO: 222768 - protein, 46 aa, Glycine max
  Clone ID: PAT_MRT3847_43188C.1.pep
YVCHQKGCGKRFLDSLMLKRHFLILTGERDFVCPYEGCGKVMNRSN

SEQ ID NO: 222769 - protein, 48 aa, Glycine max
  Clone ID: PAT_MRT3847_43189C.1.pep
GQRSTDATLSPTARRHLRKGLYHDKVRTSAHGEREANTNKTNSTKKKK

SEQ ID NO: 222770 - protein, 36 aa, Glycine max
  Clone ID: PAT_MRT3847_4318C.1.pep
TLRRLVILCNWTCKVKVMEHEGELSRLLTTSRTWYF

SEQ ID NO: 222771 - protein, 324 aa, Glycine max
  Clone ID: PAT_MRT3847_43190C.1.pep
MAPNITTVTDAQAKAAGGRGRAYVTFLAGNGDYVKGVVGLAKGLRKVKSMYPLVVAVLPDVPEHHRNILTSQGCIVREIEPVYPPENQTQFAMAYYVINYSKLRIWEFVEFSKMIYLDGDIQVFDNIDHLFDLPDNYFYAVMDCFCEPTWGHTLQYQIGYCQQCPHKVQWPTHFGPKPPLYFNAGMFVYEPNLDTYRDLLQTVQVTKPTSFAEQDFLNMYFKDKYRPIPNVYNLVLAMLWRHPENVELEKVKVVHYCAAGSKPWRYTGKEENMEREDIKMLVKKWWDIYEDETLDYNNPFNVDRFTAALLEVGEVKFVRAPSAA

SEQ ID NO: 222772 - protein, 216 aa, Glycine max
  unsure (1)..(216): unsure at all Xaa locations
  Clone ID: PAT_MRT3847_43191C.1.pep
MAPNITTVKTTITDAQAKVATDHGRAYVTFLAGNGDYVKGVVGLAKGLRKVKSMYPLVVAVLPDVPQDHRNILTINYSMANXLSPLGGTRAQSRFAWAYYGXDGSKLXILEFVEYIKMIYLDGDIQVFDNIDHFFDLPDNYFYAGIDCFCEPTWGHTKQYQIGYCQHCPHKVQWPTHFGPKPPLYFNAGMFVYXPNLATYRDLLQTVQGTQPTYFC

SEQ ID NO: 222773 - protein, 71 aa, Glycine max
  unsure (1)..(71): unsure at all Xaa locations
  Clone ID: PAT_MRT3847_43192C.1.pep
TRGLCPSPLGPSSXSTWAFRLYLACFMILITLPPLXNRTYVXLXIXSXFYTEKYGRNXKFLFSITDQXXKF

SEQ ID NO: 222774 - protein, 129 aa, Glycine max
  Clone ID: PAT_MRT3847_43193C.1.pep
LKPLHLSNSLTTMKIIHLSGKSCCSWFLLGLLSIIASLASDLNWGLGTALLVENGVGPSQSVIPPPPDHYNHFGLPRPTAPTDTAFSKLIHAGCCYKIRVSFHCLYLFSKINYQPKKQDDSHIIIQACA

SEQ ID NO: 222775 - protein, 62 aa, Glycine max
  Clone ID: PAT_MRT3847_43194C.1.pep
VAFFHPPMDDISGTRESLIYVTSFYTGSGLNKPDCLSTVYVYPNYSSFSKEIHRLPAAYLGD

SEQ ID NO: 222776 - protein, 177 aa, Glycine max
  Clone ID: PAT_MRT3847_43195C.1.pep
HSFVLPPTTSLMQAYYNGIPGVFTAAFPPVPPLLSNYTGKVPRGLCTPARGTKLDKLKYGSNVQIVLQDTSIVTTEDHPMHIHGFHFFVVGSGFGNFNPATDPARFNLVDPPVRNTIGTPPGGWVAIRFVADNPGIWFLHCHIDSHLNWGLATALLVENGVGPSQSVIPPPPDLPQC

SEQ ID NO: 222777 - protein, 99 aa, Glycine max
  Clone ID: PAT_MRT3847_43196C.1.pep
PLLSRCHKTYANGSTEKIQLCPDMCSLILNSGLYDREVQLSRERQLFGLCAPTFGTFSTRTRGPWITFCCATLGHRKCLGDVLNVRKKMYLGRVLGFNR

SEQ ID NO: 222778 - protein, 89 aa, Glycine max
  Clone ID: PAT_MRT3847_43197C.1.pep
VYDWKSLNSLDAVVNPNLKISNHTQYCNNKKNLNSGFPPHQFNLKICPLPFKKKKEKKKKKKKKKKQKKQKKNSKKKRKIKKEGGAAFF

SEQ ID NO: 222779 - protein, 120 aa, Glycine max
  unsure (1)..(120): unsure at all Xaa locations
  Clone ID: PAT_MRT3847_43198C.1.pep
TALGFGAPPTTLPLQVRLTSSPSTLAFPLIHICQNAGESLITICTKRKAKSRLDTLCSAPVQDQEVRDITIRERSGSLDLLAGGHGKRIXSSMPKQYEPLXRXPIALYRFYTLTHTDQVK

SEQ ID NO: 222780 - protein, 84 aa, Glycine max
  unsure (1)..(84): unsure at all Xaa locations
  Clone ID: PAT_MRT3847_43199C.1.pep
LSFFQSGPSSSFDDYEFSKPFCXFCMCPRSMPPQCSCENFWVNSSPSNCXNCLCPRSHPGQFCFFYPHDFFFNPFKSQDFLKNL

SEQ ID NO: 222781 - protein, 90 aa, Glycine max
  unsure (1)..(90): unsure at all Xaa locations
  Clone ID: PAT_MRT3847_4319C.1.pep
DSFKRQWPFPIRVLRIRISFRKKGGGKPIPKVKLDRNALPLVVVIRTQKDXNIISKVYFKKNSVIVDHENAKETXGYYKKIHFPLLGKEK

SEQ ID NO: 222782 - protein, 71 aa, Glycine max
  Clone ID: PAT_MRT3847_431C.1.pep
LLPNLIFFRRMKKGKRTGDFRFIDILSSPFSCRVQTLHEIIPVLLPSLLCLFGKDKAKSILCTLLYSWEKM

SEQ ID NO: 222783 - protein, 120 aa, Glycine max
  unsure (1)..(120): unsure at all Xaa locations
  Clone ID: PAT_MRT3847_43200C.1.pep
GCSMISASSVATVNRADAGVKGPFTGLRLMAGLRSLTTNRDITYDARNGGGLQTLQVXPPVGYKKGETLSYLPDLDDAQWAKEVDYLIRKGWIPCFEFELEHGYEYREHNKSPGYYKGHY

SEQ ID NO: 222784 - protein, 166 aa, Glycine max
  Clone ID: PAT_MRT3847_43201C.1.pep
MGRPPSNGGPAFRFTQPEVSEMEAILQEHNNAMPSRDVLTALAEKFSESQDRKGKISVQMKQVWNWFQNKRYAIRAKSSKTPGKLNITPMPRDDYNSTPIRSMPQQPTAASIPAASATVPTAVKATTGNSAMEFEAKSGKEGAWDEGATFLSHRYLETIDPGSAGP

SEQ ID NO: 222785 - protein, 34 aa, Glycine max
  Clone ID: PAT_MRT3847_43202C.1.pep
RFIYILKSHPTSKVKQVRINFSKYQKWLPFAKKP

SEQ ID NO: 222786 - protein, 437 aa, Glycine max
  Clone ID: PAT_MRT3847_43203C.1.pep
MAHNYIATDSPLSRRIVRAFLHFLNSVEPGPGVDAEGIEVARECLAEAFKLNQSPVAGDDVKSDSLIDIFKSLEAKKQCEPSKSDVGPQPDSVDASSSFSGENPARGKNHSEASKSTDEDSTQGPHAFVSKDELCARFFAALEKNCYFWSNTDGSDDPVQLEKASCLFNEACMELERSGCHQFSLKNLAESLKTLGNKAMQSKKYSDAIELYNCAIAVHEKSAVYYCNRAAAYTQINKYTEAIQDCLRSIEIDPNYTKAYSRLGLVYYAQGNYRDAIHKGFRKALQLDPNNESVKENIRVAERKLLEEQHRAYPNQNTRSSQEFPNQSAQGGSRSHGEPPPFSSMPFNPRDIASMFMNFTNATNAQQQGSHSQERQEDSNGSGASEPEIRIGGNISVNMEDMPEDITGAFQSMMEMLSGAAPPGQPQDQMNGRAAPN

SEQ ID NO: 222787 - protein, 227 aa, Glycine max
  Clone ID: PAT_MRT3847_43204C.1.pep
MADPQKIHPVHHDVEAQNHPSAPLVPRSMSKSDAGDPQRVVVVQQQQQQQQQHIPVKHTKPPTKKRRSCCCRFFCWLISILLILIVAIGITIGILYLVFRPKLPKYSVDELKVTNFDLADNNSLSVTFNLTITARNPNKKIGIDYRGGSHISAWYMDTKLCEGSLPKFYQGHRNTTILSIPLTGKTQDATGLQNTLQNQLQETGNVPLNLRVKQPVRIKLGKLKLFK

SEQ ID NO: 222788 - protein, 146 aa, Glycine max
  unsure (1)..(146): unsure at all Xaa locations
  Clone ID: PAT_MRT3847_43205C.1.pep
MADPQKIHPVHHDVEAQNHPSAPLVPRSMSKSDAGDPQRVVVQQQQQNIPLKQTKPPPKKRRSCCCRFFCWLISILLILIVAIGITVGILYLVFRPKLPKYSVDELRVTHFDLADNNSLSVTFNLTITARNPNKKIGIDYXGGSHI

SEQ ID NO: 222789 - protein, 109 aa, Glycine max
  unsure (1)..(109): unsure at all Xaa locations
  Clone ID: PAT_MRT3847_43206C.1.pep
SFLGQHPCFFPIPVTALMGSPHRVLSPIEGPISCSLAPNSSLFFLARAQSVLVRANSVCTCDFSFFFAGAVYRFFFPFLAIIWSPPPPPGVRFLVSARVXXVPXPQTPK

SEQ ID NO: 222790 - protein, 293 aa, Glycine max
  Clone ID: PAT_MRT3847_43207C.1.pep
MGDRGEDEDLQMAIRMSMQRGTPEPKRSKPRDAVADAVSGSPEELPEYKTRRRELMAAAAEKRMAAAARVSPSPSPSPSPVKKGGELGRREEDSCLKSVNLSKELSAEEANQLFGMVFGNEVSKGILAQWSNQGIRFSSDPVTSMGLVQHEGGPCGVLAAIQAFVLKYILFFSDELKDVSCMSPEGLGASFKSQSIPSYNFSSLTEGEKIRALVRSMGEILFSCGSNRRAVIATLSISENDIQRFEGISEVEVVTKSLQGLSIESALDLQKVLRVETCTSQTTALQRLEANLP

SEQ ID NO: 222791 - protein, 76 aa, Glycine max
  Clone ID: PAT_MRT3847_43208C.1.pep
RCHRHLFRAGTGVAATRCLMVLPAVLIGNIAIRATAVSKTDRLCNVTVPPQTYGLKHLTVVPTSYDKQHASSVPSL

SEQ ID NO: 222792 - protein, 121 aa, Glycine max
  Clone ID: PAT_MRT3847_43209C.1.pep
PIPFAISVFKFPSFQSERSSNRLERRHSANSKLVESFVALSSEIETPLSLVYLSSNIVLRYKSKPLLRSEAKRLGYSLSLFCAKRFPKNASERRVLVCSDRGIAGGLMEKVPFCAPVFAIP

SEQ ID NO: 222793 - protein, 40 aa, Glycine max
  Clone ID: PAT_MRT3847_4320C.1.pep
NDLDARPVHLGGTTQYTVNNHIRNATLINITNNPTNIHLP

SEQ ID NO: 222794 - protein, 98 aa, Glycine max
  Clone ID: PAT_MRT3847_43210C.1.pep
MGDRGEDEDLQMAIRMSMQRGTPEPKRSKPLDAVAGAVSGSPEESPEYKTRRRELMAAAAEKRMAAAARVSPSPSPSPSPVKKGGELGRSEEDSRLKV

SEQ ID NO: 222795 - protein, 166 aa, Glycine max
  Clone ID: PAT_MRT3847_43211C.1.pep
HSSARLDFQMDRRGSRQPVIKNFKTILPAASNDIYYRDEIGNISTSNVYPRADRVEVELRPRFPLYGGWRTNYILGYNVPSTSFLRHSGSNFAIKMKLMDRLYDNAVVEKLCVKIILPETSKNIKLVTPYSVKRLPDEVHITYLDTFGRPVIVLEKENLINNHIQP

SEQ ID NO: 222796 - protein, 71 aa, Glycine max
  unsure (1)..(71): unsure at all Xaa locations
  Clone ID: PAT_MRT3847_43212C.1.pep
XXFXXVVXXXXXXRSXFXXXXVXYXXXXXXDTWXTXXXAXSXESLXXXXXXXXXVXXLLEPNSELTYACXR

SEQ ID NO: 222797 - protein, 67 aa, Glycine max
  Clone ID: PAT_MRT3847_43213C.1.pep
PKQRPGGRVARGSCGPSNPSWPLPSLAQSSFSSALRGVRCCGSCVVGGGPSRPLPHSSPSCKRPSWA

SEQ ID NO: 222798 - protein, 206 aa, Glycine max
  Clone ID: PAT_MRT3847_43214C.1.pep
MASNSDKDSPTPPSPDSSSSQSPPSSPPPSQDSSSPPPSSQDNSSPPPSSPPPSSPPPSSSPPPSPPPPSSNDQKSPPPPSDSSSSPPSPPPPPPPDKDSGSHRSPPPPPHSRHEFSPPPPPNHRLSPPKSSSSGSSDGLKDSESHSLSMPVIIGIAAGAGILLLLLLGVVCACSRRKKRSQPSVSYYANQPSDMDIIKDQGEGKI

SEQ ID NO: 222799 - protein, 59 aa, Glycine max
  Clone ID: PAT_MRT3847_43215C.1.pep
IMEAPTIERQVGFAGPARPDNCHSRLMLDLNYVPLLCGRVNHLVNSSEMSLFLCFKGMN

SEQ ID NO: 222800 - protein, 192 aa, Glycine max
  Clone ID: PAT_MRT3847_43216C.1.pep
MKSKGLEYLYKDMPSLIAPHGNLKSSNVLLTESFEPLLTDYGLVPVINQDLAQDIMVIYKSPEYLQQGRITKKTDVWCLGILILEILTGKFPANFLQQGKGSEVSLASWIHSVVPEEWTSAVFDQEMGATKNSEGEMGKLLKIALNCCEGDVDKRWDLKEAVEKILEIKQRDNDQEDFFTSYASEADMKSST

SEQ ID NO: 222801 - protein, 125 aa, Glycine max
  Clone ID: PAT_MRT3847_43217C.1.pep
MKTPNKASLLLFPLLSLSLFINHSHAAGIAVYWGQNGGEGTLAEACNTGNYQYVNIAFLSTFGNGQTPQLNLAGHCDPNNNGCTGLSSDINTCQDLGIKVLLSLGGGAGSYSLSSSDDATQLANY

SEQ ID NO: 222802 - protein, 184 aa, Glycine max
  unsure (1)..(184): unsure at all Xaa locations
  Clone ID: PAT_MRT3847_43218C.1.pep
MGGCCCSARKPHLQGAPVYYYCPPTFEERESLTSNDGLNASVNAGFLIGLNLEASMPDTFQPPPVPLPYDMVLGGSASTDSESGRETVSSFETSITREDVEESDCKAQANSALTSPKKAQLPKSNVTQELVTEEEDVCPICLEEFDVENPRNLTKCEHHFHLSCILEXLERSDSCPICDQEMIF

SEQ ID NO: 222803 - protein, 102 aa, Glycine max
  Clone ID: PAT_MRT3847_43219C.1.pep
YIYIYIYIYIYIYIYIYIRVLHGAYILCGTSRAYIYLGYNCENKRWYISCGLVQVERTSTWLFKENKGWYIPCGSLLVKDFTRLLEISRTGACLGTGRRHRL

SEQ ID NO: 222804 - protein, 194 aa, Glycine max
  Clone ID: PAT_MRT3847_4321C.1.pep
IRLETLSLLYSSASNSIRHPLIPTTPSYTLQHRILFPDHHLLILTNPQQQQQKLHELECVYYTLHPNASSSGSPEPVLEVQVRPVLSTDRYDESRSIVRCPLPQTNSSAGGGPKAVDLRRRGEVGRRSLGILMNQTAQSWDRVAYEATLDGDTVVVFVKGLNLRPHKISDPTRIRCHFGLKSFTRTMPFTYQRA

SEQ ID NO: 222805 - protein, 39 aa, Glycine max
  Clone ID: PAT_MRT3847_43220C.1.pep
ILLITFIIKKHSNKSHINSKSILTKISFGNHHLNTHGIE

SEQ ID NO: 222806 - protein, 127 aa, Glycine max
  unsure (1)..(127): unsure at all Xaa locations
  Clone ID: PAT_MRT3847_43221C.1.pep
KKSAELVPGSAHALSEIITRSGIPAGVFNLVVGSGSVVGQTLLDHPDVAAISFTGSVQTGRKIAQACVLSNPMKKFQLEMGGKNPLVVLDDADLKTAVEXAXNGSYFSTGQRCTASSRMIGTICIHE

SEQ ID NO: 222807 - protein, 77 aa, Glycine max
  Clone ID: PAT_MRT3847_43222C.1.pep
TPPPRICSPDGESHLGPLFFGVKPPPGFYGPRGRSPLPLKPRGEPPFFGVFLGAPKGKGPFFFFRLGKFNFFPDKEP

SEQ ID NO: 222808 - protein, 47 aa, Glycine max
  Clone ID: PAT_MRT3847_43223C.1.pep
NQPHKILIVIIWHVCYVYQYVKCSAKNKNKNQYAKWEIGISVVMERK

SEQ ID NO: 222809 - protein, 99 aa, Glycine max
  unsure (1)..(99): unsure at all Xaa locations
  Clone ID: PAT_MRT3847_43224C.1.pep
FHLLGLIGVRGCCMRRHKRKLPVRGGNDMPTTLVSYPESDSYSCKTHXLTALVQRGSGSDHVYTPSEPGGLGNSRPWKRYEELIRVTNGLSTQNLQDYR

SEQ ID NO: 222810 - protein, 181 aa, Glycine max
  Clone ID: PAT_MRT3847_43225C.1.pep
DAGVDPEIPNRDPEGEPGLPKREKKKSGGKKGKKLFPGENGKPGKKPKKKQPGRKKGKAGGAKGGSKPKKMGGPPRPAYKGENRAGQGHKKRAQPPGKGGWGMGPKGGFPSHKEKGKKWRALNGLPLKKGKKGAHAGLPQGAKKRGEGGKRGEKTRAGKGLGGAHNRENPTRAQPGLGKGP

SEQ ID NO: 222811 - protein, 28 aa, Glycine max
  Clone ID: PAT_MRT3847_43226C.1.pep
HLLVLVLFQLLRTESYYEVLGKLVPIQR

SEQ ID NO: 222812 - protein, 73 aa, Glycine max
  unsure (1)..(73): unsure at all Xaa locations
  Clone ID: PAT_MRT3847_43227C.1.pep
GXGXSNCFFFXFFFFSKKNGLMGAISKTFIPGILNPKLAKTKKKILGGNLFWGMIYFNQNFLNQRVPDPFFRD

SEQ ID NO: 222813 - protein, 85 aa, Glycine max
  unsure (1)..(85): unsure at all Xaa locations
  Clone ID: PAT_MRT3847_43228C.1.pep
MPVEKADTGDDDTGHDVAADYSGERLGAATSDHTVEILGVSNYGXEHHSKLXTGHEGPVWQVVWAHPKIGCLLARSIYAGQHDDW

SEQ ID NO: 222814 - protein, 79 aa, Glycine max
  unsure (1)..(79): unsure at all Xaa locations
  Clone ID: PAT_MRT3847_43229C.1.pep
RSFFLPSQXSIVNYSPLAVICPQHMLLFIVVGSSALSLVGLXLLIECIHVLPVLVFVXXDGPLLSXVRCRFHLLYIACG

SEQ ID NO: 222815 - protein, 66 aa, Glycine max
  Clone ID: PAT_MRT3847_4322C.1.pep
HPVKADGSLSLTVSEDWERRGPYSLSQLALIWDGLMQTLISSMRYTLDTSSTMLDRLVLCPGLKNL

SEQ ID NO: 222816 - protein, 377 aa, Glycine max
  Clone ID: PAT_MRT3847_43230C.1.pep
MADTEDIQPLVCDNGTGMVKAGFAGDDAPRAVFPSIVGRPRHTGVMVGMGQKDAYVGDEAQSKRGILTLKYPIEHGIVSNWDDMEKIWHHTFYNELRVAPEEHPVLLTEAPLNPKANREKMTQIMFETLNTPAMYVAIQAVLSLYASGRTTGIVLDSGDGVSHTVPIYEGYALPHAILRLDLAGRDLTDALMKILTERGYSFTTTAEREIVRDMKEKLAYIALDYEQELETSKTSSSVEKSYELPDGQVITIGAERFRCPEVLFQPSMIGMEAVGIHETTYNSIMKCDVDIRKDLYGNIVLSGGSTMFPGIADRMSKEITALAPSSMKIKVVAPPERKYSVWIGGSILASLSTFQQMWIAKAEYDESGPSIVHRKCF

SEQ ID NO: 222817 - protein, 96 aa, Glycine max
  Clone ID: PAT_MRT3847_43231C.1.pep
RHGTETDTGGGLYHPGSHGDKIAYRSISTREWCHGDLYDSVVEHGACQRHRGRNTPQVRATERSVAGCRYQLQTRLGWPSWHQWSESLGHTSRYLG

SEQ ID NO: 222818 - protein, 79 aa, Glycine max
  Clone ID: PAT_MRT3847_43232C.1.pep
GRVVLRLISLILMPQGLATYYKPINKSPVYKPPVYKPPSYKPPPYKSKPPRCTTRLHHVTQPNDNTPYTRLHFIYYTPL

SEQ ID NO: 222819 - protein, 84 aa, Glycine max
  Clone ID: PAT_MRT3847_43233C.1.pep
MGFMLKEALRTLCGRNQWSYAVFWKIGCHNSKLLIWEECYYEPLPCPPHMFGMPDLPYQNGEGCWVSLEYRSSQLGIQEDDQVS

SEQ ID NO: 222820 - protein, 64 aa, Glycine max
  unsure (1)..(64): unsure at all Xaa locations
  Clone ID: PAT_MRT3847_43234C.1.pep
CKCFFINLPFHFDMNISYLHSIKQGNARDQPVNRIEKHEEEKHNPSRAHRFEGEEPFLLLXIHT

SEQ ID NO: 222821 - protein, 81 aa, Glycine max
  Clone ID: PAT_MRT3847_43235C.1.pep
GNADAEQRSHAHRVPDITPQCYSLIINMPYPKSRFCRGIPDTKITIYDVGMMYNGLDEFPFCVQLVTWNKANVSTYVLEAT

SEQ ID NO: 222822 - protein, 65 aa, Glycine max
  Clone ID: PAT_MRT3847_43236C.1.pep
NAAPGKYEDLMFAGVLDPPKVVQCCLEHPPSVAKTFLMSDWVVVEIKEPGALPAGNPLGHSGFGL

SEQ ID NO: 222823 - protein, 115 aa, Glycine max
  unsure (1)..(115): unsure at all Xaa locations
  Clone ID: PAT_MRT3847_43237C.1.pep
PLNFDSSKHSFCQXSIDLLGGRILLDKTGDWITLIQNSPIRHXLRVAAWNKGCLMAKIVMRGNATIEKRDWASLVQVILTNXGRADHFDACEWTESEPHSWEXILPIKVSGPNNT

SEQ ID NO: 222824 - protein, 49 aa, Glycine max
  Clone ID: PAT_MRT3847_43238C.1.pep
NLSSRSHSLLVWSDVIFVLVIVLVTTLINFVWHWHTCHFAGFKLAHDAG

SEQ ID NO: 222825 - protein, 89 aa, Glycine max
  Clone ID: PAT_MRT3847_43239C.1.pep
LTKNIIYRAVFLSNSQNSQDGFIKILKGLWNLFITLNIPDYIPYLYYIYPQTFNSILSMALRPLDIFINKIIHEHVLNINNDTTSEFID

SEQ ID NO: 222826 - protein, 142 aa, Glycine max
  unsure (1)..(142): unsure at all Xaa locations
  Clone ID: PAT_MRT3847_4323C.1.pep
FDSSEDSFISTNATINLSHVCSELQYLAVCVFYTTRCGIYNXIFTHFKNLLYFPLVFLHREKKITYFPLVNRLNSLLYGCDKLTISSLYITPNALTYIXLTYICQYIPNVRWMLLTYFGNTHPRLLKFSNGCPTLHKLEMTA

SEQ ID NO: 222827 - protein, 67 aa, Glycine max
  Clone ID: PAT_MRT3847_43240C.1.pep
EKRREYVLKELPSRLVYTEREYLLLDKRHPQLFVSPEYTKDAVNRPKENLKLSIHTPESFEHDFVEE

SEQ ID NO: 222828 - protein, 63 aa, Glycine max
  Clone ID: PAT_MRT3847_43241C.1.pep
NYLFLGESPQGAQKNFFSLEVMPHVCPKNFGFFIPFTKAAPPPRFSFTSEKKTPKRFLIMRLG

SEQ ID NO: 222829 - protein, 60 aa, Glycine max
  Clone ID: PAT_MRT3847_43242C.1.pep
ICSVPPGSPIEHFCQISHRLQGHVLNSWWKAGWCVIIWNIWYNRNKILSGGGEGEAQDTF

SEQ ID NO: 222830 - protein, 93 aa, Glycine max
  unsure (1)..(93): unsure at all Xaa locations
  Clone ID: PAT_MRT3847_43243C.1.pep
HGERREGRVGVGGCPPPSSMGMATLSSSLPLFHRYPNXNPNPSLFRPSLSLSFSFSRTKPRRXPFLXLASSSHDFTXXXKXSXLTXLIQXIXP

SEQ ID NO: 222831 - protein, 38 aa, Glycine max
  Clone ID: PAT_MRT3847_43244C.1.pep
SLFPLRVSYIITVYMPFILSGPSTIYSHLHLPKCYYIT

SEQ ID NO: 222832 - protein, 37 aa, Glycine max
  Clone ID: PAT_MRT3847_43245C.1.pep
KTADCFRLIGGKHPIECLGRSLKLRLNLKTQFYCTAL

SEQ ID NO: 222833 - protein, 47 aa, Glycine max
  Clone ID: PAT_MRT3847_43246C.1.pep
LRFWFMGKGQGENVCITCWVSYSYDSSSSVFISGHWSELTSGFVTAF

SEQ ID NO: 222834 - protein, 69 aa, Glycine max
  Clone ID: PAT_MRT3847_43247C.1.pep
PNDKVSINGFFSSLSLEHQYFWLVIIMFFFYLIPVQIVLNLLSFMRWYRYVPLKMFFYLKNLVLQTLLD

SEQ ID NO: 222835 - protein, 97 aa, Glycine max
  Clone ID: PAT_MRT3847_43248C.1.pep
HIWETEYMGGRRVAPTSFCRLCLYKLYAPYHYSHYCCRHYNEGYVFFPTRDTLSTMTSYATSRGGGRRTTLLSVLTSSWGEPLTYERADSTYYFHTP

SEQ ID NO: 222836 - protein, 123 aa, Glycine max
  unsure (1)..(123): unsure at all Xaa locations
  Clone ID: PAT_MRT3847_43249C.1.pep
MANNMVTMVFLILMLISSITPTEIDARNQDLVAATKEMQKANYFTFVMLINMSPLDTIEGNVTFLMPNDRMLANMVLQEGSISSFLLRHSIPSPMLXDVLEQFXTGTTIPTSLPNCMLRVXNN

SEQ ID NO: 222837 - protein, 56 aa, Glycine max
  Clone ID: PAT_MRT3847_4324C.1.pep
SRNLVSEFVCGFTHVIMFASQFVSHELVTYTVVSISALSYRLSMNMYMHQALKHAP

SEQ ID NO: 222838 - protein, 68 aa, Glycine max
  Clone ID: PAT_MRT3847_43250C.1.pep
NIHQINRLISSESSHRICTPGSRSKSSTLNRVHLTLWHHNDKSRYKSPYHEQSNEIHALMVYNVLYML

SEQ ID NO: 222839 - protein, 109 aa, Glycine max
  unsure (1)..(109): unsure at all Xaa locations
  Clone ID: PAT_MRT3847_43251C.1.pep
VTYKNINFTVFDVGGHYKRGCLLRLSFHNTHGLIFVVDSIDRDRFVDAKHELHRMHNEDXLIDAILLVFANKQDLPNAMNAAEITDKCVSXNSIIQLHCYIQSTCATSG

SEQ ID NO: 222840 - protein, 62 aa, Glycine max
  Clone ID: PAT_MRT3847_43252C.1.pep
NNGRSLHQAFRGPPPARLLHRYAMIYKYTCRKRTLCRFILLLLRQNHYTCLVCVLQGRKAGR

SEQ ID NO: 222841 - protein, 79 aa, Glycine max
  Clone ID: PAT_MRT3847_43253C.1.pep
RLQIPKRISLLMTKLETDESQTSDDETASKDSTAEHRATATIGPRPGPAGHACNPVDLSAMSELLNDPSINELAEQISK

SEQ ID NO: 222842 - protein, 64 aa, Glycine max
  Clone ID: PAT_MRT3847_43254C.1.pep
CYSLPRWLSFPYVIKSTPPVWVVPPRSRTKLLACSPPYSRFPPVLARKKKGMHLKTTFRWPLRR

SEQ ID NO: 222843 - protein, 213 aa, Glycine max
  Clone ID: PAT_MRT3847_43255C.1.pep
PPEIGMIIEIHLKMVNAVDSLLSLNPQSEEFLWVVWELSMLSRSDCGRQALLALGNFPEAVSFLIEALSSIKESESVGKSSGSSAVNLTIFHSAAEIIEAIVTDSTASSLGSWIGHALELHRALNFSSPGSNRKDAPSRLLEWIDAGVVFHKQGGIGLLRYAAVLASGGDAQLTTVLVSDLTDVENVVGESSSGSDINVMENLGKFISEKSFD

SEQ ID NO: 222844 - protein, 124 aa, Glycine max
  Clone ID: PAT_MRT3847_43256C.1.pep
EVINPGFETSGTLGGVSKSSTIQSYHAYDGSISSNDGVDEQFPNQYLDSFENTYTVANGVSEGGSRKGKGLVNSMLRGDLETQRQSYFREGRPRIPRDNRRNLNEVSETTRHGHAHWMRTKKDE

SEQ ID NO: 222845 - protein, 74 aa, Glycine max
  Clone ID: PAT_MRT3847_43257C.1.pep
SGRAAAECTATLLREAHPCQLREAMRIRPLAGDRLGGSIDQRPGMFEQVSRRIDLAVETLTAYDRGRYCEGHLL

SEQ ID NO: 222846 - protein, 166 aa, Glycine max
  unsure (1)..(166): unsure at all Xaa locations
  Clone ID: PAT_MRT3847_43258C.1.pep
ELNANHLSGHIPPELGKLTDLFDLNVANNNLEGPIPSNLSSCKNLNSLNVHGNKLNGSIPPSLQSLESMTSLNLSSNNLQGAIPIELSRIGNLDTLDISNNNLVGSIPSSLGDLEHLLKLNLSRNNLTGIIPAEFGNLRSVMEXIDLSNNQLSGLFPDELSQLQNM

SEQ ID NO: 222847 - protein, 63 aa, Glycine max
  Clone ID: PAT_MRT3847_43259C.1.pep
FSMVKTGGWGDLETNPGLKFFAHNAIWTCVQFTPMDENFFITGSLVAKGKMGNIPAPPVWDWI

SEQ ID NO: 222848 - protein, 170 aa, Glycine max
  unsure (1)..(170): unsure at all Xaa locations
  Clone ID: PAT_MRT3847_4325C.1.pep
MKRHWRNWSHDDEGEGLPDSDSDTRSSRRFSLTRLMAIFLFSLFLFSLIFLLPHPPIQSASTAKTLHQFKQTQQGNVADSVELHKDKLLGGLIADGFDEQSCLSRYHSVTYSKGLSGNPSSYLISRLRKYEALHKECGPYTXTYNXTVKDLRSGHXSESPALXYVVWISY

SEQ ID NO: 222849 - protein, 44 aa, Glycine max
  Clone ID: PAT_MRT3847_43260C.1.pep
ARGITRGYLTLVLGTQTTTITQSPAGQSMHSQRDNKTKGFKGFG

SEQ ID NO: 222850 - protein, 97 aa, Glycine max
  Clone ID: PAT_MRT3847_43261C.1.pep
TLTSFPQHFTSNFSQIKLSLHDSSLPFAPPSHNPTCDYYYSLGFFRKSLCSKSAEEIQRGCWNCHTVPHSEPFLVCESCRCIQPVDSSVDYFDIFGV

SEQ ID NO: 222851 - protein, 104 aa, Glycine max
  unsure (1)..(104): unsure at all Xaa locations
  Clone ID: PAT_MRT3847_43262C.1.pep
YHLFSALKTKFVKIYFSQEEHDHRFRIFKNNLLRAKSHQKXYPSAVHGVTRFFDLTPDDFCPXLFGLKPLLLPSDAQNATIXLPTNDSPTNFYWREHGALFLCK

SEQ ID NO: 222852 - protein, 69 aa, Glycine max
  unsure (1)..(69): unsure at all Xaa locations
  Clone ID: PAT_MRT3847_43263C.1.pep
TYKIICQRTTSYSLKLKGLGGTLYPSRGACSIIDKPRSTXPFSLIQPIYRHLQQTHPRAEFRAYVRVHA

SEQ ID NO: 222853 - protein, 94 aa, Glycine max
  Clone ID: PAT_MRT3847_43264C.1.pep
DMHLWPTKNLRDSFKDSYLKRLEWNYQRMKAEKNQQQSSTEQKLLENENQDHGNNNNGDAPNLLNCEAGSVSSLFQELLLVLSCCYCCFCCGGK

SEQ ID NO: 222854 - protein, 147 aa, Glycine max
  Clone ID: PAT_MRT3847_43265C.1.pep
ESSYYTGFDALMSSTFSGECASCVCRKEALVVGGKLVRYRGWSMTIFFVVGVLCLRIMCKISGENYAGKFLFIKALMERFSWILITVDCVYLTLNSPPERVVLRVAAFGGIFLLIFLQALKEACSQIYSMAYVAERLGWVSASLHTI

SEQ ID NO: 222855 - protein, 29 aa, Glycine max
  Clone ID: PAT_MRT3847_43266C.1.pep
MKATQLFNNTVTNSLIIQYIIKNLKFSVR

SEQ ID NO: 222856 - protein, 172 aa, Glycine max
  unsure (1)..(172): unsure at all Xaa locations
  Clone ID: PAT_MRT3847_43267C.1.pep
MEEGLGKRELEGEVVSRVAEVISAIKNAKHVDQVICALHSLATILFPFDPSLLSDSIDQSYGDKVQVPSAEKRHAWWRVFYRGAAFPTLARFLLLDVASNWLGCFPFSAQTYVYDVFFVRGLVTEVLQILVPFLQLSSSDGLDVNGCLSNSERLLVLXLLENNGALQLAREF

SEQ ID NO: 222857 - protein, 44 aa, Glycine max
  Clone ID: PAT_MRT3847_43268C.1.pep
RKRIKPDPRTSIRSKPTRLRDQKVCVLSRSSRNALFRSPFLHLP

SEQ ID NO: 222858 - protein, 74 aa, Glycine max
  unsure (1)..(74): unsure at all Xaa locations
  Clone ID: PAT_MRT3847_43269C.1.pep
GKTNFPKEKGRARVPPRFKRAPKKEKRGTPRARGRIKSGGGRAQKGGGPRFFLVFYLLFRXXLEFDQAVFLFFL

SEQ ID NO: 222859 - protein, 326 aa, Glycine max
  unsure (1)..(326): unsure at all Xaa locations
  Clone ID: PAT_MRT3847_4326C.1.pep
MLLSSIRRGFTSRVGPIRTLSSHSEMKDFLDYLDSLKNYEKSGVPKGAGTDSSDGFDLGRMRRLMERFGNPHSKFKAVHIAGTKGKGSTAAFVSNILRNEGYSVGCYTRLYFSXSSPHILTIRERILLGKSGHPVSAKLLNDLFRRIKPDIDQAMKEENGCIXHFEVFGTMAFLLFADENVDIAVIEAGLGGARDATNIISSSGLVASVITTVGEEHLAALGGSLETIAMAKAGIIKQDRPLVLGGPFVPHIERIIRDKAVAMDSPVVSAYDTGNKCTVKSFSIRNGRPCQICDILIQVVKDMKMSCKXHDVKLQMLWRSPTSNAA

SEQ ID NO: 222860 - protein, 86 aa, Glycine max
  Clone ID: PAT_MRT3847_43270C.1.pep
YNGYNNVIKSNKRHVSRIYSASTSRPKTSISGVPPAILRQSCMISCKSVPSVPILRLSTRSNLSAVASQPSQASYDSHKNTIIAEF

SEQ ID NO: 222861 - protein, 76 aa, Glycine max
  Clone ID: PAT_MRT3847_43271C.1.pep
KEKQMASNDLFQLYHCQPCRSAGVIHCLSHGWFPPKDQQCIPHCATGRGCISVAHAESWTFYRNCITMARVIPLRR

SEQ ID NO: 222862 - protein, 115 aa, Glycine max
  Clone ID: PAT_MRT3847_43272C.1.pep
MRTPYLSKKMKSFAFFVVFSLLVVNLSYARKDMGDYWKNMMNGQPMPEAIKDLLVQDPQVSDAVKDHFIRDFDIKPNIILYHTHVVPNKHKQKQNIQQAMAKKLEPKFQGTERHG

SEQ ID NO: 222863 - protein, 82 aa, Glycine max
  unsure (1)..(82): unsure at all Xaa locations
  Clone ID: PAT_MRT3847_43273C.1.pep
CVEKVQFRSSVSTIRNHNASSAWTEELSSIAARIVFMLIXFQIALFRVTCRSGMCTTPLHVTSSRLIASEXLPVVLVKGLLY

SEQ ID NO: 222864 - protein, 38 aa, Glycine max
  Clone ID: PAT_MRT3847_43274C.1.pep
MTYVMLPSLKVFIGMGLQKHAPWYVNRCKKRKHHFHED

SEQ ID NO: 222865 - protein, 39 aa, Glycine max
  Clone ID: PAT_MRT3847_43275C.1.pep
MAPTIFRDAGIVDMQYMQLNDYTRCSNTDQDLSAYSPLS

SEQ ID NO: 222866 - protein, 76 aa, Glycine max
  Clone ID: PAT_MRT3847_43276C.1.pep
MWGFGGRYYWERKVACEKVDGIVVVFAWMSSEEKHLMKYVDLYSSIGWNSLVCHSQSLNMFFPEKATILAASILNE

SEQ ID NO: 222867 - protein, 40 aa, Glycine max
  Clone ID: PAT_MRT3847_43277C.1.pep
RVLALAISEKFWVLFTIKQGRVLSSLSSKLVWFIMGQNHY

SEQ ID NO: 222868 - protein, 60 aa, Glycine max
  Clone ID: PAT_MRT3847_43278C.1.pep
HTHIRCIMSHFFRCTPPLFKSPHRYRFLHYLRNTHPFIPNFTPHLPSYSSLFQLAIAHPK

SEQ ID NO: 222869 - protein, 48 aa, Glycine max
  Clone ID: PAT_MRT3847_43279C.1.pep
SYLRLYDLITKIIYGLGIFYHPYFILSHQHRSTDQLICKSSSYLYFLT

SEQ ID NO: 222870 - protein, 211 aa, Glycine max
  Clone ID: PAT_MRT3847_4327C.1.pep
MRSLLTIFSALLAYTTAVYATALTYRLEAHEQACFYAHVENKGTKLAFYFAVQSGGSFDVDYLVVGPTDKTILDGTKERQGDFVFTANDVGEYRFCFNNEMSTFAEKMVDFEIAVENEAARAKIPSKQGSSPEQTSVLEESILKLSAQLSTISRNQKYFRTRENRNFSTVKSTEKRIFNFSLMESGLIMTMAGLQVFIVRFFFQGARKGYV

SEQ ID NO: 222871 - protein, 88 aa, Glycine max
  unsure (1)..(88): unsure at all Xaa locations
  Clone ID: PAT_MRT3847_43280C.1.pep
GFWLGLPXFCKSILPKKDEVVTLIDEDGTEYSTIYLAGKTGLSGGWRGFAIAHDLADGDALIFQLIKRTTFKVYIVRAICPPDDKQLE

SEQ ID NO: 222872 - protein, 57 aa, Glycine max
  Clone ID: PAT_MRT3847_43281C.1.pep
CVSYLKFIIKINFVWKSYTGFVRTQTNKCSKENQKYHLIQGHKSSFAWYGIFKNGLG

SEQ ID NO: 222873 - protein, 182 aa, Glycine max
  Clone ID: PAT_MRT3847_43282C.1.pep
PLNLEEEARETLRFKTLTKMACEMPLDLIKHLRILLRREANLSWYDPEKEENLALPKLPSVAETIAKLDPSPNYLRCKNCNGKLIRDLQSSICVFCGTNPQNDLPPEPFKFKSTIGYRWLLESLQLDGSEMVAPVVNENEWNRGRSESKDEIPLSELLDLGIRWPSEAERVQTSTFGSRPFF

SEQ ID NO: 222874 - protein, 53 aa, Glycine max
  Clone ID: PAT_MRT3847_43283C.1.pep
GDTLLLTILDHLMAKVSDNTWKSFVACLANRLSDVNHGGKSGMLFDLWKNRDI

SEQ ID NO: 222875 - protein, 86 aa, Glycine max
  Clone ID: PAT_MRT3847_43284C.1.pep
GLLLPGLRRPLVQGPIITTIPRLGFTFLIVCQPFCSSVRTCTRPLTLTYPGLPCSRSCEQRFQTRVTSLWYPRRYTMVTYTAGHVP

SEQ ID NO: 222876 - protein, 398 aa, Glycine max
  Clone ID: PAT_MRT3847_43285C.1.pep
MARSWLIDIGGFAKKVKNTTLSTDDQMKDCGTYRECPKCHYHIDNSDVSHEWPGFPVGVKFDPSDVELLEHLAAKCCIGNREPHMFIHEFIPTLEGEQGICYTHPENLPGAKKDGSYVHFFHRTTNAYATGQRKRRKIHHQQGLTEEHVRWHKTGKTKAIIEDGAHKGFKKIMVLYVRSSENGSRSYKSNWVMHQYHLGTVEEEKEGEYVVSKIFCQQQKQTEKNEGNPMAEDPDNIISRTGPRTPKPNPPNPPRAGKSVDCDDNIDETVLLSSALDTKTIPGESHAPQSDIQDQDFTGNAAWLAGESQAEESTKYDGCDDILLCKEILDSSAILNDPGLDSTNLEDIAGYATQRARNDNESCGISVLDSLELDTPDFDLSSLYFCSQDSILDWMDRL

SEQ ID NO: 222877 - protein, 225 aa, Glycine max
  unsure (1)..(225): unsure at all Xaa locations
  Clone ID: PAT_MRT3847_43286C.1.pep
MDALAQEQEANAQIGAALCLAAAVEAAPDPDAEALRRSALPRLGKLVKSEACRARAALLVLIGSVVGAGGASSRGAVNWLVPCLVEFLGSKDWTVRKAAAEALAKVASVERDLASQHKVLCLNSLQNRRFDKIKVVRETMNRALETWKEVTEDAPAYVKSECASVGTDDGKSQCVSKSSPDVGSKLSSKTGPANRSPPSVISFMXAMKRESSLXSNEKHLXMGTL

SEQ ID NO: 222878 - protein, 420 aa, Glycine max
  Clone ID: PAT_MRT3847_43287C.1.pep
MTRAMLLVLFPQDNKAKFNFPSPSKSLVSKAQSTISICLLLFFTTLLLFTLSTLPNTPHTPPTHPPKPTPHHLALQRMGTLHRRGTKSMSDLLICHVPDETPLQDFRIFLRLLHRSSLTSSSDVVFLFPSPSSSIKFTHIILQENTAFSSLLHLHAHLNSTRWRQHPKSTFDPNRFISKTTQQQQHPCAPTSTPRAGPSPPLPPASLLASAPSLLGPENSLASPRGVPPLALPRSAPVPLRLARVSRIFKHVMLADVRSLLILKDPLARVRNRSPDSVILFTKTEKHGKRTQRAVVSSVIMGGARGVRRLSGTVVVEIVRAATQHRKKKNSVSESAVLSQLVGGSEFVWKNKNVNLIASSESIPELTSASASASVSAASSTTSFSDSAMVQRGVSNHDLNYVIMRQICSSVVDSSVYSDC

SEQ ID NO: 222879 - protein, 59 aa, Glycine max
  Clone ID: PAT_MRT3847_43288C.1.pep
IFSFGIIGIKANMVAYPLFLNRYYGRGSTKASHPLPPKGPLFNVLFCNKFFLSGEILTA

SEQ ID NO: 222880 - protein, 451 aa, Glycine max
  Clone ID: PAT_MRT3847_43289C.1.pep
MQQPAMTKAKSDSDNNNSSGMGMLLVLFPQDKSSTSTSNTDIKPMFNFPSPSKSLFSKAQSTISICLLLLFTTLLLFTLSTLPNALPTPPPPPPTPKPTPHHFALQRMGTLHRRGTKSMTDLLICHVAEETPLEDFRLFLRLLHRSSLTSSSDVVFLFPSPSSSLKFTPVIQQENTAFSSLLHLHAHLNSTRWRQHPKSSFDPNRFISKPQLQQKQQREPLWGPKTRTNLNSSRDSLSYGSVLSFDATELDPENSLSGFLDKVPLTLRRWACYPMLLGRVRRSFKHVMLADVKSLLIFKDPLGRVRNRSPDSVVLFTKTEKHGKRTQRAVVSSVIMGGARGVRRLSGTAVVEIVRAATQHKKKKNSVTESAVLSQLVGGSEFVLKNKNVNLIASSESIPEVTTASASSSVSKTSFSDSAMVQRGVSNHDLNYVIMRQICSSVVDSSVYSDC

SEQ ID NO: 222881 - protein, 72 aa, Glycine max
  Clone ID: PAT_MRT3847_4328C.1.pep
RAFTIVAGSDNQQYRSVVQYPWCMCMNSSSSYFCVFGHSFLLPVVDVILCMRFLSNYILMESIYSASFLFLS

SEQ ID NO: 222882 - protein, 61 aa, Glycine max
  Clone ID: PAT_MRT3847_43290C.1.pep
GRASFQIHETGHPLCCAGGSTRNSGAYLQEPDLPAELDVQIINGTYLFQHTFSNHALRGRL

SEQ ID NO: 222883 - protein, 187 aa, Glycine max
  Clone ID: PAT_MRT3847_43291C.1.pep
APRGLPPPIFTRGCLFSFPGGGGGSSPPPGSGFFFWQKSSPPPRLFPVGGVKKVGFGGVPSFPSPPKKSLFGAPPAKIIFFSQGGGVFLSPGAPPKSPGCGFLGCFGGPLFLAKKILFFLAEAPFFFFFGPPHKFFYLFPVQEGQIGRFFCLPLKKIFPFFPSFGGAPMSPPGAPGFVFQKAVFLVL

SEQ ID NO: 222884 - protein, 48 aa, Glycine max
  Clone ID: PAT_MRT3847_43292C.1.pep
KVPKPNSSLHIFFSSGMKVVKKLSAHLFIHPVTLRARLDIVPVESLKS

SEQ ID NO: 222885 - protein, 48 aa, Glycine max
  Clone ID: PAT_MRT3847_43293C.1.pep
FLEDVVLALSEVLGCDLGGIKRVGVGDQHTISGERTGIKNKKIHKKCF

SEQ ID NO: 222886 - protein, 54 aa, Glycine max
  Clone ID: PAT_MRT3847_43294C.1.pep
SEIHHVTPTLDSLCSLRKGLGLQLSASAPNHATLRSYTSKLFFSSSISFLVFIF

SEQ ID NO: 222887 - protein, 45 aa, Glycine max
  Clone ID: PAT_MRT3847_43295C.1.pep
VVFKNLPQGYGFHKPSQGCGCDRLQKGTNAIIVTLGGKNKVKGVL

SEQ ID NO: 222888 - protein, 94 aa, Glycine max
  Clone ID: PAT_MRT3847_43296C.1.pep
EYRSHFVWLQNRHDKGTDNSKSYMTICASLYLENVNLQFAQEFRSHFLWLQDRPNKPSNDCNSDMNIYASLFLENVALEFIQGIVCVRPAGRLA

SEQ ID NO: 222889 - protein, 55 aa, Glycine max
  unsure (1)..(55): unsure at all Xaa locations
  Clone ID: PAT_MRT3847_43297C.1.pep
SVKXHLXNTQNGPAMLPVQHFVQSXXXCXXGYLDKNXWXXEGXPXXXLVDTXXXX

SEQ ID NO: 222890 - protein, 68 aa, Glycine max
  Clone ID: PAT_MRT3847_43298C.1.pep
HLEKHPQKNPTTSIPPDTNHHNPTPEMYSPILTNNFNAGKYPPNHLQKTLTALHHLLPSNQTDPNSDS

SEQ ID NO: 222891 - protein, 43 aa, Glycine max
  Clone ID: PAT_MRT3847_43299C.1.pep
TSQSVIVMLPELRICTHNHINNHHIHIMYTKAATHTIIVQQSA

SEQ ID NO: 222892 - protein, 88 aa, Glycine max
  Clone ID: PAT_MRT3847_4329C.1.pep
HQSYHLCELSEGEDSSGGFGYTAATVGAAIRGHEALLTLRQYRRAQLTDYFAACFLLEFVTGGCEAHAYLLARGYRFSRALNVHITMD

SEQ ID NO: 222893 - protein, 50 aa, Glycine max
  Clone ID: PAT_MRT3847_432C.1.pep
IPHPTHTYANEHHIVRFASDALTIASDARMDNVESSIISNILSMDFHASY

SEQ ID NO: 222894 - protein, 84 aa, Glycine max
  unsure (1)..(84): unsure at all Xaa locations
  Clone ID: PAT_MRT3847_43300C.1.pep
WEECVNLRKVMSLQTMNRPNFVNVKXYILRIVISLSFVFEYMECYLYHLMXDWEKLLLEYXNYKLXFQVFQGRAYMLQRGYFHR

SEQ ID NO: 222895 - protein, 192 aa, Glycine max
  Clone ID: PAT_MRT3847_43301C.1.pep
ARGKQLLDLKEDHQNIKEESCKTFEEKNSLMKRFWDLGEEKSKLEEEICIMIHDTIAQSNLSLLYQNIVLEKLQALKELSKDLDRLCSVNTDLEEKLKIMMGKLEDVQMENSDLKESLIVSSNELKLVQSVNDQLNCQIRNGKELLSQKENEILEAAKMFSTLHDEKTELQRLVEDLKSKYDGSQGDTLRPS

SEQ ID NO: 222896 - protein, 117 aa, Glycine max
  Clone ID: PAT_MRT3847_43302C.1.pep
DPKNAKKSIHTAKITRSRPLASMTSLNGPEIFLVLLEKSATKKLIFILTSAMVFLTTAGKKTASTPIFLTASKISYPVLRVSAVMATLPHKDFRVFVVPPLNLPLTVEKKTHPRTAV

SEQ ID NO: 222897 - protein, 78 aa, Glycine max
  Clone ID: PAT_MRT3847_43303C.1.pep
MCKHEAGEYMRTMLKVLSHMHNSWCVHCDIKLQNILIFGDGGFKLAESGLAREAEHKQEKSECMTTTKVMAAYQATAK

SEQ ID NO: 222898 - protein, 106 aa, Glycine max
  Clone ID: PAT_MRT3847_43304C.1.pep
MQRVFETELRTLFPYVGVILRAGFIYGSQSVGSREKPLGVIGSPLQMVLPDAKPLNQMPLVGPLLAPPVNVLAVAKVAVKAVSEPVFPPGFIEAYGIHRSSQHKST

SEQ ID NO: 222899 - protein, 86 aa, Glycine max
  unsure (1)..(86): unsure at all Xaa locations
  Clone ID: PAT_MRT3847_43306C.1.pep
RGGCYNGSKFSYPCLRRRNSFIVXPNFISRPDIXNGMYWQNLWVTHLNDVAXYPPFTSWFIRKKAGTDRLSKWLLTLIGKWEAPCL

SEQ ID NO: 222900 - protein, 161 aa, Glycine max
  Clone ID: PAT_MRT3847_43307C.1.pep
EHAMKRGAPIIAEYLGGAVNCDAYHMTDPRSDGLGVSTCIQSSLEDAGVSPEEVNYINAHATSTLAGDLAEINAIKKVFKDTSGIKINATKSMIGHCLGAAGGLEAIATVKAITTGWLHPTINQFNPEPAVDFDTVANVKQQHEINVGKILNNSITKVPPT

SEQ ID NO: 222901 - protein, 71 aa, Glycine max
  Clone ID: PAT_MRT3847_43308C.1.pep
VFQLYPASYYSYSYSLIFNYFFFFSSSFCLFYPTKKKRERESRKIECGVRGTRKYTKWEWKVPIWITSPTG

SEQ ID NO: 222902 - protein, 55 aa, Glycine max
  Clone ID: PAT_MRT3847_43309C.1.pep
PFSPYYYTNSPFLFIINHIPKATNYNTTLQWHSSTLSSPKPPSTPTLSTKPFIPI

SEQ ID NO: 222903 - protein, 48 aa, Glycine max
  Clone ID: PAT_MRT3847_4330C.1.pep
SQDPSSMRIHMELRRLYSGFMKPNITKTYMIKAYISGRAPNKKEATKS

SEQ ID NO: 222904 - protein, 358 aa, Glycine max
  unsure (1)..(358): unsure at all Xaa locations
  Clone ID: PAT_MRT3847_43310C.1.pep
MKNEEQARSLFGISLSDRPRWQQFLICSSGFFFGYLVNGICEEYVYNRLHFSYGWYFTFVQGFVYLCLIYLQGFTSKQMVNPWKTYVKLSAVLMGSHGLTKGSLAFLNYPAQIMFKSTKVLPVMIMGAFIPGLRRKYPLHEYISAILLVVGLILFTLAXAQTSPNFSMIGVIMISGALVMDSFLGNLQEAIFTMNPETTQMEMLFCSTVVGLPFLIPPMLFTGELFKAWTSCSQHPYVYGVLVFEAMATFIGQVSVLSLIAIFGAATTAMITTARKAVTLLLSYLIFTKPLTEQHGSGLLLIAMGITLKMLPDSKFTSTKTKRVLTSSARNIGAKSTNDEELGTLPNSGENDERRPLV

SEQ ID NO: 222905 - protein, 64 aa, Glycine max
  unsure (1)..(64): unsure at all Xaa locations
  Clone ID: PAT_MRT3847_43311C.1.pep
TPSAFIMLTICESGAELHISTDLIGLCSSFVISAAISITSXLFDPNSVGVNHSILITNISLRSM

SEQ ID NO: 222906 - protein, 52 aa, Glycine max
  Clone ID: PAT_MRT3847_43312C.1.pep
FIQQQSIMHTYSSHNIPPTVEPEISLVIHHKLLIPTLNNDFIRDPIQYMSYQ

SEQ ID NO: 222907 - protein, 121 aa, Glycine max
  Clone ID: PAT_MRT3847_43313C.1.pep
MAKSSADDGELRRACDAAIEDPRQKIVMALRVAKSHGIFGKSSSKLGRMAKPRVLALSIVGDDVVFPAAKSKGLRTSAFLRVLKYSTGGVLEPAKLYKLKHLSKVEVVANDPSGCTFTLGF

SEQ ID NO: 222908 - protein, 85 aa, Glycine max
  Clone ID: PAT_MRT3847_43314C.1.pep
FPHIISSHFPGAVYVSQNLNFKFPVYIGDQIIGEVQATNLRENKNRYLAKFKTRCFKNGDLLVIDGEAVALLPTLPVEQIQHEKC

SEQ ID NO: 222909 - protein, 63 aa, Glycine max
  Clone ID: PAT_MRT3847_43315C.1.pep
LSSPHDGPPNPSSSSSLLLLFAIFVTLKWLCLRNNLQALISTPTFIWDLGSVFCTQHLKARCF

SEQ ID NO: 222910 - protein, 57 aa, Glycine max
  unsure (1)..(57): unsure at all Xaa locations
  Clone ID: PAT_MRT3847_43316C.1.pep
KSGFAQGQTTSWCXXKVRICGSPHVIPSATPPSRDRAGQHRTGQEIEMAPGKAASLP

SEQ ID NO: 222911 - protein, 65 aa, Glycine max
  Clone ID: PAT_MRT3847_43317C.1.pep
KCIVCGSTIVLASMDNLCREQYTTISYNTIIMEKTKRQICFAKEFEMARNQRICNIFTRADSARG

SEQ ID NO: 222912 - protein, 191 aa, Glycine max
  unsure (1)..(191): unsure at all Xaa locations
  Clone ID: PAT_MRT3847_43318C.1.pep
FVNQVKRCAEMSRKLRFFEDQINKAGLMSSPSVLQTDIYLEDLEIQLAEHEHELIEMNSNSEKLRQSYNELLEFKIVLQKACRFLVSSHGNAFSEERELEENXFSNGDYIETPFLFEQEMRHAPSDQSGLRFISGIICKSKVLKFERMLFRATRSNMLFNHALADEXIMDPISTEMVEKIXFVGFFSGEQA

SEQ ID NO: 222913 - protein, 108 aa, Glycine max
  Clone ID: PAT_MRT3847_43319C.1.pep
PTHGATPIGYVAFSMPHPYVGLVGTSSSTFAGFSCKPKYQLRLSIRYQRRHCSTMVPQPNYVVCALAAAAMMLAFVAFCTTAIVGTSRLTIGGDRTLDSSIEIARRCS

SEQ ID NO: 222914 - protein, 33 aa, Glycine max
  unsure (1)..(33): unsure at all Xaa locations
  Clone ID: PAT_MRT3847_4331C.1.pep
VLLNYVKCSKYILDFIFDTLYDAIGLXNQLRSF

SEQ ID NO: 222915 - protein, 69 aa, Glycine max
  Clone ID: PAT_MRT3847_43320C.1.pep
WATKAGQILAEDFSESALTTNDSLNVHQMSVKFMTADDTRAILNIPDGTGDLTCVNRLLMVLSHKDDEN

SEQ ID NO: 222916 - protein, 53 aa, Glycine max
  Clone ID: PAT_MRT3847_43321C.1.pep
LWHALQSLEALIMWPSHHEHQTYFFVNVNQNYKKEIGAFVLQIPINKKLSWFS

SEQ ID NO: 222917 - protein, 36 aa, Glycine max
  unsure (1)..(36): unsure at all Xaa locations
  Clone ID: PAT_MRT3847_43322C.1.pep
FSAINSPTVDQSXHSFKRPPLTIIICLSRXTPLXAQ

SEQ ID NO: 222918 - protein, 101 aa, Glycine max
  unsure (1)..(101): unsure at all Xaa locations
  Clone ID: PAT_MRT3847_43323C.1.pep
XLXXXTXSXXXXXFSXXXXXXXXMTXXLLXFLLXXXFIXXXXXXXAXFHLXXLKXXXXXIXPYTPSVXYLXIXXXLXXXXXXXXFXXXSXXLLCCXXIXLL

SEQ ID NO: 222919 - protein, 88 aa, Glycine max
  Clone ID: PAT_MRT3847_43324C.1.pep
VSFGAGLKPQLGELFPVNVRVSSPSNSGPFTPGGFKKGAFSGACSKRALTPIFSLGGPSYFGVKFFPGPFKKGFFGQILFFLLGLLTH

SEQ ID NO: 222920 - protein, 124 aa, Glycine max
  Clone ID: PAT_MRT3847_43325C.1.pep
IGGVCEASFVARGGVIPWNAFKDKFLENYFPRDLRKRKAREFLDLKQGNMSVGEYTAKFNELLQCWPQYQDARNEEDLCAQFENGLRLEIQQAVSYMQITDFNQLVTKCRIFEDKMKERQARGV

SEQ ID NO: 222921 - protein, 46 aa, Glycine max
  Clone ID: PAT_MRT3847_43326C.1.pep
MALVCTSYEPWQDPKKIHFLIIMYIFKTEGSYKETLELIYFWSAAS

SEQ ID NO: 222922 - protein, 61 aa, Glycine max
  Clone ID: PAT_MRT3847_43327C.1.pep
FSLIMKIWDSIFYFLKHVLITDLFYRLITHILILFMVITLSYIYVFCLQRPYFLPYKYKSY

SEQ ID NO: 222923 - protein, 223 aa, Glycine max
  Clone ID: PAT_MRT3847_43328C.1.pep
MTTVPPHSVQVHTTTHRYEAGVVPPARFEAPRYEAGIKAPSSIYHSERGPTTSQVLAVVAGLPVGGILLLLAGLTLAGTLTGLVVATPLFIIFSPVLIPATVAIGLAVAGFLTSGVFGLTALSSFSWILNYIRETQPASENLAAAAKHHLAEAAEYVGQKTKEVGQKTKEVGQDIQSKAQDTREAAARDARDAREAAARDARDAKVEARDVKRTTVTATTATA

SEQ ID NO: 222924 - protein, 73 aa, Glycine max
  Clone ID: PAT_MRT3847_43329C.1.pep
QIETTPFLWSTLPFPFCEFLSQLLAFLKRIPAPRGGLTRAWDLATGCNCSRITFTIPLADKNHGFINGSRVRA

SEQ ID NO: 222925 - protein, 39 aa, Glycine max
  Clone ID: PAT_MRT3847_4332C.1.pep
EFLIPQRKNIDNIWEKKLSSYQRDAMQVKFCGVSNLTYT

SEQ ID NO: 222926 - protein, 149 aa, Glycine max
  Clone ID: PAT_MRT3847_43330C.1.pep
MAPKAEKKPAEKKPAEEKKSTVGDKAPAEKKPKAGKKLPKEGGAGGEGGKKKKRNKKSVETYKIYIFKVLKQVHPDIGISSKAMGIMNSFINDIFEKLAQESSRLARYNKKPTITSREIQTAVRLVLPGELAKHAVSEGTKAVTKFTSS

SEQ ID NO: 222927 - protein, 143 aa, Glycine max
  Clone ID: PAT_MRT3847_43331C.1.pep
MAPKAEKKPAEEKKSTVGDKAPAEKKPKAGKKLPKEGGAGGEGKKKKRNKKSVETYKIYIFKVLKQVHPDIGISSKAMGIMNSFINDIFEKLAQESSRLARYNKKPTITSREIQTAVRLVLPGELAKHAVSEGTKAVTKFTSS

SEQ ID NO: 222928 - protein, 77 aa, Glycine max
  Clone ID: PAT_MRT3847_43332C.1.pep
VGKMVISLEPVADFSRDQKRMQHSGRAFCLHFQGLVTVGSWCISRAGFQGVFMPGIQLMFLEDHNPGFGSPPLITTY

SEQ ID NO: 222929 - protein, 148 aa, Glycine max
  Clone ID: PAT_MRT3847_43333C.1.pep
MAPKAEKKPAEKKPAEEKKSTVGDKAPAEKKPKAGKKLPKEGGAGGEGKKKKRNKKSVETYKIYIFKVLKQVHPDIGISSKAMGIMNSFINDIFEKLAQESSRLARYNKKPTITSREIQTAVRLVLPGELAKHAVSEGTKAVTKFTSS

SEQ ID NO: 222930 - protein, 149 aa, Glycine max
  Clone ID: PAT_MRT3847_43334C.1.pep
MAPKAEKKPAEKKPVEEKKSTVGDKAPAEKKPKAGKKLPKEGGAGGEGGKKKKRNKKSVETYKIYIFKVLKQVHPDIGISSKAMGIMNSFINDIFEKLAQESSRLARYNKKPTITSREIQTAVRLVLPGELAKHAVSEGTKAVTKFTSS

SEQ ID NO: 222931 - protein, 39 aa, Glycine max
  Clone ID: PAT_MRT3847_43335C.1.pep
ILDLTLSYRMYDRDDIYMHSRTYTIIVPHNTGHERRIYQ

SEQ ID NO: 222932 - protein, 61 aa, Glycine max
  Clone ID: PAT_MRT3847_43336C.1.pep
AIQITPYFCKFVHLKVIFTHIYSCHPITLHLNLRFRLLFTISNSITRTLVISSVSYSSSNY

SEQ ID NO: 222933 - protein, 148 aa, Glycine max; identical to SEQ ID NO: 222929
  Clone ID: PAT_MRT3847_43337C.1.pep

SEQ ID NO: 222934 - protein, 148 aa, Glycine max; identical to SEQ ID NO: 222929
  Clone ID: PAT_MRT3847_43338C.1.pep

SEQ ID NO: 222935 - protein, 136 aa, Glycine max
  Clone ID: PAT_MRT3847_43339C.1.pep
PQALYTSARVIDTGSYVCIPQSYAKLVVNNIVRAQILALKETRPSLARLPGFTLPYGHFCSLNAKWHSCIKLSYCFVFCALQIGWPRFEFICHPRQGWPAPPHRLLVHLGRYRPHLSYKDAPLSSSILPSLFSFAL

SEQ ID NO: 222936 - protein, 128 aa, Glycine max
  Clone ID: PAT_MRT3847_4333C.1.pep
IAFIASIQSLEKIPQSLSSSGRFDFHIKLPAPAASERRAMLKHEIQRRQLQCDDDILLDVAVKCDGYDGYDLEILVDRTVHAAVCRFLPSNAAIYEHESPALLREDFSQAMLDFLPVAMRDITKSAFD

SEQ ID NO: 222937 - protein, 71 aa, Glycine max
  Clone ID: PAT_MRT3847_43340C.1.pep
MMRSLFTVVYNGSVPYSWSYTMCSVVALSQVNSRPFSFWNTGALVRFVDMIVFVVLDSVSCRCFCSCPCPR

SEQ ID NO: 222938 - protein, 79 aa, Glycine max
  Clone ID: PAT_MRT3847_43341C.1.pep
MSVEAATAQMANTTLNEPTSTAEGASVGAGGDKPINASQNEAVIASAAEGRRLYIGNLAYATTEGELKDFFKDYLVETT

SEQ ID NO: 222939 - protein, 76 aa, Glycine max
  Clone ID: PAT_MRT3847_43342C.1.pep
FICGPLIKFKLPRPLLAALGIQGYFWQFTMVFKKLGKMDFVTLIQLWRWSFIQKHRDIFLRHSTLIKLIRELMNMD

SEQ ID NO: 222940 - protein, 77 aa, Glycine max
  Clone ID: PAT_MRT3847_43343C.1.pep
KQALKTNQFSQIVKSFGEKKKGLTFLFPQQLKNGNKFLQAQGPGPPIKTFPLKKGTNLFYPPNSKKNIQAQKERDFI

SEQ ID NO: 222941 - protein, 81 aa, Glycine max
  Clone ID: PAT_MRT3847_43344C.1.pep
SKVLPYSHGCRCRLLAMEECHGQTKVEKQLEKIKNKKPFAVNLKLFPTPPQLKELKIHKTNEPQFPESTLSPQYSKIQIKN

SEQ ID NO: 222942 - protein, 667 aa, Glycine max
  Clone ID: PAT_MRT3847_43346C.1.pep
MRALNSHVLLVDLHSHHHVPTSTLSYLRNSRFISSLRRRSPRTGIRCTASPEIRRPSDRFYGSSPSTSRPEDLNLFLELLPLKMRRELYRHREIGGLIEIVMDLGRKPLARFPSGDWVISEQPIAQEDLRHAISKVGEFSDDNRSGIDRSLHRISAIRNRKMQIIGLTCRVGRAVGGSAEIIRDLVEDGGSILVIGPPGVGKTTLIREIARMLADEFRKRVVIVDTSNEIGGDGDVPHAGIGRARRMQVPNVNMQHNVMIEAVENHMPETIIIDEIGTELEALAASTIAQRGVQLVGTAHGMTIENIIKNPYLQILVGGIESVTLGDEEARKRKVQKTILERKGPPTFSCAVEMISKTECRVHHRLDATVDAILAGKPPLFEIRQWDDSDNELPKYAPLPEENLGETSDLTNNNITSSDNEPSEDDKDHPRTWSTKWSTSGPVMTRSSPMQVYTYKILEADLLQVAKVMGLEDVIDVTDDIGTAEAILASSSEIRQNPWIRGVAKFHHVPVFVIKSNTMAQMVKAVRMILGLESFGPTPKKPLNECLDIEIEDDEPKRKPSLEEIDALEEVRLAIEYIVIPGGEAVELLPRRSEIIARQLELVQSYQLAAEKSGTDQNPRLQILPLRLNTKKASKSTVARKKTSPTSMSTGDSGNGTSVTRLPILPE

SEQ ID NO: 222943 - protein, 96 aa, Glycine max
  unsure (1)..(96): unsure at all Xaa locations
  Clone ID: PAT_MRT3847_43347C.1.pep
PTAPSTLKTFSLFSNKNPSPPPMKNPPSLSPAYEELAKCYCSDRMIFLPYVLLYRSVIPLYLTXNLSXYYGYYPFSLIKNLNYFSNYYFFEYYYSL

SEQ ID NO: 222944 - protein, 48 aa, Glycine max
  Clone ID: PAT_MRT3847_43348C.1.pep
QGPPIKKKTANKIEGVEILIDKVGNVTLSFKKIPFNIFRKKLVRAPTL

SEQ ID NO: 222945 - protein, 98 aa, Glycine max
  Clone ID: PAT_MRT3847_43349C.1.pep
KEEKNMGSLNRVWMAAPVAVGQGPPDPGPKCKRGLPSIPPNGSRLFSGGALSDLGPLSGVVGFNVAGSVGGSSHVENRVRQAHAFLRKVMSLSCWGQG

SEQ ID NO: 222946 - protein, 68 aa, Glycine max
  Clone ID: PAT_MRT3847_4334C.1.pep
PNFLIWAAATVKGVISERNSIFLCIKGFGDKLSTSLDKGLWQGFCMHQFTTSGPPMRFAYKSINGLAN

SEQ ID NO: 222947 - protein, 35 aa, Glycine max
  Clone ID: PAT_MRT3847_43350C.1.pep
KPLILAFKPPQQGHLLVGKFGQNKSRFPPGSISAV

SEQ ID NO: 222948 - protein, 172 aa, Glycine max
  unsure (1)..(172): unsure at all Xaa locations
  Clone ID: PAT_MRT3847_43351C.1.pep
FSSKPSYTSALVRGFLPFPPPMATAAALFSRLRRSRPSSSLSLLSPPRVLSSPLPPPLPAPASPDSPTLAFLDAFRSRALSSHISDNREPELNSFGVDSPLNSELLKVTADTSGGGEDDAVFPVRAAISMLESFHDLSGFPRWXTIISSTLALRIGVLWPLIYHFTSLKPLE

SEQ ID NO: 222949 - protein, 69 aa, Glycine max
  Clone ID: PAT_MRT3847_43352C.1.pep
HNLSILLTMLSRLHRSLTHRIQRESTTINTIIFSRILCHLELRHRHLIRLRDLTIQALRYSLLHQQRSS

SEQ ID NO: 222950 - protein, 66 aa, Glycine max
  Clone ID: PAT_MRT3847_43353C.1.pep
RRRVRPRVRENLSHSLTDSFEHDQDARIHMGMSWSTITDPAVSRSAGVTKAVLFITPISRGVHSAN

SEQ ID NO: 222951 - protein, 118 aa, Glycine max
  Clone ID: PAT_MRT3847_43354C.1.pep
MERRVAIIGAGTSGLVACKYLLEFGFNPIVFEVEDGVGGLWRHTIESTKLQNKKQMYQFLDFAWPSSVKEDNPSHEQVLDYLNSYAEHFSLIPYIRFNSKVIDIDYVGGESSEEMKSW

SEQ ID NO: 222952 - protein, 40 aa, Glycine max
  Clone ID: PAT_MRT3847_43355C.1.pep
EAPLLSRRRRVPRAHSPLVGPINNKEGGCCLNNGLCRTRI

SEQ ID NO: 222953 - protein, 154 aa, Glycine max
  unsure (1)..(154): unsure at all Xaa locations
  Clone ID: PAT_MRT3847_43356C.1.pep
LPQYRDAVMSHTLIYVPSYFDXVRLRNYFKKEELNFTHICEYTQKSGISRARHFFLQGEKQFLLLTERFHFYKRYTIKGIRNLIFYELPTYPHFYSEVCNMLRATSRGEEATWTCTVLYSKYDAQRLAAVVGVERAAQMLQSPKNVHLFVTGEK

SEQ ID NO: 222954 - protein, 55 aa, Glycine max
  Clone ID: PAT_MRT3847_43357C.1.pep
GEGEVQMQSVISAKFLTRSKFRIMCQHIIKKVETSCSSGCNTQACLMISQCTIFL

SEQ ID NO: 222955 - protein, 55 aa, Glycine max
  Clone ID: PAT_MRT3847_43358C.1.pep
KKWFKCMGKNYFFVKKHFVSTELKHNFLNWWKNMWGRRTNSSRLQTEKGLVDSIN

SEQ ID NO: 222956 - protein, 128 aa, Glycine max
  unsure (1)..(128): unsure at all Xaa locations
  Clone ID: PAT_MRT3847_43359C.1.pep
KSLPPPQGGNPGGGFHPPXPCPPFLGPREKTLPLGSGHCGPLWGSSFPPPRRARALFEPPLAPLLPRGPPPPPNQLGGLSFVPPTWVNPWPPPGIPEGLIFWRVLGGEKKKKTPPPKKKNQKKKKKKK

SEQ ID NO: 222957 - protein, 48 aa, Glycine max
  Clone ID: PAT_MRT3847_4335C.1.pep
GVPDHVMHLDQSPSISAQVVRVYICEPSSLATVWPTRFSQHKGITSPS

SEQ ID NO: 222958 - protein, 50 aa, Glycine max
  Clone ID: PAT_MRT3847_43360C.1.pep
GLGWRMRGEWCGGAPMVLRGSYGKTRSTHTKVFLMLVRMSTNRGPYSMTG

SEQ ID NO: 222959 - protein, 396 aa, Glycine max
  unsure (1)..(396): unsure at all Xaa locations
  Clone ID: PAT_MRT3847_43361C.1.pep
MYVTRPLSLYKKSADALSLPPPEGPNSGILVIQDEDLVPTSCFGLGEFHEVKELPFPQNLNLELFYRSGISLNRTTHYHHVAFIPVLNQPLSSNKYYVINLSGKKRGEAYINSKGEDLDTFCFYNAVSDVPLHPIVINDTYQEFEIFPRRSKVTFRSGFSAKSVAPDGXPPRFLSTRWKVSASTSSDSSLGEASGVNETLRASKPEFQFSLAKKSSDSVVVGKWYCPFMFIKEGTHKTLKEEMRKSMFYEMTLEQKWEQIFSCENEYGMGNTVNVDVVVQKEVVVIAGWEAVINEMDIAEGFVWFNSVNNVGEKSSVGLSTAVVERMKWEQERVGWNGGIEKQIRVKKVEEFEGTNGWKKFGCFVLVETFILKTLDGSIVLTHAFKHHDQLRSKWE

SEQ ID NO: 222960 - protein, 88 aa, Glycine max
  Clone ID: PAT_MRT3847_43362C.1.pep
VPAPHVVTVCFLRDRTKRSATPVAALVPAVRGFVSHRKPNKGPVVLICKILARFFRVRDRLFFALSSESVFGSVKLSRHRPRRRRLRV

SEQ ID NO: 222961 - protein, 73 aa, Glycine max
  Clone ID: PAT_MRT3847_43363C.1.pep
VNITLRDQNMFKGCVYFSYFKFMYLNLKVMEWLKDRVFKYGSQLALSQFLVFLFSSLAFFVLLLFLKDHSLCI

SEQ ID NO: 222962 - protein, 116 aa, Glycine max
  Clone ID: PAT_MRT3847_43364C.1.pep
EKKNPPFGKKKGVPWGGGGKQGLSSPRKKGYNNQTGRGDQPRPKKFFTQPGPTKKTQTSFNPPGGQKGAWLSIYGGGKTIKKNGPPWLIWPGGKKSGKKGPPSSQKQENKGRKKKF

SEQ ID NO: 222963 - protein, 81 aa, Glycine max
  Clone ID: PAT_MRT3847_43365C.1.pep
TRRGGGMELGMMVGIIASHIEYHMSIIHITSYLEIHRSIMNDRTYTPFHYLLMGQIDVCSFSLYHCFIGSLMSLAKFAHLY

SEQ ID NO: 222964 - protein, 90 aa, Glycine max
  Clone ID: PAT_MRT3847_43366C.1.pep
KKNFGGFSKAPWGGTFPPYGFPIKSPLKGGGGPFGGLLKPQKIPPLLKKKTLPNFFSPNTKGGGPLWALFFEQEIFSEQIQGPFFLIPEN

SEQ ID NO: 222965 - protein, 213 aa, Glycine max
  Clone ID: PAT_MRT3847_43367C.1.pep
GDKKILKKIKNLGEGFDRPNEGSQVKVIYLCKGEDGMIIESKGSEEEPFEFTTQEEQVPEGLERAIMTMKKGEQALVTVDAEYLCDYNNSKGNTANNKVLYYEVELVDFVKEKPFWKMDTQEKIEACERKKHDGNLLFKVENFRHASKKYEKAVKYIEFDHSFSEDEKCRANTLHLSCNLNNAACKLKLGEYIEASRLCTKVLEQDPLNIKAL

SEQ ID NO: 222966 - protein, 90 aa, Glycine max
  Clone ID: PAT_MRT3847_43368C.1.pep
ASLKVAFLAAVLSVAVVSAPMAHAAITCGQVTNSLINCIGFFLNGRTPSKGCCIGVKSLNADIKTTVDRHTVCNCLKSSVSQISCFKTHN

SEQ ID NO: 222967 - protein, 113 aa, Glycine max
  Clone ID: PAT_MRT3847_43369C.1.pep
MSHFKGKYHDELIANAAYIGTPGKGILAADESTGTIGKRLASISVENIESNRRALRELLFTAPGVLQYLSGVILFEETLYQSTAAGTLDSFEYHNWFVSLIDEHCIIGFECVD

SEQ ID NO: 222968 - protein, 245 aa, Glycine max
  Clone ID: PAT_MRT3847_4336C.1.pep
VLVHMQCADVKPDSQTFSYLISNSETEEDIVKYYEELKQSGIVATKQIFMALVNAYAACGQLEKAKNLFLDPLIPPKSLNQIKGFLVSVLASHGKLSEALVIYEEIKQSGHKLEAKEVTSLIEHTHSEGELDRLLLLLKELDDTDYWNDACCRIILYCIWNKHLSSAVELCNLLKDKFQSDEQVMEFLFDKVFSLIEESEESSHLHTCSELLSEIKDKLGLLPSHKRHDSLLCACANATDLHDSE

SEQ ID NO: 222969 - protein, 290 aa, Glycine max
  Clone ID: PAT_MRT3847_43370C.1.pep
YWHCCYTDNGLNGFYAGKPFVEVLKEAGVLPGIKKVDKGTVELAGTNGETTTQGLDGLGQRCAKYYEAGARFAKWRAVLKIGPNEPSELAIHENAYGLARYAVICQENGLVPIVEPEILVDGSHDIHKCAAVTERVLAACYKALNDHHVLLEGTLLKPNMVTPGSNSAKVSPQVVAEHTVRALQRTVPAAVPAIVFLSGGQSEEEASVNLNAINQVNGKKPWSLSFSFGRALQQSTLKAWSGKEENVKKAQEALLVRAKANSEATLGTYKGNSKLADGASESLHVEDYKY

SEQ ID NO: 222970 - protein, 45 aa, Glycine max
  Clone ID: PAT_MRT3847_43371C.1.pep
VGAVDKRIIMVNIASHVLVSQQFAIFPVTVQGLVLIPHVHILHTL

SEQ ID NO: 222971 - protein, 358 aa, Glycine max
  Clone ID: PAT_MRT3847_43372C.1.pep
MSHFKGKYHDELIANAAYIGTPGKGILAADESTGTIGKRLASISVENIESNRRALRELLFTAPGVLQYLSGVILFEETLYQSTAAGKPFVNVLKEAGVLPGIKVDKGTVELAGTNGETTTQGLDGLGQRCAKYYEAGARFAKWRAVLKIGPNEPSELSIHENAYGLARYAVICQENGLVPIVEPEILVDGPHDIHKCAAVTERVLAACYKALNDHHVLLEGTLLKPNMVTPGSQSAKVSPQVVAEHTVRALQRTVPAAVPAVVFLSGGQSEEEASVNLNAINQVNGKKPWSLSFSFGRALQQSTLKAWGGKEENVKKAQEALLVRAKANSEATLGTYKGNSQLADGASESLHVSNYSY

SEQ ID NO: 222972 - protein, 63 aa, Glycine max
  Clone ID: PAT_MRT3847_43373C.1.pep
EKKTLLDVHYHRQTAQPGELTYTAYDRTLLSIVLSPTSTKTLHTSSHGPKKKGRQNKHQRKEL

SEQ ID NO: 222973 - protein, 121 aa, Glycine max
  Clone ID: PAT_MRT3847_43374C.1.pep
MGCSASRTITIVANNNNQLEDPSSASLASSFSSSSASHKSINSTSSPAAAPVRRRALSLPMPLVHHPPIKKGDTHHLVSLTSTTYGSLLLIDQKDPNLTQKNQPRLTKTSNQTDPAHSLPD

SEQ ID NO: 222974 - protein, 44 aa, Glycine max
  Clone ID: PAT_MRT3847_43375C.1.pep
KVNKFFKIKNIQLMREILLFLEVTQVSSNYCFKEIKHPVFQIQT

SEQ ID NO: 222975 - protein, 199 aa, Glycine max
  Clone ID: PAT_MRT3847_43376C.1.pep
SSRKLFDCLAPKEVKLDALMIISDLARMDKGFYEYIKGASILEFLKDFLLHEDPNMRAKACSALGNMCRHSAYFYSSLARHQIVGILIERCSDPNKRTRKFACFAIGNAAYHNDLLYEELRRSIPQLANLLQMAEEDKTKANAAGALSNLVRNSDKLCEDIVCKGAVQVNAYCIFLNIVKVSIYAAKLTLLYLFSQLHN

SEQ ID NO: 222976 - protein, 206 aa, Glycine max
  Clone ID: PAT_MRT3847_43377C.1.pep
MANKLINQMGLPKSIVNIFTARNIITAKDALSHTEFELMELLDVGKEEVTSAMAHVSEVVCPPCQTALLLLEQRVLNESLAGHLSTRLKGLDEALCGGIPFGVLTELVGPAGIGKTQFCLKLSLLASLPTNCGGLDGRVIYIDVESKFRSKRLIEIGINSFPEIFLKKGMTGGMQMAGRILILHPTSLSEFAESLHQIRVSLLQQQ

SEQ ID NO: 222977 - protein, 76 aa, Glycine max
  unsure (1)..(76): unsure at all Xaa locations
  Clone ID: PAT_MRT3847_43378C.1.pep
ASPXXLTNTNFQKKVDENFPGPLTTTTTTPFSPQPKAHCSFGIIISTTNTNXXIDAQDHASFTGWVGGYNASXLFS

SEQ ID NO: 222978 - protein, 79 aa, Glycine max
  Clone ID: PAT_MRT3847_43379C.1.pep
NRKQPIHHHTKCSPHCDLTKSKFGYSELGPPNQIRALQWTKRTKQRGKKENTRQAHLILKTSLAPYLMNILQLNAKKKK

SEQ ID NO: 222979 - protein, 70 aa, Glycine max
  unsure (1)..(70): unsure at all Xaa locations
  Clone ID: PAT_MRT3847_4337C.1.pep
SARVRKLGINSGVPAGVPAFPIVSRIRAWRNHGHSCFLCEIVIRSQFXTTYEPRRWSLGWKGWSYSCTTG

SEQ ID NO: 222980 - protein, 83 aa, Glycine max
  Clone ID: PAT_MRT3847_43380C.1.pep
MDGASLIGGKGKNPRMVSRGFRNLKGPASPLGPPKKTPPWAPKNPKKGDPRPYKFPPAGGLEKTGFGRERIWGPLKNKFSPGG

SEQ ID NO: 222981 - protein, 46 aa, Glycine max
  unsure (1)..(46): unsure at all Xaa locations
  Clone ID: PAT_MRT3847_43381C.1.pep
ITAGDIGTWIPGGXIKIIDRKKNIFNGAQGDFIAPEKIVNVYPKCK

SEQ ID NO: 222982 - protein, 75 aa, Glycine max
  Clone ID: PAT_MRT3847_43382C.1.pep
RFLTLIFFLGQPIPSLTVPTGVLALLNHTKGLNGMVQLPSLFLGIDSPTTIYSTTKGFLILKTTLLYLPQKLENN

SEQ ID NO: 222983 - protein, 104 aa, Glycine max
  Clone ID: PAT_MRT3847_43383C.1.pep
VGAKTIYNGLETTNLWKKMYFVRDFIHKVWLQNRQKLDIKMHISIYPWSAISQVKAVCVSQLLHLFKVSPFIDNDKGRQTGVFVTPCRHMALNSTSRGYFGAIH

SEQ ID NO: 222984 - protein, 64 aa, Glycine max
  unsure (1)..(64): unsure at all Xaa locations
  Clone ID: PAT_MRT3847_43384C.1.pep
XQXEXCXXXXMXEXXXXXXXXXMXXXXLXXXXCXGXXXXVXXGLXXXXSXGXVXXXXGVRXLVK

SEQ ID NO: 222985 - protein, 87 aa, Glycine max
  Clone ID: PAT_MRT3847_43385C.1.pep
TTFEGPGTRSTAAAGPAEPAPESAKHACHESCNDQTPVVDMLNSTRANNFANIINLRQWAEGYLKLTTGAQLYNGQHIAVHNISAGE

SEQ ID NO: 222986 - protein, 42 aa, Glycine max
  Clone ID: PAT_MRT3847_43386C.1.pep
SIIRARRGAGAFFFYQSMSTSHRRYIIPRANGGCCERLLHNW

SEQ ID NO: 222987 - protein, 64 aa, Glycine max
  Clone ID: PAT_MRT3847_43387C.1.pep
FELLSFICRKNRTNLLINLCLYLLHCYISHTFFFARPWFVDMLLLFSQHIGHTHNAYFIHLILR

SEQ ID NO: 222988 - protein, 55 aa, Glycine max
  unsure (1)..(55): unsure at all Xaa locations
  Clone ID: PAT_MRT3847_43388C.1.pep
TPFQXXTGXDVSSTSXSGISHXXLLNPGSXNTDHXXGKGXKYXKNTKGDXXXPNT

SEQ ID NO: 222989 - protein, 234 aa, Glycine max
  Clone ID: PAT_MRT3847_43389C.1.pep
MAANDSSTEIDTKKLSNCWGNAQMPFALPTLLSSPPQHLHTSFTTAADNFFRFLHSLASHNSFLNKILSLPSEFHTLCVQIGKQRNVRLVSGHNFAAVLPGDSVAGLVVANGVLNFLNIYNTLLIVRLVLTWFPNTPPSIVSPLSTICDPYLNIFRGLIPPLGGTLDLSPILAFLVLNAFTSTASALPAELPVTEQSKQGLAAPLHSTNLTTSQKKWLTRFQGNRSRTSGADAK

SEQ ID NO: 222990 - protein, 88 aa, Glycine max
  Clone ID: PAT_MRT3847_4338C.1.pep
MVAAIAYEESRRKTVEENKKRIEALNLPLISQALQKSSPSPKSSPLKQTKHRAIQKDVVVVIRSSRVANLPSPVYKEIVIDRVTMPRR

SEQ ID NO: 222991 - protein, 244 aa, Glycine max
  unsure (1)..(244): unsure at all Xaa locations
  Clone ID: PAT_MRT3847_43390C.1.pep
MGANANDLSTEIDCTKKVSNCWGNGQIPFALPFLTLPNSNFTTLLSSPPQLLHTSFTTAADNFFRFVHSLASQNPFLNKVLSLPAEFHTLCVQIRKQRNVGLVSSHNFAAVLPGGSVAGLVVANGVLNFLNIYNTLLIVRLVLTWFPNTPPSIVNPLSTICDPYLNIFRGLIPPLGGTLDLSPILAFLVLNAFTSTAAALPAELXVTEQSKPHAAAPLPSTTSQKKWMRRFQGNRSRTSGDDAK

SEQ ID NO: 222992 - protein, 48 aa, Glycine max
  Clone ID: PAT_MRT3847_43391C.1.pep
CACCRVSACFCWIAGLACVLGWAYSRFSSFLQFFGFFACYTSSFYICS

SEQ ID NO: 222993 - protein, 81 aa, Glycine max
  Clone ID: PAT_MRT3847_43392C.1.pep
GIDHHVRIVYILRTKYTTVHQKHIIARSTCIRHRCSYLTYACMLPHSAYMPYHNINSLAITSQRSHFANPYITQTNRLAAQ

SEQ ID NO: 222994 - protein, 62 aa, Glycine max
  Clone ID: PAT_MRT3847_43393C.1.pep
VPRHVCLAVRNDEELGRLLGGVTIAHGGVLPSINPVLLPKKTGKEGVEPKSPKKAAKSPKKA

SEQ ID NO: 222995 - protein, 51 aa, Glycine max
  Clone ID: PAT_MRT3847_43394C.1.pep
TRAKTERGLMGENVSFTLSFEQHHLLTEETPTVTYLTGKVSHAIEASYPKI

SEQ ID NO: 222996 - protein, 125 aa, Glycine max
  unsure (1)..(125): unsure at all Xaa locations
  Clone ID: PAT_MRT3847_43395C.1.pep
TRDKLTQVHDTIWCCRSGSAADTXAVADIVHYQLGMYGIQNGAPPTTHVAAAMFQELCYNNKDRLSAGLIIAGWDERHGGQVYSIPLGXSLHKQSYAIGGSGSTYIYGYCDANWQEGFEEAAAVD

SEQ ID NO: 222997 - protein, 47 aa, Glycine max
  Clone ID: PAT_MRT3847_43396C.1.pep
SACHGTVLTNMLVGHSETTLMNGSLCHVNGPRGHAKRGIALSLTPDL

SEQ ID NO: 222998 - protein, 69 aa, Glycine max
  Clone ID: PAT_MRT3847_43397C.1.pep
LPNPPNSASPKNFTKWPHQLPPTFHCHMSIFVYFLKNIFYKKNVLEGFIKNSSRVLLTSIKKLEVLKLC

SEQ ID NO: 222999 - protein, 98 aa, Glycine max
  unsure (1)..(98): unsure at all Xaa locations
  Clone ID: PAT_MRT3847_43398C.1.pep
ASATTPREEFVYMANLAEQAERYDEMVEFMEKVSGNAENXELTVEEHNQLCVTYKNRIRTSRACWRIISXIEQNEESQGNEDHGPVIRSYRSQIKAEL

SEQ ID NO: 223000 - protein, 166 aa, Glycine max
  Clone ID: PAT_MRT3847_43399C.1.pep
MFVFLTQSGNNTHKPFPFLAPAMTTQASTFAVAVPSVTTPFRSHRNPFVVRAQAEPSDKSVEIMRKFSEQYARKSGTYFCVDKGVTSVVIKGLADHKDTLGAPLCPCRHYDDKAAEVAQGFWNCPCVPMRERKECHCMLFLTPDNDFAGNEQTITLDEIKESTANM

SEQ ID NO: 223001 - protein, 139 aa, Glycine max
  Clone ID: PAT_MRT3847_4339C.1.pep
MAATTAPKPAFTALPSSSSSSSQKPFLRLALQFPSLPNSSYHSQRPSLKISSALSDATAKTTTAAAAEDFVSRFGLEEPRKGADILVEALERQGVTDVFAYPGGASMEIHQALTRSASIRNVLPRHEQGGVFAAEGYAR

SEQ ID NO: 223002 - protein, 154 aa, Glycine max
  Clone ID: PAT_MRT3847_433C.1.pep
VTRSESKPAPVQQPVVQQAVVQPPPTLSPVKSFDPFFDPQPVTQRVVQPPPQPVYNPPPQQYYPPQPIVQQPVVQQQQPGPNPFFQPAVTNGPSQWVTFGNAVPFAPSQGTLAGNYVNQPQVQQRPNTDLAGLVSLVKTQTKDEVERRKKDEDG

SEQ ID NO: 223003 - protein, 61 aa, Glycine max
  Clone ID: PAT_MRT3847_43400C.1.pep
LELTQIPVALSRTVTSSPLSLQQSVIEDYLNGTTSACYQCLSLTPYHGTLRIYPVLICILQ

SEQ ID NO: 223004 - protein, 188 aa, Glycine max
  Clone ID: PAT_MRT3847_43401C.1.pep
PHDKHAPIIDKRSIKGIVFDMIIGASETSSNVIEWAISELVRHPRVMENLQNELKDVVGINKMVDENDLAKLSYLDMVVKETLRLHPVVPLLAPHESMEDIVIEGYYIKKKSRVIINAWAIGRDPKVWSENAEVFYPERFMNSNIDFKGQDFQLIPFGSGRRSCPGIVMGLTTVKLVLTQLVHCFKWE

SEQ ID NO: 223005 - protein, 323 aa, Glycine max
  Clone ID: PAT_MRT3847_43402C.1.pep
MVGVISLVTGMAGPSGFGSASTAEQVTDGIDASNLTAIITGGASGIGLETARVLALRKVHVIIAVRNMVSAKEAKQQILEENESARVDVMKLDLCSVNSITSFVDNFIALDLPLNILINNAGVMFCPFKLSEDGIEMQFATNHLGHFHLTNLLLDKMQQTAKATGIEGRIINLSSIAHNYTYRKGIRFNKINERKGYGNKKAYGQSKLANILHTNELSRRLQEEGVNITANSVHPGVIMTPLMRHSSYLMHFLKVFTFYIWKNVPQGAATTCYVALHPSVKGVTGKYFVDCNQCKPSSHAKNKQLAKKLWDFSNDLIKSISKA

SEQ ID NO: 223006 - protein, 241 aa, Glycine max
  unsure (1)..(241): unsure at all Xaa locations
  Clone ID: PAT_MRT3847_43403C.1.pep
REREQHLVAVLHKYLLRRTKEETIGHLMMGKEDNIVFRAMSDVQKRVYRRMLQLPDIQCLINKNLPCNSARALTQVECCKRIVPDGAIWPYLHRDNPDGCDSCPFCLVLPCLVKLQQISNHLELIKPNPKDDPDKQNKDAEFAAAVFGPDIDLVGGNTQNESFMGLSDVTHCGKMRALEKLLYSWFSQGDKVLLFSYSVRMLDILEKFLIRXGYCFSRLDGSTPTNLRQSLVDDFNSSPSK

SEQ ID NO: 223007 - protein, 68 aa, Glycine max
  Clone ID: PAT_MRT3847_43404C.1.pep
TGGAFFPSLPLMVKALNRWFFFGFKRPFSLSPPICLIEKIFSPFAKFWGKTFFFRPFFFLWMSCNSFQ

SEQ ID NO: 223008 - protein, 94 aa, Glycine max
  Clone ID: PAT_MRT3847_43405C.1.pep
NPQSGGVLGARATRLRGSNARQVSTVMRAKKARSGGPPQDRHRCAYISSQHRTLLQRQTGYGVDCDPLRTQLRWLQVHSMSPRRVNSSSIAHGV

SEQ ID NO: 223009 - protein, 107 aa, Glycine max
  unsure (1)..(107): unsure at all Xaa locations
  Clone ID: PAT_MRT3847_43406C.1.pep
PFPPHCESLSIAHASAHYSPSDKKPASNGPXEKKPXVXVKVSMERGSQKMKQIIKXTCETYKIHIVKVLKQVHPDIWIFIKAIGIMNNFINDIFEKLSQESSRLARY

SEQ ID NO: 223010 - protein, 44 aa, Glycine max
  Clone ID: PAT_MRT3847_43407C.1.pep
ILNKNNHVLKLLYIGFLGGSYYILVFNLLNTNLTSSCKYTFLFL

SEQ ID NO: 223011 - protein, 79 aa, Glycine max
  Clone ID: PAT_MRT3847_43408C.1.pep
HAKLVLGPTPRLTCYAWPALAAKQKLPSLLLTLRRICFSSSLTLTTTHSPRVTYLLLTTNHYNFNNILFQFKQNKVKHC

SEQ ID NO: 223012 - protein, 99 aa, Glycine max
  Clone ID: PAT_MRT3847_43409C.1.pep
VPICVSSKGRKLLQGATIKANAIVAQDGSGNYKTVSEAIEAASGTTRFVIYVKEGVYKEKINTNKDGITLIGDGKYSTLIVGDDSVAKGAILPDSATFS

SEQ ID NO: 223013 - protein, 78 aa, Glycine max
  Clone ID: PAT_MRT3847_4340C.1.pep
SGITRVDPRVRESAADKVEWIKKISQVIQAKGGQIRTSDGGPTMRHSLSDGSLVSFCGLKVFITRVAFFYGAFIRLVY

SEQ ID NO: 223014 - protein, 54 aa, Glycine max
  Clone ID: PAT_MRT3847_43410C.1.pep
SMHRAELGRSGHRACQGCPSFTDSHVNSRVSWAILSSGKEALRKRETHGSLTRQ

SEQ ID NO: 223015 - protein, 104 aa, Glycine max
  Clone ID: PAT_MRT3847_43411C.1.pep
TGQNKTNWSCCVEPNCYQYSIFYTILYSYSSSYMVRIGCGYRWICFISSFLSVPIDFFFPSHYLVVFFLSVVAKLGWIIGFFGVCVCDCEKDVSLMMMMMGCFC

SEQ ID NO: 223016 - protein, 177 aa, Glycine max
  Clone ID: PAT_MRT3847_43412C.1.pep
MKTEKNRGSASKGKVRKKMETYIIKVLNFLTKKGEVYKAEPPLDLKEAFSKFAGGENQMKKDQLLRFMVEHQGENNISTMEDLDKIVEKFLQLGNSCSSTKTSSTRIVDVYRKQGLSLNDFIDFLILDDFNGPLKDKVHHDMNAPLSHYFMYTGHNSYLTGNQLTSESSDEPIIEAL

SEQ ID NO: 223017 - protein, 106 aa, Glycine max
  Clone ID: PAT_MRT3847_43413C.1.pep
LSVTFFAGVITTTFTLVNKSDYTVWPGILSNAGVPPFSTTGLVLQTGASTTIAVPASWGGRFWGRTLCFEDSTGKFSCDTGDCGFSKLECSGNGSAPPATLAEFTL

SEQ ID NO: 223018 - protein, 192 aa, Glycine max
  unsure (1)..(192): unsure at all Xaa locations
  Clone ID: PAT_MRT3847_43414C.1.pep
MSEKSGQSTKAKDGKKYATLSLFNTYKGKSLETQKTTVAARHGLQSLGKVGISRRMPPPANLPSLKAENKGNDPNVNIVPKDGTGWASKQEQHEEEKAPEVSPAQPKPGVAAPPEVAPAPKSWASNKQGIQVNSQFQQEFPSLQAAGDQEKKEKEAXDENYGPGPSLRPXNVACWRDGGKSAGSPSSDQDEK

SEQ ID NO: 223019 - protein, 109 aa, Glycine max
  Clone ID: PAT_MRT3847_43415C.1.pep
QGEVGPILSDPQRPFVGDVRKMAQAIQKQNTTPHMLSCGGYQYLENKLMDEKRKKKLEEVAKSGITDTMIDPSSAIKRHVKWKMVRTKKTGQMTSDAAQEIANKIDSLE

SEQ ID NO: 223020 - protein, 110 aa, Glycine max
  Clone ID: PAT_MRT3847_43416C.1.pep
IRKRPHKRTLERKSGSNHKREETLHVGGHTREEHKGEHHGEHKGEHKGEHHGEHKGEHKGQQQHGEHKEGLAAKIKDKIHGDGHDKGEKKKKKDKKKKEQGDDHHGHSTS

SEQ ID NO: 223021 - protein, 42 aa, Glycine max
  Clone ID: PAT_MRT3847_43417C.1.pep
WFIPLLVPYCSYIFVIVQLSFEGSRSHSSSVPGHIQLNATVC

SEQ ID NO: 223022 - protein, 80 aa, Glycine max
  Clone ID: PAT_MRT3847_43418C.1.pep
NTILSGGRISIEIKIKKTGQPDTLNIVSRLTPSKIYAKKSAKDIKIRDGLNLVIYTLNESHHTGSWSEDLLVVLANVGTD

SEQ ID NO: 223023 - protein, 397 aa, Glycine max
  unsure (1)..(397): unsure at all Xaa locations
  Clone ID: PAT_MRT3847_43419C.1.pep
MECAAKGSGGRCGGSGGGGAAALGARGGAGACGSRAPPSPRARCHALACGSLPHQLAHWSRHKHECDRLQQQLKSVEVLNNFPFTFSRESTFQVCVKQETRCSFFSKRGLHQVGMWMHECHCGASSTSFDCLGLNNGWDLPSSLCPCCEPSSPVSEQLHCWRDYYKWRCIPLDSPVALLLQWPLTIYHAARLVGITALNPEISDKLYIHYLGPEKELLQLAVFGELLALFPGVRIHIELVGPAIPPQXDGEMIHISKYPCCNEDECECKIGSKNTFLETQSGITSTLTLQLWQGFYHDRYRDIVKDSFPRLIIAPNGGIAAYSSWLPSIELIKKIDVPVVFTDYCEEACHLAANCIKTVTGSPLKLPVQLNPFRQPMAVEDSVLLLPCYSNCYLFGM

SEQ ID NO: 223024 - protein, 47 aa, Glycine max
  unsure (1)..(47): unsure at all Xaa locations
  Clone ID: PAT_MRT3847_4341C.1.pep
EQFELSACFLLYLTKFSCYSFVKFLKSFXVRQIGQTPKELFDFAFFD

SEQ ID NO: 223025 - protein, 114 aa, Glycine max
  Clone ID: PAT_MRT3847_43420C.1.pep
GSGGCCGGAATRLCARCESVDYCSLSHQIAHWNRHKHECDRLQQQLKSVEVLNDFPFTFSRESTFQVCVKQETRCSFLSKRGLHQVEMWMHECACGASSASFDCLGFLHISFIF

SEQ ID NO: 223026 - protein, 99 aa, Glycine max
  unsure (1)..(99): unsure at all Xaa locations
  Clone ID: PAT_MRT3847_43421C.1.pep
LSNDSNVDATVSNNKITDIVTGDVSEVCTGKEGLSEKNGNSDPLPNQVSSDPLMSAPDSQSDLSGLLLTELRSRILLVFESLAKDADIGKIVXXFXTCA

SEQ ID NO: 223027 - protein, 94 aa, Glycine max
  Clone ID: PAT_MRT3847_43422C.1.pep
MECAAKGSGGRCGGSGSGGATRLCARCEAVAYCSLSHQIAHWSRHKHECDRLQQQVKSVEVLNNFPFTFSRESTFQVCVKQETRCSFFSKRGLH

SEQ ID NO: 223028 - protein, 124 aa, Glycine max
  Clone ID: PAT_MRT3847_43423C.1.pep
EEAPLSWAPPAAPPQEPSFWHQLVHNALIPGTACFPQLLTPTRFGSPPVPGIPPHAMYKADHDIGLPGPLFDFYPSKECIDAAIGDVLSKPWLPLPIGLKAPALDSVMSELQRQGIPNIPPSSA

SEQ ID NO: 223029 - protein, 60 aa, Glycine max
  Clone ID: PAT_MRT3847_43424C.1.pep
ALSALRLKLECWHSQICLVYKVCPFGISILSFVMIWTRSDASDAQCKHHSYRIIMVISPG

SEQ ID NO: 223030 - protein, 45 aa, Glycine max
  Clone ID: PAT_MRT3847_43425C.1.pep
MSYLRLCGSIWYGSLWKKKKKTKKKKKKKKKQKKKKHKKKKKKKD

SEQ ID NO: 223031 - protein, 106 aa, Glycine max
  unsure (1)..(106): unsure at all Xaa locations
  Clone ID: PAT_MRT3847_43426C.1.pep
MLNNVGILAIDVYFPAGCGQQEALDTHDGTIQGNYSIGLGQHCMXTFCTELKDVISMSLTVVTYVLEKNGIDPKQIGRLEDVSETVIDKSKSIKTFYIIRRSASGM

SEQ ID NO: 223032 - protein, 154 aa, Glycine max
  Clone ID: PAT_MRT3847_43427C.1.pep
LGSILIIGVVALYFYYGSNSGDNNSDLCNCIMDTTINHTITGTNKSTLSRISEKDINFIQEFLVGGMPDMGDSFLTKVSEENIKTMKDSIAEGIKSNYNISKHLLQIQRQVGDIDTKQTLLGSLLKFWPELKKVNQSLIKMYRIVEQIINGKYE

SEQ ID NO: 223033 - protein, 55 aa, Glycine max
  Clone ID: PAT_MRT3847_43428C.1.pep
TSITYDSYVDVFEFTSCILSFRNFSYQVKPQVSNSNRTFVQVVSQKIMFIQTILN

SEQ ID NO: 223034 - protein, 782 aa, Glycine max
  Clone ID: PAT_MRT3847_43429C.1.pep
MGSRGPPQSHPNSAAISKGYNFASTWEQNAPLTEQQQFAIVSLSHAVSERPLPLKLAQENASVQDNALSVKTKDSSFDDSGTIETVMVNTNQFYKWFTDLESAMKSETEEKYQHYVNTLTDRIQTCDEILQQVDDTLDLFNELQLQHQAVATKTKTLHDACDRLLQEKQRLIDFAEALRSKLNYFDELENVATNFYSPNMNVGNENFLPLLKRLDECISYVENNPQYAESSVYLLKFRQLQSRALGMMRSHVLAVLKGASSQVQEAIRGSGGGKASISEGVEASVIYVRFKAAASELKPLLEEIESRSSRREYGQILAECHRLYCEQRLSLIRAIVQRRISEFAKKESLPSLTRSGCAYLIQVCQLEHQLFDHFFPASSKDISSLAPLMDPLSTYLYDTLRPKLVHETNIDFLCELVDILKMEVLGEQHSRRSESLAGLRPTFERILADVHERLTFRARTHIRDEIANYIPTNEDLDYPEKLKKSAESTSEINPADDNPDIFKTWYPPLEKTLSCLSKLYRCLESAVFTGLAQEVVEVCSASIQKASKLIAKRSSQMDGQLFLIKHLLILREQIAPFNIEFSVTQKELDFSHLLEHLRRLLRGQASLFEWSRSTSLARTLSPRVLENQIDTKKELEKSLKATCEEFIMSVTKLVVDPLLSFVTKVTAVKVALSSGGQNQKLESVMAKPLKDQAFATPDKVAELVQKVRNAIQEQLPGVIDRMKLYLQNSSTRTILFKPIKTNIIEAHTQVQSLLQSEYTSEEIQIINLKSIQDLQNELDNFL

SEQ ID NO: 223035 - protein, 231 aa, Glycine max
  Clone ID: PAT_MRT3847_4342C.1.pep
MASETEVPDIISSVFERFQQNRDMSLFLPFLFGFSDATPGRNSDDPDHETAPTEAPQRQRIILVNPLTQGMVVIDGGSSLEALFREFTNGKGGRPPASKESIEALPSVEIGEGNEDSECVVCLEEFGVGGVAKEMPCKHRFHGNCIEKWLGMHGSCPVCRYEMPVEEIDWGKKREEEGGERRRSDGGEVWVSFSFNRSSRRNQDHDQADSGDSNDDDGSSSSHGDGAAEES

SEQ ID NO: 223036 - protein, 147 aa, Glycine max
  unsure (1)..(147): unsure at all Xaa locations
  Clone ID: PAT_MRT3847_43430C.1.pep
RDRSQMKAIVRTSLLLCSSVYIATSLFGFFLFGDNTLDDILANFDGDLGVPYGSFLTDIVRVSYGIHLILVFPIVFYSLRLNIDGLMFPHAIPLAFDTQRFXLVTTVLMAFIFVGANFVPSIWDAFQFIGATAAISAGYIFPAAIAL

SEQ ID NO: 223037 - protein, 223 aa, Glycine max
  Clone ID: PAT_MRT3847_43431C.1.pep
ESSRELAAPLLVLRKSGEQENNNGVESTFCQEFKRVSSMAAPMVAVTVSQYLLQVVSLMMVGHLGILVSFSGVAIATSFAEVTGFSVLLGMSGALETLCGQTYGAEEYRKFGNYIWCAIVTLTLVCLPISLVWIFTDKILMLFSQDPEISHAAREYCIYLIPALFGHAVLQALTRYFQTQSMIFPMVFSSITALCLHVPICWGLVFKLGLGHVGAALAIGVSY

SEQ ID NO: 223038 - protein, 49 aa, Glycine max
  unsure (1)..(49): unsure at all Xaa locations
  Clone ID: PAT_MRT3847_43432C.1.pep
KNKXFLSXPIFQLLSTFXXIIXITXNTKYXYNXXXFTQNITXTXXXXXI

SEQ ID NO: 223039 - protein, 85 aa, Glycine max
  Clone ID: PAT_MRT3847_43433C.1.pep
CFRSNSLLWEKDQQLKRIFVEQTLPNNNVRYPWLQGILGEFYVYPPWAKVHVFAKFGINVWLDINPHGRLTVKRKKKIELVRYTE

SEQ ID NO: 223040 - protein, 106 aa, Glycine max
  Clone ID: PAT_MRT3847_43434C.1.pep
MDAKSAEAVVPLEPLKYQTWFLKVSIHCEGCRRKVKKVLQSIDGVFTTTVDPQQQKVTVTGSVGVETLIRKLVKAGKHAEIWPENLAAGKGKNSGKDKKQQQQQKK

SEQ ID NO: 223041 - protein, 313 aa, Glycine max
  Clone ID: PAT_MRT3847_43435C.1.pep
ASGEIDLGIIADVVEALIGAFISTEDEKAALSFINWIGINVDTNIMPYENERHISIIAPEELVKAKLLKSRLNYSFKDPYLLVEALTHSSGKRPEIRTCYERLEFLGDAVLDYVITMHFYKEYSNDKFSAEFFTNMRSISVNNECYALSAIKAKLDEHILCDSVVKNNIAQTMEGVKNLSLESTFGWELETYFCQVLADVIESIAGAIFVDSGYKKEVVFQSIKPLLEPLVTPETARRHPISELHELCQKKGYKMKVYPPVRVNGETSVTIEVKTNGITYKNNPPAKASNNDTARKLAAKDVLKQIKICKSLG

SEQ ID NO: 223042 - protein, 60 aa, Glycine max
  unsure (1)..(60): unsure at all Xaa locations
  Clone ID: PAT_MRT3847_43436C.1.pep
PILLFYSFSDDNFXTISHXLKASLSQVLTLYHLXCXTLRGNSAVECNDRGHSLHRIXSLR

SEQ ID NO: 223043 - protein, 71 aa, Glycine max
  Clone ID: PAT_MRT3847_43437C.1.pep
EDMAQPRLNGDLNNNQHGHGASTAAPVGGGSNASVLAAMDCHAGPGHRHCHYAALDDDVPAALHALRSLTL

SEQ ID NO: 223044 - protein, 57 aa, Glycine max
  unsure (1)..(57): unsure at all Xaa locations
  Clone ID: PAT_MRT3847_43438C.1.pep
XPPFXXXXXXXPPLXWXXFXTGXXPXRKXGYXXQSYKYALLTTFQEIQELFIHSSEI

SEQ ID NO: 223045 - protein, 98 aa, Glycine max
  Clone ID: PAT_MRT3847_43439C.1.pep
WFSFVQSIVNTGSHGELYFSFPRSPFGGRSYSKKAGPGTRTQPIIKHKRALVLRVWASGGFKNFWSPPPYLGGRKGEIPQFLFFVTPKKEKFYCFLFF

SEQ ID NO: 223046 - protein, 54 aa, Glycine max
  Clone ID: PAT_MRT3847_4343C.1.pep
KKKKKKKKKKKKKKKKKKKKKKKKKKKKKKKKNKKKKKKKKKKKKKKKKRGGAV

SEQ ID NO: 223047 - protein, 60 aa, Glycine max
  Clone ID: PAT_MRT3847_43440C.1.pep
PCRSLSHCTSEDDCKVSALTFSCFRRADLRVQTSSPGQRGMVHLSDSYFHSTETFFLIRY

SEQ ID NO: 223048 - protein, 173 aa, Glycine max
  Clone ID: PAT_MRT3847_43441C.1.pep
SVSKNDSNATFEGDCNSSSLVKLEDRYSQGSRASEMIVENTSMKNDNCHDSNADVSSESLSNSMSELEIGGAYFEDCKLQPAEYCFGEGVVINEFPKNSGSVLGTSINVENPTNSCSYVSSTEEDIIDLGLQFKLDEIEAHYQHWIDELNEMMLEALDSTRRSWVAKKKLAVQ

SEQ ID NO: 223049 - protein, 89 aa, Glycine max
  Clone ID: PAT_MRT3847_43442C.1.pep
ERENGEIGRNGRDGRDNASVIRLGFCIGLGLNPPHTLYRDQDGIAIHQDIYKDAPDPSNCPYRTHSSLTIIQSNSNLATFVRYMIPLSH

SEQ ID NO: 223050 - protein, 140 aa, Glycine max
  Clone ID: PAT_MRT3847_43443C.1.pep
MHKNPDTIFEDPANDPIVPVTVAPKHYLFNSKHPDMKHMHGENWNNTVLVDGNAGAKFQVGIATFPSIGMNLVMEKIEEEIPLPPGTELTEILDTELPPEDIGNALQLLEFCRVFGKALDLKKGEAEAILRELVRKQNLR

SEQ ID NO: 223051 - protein, 98 aa, Glycine max
  Clone ID: PAT_MRT3847_43444C.1.pep
KQGGMRFTINGFRYFNLVLITNVAGAGDIVKTSVKGSKTGWMSMSRNWGQNWQSNAVLVGQSLSFRVTASDRRTSTSWNLVPANWQFGQTFTGKNFKV

SEQ ID NO: 223052 - protein, 113 aa, Glycine max
  Clone ID: PAT_MRT3847_43445C.1.pep
FSAHYHSSPTAQEAEAMPLHTAISWVSDSKLDNIIFESDCKHVVIDSLFSQKVLNKYGSILRSCKRNLSVFQNFSLKFINRQVNLVAHCLTRVSRCYVDMFLTLSLLVLIQLL

SEQ ID NO: 223053 - protein, 112 aa, Glycine max
  unsure (1)..(112): unsure at all Xaa locations
  Clone ID: PAT_MRT3847_43446C.1.pep
PYPHPPAPAPAPLLSAQLNHNPPISFTFYACTSLPYFPKSHLHYLLVYGNPFHFLCAVYQLSHSISSLRGSPFFLTYCFAYPSPHPXVSPPPPPPPPPPPPPPPKKEDVHTC

SEQ ID NO: 223054 - protein, 68 aa, Glycine max
  Clone ID: PAT_MRT3847_43447C.1.pep
CPSCQFTIPTSLSLDYDACSQQQGLLLCEPRTHHRLYHPRMYVQLLMKRTPLVDLYRKRAGPSSLMCR

SEQ ID NO: 223055 - protein, 59 aa, Glycine max
  Clone ID: PAT_MRT3847_43448C.1.pep
NHKLAISKKIIIKYINYIYNINSNNDDIRMNKLVHNLELYQSFGYDSEVKNLRSVNANP

SEQ ID NO: 223056 - protein, 38 aa, Glycine max
  Clone ID: PAT_MRT3847_43449C.1.pep
KQGRKLPLTDGYYVMYSPPNIKHRIHEVKQGKKLPFWS

SEQ ID NO: 223057 - protein, 193 aa, Glycine max
  Clone ID: PAT_MRT3847_4344C.1.pep
DYDEASPRACRWIATKKTVKSIRTPSYRERLNRLRISDVCWILYGEHREVQDFHVRSARAGLLHWGLVAVYYRPEKVVRQFGYTPAIPAPPVDSWVSYDDIHDRWMHYEGHIVPVGEVCVVLGACSSDYIEWFFRISHPFMTPGHAVDPLPHGHAPQPRVVPQAPQTDIPRVTEPGASSTSAEEPRHAVIRSL

SEQ ID NO: 223058 - protein, 60 aa, Glycine max
  unsure (1)..(60): unsure at all Xaa locations
  Clone ID: PAT_MRT3847_43450C.1.pep
PPANNNLANWHNPDRKILLPXTLLHQSKIPQYLTIEVPRHYTYNPLILNNKPQDFSRYET

SEQ ID NO: 223059 - protein, 58 aa, Glycine max
  Clone ID: PAT_MRT3847_43451C.1.pep
PPQKDTSPATQKPQIMSIKLPNTTRTVAKNREQETLDGPSQAIAAINARAECLARVHA

SEQ ID NO: 223060 - protein, 126 aa, Glycine max
  unsure (1)..(126): unsure at all Xaa locations
  Clone ID: PAT_MRT3847_43452C.1.pep
DRGVIVEYLGRVAYVAHNDNEAQEKDLVEGNSSFDIKCSSRLEIVSSTKAQFASGKTFKYDILGAGSQTSEDFPEXKIKRNPLRLSARLRQRIAPQYNEGQAQMETYVLKLSLDDVATPKGSMWDL

SEQ ID NO: 223061 - protein, 57 aa, Glycine max
  Clone ID: PAT_MRT3847_43453C.1.pep
NQKPLLIPFGGGNSNSFSHFPRAKMVGPLTPWGEGGGSQMDLKSKNVLYPHKIALLR

SEQ ID NO: 223062 - protein, 52 aa, Glycine max
  Clone ID: PAT_MRT3847_43454C.1.pep
NIKFPHLLIPASTTTILGFFCKRQTHLFTFSSKNPFFHTSSICSHIYLILIF

SEQ ID NO: 223063 - protein, 134 aa, Glycine max
  unsure (1)..(134): unsure at all Xaa locations
  Clone ID: PAT_MRT3847_43455C.1.pep
RWDRGVERKRRTRHMWKSPTRAHSSVTVDFSSSSSSSSSSSSSLKSSVDWFYKDGRKIIAGDCALFKPPKDRPPFIGISHRVTVGKENKWKXSVNWLXRPIEVRLVKDLLLESAPNKIFYSFHXEEIPATSLLH

SEQ ID NO: 223064 - protein, 77 aa, Glycine max
  unsure (1)..(77): unsure at all Xaa locations
  Clone ID: PAT_MRT3847_43456C.1.pep
WGRDXIGSQSLLSSFIARLHTQMRGXSFHFPLGTGSLFHQMLLVSDKIXXIVPPIFKRVTHSLSRARNXXDXLKVGX

SEQ ID NO: 223065 - protein, 135 aa, Glycine max
  unsure (1)..(135): unsure at all Xaa locations
  Clone ID: PAT_MRT3847_43457C.1.pep
GFAEVETVPFEVRGWGIDGSRWVSRWDRCVEWKRRTRHMWKSPTRGHSSVTVDFSSSSSSTTSGDSFYKDGGKISAVDCALFKPHKDCPPFIGIIRXLPIEVRLGKDLLLESAPNEIFYSFHKAEIPATSLLHPL

SEQ ID NO: 223066 - protein, 150 aa, Glycine max
  Clone ID: PAT_MRT3847_43458C.1.pep
MVESQPKFFIPDSINGVNFDVAAQIKMVWEVIKAPLIVPLLNLAVYISLAMALMLFMERVYMGIVIILVKLFWKKPHQRYKFEPLQDDEELGNSNYPVVLVQIPMFNEKEVYKVSIGAACNLSWPVDRLVIQVLDDSTDPTVKQMVEMEC

SEQ ID NO: 223067 - protein, 546 aa, Glycine max
  unsure (1)..(546): unsure at all Xaa locations
  Clone ID: PAT_MRT3847_43459C.1.pep
MVESQPKFFIPDSINGVNFDVAAQIKMVWEVMKAPLIVPLLNLAVYISLAMALMLFMERVYMGIVIILVKLFWKKPHQRYKFEPLQDDEELGNSNYPVVLVQIPMFNEKEVYKVSIGAACNLSWPADRLVIQVLDDSTDPTXVKQMVEMECQRWASKGINIVYQIRETRGGYKAGALKEGLKRNYVKHCEYVAIFDADFRPEPDFLRRSIPFLVGNPDIALVQARWRFVNSDECLLTRMQEMSLDYHFTVEQEVGSATHALLRFQWKLSGIWRIAAINECWVGWNDSITVEDMDLGXRAKFLGNEKYFCHGDLQSKXGLSSSLKSFRFQQHRCSCGPANLFRKMVMEIVRNKKVTFWKKVYVIYSLFLXRKIIDHMVTFFFYCVVIPLTILVPEVHVPIWGAVYLPSVITILNSVGTPRSIHLLFYWILFENVMSLHRTKATFIGLLEYGRANEWVVTEKLGDSVNNNKNKSGDAAKKNNAIKATPKKTRSKFVERLNLLELGFAAFLFVCGCYDYVHGKHNYFIYLFLQTLTFSIVGFGYVGTIV

SEQ ID NO: 223068 - protein, 45 aa, Glycine max
  Clone ID: PAT_MRT3847_4345C.1.pep
RKEWSRFTACENRRNSITDTLYINLTLPHSYSTQFKWERFWGLFR

SEQ ID NO: 223069 - protein, 225 aa, Glycine max
  unsure (1)..(225): unsure at all Xaa locations
  Clone ID: PAT_MRT3847_43460C.1.pep
MGTTVAGLAPGLSRKLKKVLESRIDTPDLLSSLNTLSSFYDDNTPQARRNLRSTIEKRALSINREFLDASHAAQLALDSVENEVDALAECCDRIAKALNSCSASTADIIGTTERLKQELETTTQRQEIVACFLRDYQLSPEEINALREEELNENFFKALSHVQEIYANCKVLLRTHHQRAGLELMDMMAXVYQEGAYERLCRWVQAECRKLGDTDNPEVSELSET

SEQ ID NO: 223070 - protein, 67 aa, Glycine max
  Clone ID: PAT_MRT3847_43461C.1.pep
AVYPIITRVFSLCVCDPYIQFVPTPVGNCGVVLGRLPRERKEPPAAVLFRFEQTKDWCCGISPIISF

SEQ ID NO: 223071 - protein, 91 aa, Glycine max
  Clone ID: PAT_MRT3847_43462C.1.pep
CWNARAHRSTVFAGVDVTTCPAGGITSPGGNHWAYYFELITNLLHLGHDYNPDTDMCLMKIASEQNGSSLLRSVTCLRMFTVGLVDVLLLY

SEQ ID NO: 223072 - protein, 150 aa, Glycine max
  unsure (1)..(150): unsure at all Xaa locations
  Clone ID: PAT_MRT3847_43463C.1.pep
RVSSXHIPLEKVQAXHTSKKXHXPPXDIIDADGCWTGSXXXDXXKXWGXXXHLXLXPXXGXALVVQKTXLLHIDSXXDGGXXXSTIXPISXXPNPXVFILTNINLVFNRFGXXXIFHXXTIFLQXGSXHXXIXFGSSFXQMXXSKXCPSC

SEQ ID NO: 223073 - protein, 124 aa, Glycine max
  unsure (1)..(124): unsure at all Xaa locations
  Clone ID: PAT_MRT3847_43464C.1.pep
FLGVLKCFLIFLGGFRKSRFPYLWSYMQFFSSTRTVFLTPFRGQIRVYIIFGVYFPCPQSFVSCLYLSWVVLLIKFLFYGGVEFANWLYCKRLYSPFLLLKSRICPCPFKKEDKKKRXXIGWWP

SEQ ID NO: 223074 - protein, 107 aa, Glycine max
  Clone ID: PAT_MRT3847_43465C.1.pep
ENEKIRDELEKAVHIIWNCRLPSPRCVAIDAVVETELVAALQVSIFPEIIFTKAGKILFRDKAIRNAEEWSKVMAYFYYGAAKPSCLNSLTYSQENIPSIVTDNPVS

SEQ ID NO: 223075 - protein, 49 aa, Glycine max
  Clone ID: PAT_MRT3847_43466C.1.pep
LKRQCISSSLRVVLSNKVELSLCFQYLIQCCCTFNTIGTQGSSRQEKDL

SEQ ID NO: 223076 - protein, 93 aa, Glycine max
  unsure (1)..(93): unsure at all Xaa locations
  Clone ID: PAT_MRT3847_43467C.1.pep
PTRLMATFQFCSVTPFLYPPLXPNCXRSVSHXRIEXLLRFSXXGXKALMSLRKPXXSEKPFPICLKXLVWLPEXVAEXHXSXLNFLEAEAEAV

SEQ ID NO: 223077 - protein, 63 aa, Glycine max
  unsure (1)..(63): unsure at all Xaa locations
  Clone ID: PAT_MRT3847_43468C.1.pep
RKQMLSIEKTTGKICYLLSARQLSITWGNSTLYWSWXPSKSSFEEAAELRTICWLEIKGSINS

SEQ ID NO: 223078 - protein, 110 aa, Glycine max
  unsure (1)..(110): unsure at all Xaa locations
  Clone ID: PAT_MRT3847_43469C.1.pep
GRRVSARACGXSLRFAVRRLCVRLRRFFRGRWGLLCRRPVWLVLGVGVXGAPPLLCCVLPPWRPPVVAVAAALVPSLPSGVRVAASVSPLGSPPSACGGXLPCPPSGVFP

SEQ ID NO: 223079 - protein, 41 aa, Glycine max
  Clone ID: PAT_MRT3847_4346C.1.pep
TIRIYALRNSLRFLMVSYQPGLESTFIHYIPILSASYLALC

SEQ ID NO: 223080 - protein, 97 aa, Glycine max
  unsure (1)..(97): unsure at all Xaa locations
  Clone ID: PAT_MRT3847_43470C.1.pep
XXXXXXCXXXXPXPXQNXPXQXXXXXXPXXXXXWXAXXXLXPXGXXXXGCTCXXXXXXXXXXXXXXXLXXSWXXXXLVXXXWXXAXSXXXSXXXXXE

SEQ ID NO: 223081 - protein, 107 aa, Glycine max
  Clone ID: PAT_MRT3847_43471C.1.pep
PRVRTAARRRQKGGGNGRIWLGRAWRPYSRVVFAFSIMSDIIAPEGWNDFNDPSRDQTIFYGEYNCLGPGANTNFRAPYVQKLNETQALAFLNTSFIDGDQWLETSK

SEQ ID NO: 223082 - protein, 96 aa, Glycine max
  Clone ID: PAT_MRT3847_43472C.1.pep
AFISENMGNCCEPASSMEWDGEDWSDLTTSKKTISSKVFDETHANADHGHELSLGKVQKEKFMGALRASLDANYGKAKIKISKKELEELLEKQQEQ

SEQ ID NO: 223083 - protein, 66 aa, Glycine max
  Clone ID: PAT_MRT3847_43473C.1.pep
SDFYPTNPTLLVLASQLMVLRRVSCGQLQLSDSELADAGLVTAHAHLFIADPQFLMLKSGLLKTIC

SEQ ID NO: 223084 - protein, 76 aa, Glycine max
  Clone ID: PAT_MRT3847_43474C.1.pep
QFYCKFTLLFFLCSTCIFVQIHQKKHKSHLKHAFNLKQGIHPFHKINKLLHCHTNKVKLNCSRCFRMSNYTTHAKT

SEQ ID NO: 223085 - protein, 98 aa, Glycine max
  Clone ID: PAT_MRT3847_43475C.1.pep
LFHAEECMWSKVAIYGCLWPADPSFRAVSNWVRTGLVFPLPRCAIIIQHEEKTHHNVGPHNKASCQRPTGTPTLDARYASSNLPRGLPHQNKTLPRFT

SEQ ID NO: 223086 - protein, 53 aa, Glycine max
  Clone ID: PAT_MRT3847_43476C.1.pep
LYLIESCISLVRCRPIKTSTIFILMHLPIVYNYQPTLIIENNLAIRKYGYKYP

SEQ ID NO: 223087 - protein, 72 aa, Glycine max
  Clone ID: PAT_MRT3847_43477C.1.pep
MARIKPQALLQQSKRKKGPSRISAATVIFYFLILALLGFFLFASYRHWSSRSRLQSEDHLSVSESNYYFLVG

SEQ ID NO: 223088 - protein, 57 aa, Glycine max
  Clone ID: PAT_MRT3847_43478C.1.pep
RERFRSFLFSLLFLARIVQFGSYILGNFVIFFLYINLTRIVEITTDTPVFLSVICYS

SEQ ID NO: 223089 - protein, 84 aa, Glycine max
  Clone ID: PAT_MRT3847_43479C.1.pep
MPIVTKDMDSAFQTAGANPGLEVWCIENQRLVSVSNSSHGKFYTGSAYLVLNAVFPKIGPPQYDIHYWLGNEAKKVDSSLASGT

SEQ ID NO: 223090 - protein, 99 aa, Glycine max
  Clone ID: PAT_MRT3847_4347C.1.pep
FFFFFFFFCFLGKIYKILQDCRVNGKLKCKCLTEKSPGGKQKKKKIFLLHFFTLNGGGLIFNGTATNSKQKHCIQISQLISLFNLSCTFLPLTFYFKQI

SEQ ID NO: 223091 - protein, 60 aa, Glycine max
  Clone ID: PAT_MRT3847_43480C.1.pep
AITSSIQISLRLNHTIFLSFQPKNESKNIWCPKKPSIAIFGFHLPAFFPWVLINNPEIMN

SEQ ID NO: 223092 - protein, 227 aa, Glycine max
  Clone ID: PAT_MRT3847_43481C.1.pep
AEAVLKYCILVHLDNNFDKFNLLIFMLQKLFSLIDQTSVPDNPDSLQNHEVLLPGHLITLYLKEKLEDWLQKGKRLLLDEIDKKSKKFDFSDIVQVKKVMDKNSPKQVSTAVENMLKTGRLVTQTGLDLQQRAGYTVQAERLNFLRFVSHFRAVHRGASFAGLRTTTVRKLLPESWGFLCPVHTPDGEPCGLLNHMTCTSRITSFFDSSGNVKDYFKIKMSILNVLL

SEQ ID NO: 223093 - protein, 65 aa, Glycine max
  Clone ID: PAT_MRT3847_43482C.1.pep
GHVVVGRRERGRTLLGVRITKNNGTDKSKTESADRHIKKKTHNNAKLKVKQKKRAAARDLELARA

SEQ ID NO: 223094 - protein, 91 aa, Glycine max
  Clone ID: PAT_MRT3847_43483C.1.pep
PYPVLFSLTNFCFRRKEKARGKKPADKPINQPRAMGFQPPKKRAPQNGAHPKKTKEGLGIYRGGAGLRNTPGPHYPQKGGGPGSFENSFGL

SEQ ID NO: 223095 - protein, 47 aa, Glycine max
  Clone ID: PAT_MRT3847_43484C.1.pep
MIYDVNSPLFRSFLSQKGGSSDKRKSDEQKPKEQKPKASENKPIMTE

SEQ ID NO: 223096 - protein, 60 aa, Glycine max
  unsure (1)..(60): unsure at all Xaa locations
  Clone ID: PAT_MRT3847_43485C.1.pep
MIYDVNSXLFRSFLSQKGGSSDKRFSPPLFLSCQSLGKSDEQKPKEQKPKASENKPIMTE

SEQ ID NO: 223097 - protein, 622 aa, Glycine max
  Clone ID: PAT_MRT3847_43487C.1.pep
SSLFGFTVITDTKGEEYFTYKWNSPEKVRFQITWDGFEKKFVLDADGKQWNRTQFEPFDDCEKYNFCGSFAVCDTGNSPFCSCMEGFEPMHWEEWNNRNWTRGCGRRTPLKAEAERSANNSSSGADREVSVGEDGFLEQRCTKFPDFARLENFVGDADCQRYCLQNTSCTAYSYTIGIGCMIWYGELVDVQHSQNNLGSLLHIRLADADLGDGGKKTKIWIILAVVVGLICIGIVVLLVWRFKRKPKVSSASGFNNNSEIPAFDLTRSTGLSEISGELGLEGNQLSGAELPLFHFSCILAATNNFSDENKLGQGGFGPVYKGKIPGGEEVAVKRLSRKSSQGLEEFKNEMVLIAKLQHRNLVRLLGCCIQGEEKILVYEYLPNKSLDCFLFDPVKQTQLDWAKRFEIIEGIARGLLYLHRDSRLRIIHRDLKASNILLDESMNPKISDFGLARIFGGNQNEANTNRVVGTYGYMSPEYAMEGLFSIKSDVYSFGVLLLEIMSGRKNTSFRDTDDSSLIGYAWHLWSEQRVMELVDPSLGDSIPKTKALRFIQIGMLCVQDSASRRPNMSSVLLMLGSESTALPLPKQPLLTTSMRILDDGESYSEGLDVSNDLTVSMVTTGR

SEQ ID NO: 223098 - protein, 67 aa, Glycine max
  Clone ID: PAT_MRT3847_43488C.1.pep
LLRVSKKPTQTDCLPGWTGKKLEGGRDQPKIVAPRSKKKHVFHSQKRESLGPWDKKNGGHNGGHRGE

SEQ ID NO: 223099 - protein, 136 aa, Glycine max
  unsure (1)..(136): unsure at all Xaa locations
  Clone ID: PAT_MRT3847_43489C.1.pep
PQTEAAQTARQLPGSTCRPECEKKEDEIRSPEEVQNQLFGHVVKILILFPRVLIRKYITDKLKKPFITKKTHSRLFIRHTWTAHNTCPQCQSWIDLCTLEVVVLLPPFSHTALSFLCYEYRTITSSTTCIXFVCSP

SEQ ID NO: 223100 - protein, 212 aa, Glycine max
  Clone ID: PAT_MRT3847_4348C.1.pep
PRVRTAARRRQKGEYEYIEEDIFNKSSLLLELNPVHKKVPVLVHAQKPIAESFIILEYIDETWKKYPLLPHNPYQRALARFWAYSAEQKLMDAAWIAMCTSGDDQQKAVKVGRELMEKIEEEIKGKKFFGGDNIGYLDIALGWISYWIPVWEEVGSMLIIEPLKFPAITAWMTNFLSHPVIKDNLPPRDKMLVYYSSRRKALSSTFLGWFKV

SEQ ID NO: 223101 - protein, 62 aa, Glycine max
  Clone ID: PAT_MRT3847_43490C.1.pep
SKDIVISYNPYLSGCIALDRYDHTNNKLHMLPLLPRMTTFASNRACTYHSNDISTCRAQKPT

SEQ ID NO: 223102 - protein, 143 aa, Glycine max
  unsure (1)..(143): unsure at all Xaa locations
  Clone ID: PAT_MRT3847_43491C.1.pep
VVPANSPFVLPYNYCSFFCVQPIWFGLPKCLHPKLTARYYGPYLVLIKVEVVAFQLQLPKHAXIHPVFLVLQLKRAVGQQHLVEAELQQELQLDPIIYLPAKVFAESVVMQKDEQIPQVLIKLNGKEKLRKRRHGRCTSHSGL

SEQ ID NO: 223103 - protein, 35 aa, Glycine max
  Clone ID: PAT_MRT3847_43492C.1.pep
AYFIPVYLVPSEHLREWQCQLGARAMDKRMERHHI

SEQ ID NO: 223104 - protein, 85 aa, Glycine max
  Clone ID: PAT_MRT3847_43493C.1.pep
MDKSCHPSSNTSISTSSAANPNNNSRDQYLRHLNKLSQKISKPIIKKPVFDPPQAQVPNNQVQHQPPVYNINKNDFRDVVQKLTG

SEQ ID NO: 223105 - protein, 48 aa, Glycine max
  Clone ID: PAT_MRT3847_43494C.1.pep
EIYEKFSVSSKRIVLVNNCRNNSALLKNIFSKKTGTGFDKKKKKRGAP

SEQ ID NO: 223106 - protein, 185 aa, Glycine max
  unsure (1)..(185): unsure at all Xaa locations
  Clone ID: PAT_MRT3847_43495C.1.pep
YSSLSVFALHPLYLRVQALSKNIPEAIKKEIEKAKQQLDGKDVDYEATMATKLSIAKKVFAQEKDLILNSSSFKEFFSENEGWLKPYAAFCFLRDFFETSDRTQWGHFAHYSEDKLEKLVSKDSLHYEIICFHYYVQYHLHLQLSEAAEYARKKGVILKGDLPIXVDRNSVDTWVYPNLFRMNTS

SEQ ID NO: 223107 - protein, 218 aa, Glycine max
  Clone ID: PAT_MRT3847_43496C.1.pep
FSIERSCTPPASMEVSQQKHYKEEHSQGVVHPRNGSHGSVPAQHAYPYYISGVVNHVMMPSSAQLYQKNIQDLQIHAGSSMIAQYNHLPQCPPHANGMTNFPYYPMNICLQPGQISTNSWPSLGSSSSCEVQISKVDRREAALMKFRQKRKERCFDKKIRYVNRKRLAERRPRVRGQFVRKLNGINVDLNGQPASTDYDEDDEEEDNHRARDSSPEVA

SEQ ID NO: 223108 - protein, 317 aa, Glycine max
  Clone ID: PAT_MRT3847_43497C.1.pep
MAGATGRTLFTLSLSSSSSLTRLSLIPKRVPLPKPLPLFRRFRPLCSVSAAAPEAADAKHSILLERLRSRHLRDAAKAAPEPRKKEKVAAAAAAAAAAAEAKEKKKAVASFEELGLSEEVMGAVREMGIEVPTEIQSIGIPAVLEEKSVVLGSHTGSGKTLAYLLPLAQLLRRDEQLNGILLKPRRPRAVVLCPTRELSEQVFRVAKSISHHARFRCTMVSGGGRLRPQEDSLNNPIDVVVGTPGRVLQHIEEGNMVYGDIKYLVLDEADTMFDRGFGPDIRKFIGPLKNRALKTCGLSFQTIFVTATITKAWQKSD

SEQ ID NO: 223109 - protein, 37 aa, Glycine max
  unsure (1)..(37): unsure at all Xaa locations
  Clone ID: PAT_MRT3847_43498C.1.pep
ECFTDXWIKNVRFLGXSXXQSLDTMLRXGIDFHSKVS

SEQ ID NO: 223110 - protein, 60 aa, Glycine max
  unsure (1)..(60): unsure at all Xaa locations
  Clone ID: PAT_MRT3847_43499C.1.pep
IATMKSHLVGANNITNNEKPKPPRRNWGGRSSVSIKLCQLGVSIQLLRFXLIFSLLVLHT

SEQ ID NO: 223111 - protein, 37 aa, Glycine max
  Clone ID: PAT_MRT3847_4349C.1.pep
VSSLRFLELARDYSISLSCSSMMLGGTSGTMCSSSFM

SEQ ID NO: 223112 - protein, 79 aa, Glycine max
  Clone ID: PAT_MRT3847_434C.1.pep
KILFLKNPLSEKAKLKPFFNPPPKGDPKKNSNLNKKKKKQGVHKTKFHILKDHRDPHPPPQEDKKLHKTNPKTTLPTKF

SEQ ID NO: 223113 - protein, 39 aa, Glycine max
  Clone ID: PAT_MRT3847_43500C.1.pep
SNDYEHYNVISQCHACLTYVFKVTQLGYTHERRIDLGLI

SEQ ID NO: 223114 - protein, 37 aa, Glycine max
  Clone ID: PAT_MRT3847_43501C.1.pep
FVFSLNPYMTYKTGVKLNREWLTALISQRKQFYDPIL

SEQ ID NO: 223115 - protein, 40 aa, Glycine max
  Clone ID: PAT_MRT3847_43502C.1.pep
LTLSETNPSGTIYSYHDTSAMVEAKSRTVGNTERTGCQAV

SEQ ID NO: 223116 - protein, 82 aa, Glycine max
  Clone ID: PAT_MRT3847_43503C.1.pep
APLRSLGIGLGSISPCPDRPIERTYSVMRSCPLDVSLRVFLMLTLSAFSFLCGLHAILGSSCSLLSGLFIQPTELIVPLRIM

SEQ ID NO: 223117 - protein, 65 aa, Glycine max
  Clone ID: PAT_MRT3847_43504C.1.pep
AGLFFLLCFLHKKLCACENICMRIPIQPWTGGPCHNTKHVDIYGKRGHLLRPDLPYTSQIQNIHL

SEQ ID NO: 223118 - protein, 100 aa, Glycine max
  Clone ID: PAT_MRT3847_43505C.1.pep
GDEFVTTKKKPYPSFGGPRGYLLRKGGLLLAIKKPPPPQKIFFFLPPPPTNFLKGGGALYFLTPYFWGPWFRGGGGGRIKRGPPPKAAGWGNRFHHVPPR

SEQ ID NO: 223119 - protein, 41 aa, Glycine max
  Clone ID: PAT_MRT3847_43506C.1.pep
ERGCFLFFPGIFNIYFARREMVLNHKNDTMNPYFFRKIYTA

SEQ ID NO: 223120 - protein, 104 aa, Glycine max
  unsure (1)..(104): unsure at all Xaa locations
  Clone ID: PAT_MRT3847_43507C.1.pep
FXFFFFFFFFGXHKSGAFCXYVSSIXIRTSTLRSSLKRKKVTRGVDFRFLTGSFSPIKVKKKRLVNALPLDTIXNEXHTVAAEHEEDSGRRMSCACSLSEVSSP

SEQ ID NO: 223121 - protein, 239 aa, Glycine max
  unsure (1)..(239): unsure at all Xaa locations
  Clone ID: PAT_MRT3847_43508C.1.pep
MIGSKDRSADFEGENSRSKLSRHNFEANKEYPDEKGVEFLRDSSEVGGCGGSSGLQELTLSYLCDNPKFNLAEKEIPGKSLLEKMSHKGKEVVVCENSYQDGKWVERDFLSLSEPREDSSKRSLEEVVERESNREKKPKLEILNLSLALPDVSLSLTASNALQNGGDHQQQVRTXSLQPSSTTHTSYSNDYTAASLSYSYSHPFSHNPSCSLTXHLTDMFDYSVSQDDQIWXCGEGTNG

SEQ ID NO: 223122 - protein, 94 aa, Glycine max
  Clone ID: PAT_MRT3847_43509C.1.pep
PRVRKTLGKIFQRVKSANGNENESVPNKAVHKLNGSETGNDTSPSTSPKSSSPDFSSQSPYVEAPRFAGMQFDYNFPRPTAPPGAQRPTSTSKD

SEQ ID NO: 223123 - protein, 61 aa, Glycine max
  Clone ID: PAT_MRT3847_4350C.1.pep
KCVLQSPGLLQWLEGPALRRSSHSSSSHMRSEPRLEKQGGNQSKSFKPLPIQIFCDLWGHV

SEQ ID NO: 223124 - protein, 81 aa, Glycine max
  Clone ID: PAT_MRT3847_43510C.1.pep
WNAWDQANVNAIAKTVKRPLAVYGTRAFQEIIRNCMAQDLSWKGPAKKWEEVLLSLGVPGSEPGSDGEKIAPQAKENVATP

SEQ ID NO: 223125 - protein, 132 aa, Glycine max
  unsure (1)..(132): unsure at all Xaa locations
  Clone ID: PAT_MRT3847_43511C.1.pep
MADSSREENVYMAKLAEQAERYEEMVEFMEKVAKTVEVEELTVEERNLLSVAYKNVIGARRASWRIISYIEHKEESRGNEDHVAIIKEYKGKIEFKTGADRKEVXKSTLLAYKSAQDIATADLXPTHPIRLG

SEQ ID NO: 223126 - protein, 140 aa, Glycine max
  Clone ID: PAT_MRT3847_43513C.1.pep
YPNFAGDLSKASSNQTIFRHICLRKESRFDGKQGFPLQLESSDQFVMKFLECSALERLNDFLGNLNLGERTIKGCLEAYSCKHAGSDKKLSISLETEILDYLGKSSDTDSSSPDQTLLTRNSRKTLANLAPTLYHKNPDN

SEQ ID NO: 223127 - protein, 164 aa, Glycine max
  Clone ID: PAT_MRT3847_43514C.1.pep
RTSHKSNRETLRRDNGSIYESSIESCDCKATSSVSSVVPKEAFMRQKSRNSNDSVLEEEISNVNSGGFEVYINRFDASKNTTHEDDNHQSQYGNVSVTRHKYGRPSVSSASNNDNTVDEFETEITARGVNVVKGGNYHSDEAAKYKRPSETTIKGSMKAKKILH

SEQ ID NO: 223128 - protein, 69 aa, Glycine max
  Clone ID: PAT_MRT3847_43515C.1.pep
IFLLEVQSGHVDLNNNLFVPTNNFRESFSIPLMHLLLISSLMMCLECCAKGLLVCKAICNWNYNKSPIF

SEQ ID NO: 223129 - protein, 236 aa, Glycine max
  Clone ID: PAT_MRT3847_43516C.1.pep
SVKLESSDQFVMKFLECSALDRLNDFLGNLNLGERTIKGCLEAYSCKHAGSDKKLSISLETEILDYLGKSSDTDSSSPDQTFLTRTSRKTLVYLVLTLYHMYPDYDFSAVKAHQFFTEESRDSFKQIFDTYMHEASKEWAETVGGASLLDTLFKALDEVVKLVDCDIYGYVPDFEADPLLESGGTIWSFNFLFYNRKLKRIVSFRFSCFSNLIADGLLIDDIHNEYDEEIFADMDI

SEQ ID NO: 223130 - protein, 139 aa, Glycine max
  Clone ID: PAT_MRT3847_43517C.1.pep
AKSAAVENSRKIFNTMLHHNVMSWTALISGYVQSRQEQEAIKLFCNMLHGHVTPNCFTFSSVLKACASLPDFGIGKQLHGQTIKLGLSTINCVGNSLINMYARSGTMECARKAFNILFEKNLISYNTAADANAKSLDSD

SEQ ID NO: 223131 - protein, 87 aa, Glycine max
  Clone ID: PAT_MRT3847_43518C.1.pep
AKHTASHSFTYNMTTLHKPQGLLHTPCVTHLYLITYVLKYNFFHVSYPYICSSQLFLLPLTYGSLPSQSTNSITILNTSFIPDYSFL

SEQ ID NO: 223132 - protein, 51 aa, Glycine max
  unsure (1)..(51): unsure at all Xaa locations
  Clone ID: PAT_MRT3847_43519C.1.pep
IRLESKFSGRSXNFFIYWRHHLRWVVTHRGDNSYNFWKEKRNTVYSARFSF

SEQ ID NO: 223133 - protein, 208 aa, Glycine max
  Clone ID: PAT_MRT3847_4351C.1.pep
PRVRTAARRRQKGEYEYIEEDIFNKSSLLLELNPVHKKVPVLVHAQKPIAESFIILEYIDETWKKYPLLPHNPYQRALARFWATCVEQKLGKAGWVAMSTSGDEQEEAVKVAREIIEKIEEEIKGKNFFGGENIGYLDIALGWISYWLPIWEEVGSIQIIDPLKFPAITAWITNFLSHPVIKDNLPPRDKMLVYFHSRRTALSSTFQG

SEQ ID NO: 223134 - protein, 66 aa, Glycine max
  Clone ID: PAT_MRT3847_43520C.1.pep
APIFYQSTNRSYNSEGLTRQTTSLSKMKWQETGTGKSAVPNSRRGQLSDNKKTARATCKGNHQLCT

SEQ ID NO: 223135 - protein, 75 aa, Glycine max
  Clone ID: PAT_MRT3847_43521C.1.pep
AQKVHSYFRKWVHHNLSAKVAASLKIIYGGFVNGGNSKKLAPHPHVNGFLVGGAPPKPEFVDIINAAPVKKNLNL

SEQ ID NO: 223136 - protein, 50 aa, Glycine max
  Clone ID: PAT_MRT3847_43522C.1.pep
FLVSEFQVSTSFLLLIESAFFKFLKETSRPNYYRALYGVKSSSYIFGMLP

SEQ ID NO: 223137 - protein, 77 aa, Glycine max
  Clone ID: PAT_MRT3847_43523C.1.pep
KDNMTFTAAYFNLDEGKPRWERILGPTNHRKAPKNPTMDECREQDQLQPAIVIMENNSSGAKMEENGICSRNSWKKK

SEQ ID NO: 223138 - protein, 135 aa, Glycine max
  Clone ID: PAT_MRT3847_43524C.1.pep
LTSTRTPQLSHQLSHKPLFFPSNIYHQIPTFFFFLIQPQQKPQSSEHLISREPTRGNKTPKFAQDRRRNGESLLEKRDRHVQFELSLCFRHSCGKHKTRGWNLERTGERPELRLSQPEAGGVVVCLSSHASSKIA

SEQ ID NO: 223139 - protein, 52 aa, Glycine max
  Clone ID: PAT_MRT3847_43525C.1.pep
LRGLKIGNASGKKWISMTNEEKVKYYDIASEKRIEFDRAMAKFNNKMESGGV

SEQ ID NO: 223140 - protein, 281 aa, Glycine max
  unsure (1)..(281): unsure at all Xaa locations
  Clone ID: PAT_MRT3847_43526C.1.pep
HSSPGKCVYLIVYVDDIVITGNDATKIAQLKEHLFSHFQTKDLGYLKYFLGIEVAQSRDGVVISQRKYALDILEETGMQNCRPVDSPMDPNLKLMANQSEIYPYSERYRRLVEKLIYLTITRLDISFKVGVVSQFMQNPHADHWNAVIRILRXYIKRALEPELLYEDKGNTQISGNCDADWAGCPMDRRSTSGYCVSIGGNVISWKSKKQVVVARSSAEAEYRSMTMVTCELMWVKQILEELKFCKVVQMKLYCDNQAALHIASNLVFHEKAREGPSDLCQ

SEQ ID NO: 223141 - protein, 104 aa, Glycine max
  unsure (1)..(104): unsure at all Xaa locations
  Clone ID: PAT_MRT3847_43527C.1.pep
GRKHLSYIPYKALVQFLLPAIAWVVGWRLVNEESGLKIQCLWKLRDFKCGVELINRISNVVEAFGHFPNIYLEQPNQIRTXLLTASIGGLTINDFIVAAKIDYI

SEQ ID NO: 223142 - protein, 97 aa, Glycine max
  Clone ID: PAT_MRT3847_43528C.1.pep
KWRSKTTLSKKKKKPCSYQKPFKTGGKLKKVPKNIGPQKIQARDKSGLSTTGFFPSKGESFQRILGTTPRFFKKNPPPFHKKKIFGSKRGSLLWRKS

SEQ ID NO: 223143 - protein, 79 aa, Glycine max
  Clone ID: PAT_MRT3847_43529C.1.pep
MFLFIFLSTLVLIAVRAKKLWIAIEDWFHVYQFFKVPELNETTQHNHLYRKVSLYLHSLPSIEDSVFANLITGKEAKRH

SEQ ID NO: 223144 - protein, 56 aa, Glycine max
  Clone ID: PAT_MRT3847_4352C.1.pep
NKEQKKLGQTSVGNKLINQEFLFLLKATANKIGVGKKKKKKKIKPKKKKKKKKKKK

SEQ ID NO: 223145 - protein, 49 aa, Glycine max
  Clone ID: PAT_MRT3847_43530C.1.pep
GYPLDDLFSLIAGFYNYPPHMHESPKGKVLPFFYSTKGTTPTSSLINYS

SEQ ID NO: 223146 - protein, 38 aa, Glycine max
  Clone ID: PAT_MRT3847_43531C.1.pep
WTSGHAIVDNHAYQRHYNVMLEAETANAEPQLCAHSSS

SEQ ID NO: 223147 - protein, 159 aa, Glycine max
  unsure (1)..(159): unsure at all Xaa locations
  Clone ID: PAT_MRT3847_43532C.1.pep
GSSFEGAFDMFFSIIREEGNSDGGVVVQDCLELLNNLLRSNASNQVLLRETVGLDSLILILKLRGSSFTFNQQKTINLLSALETIKLLLKGGSESDPGKDMNKQTNKTTLVQKKILDHLLILGVESQWVPVPVRCAAMRCIGDLIAGDXKNRDLLLASF

SEQ ID NO: 223148 - protein, 35 aa, Glycine max
  Clone ID: PAT_MRT3847_43533C.1.pep
NFICSELYPVGPLFRLYVELEIGKQILSQQFSAKF

SEQ ID NO: 223149 - protein, 125 aa, Glycine max
  Clone ID: PAT_MRT3847_43534C.1.pep
EMLKAEQEPEELTPGKQARKIAVENALKKLKKGPDGRYSNVWEVMSDLDILIGAFENVVSGPEYAELRQGGPKHLNIQFFKDIQARMRDPNYKFSPELKLKPKSKLVSRKKWQKAESRRRKARKR

SEQ ID NO: 223150 - protein, 69 aa, Glycine max
  unsure (1)..(69): unsure at all Xaa locations
  Clone ID: PAT_MRT3847_43535C.1.pep
IPIITSSRITPHLIDIIILAIIDTAYSFHTQLYIGYNNGIFEKKKVVRDIHANEIXGKLFIMCTLNWLE

SEQ ID NO: 223151 - protein, 170 aa, Glycine max
  Clone ID: PAT_MRT3847_43536C.1.pep
SPVGKCSSRVTPVLCLKYTRFLILNVTAIVVELNLLIKILKPVHHRPPAARLLGVWSTSCQGVAGFLLRGDGWYLHSRAASLLEVRKGGGYLLVATDIAARGVDLPEMPHIYNFDLPRTAIDYLHRAGRTCRKPFSDINCTVTSIIVPDERFVLQRYENELMFNCEELVP

SEQ ID NO: 223152 - protein, 63 aa, Glycine max
  Clone ID: PAT_MRT3847_43537C.1.pep
MMIMIYDHTMSLRASIITTHSDMCTHLHASLIWWILHLEIGERGNRASLLLTSINRVCLKCVF

SEQ ID NO: 223153 - protein, 296 aa, Glycine max
  unsure (1)..(296): unsure at all Xaa locations
  Clone ID: PAT_MRT3847_43538C.1.pep
LRFLGRVGARGLSIFTLPSLLQLSSINASPRYPQLERNNLCILGATAIEDKLQQGVPESIESLRTAGIKVWVLTGDKQQTAISIGYFSXLLTSNMNIITINTNNRESCRNRWPDALDNSVSSSGAVSTPLALIIDGTSLVYILDSELEEELFQLANRCSVVLCCRVAPLQKAGIVALVKNRTDDMTLAIGDGANDVSMIQMAHVGVGISGQEGRQAVMASDFAIGQFRLLVPLLLIHGHWNYQRLGYMIIYNFYRNAIFVLVLFWYVLFTAFSLTTAINEWSSVLYSIIYSAVPTN

SEQ ID NO: 223154 - protein, 65 aa, Glycine max
  Clone ID: PAT_MRT3847_43539C.1.pep
MGRRRVKCEHDLNYKVPLGTVVRPIRHNMRIIRWPLRANKGNHGLQQRCRERHKNRQQLAYNGQH

SEQ ID NO: 223155 - protein, 224 aa, Glycine max
  Clone ID: PAT_MRT3847_4353C.1.pep
MGREEVKLLSFFASPFGKRVEWALKLKGVEYEYIEQDIFNKTSLLLQLNPVHKKVPVLVHAHKPIAESFVIVEYVDETWKQYPLLPRDPYQRALARFWANFAEQKLLDAAWIGMYSSGDEQQNAVKVAREAIEKIEEEIKGKKYFGGENIGYLDIALGWISYWLPIWEEVGSIQIIDPLKFPAITAWITNFLSHPVIKDNLPPRDKMLVYFHSRRTALSSTFQG

SEQ ID NO: 223156 - protein, 54 aa, Glycine max
  Clone ID: PAT_MRT3847_43540C.1.pep
LSYVHCQIGGFASGIIFIVKFPVLYFLTLQQSPNACGIQEAPVKCINVFAFGML

SEQ ID NO: 223157 - protein, 51 aa, Glycine max
  unsure (1)..(51): unsure at all Xaa locations
  Clone ID: PAT_MRT3847_43541C.1.pep
XXRGRAIIVNAFTIKIHIIIIGADDTCSKKTHKRYHICSKPNKNWMNIIIT

SEQ ID NO: 223158 - protein, 543 aa, Glycine max
  unsure (1)..(543): unsure at all Xaa locations
  Clone ID: PAT_MRT3847_43542C.1.pep
MMDATTSGTPTIQYHNIPDQPITAIIATPLPTFQRQQRHCFGDSTPGEFPLSANPSIVLHVLTACNLDPQDLAKLEATCSFFRQPANFAPDSDLSLSELAALDMCQKRAIFKPMTTEQRQDLKLRCGGSWKLVLRYLMAGEACCRREKSQAIAGPGHSIAVTSKGIVYSFGSNSSGQLGHGTTEEEWRPRPIRTLQGIRIIQAAAGAGRTMLVSDSGQVYAFGEAEYGVQGSKTVAAPQIVESLKNIFVVQAAIGNFFTAVLSREGRVYTFSWGSDEKLGHHTDQSDVEPHPLLGALENIPVVQIAAGYCYLLCLACQPSGMSVYSVGCGLGGKLGHGSRTDEEYPRLIEQFGLLNLQPMVVAAGAWHAAVVGRDGRVCTWGWGRYGCLGHGNEECESVPKVVEALSNVKAVHVATGDYTTFVVSDDGDVYSFGCGQSASLGHNAAGNDEQGNRHAKVLDPELVTSLKQINEVLDPELVTSLKQINERVVQISLTNCNYWNAHTFALTESGKLYAFGAGDKXQLGIELVANQTERGNPERVEI

SEQ ID NO: 223159 - protein, 207 aa, Glycine max
  unsure (1)..(207): unsure at all Xaa locations
  Clone ID: PAT_MRT3847_43543C.1.pep
KTTEGVGCGLGGKLGHGSRTDDEYPXRLIEQFGLLNLQPXGAWHAVVVGRDDCVCTWGXGRYGCLGHGSDECDSVPKAVEALSNVKAIHVVAGDYTTFVVFDDGDVYSFGCGQSASLGHNAVGNDEQGNRHAKVLDPELVTSLKQINERVVQISLTNCNYWNAHTFALTESGKLYAFGAGDKGQLGIELVANQTERGNPERVEIDLG

SEQ ID NO: 223160 - protein, 462 aa, Glycine max
  Clone ID: PAT_MRT3847_43544C.1.pep
LEATCSFFRQPANFAPDLDLSLSELAALDMCQKRAIFKPMTTEQRQDLKLRCGGSWKLALRYLMAGEACCRREKSQAIAGPGHSIAVTSKGVVYSFGSNSSGQLGHGTTHASGRPRPIRTLQGIRIIQAAAGAGRTMLVSDSGQVYAFGKDSFGEAEYGVQGSKTVAAPQIVESLKNIFVVQAAIGNFFTAVLSREGRVYTFSWGSDGKLGHHTDQSDVEPHPLLGALENIPVVQIAAGYCYLLCLACQPSGMSVYSVGCGLGGKLGHGSRTDEKYPRLIEQFGLLNLQPMVVAAGAWHAAVVGRDGRVCTWGWGRYGCLGHGNEECESVPKVVEALSNVKAVHVATGDYTTFVVSDDGDVYSFGCGESASLGHNAAGNDEQGNRHANVLSPELVTSLKQINERVVQISLTNSIYWNAHTFALTESGKLYAFGAGDKGQLGIELVANQTERGNPERVEIDLG

SEQ ID NO: 223161 - protein, 45 aa, Glycine max
  Clone ID: PAT_MRT3847_43545C.1.pep
NVLIISLLGAHRYESGSVIGLPGSGGGSFSLFGGHLHQKEPQESS

SEQ ID NO: 223162 - protein, 45 aa, Glycine max
  Clone ID: PAT_MRT3847_43546C.1.pep
ERFFFYGRPESVKQRGAVSYCKNAPTSYLKRTFILAHVPPNHLRK

SEQ ID NO: 223163 - protein, 93 aa, Glycine max
  Clone ID: PAT_MRT3847_43547C.1.pep
ISFGLIKFLLKKTVVQGWKLGSVDRTIYGVVCLVLFSQLYLFQLVIQTVLYFVCKSYHHQNIDKSALSDHLEVYHGEYEPLKAKDVQMEECHV

SEQ ID NO: 223164 - protein, 91 aa, Glycine max
  Clone ID: PAT_MRT3847_43548C.1.pep
AFSSFLGRVLFTSVYILSANQECNAHGDDGGPTAKALTPKSDAFAHKVHSIAGFQLPDLDIKILAAGAIALKGLRRILSIPGSVYGASLLV

SEQ ID NO: 223165 - protein, 46 aa, Glycine max
  Clone ID: PAT_MRT3847_43549C.1.pep
TMCVFRPWEKHHGPYVSGALSRPKLKGCRQVLKNKTDWPNKVNGAN

SEQ ID NO: 223166 - protein, 83 aa, Glycine max
  unsure (1)..(83): unsure at all Xaa locations
  Clone ID: PAT_MRT3847_4354C.1.pep
PPTRPLHAILLSTNSHPYFIFTLHQNGGFFNHTISPTQPYILSXYNXKTSIFHNHQNHITSFSTNSKSFYPIIKQNPIIYINQ

SEQ ID NO: 223167 - protein, 108 aa, Glycine max
  Clone ID: PAT_MRT3847_43550C.1.pep
KYLVLLKGFYKLQLQFETNSNKHYNVQEKRKTNNSKLRRGFAPPSPRGVTQLFAKSQPPREKMLPGNRGGGKKPAEGAGKNRPSGSRRNPKEGSRAQSGNGANDEVIR

SEQ ID NO: 223168 - protein, 106 aa, Glycine max
  Clone ID: PAT_MRT3847_43551C.1.pep
LKWQVTRRKTFGNLRTFASYAKGGPRGRSNLVSWVAAGTLVYFLWIKPSQHLKRETADIAVLAVFDPDPYRYDETRNPLPDLPATALTYVNYIMVGPANPDGSFFH

SEQ ID NO: 223169 - protein, 74 aa, Glycine max
  Clone ID: PAT_MRT3847_43552C.1.pep
RFLVLHQKIIRLIFPSFLFNARWAYPLRKTDELVSELFVKDVKDSEDSEAKAATTYVVGGMGVSPACLGNPKVG

SEQ ID NO: 223170 - protein, 64 aa, Glycine max
  Clone ID: PAT_MRT3847_43553C.1.pep
MAQGIRAGKIAEGNDAHSLSLQAVETRQQTQVIKVVPHNRKSATESAARIFQSIQEERKQHDLV

SEQ ID NO: 223171 - protein, 90 aa, Glycine max
  Clone ID: PAT_MRT3847_43554C.1.pep
LIRLLAKEHEILITVEEGSIGGFGSHVSQFLSLSGILDGPLKWRAMMLPDRYIEHGSPQVQIEEAGLSSKQIAATVLSLMERPKQALLFK

SEQ ID NO: 223172 - protein, 127 aa, Glycine max
  Clone ID: PAT_MRT3847_43555C.1.pep
IHQSVDNDVMMQQKQPSSTTTRMQEREKAPPPAPAPQPALKPGEHADPSQGAQAEETPLTDLQRGQDEHEQPKKPKSQASSRNPTKQQQLRNLSCPSSNREREATSHPRTPTTNVRADSHITGTKQG

SEQ ID NO: 223173 - protein, 694 aa, Glycine max
  unsure (1)..(694): unsure at all Xaa locations
  Clone ID: PAT_MRT3847_43556C.1.pep
LCLPQFCVRVSASGSADEERTIIRKEKVGWKINYSGEKPATPLLDTVNHPIHMKNLSTQDLEQLAAELRADIVHSVSDTGGHLSSSLGVVELSVALHHVFNTPEDKIIWDVGHQAYPHKILTGRRSRMHTIRKSSRLAGFPKRDESVHDAFGCWHFAKGRSADLGMDISRNXELIWYPSFPSIGRIRALTAGQAYEAMNNAGFLDXSNMIVVLNDNKQVSLPXTATLDGPXTPVGALSSXFLSKIQASSEXRKLREAAKXITKQIGGXKHIRLQAKVDEYARGMISASGSTLFEELGLYYIGPVDGHNIEDLVTIFEKVKAMPAPGPVLIHVVTEKGKGYPPAEKAADRMHGVVKFDPKTGHQLKAKSSTLSYTQYFAESLIKEAEIDNKIVAIHAAMGGGTGLNYFHKKFPERCFDVGIAEQHAVTFAAGLAAEGLKPFCAIYSSFLQRGYDQVCRXVHDVDLQKLPVRFALDRAGLVGADGPTHCGAFDITYMACLPNMVVMAPSDEAELMHMVATAAAIDDRPSCFRFPRGNGIGATLPLNNKGTPLEIGKGRILVEGSRVAILGYGSVVQQCRQASEMLKELGIDVTVADARFCKPLDTGLIRLLAKEHEILITVEEGSIGGFGSHVSQFLSLSGILDGPLKWRAMMLPDRYIEHGSPQVQIEEAGLSSKQIAATVLSLMERPNEALLFK

SEQ ID NO: 223174 - protein, 86 aa, Glycine max
  Clone ID: PAT_MRT3847_43557C.1.pep
LEKQHKHDLLTEPDLGVTIDLINPDTYRIDPNVLLDPADEKLLEEEIQAPTSSKRSQQHAKVVPWMRKTEYISTEFNRYGISNEKP

SEQ ID NO: 223175 - protein, 46 aa, Glycine max
  Clone ID: PAT_MRT3847_43558C.1.pep
TIELHSTINMSPTKPMLTETTYDYPHPGSIVTRDIRTYYSCCIQLD

SEQ ID NO: 223176 - protein, 49 aa, Glycine max
  Clone ID: PAT_MRT3847_43559C.1.pep
QLSGANVTLVEDRPDVTQKIIQISGTPEQAERAQSLLQGFILSTQEDVP

SEQ ID NO: 223177 - protein, 66 aa, Glycine max
  Clone ID: PAT_MRT3847_4355C.1.pep
AGNNVIPSLRFSHFLLVSCNPLYSILQSYQNLHLHYSVIRAPKDRDHNVSKLCSGNPILVNRILSY

SEQ ID NO: 223178 - protein, 52 aa, Glycine max
  Clone ID: PAT_MRT3847_43560C.1.pep
MHRLEGNSLIINGVISLVSKANEETVRYNLSVGRSTFLKTSRDEFSNGISPH

SEQ ID NO: 223179 - protein, 63 aa, Glycine max
  Clone ID: PAT_MRT3847_43561C.1.pep
HKPEYIKEYDIPMQFLIEKLASSHGSTLFLASVWIPTTINFRSQNYNEWWENHKPQRVTLPEP

SEQ ID NO: 223180 - protein, 241 aa, Glycine max
  Clone ID: PAT_MRT3847_43562C.1.pep
PHEKTPPEYLPPPHEKPPPEYLPPHEKPPPEYQPPHEKPPHENPPPEHQPPHEKPPEHQPPHEKPPPEYEPPHEKPPPEYQPPHEKPPPEYQPPHEKPPPEYQPPHEKPPPEHQPPHEKPPEHQPPHEKPPPEYQPPHEKPPPEYQPPQEKPPHEKPPPEYQPPHEKPPPEHQPPHEKPPPVYPPPYEKPPPVCEPPYEKPPPVVYPPPHEKPPIYEPPPLEKPPVYNPPPYGRYPPSKKN

SEQ ID NO: 223181 - protein, 79 aa, Glycine max
  Clone ID: PAT_MRT3847_43563C.1.pep
YRFQLKDGTEKNRGRQGKRQWRGENRDATIRGCFTWPPRFNKPTIIVLFNVVPLLVIMFLSILKKIVNIFRTEKIIDGS

SEQ ID NO: 223182 - protein, 82 aa, Glycine max
  Clone ID: PAT_MRT3847_43564C.1.pep
CGGETPSFIDRLKPSSSSSLTRLMASSPPSYSLTHHEQLCPRNHPVCALQGRSTYRSAKGMLLTTGREERGTRDCGFAHWTA

SEQ ID NO: 223183 - protein, 59 aa, Glycine max
  Clone ID: PAT_MRT3847_43565C.1.pep
PIILKTLSFCPIVSILTPGLFREISRNAYSPIASLQALLCIASECLWGCGLIINFNFMG

SEQ ID NO: 223184 - protein, 93 aa, Glycine max
  unsure (1)..(93): unsure at all Xaa locations
  Clone ID: PAT_MRT3847_43566C.1.pep
LGKLGAPEGIPFGSVWWFVYAGISFSLVIFAGIMSGLTLGLMSLGLVDLEILQSSCSPSXKKQAAVILPVVQKQHQLLVTLLLCNAAAMEIGN

SEQ ID NO: 223185 - protein, 82 aa, Glycine max
  Clone ID: PAT_MRT3847_43567C.1.pep
PGFLYFDSLNILPRGTPLTPPSPHLFWSPNNRKIVSTHGPGSCFSGSSNPVPQWARGSHHLFRVCYFRKIFAAPLFFFPLLN

SEQ ID NO: 223186 - protein, 63 aa, Glycine max
  unsure (1)..(63): unsure at all Xaa locations
  Clone ID: PAT_MRT3847_43568C.1.pep
IYKNDKNMRGGQTLISGVEDIFFYMLGKVHEQVRRCCSVGLTPRFEFLPRLRXWARYEDMSIV

SEQ ID NO: 223187 - protein, 52 aa, Glycine max
  Clone ID: PAT_MRT3847_43569C.1.pep
RSLPLIMMMSSGDILVMMLHLSTLRSRLTPPHKCLSQLRQRLHRLNQTHALL

SEQ ID NO: 223188 - protein, 38 aa, Glycine max
  Clone ID: PAT_MRT3847_4356C.1.pep
RSLTTDRVEEISRLDDFLFTTRNLESVSTVLNLFIYFE

SEQ ID NO: 223189 - protein, 64 aa, Glycine max
  Clone ID: PAT_MRT3847_43570C.1.pep
PSIIITTSIFKMTLYLNTTLRCLRLLLPIEITYMTLTTADHSTLNHTSPKYLKKHFSYLFYSLL

SEQ ID NO: 223190 - protein, 91 aa, Glycine max
  Clone ID: PAT_MRT3847_43571C.1.pep
FVLFIPAPPLIPKFHEAALHGSHEAFTRNAYLSFIVSRGEGAKLNWQKRRSHKDWAPRDPKCNQGFKSPSRFKGQGFCPNRPNAPPDILFP

SEQ ID NO: 223191 - protein, 37 aa, Glycine max
  Clone ID: PAT_MRT3847_43572C.1.pep
SISHDLLTNKNATLDPCLIRHDNYQNHHEFTINPHDM

SEQ ID NO: 223192 - protein, 83 aa, Glycine max
  Clone ID: PAT_MRT3847_43573C.1.pep
HILDQLKSCTWSGLHMKITGDSIRLSYFSLEKKLEYGAGGVLTCRAPPFQSTAIKGTKAYETTMGTSSYAESTTGGDLGKIEI

SEQ ID NO: 223193 - protein, 82 aa, Glycine max
  unsure (1)..(82): unsure at all Xaa locations
  Clone ID: PAT_MRT3847_43574C.1.pep
MAPKGTPQGCKNPELIRGIGKDLRAQIYHKKGLWAFKAKNGGLLTCHHPXPNLKHPLKNHPNFXPAHYIKKPLVNQHKPKPA

SEQ ID NO: 223194 - protein, 88 aa, Glycine max
  unsure (1)..(88): unsure at all Xaa locations
  Clone ID: PAT_MRT3847_43575C.1.pep
FGVISITVVVASQLSLCPSTFRDFQGFQIELLFFSEVNFIYYKLIKFCFLFNSLPNLNLMFGGRIFRFWLXFIYINRSIYRGVVRPEW

SEQ ID NO: 223195 - protein, 88 aa, Glycine max
  Clone ID: PAT_MRT3847_43576C.1.pep
KAGKAARQTIKKNTWTTQGQTQKIIQTGPGGNLVNKLESKQKWKGGGLKTQDPQKARGPNHKTKFSHNYNRDNKRFSKGPNFWPPFFA

SEQ ID NO: 223196 - protein, 52 aa, Glycine max
  Clone ID: PAT_MRT3847_43577C.1.pep
WHRLTHVIFLPRPIHQIRERANSISFQLGVLRVPLGVRQCSASIPYHRILKD

SEQ ID NO: 223197 - protein, 47 aa, Glycine max
  Clone ID: PAT_MRT3847_43578C.1.pep
SSRALSGLYLFNAWKLKEHLLLVRRTLMMVRNLRRLGSLAVRRPCFF

SEQ ID NO: 223198 - protein, 35 aa, Glycine max
  Clone ID: PAT_MRT3847_43579C.1.pep
TSEPEFQTALTRPTFWNLGHPAHDHTLHENFISFM

SEQ ID NO: 223199 - protein, 69 aa, Glycine max
  Clone ID: PAT_MRT3847_4357C.1.pep
IVTPWAPRCVFPLGPMPEFVDQNKPWVVYKGRSGRAQFSLCDIQVTRWGDFGLFQGAHQEPPLGGSLSS

SEQ ID NO: 223200 - protein, 51 aa, Glycine max
  Clone ID: PAT_MRT3847_43580C.1.pep
GGFSREIELPENVKVDQIKAQVENGVLSIVVPKDATPKTPKVRNINITSRL

SEQ ID NO: 223201 - protein, 104 aa, Glycine max
  Clone ID: PAT_MRT3847_43581C.1.pep
TSSHVCACTCTSPTITTTSTRSSRTFLSIIGGVVAGILGFTSLKGFVFYFLLMMVTSLGLVAKARFSIHSYFDSSNRVLLDGFLGGLMSFVLFWTFAFDIVHIF

SEQ ID NO: 223202 - protein, 120 aa, Glycine max
  Clone ID: PAT_MRT3847_43582C.1.pep
MAGPFELGSSKKKPGDGVNDLLTFNAENMQSNMKIIYYSRTFLSIIGGVVAGILGFTSLKGFVFYFLLMMVTSLGLVAKARFSIHSYFDSSNRVLLDGFLGGLMSFVLFWTFAFDIVHIF

SEQ ID NO: 223203 - protein, 212 aa, Glycine max
  Clone ID: PAT_MRT3847_43583C.1.pep
MASFISLSLLLLFLNYPFLSLSTNPEGNALHALRSRISDPNNVLQSWDPTLVNPCTWFHVTCDSNNHVIRLDLGNSNVSGTLGPELGQLQHLQYLELYRNELTGKIPKELGNLKSLISMDLYDNKLEGKIPKSFGKLKSLKFLRLNNNKLTGSIPRELTRLTNLKIFDVSNNDLCGTIPVEGNFESFPMESFENNRFSGPELKGLVPYDFGC

SEQ ID NO: 223204 - protein, 419 aa, Glycine max
  unsure (1)..(419): unsure at all Xaa locations
  Clone ID: PAT_MRT3847_43584C.1.pep
DLEWLCDGDVHEILVELEGMGGGGKVQLEVKPDVIVNEXEEKRWWKIPFVLDFLKIKGFDSAFRKVIGSDIVQAGQFVEYAFGQLKSFNNSYLPKGQQSDINNDKYDTEGTRELSESVSIFNMPSNEAGSQEASREDCVEQRNSNEFHKQDNDTENGHASESSSKVSEEELSNQIFWRNCANASDSRIANLLTTAVLVXVILVVMIEFYVKMARARAESARGIYVQSGLAIPGGTDDTNDKTSGQPAIAAFQSSVPEVKEATQNLMRQTESILGGLMLLTATVSKIKDEGLSSEERIIKEDSANAGGNDIQYSTNQKFPSTQNGLVLDDKKTEEMKELFSTAESAMEAWAMLATSLGQPSFIKSEFEKLCFLDNASTDTQVAIWRDSARRRLVVAFRGTEQTLWMDLSTDLMLCQPGNI

SEQ ID NO: 223205 - protein, 94 aa, Glycine max
  unsure (1)..(94): unsure at all Xaa locations
  Clone ID: PAT_MRT3847_43585C.1.pep
FPGPRSLKKNPFGGNPLLKKINKLHPKAEKDIKKNWARAFPIKPPKSGQPIAIPNGKKHFPIXKTDGRVGHKLGEFSPPLNFRGHAKNEKRSRR

SEQ ID NO: 223206 - protein, 198 aa, Glycine max
  Clone ID: PAT_MRT3847_43586C.1.pep
ANCFDLIQIICVGNALHALRSRLSDPNNMLQSWDPTLVNPCTWFHVTCDSNNHVIRLDLGNSNVSGTLGPELGQLQHLQYLELYRNEITGKIPKELGNLKSLISMDLYDNKLEGKIPKSFGKLKSLKFLRLNNNKLTGSIPRELTRLTDLKIFDVSNNDLCGTIPVEGNFESFPMESFKNNRFSGPELKGLVPYDFGC

SEQ ID NO: 223207 - protein, 57 aa, Glycine max
  Clone ID: PAT_MRT3847_43587C.1.pep
KHPSQYFKPEFSSLLKFFVLKPILYFIPSCKPSRAMSGINPQLGPARPKKPIMYIKL

SEQ ID NO: 223208 - protein, 90 aa, Glycine max
  Clone ID: PAT_MRT3847_43588C.1.pep
KNEMRNIFLIFANLYHVFKIGTPNDSNPKELLYIRPLCRKQLQKKKKSIEVFHFLVYLLLLSGINMRFFFIIINLKNILSSVLYCSMFEG

SEQ ID NO: 223209 - protein, 80 aa, Glycine max
  Clone ID: PAT_MRT3847_43589C.1.pep
MQNIIIITTENFCNGPSTNKGVIKLHETKYTPPQGGGGKGFKNNGIHMTDELKPNTKTIRHWKRDGFYLPCRRRKMMDET

SEQ ID NO: 223210 - protein, 130 aa, Glycine max
  Clone ID: PAT_MRT3847_4358C.1.pep
KHYPFLKKKKKKKKKKKKKKKKKKKKKKKKKKPQKKKKRGPPDPHFFSLLGGVNGPLGEKREKGFPWGKFFPLQNSQKKKTRKKKGKTRGALRGGPPPINGGGPIAPFQRGKLWRPFFLKNRPPPGEGGF

SEQ ID NO: 223211 - protein, 86 aa, Glycine max
  Clone ID: PAT_MRT3847_43590C.1.pep
SYLSLPNLIVAFSALSKLSINCKSHLYLLYSVYSFECLFRNAERCRSKLIDKFITTLNCHFLLLLCYSKSTFRCLDRCMDIWWTWS

SEQ ID NO: 223212 - protein, 54 aa, Glycine max
  unsure (1)..(54): unsure at all Xaa locations
  Clone ID: PAT_MRT3847_43591C.1.pep
XXKTRYMYLPKIVKCCSSPWPSLFGTKKPLNLHWKYPLVKIWLALWPNRDGKGN

SEQ ID NO: 223213 - protein, 75 aa, Glycine max
  Clone ID: PAT_MRT3847_43592C.1.pep
KQKKKASSITETKGSNKLHVYKLKACQNPIKLQFAKLLFFIIKPLPYIGGNSKTSIFQPNYSWQGGSIIVASNGR

SEQ ID NO: 223214 - protein, 38 aa, Glycine max
  Clone ID: PAT_MRT3847_43593C.1.pep
FTDSATKLAQTILDFNREELPHFILANWTGFSRGQMDL

SEQ ID NO: 223215 - protein, 177 aa, Glycine max
  Clone ID: PAT_MRT3847_43594C.1.pep
DSEHKSSKKSISLAGMVEFIGLIKVNVVKGTNLAIRDVMSSDPYVIISLGHQSVKTRVIKSSLNPIWNESLMLSIPDHIPPLKVLVYDKDTFSTDDFMGEAEIDIQPLVSAAKAYEKSSINESMQLGKWVASGDNTLVKDSIISLEEGKVKQEISVRLQHVERGVLEIELECVPLTQ

SEQ ID NO: 223216 - protein, 80 aa, Glycine max
  Clone ID: PAT_MRT3847_43595C.1.pep
PGKLQVNLFIAIVLSYHLVSPPKHEAILVFSSMCFCFCPSSFFPGFSSYRGTHFQSKLLPHLISFLSSWLFNYVSNLVLS

SEQ ID NO: 223217 - protein, 243 aa, Glycine max
  Clone ID: PAT_MRT3847_43596C.1.pep
MLMKRDVESGGDGNANPRPLYPAMLENPQLRWAFIRKVYTILTIQLLLTIAVASVVVFVRPIALFFVSSPGGLALYIVLLIAPLITVCPLYYYHQKHPLNYILLFIFTVTLAFAVGLTCAFTSGRIILESVILTTIVVVSLTLYTFWAAKRGHDFNFLGPFLFGALLVLMLFAFIQLLFPLGRISTMIYGVLASIIFSGYIIYDTNNLIKRYTYDQYIWASVALYLDVINLFLSLLTIFRAVN

SEQ ID NO: 223218 - protein, 118 aa, Glycine max
  Clone ID: PAT_MRT3847_43597C.1.pep
KNAKHLSLNNHSGLGPFLVPGTNSFLEVFTIKPPISIDESTLLIIIIYNLLEPRNRQKFFLTSPSSSSPYPSPELYSPNSTTPLFEPACGTPSPSTPGCHHSDSSSNSSSLLSLGPQP

SEQ ID NO: 223219 - protein, 61 aa, Glycine max
  Clone ID: PAT_MRT3847_43598C.1.pep
SGVDASIKLQSVPIHIPAVNLHPPDTIDARQLYVCMVASHAHTIFKSITLNSYRRRRSYCA

SEQ ID NO: 223220 - protein, 86 aa, Glycine max
  Clone ID: PAT_MRT3847_43599C.1.pep
MCPLRFILVFFSAVLAGYFAWKTVRSNPIEVFSEDSADEDKSSKKGDFDFKKMIQNGFWGFVDMASGRYLWRNLRSTNKDAELKSS

SEQ ID NO: 223221 - protein, 123 aa, Glycine max
  unsure (1)..(123): unsure at all Xaa locations
  Clone ID: PAT_MRT3847_4359C.1.pep
MTTVQSKGAAMGTATTEKAFKRWGRRKXNPFVRYGLPMISLTVLGSIGLAQLLQGSKDIAKVKDDREWEIIETKKALSKTGPVNAYNPKKISLEDELMALQQKVDINSYEYKKIPKPNKGNPD

SEQ ID NO: 223222 - protein, 351 aa, Glycine max
  Clone ID: PAT_MRT3847_435C.1.pep
EEFLIKDFTCYLKRKMPLQGRLFLSARILGFHANLFGHKTKFFFLWEDIEEIQVQDSGFHANLFGHKTKFFFLWEDIEEIQVLPPSLATLGSPTLVIVLRRGRGLDARHGAKTQDEEGRLRFHFQSFVSFSAASRAIKALWRTRILNPYQKEQISEEHEDQERFVIPEDSASILEDEEKMSRIFSAELPIKMKSVMGIFDGGNLEHKIMQRTGCTNYETTSWEQVKHDVFERRVSYQFNRHVSAFGGEVTCTQQKFPNANTGGWTVIEVMDLHGVPFADHFHIHFRYEIEKSSLGDCACKCDAYIGIMWLKSSKFQQRINRNITAQFNLRLKEIFELVQKEILLMSQNSHG

SEQ ID NO: 223223 - protein, 38 aa, Glycine max
  Clone ID: PAT_MRT3847_43600C.1.pep
AHTFLNFYSTYLVLYYSNSSYGEGANEIMELRSSLRDS

SEQ ID NO: 223224 - protein, 160 aa, Glycine max
  unsure (1)..(160): unsure at all Xaa locations
  Clone ID: PAT_MRT3847_43601C.1.pep
FPSFAKTLTGKTISLXVESSDTIDNGRGKSQDTEGIRPDQERIISSGKQVEDGRTLTDYNIQKESTVHLELRIRGGMQIFEKTLTGKTITLEVESRDTIDNGKAKIQDKEGMPPDQQRLNFDGKHLEDGRTLDDYNIQKESTLHLALRLRGGMQIFLKTL

SEQ ID NO: 223225 - protein, 137 aa, Glycine max
  Clone ID: PAT_MRT3847_43602C.1.pep
FYVKLDVIEWNTLFTNWRRGAKDPSANGSNATNVTYAAMDPFFALVRFLQSGMAPPVSNNWGFINNPKFDELVKKARQTFDPAARDAALAELHAASVDDAAFLYVAHDVGPRAISPKVTGVVQPKSWFIDFSLVSMQ

SEQ ID NO: 223226 - protein, 45 aa, Glycine max
  Clone ID: PAT_MRT3847_43603C.1.pep
FPFFYSACLTKRLFFFVQNNATFSSALFNAGNCPEYTPVKNSEMH

SEQ ID NO: 223227 - protein, 284 aa, Glycine max
  Clone ID: PAT_MRT3847_43604C.1.pep
MESGRIFFGASASSGNNMLFLGNTELAFRGRSIMSMEEASKRRPFFTSPDELYDEEYYEKQSPEKKHRLSSEQVHLLEKSFEEENKLEPERKTQLAKKLGLQPRQVAVWFQNRRARWKTKQLERDYDVLKSSYDTLLSSYDSIMKENEKLKSEVVSLNEKLQVQAKEVPEEPLCDKKVDPIPVDEDMAPIFGTRVEDHLSSGSVGSAVVDEGSPQVVVDSVDSYILADNYGGCVGPVERVQSEEEDGSDDGRSYLDVFVVSETEHQNHEEGETLGWWTNMYYVG

SEQ ID NO: 223228 - protein, 117 aa, Glycine max
  Clone ID: PAT_MRT3847_43605C.1.pep
PDPSESQLLDMSHYDTMLETGAAFAHPFGEDNVVLEKIDDLILNRSSSGLVQGEWCSNSEINKTTKVSEAEEEFCSQSGNIDAVKPGPFGIKLKTLLADIENTRKFRTSQCKSFESW

SEQ ID NO: 223229 - protein, 91 aa, Glycine max
  Clone ID: PAT_MRT3847_43606C.1.pep
TGHHIRDCSRTNGRQRRSSHASVKPSVNHILVPIESYHLFDPFGRRIKHDTRFEYDRIPAVVELCVQAGVDIPEYPSRRRTNPIRILGRRV

SEQ ID NO: 223230 - protein, 73 aa, Glycine max
  Clone ID: PAT_MRT3847_43607C.1.pep
HLALLQVLSVLYIQLQGYLHSYLPFSLLSMPTSRPLYLCERPPKKFVFIDNPCYIITILVSATRNDKLFFELV

SEQ ID NO: 223231 - protein, 60 aa, Glycine max
  Clone ID: PAT_MRT3847_43608C.1.pep
LKLIFIHNIPKKSFTNGKMLGAKIYNLYLMIGVLIFKVIIYALNFCILKTYLLDQYYTVN

SEQ ID NO: 223232 - protein, 359 aa, Glycine max
  Clone ID: PAT_MRT3847_43609C.1.pep
MMLGEHHRANPTVHVPPWPTHDDPTAEMYSAFLTNDVNAGEYSPYYLQEALTALQRFLPSNETDADSDTEAQPDAAVDAYSCDHFRMYEFKVRRCARGRSHDWTECPYAHPGEKARRRDPRKFHYSGAACPEFRKGNCKKGDTCEFAHGVFECWLHPARYRTQPCKDGTSCRRRVCFFAHTPEQLRVLPMQSPRSAANSSESYDGSPMRQMMSPAAFMSSPAASLSPPESPPVSPSINEMVASLRNLQLGKMKSMPQSRNVSVGSPGYGSPRGSVLRPGFCSLPTTPTQQPVRSGVNCFDFWDQSCEEEPVMERVESGRGIRAKMFEKLSKENSLEGSGTGSGQGSGAPDVGWVSELVN

SEQ ID NO: 223233 - protein, 74 aa, Glycine max
  unsure (1)..(74): unsure at all Xaa locations
  Clone ID: PAT_MRT3847_4360C.1.pep
LKGAFLAAVLCMAVVSAPMAHAAITCGQVTNSLINCICFLQNGGTPPSGCCNXVKSVNAAAMTTGDRQTACNCL

SEQ ID NO: 223234 - protein, 63 aa, Glycine max
  Clone ID: PAT_MRT3847_43610C.1.pep
CLESGAIKDVAACSFIFVCSSWFPPRIPVCCNFPVTVFYKEENISLRLQSSLCALNHVQSMIA

SEQ ID NO: 223235 - protein, 71 aa, Glycine max
  Clone ID: PAT_MRT3847_43611C.1.pep
SSSADSSLAGLWWKIVPGAISWISFCLLRRRAYKCHASAAHVAMIAMVTATATAAVAPFDRPDVLLSSGDS

SEQ ID NO: 223236 - protein, 64 aa, Glycine max
  Clone ID: PAT_MRT3847_43612C.1.pep
KVNFLKPGRFFLPLKRIPKRLDQKAKKKKKTPMISQRGQSFIPGSLTQMYLFSFVKGQPLSLEF

SEQ ID NO: 223237 - protein, 51 aa, Glycine max
  Clone ID: PAT_MRT3847_43613C.1.pep
VRFVTKFSNHRGLQVYRVVQLTRWSTFQDSLPPVSGSDTLVMFHRQTKVSF

SEQ ID NO: 223238 - protein, 52 aa, Glycine max
  Clone ID: PAT_MRT3847_43614C.1.pep
MLEGSTGLIIGISISVVIGVGLATSALFCHRYQRKRSQIGKSSSRMAHTIPI

SEQ ID NO: 223239 - protein, 75 aa, Glycine max
  Clone ID: PAT_MRT3847_43615C.1.pep
SKFPSGEFISCTYIVQVPSPFHALLSFPNVITQGIWMFGVFKSWRRQHHLKHWSSESTWSVLPSFWSSMQPFFSV

SEQ ID NO: 223240 - protein, 67 aa, Glycine max
  Clone ID: PAT_MRT3847_43616C.1.pep
GMQICVKTLTGETITLEVESSDTIDNVNAKIQDKEGIPPDQQRLIFAGKQLDDGRTLADYNIQKEST

SEQ ID NO: 223241 - protein, 46 aa, Glycine max
  unsure (1)..(46): unsure at all Xaa locations
  Clone ID: PAT_MRT3847_43617C.1.pep
VSRPFLTHKTHFYFKRFLEYMSMNLYQLRKKKXXXXXXXAAALEDP

SEQ ID NO: 223242 - protein, 88 aa, Glycine max
  Clone ID: PAT_MRT3847_43618C.1.pep
ALVPILSCGFGCGSGVDFDFGSFCGCVRAVGLGSAYECGCVVLFSVSCLIPVGAFISDRLLYILYPIPGPVVQPLDKPNLRRRCTPLT

SEQ ID NO: 223243 - protein, 40 aa, Glycine max
  Clone ID: PAT_MRT3847_43619C.1.pep
STIIDTFGKKLTNTGLTASLTCHECREVLNSANSSMFTKY

SEQ ID NO: 223244 - protein, 42 aa, Glycine max
  Clone ID: PAT_MRT3847_4361C.1.pep
LWGAIFYIRCPQPPFTPQLMVFPRREGINLGKFVKQMVCWAS

SEQ ID NO: 223245 - protein, 166 aa, Glycine max
  Clone ID: PAT_MRT3847_43620C.1.pep
KAEPKKPSSAPPSSKRHNDSRSSYSSGGYGDTYDGFGGSFGMGGGYRSGGAYGGGRGGAYGGFGSEFGGYGGYAGEMGPYRGDLSLGYAGRYGGNFSRGYDLGGYGGPSENYGAYGAGGGSSGGGGAYQSGYDGNLGGGYGGASGGPFYGSSRAGYSAGRYHPYGR

SEQ ID NO: 223246 - protein, 51 aa, Glycine max
  Clone ID: PAT_MRT3847_43621C.1.pep
DRSLLWIRPCSLTFLHEITREVLTRLGIVRTELHIWSSKLAHFHESHLNPS

SEQ ID NO: 223247 - protein, 377 aa, Glycine max
  Clone ID: PAT_MRT3847_43622C.1.pep
MESPGNEHVVGGAEPNDVVTPFSHREEPHNSQPLTGDGASPGKIFIGGLARETTIAQFIKHFGKYGEITDSVIMKDRKTGQPRGFGFITYADPSVVDKVIEEPHIINGKQVEIKRTIPRGAVGSKDFRTKKIFVGGIPSNVTEDEFRDFFTRYGEVKDHQIMRDHSTNRSRGFGFITFESEEAVDDLLSMGNKIDFAGAQVEIKKAEPKKPNSAPPSSKRYNDSRSSYSSGGYGDAYDGFGGSFGMGGGYRSGGAYGGGRGSGAYGGYASEFGGYGGYAGAMGPYRGDPSLGYAGRYGGSFSRGYDLGGYGGPSENYGAYGAGGGSSGGAGAGAGAGAYQSGYDGNLGGGYGGASGGPFYGSTRGGYSAGRYHPYGR

SEQ ID NO: 223248 - protein, 94 aa, Glycine max
  Clone ID: PAT_MRT3847_43623C.1.pep
LSENDPSLSGKYARRQHWMDQSERTTETILTHKSHSARDNYKMITRTREEKLTKQWDVRPSYGTTVMPARVLSLTDVDPSLMMHDKSVDWTSND

SEQ ID NO: 223249 - protein, 68 aa, Glycine max
  Clone ID: PAT_MRT3847_43624C.1.pep
LHLQSKLCFSSLYSNDSNFHLAFNKVMVNSLFEVIWFRFASNFPSFEILLGKKPGSLGSTSSISLPNI

SEQ ID NO: 223250 - protein, 58 aa, Glycine max
  Clone ID: PAT_MRT3847_43625C.1.pep
PRVCKKKKMSQKTEKGRSKRWERGGKKKMKNQVLVGISKKWGAAGLKDSSLFTLCKTD

SEQ ID NO: 223251 - protein, 53 aa, Glycine max
  Clone ID: PAT_MRT3847_43626C.1.pep
PQPPGELAIPLKEIGFFKYPITLSLKRQAKGGPQGGTKPFGLFFYFRNWKTYS

SEQ ID NO: 223252 - protein, 83 aa, Glycine max
  unsure (1)..(83): unsure at all Xaa locations
  Clone ID: PAT_MRT3847_43627C.1.pep
THYLFYSNIXIFISPFSQXIYLKPXKPTXQQFPLXPKFXXNLPLHQHHQXISLPQTXTFSTISINLSITTINYTQLSXPHLPP

SEQ ID NO: 223253 - protein, 43 aa, Glycine max
  Clone ID: PAT_MRT3847_43628C.1.pep
AKILGIFYHPTSHNIWKQFTGLIADVKRKRSFNMNHSRKTTPL

SEQ ID NO: 223254 - protein, 136 aa, Glycine max
  Clone ID: PAT_MRT3847_43629C.1.pep
QFTFNQVQDMSKTLAIWFFLLFSILTYSAYGSTCTEDTGDFRTSKPEQKEPKPMHGMIMGSSKPCSQRKFPELHAARYTRISRLGKAVYRGPSNLRPRNVRNASNSNSIKPPSLFMAALGHLVFGLLLVPCFYRIT

SEQ ID NO: 223255 - protein, 92 aa, Glycine max
  unsure (1)..(92): unsure at all Xaa locations
  Clone ID: PAT_MRT3847_4362C.1.pep
IQLCFXXQKVGARRATFFNLLAHPIFKKPLFCGEVIFFFAGGGFLKLLGAPHLGGFFPPGNKIEVARFFQFLVLRSFLKKEAKEKDFLSILA

SEQ ID NO: 223256 - protein, 91 aa, Glycine max
  unsure (1)..(91): unsure at all Xaa locations
  Clone ID: PAT_MRT3847_43630C.1.pep
RAAGVPRPGSLHAPMRFPRFHSCALSSFCQGGGPPPAPRGEVGAASPGCAPPTTRXWLKPPNLVFSLELPGQARAQQKAGSGQSGCPGPKG

SEQ ID NO: 223257 - protein, 43 aa, Glycine max
  Clone ID: PAT_MRT3847_43631C.1.pep
RKEGWELTRTYILSDVGSCQSYQLRRLSLRCSTWPLGSNCARW

SEQ ID NO: 223258 - protein, 114 aa, Glycine max
  Clone ID: PAT_MRT3847_43632C.1.pep
NNSPIFKLVPCLIHNCLCVPYPWLYYLKRSHILYGSIEPIKLRLDRKLHNFKPHLPSNCHAIFHRQTLFCLPKKFNKHLYKHLKKYFKAFVWTIDSLIYRPVAPLLYSLFTGPS

SEQ ID NO: 223259 - protein, 111 aa, Glycine max
  Clone ID: PAT_MRT3847_43633C.1.pep
MAVSVKVSNISSTATEQDLREFLAFPGKIEYIEMQSDKGNSQVAYVTFSNPEGAETAVLLSGAVVCGQSLTIALAPDHALPASAASATQTSNAESGESGLRKAEDVVTGLL

SEQ ID NO: 223260 - protein, 57 aa, Glycine max
  Clone ID: PAT_MRT3847_43634C.1.pep
FMYNSKPVARKTTVSSLKKKTRLTAHPKLKTMVTLSYIFHPKCKPNNEGTIARLLPT

SEQ ID NO: 223261 - protein, 100 aa, Glycine max
  unsure (1)..(100): unsure at all Xaa locations
  Clone ID: PAT_MRT3847_43635C.1.pep
CFVDLHIQHGPMLDDEGVSIGIGTVIAGTARLTAAFVGTGGHGEAVLILSWPQAAWAVSFPLLADXRNTLLSGLRDTVGTDRILELYPGAVNSIVHAGDL

SEQ ID NO: 223262 - protein, 88 aa, Glycine max
  unsure (1)..(88): unsure at all Xaa locations
  Clone ID: PAT_MRT3847_43636C.1.pep
YNGLTLMWATWKMHIPLDPISGMNIXTQAFMMTYKHKSRIVXYEGHIVTSVSAILTLTDDAYYMTLFETTEYEPSNSTVSLPPIRDRP

SEQ ID NO: 223263 - protein, 40 aa, Glycine max
  Clone ID: PAT_MRT3847_43637C.1.pep
QDSQKNIYCDLRINTTLVSQALLYVFLTVLLMVIKEIQCK

SEQ ID NO: 223264 - protein, 116 aa, Glycine max
  Clone ID: PAT_MRT3847_43638C.1.pep
MAAKLLANLIVIGGGIMTRAFVQAYRQALSNASRNGVAQETIQNTIRRASKGMTQQEARQILGVTEETSWEEIVKKYGSLFENNTKNGSFYLQSKVHRAKECLEAVHQGKNPGTPC

SEQ ID NO: 223265 - protein, 205 aa, Glycine max
  unsure (1)..(205): unsure at all Xaa locations
  Clone ID: PAT_MRT3847_43639C.1.pep
MLGAQKQEQEKPLKNKTTAKNQTKPIKPTNSISSTNHTKTTKSPHNISSKNQTKPLKPSSTNSASTDTALAKKLNSKIKKLNVTSKTSPSKPGTSVSISSNKKTLDLAKPTNKTAKDTATNKQPKTTTTTNKKQQTQKKPTKQKAPPSWIMEELEEEDDDLVSEFTDLPNKFHRTLLPDLERISTTXKAYITKANNEMTKGFXPY

SEQ ID NO: 223266 - protein, 141 aa, Glycine max
  unsure (1)..(141): unsure at all Xaa locations
  Clone ID: PAT_MRT3847_4363C.1.pep
MVKNLQIRFFTCIRSFNQEREGFISHKENQMTFGDLGSSSLSFMGPSKLNCSGNTSMPCSQAENGFVNSFSLFPEKAVQELLQSPVQGGDDHLIEFFEALRTAAKALRLIAXGKASAQAEAAEWKRKYDLERDRNLNFELA

SEQ ID NO: 223267 - protein, 167 aa, Glycine max
  unsure (1)..(167): unsure at all Xaa locations
  Clone ID: PAT_MRT3847_43640C.1.pep
GPKKKMGAQNALGNFALNLGGPIQGGKVASQLFFFYKKKIXNGVWRGFQWVNGNPPFGGGEFXEKKKEVGSLFFPPKTKMFPGVGGYSGGTQEKEGPPPGRGKGGGPQIWGGVLTKNFPGGVFFFSKTPFKFKKQGGPMVLMGIYFPPFFLKGLSPVFLGQKKKVLP

SEQ ID NO: 223268 - protein, 254 aa, Glycine max
  Clone ID: PAT_MRT3847_43641C.1.pep
DQEAQRHIKNLTLKTRYQRFHFQPWSELTVLPARPPRTLLPDLERISTTSKAYITKANSEITKGFKPYVGKKYAPTVATIISSAFILIPLLLVSLLCTRIKAYFSLQMSLIFIQVYLSFYFTILCVTSFFTGFEPLRFLYSTSQSTYLCLQVLQTLAYVFYLLLLLMYLVLVFSTDCGLGSKFLGLAQVFVGFAVGLHYYVTVFHRVVLQQPPKTNWKIHAIYATCFLLICVLARADRRKKNYVEDGGGEGKKN

SEQ ID NO: 223269 - protein, 50 aa, Glycine max
  Clone ID: PAT_MRT3847_43642C.1.pep
MSMSGFEGQCSNDEIRERRSDIENSEDERRQSRIGTLKKKAMNASSRITH

SEQ ID NO: 223270 - protein, 72 aa, Glycine max
  Clone ID: PAT_MRT3847_43643C.1.pep
ALEDTEHALIPVIKVFTMCWFASHISLNHGPHFILNKSIKCQCTHSRFHSHSLFAYISHIHNPIDTSTQHNS

SEQ ID NO: 223271 - protein, 54 aa, Glycine max
  Clone ID: PAT_MRT3847_43644C.1.pep
KRRDMHSSLTSALNSGQAYIFSMLQIYLPLGSLCTILSPYHHPTSLELQICIAC

SEQ ID NO: 223272 - protein, 54 aa, Glycine max
  Clone ID: PAT_MRT3847_43645C.1.pep
RKHQGEEGLNQVTTNNFGKILGRNELAQNLNQKPKDRIRKHSHSYSNAHLSNRG

SEQ ID NO: 223273 - protein, 93 aa, Glycine max
  Clone ID: PAT_MRT3847_43646C.1.pep
LFFQNPNPWGVKLDFFPQIKKDSPNPFPLSQKGTFSPWGGKKRKFKPFGTGGNRVQKKLYFFRKKNSWNFQKSRFLTGRWPPFLGVTKNKAYS

SEQ ID NO: 223274 - protein, 142 aa, Glycine max
  Clone ID: PAT_MRT3847_43647C.1.pep
MPSSTTSSSSFTTSSFTCCSASSPSNLERFLQCVSPHVPSQILPKSCFSDLNPLWQPLGKDTIEYFTLQDLWDCYYEWSAYGAGTPVMLEDGDTVTQYYVPYLSAIQIYTNKSVVASRNRREDSDGVEFESDSWSEDSSSDN

SEQ ID NO: 223275 - protein, 91 aa, Glycine max
  unsure (1)..(91): unsure at all Xaa locations
  Clone ID: PAT_MRT3847_43648C.1.pep
LKTLGAKRLTLVKMFICVLTLTLIPSCDSERQNNSLVMNLNKGLCPQAAHIITEHIKVLFKRHKNTAFSXVTNIFHDCDDHKNDASLVIDF

SEQ ID NO: 223276 - protein, 76 aa, Glycine max
  Clone ID: PAT_MRT3847_43649C.1.pep
ENFRVKKDVFMNFWETLKEGGNLWDGKKVNIKEGGAKVLIFKWHNLRHRVVAEQFQHFLPMGSKWFPIILKAVWKL

SEQ ID NO: 223277 - protein, 75 aa, Glycine max
  Clone ID: PAT_MRT3847_4364C.1.pep
LLVVRYKFSERDAHEFSEFLSPLLDFAPEKRPTAQQCLQHPWLQGIESTPNEMRNESSVEKVDVGMSNLQIKVGK

SEQ ID NO: 223278 - protein, 459 aa, Glycine max
  unsure (1)..(459): unsure at all Xaa locations
  Clone ID: PAT_MRT3847_43650C.1.pep
MDHVIGGKFKLGRKIGSGSFGELYLGVNVQSGEEVAVKLESVKTKHPQLHYESKLYMLLQGGTGIPHLKWFGVEGDYNVMVIDLLGPSLEDLFNYCNRKLSLKTVLMLADQLINRVEYMHSRGFLHRDIKPDNFLMGLGRKANQVYIIDYGLAKKYRDLQTHKHIPYRENKNPTQRLTDPKVYVLFCESNKADDRTLXSLLYLLMYFLPDSLPWQGLKXAGSLKSKKYDKISEKKMLTPIEVLCKSYPLEFTSYFHYCRTLRFEDKPDYSYLRRLFRDLFIREGYQFDYVFDWTMLKYPQIGSSSRARPSGKPVINPGQSGERIERPSGGFSGAVEAFARRNGSGLVLQSEHSRHRSSDDVPSSKDVQADSERPRSSSRNGSSSKKPVLSSSRPSSSGEPSESRTSRLVLSSGRLSTTQRLQPGFESKTSLSRASATRGGRDDTLRSFELLSLGSGKRK

SEQ ID NO: 223279 - protein, 62 aa, Glycine max
  Clone ID: PAT_MRT3847_43651C.1.pep
FCSQKRPPFILHRKLETLFSLRVGVKKVPWDGNLKNSRPSPEHRKGKQPIFAENMIRRFKEK

SEQ ID NO: 223280 - protein, 73 aa, Glycine max
  Clone ID: PAT_MRT3847_43652C.1.pep
CVKKKCLETGVKSMVHRERFLKDLVPSPDLQRHFLFLPPPYPLGVEAPERPKGNFSRFGKNKSSFVFLKVQIK

SEQ ID NO: 223281 - protein, 115 aa, Glycine max
  Clone ID: PAT_MRT3847_43653C.1.pep
ITCTSVVGGLSREGKVREAMKFFHYLKRFAIRPNAFIYNSIITGLCKSQQTSLAIDFLADMVAKGCKPTEATYTTLIKGITYEGLAEDASKLSNELYSRGLVKRSLVEKVSLEVE

SEQ ID NO: 223282 - protein, 121 aa, Glycine max
  unsure (1)..(121): unsure at all Xaa locations
  Clone ID: PAT_MRT3847_43654C.1.pep
NEMVGVSIRRXPYKGEALEQRLASSILVPGGGSLFPGIVERLEAGIRIIRPCGTPIKXVRALDPVMVAWRGAASFAADPQFHMHAFSRLDYYDNGAGWLGCFQLQYPLCFLARWGAVICFK

SEQ ID NO: 223283 - protein, 86 aa, Glycine max
  Clone ID: PAT_MRT3847_43655C.1.pep
YQILISTGLEYLHTGCNPSIIHRDIKTGNILLDINMRAKVSDFGLSRLAEEDLTHISSIARGTVGYLDPEYYASQQLTEKNDVYSF

SEQ ID NO: 223284 - protein, 56 aa, Glycine max
  unsure (1)..(56): unsure at all Xaa locations
  Clone ID: PAT_MRT3847_43656C.1.pep
MSRRKVREPKEENXTLXPTVXDXXHVXXRXHLCLFNDTFIQXDLSGRETLVRITGG

SEQ ID NO: 223285 - protein, 48 aa, Glycine max
  Clone ID: PAT_MRT3847_43657C.1.pep
NNFEFNQHAVRLAMFSQKNKQINKIQGFGLNYKVRKGKNRSSIKSFTT

SEQ ID NO: 223286 - protein, 207 aa, Glycine max
  unsure (1)..(207): unsure at all Xaa locations
  Clone ID: PAT_MRT3847_43658C.1.pep
MAETPNKGHIVMVPLMAQGHLIPFLALARQIQQNTSFTITIANTPQNIQHLRSALSSSTTPNHQIHLAELVPFNSTQHSNKDNNTQKAPLTDLLKLGYASLTLEPPFRSLISQITEEDGHPPLCIISDMFLGWVNNVAKSLGTRNLTFTTXGAYGILAYISIWSNLPHRKTDSDEFHVPGFPQNXGFHKTQLHXFLQAGDGTHDWSR

SEQ ID NO: 223287 - protein, 98 aa, Glycine max
  Clone ID: PAT_MRT3847_43659C.1.pep
KNQQNVEPSQPKKTTQTHQNPPTLDSYPQLPQIKIHHPSYPRHHHPFSADTPTPTAGARRKIGVAVDLYDESAYTVRWAVQNYIRPDDTVILIHVSPT

SEQ ID NO: 223288 - protein, 78 aa, Glycine max
  unsure (1)..(78): unsure at all Xaa locations
  Clone ID: PAT_MRT3847_4365C.1.pep
MKSKMGQDQNQRACGYALAIRGAQMLGEYTELRGNLNTMMMQCLQKLPVYNNTYTYNXDGHTLKYVVEIGMTYCVCAD

SEQ ID NO: 223289 - protein, 148 aa, Glycine max
  Clone ID: PAT_MRT3847_43660C.1.pep
NVMLDENLVAKVTEFGFAIADGKATYCGFSAEKDIEDFGKLVLTLLTGCCDHDHVKLCKWAYKEWMEERVANVVDKRMEGGYNSEELERTLRIAFWCLQMDERRRPSMGEVVRVLDGSLSVDPPPSPFAFQRPLQVDYSEENVSELEG

SEQ ID NO: 223290 - protein, 146 aa, Glycine max
  unsure (1)..(146): unsure at all Xaa locations
  Clone ID: PAT_MRT3847_43661C.1.pep
PSKLXGFHIQKDTHVLFEISXTAVKDXSYHYSISWNRGFQNIRGLAQGDNWSAFFKIAVFLYLLKLILSELFTKMIGIGLVIAFMAFFVYEQYESEIDGLVDFLFTSLKEFMIYLMRISPVSILRLLHYHDNFQRYEGPRKVKDLR

SEQ ID NO: 223291 - protein, 199 aa, Glycine max
  Clone ID: PAT_MRT3847_43662C.1.pep
HASDLRIIGEPKLPSVFLQVICWVLGEYGTADGKYSASYISGKLCDIAEAYSNDENVKAYAISALTKIYAFEIAAGRKVDMLSECLSFIEELLASHSTDLQQRAYELQALIGLDAQAVETIMPQDASGEDIEVDKNLAFLNQYVQQSLERGALPYIPEDERNGTVNVSNFRSQDQHESAQHGLRFEAYEVPKPPMPSKV

SEQ ID NO: 223292 - protein, 59 aa, Glycine max
  Clone ID: PAT_MRT3847_43663C.1.pep
QWGGMKCQTLYPIGILIHTKGPNIYHWKVKNNRKPISYIAKITIWHKHKRSEVPYPSME

SEQ ID NO: 223293 - protein, 63 aa, Glycine max
  unsure (1)..(63): unsure at all Xaa locations
  Clone ID: PAT_MRT3847_43664C.1.pep
SEHVGPGVKCRAEPASVLXGAIILRKVTVLPQRKGTGRNKIGKPHTVPCTVTGEVRARNRWDA

SEQ ID NO: 223294 - protein, 52 aa, Glycine max
  Clone ID: PAT_MRT3847_43665C.1.pep
HNYQLILVDGKNTSYQDNNIKRSSYYLPCYNFFFFFCRLKFFSITLGKSLRL

SEQ ID NO: 223295 - protein, 75 aa, Glycine max
  Clone ID: PAT_MRT3847_43666C.1.pep
KLNIAKNFEWNHNRSSMDTGSDQLAQCFKLCLNSSHIIFNFIIKFIATFIRKCRNRAKCVGFKKLREFKCKILSK

SEQ ID NO: 223296 - protein, 74 aa, Glycine max
  Clone ID: PAT_MRT3847_43667C.1.pep
SLGEDFLEQRISCEKLERSQYYMFSLQNIKSYIRYGSLHYIYDSFRLLLSLWISTLYIILFDCSLVHTIPLPPC

SEQ ID NO: 223297 - protein, 141 aa, Glycine max
  Clone ID: PAT_MRT3847_43668C.1.pep
IYAHINSNLNILIFMPKQQQDHLTNTSDPDKETRFPNSLHFYDQTNQPYTLLKTNQYREILYSISLGYKRLANKMQTKIITPHTISRPKKVENFIGNLVDHSQKSFPCGTWFFHATDFESNDPVALPSPVSMLFGSSIPHL

SEQ ID NO: 223298 - protein, 69 aa, Glycine max
  unsure (1)..(69): unsure at all Xaa locations
  Clone ID: PAT_MRT3847_43669C.1.pep
MGSHHLEPWLLENGKPKVLTKENMHGRYXHSMFSTSLRKKSNPTLGFQLSCATLRSILFKYCNEGYSWV

SEQ ID NO: 223299 - protein, 163 aa, Glycine max
  unsure (1)..(163): unsure at all Xaa locations
  Clone ID: PAT_MRT3847_4366C.1.pep
MDAPRKQQVSLRGASAKEITRDALLLKVSQERELRNYAKRAASAALFIQRVWRRFKVTKMISLQLQQEWEIAVNHYAGVMTANWISNDLLRPFLFFITRISTQHRKVHSKRIDSMKLCFTILLESLKSSDSXFSFLAFGTTEERTIWRYQARQLTSLVMHSFN

SEQ ID NO: 223300 - protein, 137 aa, Glycine max
  unsure (1)..(137): unsure at all Xaa locations
  Clone ID: PAT_MRT3847_43670C.1.pep
EFCRQVDRDCDFLEHERIMDYSMLVSLHFRRMSCSNNITPSNYRSSTQTPTNHSNFNNKAPRLSKVNVNHLIVDPSRXVQCNINIPXRAKSTVRKSDDTPQLVXEPTGELYEIIIFVRIINIXQNYHISKXLEHTDE

SEQ ID NO: 223301 - protein, 183 aa, Glycine max
  Clone ID: PAT_MRT3847_43671C.1.pep
VGMPNAGKSTLLGAISKAKPAGGDYAFTTIRPNLGNLNYDDLSITVADIPGLIKGAHQNRGLGHAFMRHIERTKVLAYVVDLAAALNGRKGIPPWDQLRDLILELEYHQDGLSKRPSLIVANKTDEEGAEEVYKELKRRVQGVPIFPVCAVLGEGIADLKAGLKMLVSSEMSSELCLDQILLA

SEQ ID NO: 223302 - protein, 114 aa, Glycine max
  Clone ID: PAT_MRT3847_43672C.1.pep
MVGFFFQKRPSKNGAPISPLFFFPKTLAVGPWGGTTLRGGPGLNQPAPGFSLFKKGGEFSRLSPSTQRGPNFFSQKKKTPLSKKKKKKKKKKKPKHQKKKKKNKKKKKKKKKRT

SEQ ID NO: 223303 - protein, 116 aa, Glycine max
  unsure (1)..(116): unsure at all Xaa locations
  Clone ID: PAT_MRT3847_43673C.1.pep
FYWLPIFGNXLYPGSQLPSKAVVGNVTCGSGRGGSPTSASIISAVTNXPEXVNERIRTALGNGKKIAFFTRGDAFPAASLADLWVVKNEIMSCNATNPMMARLFVNCTTTTYLLVE

SEQ ID NO: 223304 - protein, 64 aa, Glycine max
  Clone ID: PAT_MRT3847_43674C.1.pep
LKTYHLRLDKYKYPSASLKTQTSSLLSSLINNMQIFVKTLTGKTITLEVESSDTIDNVKAKIQD

SEQ ID NO: 223305 - protein, 69 aa, Glycine max
  Clone ID: PAT_MRT3847_43675C.1.pep
FQRSWAWVFPLTALAPYYGLNLLAPRAYIQHCLSWSRAVSALLQSLCGFLFKKKQRISFQCLVQAAPKL

SEQ ID NO: 223306 - protein, 27 aa, Glycine max
  Clone ID: PAT_MRT3847_43676C.1.pep
TLVSLCCNPIRYKMLHGIRQVAIETNR

SEQ ID NO: 223307 - protein, 587 aa, Glycine max
  unsure (1)..(587): unsure at all Xaa locations
  Clone ID: PAT_MRT3847_43677C.1.pep
MSIGKIDSEEGKDKEINSSEDKPQNKPNPTVNAVVSDPSVKTTKKKKIIKRVPKKKVVGEASKSLVSEPKKDENQGQDSTQSSGKQTADANTIVTEEKKPGKVVPKKKIKTPVSKKKDETADSNKTETLSDKKDEGNVVAVQAQDDTQSTGKQTANADTTVTPEVKKTGKVVPKKQSKTPTSEKRDNTADSSKTETKSDKDDKKEERVTGEKSGAKTDKLKASDKDVTNVKGKVKDGDKSKDEKVTQERDGKDXSKSKSSKEVKDKRKSNEPPRHPGFILQTKWTKDSKIRSLSLSLDSLLDYTDKDVEESNLELSLFAESFYEMLQFQMGSRILTFLQKLRIKFVIKRNQKKRQREDEQEKDDVKKSPVKRQKGNDPSVKNEPTNMDTLNPTLLDDEKAVARNDNSSNKEDDVKMEDGSDEEEEDPEEDPEEYEEMENGSPQHEASNDKNAEQEANADTKSENITTNDKTADETSKEEIKVKDEVQESKADLQVKEEKEGKDEIKKETPTAKEVVVDRELLQAFRFFDRNRVGYIRVEDMRIIIHNLGMFFSHRDVKELVQSALLESNTGRDDRILYNKLVRMSDI

SEQ ID NO: 223308 - protein, 560 aa, Glycine max
  Clone ID: PAT_MRT3847_43678C.1.pep
LFLRPERLRERLFESERDRLKEKDRERLLERELERERERDRIMERREKERERERKRALETKPERTPARSSKDPRGTSKDPRGTSKDPRGSSLTKEGRSTRRDSPHHGALHRHHSPVKEKRREYVCKIFPSRLVDIERDYLLLDKRYPRLFVSPEFSKAVVNWPKENHKLSIHTPVSFEHDFVEEESATEPRDSSNKLLVGQPPNSLQGNTVWNAKIILMNGLSRSALEELSSDKIVDDRIPHFCNFLRFAVLKKDHSFMAVGGPWEPVDGGDPSIDNNSLIKTALRYAKDVIQLDLQNCQHWNPSLELHYDRIGKDGFFSHKEITVLYVPDLSDCLPSLDEWRDKWLAHKKAVAEKERQLSLKKEKSRDNKEVSKDKSDKRKDSTPSGKSDVKKKEKDNNTVKEEIEGKTGVNNNNIVKNEGSDIGEEGKSAEKKLAGETATGQTTGGVKSVKKKIIKRVVKQKVATKANAAATKQTDKAGEKDVAEEVTTSNVTDRDGKFSVDPTGVQTPVKNLVAEDMSIGKIDGEEGKDTEINSSEDKPQNKPDPIVNAVASDPAVK

SEQ ID NO: 223309 - protein, 120 aa, Glycine max
  Clone ID: PAT_MRT3847_43679C.1.pep
PIPNGRNLLSSAPLPESANLVLIIFSQKFFGKRCKNDYFRNHSKSASTYRVLESLSGMNGSTEKPIKYVLCTVLSSCAKTLNWHLGIQIHAYMIRSGYEDNLFLSSALGDFYAKCFAILD

SEQ ID NO: 223310 - protein, 50 aa, Glycine max
  unsure (1)..(50): unsure at all Xaa locations
  Clone ID: PAT_MRT3847_4367C.1.pep
KQCDENEGPVGCXXLKNXXPGIPFASAGTVRDVSPHEFVGGCSSLLTRIL

SEQ ID NO: 223311 - protein, 519 aa, Glycine max
  Clone ID: PAT_MRT3847_43680C.1.pep
KPKKDVENQGQDGTLSSGKQTADVNTVVTEVKIPGKVVPKKKIKTPVSNKQEETADSNKTETPSDKKDEGSVVAVQAQDDTQSTGKQTANADTTVTPEVKKTGKVVPKKQSKTPMPEKRDNADTSKTETKSDKDDKKEERGGTGEKSGAKTDKQKASDVSNVKGKVKEGDKSKDEKVTKERDGKDEGFKSKSSKEVKDKRKSDEPPRHPGFILQTKWTKDSKIRSLSLSLDSLLDYTDKDVEESNLELSLFAESFYEMLQFQMGSRILTFLQKLRIKFVIKRNQKKRQRDDEQEKDDVKKSPVKRQKGDDPSVKSEPTNMDTSNPTQVDDEKAVVENENSSNKEDDVKMEDGSDEEEDPEEDPEEYEEMENGSPQHEASHDNNAEQEVKADTKSENITTNNKTTDETSKEEIKVKDEVQESKADAQVKEEKEGKDDTKKETPAVKEVVVDRELLQAFRFFDRNRVGYIRVEDMRIILHNLGMFFSHRDVKELVQSALLESNTGRDDRILYNKLVRMSDI

SEQ ID NO: 223312 - protein, 92 aa, Glycine max
  unsure (1)..(92): unsure at all Xaa locations
  Clone ID: PAT_MRT3847_43681C.1.pep
GLHKSCNMVRFLSYFAYGLMQKFFGKRCKNDYFRNHSKSASTYRVLESLSGMNGSTEKPIKYVLCTVLSSCAKTLNWHLGIQIHAYMXSIWI

SEQ ID NO: 223313 - protein, 123 aa, Glycine max
  Clone ID: PAT_MRT3847_43682C.1.pep
IMAEPFLFNHQMVEKPPLMRMAPLKICLLRLINYTRQGLSGNIDMETGMEGASYGTCKCALPGLDYEDRRPVTTSTMDGLFSCTTKVHRSALGTAPIISWGKVGEILLVKILSRPTREIHFNF

SEQ ID NO: 223314 - protein, 54 aa, Glycine max
  Clone ID: PAT_MRT3847_43683C.1.pep
LFGLDLTNSLVIMLLQFRYDKKKRSLNSTQPKLKYFDYVSKLDLNQLMYTPMVL

SEQ ID NO: 223315 - protein, 45 aa, Glycine max
  Clone ID: PAT_MRT3847_43684C.1.pep
LIVETLTSHPLHSPSSTTGSTRNALSSIFILVISRFPELDLKEPF

SEQ ID NO: 223316 - protein, 198 aa, Glycine max
  Clone ID: PAT_MRT3847_43685C.1.pep
MESDTNTTFSHSSNTTPSSPPQQVQVVMIPCAACKILRRRCAEKCVLAPYFPPTEPAKFTTAHRVFGASNIIKFLQELPESQRADAVASMVYEAGARIRDPVYGCAGAICHLQKQVNELQAQLAKAQAEVVNMQFQQANLVALICMEMAQTQTPQESPQQSVDNFISSPSHSSGYQNNLNFFEENTNNLNSLWEPLWT

SEQ ID NO: 223317 - protein, 40 aa, Glycine max
  Clone ID: PAT_MRT3847_43686C.1.pep
YVMLGRDVEDRFYEMMCEVVPPTLLIIPKRGNEDAIIIKK

SEQ ID NO: 223318 - protein, 40 aa, Glycine max
  unsure (1)..(40): unsure at all Xaa locations
  Clone ID: PAT_MRT3847_43687C.1.pep
ITTRXNVFYIPQFWVKIXLNLYILKRQDSSIRKNNRFLSV

SEQ ID NO: 223319 - protein, 133 aa, Glycine max
  Clone ID: PAT_MRT3847_43688C.1.pep
KSRGDNFDLGGLINGFLNFALGPDGGNRKKQHPGRHTRIKTSWAKVVSQDQQNHPFPFPQPREQFRPQHEEPKSKSPYNPQRGDKGKNGWHTVGKNPSGLPHRVQRDIWNIYNRPAVDQESSNEVKFGPDVNP

SEQ ID NO: 223320 - protein, 112 aa, Glycine max
  unsure (1)..(112): unsure at all Xaa locations
  Clone ID: PAT_MRT3847_43689C.1.pep
GGESFYGEKFWYENFKLKQMGAGVQXGANGGPKNKGSQCLITPVTINWLEERHVVFGKVFFGMDVVSNIXAEGAKRGPPKTKVVIVDRGEPPQKWEFLIPKRDLLKGFPVFI

SEQ ID NO: 223321 - protein, 41 aa, Glycine max
  Clone ID: PAT_MRT3847_4368C.1.pep
NIKKIILGLRVCLSVKFLFIKTNYFFYLLEKKKKLKKRGGP

SEQ ID NO: 223322 - protein, 80 aa, Glycine max
  unsure (1)..(80): unsure at all Xaa locations
  Clone ID: PAT_MRT3847_43690C.1.pep
YTTLXNLLXDTQELTHLXSXLISISQXFTLFXPXDNVFQSLXPXALNXLXDXQGVXLILFHVTPIFYTISVLLXEXHPLG

SEQ ID NO: 223323 - protein, 65 aa, Glycine max
  Clone ID: PAT_MRT3847_43691C.1.pep
KKLLWPTGHRNKTIAVFGQKFQTIYSVDGRPNILLLRKLEVLSNKLYTPFYPIISSLSVILKFVY

SEQ ID NO: 223324 - protein, 69 aa, Glycine max
  Clone ID: PAT_MRT3847_43692C.1.pep
LNRLDLIYGSPGDRNTIIFVCYSHVFRLMRLWQTERIYGEGVKDDMEQGRQSRKFFYKLYILGAHVIVN

SEQ ID NO: 223325 - protein, 48 aa, Glycine max
  unsure (1)..(48): unsure at all Xaa locations
  Clone ID: PAT_MRT3847_43693C.1.pep
QHNSFSIASLLYLYEHSXXGKXKXXCXRXVGXXCEIXXSXSVHIGIXG

SEQ ID NO: 223326 - protein, 54 aa, Glycine max
  Clone ID: PAT_MRT3847_43694C.1.pep
IKGSVEGARNSFICVCCCHKQGLYEWFQLGVCEDPGQLYQFSELSYGSLPIIVH

SEQ ID NO: 223327 - protein, 68 aa, Glycine max
  Clone ID: PAT_MRT3847_43695C.1.pep
VLQCGNDFTYYQPANPPSKKIIINYTYWSLLIDLMLYFQPCLLYQHYYNYLFQMQTKSVNSSNHCIAP

SEQ ID NO: 223328 - protein, 128 aa, Glycine max
  Clone ID: PAT_MRT3847_43696C.1.pep
MTSCSSITISPRKLRYDLYSYSYKEDSNTPLVINVLASLIERSMARTQRIVKNCSNSLSKAISTNIFDCREIPDLTIQSYLERIFRYTRAGPSVYVVAYVYIDRFCQNNPGFRINARNVHRLLITTIM

SEQ ID NO: 223329 - protein, 324 aa, Glycine max
  Clone ID: PAT_MRT3847_43697C.1.pep
ARATNDFDEALLIGTGGFGSVYKGSFDGGATSVAIKRANPMSHQGVSEFETEILWLSQLRHANLVSLLGYCNEDGEMILVYDFMDNGTLYEHLHLRQRDQPPLSWIQRLEICIGVARGLHYLHTGTKHRIIHRDIKTTNILLDHNWVPKISDFGLSKAGYPSILITNVKGSIGYLDPECFQSHKLTEKSDLYSLGVVLLEILSTRPAVIVGEDDEHVNLAEWAMLCFENGNLEQIVDPNLKGNIVEECFELYLGFAMKCLAERGVERPSIGEVLQNLVLAMHLQKKGGVVPDGNVQRNDNSGLQGYSDLTPGVEFSEIMMPVGR

SEQ ID NO: 223330 - protein, 52 aa, Glycine max
  Clone ID: PAT_MRT3847_43698C.1.pep
SQALLWHRGGSRVKHGPGKNRFEKSPPVMSRVKEYRRRGSFYKDLMGVRSGP

SEQ ID NO: 223331 - protein, 141 aa, Glycine max
  unsure (1)..(141): unsure at all Xaa locations
  Clone ID: PAT_MRT3847_43699C.1.pep
LEHEENVCEEVSEWHELTPIKGLMVRAVYQSLFXLITHKLNLRPWIIPSLYVAARLVVLFHARTCTGGQTNKELFTKPFTKHDNPDVQTCHAACYGLAFSGGGGTYLTARDERAYQLMSPDFPXALSQDAKDPCLLWMKIF

SEQ ID NO: 223332 - protein, 78 aa, Glycine max
  Clone ID: PAT_MRT3847_4369C.1.pep
IIIKLRDSVLHIQNLTKVALQIYRLSTKRSQGILSKSSSFKCFRISHWQVATNVMDSQFNICNCHCELGICTTKFKIT

SEQ ID NO: 223333 - protein, 106 aa, Glycine max
  Clone ID: PAT_MRT3847_436C.1.pep
RVPSCCRVGWFLSARILGFHANWFGHKTKFFFLWEDIEEIQVLPPSLATLGSPTLVIVLRRGRGLDARHGAKTQDEEGRLRFHFQSFVSFSAASRYESGKLIFLIL

SEQ ID NO: 223334 - protein, 81 aa, Glycine max
  Clone ID: PAT_MRT3847_43700C.1.pep
PSTIPICNAPCCTCNIGNNFTALPPPVCNTPILTLLRSAHLNMCLFCGTRFGLLRTFIEHVPRGTVRLHYCRKANNHQEDL

SEQ ID NO: 223335 - protein, 187 aa, Glycine max
  Clone ID: PAT_MRT3847_43701C.1.pep
MSLEESLRSLSLDYLNLLINGQAFSDVTFSVEGRLVHAHRCILAARSLFFRKFFCGPDAPCGLDPAGPRGVNSSRSGVIPVNSVGYEVFLLMLQFLYSGQVSIVPQKHEARPNCGERGCWHTHCTSAVDLALDTLAAARYFGVEPLALLTQKQLASMVEKASIEDVMKVLLASRKQDMQQLWSTCSH

SEQ ID NO: 223336 - protein, 46 aa, Glycine max
  Clone ID: PAT_MRT3847_43702C.1.pep
RVLITSNTLQIKKDSRTIPEKMGNSLIFKNNNLSIFTNSQTDHHLH

SEQ ID NO: 223337 - protein, 105 aa, Glycine max
  Clone ID: PAT_MRT3847_43703C.1.pep
SFIALLCLSCKIWRSFVSPFFSLAFGGFCFLHCCLTSCICSLHCSSRWFSNGSHSGFLFCFCCFFFIVFRKQVCFGSEVVAMDKLVFGMLKYGYVSFQILTYILL

SEQ ID NO: 223338 - protein, 223 aa, Glycine max
  Clone ID: PAT_MRT3847_43704C.1.pep
ARNLGRAPETVFWPVFIVATLAAIVGSQAVISATFSIVSQCCALNCFPPVKIVHTSSRIYGQIYVPEVNWILMCLCLAVTIGLRDIDMMGHAYGLATTTVMFVTTCLMTLVMVIVWKQGIIKAIICLVLFGSIELLYISASICKVPEGGWIPLVLSFIFMSIMFTWNYGTMKKHEFDVENKVSMSKILSLGPCLGMVRVPGIGVIFSNLASGVPAIFGHFVTN

SEQ ID NO: 223339 - protein, 96 aa, Glycine max
  unsure (1)..(96): unsure at all Xaa locations
  Clone ID: PAT_MRT3847_43705C.1.pep
GTLGDQHHLXXQHDKMGGVNDCGXGXRCDXXXSLGXWXXLXWXRSGSXSSRXSGFSXSSXSRXMGXXXSHEAKADLLXXXVAXNXXHSRGICCLCX

SEQ ID NO: 223340 - protein, 404 aa, Glycine max
  Clone ID: PAT_MRT3847_43706C.1.pep
MATIWKTNASRNAVRCLTQSLASTSRTPSLPSHFSSVRYLRTGRDPSSRTYEIIPPVNWGIRIVPEKKAFVIERFGKYVKTLPSGIHFLIPFVDRIAYVHSLKEEAISIPDQSAITKDNVTIIIDGVLYVKIVDPKLASYGVENPIYAVIQLAQTTMRSELGKITLDKTFEERDTLNEKIVESINMAAKSWGLECLRYEIRDISPPRGVRAAMEMQAEAERKKRAQILESEGERQAHINIADGKKSSVILASEAARMDQVNRAQGEAEAILAKAKATAEGLAVVSKSLKENGGPEAASLRIAEQYIQAFSNIAKEGTTMLLPSSASNPANMMAQALTMYKSLLGNPSSGKLSGTAPPSIAGQLEGNDSSSEVKGESSTNATVTSGIPDYRGKPGFSLQSPPKRE

SEQ ID NO: 223341 - protein, 96 aa, Glycine max
  Clone ID: PAT_MRT3847_43707C.1.pep
GVLIKHTSSSILSYLWKAVNYECSRKFLFICCILFVKISFGCLIFLFWFTFEAVLMTFLLGGPRNAQISYTEKFDYPLTLLRNNHISVVDDIVHLG

SEQ ID NO: 223342 - protein, 114 aa, Glycine max
  unsure (1)..(114): unsure at all Xaa locations
  Clone ID: PAT_MRT3847_43708C.1.pep
MINAITWVHKRVSKSELVVAEPSTDKENDHTIVNHAFTRIDKDHEDAIDDDLVAHALTVSDADDNAFTGTCDDKTLAVNDLDMDLYDDXIKELXVFSSGIGYRYYASNDMDPYI

SEQ ID NO: 223343 - protein, 60 aa, Glycine max
  Clone ID: PAT_MRT3847_43709C.1.pep
IFFESNNISGFFNPRDYLLLALFGIKDIKTETHLPLGEKMRQNQSLIGRCNDTVTGKANP

SEQ ID NO: 223344 - protein, 47 aa, Glycine max
  Clone ID: PAT_MRT3847_4370C.1.pep
SCYLVIVLVLSSLRCSAVFYIVCYKHYSHVVVRNKVRSYLDSMHRFV

SEQ ID NO: 223345 - protein, 56 aa, Glycine max
  Clone ID: PAT_MRT3847_43710C.1.pep
TGSVSFQPITPSIIIFRPEISPTIFYCHHLPLIYLFYLNNFFKRIIKFYQTLKFFF

SEQ ID NO: 223346 - protein, 59 aa, Glycine max
  Clone ID: PAT_MRT3847_43711C.1.pep
VAQSTASDKRENGSSSVGGNPTMVHVSSYRYYGESLNKPPRPYHKDLLDAYLNLVPEYW

SEQ ID NO: 223347 - protein, 140 aa, Glycine max
  Clone ID: PAT_MRT3847_43713C.1.pep
LEVARHALGAEDIISFPDDKLNRMWQPYKDQNLVEESHSNVTSSDFWNQPPVKAFSSAMTTRRGKTLEIQWPPMSLPSTYYYISLYFQDNRNPSPYSWRIFDVSINGHTFFSSLNATTKGVTVYAAKWPLSWQTKITLTP

SEQ ID NO: 223348 - protein, 227 aa, Glycine max
  unsure (1)..(227): unsure at all Xaa locations
  Clone ID: PAT_MRT3847_43714C.1.pep
AGPATQPLGVIEGTRSFLCATTLAKPGRGRRSPSGCVSGYSARSSSPSDSRSSSRSRSLSRSRSPWRYRSCHTSXARAXRSYHSRNPHRHRRRSAADPTRRGSVPXTLSDKERPTLTKETFTCTRVTSVFKMKSSTEMRRKGTMKERDSNSGEXLSDQRRAMDXTVNPTKGNGYGQFKTRGDAEKASLCMDGAQIDGDGIKAXFTLPTTQKVSPPPKADAAAPKRDT

SEQ ID NO: 223349 - protein, 79 aa, Glycine max
  Clone ID: PAT_MRT3847_43715C.1.pep
PQKGSNVTYVLGGRSFTTLATSPTTPRGASIFKAFHDLDCFPKCSVVKNLKERVFSEPNFIKSRGEVRVILTPQSGGVL

SEQ ID NO: 223350 - protein, 96 aa, Glycine max
  Clone ID: PAT_MRT3847_43716C.1.pep
AVTDPNSEKPGEVYVPRDENFGHLKSSDFLTYGIKSLSHDVIPLFKSAIFQLRVTSREFESFQDVRSLYEGGIKLPTDILRQISPLTSPQGIFRTE

SEQ ID NO: 223351 - protein, 287 aa, Glycine max
  unsure (1)..(287): unsure at all Xaa locations
  Clone ID: PAT_MRT3847_43717C.1.pep
MKVKVISRSVDEFTRERSQDLQRVFRNYDPSLRPQEKAVEYVRAVNAVKLDKIFARPFIGALDGHVDAVSCMTRNPSQLKGIFSSSMDGDIRLWDLAARRTVCQFPGHRGAVRGLTASTDGRILVSCGTDCTIRLWSVPITTLMESDDSTKSTVEPASVYVWKNAFWGADHQWDGEHFATAGAQVDIWNHNRSQPINSFEWGTDTVISVRFNPGEPNLLATSASDRSIILYDLRMSSPVRKMIMMTKTNSICWNPMEPINFTAAXEDGNCYSYDARKLDEANVSQRS

SEQ ID NO: 223352 - protein, 82 aa, Glycine max
  Clone ID: PAT_MRT3847_43718C.1.pep
KPIVDGTFRGLFLRGHLKRCTVEIILPEIFQNPPFYRGMFTLGQCSTVPLVCVITQRFQTGHIWVKQPQSVNPVNCARLFVC

SEQ ID NO: 223353 - protein, 96 aa, Glycine max
  Clone ID: PAT_MRT3847_43719C.1.pep
VDPRVRIPVPLISRPAMSVKEASFFSDTLPNQFSLKNLHILLSHNQNKLAFSSLSLLGALIVFRNSLLILLDLFFALRVLISVLNYLTKLTLSNIN

SEQ ID NO: 223354 - protein, 51 aa, Glycine max
  Clone ID: PAT_MRT3847_4371C.1.pep
RHYWEALPLYYHYSPPLICRGYYIVEILLAVYEQKEVQPPSGSTSYHYIRC

SEQ ID NO: 223355 - protein, 59 aa, Glycine max
  unsure (1)..(59): unsure at all Xaa locations
  Clone ID: PAT_MRT3847_43720C.1.pep
AGVRNKCKLLTDGKLYEGKXHIPVSNISPGENPVVQIPQMAPEELLSSSAIDFRTAMGE

SEQ ID NO: 223356 - protein, 53 aa, Glycine max
  Clone ID: PAT_MRT3847_43721C.1.pep
VCPLFLHDSLLLVKLRNCKSLIKLPRFGHDRIRNNLDDDGCIRLRNIDSSIGL

SEQ ID NO: 223357 - protein, 79 aa, Glycine max
  Clone ID: PAT_MRT3847_43722C.1.pep
KATCERYRSLLMHIKDSPSPPSYIHKQISLTTTTTTTNNNNNYYQPHCGGKFKLQIEGPRTSSILIESLIKASASLSFP

SEQ ID NO: 223358 - protein, 68 aa, Glycine max
  Clone ID: PAT_MRT3847_43723C.1.pep
SLSENWGLYKSLLGRVFGRLEFDIRIWIMDFWIGDGWDFELVRAQVGVNNEEVYYGTQVIATAQQWVT

SEQ ID NO: 223359 - protein, 54 aa, Glycine max
  Clone ID: PAT_MRT3847_43724C.1.pep
TKVPNPKRYEFNFLGFSFSIGAFSGGAWECLLRAIPNFPLTYSSLDPHCRIHPR

SEQ ID NO: 223360 - protein, 85 aa, Glycine max
  Clone ID: PAT_MRT3847_43725C.1.pep
KNILKGKNLIKGKDQLYTWTIKTGTKKAKFNTGFNGIDWKENLGKKIQFKDQVNKIERVKDGGEMPLIRAFIKIYCIFGYSTTTS

SEQ ID NO: 223361 - protein, 65 aa, Glycine max
  Clone ID: PAT_MRT3847_43726C.1.pep
DQQVQISLGHRRNVCFLAVWLAEVSLWGVCSLMVWCAVVLVSGCVQWMIRGTRRSLYGESYHLGL

SEQ ID NO: 223362 - protein, 48 aa, Glycine max
  unsure (1)..(48): unsure at all Xaa locations
  Clone ID: PAT_MRT3847_43727C.1.pep
LSEDMFHXPATNMGTADRPNAGGVFLVTIHXHQDYPFKPPKVAFRTKV

SEQ ID NO: 223363 - protein, 124 aa, Glycine max
  Clone ID: PAT_MRT3847_43728C.1.pep
MAVEYYDFGPHKIHHSSVFYTSNLSFAFVNLRPAVTGHVLVCSKREVKRVADLTDDETIDLWRIAKKLGRQLESYHKASSLSFGIQMNEKEKELNRALKVDVERKDRSIEEMALEADEYRKFVF

SEQ ID NO: 223364 - protein, 157 aa, Glycine max
  Clone ID: PAT_MRT3847_43729C.1.pep
MAVEYYDFGPHKIHHSSVFYTSNLSFAFVNLRPAVTGHVLVCSKREVKRVADLTDDETIDLWRIAKKLGRQLESYHKASSLSFGIQDGPQAGQTVPHVHIHILPWKSGDYENNDDIYDDMNEKEKELNRALKVDVERKDRSIEEMALEADEYRKFVF

SEQ ID NO: 223365 - protein, 111 aa, Glycine max
  Clone ID: PAT_MRT3847_4372C.1.pep
DEDVSECKIRPSRSGRFRSKMVKLVSKKFRGSKKEKKGEVNKHNEGESGSEISSAVGEEKLPILEIEVEEENGDNKSSNSKLDCGITCSYDNEKRVERVGNSGSSMVLVMI

SEQ ID NO: 223366 - protein, 50 aa, Glycine max
  Clone ID: PAT_MRT3847_43730C.1.pep
KRSEEPWAFGIISHPRVQKWKIIHLLLLISTWEGFLIDTAMNGVVNKACQ

SEQ ID NO: 223367 - protein, 44 aa, Glycine max
  Clone ID: PAT_MRT3847_43731C.1.pep
DKAYFSSLVRPPFNLCLFSIVLSIYYPTIPGFYSIFKKLRFYCV

SEQ ID NO: 223368 - protein, 88 aa, Glycine max
  Clone ID: PAT_MRT3847_43732C.1.pep
IVSILDEGEMCISKSSSTHLLLLSLFNLLTSASQAAPTYSAHACSDEGSHYRPNTTFEINLNILLSSLVSNAILHHGFYRTNVSLGTS

SEQ ID NO: 223369 - protein, 38 aa, Glycine max
  Clone ID: PAT_MRT3847_43733C.1.pep
QAVVVKPRASGTTWYHEQVELVNVCYLQYIVNSLTLVA

SEQ ID NO: 223370 - protein, 42 aa, Glycine max
  Clone ID: PAT_MRT3847_43734C.1.pep
KITFSSTDSTYALTVPHYFLKHYPCWHLLSSFPTTLCFISSD

SEQ ID NO: 223371 - protein, 72 aa, Glycine max
  Clone ID: PAT_MRT3847_43735C.1.pep
WLQAKKTMDRDQFINSKVLFKTVRNDASLTKFKPGIIPVNYPPDKLPPKKTNVENYVNGKQKALKPFPDGSN

SEQ ID NO: 223372 - protein, 81 aa, Glycine max
  unsure (1)..(81): unsure at all Xaa locations
  Clone ID: PAT_MRT3847_43736C.1.pep
KKHGGLCERVLTLHTPPPKVCLCFXLLASLINNXKGYDTWRNIVLSMSGMKQRSILHEQRNFGYSQANRQVTKRQWTTLSH

SEQ ID NO: 223373 - protein, 33 aa, Glycine max
  Clone ID: PAT_MRT3847_43737C.1.pep
SSTLRLQSHSTCFSMLALGKPHVISNAPKLILS

SEQ ID NO: 223374 - protein, 81 aa, Glycine max; identical to SEQ ID NO: 223372
  unsure (1)..(81): unsure at all Xaa locations
  Clone ID: PAT_MRT3847_43738C.1.pep

SEQ ID NO: 223375 - protein, 50 aa, Glycine max
  Clone ID: PAT_MRT3847_43739C.1.pep
QWTTHDGFLLSTKDHLHNTRVPNTRRFHIFPQPNAPLKENLRVTRDSSEA

SEQ ID NO: 223376 - protein, 97 aa, Glycine max
  Clone ID: PAT_MRT3847_4373C.1.pep
EKGGLILLQIIAGEHAPLGDRKWAQINSFVGVPGEKTGSPMHFTFNFAYKQREWGKRTRDPPLEGHNRTTLPGYPITHLEQHTLAFFAPTGRDKYPS

SEQ ID NO: 223377 - protein, 106 aa, Glycine max
  Clone ID: PAT_MRT3847_43740C.1.pep
MDYSFSLRGPHDYVCIDSIVVLHLISVECNKQRCSSLLKKKKKKKKKKKKKKKKKKKKKKKKKKKILLFLFFREKKKKKGLFVLFPKTHSLPFAPKAGTFGGEWLS

SEQ ID NO: 223378 - protein, 195 aa, Glycine max
  Clone ID: PAT_MRT3847_43741C.1.pep
MLCKLVPVPRKKKPGLNPVYLNVYDLTPINGYAYWLGLGVYHSGVQVHGVEYGFGAHERDTTGIFEVEPRHCPGFTFRKSIFIGSTDMGPKDVRAFMERLAEEYSGNTYHLIQKNCNHFCEDVCVRLTGKSIPRWVNRLARLGFLCKCVLLAFLIETKIRQVTIDQGSRRRIKEVKEKQVEEVRGINPTYIVKKG

SEQ ID NO: 223379 - protein, 150 aa, Glycine max
  Clone ID: PAT_MRT3847_43742C.1.pep
MLCKLVPRKKKPGLNPVYLNVYDLTPINGYAYWLGLGVYHSGVQVHGVEYGFGAHERDTTGIFEVEPGHCPGFTFRKSIFIGSTDMGPKDVRAFMERLADEYSGNTYHLIQKNCNHFCEDVCVRLTGKSIPRWVNRLARLGKGYRKVCCD

SEQ ID NO: 223380 - protein, 66 aa, Glycine max
  unsure (1)..(66): unsure at all Xaa locations
  Clone ID: PAT_MRT3847_43743C.1.pep
XXVSXAXRCXTPXVCKKIQIFEKKCFTLGXXXXPXXSVXGXDXLVRTRGESALNIAMXRXXGGGVK

SEQ ID NO: 223381 - protein, 75 aa, Glycine max
  Clone ID: PAT_MRT3847_43744C.1.pep
SRLYGSTREKFYRQRRPSPTQEMKMMPAGLGLLVTESYRKLAKAARGARETRAWLDQPLHFDARKGRLKKQMTIH

SEQ ID NO: 223382 - protein, 79 aa, Glycine max
  unsure (1)..(79): unsure at all Xaa locations
  Clone ID: PAT_MRT3847_43745C.1.pep
GSKGAGVHFPTTTVSTVRGNPTEREPMGEXTAPAQACSKGFITAKEDAETSRRNLKLSKDQSMVLEKSFKDHNILNPVG

SEQ ID NO: 223383 - protein, 89 aa, Glycine max
  Clone ID: PAT_MRT3847_43746C.1.pep
MGCVFGKEASKKKEEVEVARAEDGVAQNSGNVKVGGEEEKSKRPKGERRRSSKPNPRLSNPPNHVHGEQVAAGWPSWLSKVAGEAINGL

SEQ ID NO: 223384 - protein, 87 aa, Glycine max
  Clone ID: PAT_MRT3847_43747C.1.pep
KSIDHFGTKNNRPKPNGTEIISSHTKSSIIFPQFICRKCSKYNLTGREREHSTTIFPPISSDQKHSVIQWGGKQGGIKMHEIYEDIS

SEQ ID NO: 223385 - protein, 46 aa, Glycine max
  Clone ID: PAT_MRT3847_43748C.1.pep
RTRERTLGLTRLLTHGEGIPTNQHMLIFSQNQLPGSEGRLADSPHS

SEQ ID NO: 223386 - protein, 92 aa, Glycine max
  Clone ID: PAT_MRT3847_43749C.1.pep
VHAHVTRTQARIPYRARPLFFFFLLFIMPITFLEVIQRRKLPSPREQKKRQLFQDKGVKSHPAPPWDSRKLKEERNLFRIRANMGESRVGRL

SEQ ID NO: 223387 - protein, 576 aa, Glycine max
  Clone ID: PAT_MRT3847_4374C.1.pep
MNPLCCIAPVSIDRDRPNHVLAKSPAQCQLGLDASIRTVNHASKSSSSTQDSSVAVDSVKATSAVADLPEEEEPRDSKAFSGGNGGGVAGSVAGILYKWVNYGKGWRSRWFVLEDGVLSYYKIHGPDKILMSPAKDRSVRVIGEESSKFVKKANWNLNLNRASSGGGVRGGNSSNNGKPCKPIGGIHLAVYSSRSKKSDDWRLSVRTMQETRRQPSVSKKDEDGWFRALRAAWDPCARALSSGVPATSGQSVDSTEKLRSRLSQEGISESIINDCESIMLSEVSYLQSKLKFLQQKHVMLLDTLKQLETEKIELETTVVDETKERESYCGQGNRRFSDFYSVMSEGSATDSVADNESQDGADVETDDEDRTYFDTNEFLYSDALRSASYRSREGMGNASIFDRDYICYDGVHGFDKEIKDVSYPYVKRRDNLPEPKEKEKPVGLWSIIKDNIGKDLSGVCLPVYFNEPLSSLQKCFEDLEYSYLVDRALEWGKQGNDLMRILNIAAFAVSSYASTEGRQCKPFNPLLGETYEADYPDKGLKFFSEKVSHHPMIVACHCEGRGWKFSSPQLCFLLSQ

SEQ ID NO: 223388 - protein, 77 aa, Glycine max
  Clone ID: PAT_MRT3847_43750C.1.pep
FAKTFRVLYYPNPFGILGPHLSGRRALNQLLFYHLTVDDYLYFLCTLNYSAPEIITLTKKKLHFNAGNQYSLTNLNY

SEQ ID NO: 223389 - protein, 49 aa, Glycine max
  unsure (1)..(49): unsure at all Xaa locations
  Clone ID: PAT_MRT3847_43751C.1.pep
SQYRSRYRLIRRFSXAFVVCPLVVPKGKPGTFGCAHFYSLALVPSYKKV

SEQ ID NO: 223390 - protein, 440 aa, Glycine max
  Clone ID: PAT_MRT3847_43752C.1.pep
MEGFHPSMTSPFSYTFPISDAGTSNFSTTTTGTSYSTSTPWMNSRIWSKLPQRLLDRVLAFLPPPAFFRARCVCKRWYALLFSNTFLELYLQVSPHQHWFLFFKHHKTRKSYIYKNNNNNNGSSDGCGHIGAFEGYLFDPYEMSWYRIFFALVPSGFSPASSSAGLLCWVSDEAGPKTMLLSNPLIGSLTQLPPTLRPRLFPSIGLTIRPTCIDVTVAGDDMISPYAVKNLTSESFHIDGGGFYSLWGTTASLPRLCSLESGRMVYAEGKLYCMNCSPFSILAYDITSNTWFKIQAPMRRFLRSPNLVECKGKLLLVAAVEKSKLNVPKSLRVWSLQACGTMWVESERMPQQLYVQFAELEDGNGFECVGHGEFIVIMIRGTDKALLFDICRKRWQWIPPCPYIAHDGFELHGFAYEPRLATPVTGLLDQLALPFQSFNA

SEQ ID NO: 223391 - protein, 52 aa, Glycine max
  Clone ID: PAT_MRT3847_43753C.1.pep
KPNNTGGLYNQYILRLQYTKGATQDHSFNYKSYQTKKRLLLSKISNGGKKKA

SEQ ID NO: 223392 - protein, 38 aa, Glycine max
  Clone ID: PAT_MRT3847_43754C.1.pep
FLSGKFFLNPRLLQTHIAFHLLSNSPQLNLRYISITVF

SEQ ID NO: 223393 - protein, 168 aa, Glycine max
  Clone ID: PAT_MRT3847_43755C.1.pep
MRVSSPATASPSLHADEHRIFTLGSRDAESLFRSKPIAEIRKTEAATRKQIEDKKEELRQLVGNRYRDLIDSADSIVLMKVSCNGISSNIAAVHGRIRSLSQSQSQSQTKLHSQSRAWTYGAACRVKDLGDTPENIWGCLDEGMFLEAGSRYVRAKDVHHHLVVDSDD

SEQ ID NO: 223394 - protein, 167 aa, Glycine max
  Clone ID: PAT_MRT3847_43756C.1.pep
MRVSSPAAASPLPRADDHRISTIGSRDAESLFRSKPIAEIRKTEAATRKQIEDKKEELRQLVGNRYRDLIDSADSIVRMKGSCNGISGNIAVVHDRIRSLSQSQSQSQTKLHSQSRAWTYGAACRVKYIVDTPENIWGCLDEGMFLEAASRFVRAKYVHHHLFVDSD

SEQ ID NO: 223395 - protein, 93 aa, Glycine max
  Clone ID: PAT_MRT3847_43757C.1.pep
SILPWKTPQFLSSEGPVGGQSGLFRLEFLKPDWGNPPQGFLVPPGFLARVFTIVGPAPLVFKKVGGFQTLGFTLGWDFGDKNLLVGRFIKAVF

SEQ ID NO: 223396 - protein, 193 aa, Glycine max
  unsure (1)..(193): unsure at all Xaa locations
  Clone ID: PAT_MRT3847_43758C.1.pep
MGLGLLASKAIRPTSRLLLGSQNPTTFLLRTIVSKPELRNPEASAAQPEQPPAPDLPPRTPLAGARVHFSNPEDAIEVFVDGYPVKIPKGMTVLQACEVAGVDIPRFCYHSRLSIAGNCRMCLVEVEKSPKPVASCAMPALPGMKIKTDTPVAKKAREGVMEFXLMNHPLDCPICDQGGECDLQDQSMAFGSD

SEQ ID NO: 223397 - protein, 746 aa, Glycine max
  unsure (1)..(746): unsure at all Xaa locations
  Clone ID: PAT_MRT3847_43759C.1.pep
MGLALLASKAVRPTSRLLFGSQNPSTFLLRTIVSKPQLRNPEATAAHPEQPPPADLPPRTPLAGARVHFPNPEDSIEVFVDGYPVKIPKGMTVLQACEVAGVDIPRFCYHSRLSIAGNCRMCLVEVEKSPKPVASCAMPALPGMKIKTDTPVAKKAREGVMEFLLMNHPLDCPICDQGGECDLQDQSMAFGSDRGRFTEVKRSVVDKNLGPLVKTVMTRCIQCTRCVRFATEVAGVQDLGMLGRGSGEEIGTYVEKLLTSELSGNVIDICPVGALTSKPFAFKARNWELKGTETIDVTDAVGSNIRIDSRGPEVMRIVPRLNEEINEEWISDKTRFCYDGLKRQRLNDPMIRGSDGRFKPVNWRDALAVVAEIAHQVKPEEIVGIAGKLSDAESMIALKDFINRMGSNDVWGEGIGVDTNADFRSGYIMNTTIPGLEKTKLLAXLANFLMLGPSLDYARIQMAGGQMMYEVGYIGPATDFNYDQEHLGTGPQTLLEIAEGLHPFFKTLSNAKNPVIIVGAGVFERKDQDAIFAAVETIAQKANVVRPDWNGLNVLLLHAAQAAALDLGLVPQSEKSLESAKFVYLMGADDVNLDKIPDDAFVVYQGHHGDKSVYRANFILPAAAFSEKEGTYENTDGCTQQTLPAVPTVGDSRDDWKIIRALSEVAGVPLPYDTIGAVRARISTVAPNLVNMDEREPATLPSSLRPTFSEKVDTTPFGTVVENFYMTDAITRASKIMAQCSAMLLK

SEQ ID NO: 223398 - protein, 64 aa, Glycine max
  Clone ID: PAT_MRT3847_4375C.1.pep
GLKGCLWGSRYPKCYWMATASVSKINPQIMCHSSSRRFHSLTFCGGGLFFPPEIGGSPFLSLTF

SEQ ID NO: 223399 - protein, 68 aa, Glycine max
  Clone ID: PAT_MRT3847_43760C.1.pep
IFGSILSCLIGGLLDLFLIICMGNFVINYLTIMKSYANNNDVKVNYFIILKKKKNLFKGLMVNWLLNI

SEQ ID NO: 223400 - protein, 187 aa, Glycine max
  Clone ID: PAT_MRT3847_43761C.1.pep
RDAFRLLDEMAFHGAFPDSLTYNMIFECLVKNKKARETERFFAEMVKNEWPPTGSNCAAAIAMLFDCDDPEAAHEIWSYVVENRVKPLDESANALLIGLCNMSRFTEVKRFAEDILDRRINIYQSTMSILKDAFYKEGRSARDRYDSLYRRWKAHVQLYPKTNLHFFVLKFLAVQPLLPKTGRQACL

SEQ ID NO: 223401 - protein, 298 aa, Glycine max
  Clone ID: PAT_MRT3847_43762C.1.pep
RAESARGKKKKHVREPPSVPFIWEVKPGIPKKDWKPEAEIPITPLKLIASVPFVWEEKPGKPLPNFSVDHPVPSKPLLIHVASSSGFSVACNFGHDDKEKGSLSLSSSDNESITTLDLEAFSFDEDESFISSVPSLLANCLVPSAKVPTAIPLRETTPSSPTSSETDSGTIRHATGLSSPIGATFLECLFPLYPPKSCFLESDENLEKVTSSAQELRKKELDLEDCAGDSVRRPPTLGELIMMSRRRSCRRKAVQMKKWDPPKKITRKQAFGCFSVVTDNNMIEGLLKRKYFPRLKLV

SEQ ID NO: 223402 - protein, 77 aa, Glycine max
  Clone ID: PAT_MRT3847_43763C.1.pep
GLPLTILLNTYQTTSYECLTPRTQERADFDGLKLGEKRLILNSPSIILWIDAICITIVLGEKARRNLWIHHKFANVV

SEQ ID NO: 223403 - protein, 156 aa, Glycine max
  Clone ID: PAT_MRT3847_43764C.1.pep
ATSHSCDANQPIAASNSGDPNQGRYPLEIKYYAFPKFQYDSTEKAMENCWIFVKCDWTNLLRVEFLFQPPIWRVELLEDHPLRSDKFLYQQHHVTFEKMETFQEFHAKSSCGCSGFVDHFCVLFCIRQSCEWKTRHVKFDFVFCLCFHVSVSVKAD

SEQ ID NO: 223404 - protein, 79 aa, Glycine max
  Clone ID: PAT_MRT3847_43765C.1.pep
TFTRTNLADRVRRMTISVMNVNDVVIMLEGGSVFFSRIHTRMPILVCVGVEINVNVKLSTCSHGYQLQRKLSKCRYSIN

SEQ ID NO: 223405 - protein, 153 aa, Glycine max
  Clone ID: PAT_MRT3847_43766C.1.pep
VNPFDGQEAKPYKNDPEILVMTNLIAAYQRNEILEFEKILKSNRRTIMDDPFIRNYIEDLLKNIRTQVLLKLIKPYTRIRIPFISKELNVPEHDVEQLLVSLILDNRIQGHIDQVNRLLERADRSKGMKKYTAVDKWNTQLKSLYQTINNRVC

SEQ ID NO: 223406 - protein, 57 aa, Glycine max
  Clone ID: PAT_MRT3847_43767C.1.pep
SNVRVYRRVVLSSWFLIQIEGNPSYLSLSLYSLSFSEFELGSTGSIFVFILEWPSRD

SEQ ID NO: 223407 - protein, 44 aa, Glycine max
  Clone ID: PAT_MRT3847_43768C.1.pep
LILYLIGNENRVCFRSENFRLSFSMLYKLGLGIKCNILWNNISH

SEQ ID NO: 223408 - protein, 37 aa, Glycine max
  Clone ID: PAT_MRT3847_43769C.1.pep
SSIHPITDHDRLCLYGLDWGCRVSAFHPDLYVSLYEG

SEQ ID NO: 223409 - protein, 56 aa, Glycine max
  unsure (1)..(56): unsure at all Xaa locations
  Clone ID: PAT_MRT3847_4376C.1.pep
XXPXXKFXAXCHAKPTLETHLFFNHEXSGXXSSXXSTAFXXIXIHSGXXFPKXXXF

SEQ ID NO: 223410 - protein, 193 aa, Glycine max
  Clone ID: PAT_MRT3847_43770C.1.pep
MFAEENGLKGDPRLQAISQAIRVVPHFPIHGIMFQDITTLLLDHKAFKDTVDIFVDRYRDTHISVVAGIEARGFMFGPSIALGIGAKFVPLRKPRKLPGEVISEKYALEYGTDCLELHVGAVQPGERAIIIDDLVATGGTMSAGVKLLERVGAEVVECACVIGVPDVKGQCRRIGKPLYVLVEPRKADKCYPD

SEQ ID NO: 223411 - protein, 198 aa, Glycine max
  Clone ID: PAT_MRT3847_43771C.1.pep
MFAEENGLKGDPRLQAISQAIRVVPHFPKHGIMFQDITTLLLDHKAFKDTVDIFVDRYRDMHISVVAGIEARGFMFGPSIALGIGAKFVPLRKPRKLPGEVISEKYALEYGTDCLELHVGAAQPGERAIIIDDLVATGGTLSAGVKLLERVGAEVVECACVIGVPDVKGQCRSIGKPLYVLVEPRKADKCQAQADKCY

SEQ ID NO: 223412 - protein, 154 aa, Glycine max
  Clone ID: PAT_MRT3847_43772C.1.pep
SARARPSLTIIEENLSDRIIQSAICDSIMEIEESTPIKNSLELKDEEKSKSTRSISVEQKLGWPLLRRANSGMSQTLLHTRDMSVVQWVMTLPDRSPHNKSSSSSSTEENPFERRSISDIEYESSTNSSPASVDIIPNGLEEILNLNSLDCKRF

SEQ ID NO: 223413 - protein, 58 aa, Glycine max
  Clone ID: PAT_MRT3847_43773C.1.pep
KLSELLVSTGRTVRYLDTTASPIGPLHMNMMPISPRGLKNYDLGGVGLGIVVAIDQFN

SEQ ID NO: 223414 - protein, 39 aa, Glycine max
  Clone ID: PAT_MRT3847_43774C.1.pep
HCPSSTAYALEHSLKDLWLSPLSIPSNYLDSTTECSSTV

SEQ ID NO: 223415 - protein, 67 aa, Glycine max
  unsure (1)..(67): unsure at all Xaa locations
  Clone ID: PAT_MRT3847_43775C.1.pep
PPPVPLSVVITVLFPFLFAFTLGGSSPVCCPLRPLCRPFAFWGPPCHRGCSPLCCLFCXLIIYPXAS

SEQ ID NO: 223416 - protein, 60 aa, Glycine max
  Clone ID: PAT_MRT3847_43776C.1.pep
VTLITYAAYSEPVSAIMSQPSFMERPCAINVWCVPCAPISNCKSVRHALGLTRYLDLCLI

SEQ ID NO: 223417 - protein, 168 aa, Glycine max
  Clone ID: PAT_MRT3847_43777C.1.pep
LSRSIWYWNLIGLIPYQVPIRLALSQCYHPIWTNTEKKEIREIKKLIENKIRTFTASPTEFTVAANRMCLDFNNLFYSAGKTCSFVGKTKFFQGWHNLYLRLAKHPRGFEFDAGSFDASVFRDALIDQMEFRWESYPSYLQTPENRRRLTHIYGEIINSAIILEGELV

SEQ ID NO: 223418 - protein, 58 aa, Glycine max
  Clone ID: PAT_MRT3847_43778C.1.pep
QSLLFFVRGLANLQGATLRAKDIAEAALYLASDESKYVSGHNLVVDGGVTSSRNCIGL

SEQ ID NO: 223419 - protein, 65 aa, Glycine max
  Clone ID: PAT_MRT3847_43779C.1.pep
VSSFCSPSALFFSFQFVLRASRCALLVPGPAARGLSVPSVFVLVWPGGQLFGAPPVLLGLPGCGT

SEQ ID NO: 223420 - protein, 60 aa, Glycine max
  unsure (1)..(60): unsure at all Xaa locations
  Clone ID: PAT_MRT3847_4377C.1.pep
SPAEGLXMVVVGGRGRGKRGRRFXPCTPINKKSPQIVFLLQRAYCSLRLRFIRKRGRTRG

SEQ ID NO: 223421 - protein, 66 aa, Glycine max
  Clone ID: PAT_MRT3847_43780C.1.pep
PTHTIKNLFFLILHYVSSGHIFTELRSSQKYHTLLHLSHTHADRLTITNTNNHLHNKSALESYNLA

SEQ ID NO: 223422 - protein, 53 aa, Glycine max
  Clone ID: PAT_MRT3847_43781C.1.pep
NCKHLVSQYISQINVIYLGVPGKEPIELSFQQANPWFGSNFSASSFSVVRWVT

SEQ ID NO: 223423 - protein, 69 aa, Glycine max
  Clone ID: PAT_MRT3847_43782C.1.pep
PNAEAAEIGLRNMILTIPLLPYGLLVHRMRPSLDLKHGRFSSHSMRHVQTSDMSKWLRSHYELSLLLCT

SEQ ID NO: 223424 - protein, 70 aa, Glycine max
  Clone ID: PAT_MRT3847_43783C.1.pep
TRPRTRGFKTLCVTIYFSCIIKLEIKEQIVWKQIYHRGGRRMCYNDIYIYIMSYRKHTFKSTNTSADYSL

SEQ ID NO: 223425 - protein, 80 aa, Glycine max
  unsure (1)..(80): unsure at all Xaa locations
  Clone ID: PAT_MRT3847_43784C.1.pep
LDWKISIIYGIAGGLLYLHEDSWLRVNHRDLKASNVLLDHEMSPKISDFGLARAFXMEKDQANTKQLMGTFGYMAPEYAM

SEQ ID NO: 223426 - protein, 105 aa, Glycine max
  unsure (1)..(105): unsure at all Xaa locations
  Clone ID: PAT_MRT3847_43785C.1.pep
IDDSGSKTNDTQVKLWXIMPLRLGRADKKIFIARAKSYHGTTLIAFRRYGLTALHQKVDLTASFVLRTDCAHYWRHDFPGETVEEVATRLGYNVEQVILKEGPET

SEQ ID NO: 223427 - protein, 45 aa, Glycine max
  Clone ID: PAT_MRT3847_43786C.1.pep
PRVRPRVRPRVRTAARRRQKGTAARRRQKGTAARRRQKGSLYFFS

SEQ ID NO: 223428 - protein, 68 aa, Glycine max
  Clone ID: PAT_MRT3847_43787C.1.pep
KGSCVLPPKPFMEFTALSNASQLGSINPRRTNLQSLTQTLLLFLSFFPFFLSQRLLLHSHSQHPHAHL

SEQ ID NO: 223429 - protein, 67 aa, Glycine max
  Clone ID: PAT_MRT3847_43788C.1.pep
PVICQVNTYCSRFEVTGNLYFVGHLALILSSHDCFLSKEKLALSRTSTFLAFSCMSSAIGTLLMLFA

SEQ ID NO: 223430 - protein, 212 aa, Glycine max
  Clone ID: PAT_MRT3847_43789C.1.pep
KKKGQSEATLQKKKETTPIECKEVPYPLVPSRKDKERHLTRFLDIFKKLKITLPFEEALQQIPLYANFLKDMLTKKNRYIHSDKIVVEGNCSVVIQRILPPKHKAPGVVMIPCSIGEVVVGKTLIDLGASINLMPLSMSRRIGEIEIMSTCMTLQLVDCSITRPYGVIEDVLVKVKHLIFSADFIVIDIEEDADIPLILGCPFMSTVSCRWT

SEQ ID NO: 223431 - protein, 76 aa, Glycine max
  unsure (1)..(76): unsure at all Xaa locations
  Clone ID: PAT_MRT3847_4378C.1.pep
PLGNFLGFPPFLPFSSRAASFPGLGWPFLVSHPVCLFAYVSLVSRLTSTLSFFPFFFFLXXFSFFFFFLKTIIYTV

SEQ ID NO: 223432 - protein, 382 aa, Glycine max
  unsure (1)..(382): unsure at all Xaa locations
  Clone ID: PAT_MRT3847_43790C.1.pep
KFCRNEGIARQLTVRNTPQQNGVAKQMNRTLLERTRCLLSNAGLNRSFWGKAINTTCFLINRTPSTAIGLKTPIEIWNGKTVNYSNLRVFGCNTYYHVNEGKLAPKSXKGMFMGYGDGVKGYRIWSPSERKVLLSRDVIFDESHLLHPKIEVPIVGTQSCHSPLEKDVESTTKDSEKGVHIDTSPVPQEGEQSEDSNANEAHQNAEPEPAQLNPGISQRPKRVSKPLERYGFEDMAAYALHAAEEIDSNEPATYKKAINHPEAENWFXAMKEEMESLYKNQTXKLVEPPKGRHVVGCKWIFKRKPSLSEKEEIRYKARLVAKGFSQKEGIDFNEIFSPVIRHTSIRVLLAIVANQDLELEQLDVKTTFLHGRLEENIRMKQT

SEQ ID NO: 223433 - protein, 345 aa, Glycine max
  Clone ID: PAT_MRT3847_43791C.1.pep
MKPQTNGMSRAHKANNNTQFEGPNWLIFAAGALLSTLSIRLGYKLKQAVDSKPKQNATTAHRGNGKSTHTKNSTDCFMQSNGYSQTQDNHGCFSCISGTGGTMELKCPPNGQMQMLNEFDGALPLVTVPAVAEFSKENGVVWACSPDRLELPSKPFHHSNCSDSPCVSESGSDIFSKREVIQKLRQQLKRRDDMILEMQDQMAELQNSLNAQMGLSSHLQLQLDATNSDLFDSEREIQRLRKAIADHCVGFVHHDKSSKVTVFPAEIRNDLSNGHLDGENNCESPEKLRDEEERIELLKRQVGELKEVIEGKEYLLQNYKEQKAELSLKIRELQQRLDSQLPNIL

SEQ ID NO: 223434 - protein, 101 aa, Glycine max
  unsure (1)..(101): unsure at all Xaa locations
  Clone ID: PAT_MRT3847_43792C.1.pep
ARDHKFIQFPLIDKVAALAINGAAEITTGHVPLNALQXLLRVNLIMDTLXGALALAAEPPTQRLMRRLRLXPREPMITHIMWRNXIIPAVYEKAILLALNL

SEQ ID NO: 223435 - protein, 293 aa, Glycine max
  Clone ID: PAT_MRT3847_43793C.1.pep
MSIAGLIDPEMNHNKSFHRRNDSGELDVFEAARYFSGYSEVVGYTSGSTTYTQKIMREERHHHGQRAARISLDMPMRSLLPQQFHGMEKQIIMKEKKNKQPSSPGGRLASFLNSLFSQSASKKKKSKSGSQSMKDEDESPGGRRRRRSSISHFRSSSTADSKSLYSSLSSEFRTPPYVQTPTKSCKEFRTFSSEKKHALSFSAKYNNNNGQQIRSSTTTTLQNELLWDEKKKREPNNNHNNNHVDDGAESDSSSDLFELQNYDLGYYSSGLPVYETTNMDSIKRGAPISNGPL

SEQ ID NO: 223436 - protein, 141 aa, Glycine max
  unsure (1)..(141): unsure at all Xaa locations
  Clone ID: PAT_MRT3847_43794C.1.pep
SRPKRPVRFESIQSTILFNEEHHFXSEGYAGAFKTYPHQAGTIRKNGYIVIECLSXLELEFYTFMTLRHGHAXIINFVMIXIFTAKKLDDIVPYFHNYDVPHVNRTDYQLIDIAEDGFLSLLTENGNTKDDLKLSTDESLL

SEQ ID NO: 223437 - protein, 131 aa, Glycine max
  unsure (1)..(131): unsure at all Xaa locations
  Clone ID: PAT_MRT3847_43795C.1.pep
FVPIGRWAMESVNDLIQEAKLRTLWWALCIFVVSYFLTHTSKSMWMNVPMSILFVVGLRILFNRVEFRWKVPQPRLQTYLSHLEKKQXSLNDPRLTSLPSPAKWKKKIDSPAVEAAMSDFIDKILKDFVVD

SEQ ID NO: 223438 - protein, 63 aa, Glycine max
  Clone ID: PAT_MRT3847_43796C.1.pep
QSSKHTVILDLGSASCITQSVMQFLYKLPSYQIPYNIPHYKIFLRVPVAIPPRYPPYLATRIP

SEQ ID NO: 223439 - protein, 110 aa, Glycine max
  Clone ID: PAT_MRT3847_43797C.1.pep
GGQTPLFFQGTQRPWKKTPGQDKTPLFYFFPKVVQNMGGPGTVLLVSPMVANKNDGPGGPWSANPFLPFFTPWGLTGVPYFWNEIFLSFLPPKKGAFLPWGGPPFCPFFF

SEQ ID NO: 223440 - protein, 52 aa, Glycine max
  unsure (1)..(52): unsure at all Xaa locations
  Clone ID: PAT_MRT3847_43798C.1.pep
VLRXXRPILEIEYVHSLTSVYREWWVFNIYLPIAREMLNQLLGKKKKKSSIQ

SEQ ID NO: 223441 - protein, 235 aa, Glycine max
  Clone ID: PAT_MRT3847_43799C.1.pep
MELNASYDVEHSHSTQRIQHELWPLDPIDPKKAKFPCCLVWNPLPVVSWLAPFIGHVGICREDGVVLDFSGSYLVNVDDFAFGPVARYLQLDRRQCCFPPNLSAHTCKHGYLHAEYGTAIAWDDALQTSLRYFENKTHNLFTCNCHSFVANCLNRLCYGGSMNWNMVNVGALVIFKGHWVDFRSIVRSFLPFVVVVCLGVFMVGWPFLLGLLSFSLLLIGWFLLGTCLFRNLLEC

SEQ ID NO: 223442 - protein, 62 aa, Glycine max
  unsure (1)..(62): unsure at all Xaa locations
  Clone ID: PAT_MRT3847_4379C.1.pep
ACHAYDMXPLRVNMAMVPVLPEVKCXSWXXAVEAHXIFXLRPXPXECVDXTQEYIHGDHDHI

SEQ ID NO: 223443 - protein, 192 aa, Glycine max
  Clone ID: PAT_MRT3847_437C.1.pep
MLASSSAWKVLTRNNRRCNSGAEPWRLRRCSSSSHPFRPRPPRLFGDSLSPSAAVPQHPPRSTSATASTPPRPSASSCGMVGGRARRRPQSPEPETSPPPPPEPETSPPPPPEPPAPARAESANRNKTRTRRKTSSRFFFFFFFLKRKRKMKRKRRKENGGIIGNCCYREVPCLKGMKSIVILKLMRKIDVG

SEQ ID NO: 223444 - protein, 47 aa, Glycine max
  Clone ID: PAT_MRT3847_43800C.1.pep
ANHFLFSWMYQRANLMTCWLTLIMMLRLLKSVVSTGLAFKSPRPNCL

SEQ ID NO: 223445 - protein, 63 aa, Glycine max
  Clone ID: PAT_MRT3847_43801C.1.pep
SKQKWPLQGWHLEDLKLGTLTGEKFSVRCLHLISRNCSSFKDVATGSTMIKTDLPYWINIGMS

SEQ ID NO: 223446 - protein, 59 aa, Glycine max
  Clone ID: PAT_MRT3847_43802C.1.pep
LSHAIVPPSTRVVGILSRVHRAGDSAFSPLNSVSNDLRPSSTVLVRRRRLSSSIVTTTY

SEQ ID NO: 223447 - protein, 92 aa, Glycine max
  unsure (1)..(92): unsure at all Xaa locations
  Clone ID: PAT_MRT3847_43803C.1.pep
SSIKDWTSRITNYFFRTQRPGVDIPTNHEPFAAPKGYNAPQQVHITHGDYYXKSTIFSYLTPDEPMTRHVQYSTSKDKFQTIAESTTANYTF

SEQ ID NO: 223448 - protein, 69 aa, Glycine max
  unsure (1)..(69): unsure at all Xaa locations
  Clone ID: PAT_MRT3847_43804C.1.pep
INTMREGFTKMGCVDQCMYNGSNITLLIYYQLWLLNLINSELTYGHELLKLFDTXIVCSLATLHSLLHH

SEQ ID NO: 223449 - protein, 55 aa, Glycine max
  Clone ID: PAT_MRT3847_43805C.1.pep
ENIFYFNFMFLQIITKCYFCFHGFLYKSSKNDKWHFAIIYEKLKIENVFSSQIIP

SEQ ID NO: 223450 - protein, 113 aa, Glycine max
  Clone ID: PAT_MRT3847_43806C.1.pep
TRISVLDFQDAEPDILAHSSSEILERFNQFCDDEIKALCKKKGLYGEGAYLVGAGSLGVDVRVLSCAEVIRGSFPFKVQAANANAAEKQIWQLLFPRSRRKKNMKKWWSASMI

SEQ ID NO: 223451 - protein, 67 aa, Glycine max
  Clone ID: PAT_MRT3847_43807C.1.pep
TRAESARGQMSILIYTCLKFIPLHLAWNRKNPHDQSYKAEIMRDCETLTRIASVHPKKRKQVSSFSF

SEQ ID NO: 223452 - protein, 64 aa, Glycine max
  unsure (1)..(64): unsure at all Xaa locations
  Clone ID: PAT_MRT3847_43808C.1.pep
QKVSSDLSASIGKEMAETGITDIPSSTVSNYDQSLDGTDIITTVAPRYXSTSCEIEVDTYFYMA

SEQ ID NO: 223453 - protein, 263 aa, Glycine max
  unsure (1)..(263): unsure at all Xaa locations
  Clone ID: PAT_MRT3847_43809C.1.pep
MELMRTVYPTTAVPLPLSNLPVRTNFAVRCSNVHSQPQLDSRKLQLVLAVKEKLEKEHHSLPVGRNGRDDEDMILWFLKDRKFSVDDAIYKLTKAIKWRQDFEVSKLTEEVVKDALQTGKGYVHDFLDINGQPVLVVVGSKHIPQALDPADDERLCVFLIEKALSKFPTGKEQILTIVDLRGFSTENADLKFLTFLFDIFYYYYPKRLAQVLFVDAPFVFKPIWQLVKPMLKSYAXSLVRFCSAETVRKEYFTDETLPPSFRD

SEQ ID NO: 223454 - protein, 62 aa, Glycine max
  Clone ID: PAT_MRT3847_4380C.1.pep
GGERNVFSFMYQTLFPTESWVCFPRVPLIKVVSKPGIEFRLGVRISPSTGFNIWFFINTPFA

SEQ ID NO: 223455 - protein, 250 aa, Glycine max
  unsure (1)..(250): unsure at all Xaa locations
  Clone ID: PAT_MRT3847_43810C.1.pep
MVLMRTVYPTIAVPLPLPLSNLPVRTNFAVRCANVHSQTQLDSRKLVLAVKEKLEKEHHNLPVGRNGRDDEDMILWFLKDRKFSIDDATGKXRRVPRNGVKIXEVSKLTEEVVKDALQTGKGYVHDFLDINGQPVLVVVGSKHIPQALDPADDERLCVFLIEKALSKFPTGKEQILTIVDLRGFSTENADLKFLTFLFDIFYYYYPKRLAQVLFVDAPFVFKPIWQLVKPMLKSYASLVSVAHLNVHLLI

SEQ ID NO: 223456 - protein, 403 aa, Glycine max
  Clone ID: PAT_MRT3847_43811C.1.pep
GGGMWNTNVALDVIRKDDVSAAIFAPGWVYETKQAPDFETAQNRWWSLVEKSWGIVRKYLGTLPFYTNFDQGRGYHISVDGDQVSDATWCNISSQGVQPLLEFADSTANSIQPLVDLKEASYSGGGNITFKGSLEKDNYLKRRIFQGEFTLSELPIHFFYSVKSDSNSSLGLVLEFTSTINKAMSILLTSHGMDHLSSGFSKVVPTSEHKGNAPGWVIHEGTIEMNGYILTGIHALCYRPNAPFKELKSRPFGPDYTVPSSTDYSAVLGHITVKTSNYKPDFPVSTSWLVDGEYINWKSGPQDSRILSVKISWELKEGKNFAFPHYNVYVEKIPKLAGGNSGTTIEHVQEYLGVAHVNCFYVSELKVPASISNLKFIIQVCSFDGTNQNLEDCPYYQLEIKGL

SEQ ID NO: 223457 - protein, 175 aa, Glycine max
  Clone ID: PAT_MRT3847_43812C.1.pep
MKHCISKHFLSCFALFLLLVATTYATVVPTTTQKPPRSFANQFLIPQNAARAVLRLRPLVWDSKLAHYAQWYANQRRNDCALEHSNGPYGENIFWGSGTGWKPAQAVSAWVEERQWYNYWHNSCANGQMCGHYTQIVWSTTRKIGCASVVCSGGKGTFMTCNYDPPGNYYGERPY

SEQ ID NO: 223458 - protein, 35 aa, Glycine max
  Clone ID: PAT_MRT3847_43813C.1.pep
LVKVIKIFVGFTLSKISQRICFCSLRCLLRNNNPF

SEQ ID NO: 223459 - protein, 128 aa, Glycine max
  unsure (1)..(128): unsure at all Xaa locations
  Clone ID: PAT_MRT3847_43814C.1.pep
GAXCVDGSGAIIKRRQVTLATSSPASSIEDHLKYGDYVNKMSAQTLYQSNSMQKSIPDSSYEAGLELAIQSSGIANQESAITSAKECLKTTRRMGPSPTLNAASLALSLSKVVPYRAQIEWYKTWCEK

SEQ ID NO: 223460 - protein, 160 aa, Glycine max
  Clone ID: PAT_MRT3847_43815C.1.pep
EEKIKTLEGMIKSKETALEMSTSSFLEKEKELQSKIEELEDKVEEFNQSIALQKVVEDTNTITSNGVAVSLFKSDVHLSEKEAEISTIDSNGGGNLCDTLAELSLLKERNNSMETELKELQQRYSEMSLRFAEVEGERQKLVMTVRNLKNARKAQMTTSS

SEQ ID NO: 223461 - protein, 100 aa, Glycine max
  Clone ID: PAT_MRT3847_43816C.1.pep
PSQSGPAWPAQEKKSRRGTAPLRTLKGAPRRDKSRLPPPAHKCRPPNLCLKSHLPQVCSRITPAQHGVSNVPVADSARKTAPPGITKFGLKDLLPPPPRK

SEQ ID NO: 223462 - protein, 71 aa, Glycine max
  Clone ID: PAT_MRT3847_43817C.1.pep
SLICPRTGCWYTRLTGCYLALGTLPCGGTLGSAFSFAYYLCYGPALAAGNLSISFTHASKTRLRYVTFRSV

SEQ ID NO: 223463 - protein, 127 aa, Glycine max
  unsure (1)..(127): unsure at all Xaa locations
  Clone ID: PAT_MRT3847_43818C.1.pep
DFLHGVSYPHPCDGTVRDSWAHQTPEVRKGRSMMEDLPPSSVSLRSPWYCPHRVKYSGPFSGEPSFYLTGEFPGDYGXDTAGLSADPETYVXNRELQVIHSRWVMLGDLSCVFPELMTPSGVNFGEA

SEQ ID NO: 223464 - protein, 58 aa, Glycine max
  Clone ID: PAT_MRT3847_43819C.1.pep
DLTITLPLVLLLLPSHFVHRLHVMYDKHIQTFTQQEVEVRIKHTYYFHKPISISQVIK

SEQ ID NO: 223465 - protein, 221 aa, Glycine max
  Clone ID: PAT_MRT3847_4381C.1.pep
ETPSPTHVKRVSDVIFSDLESNYTDTDEFDDSQIESVPVMEQVESVPVMERAVRPGKKGSCYRCLKGNRLTPKEVCIVCSAKYCRSCVVRAMGSMPEGRKCVTCIGYRIYERNRSKLGKCSRMMKLLLSELTVTQVMDDERSCEANQIPPELVCVNLQPLNREQLKLLLNCRNPPKQLKPGSYWYDKTPVDWGGNGKVKPPIHLHEKTQAGRLPKMQEWKH

SEQ ID NO: 223466 - protein, 114 aa, Glycine max
  unsure (1)..(114): unsure at all Xaa locations
  Clone ID: PAT_MRT3847_43820C.1.pep
AGYHRSEPFILKDPESPSAPKAVSAXTSAREXLIRQGIYIVGLRGDQWRDLRAGHRGYSRPCWRRHPSXPPSSSFPFRRSELDPYCSXVIRCVRIGALASLSVVXSAVSQQVLS

SEQ ID NO: 223467 - protein, 46 aa, Glycine max
  Clone ID: PAT_MRT3847_43821C.1.pep
MGCCVSTSSRSTCSSKSNGDMVSSSCLETGCCGQKRTRRTFSDHGI

SEQ ID NO: 223468 - protein, 164 aa, Glycine max
  unsure (1)..(164): unsure at all Xaa locations
  Clone ID: PAT_MRT3847_43822C.1.pep
HGRRCEKTTEGDSGQLSAIKEVRVVCDDQSSKECLKQLNQEIHLLSQLSHPNIVQYYGSDLGEETLSVYLEYVSGGSIHKLLQEYGAFKEPVIQNYTRQIVSGLSYLHGRNTVHRDIKGANILGDPNGEIKLADFGMAKHINSSYSMLSFIGSPYXVAPEVVMN

SEQ ID NO: 223469 - protein, 142 aa, Glycine max
  unsure (1)..(142): unsure at all Xaa locations
  Clone ID: PAT_MRT3847_43823C.1.pep
YSCEKTTEGGLPLCLQERKPSLTLALKLSRTFHHRLQRRTWTPPPSYNPVKXGGGKQNNKNWSKGKQKEKVNNMVLIDQGTYDKLLSETPKYKLITPSILSDRLRINGSLARNAIRELMARGSIMMVFAHASHQIHTRATNT

SEQ ID NO: 223470 - protein, 92 aa, Glycine max
  Clone ID: PAT_MRT3847_43824C.1.pep
MGMKGAPVCLSVDDNVVLKSPNDRRLYRLIHLPNGLRALLVHDPEIYPEGPPKHAPNEDEVEEEEEDDEEDGEYDDDDDDDEDEEEEEEGEE

SEQ ID NO: 223471 - protein, 105 aa, Glycine max
  Clone ID: PAT_MRT3847_43825C.1.pep
CCFHPPSACGIGLKRQCVPLLFCIRGVPSCMCRSPSSCLHLCRMCCSTAVLLKRICFELLGYDILRLPHGELHDNLRPPQALGIHTVHRLPHPAAASLAGTTVQP

SEQ ID NO: 223472 - protein, 94 aa, Glycine max
  Clone ID: PAT_MRT3847_43826C.1.pep
NPKVRFSMPAFPIRYLLTKRVSSRSISLGPWQHSHLAYLSTQIHIMTNQPCSVVPIKRRRYVKRCKSHAKHQCTAYIILRALWMDSQFNSRSLF

SEQ ID NO: 223473 - protein, 151 aa, Glycine max
  Clone ID: PAT_MRT3847_43827C.1.pep
GNMCRGGRMFAPKKTYRRWHRKVNVTQRRHATGAAIAGSGIPALIQARGHIIDQLAEVPLVVSDKIESYTKTKEAVAFMQRVNLWSDVEKVYKSKRTRAGKGKGRNRRYKQKIGPLVVYHNDGGIARAFRNIPGVTTLSVNRLNLLKLAPG

SEQ ID NO: 223474 - protein, 361 aa, Glycine max
  unsure (1)..(361): unsure at all Xaa locations
  Clone ID: PAT_MRT3847_43828C.1.pep
MGDIDPAFIQSTEHRPIAKVVEVREIPVIDLSEGRKELLISEIGKACEEWGFFQVINHGVPFEISREVEIVSKKFFETSLEEKKKVKRDEFNAMGYHDGEHTKNVRDWKEVFDYLVENTAQVPSSHEPNDLDLRTLTNQWPXQNSPHFRETLQEYAREVEKLAYKLLELISQSLGLAADKFHGCFKNQLNMVRLNYYPASPFPNLAQIGWFRFCIQIIITXLSSSXVLKPKLNRIINRSLIEVKPXPNAFIINKREKKKLRRFDSVXNNEHRVVVNTEKERFSIPFFFFPAHHVMVKPAEELVNEQNPARYREYKYGKFFANRNRSDFKKRDVENIQIHHFRILDEAFGLASSISSISEHN

SEQ ID NO: 223475 - protein, 118 aa, Glycine max
  unsure (1)..(118): unsure at all Xaa locations
  Clone ID: PAT_MRT3847_43829C.1.pep
DFYDVSKVDXFNFPISLPRKGGIVDCMAQVCAKTLTLCXPADLHVIRSDGNVITCNNACDACTGNRFCCTGPINTAQTCQPKIDSHIFQDHCPHADSYAYDDLSNTFRCFNKPEYTIT

SEQ ID NO: 223476 - protein, 125 aa, Glycine max
  unsure (1)..(125): unsure at all Xaa locations
  Clone ID: PAT_MRT3847_4382C.1.pep
LLVVPRAHPPVRTAARRRQILTPFLPITAHEREMPSXTIYCTNIDKKLTXVDVKHYFESIXGEDHRLRLLGDYHHSTRIAFVEYALAEGAIASLKXNGVTSGSLPIRVSPSMTPVRPCCTRAPMH

SEQ ID NO: 223477 - protein, 33 aa, Glycine max
  Clone ID: PAT_MRT3847_43830C.1.pep
IWQSPFTNHHQYLGAPKPHHRSSARQYHEPQLI

SEQ ID NO: 223478 - protein, 73 aa, Glycine max
  Clone ID: PAT_MRT3847_43831C.1.pep
TLSRLHISPTLHVRFSVLFESLSQSPVHTAFALAAQETPTRGPHDPRARARGTCEGPGASGARPTGEPGAGRG

SEQ ID NO: 223479 - protein, 130 aa, Glycine max
  Clone ID: PAT_MRT3847_43832C.1.pep
KVSCHHCMTSSFCLSDNDLPQPNDRRVYVFIQVIGERRSSQASYMFMIYFMDMFMFVLLFYVFSMVIISSFVVVVALVVVLPVVFLFMIINVVIVHRHICSRVRNCVSMGVVCRCKCVKCVPLKNIMGVG

SEQ ID NO: 223480 - protein, 44 aa, Glycine max
  Clone ID: PAT_MRT3847_43833C.1.pep
PPERKTSVWIGGSFWAFLSPFHQMGIAKAEYDESGPPIGPKKCF

SEQ ID NO: 223481 - protein, 72 aa, Glycine max
  Clone ID: PAT_MRT3847_43834C.1.pep
KQDTNWKQGNILVIICKNKKGKQCFLKPNKPLVETKTVTTVIRDSGKRASLTANQPLFLPIATIAQVNLTGC

SEQ ID NO: 223482 - protein, 100 aa, Glycine max
  unsure (1)..(100): unsure at all Xaa locations
  Clone ID: PAT_MRT3847_43835C.1.pep
QNKPTRIAAFLYIPILLPTPLILIPKXLTTYYKPINNPPFYNPTLYKPPXYKPPFYNPKPPFYNPKPPLYNPPYINPPYKKPPYLKYPSLNDNTHSSKQL

SEQ ID NO: 223483 - protein, 31 aa, Glycine max
  Clone ID: PAT_MRT3847_43836C.1.pep
SFKNLIIREEILSFSYKVKIYPFNFYRSYFI

SEQ ID NO: 223484 - protein, 43 aa, Glycine max
  Clone ID: PAT_MRT3847_43837C.1.pep
ACSKVKRTRLRVVILHICPVRTRFYKGNKQQCVHLLNVRGTCI

SEQ ID NO: 223485 - protein, 125 aa, Glycine max
  unsure (1)..(125): unsure at all Xaa locations
  Clone ID: PAT_MRT3847_43838C.1.pep
LQVSALYSRFDPRFIVYKWCQGINKGLFIWDTSYAQXGVMLQTKFEKFFEKIDLTMLNRLLRLVLDHNIADYVTAKNNVVLSYKDMSHTNSYGLIRGLQFACFVVQYYGLVLDLLLLGLTRASEI

SEQ ID NO: 223486 - protein, 80 aa, Glycine max
  Clone ID: PAT_MRT3847_43839C.1.pep
CKKVFFDQEKQLGPIIYKGKVLPFGGASKVSHRIVRRKIPLISNIGKRANINFYFPHRGAVPSWGGKGGSVKCFFPGKGF

SEQ ID NO: 223487 - protein, 39 aa, Glycine max
  unsure (1)..(39): unsure at all Xaa locations
  Clone ID: PAT_MRT3847_4383C.1.pep
RNPLFMNCGHGCYKADCGMKLINDCTECXXGFSSFFNSL

SEQ ID NO: 223488 - protein, 59 aa, Glycine max
  Clone ID: PAT_MRT3847_43840C.1.pep
VTKQNFFSVLESLTQRNQKIPELRIIQIMEFFERPHSNWIMKIRHYLAWVDHCIKKPQK

SEQ ID NO: 223489 - protein, 52 aa, Glycine max
  Clone ID: PAT_MRT3847_43841C.1.pep
LSLKCFNTGSEMHYDELLNRRVSITTACWIHIPSIYLYRALVDYIEHMRIKF

SEQ ID NO: 223490 - protein, 43 aa, Glycine max
  Clone ID: PAT_MRT3847_43842C.1.pep
DSRDGFGKSFQKLDISDGAVVTVHGSLVFGKSLMIMCLKPLMK

SEQ ID NO: 223491 - protein, 115 aa, Glycine max
  unsure (1)..(115): unsure at all Xaa locations
  Clone ID: PAT_MRT3847_43843C.1.pep
MMSVVGFFIARILVTWQCKAXDMFSLRMNTVXCARNPEVKCXASWKLAVETHNIFGFETIPEECVKVTNEYIYRKQXRSDSKTVNQQAYFYARDLEVHPKDILCVSIDGHVLSNT

SEQ ID NO: 223492 - protein, 377 aa, Glycine max
  Clone ID: PAT_MRT3847_43844C.1.pep
MADGEDIQPLVCDNGTGMVKAGFAGDDAPRAVFPSIVGRPRHTGVMVGMGQKDAYVGDEAQSKRGILTLKYPIEHGIVSNWDDMEKIWHHTFYNELRVAPEEHPVLLTEAPLNPKANREKMTQIMFETFNTPAMYVAIQAVLSLYASGRTTGIVLDSGDGVSHTVPIYEGYALPHAILRLDLAGRDLTDALMKILTERGYSFTTTAEREIVRDVKEKLAYIALDYEQELETSKTSSAVEKSYELPDGQVITIGAERFRCPEVLFQPSMIGMEASGIHETTYNSIMKCDVDIRKDLYGNIVLSGGSTMFPGIADRMSKEISALAPSSMKIKVVAPPERKYSVWIGGSILASLSTFQQMWIAKAEYDEAGPSIVHRKCF

SEQ ID NO: 223493 - protein, 48 aa, Glycine max
  Clone ID: PAT_MRT3847_43845C.1.pep
CITASFQVDSVSEQSLLSQVVPVFQHMNCKICKTFILCDAGWFTYGAH

SEQ ID NO: 223494 - protein, 84 aa, Glycine max
  Clone ID: PAT_MRT3847_43846C.1.pep
GCREVGILIKSVDISIGEVTVNLNEGLLVKKKSSVESSSGSEKSVGSNVDSMSAKEPPKKREKIIGYISKFPQKVCKIKHTLFF

SEQ ID NO: 223495 - protein, 150 aa, Glycine max
  Clone ID: PAT_MRT3847_43847C.1.pep
HKLVQFGQIHEKVVLKFSHEEFLTAWSTHVPPASTVLADGCPYLYAMVHDSSMSTIPRDSVIGVGLATIDSMCAYGLNPGISGSLFLGTIPQSISQPTAWNLLDTVRTPLRFDPSKRSVCDFSIDLLGGGILWYWAGHCITLLLICPISN

SEQ ID NO: 223496 - protein, 178 aa, Glycine max
  Clone ID: PAT_MRT3847_43848C.1.pep
MVMAIDLSRISVRPFKASEDVDDVLLWLGDARVTQNTRLKTCGSRSEALTFLKDECVHPLRRSICLDDRSIGIVWVLPYSGDERYKADLGYALGFNCWGNGIATKAVKIVLSQVFHDFPHLRRLQAYTYLRHKASQRVLEKVGFHREGIATDLYFPGKSDDCYIFRFLSTDEIPSVIV

SEQ ID NO: 223497 - protein, 45 aa, Glycine max
  Clone ID: PAT_MRT3847_43849C.1.pep
QGGKVNPCITMSHLINLNRHQHLLLTQYNALKPQTNPIPRSQTHS

SEQ ID NO: 223498 - protein, 65 aa, Glycine max
  Clone ID: PAT_MRT3847_4384C.1.pep
NGFFSLQFNLFWEGIRKVGIFNFGGLPFYFDQGVWILVWKRIGWNLVLTLNFFPFWWSFGTVTEV

SEQ ID NO: 223499 - protein, 106 aa, Glycine max
  Clone ID: PAT_MRT3847_43850C.1.pep
PGFPGRTTRPPTRPRTRRRMRQYGSKGHCKWEHKSLHPSPHTQDMCHATPAHSLCSCTAITIRIILSLSRASRSHIHLGIFSVKSQCLPWRCVFLWIALPTYLSGQ

SEQ ID NO: 223500 - protein, 52 aa, Glycine max
  Clone ID: PAT_MRT3847_43851C.1.pep
GAYRSDEASGTWPTKQTMHHQIIQVASNSLQRYQPTLINGIYISGIIKFNFT

SEQ ID NO: 223501 - protein, 96 aa, Glycine max
  unsure (1)..(96): unsure at all Xaa locations
  Clone ID: PAT_MRT3847_43852C.1.pep
AVXFXXVXXCXCXXAAXXCCXFXLXXXFLFSVXXXXSPPLWXXXFVLXFSXXXXPXXXXXLVXXCXLXWXXXXLFXXFPRXLLLXPXFGLNXXXXG

SEQ ID NO: 223502 - protein, 86 aa, Glycine max
  Clone ID: PAT_MRT3847_43853C.1.pep
MPSHQPAAGEAAVKPEFLSSQPSAMAKPSEPNRNPKYDPTKKHITEYPMTRQNWYKHVNWLNVFFIGGIPLMGCIAAFWTPLTFKT

SEQ ID NO: 223503 - protein, 138 aa, Glycine max
  Clone ID: PAT_MRT3847_43854C.1.pep
LSSLLILIPTHVPVPIHVHILVPFTVTTAAISGSMAFSRSALHGSSTNSAISSTVFKPRGCIVRASIRFSCGWRSVPATPYVPVSVVRHGVYGSSASELVPPPRDRGGGHHRPSGRSRTRLGDFVVAAPFEREYCVCF

SEQ ID NO: 223504 - protein, 44 aa, Glycine max
  Clone ID: PAT_MRT3847_43855C.1.pep
VQSLLGASALRPSDTTLYLRLDKLRWTCLWMQNLTDIPNLGRRA

SEQ ID NO: 223505 - protein, 70 aa, Glycine max
  Clone ID: PAT_MRT3847_43856C.1.pep
PHALGQKGESLLACIVLFVVNPLTDASLANVNLVSLSTAGGYIIPTARRFTSFYFEGGHVDMKKKLNCSS

SEQ ID NO: 223506 - protein, 295 aa, Glycine max
  Clone ID: PAT_MRT3847_43857C.1.pep
MDVRKRGRPDVNLNGAVKKTKQELESLSSGVGSKSKPCTKFFSTAGCPFGEGCHFLHYVPGGYNVVAHMMNLKPAAPPPRTVAAPPPIPNGSAPSAVKTRICNKFNTAEGCKFGDKCHFAHGEWELGKPIAPSIDDHHHHRPLGPPAGGRMAGRIEPPPAMAGSFGAISTAKISVEASLAGAIIGKGGVNSKQICRQTGAKLSIREHESDPNLRNIELEGTFEQIKEASNMVKDLLLTVSMSAPPKSTPGVPGAPAPPGSNFKTKLCENFAKGSCTFGERCHFAHGAAELRKSGV

SEQ ID NO: 223507 - protein, 45 aa, Glycine max
  Clone ID: PAT_MRT3847_43858C.1.pep
VYKVNTSSSSSILFSHPNYLFLHGNSHNPLSSLLYTGGVMLMCVK

SEQ ID NO: 223508 - protein, 180 aa, Glycine max
  Clone ID: PAT_MRT3847_43859C.1.pep
MYHTTHPMKSVAKSWTMMMPSPMQHIPLPSSLMNNISTHNSILCCDFNYVNLSNQRGTRLLCSARRQIRYQDDGDDKDSDEEYGHNEEIAKLESYSQSAKGEVLLVHALVDQEEVDVLIFKGFSSCLSYSTSPDPTRSILPARAVIVSIDRIKGPFNPANIEYLQKGVTWEEFKTNLLSN

SEQ ID NO: 223509 - protein, 108 aa, Glycine max
  Clone ID: PAT_MRT3847_4385C.1.pep
GPPPVLRAGPYVPPLSLGAGPVPPPFLPKKFGFRIWAKAVSLFFGPPWVFPFVFGLLFFRVVNKFGTRAGDLGVSPVCVFAVLNIAGKGVETKGRSLGGIKRALRGSA

SEQ ID NO: 223510 - protein, 40 aa, Glycine max
  Clone ID: PAT_MRT3847_43860C.1.pep
YMIIPLTGLPPKVASFAKCLTQTFLHALTPKCIFDLEYHG

SEQ ID NO: 223511 - protein, 47 aa, Glycine max
  Clone ID: PAT_MRT3847_43861C.1.pep
NQRRCKDEDRSQSIGPGPCIISAVWCQYCGVRTCERTRGSPREFRTG

SEQ ID NO: 223512 - protein, 97 aa, Glycine max
  Clone ID: PAT_MRT3847_43862C.1.pep
LSLGWSRRAKKGIIDRRTGVNTHDESQNSHVYPVPGTGLFCNCWGYTPDSPTSTTTEDPSTGATGTSHAISNGSFTTATTTTTTSSWRESSYINSKV

SEQ ID NO: 223513 - protein, 46 aa, Glycine max
  Clone ID: PAT_MRT3847_43863C.1.pep
MDTWRKDNRKMTMNRPSALALPSYKLVLVGLSITNGLVLYSRKKNI

SEQ ID NO: 223514 - protein, 69 aa, Glycine max
  Clone ID: PAT_MRT3847_43864C.1.pep
AIVGKPTQSRVWAITKPNYSTPSYLPDTPQVCSQIQPSQILNTPRIKINYQTAFTKTILPTCTVTVNII

SEQ ID NO: 223515 - protein, 51 aa, Glycine max
  Clone ID: PAT_MRT3847_43865C.1.pep
SAHQRPTCSSVAMDSLTIGVCLTFYFIVHFDNLFPISFQRVLSQRVSRFIC

SEQ ID NO: 223516 - protein, 62 aa, Glycine max
  Clone ID: PAT_MRT3847_43866C.1.pep
QAAFPLVWGGARSFILVGFLVACFLLPGSLETTKKSKVIIELCLYNTCWQKGRFDPTKLTRV

SEQ ID NO: 223517 - protein, 58 aa, Glycine max
  Clone ID: PAT_MRT3847_43867C.1.pep
DPDPKSVRWKLAFNVDKRKFCTQKQLIQSLGSDPCFLLYKYTPYCVKGISFLAQGRRS

SEQ ID NO: 223518 - protein, 60 aa, Glycine max
  Clone ID: PAT_MRT3847_43868C.1.pep
MCCLSLDVSNRKENVAIRLFNDIDRNYDPLQYEYLVKTNFPQFVFHQSGRGTGCECVDGC

SEQ ID NO: 223519 - protein, 75 aa, Glycine max
  Clone ID: PAT_MRT3847_43869C.1.pep
MAKQDISPISFVEGRRINMILPRMAINIALKYYREIGANEQLGSTYSYVFWRRVIGRASSCDHHDQCNAKRGCFS

SEQ ID NO: 223520 - protein, 97 aa, Glycine max
  Clone ID: PAT_MRT3847_4386C.1.pep
MGGVGKTTLAQHVYNDPRIEGKFDIKAWVCVSDDFDVLTVTRAILEAVIDSTDNSRGLEMVHRRLKENLIGKRFLLVLDDVWNEKREKWEAVLTPLN

SEQ ID NO: 223521 - protein, 261 aa, Glycine max
  Clone ID: PAT_MRT3847_43870C.1.pep
MHSHKEESDERKRRLQVVPVPVQKADFVRTLLIDNYDSYTYNIFQELSIINGVPPVVIQNDDWTWEELCHYLYKENAFDNIVISPGPGSPACPEDIGICLQLLLKCWDIPILGVCLGHQALGYVHGAQVVHASEPIHGRLSEVEHNGCQLFRDIPSGKNYGFKVVRYHSLVIDSESLPAELIPIAWTSSTSTLPFIGSKDFGKSNTHEAQPDQSISIDPLLAKVGNGSSNHFDYGKTRSARVLMGIRHSTRPHYGVHVSSA

SEQ ID NO: 223522 - protein, 112 aa, Glycine max
  Clone ID: PAT_MRT3847_43871C.1.pep
EVDRSENVGMEWDSVVLGREERDEAVVGSGEVDAPSLLEESVLDSRAQKEVGTEVSNVEDPSVVDVDVECTNAPDAEASDHEVNNALRCLLVGENVQVSSDTWHGVYKDLTI

SEQ ID NO: 223523 - protein, 110 aa, Glycine max
  unsure (1)..(110): unsure at all Xaa locations
  Clone ID: PAT_MRT3847_43872C.1.pep
MASSVSYVLLLPDLMIVAFAGELNXTLDITCGDXRTNILNHGXLRSLSVEIPSCPGFQTRNDXPCGKIDMPLKHVPGNTAGTVPADELTPKGSTWDHLDYELLGVLSGDL

SEQ ID NO: 223524 - protein, 44 aa, Glycine max
  Clone ID: PAT_MRT3847_43873C.1.pep
EAEADEPLPRRCVQPMDGGRHWVQDALSMKKITTTTLFCTVHHS

SEQ ID NO: 223525 - protein, 57 aa, Glycine max
  Clone ID: PAT_MRT3847_43874C.1.pep
HSCIEQMSNQARWAVLQSYNLLKWHRAAHRAAVKALESGDSLSVVIRSIEETMYFKK

SEQ ID NO: 223526 - protein, 80 aa, Glycine max
  unsure (1)..(80): unsure at all Xaa locations
  Clone ID: PAT_MRT3847_43875C.1.pep
YNFVVNFFHPYLQNGNIFPLYNDSYTTXCVSIVLLFCHSNFCNRNTFHVVYLQNKNMICCVSNSTHNKIMILLCFKKKNT

SEQ ID NO: 223527 - protein, 95 aa, Glycine max
  Clone ID: PAT_MRT3847_43876C.1.pep
ARPLDQSLIIMTLDITSAFRTQGVVLTKTQHMSKPYDDAFANAHYSTKSAPQRASTSYDSIQNPFEYTRLVPIATSSLYHRDIATHIASSIRDIQ

SEQ ID NO: 223528 - protein, 81 aa, Glycine max
  unsure (1)..(81): unsure at all Xaa locations
  Clone ID: PAT_MRT3847_43877C.1.pep
MLYLLVEQTDASTSDISEVFCRLPLPFISEEFKIDFTWKTWTIRXEQPSPYVHIRRNIYLVKKKRSDADDGAGCTSCSSTS

SEQ ID NO: 223529 - protein, 81 aa, Glycine max
  unsure (1)..(81): unsure at all Xaa locations
  Clone ID: PAT_MRT3847_43878C.1.pep
FKKLVGKFFPQMIGKGIXKAPFSLFPFQNVFLCKVKILKAPKFVFGKLMGVLGGFFXNVGAQVGSPPHETLGEEAPQVVGG

SEQ ID NO: 223530 - protein, 115 aa, Glycine max
  unsure (1)..(115): unsure at all Xaa locations
  Clone ID: PAT_MRT3847_43879C.1.pep
CSSYEDLIRPIGPMKRCAPLNVYKAKGLLLKTMNILYKEINSIWQDSIFTIYSYIQWPYYHMKDLLKVGLYCSKTNYLLLHXYFNRSYYYTDTCLFMIALMKMHADLLTLIKGKP

SEQ ID NO: 223531 - protein, 344 aa, Glycine max
  Clone ID: PAT_MRT3847_4387C.1.pep
NSARAARAARAARVYFLDFYNKGSCSCLREQGGLYLPQGLESLSNELRYLRWTHYPLESLPSKFSAENLVELNLPYSRVKKLWQAVPDLVNMRILILHSSTQLKELPDLSKATNLKVMDLRFCVGLTSVHPSVFSLKKLEKLYLGGCFSLRSLRSNIHLDSLRYLSLYGCMSLKYFSVTSKNMVRLNLELTSIKQLPSSIGLQSKLEKLRLAYTYIENLPTSIKHLTKLRHLDVRHCRELRTLPELPPSLETLDARGCVSLETVMFPSTAGEQLKENKKRVAFWNCLKLDEHSLKAIELNAQINMMKFAHQHCPHLVMPIKVPMCTREAKFQNGWCIRQYSVIT

SEQ ID NO: 223532 - protein, 35 aa, Glycine max
  Clone ID: PAT_MRT3847_43880C.1.pep
RSKINYSEDCSVQLIPFLAPPISKFITLVQHCPGL

SEQ ID NO: 223533 - protein, 67 aa, Glycine max
  unsure (1)..(67): unsure at all Xaa locations
  Clone ID: PAT_MRT3847_43881C.1.pep
TRNFKHMSNSSRAAPEDKASVWSRPHYVSRNNLEMHEAYLGNLVNVLREXDEHRPDEARQLTRTALS

SEQ ID NO: 223534 - protein, 73 aa, Glycine max
  Clone ID: PAT_MRT3847_43882C.1.pep
IRLIFGKTNHGDLRKYLSGFFDTTVGNKRETRSYVEISESLGVDKPSDILFVTDVYQEATAAKAAGMNIFPSP

SEQ ID NO: 223535 - protein, 47 aa, Glycine max
  Clone ID: PAT_MRT3847_43883C.1.pep
KKHQICTIEGNKIMVNQIVLSIYKETIEQTSNFFIYSSCLTLSAGRL

SEQ ID NO: 223536 - protein, 102 aa, Glycine max
  Clone ID: PAT_MRT3847_43884C.1.pep
RGGGRKHLRGVFLGKLGTQKVTGFFLVVFPGRVYEFFCGWVFWGGGAPHPGVRLFFPVVGGAVRGVSRGRISLFIRRGKLFFCKISRERVIFLFLKKRKKSF

SEQ ID NO: 223537 - protein, 47 aa, Glycine max
  Clone ID: PAT_MRT3847_43885C.1.pep
VKPAGLSRGRGIACFRNLVEIQDYVKGKESQWVVQKYMENPLIVHKR

SEQ ID NO: 223538 - protein, 82 aa, Glycine max
  Clone ID: PAT_MRT3847_43886C.1.pep
EYMHHKMNSSDQNKTKKRWWIGKIVKCGTFNKQMRGGKRPENEGYNMLKHQNINGLASPGLMGMLSPLRLFSPRHSPRRSFG

SEQ ID NO: 223539 - protein, 113 aa, Glycine max
  unsure (1)..(113): unsure at all Xaa locations
  Clone ID: PAT_MRT3847_43887C.1.pep
TAAXATPRSAAPSHXXXTXNRSXXXXXXXXXKGXXXNQAEGAARXEGRGPSXXDTXXRQXXEKXXXXSTXDXGXXXXQRXKXDXKXAKEXGXDXXRXXXXRXRXXPKGKGANP

SEQ ID NO: 223540 - protein, 74 aa, Glycine max
  Clone ID: PAT_MRT3847_43888C.1.pep
KKLAHEHNIAVLVTNHVVGGDDGISKPAMGESWKSVPHVRILLSRDCGSNVCNISILKHPSMASGRATSSTMYL

SEQ ID NO: 223541 - protein, 220 aa, Glycine max
  Clone ID: PAT_MRT3847_43889C.1.pep
MAMRDLVSGAAACGDSSSSSSNPLASLANALIGSSSKTQERLKEIPTSTPTDPASQFYSTALPANQLPGSEFDKPLLNLNSQASEFLHRFRGSTGLEETWDEIQRDGAAAQMRQLPPGIQQPPLDGTPQRVLSNILHSFLDSSRGGVPFHPAPLPMLGLSEGDKQCIRDRSSIMARHLFVDKSEEFIDAQVNALLCSLDIDSSVRGKGPMPERFRELEDY

SEQ ID NO: 223542 - protein, 61 aa, Glycine max
  Clone ID: PAT_MRT3847_4388C.1.pep
PLKNKVLIGHLLCKSSFNEFENNHVKPKLKSTHNQAFIHNNRLNPFKVQRLNDLFYFYRLK

SEQ ID NO: 223543 - protein, 72 aa, Glycine max
  Clone ID: PAT_MRT3847_43890C.1.pep
KTPKLLQCGHCCIGHVCSYTALLISDRDLRSNPLSMLSCLIQISVLMDTAWFREKLMSGYMNALLTSRKLHC

SEQ ID NO: 223544 - protein, 115 aa, Glycine max
  unsure (1)..(115): unsure at all Xaa locations
  Clone ID: PAT_MRT3847_43891C.1.pep
IWKEKVFGPVLCVETFRSQEKAFFLANGPPPGLGFSVMSKNFKKWGGLSKGFQAGIVWINCGQPRFFXAPWGGVXRSGFGCXLGKWGLQNFFSVKQVAQAIFFYPWGGVPSPSKL

SEQ ID NO: 223545 - protein, 71 aa, Glycine max
  Clone ID: PAT_MRT3847_43892C.1.pep
SERADVGCYYHSHHRAKLQTQDENVLLRMQPELYPSTFADGDFSRNWRGHIHSLENRTICVPRPGKTNHGK

SEQ ID NO: 223546 - protein, 92 aa, Glycine max
  unsure (1)..(92): unsure at all Xaa locations
  Clone ID: PAT_MRT3847_43893C.1.pep
WTVAARAYLLHLVGCILFANKSFTYVHVVYLDASHDLTQSGSYAXGVVALVYMYDNLDDASKSNTRQLAGYITLLRVIIIEFNFLFPLCILC

SEQ ID NO: 223547 - protein, 86 aa, Glycine max
  Clone ID: PAT_MRT3847_43894C.1.pep
KKIPAPIIQIPFFCSRGGEETKKRGFFLFFPLGEPFFRGGKTCLNGNKIFCPPGNEKCCFLNPLCWGSILFLNTLYCWQKGANKGG

SEQ ID NO: 223548 - protein, 362 aa, Glycine max
  unsure (1)..(362): unsure at all Xaa locations
  Clone ID: PAT_MRT3847_43895C.1.pep
RGAGFLFNLTRFLSYAKEGIVYAFSRINVDLRDWIYDRNFREIDETLFRPVIEALXPIANITVESQVLYHTPKSSFSNWDDKHGSHIFRTEDLPFFVNSNEWHLDTSVAAGGRSKVLQLVVYISSLPVTMHVLLAALREWKRYKQEKTQYLASKAKVNPRSCXLSSDDKMKQLCWWLGPSVWXKLFEVLMGQLRQPFGLKSDNLYVGKSGASILLXGQRVFTEWELDVLSXRKHICLNLQACASTLGLPYILVPTFSRILILIDEVXQSSFFLLAAKAAQSNASIGIYDASAVSSRQSRSLAEDAXFFHPSIMSISYYSFEHCFAIYSPFFLPVTMHVLLAXYENGKGTSKKKRSTWHRRTK

SEQ ID NO: 223549 - protein, 106 aa, Glycine max
  Clone ID: PAT_MRT3847_43896C.1.pep
FFSTVRRHHRGKMVLQPLPFLTTTAQWCMKVHLIRVKCRGPRADTCSNPKPLPALSVSRWLCGGCASSSNLSIILHRVVGPMTLHEATFIGPNKQVIRYLYHNFIG

SEQ ID NO: 223550 - protein, 65 aa, Glycine max
  Clone ID: PAT_MRT3847_43897C.1.pep
LLKMLRWKSFFLLRLVINHPQRRVMPRAIFFFWLFLFPFQIGALNSLSGVLGMGILCSRASPFLC

SEQ ID NO: 223551 - protein, 443 aa, Glycine max
  Clone ID: PAT_MRT3847_43898C.1.pep
MAQEQEFRTSTPLPKCDAYFETIQSRKKLPLSLQETLTDAFAKIPVSSFPAVPSGKVIEILADTPVGEAVKILSESNILAAPVKDPDASNSSDWRSRYLGIIDYSAIILWVLEGAELAQAALLAGTATAAGVGAGAAGALGALALGLTGPAAIAGLTTAAAGAALAGGVAADKVMAKDAPQAADNLGEDFYKIILEEEPFKSTTVRSIIKSYRWAPFVPVARNSAMLTVLLLLSKYRLRNVPVIEPGRPDIVNFITQSAVVQGLEGCKGRDWFDCIAEKCISDLGLSFMSSREVISIQSNELILEAFKQMKDNRIGGLPVIEGPKKRIVGNLSIRDIRHLLLRPELFTNFRKLTVMDFMKKIVSSSLQTGKVTQPITCKPDSTLQGVIHTLASQSIHRIYVVDGHDEVVGVITLRDVISCFVTEPPYNFDDYYGFAVKEMLNQ

SEQ ID NO: 223552 - protein, 61 aa, Glycine max
  Clone ID: PAT_MRT3847_43899C.1.pep
MASINFNPFGGNWFSKPPNPLSVPSLPNNLTDAPSSLPPNFAAISLPKPFRRRASPSSSSK

SEQ ID NO: 223553 - protein, 185 aa, Glycine max
  Clone ID: PAT_MRT3847_4389C.1.pep
SARVRLGIRLEAWSAVGAAWRECFPLQGHDVARWFPGHMAKGLKKMQSSLKLVDCVIEVHDARIPFSGRNPLFQELLGLKPHLLVLNKMDLADLTEQQKIVQHLEEKGLRNVIFTNCIKDENIKQIIPKVTELIGCSYRYHRAENPEYCIMVVGVPNVGKSSLINSLRRQHLKTGKAARVGGEPG

SEQ ID NO: 223554 - protein, 64 aa, Glycine max
  Clone ID: PAT_MRT3847_438C.1.pep
DNNQARLSSEVFDQELLRYKNIEDELVAMLHVGLACVAAQAEKRPCMLEVVKMIEEIRVEESPL

SEQ ID NO: 223555 - protein, 62 aa, Glycine max
  Clone ID: PAT_MRT3847_43900C.1.pep
CTSAPRYTVFFFSMATISFHNEASRPFSLPIPQNTLLPNATLLAIVVILIISGTPLWNPWGQ

SEQ ID NO: 223556 - protein, 56 aa, Glycine max
  Clone ID: PAT_MRT3847_43901C.1.pep
PCPPVIHVLMFIQPSLLGISNLKLQRGVTKSNCSKKGRKKTLPLLLRINHLPTSLS

SEQ ID NO: 223557 - protein, 174 aa, Glycine max
  unsure (1)..(174): unsure at all Xaa locations
  Clone ID: PAT_MRT3847_43902C.1.pep
SLGFFTFSQDETLICTMTGHRSVVSTLAVCDEVLYSGSWDGTVRXXSLNDHSPLTVLGEDPPAEMKSILAITVDRHLLVAAHENGCIKVWRNDVFMNSKTLHKGAIFAMSMQGKCLYTGGWDKNVNIQVVSXSSGAPGWQCLGILPFLCCCNSLLCSQGKLYVGYADKSIKVYL

SEQ ID NO: 223558 - protein, 83 aa, Glycine max
  Clone ID: PAT_MRT3847_43903C.1.pep
VVVSAMASVVSSRQSRQAIRVWIIWVWRSQCGLATLRSTVLHVTVTKSFGTFAHGRRHISATFNRATNVFCSMPEQHNCVSLS

SEQ ID NO: 223559 - protein, 156 aa, Glycine max
  Clone ID: PAT_MRT3847_43904C.1.pep
ARRGSARVFLHFGRASYSPLSYGPTGGGVFSNCGGAPPPLHPLSRVQSIKNRKAKPHHRPRMTCSGNQSNPTPNPNCQGEPPHIVGHRRSVLLGLGGLCGACTPNNNNPVGLAAPISPSDLNTGGPPDLPAGVKPTNWWPPSSKITGFKFSPLTNP

SEQ ID NO: 223560 - protein, 81 aa, Glycine max
  Clone ID: PAT_MRT3847_43905C.1.pep
TAVVLPPLFLRFFSPPLCPPFFGYLSIGHCGARPRWSGGDFFFLPAQGAGYLIGLGAPPGLLFFSASGPPKKNTNLNKMVL

SEQ ID NO: 223561 - protein, 68 aa, Glycine max
  Clone ID: PAT_MRT3847_43906C.1.pep
TRPALDMLQTKDILWMPYTVHREHRPFHDISLFSGYIRCGSSAFPLRAHTGHSCSVSVCMCTLFYANP

SEQ ID NO: 223562 - protein, 77 aa, Glycine max
  Clone ID: PAT_MRT3847_43907C.1.pep
INFFFFFFFCFFFFFFFFFFGAKQKLLLTDQGRNFFNTSATSKKYWPLPHYIFGTTENKAREQIRYKTLHYTSSPPN

SEQ ID NO: 223563 - protein, 119 aa, Glycine max
  unsure (1)..(119): unsure at all Xaa locations
  Clone ID: PAT_MRT3847_43908C.1.pep
VNPWGARSRLEXRSPPPGVAPFFSGSDPLVMALKXVLDGRPDAVPLPPDXLDGIVPFYDSTRSLRGVYQVASVPFHLLLPLVLESYWLVLFSFLVVASRGLDAGARFFLRPPSRNVCCA

SEQ ID NO: 223564 - protein, 120 aa, Glycine max
  unsure (1)..(120): unsure at all Xaa locations
  Clone ID: PAT_MRT3847_43909C.1.pep
SKKSSCKKYNPETRPPYLVDPKKRRQYDSAGFEALDADSMDMEIDLSNLGTVNTMFTALFSKMGVPIKTTISANVLEEALNGTVTIRPLPIXYFEQDANGGYGLALQEDSEKTGKVTSAG

SEQ ID NO: 223565 - protein, 70 aa, Glycine max
  Clone ID: PAT_MRT3847_4390C.1.pep
GALVNLNTIATIYALVVKQVASMLSSSHSTGFKNAIGKEPLDYCTGESSHCCKTFPMIIELVMTSHSIPV

SEQ ID NO: 223566 - protein, 62 aa, Glycine max
  Clone ID: PAT_MRT3847_43910C.1.pep
SIRNLEIDNSYVSYGLTIRNNNTNYQSVRTLPIDNLYGCYRLSICKKHTDCQFVTIIWIVNP

SEQ ID NO: 223567 - protein, 136 aa, Glycine max
  Clone ID: PAT_MRT3847_43911C.1.pep
MDPRISFSYDFVVSQQAIKHENIYREDPVSSDFEFSVKNNSMISADEVFFQGMLLPLKSDCSNKKVTLRDELLVNDDHYEEELPRLPKSSSRWKERLGLRKGSSKKDKNKNNEGFQQTRVAGEKGFSSGQGDKTVS

SEQ ID NO: 223568 - protein, 59 aa, Glycine max
  Clone ID: PAT_MRT3847_43912C.1.pep
IKKSSFKKRDSPPIRTSPQLKGQVLRPQMPSLEKPFQLKLGGAAPNDNPSPCSDALAEK

SEQ ID NO: 223569 - protein, 179 aa, Glycine max
  Clone ID: PAT_MRT3847_43913C.1.pep
MSTSLHENPSSLFFLPIITFITFFVLRTVIKLLSKWNNNSNSATTRETSPVSSSPPSPPKLPIIGNLHQLGTLTHRTLQSLAQTYGPVMLLHFGKVPVLVVSTSEAAHEVMKAHDLVFSNRPHRKMVDIFFYGSKDVAFAPYGNYWRQIRSICVLHLLSAKKVQSFGAVREEVLKDMAS

SEQ ID NO: 223570 - protein, 61 aa, Glycine max
  Clone ID: PAT_MRT3847_43914C.1.pep
LSHQIPLPILRSLAASYSDRRIGRGIWCDAARDDFWLRYWAALFSFLDTHFLSSDLSFVEI

SEQ ID NO: 223571 - protein, 424 aa, Glycine max
  unsure (1)..(424): unsure at all Xaa locations
  Clone ID: PAT_MRT3847_43915C.1.pep
YEKGPGGVWCDVDVVEFSYYGAPAQTPKEQLYTELADGLRGSDSCVGSGSQVASQETYGTLGAIVRSRTGNREVGFLTNRHVAVDLDYPNQKMFHPLPPSLGPGVYLGAVERATSFITDDLWYGIFAGTNPETFVRADGAFIPFAEDFNMNNVITTVKGVGEISDVNIIDLQSPINSLIGRQVVKVGRSSGLTTGTIMAYALEYNDEKGICFLTDFLVVGENQQTFDLEGDSGSLILLTGQNGEKPRPVGIIWGGTANRGRLKLKVGQPPENWTSGVDLGRLLDLLELDLITTNEALQAAVLEQRNGSAAGIDSTVGESSPTVPIXEKLEESFEPFCLNIPLAQFHIKSEIEIAPNVEHQFIPSYAGKSPARQSYLKEDMELKSLAELRNGPDEDNFVSLHLGEPEMKRRKISNSSFCIKELKY

SEQ ID NO: 223572 - protein, 43 aa, Glycine max
  Clone ID: PAT_MRT3847_43916C.1.pep
KKKKKKKKFVKLKKEKKKKKKKKKKKKKKKKKIKKKKKKGRPF

SEQ ID NO: 223573 - protein, 41 aa, Glycine max
  Clone ID: PAT_MRT3847_43917C.1.pep
GSIENGSLKQSKVFLSSKNTGNGKIPGKGGNRFWQSIGLGF

SEQ ID NO: 223574 - protein, 86 aa, Glycine max
  Clone ID: PAT_MRT3847_43918C.1.pep
SFELNNNLFNFNGTSMTQFAVASLQAAAIHQLPNATSWLYLKGVDSGNCSPERVPNHGLAQISPPLHSHVHSELDVSQQGRRHYMI

SEQ ID NO: 223575 - protein, 105 aa, Glycine max
  Clone ID: PAT_MRT3847_43919C.1.pep
MLGVNNNHAVMKRKGQSKRGHKKNVKVTYISSPMKVKTSASNFRALVQELTSQASNVAEMFVEADYYYGVHDDDGVKGNQHCTPDEGYFSTRGAHDDDLNSSWSY

SEQ ID NO: 223576 - protein, 104 aa, Glycine max
  unsure (1)..(104): unsure at all Xaa locations
  Clone ID: PAT_MRT3847_4391C.1.pep
WGIIGVRANSTSGTTLEHYVLHADINQLFKLMINSLFSYTEIFLCETITNVSEALNKXRFESLTAKSMFDAKTXLLIRIVPYKDNKTLCGIDIGIVMTKADFVN

SEQ ID NO: 223577 - protein, 237 aa, Glycine max
  Clone ID: PAT_MRT3847_43920C.1.pep
PRVRPRVRPRVRPGLRRKYPFHEYVSAVLLVIGLILFTLADAQTSPNFSAIGVLMISGALIMDSFLGNLQEAIFTMNPQTTQMEMLFCSTVVGLPFLIPPMLFTGELFKAWTSCSQHLYVYGVLVFEAMATFIGQVSVLSLIAIFGAANTAMITTARKAVTLLLSYLIFTKPLTEQHATGLLLIAMGITMKIFLDDRSNKKALNSSPIASIPKPSEDKELMAQSGYAGEHEERRPLV

SEQ ID NO: 223578 - protein, 49 aa, Glycine max
  Clone ID: PAT_MRT3847_43921C.1.pep
PPLKPKYFSKGLEGGPRPIKGKSGELMVIQSPPIHPKIMANLGQFYHIP

SEQ ID NO: 223579 - protein, 93 aa, Glycine max
  Clone ID: PAT_MRT3847_43922C.1.pep
RVFVRLTNFVGSHTIASSMTSSPLLVAVTLSATLALNSVTEVSPVVYRLASESDPVNLEVAIMAYNITYFLFSLQMYSLLARLFLMTHLFVYY

SEQ ID NO: 223580 - protein, 79 aa, Glycine max
  Clone ID: PAT_MRT3847_43923C.1.pep
LMQFVCSYFCRSTVWMLLCAASPLFRVPLVPVSCLWVVYSEVTVRWVCACSEDYYHVARTDGQPLKKPDTGILDQARGR

SEQ ID NO: 223581 - protein, 130 aa, Glycine max
  Clone ID: PAT_MRT3847_43924C.1.pep
CSDLVDKYSLENRDIFSIYSTTICHKFFTLAFVILPWALLITSVDFKFIYHYISILKQRFYQRSDSLFSCSNQNDLFFFVCFNFLFTTRKQKSSSFWLIRAFLTIRNFVCKDRLWIVNISSTPCRFRSHQ

SEQ ID NO: 223582 - protein, 52 aa, Glycine max
  Clone ID: PAT_MRT3847_43925C.1.pep
IAQKQIKRLSFKWCLLQLLSFVCFLVSVVAAVGSIRGISKNIKKYKLFMYKQ

SEQ ID NO: 223583 - protein, 43 aa, Glycine max
  Clone ID: PAT_MRT3847_43926C.1.pep
TFRFKPSISHHAKQLLHSQRSSLGFLTKFKTTSGANSRRLVQK

SEQ ID NO: 223584 - protein, 93 aa, Glycine max
  Clone ID: PAT_MRT3847_43927C.1.pep
MLLLSPVTPGQVSFLLGIIPVVVAWIYSEILEYRKNSVSSRAQSDINLVEMGSDVVKDEDRAVLLEGGALQSGSPKARSLTGSPSIIRILLMD

SEQ ID NO: 223585 - protein, 53 aa, Glycine max
  Clone ID: PAT_MRT3847_43928C.1.pep
PGAIPDGKGSLPSVLEMHYKVSALRLQDLMRLSSCMEYFIMATASSSSARLKQ

SEQ ID NO: 223586 - protein, 61 aa, Glycine max
  Clone ID: PAT_MRT3847_43929C.1.pep
NNNFTTIFNLLYIYNEHVRTVCGIAISIEGNIYCIGYCTWELHIQQKEIYIAFVNPNVLGI

SEQ ID NO: 223587 - protein, 116 aa, Glycine max
  Clone ID: PAT_MRT3847_4392C.1.pep
VEEIRKQADDATTYTMSMPYRVQRIEEFTKQLEAGDLKLRVRVLESERAARKATGLQMATMYTVLGGTLLNLGITMSSQGNITIANGSFIGAGIFMTLFVRSMQRVKMLDKFEKMI

SEQ ID NO: 223588 - protein, 50 aa, Glycine max
  Clone ID: PAT_MRT3847_43930C.1.pep
RINLHGALQPPSALTTGPSTYPYPLNTITVAHPEIRQYQQNHDHVIMKLP

SEQ ID NO: 223589 - protein, 60 aa, Glycine max
  Clone ID: PAT_MRT3847_43931C.1.pep
TRSSTRPLKKKKKKKKKKKKKKLKRRRVVINKKWAASLMVQYFLSLAFNSNIYSLGCPFI

SEQ ID NO: 223590 - protein, 42 aa, Glycine max
  Clone ID: PAT_MRT3847_43932C.1.pep
TCSDSLGIIRHILLRCTDISQSKHPSNDHTTRSFIYHPRDLE

SEQ ID NO: 223591 - protein, 253 aa, Glycine max
  unsure (1)..(253): unsure at all Xaa locations
  Clone ID: PAT_MRT3847_43933C.1.pep
RKTKSVRLGSEVEDDLHRLRYLSSLLHQIDELVVQAIEVNYNNNKTISKEGKTQIESFSRVLSDMLSSLEPWVPKIQKALNPQNTVSDDETIECDSPEETTLNLVSPSPLVSWRANCTVERGRQMFMLTPLPLSSKHHQPKPHFPPPTTSSTTTFKDSVMVKPTPIKQQLPNNQDGSMLLMMTPCLXMSPXRSCLLLEPISEISRLGDRNARKGTPYPVGIHCSDSESSSSDDSSRDLSLMYPELLGIHKSGI

SEQ ID NO: 223592 - protein, 106 aa, Glycine max
  unsure (1)..(106): unsure at all Xaa locations
  Clone ID: PAT_MRT3847_43934C.1.pep
ALLVEKTTNGTKYKAKDLSQADFSHLKIELAEVXMPGLMACQTEFDISHPYKGARITVFLHMTIQTALLIDTLTALGAEVLLRYCILYSTEDSFATRNKSQSEDIF

SEQ ID NO: 223593 - protein, 139 aa, Glycine max
  Clone ID: PAT_MRT3847_43935C.1.pep
MGTNGYGTNMGTPKQNGLAERFNRTILERVRCMFLSAGLPKIFWAEAAMTVVYLINKCPLTTLNFKTPEEIWSGHPPSLKQLKVFGCVAYAHIRQDKLEPRAVKCIFLRYPEEVKGYKLRSLEAGFKRGLMSCNVAFNE

SEQ ID NO: 223594 - protein, 112 aa, Glycine max
  Clone ID: PAT_MRT3847_43936C.1.pep
CLICTTTGSLLAANLMYYMLLLFVFLTVLFCFSYKVLGLVLLNLKAYCGWTGLFVGWCGKRLALNSFIKIWMFCLDSCINGVIRVFFSFKKSLLVYLVLKSCTFGVFYTYFL

SEQ ID NO: 223595 - protein, 75 aa, Glycine max
  Clone ID: PAT_MRT3847_43937C.1.pep
MEMRKSCGFFFLLLLLVFASQVVVQTEGRVCESQSHGFHGLCNRDHNCALVCRNEGFSGGRCKGFRRRCFCTRIC

SEQ ID NO: 223596 - protein, 78 aa, Glycine max
  unsure (1)..(78): unsure at all Xaa locations
  Clone ID: PAT_MRT3847_43938C.1.pep
MGLGVIKKVAVMILLIMFLSYPVAYSSSSSETTMHTNNWAVLVCTSRFWFNYRHMANTLSLXRTVKRLGIPDERIILM

SEQ ID NO: 223597 - protein, 310 aa, Glycine max
  Clone ID: PAT_MRT3847_43939C.1.pep
MTGGGSTGRLPTWKERENNKRRERRRRAIAAKIYTGLRAQGNYKLPKHCDNNEVLKALCAEAGWIVEEDGTTYRKGCKRPSASEIGGTVANISACSSIQPSPQSSSYPSPVPSYHASPTSSSFPSPTRIDGNHPSSFLIPFIRNITSIPANLPPLRISNSAPVTPPLSSPRSSKRKADFDSLHNASLRHPLFATSAPSSPSRRHHLATSTIPECDESDASTVDSASGRWVSFQVQTTMAAAPPSPTFNLMKPAMQQIAAQEGMLWGSVAERVRGGSDFDFENGRVKPWEGERIHEVGMDDLELTLGVGKA

SEQ ID NO: 223598 - protein, 109 aa, Glycine max
  unsure (1)..(109): unsure at all Xaa locations
  Clone ID: PAT_MRT3847_4393C.1.pep
QXXXYXWRXRXXXKXPFXKXXXXXWGSRFXXXTDMXXSXTTNXAXXXXXXXLGSXLXXXKXXXTXPGXNRWXNXIYPRSRXXAXXTXNTXCATFXLXIXXKSRXXAXXX

SEQ ID NO: 223599 - protein, 308 aa, Glycine max
  Clone ID: PAT_MRT3847_43940C.1.pep
MTGGGSTGRLPTWKERENNKRRERRRRAIAAKIYTGLRAQGNYKLPKHCDNNEVLKALCAEAGWIVEEDGTTYRKGCKRPTSEIGGTPLNLSACSSIQASPQSSSYPSPVPSYHASPTSSSFPSPTRIDGNHPSSFLIPFIRNITSIPANLPPLRISNSAPVTPPLSSPRSSKRKADFDSLRHPLFATSAPSSPTRRHHVATSTIPECDESDASTVDSASGRWVSFQVQTTMVAAAAAAPPSPTFNLMKPAMQQIAAQEGMQWGSVAERGRGGSDFDFENGRVKPWEGERIHEVGMDDLELTLGVGKA

SEQ ID NO: 223600 - protein, 75 aa, Glycine max
  Clone ID: PAT_MRT3847_43941C.1.pep
CNSVPACWVGLRLLSAGLPAPSWELSLESRANAQVSGLLYLMPHRVGWINRAPNYLGSQHRKDNRLLCPQSTMAL

SEQ ID NO: 223601 - protein, 88 aa, Glycine max
  Clone ID: PAT_MRT3847_43942C.1.pep
HTIVTLEELNRDMATTNISTCHIQYVINSIIRLHNRNFLHSNIYMNRRHPYIQYTTYMSLIQLTNSILPTKPENLYFLFSAAELIISA

SEQ ID NO: 223602 - protein, 110 aa, Glycine max
  Clone ID: PAT_MRT3847_43943C.1.pep
TLFFCRLCIHSYTADMRFITVSELYHCLSAAHYRSTCSFIAVAMLCHETPILVNTYLRTILIDLIELTVIFIDHITLNAFSTKHKTQHLPLSLISGLLEPRFVKPPLPIN

SEQ ID NO: 223603 - protein, 314 aa, Glycine max
  Clone ID: PAT_MRT3847_43944C.1.pep
DKLLEKNFKGVATSLEGCVNGYLQCVAYERVPSKILVYQASDDPLYRGYRAAVQSSSQEESLLDFASWEPPHGPYKTFNYPWRSYVKVSGALRHCAFMVMAMHGCILSEIQAPPEKRLVFSIELQKVGTEGAKVLRQLGSKVENMEKLSNVDILLKVHEAAEQLQMKIDQQSFLLVNSESWQAAKKPKEVENHDNLLIDLKDPHEHKHSLISSLSETGVDSRLNINIEPSVPELHISQSLLSNKISWPRLSFYGDNMLLEQDSKVYESASSLSLATFASLLIEFVARLQNLVDEFQDLSEKANFKDPFNPPVLK

SEQ ID NO: 223604 - protein, 211 aa, Glycine max
  Clone ID: PAT_MRT3847_43945C.1.pep
GSSHYWGDQWFGEDLSIFSLDDKPVPAGSFSPEESRASLDRNSPSFSRAQSVDTLSVTPSNLKQTVSSEQMSSSRTDGDVAGLRAAEAFIRPAPVAVHGDISSFVFDLKTCTFKLALTAPSSTGEDAPTTTYLPEFHFPAGQTSVEVSGGKWTMTSEETNGALQQTLRWWHAEGDQTITVKGAVRKPGSALGTEEDEGYLAQCQKQNCAVM

SEQ ID NO: 223605 - protein, 62 aa, Glycine max
  unsure (1)..(62): unsure at all Xaa locations
  Clone ID: PAT_MRT3847_43946C.1.pep
AISFATTPADLANXTPFPSVISMQCNAAPKGIIGRSTLFFLINKNLFPNCTSLLPTIQDFWK

SEQ ID NO: 223606 - protein, 75 aa, Glycine max
  Clone ID: PAT_MRT3847_43947C.1.pep
FKGFIRTLLLLLTITCRKGLLNYKKAYYKKCGAYCLTRHGGDKKETASSFFFYAHKFFFGKIVKPLVGLTGGAFT

SEQ ID NO: 223607 - protein, 70 aa, Glycine max
  Clone ID: PAT_MRT3847_43948C.1.pep
KKTFLLDIIYRDIFAHTFLKQGSRLRGESLKKGKILKRGTPPLKVPSPSRPLVKGAFPYKKPIFNFYKTS

SEQ ID NO: 223608 - protein, 58 aa, Glycine max
  Clone ID: PAT_MRT3847_43949C.1.pep
MHFCNTFYYYYLKFIKNYKIIYQVKNKTHKKITRFIINLNHKYNVFKKMWCNVFRGQN

SEQ ID NO: 223609 - protein, 226 aa, Glycine max
  Clone ID: PAT_MRT3847_4394C.1.pep
AGPVLSYYWVADATPPLRNSKTTMFMLSTPPTTTFFATPRVLPFLSSSKLSSVSSSSSTASSSPCCSSSSSITPKVKSKDNNNCYLVSAKHSPANMSASVSSRTFLNARNEQELLAGIRKEVEAGSLPANVAAGMEEVYNNYKNAVIRSGDPKAKEIVLSNMIALLDRVFLDVTDPFVFQPHHKAKREPFDYYVFGQNYIRPLVDFKFGTMPITSEVGLSVVLPEV

SEQ ID NO: 223610 - protein, 88 aa, Glycine max
  Clone ID: PAT_MRT3847_43950C.1.pep
DSFVAWTIFLGTSSFLLLLLSLSLSTVCVSATPHFSFFQTQQQRQRESEKGVLSKCLLLALHLHHSFFSLSFCVRSLWIRIFVLLALL

SEQ ID NO: 223611 - protein, 157 aa, Glycine max
  Clone ID: PAT_MRT3847_43951C.1.pep
MATRVLLLMALTLYIFPIATATFHVKGSVYCDTCRAGFETNATFYIRGARVGIQCKERKTMKVAFYSEGVTDSTGTYHIEVENDHRDNICECLLVKSPIKWCSTPDSGRDKSSIVLTHYQNGIVNHLHYANAMGYLRDEPLPECHKLLKYYLADSDV

SEQ ID NO: 223612 - protein, 33 aa, Glycine max
  Clone ID: PAT_MRT3847_43952C.1.pep
GIRRSMHRLTIGFRSQELFYMYSRYFVLCSYAS

SEQ ID NO: 223613 - protein, 48 aa, Glycine max
  Clone ID: PAT_MRT3847_43953C.1.pep
FFFFFFLFFFFFFFFFFFFFFFFFFFWPKKKRKILNGAPGGLNKQRGL

SEQ ID NO: 223614 - protein, 50 aa, Glycine max
  Clone ID: PAT_MRT3847_43954C.1.pep
TFLHELTHTQQHRSIKTNTVFKNQEQSLMSSCVTFKAKFILHYIHFIIII

SEQ ID NO: 223615 - protein, 71 aa, Glycine max
  Clone ID: PAT_MRT3847_43955C.1.pep
RTVYIIFNLYITLLLFNHGIKHLKVTRTIECEDILTLKTLMPTLLLDTPRRMPKTTPIAASLTSFTDFFNF

SEQ ID NO: 223616 - protein, 52 aa, Glycine max
  Clone ID: PAT_MRT3847_43956C.1.pep
PRRSSEWARERMVHMTLAVSCDPLYQHHADGWYSWRTNKYGLHWHYIFYHKA

SEQ ID NO: 223617 - protein, 69 aa, Glycine max
  Clone ID: PAT_MRT3847_43957C.1.pep
MRLPIMKACPLPGTGSLFISCSEELFILLAAPFFFFFFFFFFFFFFFFFFFFIITQPNMLIFVIVSVEN

SEQ ID NO: 223618 - protein, 57 aa, Glycine max
  Clone ID: PAT_MRT3847_43958C.1.pep
PRGSYQSSPYMFANLMLFKLQRHVFSLLQFILLMESHLQNPEDASYQCECGLRMVAA

SEQ ID NO: 223619 - protein, 74 aa, Glycine max
  Clone ID: PAT_MRT3847_43959C.1.pep
SSSQSAPKSDHECNLLGLSLVNDWKVHVLLSPRLLTSQCSYKALQNMIKRVSGFLFSVIIHFLCSPSFHVIIKG

SEQ ID NO: 223620 - protein, 83 aa, Glycine max
  Clone ID: PAT_MRT3847_4395C.1.pep
FRILFHFIVVVVVVVVVIIIIIIIIIIIIIITVLSSNYAFHIFRVVLVFFLIDKQCYCLWNLKLLKNEFLMYSTCQLRIYSCV

SEQ ID NO: 223621 - protein, 56 aa, Glycine max
  Clone ID: PAT_MRT3847_43960C.1.pep
IFYFFFYYLFLVRHIVNELDHINYLSSPFLSLSRYPHFNEFLNIIFQKNKKRDVSH

SEQ ID NO: 223622 - protein, 127 aa, Glycine max
  Clone ID: PAT_MRT3847_43961C.1.pep
GLIPYDQSGFVNGIRQVITTHKQVQQQKLEQQRGMGAQQAPPVLGPILEEQARPPQNLLQLRAPQPQPQGAVGASAATGQPQPQGATQAPTGAPQGPPGAAPGPPPSGPILRPQNPGANPPAAEPSP

SEQ ID NO: 223623 - protein, 25 aa, Glycine max
  Clone ID: PAT_MRT3847_43962C.1.pep
CEAEAHRLTHFKFRRTQFNVKSWKC

SEQ ID NO: 223624 - protein, 44 aa, Glycine max
  Clone ID: PAT_MRT3847_43963C.1.pep
IFWHHTPGYKPTYLIIRSNFRLLGVLHRICRVRLRLRSPNGVVL

SEQ ID NO: 223625 - protein, 50 aa, Glycine max
  Clone ID: PAT_MRT3847_43964C.1.pep
RLRSDMPFYAQDLAGAGAEHAHIGQDCCFCSGTNGGVGNLTYGERSPILT

SEQ ID NO: 223626 - protein, 413 aa, Glycine max
  unsure (1)..(413): unsure at all Xaa locations
  Clone ID: PAT_MRT3847_43965C.1.pep
LIVSFPVLKPLNQVMXSRVDQDFNHQNESQNMNPDEQNRFYPIDEFEVRIMEPEKSGGPWQTKATIPMQSSENALTVRMVTLLNTTSKENETLLAIGTAYVQGEDVAARGRILLFSLGKITDNPQTLVSEVYSKELKGAISALASLQGHLLIASGPKIILHKWNGTELNGIAFFDAPPLHVVSLNIVKNFILIGDIHKSIYFLSWKEQGAQLSLLAKDFGSLDCFATEFLIDGSTLSLMVSDDNRNIQIFYYAPKMSESWKGQKLLSRAEFHVGAHVTKFLRLQMLSTSDRAGSVPGSDKTNRFAKTFGTLDGSIGCIAPLDEITFRRLQSLQRKLVDAVPHVAGLNPRAFRLFRSNGKAHRPGPDSIVDCELLCHYEMLPLEEQLEIANQIGTTRSQILSNLSDLSLGTSFL

SEQ ID NO: 223627 - protein, 83 aa, Glycine max
  Clone ID: PAT_MRT3847_43966C.1.pep
SLQRKLVDAVPHVAGLNPRAFRLFRSNGKAHRPGPDSIVDCELLCHYEMLPLEEQLEIAHQVGTTRSQILSNLSDLSLGTSFL

SEQ ID NO: 223628 - protein, 87 aa, Glycine max
  unsure (1)..(87): unsure at all Xaa locations
  Clone ID: PAT_MRT3847_43967C.1.pep
CSYQLPKAADKGDLELRNEIDXLLRQQREISERLQDPTGLTRGASPGPPALRTNGFGQRPLINPANRNDSDDQPPYSHHLTYSPRSG

SEQ ID NO: 223629 - protein, 80 aa, Glycine max
  Clone ID: PAT_MRT3847_43968C.1.pep
AKKPLSPIPPLPKFTPLNALQTCGGVSAQDFVHYPKWCPQPPSSCMLRLYILILYRWMTTLDETAKHARIFSAFFIVLFV

SEQ ID NO: 223630 - protein, 61 aa, Glycine max
  Clone ID: PAT_MRT3847_43969C.1.pep
ILYQEREGSKQTMSIRGIKIIVKNIYLFNMKFELLTIIIFLIHSVFHVGSVAIGGEIILIF

SEQ ID NO: 223631 - protein, 53 aa, Glycine max
  Clone ID: PAT_MRT3847_4396C.1.pep
IQVRVFSIFKSQGMLIPTQLFRKITKMPLCLNMRICVLFHFDAHRLFTKHTYF

SEQ ID NO: 223632 - protein, 73 aa, Glycine max
  Clone ID: PAT_MRT3847_43970C.1.pep
NGNLGDTNNMGHTNIRERAHLYAQFYSNMPCHCCGGRQILAHPNLELCSSVLCRNKARFPTLMVLAQDRDQLA

SEQ ID NO: 223633 - protein, 85 aa, Glycine max
  Clone ID: PAT_MRT3847_43971C.1.pep
GPKKGNRGRIRKKGGNLFFFLRSKGPREPRKWGGKIAFLVKRGVKIRGVNPLFFGQNFLGGPEKKILGLENFFKKLRPLLVKAPP

SEQ ID NO: 223634 - protein, 77 aa, Glycine max
  Clone ID: PAT_MRT3847_43972C.1.pep
LYRILLDLKTLGKEKRHISTVVLGHVDSGNSTTTGHLIYKPGGIDKRVIETFETDAAEMYKRSFEYAWVLAPLKAER

SEQ ID NO: 223635 - protein, 73 aa, Glycine max
  unsure (1)..(73): unsure at all Xaa locations
  Clone ID: PAT_MRT3847_43973C.1.pep
XKKNQXTKNTTNXFQXLRRRTTIHLLPFGSPADLXSLXLXYSXXPEXXKLXPSPXKNPKAARLGFSFXPFRVI

SEQ ID NO: 223636 - protein, 46 aa, Glycine max
  unsure (1)..(46): unsure at all Xaa locations
  Clone ID: PAT_MRT3847_43974C.1.pep
YXXGPPVGWSPRGXLYVIKPVRVDHXXLSQGGSXXXSXXPHPPPHN

SEQ ID NO: 223637 - protein, 273 aa, Glycine max
  unsure (1)..(273): unsure at all Xaa locations
  Clone ID: PAT_MRT3847_43975C.1.pep
FTACCKPTRVGEDPLEGYIAIWRKPLDNSCYLGRDIDAHPPLCESNDDPDNVWYVGLKACITPLPNNGYGANVTEWPLRLHQPPDRLHSIQLDAIISRDELLRADTKYWFEIIESYVRAFRWQDYNLRNVMDMRAGFGGVAAALHDLQIDCWVMNVVPVSGFNTLPVIYDRGLIGVMHDWCEPFDTYPRTYDLLHAAGLFSVEKKRXKCNISTIMLEMDRMLRPGGRVYIRDTTLVIGELQEIATALGWSTTINDVGEGPYSSWKILRSDKRF

SEQ ID NO: 223638 - protein, 71 aa, Glycine max
  Clone ID: PAT_MRT3847_43976C.1.pep
WLQKISFCLLISLILLVTCTAFSFQFHGFHNSERNLTREGDSNVTPKVYFSSPKEKTTLLAMHFITNPSKY

SEQ ID NO: 223639 - protein, 80 aa, Glycine max
  unsure (1)..(80): unsure at all Xaa locations
  Clone ID: PAT_MRT3847_43977C.1.pep
MGHMHSCRKGISSSALPHIRTPPNXLKHLIRKDVKNEYLXFAKKCLTPSQIRLILRHSHGIAQVIIVTGIIILRILKAQV

SEQ ID NO: 223640 - protein, 731 aa, Glycine max
  unsure (1)..(731): unsure at all Xaa locations
  Clone ID: PAT_MRT3847_43978C.1.pep
MTGHFLRTPLSFKIAAFFFIAVTFFYFGKHWSDGYQHLVFFTQRSDPDSNSNPFVSTSPNNAKTFNVSALIENNTQPTLREKAPPPPAPEEGSIDKLGVVNENGTMSDEFEVGDFDPGMVDQWVNETQVDESEGSSSDVGFGIKKFGLXPREMSEYIPCLDNEDENRKLPSTEKGERFERHCPEQRRGXNCLDPGPNRYRTPIPWAKSRDEVWFNNVPYTCLVEDRGGQNWICRDKDKFQFPEGVTHFMLGANEFLDHIAKVVMMIPDITFGKHIRVVLDVGCGVASFGAYLLSRNVVTMSVAPKDVHENQIQFALERGVPAMAAAFATRRLLYPSQAFDLVHCSRCRINWTRDDGILLLEVNRMLRAGGYFVWAAQPVYKHEEVLEEQWKEMLNLTNRLCWKLLKKDGYVAIWQKPSDNSCYLNREAGTQPPLCDPSDDLDNVWYVNLKSCISQLPENGYGANVARWPARLHTPPDRLQSIKFDAFISRNELFRAESKYWGEIIGGYVRVLRWKKMRLRNVMDMRAGFGGFAAALIDQSMDSWVMNVVPVSGPNTLPVIYDRGLIGVMHDCNNFMIYNIXCEAFDTYPRTYDLLHAANLLSVEKKRYYFLHLSAFYVFXCNVSSIMLEMDRILRPGGRVYIRDSLDIMDELQEIAKAIGCTCYALKAKWDASASTTRHLRSALPYKREEVLSIYSSIPLSLEPDASSSLFVKFNLFVYSKALRALNILFP

SEQ ID NO: 223641 - protein, 127 aa, Glycine max
  Clone ID: PAT_MRT3847_43979C.1.pep
MKRLLFITSFLYIVNTSYWCKLQNFQREKEEAYNKILQLEKQLDAKQKLEMEIEELKGKLQVMKHLGDEDDAAVQNKTEEMNDELQEKVDNLENMEAMNQILVVKERQSNDELQVDSRGSPGNEVEF

SEQ ID NO: 223642 - protein, 80 aa, Glycine max
  Clone ID: PAT_MRT3847_4397C.1.pep
GKSGLAIPLAVLCSAVFLCAVGSVMHMIWFGEMEAHVREVIIKSQACGSTCHVLAIIFEFRNFPGVFSVFACMQARVNLI

SEQ ID NO: 223643 - protein, 153 aa, Glycine max
  Clone ID: PAT_MRT3847_43980C.1.pep
CIGKFKSELAVMELEIQALVRLAEEIAQCGIPEGSRKINGKYIHSHLVARLEAVNELLKEQIKDVDAAQSKEVSVFWVGMAESVQVMGTFDGWSQGEHLSPEYTGSYTRFSTTLLLRPGRYEIKFLVDGEWKLSPEFPIIGEGLTKNNLLVVE

SEQ ID NO: 223644 - protein, 33 aa, Glycine max
  Clone ID: PAT_MRT3847_43981C.1.pep
SSLVMKEYIWTYAALECALAALTVHAILYYRSM

SEQ ID NO: 223645 - protein, 78 aa, Glycine max
  Clone ID: PAT_MRT3847_43982C.1.pep
QHIPSGEVVGKSSSTASQSKARTTRTPELHEAFAAAVNHLGGRVTATPHGVLNQMTVEGLDIDHVQRHLQNYRTASYK

SEQ ID NO: 223646 - protein, 94 aa, Glycine max
  Clone ID: PAT_MRT3847_43983C.1.pep
PSQAFHSPDGSPSIYHPQLLHQRPSYKKWQPYLRLQVGHLCPINYITVLINVMNWPHHIQLVARDNSSLLFKQLDKVGRNVVLYELCRASVAHY

SEQ ID NO: 223647 - protein, 86 aa, Glycine max
  Clone ID: PAT_MRT3847_43984C.1.pep
VQPRAYVAYRTLLTMISTTSRVRFGYEGQTTPIMAVPGPHKEPKAKACSGENNTAGFSSEEYAHTHLKKARRWPRRLPDCAWHLPD

SEQ ID NO: 223648 - protein, 87 aa, Glycine max
  Clone ID: PAT_MRT3847_43985C.1.pep
KLAKSPRKTTPKGAFPGGENGGGEGSPGGGGQGFLGPPLAQKTGGPPFFFPKEKRGPGGKGTIKSKGGGPCPPLKSKPPWGIGGPNP

SEQ ID NO: 223649 - protein, 56 aa, Glycine max
  Clone ID: PAT_MRT3847_43986C.1.pep
IFHLHSLSITLTFTISLTIHTSSLFSTQTTNSPLSFTKSSTLTLISTKHSQFLYHQ

SEQ ID NO: 223650 - protein, 168 aa, Glycine max
  unsure (1)..(168): unsure at all Xaa locations
  Clone ID: PAT_MRT3847_43987C.1.pep
MLSAARTTTTTTTHIALVSIPAFSHQVSILEFAKRLLNLHNNTFNITCIIPTLNSSYNNIATKPFFDFLPPNIHCIFLPSVYFEDLNNNGVSVEIQIQLXVSRAMPSVWETLRSLFDATXTVDAIVADAMVPEALDFGKEHPILSYNYFPLVHNGAISYAFIFHNWMN

SEQ ID NO: 223651 - protein, 371 aa, Glycine max
  unsure (1)..(371): unsure at all Xaa locations
  Clone ID: PAT_MRT3847_43988C.1.pep
RSKGGVELSGRNVLHRKWALLLCVASFCAGMFFTNRIWSMAEYKEISRASTEIERIKLNSEGCNLNLVVRXTPITVNVEVSNTQNVITKSRKSETVESTTRKKYFMVIGINTAFSSRKRRDTVRATWMPRAVERKKLEEEKGIIIRXGHGSTSGXILDKAIEVEERLHADFLXLNHIEGYLELSAKTKIYFSTAVALWDAEFYVKVDDDVHVNLATLGLTLSMHRKKPRVYIGCMKSGPVLAQKGVRYHEPEYWKFGEVGNKYFRHATGQLYAISQDLATYISINQGMLHKYANEDVSLGSWFIGLDVDHVDDRRMCCGTPPDCEWKAQAGNICVASFDWKCSGICRSVERMKEVHQRCGEDENALWSGTF

SEQ ID NO: 223652 - protein, 127 aa, Glycine max
  unsure (1)..(127): unsure at all Xaa locations
  Clone ID: PAT_MRT3847_43989C.1.pep
MDEKVPQKINSHHEDAKESSELSNPEDISKAEINSGGSEAEQAEGSEIIVTKQKKSNKKAKSVSRGKKLKKEKSLRYRKESDEEKRKKKKKEKKGLKEKIEEKIEGDHHHHKDEDTSVXVEKVEVVE

SEQ ID NO: 223653 - protein, 79 aa, Glycine max
  unsure (1)..(79): unsure at all Xaa locations
  Clone ID: PAT_MRT3847_4398C.1.pep
SGNPKKGERLNHSTSNLKTAASATSSLRNKKLYLIQLANYIQXXNXXQTHNNNIKALALQLTNLTHFFYKEKEALSVAA

SEQ ID NO: 223654 - protein, 156 aa, Glycine max
  unsure (1)..(156): unsure at all Xaa locations
  Clone ID: PAT_MRT3847_43990C.1.pep
QRELEELKRTTEKLERVLAERNLFQXKVEELEQERNHWQSEFKKVQHELVIYSTQEAEGLYWSRKHMGYRQAEFQILKAELERTKXEKHELKEKLMETETHFEMLHKAQVSYRTPKGDDLERALAKLTRLRIHVSYLLTSVLPHLELREIGFDSQQ

SEQ ID NO: 223655 - protein, 71 aa, Glycine max
  Clone ID: PAT_MRT3847_43991C.1.pep
KWVPQGFHHGQARWHPIRAFLLRFVLFRQRFRCAIQGFDRVVTEASKEFFLLYTRMVSSAVLAAIAYQSNL

SEQ ID NO: 223656 - protein, 140 aa, Glycine max
  unsure (1)..(140): unsure at all Xaa locations
  Clone ID: PAT_MRT3847_43992C.1.pep
LDTPTKPRDQATNKTRTSGSSMATLKMPARRIKRLRRGGTYPERVGVGDPVXYLVAVLRISHRSVLLXELDAKGAIDNEKTXIAARHHLDMSAHVNDXELSKLLGDGPLGTGGVVPNVHYLLLPKKGAGXSKAVAADHDS

SEQ ID NO: 223657 - protein, 62 aa, Glycine max
  Clone ID: PAT_MRT3847_43993C.1.pep
KWTVQQFEGLNNMGNGNMLVMEKGFGGRYSLLMHHGEEELRRFGFTDEMLIDQEWYDYEQGG

SEQ ID NO: 223658 - protein, 73 aa, Glycine max
  Clone ID: PAT_MRT3847_43994C.1.pep
SHLYHIQIPMRIVHILKKLRFYKYLRTPLSVHHLEPLKFPLCYHHSNKPEVTIQTKEHRFYFPNLSYAKLIDK

SEQ ID NO: 223659 - protein, 352 aa, Glycine max
  unsure (1)..(352): unsure at all Xaa locations
  Clone ID: PAT_MRT3847_43995C.1.pep
MAVLPFSYSRSPTLSLPSSQQIRPKTKPNSKTNTCSLIHCCHSQTEPIELNGQARFREKNPATAVASPVVVPPRPRRIILVRHGESEGNVDESVYTRIPDPKISLTEKGKVQAEECGNRIKQMIENDHDQHWQVYFYVSPYRRTLQTLQHLARPFQRSRIAGFREEPRIREQDFGNFQNREKMRMEKGITLAXMGRFFYRFPDGESAADVYDRITGFRETLRTDINIGRYQPPGEKKTDMNLVIVSHGLTLRVFLMSDYKXAVQQFEGLNNMGNGNMLVMEKGFGGRYSLLMHHGEEELRRFGFTDEMLIDQEWHKFAKPADLNYDCPMVNSFFPHLSDSEETCRYDYEQGG

SEQ ID NO: 223660 - protein, 47 aa, Glycine max
  Clone ID: PAT_MRT3847_43996C.1.pep
INELSNILYLLYIDDEFIMSSRIMILVILSKKIVNVIYRIGGFNLVH

SEQ ID NO: 223661 - protein, 110 aa, Glycine max
  unsure (1)..(110): unsure at all Xaa locations
  Clone ID: PAT_MRT3847_43997C.1.pep
MINPKMPYPIAILDMTIESTPTSRIIMDLYSDVTPRTHENFHALCTIENEVSKRGKPLHYKGSSFHRMIPNFMCHGRDYTPGYATXXESIYRSKLSDXNFIKKHTEPSIL

SEQ ID NO: 223662 - protein, 228 aa, Glycine max
  unsure (1)..(228): unsure at all Xaa locations
  Clone ID: PAT_MRT3847_43998C.1.pep
MEVVSQPLCTILTPTRKHSLLIPQQIPNPSKHFPFLSFRATTLSTSSRFSPPPLLFATPENQLSIGEGENTDASDWALQDFYSLRKDVEIMSQRVGEIRESSGLQLLEQELGNLEEQAADSSFWDNRGKAQETLSTLADVKDKIKLLNDFKTQVEDAETIVSLTEEMDSIDRGLFEEASNLIKELNKSIDRYELTQLLSGPYDKEGAVIXFTAGAGGTDAXDWADMLL

SEQ ID NO: 223663 - protein, 68 aa, Glycine max
  Clone ID: PAT_MRT3847_43999C.1.pep
HSRNESNIVPEHVREALHTRTMGGRWDIPKERNANMMDLKSARLEGVMGDARRGWAEKDGPLKYSWGP

SEQ ID NO: 223664 - protein, 95 aa, Glycine max
  Clone ID: PAT_MRT3847_4399C.1.pep
TTAEKGKVNGSLSSSVDQLLLRCEHGHEDNRLHPHLALHPSSCVLDGVTNCRTSVLVITASGSRRMFKRHNICALDCRNDWCSGVMSKRFGRIGL

SEQ ID NO: 223665 - protein, 49 aa, Glycine max
  Clone ID: PAT_MRT3847_439C.1.pep
SPRGEPSISETLQNLTLIFNYALPTHETKRNLLMASKMVLLACPELREL

SEQ ID NO: 223666 - protein, 87 aa, Glycine max
  unsure (1)..(87): unsure at all Xaa locations
  Clone ID: PAT_MRT3847_43C.1.pep
DQLVSGRXXXXGTVXXQLXVXXLXPXNGYAYXLGLGXSPFWGSVHXLEYGFGXHEXXTXGIFEVXPXXXPGXTFRXXIFXXTTDXGP

SEQ ID NO: 223667 - protein, 170 aa, Glycine max
  unsure (1)..(170): unsure at all Xaa locations
  Clone ID: PAT_MRT3847_44000C.1.pep
AASLIASPPVCTDHRAGAGLDAPFIRLTSMHGCPPRKTNHDFPSLACYGGRVRCMHACAPIGWKKYETLSYLPDLAHARLVEEGKYLPSKGWMPCLLVILDHGLVHRARARPPACYHGRYXPMRELAIYGCTDASHAWEELPXARTDCPPGCLRINGCNCLRSAQGMSFI

SEQ ID NO: 223668 - protein, 53 aa, Glycine max
  Clone ID: PAT_MRT3847_44001C.1.pep
PCEAVAHLLRLLPCCAKVGCTNLEALDNAFLDELADPDPRLPLGRSLTDLYSS

SEQ ID NO: 223669 - protein, 56 aa, Glycine max
  unsure (1)..(56): unsure at all Xaa locations
  Clone ID: PAT_MRT3847_44002C.1.pep
QHVRPVIKHGFGAAIVAINGFPQCAGXNPSTVQARVYAYHQYCSPVGVSSGLSLSC

SEQ ID NO: 223670 - protein, 179 aa, Glycine max
  unsure (1)..(179): unsure at all Xaa locations
  Clone ID: PAT_MRT3847_44003C.1.pep
QKFVWVVREPKXTYLVLIILEVSSLGQDPLSFLPNEFMKRTKRXGLVIPFWAPQVEILGHKAIGAFLTQCGWFSTLESVVNGVPIIVWPLFAEQRMIATILVDDLKVAIRPKANESGIVERCEVAKVVKSLLVGNEGMRIRNRMEVMQDAGASAIKNNGFSTTTLSQLATKWKNMGGCK

SEQ ID NO: 223671 - protein, 174 aa, Glycine max
  unsure (1)..(174): unsure at all Xaa locations
  Clone ID: PAT_MRT3847_44004C.1.pep
MSEEGPPKLYTDKPGKAQLKQFRGQQKSNGFSSPAAMGTHAATPPPPTPPPKEPFIRRYKFVWPVLLAVNLGVAAYLFMRTKKKGTGEEEQDDTRVSTKDATPHVVEIPVSSPSITNPVIKREPIPENXQCELLKWILEEKRKVKAKDAEEKRKIDEEKALLKKLIRSKSIPSV

SEQ ID NO: 223672 - protein, 80 aa, Glycine max
  Clone ID: PAT_MRT3847_44005C.1.pep
RKHRFFYLEAEAKIETNLIKWILEDVATSKGSMSDRKENHSLSGPHTNTIGGTITLSELAAHSPTGGKTTARIETECAYR

SEQ ID NO: 223673 - protein, 171 aa, Glycine max
  Clone ID: PAT_MRT3847_44006C.1.pep
MSEEGPPKLYTNKPGKAQLKQFRGQQKSNGFSSPAAMDTHAAAPPPPPKEPFIRRYKFVWPVLLAVNLGVGAYLFMGTKKKDTGEEEQDATPVSTKDATPHVVETPVSSPSITNPVINREPIPENQQRELLKWILEEKRKVKAKDAEEKRKIDEEKALFKKLIRSKPIPSV

SEQ ID NO: 223674 - protein, 105 aa, Glycine max
  unsure (1)..(105): unsure at all Xaa locations
  Clone ID: PAT_MRT3847_44007C.1.pep
IKQVINLIHEQTFYLTMEHYNKLKEDLGIQPWTFAQKRGYAVVNASGCPXQGRNRMSCIKVALNCVSSINVGECFSLTEELHPISMNHRSTDDYLEVKNKSLYAV

SEQ ID NO: 223675 - protein, 107 aa, Glycine max
  Clone ID: PAT_MRT3847_44008C.1.pep
MEQDIEIISQNFKPRYDSPGSRHHFLAGPKRQGIEQLDASVLEELRQRDAMAEARFKCHLAKLKRDRAKRLLYKVDVAIHKAIATLMTAEAMKASEDSLGEIKAYED

SEQ ID NO: 223676 - protein, 68 aa, Glycine max
  unsure (1)..(68): unsure at all Xaa locations
  Clone ID: PAT_MRT3847_44009C.1.pep
MAPKAEKKPAEKKPXEEKKSTVGDKAPXXKKPKAGKKLPXEXXXGGEGKKXKXYKKSVETXKXHSAVP

SEQ ID NO: 223677 - protein, 125 aa, Glycine max
  Clone ID: PAT_MRT3847_4400C.1.pep
MVDERRRFISRAGIKDTFEITQDNCNESVNEPYILVTGTIGFGEVPQPVQSFLNVNHTQLQAVAASGNRNWGQNFAKAGHTISEEYKVPLMMKFEVQGTNKDIIEFKDKVGNFNENHGRKEIQSY

SEQ ID NO: 223678 - protein, 75 aa, Glycine max
  Clone ID: PAT_MRT3847_44010C.1.pep
LFKYAMKPISKIFYLHIQKGTMYTEQINKKRGRRGIPQLNEIFCNKLEKKFVATHGENMHASNLQHKCCNSGEGS

SEQ ID NO: 223679 - protein, 523 aa, Glycine max
  Clone ID: PAT_MRT3847_44011C.1.pep
MDVVFQAPIQRLERRSSWYQNRNNSLSLGFQSHVWSDGKVDSLCNDLSNGPKKPRTQVSYSVPSAGYEFSSRQRNHHQKGLSHKRVRKAKEKKSSDVDRVPEKNIKCLSCGANVLITLGDKGWRESGAHVVLELFDHNEWRLSVKLLGITTRSYKPQQFLQPGSTNRYTHAMMWKGGKDWILEFPDRSQWALFKEMHEECYNRNIRSASVRNIPIPGVHLIEENDDNGSEETFIRSCMYFQQVEADAEMALDPCRVLYDMDSEDEQWISNAQNSVKDNSEFSWISEEMFEKTIDVFEKAAYAKKLDHFTPNEIEDLMLNVGPLCVVKIIYDHWQQRRQKKGMALMLREDDRRGERYQKQVREWELAMTKNNAPSNGCLDKVTTLEKPAMFAFCLKPRGLESLNKGLKHRSQKKISVSGNANSNLDQDGFHTFRRRQNALPFGDEKFLYQGHNYDSFDDSSLALTSPRVFLPRDAGSLKYYPTSNGAGYRNHIPKFHKPRYDTPGSRHHLLAGPMRQGYWSKTS

SEQ ID NO: 223680 - protein, 53 aa, Glycine max
  Clone ID: PAT_MRT3847_44012C.1.pep
QVYIYLSSDCNTTLYTCGCIKTISYYSSLVTYNKSATVVLFVCTHNALASVCW

SEQ ID NO: 223681 - protein, 51 aa, Glycine max
  Clone ID: PAT_MRT3847_44013C.1.pep
MLKPGKGQKDPKFAFKKRKKKKKKKKKKKKKKKKKKKKKKKKKTKGGRSRG

SEQ ID NO: 223682 - protein, 116 aa, Glycine max
  Clone ID: PAT_MRT3847_44014C.1.pep
NKRTLKRDLKAIYWDGGGTTKNGPPTQKKAHAKSQKHDLVYLKNRGKIPTFNPPYASILWEKRAFSFFLKKKKGQIPKAGSEGKKGGHHHAQFYVPHIYGKSVKLLKGKNGQQKVL

SEQ ID NO: 223683 - protein, 32 aa, Glycine max
  Clone ID: PAT_MRT3847_44015C.1.pep
SLKPLLLVIRKNQVVLVIVINFLKIIIKHFHN

SEQ ID NO: 223684 - protein, 70 aa, Glycine max
  Clone ID: PAT_MRT3847_44016C.1.pep
DGKACLFQLWVTSSNGSKNGKESACERGAAISPAVCEVLTGKPDPVYHHHHGGPDDANAYGPAYASNLPI

SEQ ID NO: 223685 - protein, 248 aa, Glycine max
  unsure (1)..(248): unsure at all Xaa locations
  Clone ID: PAT_MRT3847_44017C.1.pep
RPEVKGXTHVIVDEIHERGMNEDFLLIILKELLPHRPELKLILMSATLDAELFSSYFNGAPIMFIPGFTYPVRTHFLENILEMTGYRLTPYNQIDDYGQERMWKMNKHAPRKRKSQIASAVEDAIMAADFKDYSLQTQESLSCWNPDCIGFSLIEYILCNICENERPGAVLVFMTGWDDISSLKEKLLTHTVLGDANRVLLLTCHGSMASSEQRLIFEEPEDGVRKIVLTTNIAETSITINGCXFVLD

SEQ ID NO: 223686 - protein, 62 aa, Glycine max
  Clone ID: PAT_MRT3847_44018C.1.pep
TSNTTENRPQEQECEVDSSRVHPVAGPQQTEGPVVDKACEGRHGATQTAKNLPSCIPSPTYQ

SEQ ID NO: 223687 - protein, 89 aa, Glycine max
  unsure (1)..(89): unsure at all Xaa locations
  Clone ID: PAT_MRT3847_44019C.1.pep
TTHFDGQKPGTSGVRKKVKVFVPPHYLHNSDHATFNALTVEKVRGATLVXFGDEPYFSKEAIENITQLSSTNGGRREWIRQNGLMSTPA

SEQ ID NO: 223688 - protein, 112 aa, Glycine max
  Clone ID: PAT_MRT3847_4401C.1.pep
PAHALVWRPSLCHSTLFHTLLVLPVFASCYERAVLTQELRDSTPGFKDKLPLHPPGDKSLIFSDHRCRHRIAYPLAHLQELKTHYAGQGHVKITLYERRVPHGHTYWNYRNF

SEQ ID NO: 223689 - protein, 58 aa, Glycine max
  Clone ID: PAT_MRT3847_44020C.1.pep
LMSTFIMHTHFLLLFIVFNIGYLENRCCHIYVNIGFTKPILILIHSTSALSTSVLEPM

SEQ ID NO: 223690 - protein, 67 aa, Glycine max
  Clone ID: PAT_MRT3847_44021C.1.pep
LNFRVIGANHTWTSFALKIRMIDFIGGVFSLDASSGLMKTIFSFTLHLCCIIYKICHRLNLSWCHTT

SEQ ID NO: 223691 - protein, 49 aa, Glycine max
  Clone ID: PAT_MRT3847_44022C.1.pep
LLQEATSCTYHNARFTSQTGFLLISELRIHNLVFSLYTRLMMGSAHMLL

SEQ ID NO: 223692 - protein, 186 aa, Glycine max
  Clone ID: PAT_MRT3847_44023C.1.pep
YGCEKTTEGVMRHQQLVELAWGLANSKKKFMWVIRPDLVEGEASILPPEIVEETKDRGLVVGWCPQEQVLKHPAVAGFLTHCGWNSTLESITNGVPLICCPFFNDQTLNCRYISREWAFGMEMDSDNVTRAEVEKLVKELLEGEKGKEMKKKAIEWKKLAQEATHTNGSSFLNLEKLVNELLFVKS

SEQ ID NO: 223693 - protein, 139 aa, Glycine max
  Clone ID: PAT_MRT3847_44024C.1.pep
KGDDNREGGSSVEPNDKQDQHDNVTQDSSGGITIPTAIPTVSVVSVEEPYVGQEFGSEAAAHAFYNAYATEVGFIVRVSKLSRSRRDGTAIGRTLVCNKEGFRMADKREKIVRQRAETRVGCRAMIMVRKLSSGKWVIA

SEQ ID NO: 223694 - protein, 79 aa, Glycine max
  Clone ID: PAT_MRT3847_44025C.1.pep
AGLCPPHNSFYMYIRNIPDITFLNTRKKTHLTQEHWYLHIATGPMRRLKMKGRASPDRRMASARLRASNIRFLANIGMC

SEQ ID NO: 223695 - protein, 222 aa, Glycine max
  unsure (1)..(222): unsure at all Xaa locations
  Clone ID: PAT_MRT3847_44026C.1.pep
ASCNSSKHLLAREAEAARWSQRKQLLAAAGVGRGGGSKREVNPWLTPTMGFPPMTSMHHFRPLHVWGHQTMDQSFMHMWPKHPPYLPSPPVWPPQTAPSPPAPDPLYWHQHQRAPNAPTRGTPCFPQPLTTTRFGSQTVPGIPPRHAMYQILDPGIGIPASQTPPSTXVDFHPSKESIDAAISDVLSKPWLPLPLGLKAPALDGVMGELQRQGIPKIPPSCA

SEQ ID NO: 223696 - protein, 76 aa, Glycine max
  Clone ID: PAT_MRT3847_44027C.1.pep
KIASIIGLVISVEFYISGPWFFNSLKPPVLQNLSQLTAGVHTSNKDVGCSCNLLMLIFLMLAEIMVFCQRTQQGSI

SEQ ID NO: 223697 - protein, 219 aa, Glycine max
  unsure (1)..(219): unsure at all Xaa locations
  Clone ID: PAT_MRT3847_44028C.1.pep
ETSMATCLRLGRFTTIDSLSLFVSTARFSFSSSSSSSSSSSSSGKSKTGKKLMDRLSTVIDAVNDRKLPPELRGQRSNVRSETDIINVVEQRIWHTMEEGKFENLPGKGKPLKLDTNPHADPAEDTLYRILSKNGYAPEWVELNKEIRSKISEWRKSLKKAWATKCSGDHSEWVESSLVLXHVINYIFXQVFRYNLIVPFGRQMFGLKWEKELGYLEEK

SEQ ID NO: 223698 - protein, 126 aa, Glycine max
  Clone ID: PAT_MRT3847_44029C.1.pep
TIPRNPNPLLVSSPPPLSRNPNVFTLTVPRRRRRIRFRVSAAAEPDGPSWSQSLLRGSRRFWGKFGEMVKKETGLDFENRSVKKVGEFVNGDELRRLGTDWVFRFVDWNRWERWKNIKDWEPKRIG

SEQ ID NO: 223699 - protein, 70 aa, Glycine max
  Clone ID: PAT_MRT3847_4402C.1.pep
YIRVADYVDIIILWLPSEAVRTMSSYGMPRSFFLLNRLLQLANGGSLLRVHTITTPMQVRAFSLAIKPIT

SEQ ID NO: 223700 - protein, 145 aa, Glycine max
  unsure (1)..(145): unsure at all Xaa locations
  Clone ID: PAT_MRT3847_44030C.1.pep
LYFIHMIFQFRTGFIAPSSRVFGRGVLVEDSRAIARRYVSSYFIIDILAVLPLPQVVILVIIPEMSGFKSLNTYDCXLNMMVSSNTVPRLLRIIPLYNEVTRSCCLFTITAWTGAAFNLFLYMLASHVITRFLTSPAPVAIQCFN

SEQ ID NO: 223701 - protein, 48 aa, Glycine max
  unsure (1)..(48): unsure at all Xaa locations
  Clone ID: PAT_MRT3847_44031C.1.pep
ILXLKIGQXLSNLFXIFLLXXIXVFXXXXSRIEKFXFLPXXLTPXSXL

SEQ ID NO: 223702 - protein, 187 aa, Glycine max
  unsure (1)..(187): unsure at all Xaa locations
  Clone ID: PAT_MRT3847_44032C.1.pep
LVAPARVGLVAPIDVVVPPGNTGLDPSQTSFFQINKGTVEIITPVELIKKGDKVGSSEAVLLSKLAIRPFSYGLVVVSVYDNGSFFSPEVLDLTEDDLIDKFSVAAPHMFGNAYKNVLAVAVATEYSFPEADKVKEYLKDPKXFAVAAVAAPAIDSSTAPATASKEEEKKEEPAEESDDDMGFSLFD

SEQ ID NO: 223703 - protein, 72 aa, Glycine max
  Clone ID: PAT_MRT3847_44033C.1.pep
GGPGDASSTGVHIWHKTTQSPPKGKTPRPPRGRKSPWCAPRNCGAKFLGLGPKRLEFEGAPQKEKGPPGVFF

SEQ ID NO: 223704 - protein, 218 aa, Glycine max
  Clone ID: PAT_MRT3847_44034C.1.pep
MFSRMFGKPKQETNAVATLDKLNETLEMLEKKEKVLLKKVAAEVEKAKEFTRGKNKRAAIQCLKRKRLYEQQIEQLGNFQLRIHDQMILLEGAKATTETVDALRTGAAAMKAMQKATNIDDVDKTMDEINEQTENMKQIQDALSAPIGAAADFDEDELEAELEELEGAELEEQLLQPATTAPAAPVQVPAGRQPTRPVPAKRTPEEDELAALQAEMAL

SEQ ID NO: 223705 - protein, 125 aa, Glycine max
  Clone ID: PAT_MRT3847_44035C.1.pep
KKQVSERDGELIALRGNVACLYDACINFVIVLENEKAELVGRKVESADLGINLETPSFDDGISEECIKTLTDRLLLAAKGFASIRTEFLDANLKEMKATITYFQRVLYDNDVHRDKMCSELVKHI

SEQ ID NO: 223706 - protein, 94 aa, Glycine max
  Clone ID: PAT_MRT3847_44036C.1.pep
VSFCHAKNVLCRGPPWALEHGVLVLWEGFTFFVWQRGWVAFALLPPLGLGALCGQLRYCVLWASVLCCFVPGIFRPRFRRLKFRCEYFGGENLI

SEQ ID NO: 223707 - protein, 85 aa, Glycine max
  unsure (1)..(85): unsure at all Xaa locations
  Clone ID: PAT_MRT3847_44037C.1.pep
GGQAAGRIEMELYTDVTTSTADNLRALCTGEKGARRSGKPLHYXGSFLHRVIPNFMCXGGDFTAGYGTGSEYIYGAKFTDENFMK

SEQ ID NO: 223708 - protein, 59 aa, Glycine max
  Clone ID: PAT_MRT3847_44038C.1.pep
HGFPNGFVIKRRSKELDYGFTIEDIIRCMQAYINLDPIERPLYRPLFFFFLIQQIIAQF

SEQ ID NO: 223709 - protein, 65 aa, Glycine max
  Clone ID: PAT_MRT3847_44039C.1.pep
IVGDIGAGPVENVVHDCGLHGLRSRSYWERGPCEQCPLMCGDRHRECSSVMCQGRLDATESGLAS

SEQ ID NO: 223710 - protein, 181 aa, Glycine max
  Clone ID: PAT_MRT3847_4403C.1.pep
FITTDPIYIEYHDYYWGQPIYDSKELFKLMALESQHAGLSWLTILKKKESYEQAFYNFEPQFIAHMTEQDIDYLMKFPNIIHNRKKLEAIVSQAKGYLKIEKDYGSFSKFLWSYVNHQPINMGYKKPRDRKKVDQRATQLSKDLKAYGFKFLGPVTVFSFLEAAGLYDSHLEGCPFKPNHE

SEQ ID NO: 223711 - protein, 56 aa, Glycine max
  Clone ID: PAT_MRT3847_44040C.1.pep
LAELPINRPERHPGSTQSSGSAEEREFTQLRCLISILFNSCPSFKERFPTLVASLD

SEQ ID NO: 223712 - protein, 62 aa, Glycine max
  unsure (1)..(62): unsure at all Xaa locations
  Clone ID: PAT_MRT3847_44041C.1.pep
RLEAHCKEYKNLNSFFAIVMRLSNVAVSRLALTWEKLXPGKFKKFYAEFESVMRMIANTALQ

SEQ ID NO: 223713 - protein, 89 aa, Glycine max
  Clone ID: PAT_MRT3847_44042C.1.pep
KWVLSTLTHKKGAILSFPTKVNALILFKKAKKFIGRSFWFFLKKSFHPFPLALDLLDNNLKWVFFLGFFFFIYPSFCITGNIKLFGVFP

SEQ ID NO: 223714 - protein, 49 aa, Glycine max
  Clone ID: PAT_MRT3847_44043C.1.pep
LIHLHNLPRLTLYLTATNPYPYPILTSFPSSILLSLYLHLLPGELHLDY

SEQ ID NO: 223715 - protein, 212 aa, Glycine max
  unsure (1)..(212): unsure at all Xaa locations
  Clone ID: PAT_MRT3847_44044C.1.pep
TRPVAEMTKVAQQKGSDPLLWAVQMYSNLNSAGESLPSLQLAEFLVSYICWDNNVPILWKFLEKALTLQIVPPMLLLALLSVRVIPCRHVQPAAYRLYLELVKRHAFELKSQINRPDYQKVMKSIDAVLHLSNIFGMPQSEPGILVVEFIFSIVWQLLDASLDDEGLLEFTPDKKSRWATLYHDMELDRHDNYSEQRTEHHEKLQNAXTLYG

SEQ ID NO: 223716 - protein, 273 aa, Glycine max
  Clone ID: PAT_MRT3847_44045C.1.pep
MLIISVLAVINSSLLFFCLFIFSQFAFALFFCITTHTITILLRREEGGKMSLENESEITHLKKNLKVQMERNVSLEKENKNHRQEVARLKSQIMSLKAHNIERKSMLWKKIQKAMDGNNSDTLQHKAAVKVTMLEKSPPNERVHTNSDLLETPKVKDRSVKVPPPAPSSNPLLPSHKTEKGMKVQPLALPRTAPPPPPTPPKSLVGLKSVRRVPEVIELYRGLVGGRVGNDNKISTNGTPAAAFTRNMIEEIENRSTFLSAVSLVAVCLFFKF

SEQ ID NO: 223717 - protein, 58 aa, Glycine max
  unsure (1)..(58): unsure at all Xaa locations
  Clone ID: PAT_MRT3847_44046C.1.pep
XLNRYFFLNSLSFATYLHAPXKIXFIYVKGGNRFLPLIYIILYSSSFNLPKKAKMLVP

SEQ ID NO: 223718 - protein, 92 aa, Glycine max
  unsure (1)..(92): unsure at all Xaa locations
  Clone ID: PAT_MRT3847_44047C.1.pep
QQKEIQGFLFGGRTNQTSHXSTFXNAPLNHLATKAARKSSLFTFRVKKPHPFTPGTVSLNDILNYHNSTELLIRKLPFHRLFLYIAHYFKTY

SEQ ID NO: 223719 - protein, 80 aa, Glycine max
  unsure (1)..(80): unsure at all Xaa locations
  Clone ID: PAT_MRT3847_44048C.1.pep
VPHXXFLHSQXXRRXVPXGGYSXXXRXSXPLSSPRFSHKTKXXXNXSAXCVLSLSXTELGFAXLPRXLLCPXTRGGGRET

SEQ ID NO: 223720 - protein, 128 aa, Glycine max
  Clone ID: PAT_MRT3847_44049C.1.pep
KKIKVWDAVSGVRCYTFEGHDAPVCSICPHVKQHVDFIFSTSTDGKIKAWLYDSLGARVDFDAPGYGYTTLAYSADDNRLFSCGTGKDGEPYLVEWDESEGYIKRTYKGLKKPCFSAIHFDSTQKGLL

SEQ ID NO: 223721 - protein, 63 aa, Glycine max
  unsure (1)..(63): unsure at all Xaa locations
  Clone ID: PAT_MRT3847_4404C.1.pep
MALRNQHTVDHPSFKRGIVGDGGXAKTAFVNRHISGEFDRKYEPTIGVEVQPLDIFTSCGRIR

SEQ ID NO: 223722 - protein, 89 aa, Glycine max
  Clone ID: PAT_MRT3847_44050C.1.pep
RHKLGDAEAGNFGQFFGPSEEEGKMSKSKLSRWVCLFLLTAVLVIILCAFRIKWNQFFRQHASPNFTAYKFVSWDLPTLTFIPIKYIQG

SEQ ID NO: 223723 - protein, 54 aa, Glycine max
  Clone ID: PAT_MRT3847_44051C.1.pep
PMGASLSMSSLAAVLCVSFHSSGASLSMSSLAAVLCVSFHSSLHCISLSLSFLF

SEQ ID NO: 223724 - protein, 151 aa, Glycine max
  unsure (1)..(151): unsure at all Xaa locations
  Clone ID: PAT_MRT3847_44052C.1.pep
AHSGTGRVHSRVRFGSKNAPAPKKASRGSGRDTDRPLWYPGGKPXNPTMGHLSENXSIQPFVMGITAEYLQCKLESLEQKLAKNRVGNIMETSTELAYMKTTLSSTLKRGVWARDVYAGADHIHGISALLLNLGFHMVECFTATTRQVRPK

SEQ ID NO: 223725 - protein, 129 aa, Glycine max
  Clone ID: PAT_MRT3847_44053C.1.pep
TPVTTTPNDIHKEQALKLKQEYQKGKDSMSCNALINGTEASVHCKLFHCSENGAFCRCKRSKSKKRRTRSTRTSGTATAARDTTRPLRHRNRRRSAPFPCRKSYASLPATVISVLNCSVPLSSSSSLRC

SEQ ID NO: 223726 - protein, 181 aa, Glycine max
  Clone ID: PAT_MRT3847_44054C.1.pep
MCGVSKGKPSQIDLIMEEKYAKEGMHHKISALLEFSATDDLIGFKDAVEKEGHDVDGVGFWYGRRVGSKKIGYEERTPLMVASMFGSLDVSTYILGMGCIDVNRASRSDGATALHCAVAGGSAASVEVVKLLLDASGDVSAVDANGNRSIDLIVSVANSIFNQRSSVLQALLGGTSDADQA

SEQ ID NO: 223727 - protein, 124 aa, Glycine max
  Clone ID: PAT_MRT3847_44055C.1.pep
MSSKAWLAFLLLALAMVAETYATIDEFATTLEEFDPIISDGDADLIVDDNEFLMSSESTRRSLMHGHPGKGRGRARYISYAALRSNQVPCGRRGRSYYNCNQRGRANPYNRGCTAITHCARDTS

SEQ ID NO: 223728 - protein, 46 aa, Glycine max
  unsure (1)..(46): unsure at all Xaa locations
  Clone ID: PAT_MRT3847_44056C.1.pep
XXXXLGDGATSARGVFRXRXXAKKXXFXYXXRRAKXEXNETXMANE

SEQ ID NO: 223729 - protein, 156 aa, Glycine max
  unsure (1)..(156): unsure at all Xaa locations
  Clone ID: PAT_MRT3847_44057C.1.pep
WPSVFFSTTYICCGTQNPNTFICCADESKFVRVSFQLEKNCNFGEQFLIVGDDPVLGSWDPLEALPMTWFEGHVWAVELDMPAGKSFQFKFILKGKGGDIIWQPGLDRMIHTWETMNRIIVLEDXENAELQKIIEEDQLAEPNEEPQVDLEVPTLA

SEQ ID NO: 223730 - protein, 112 aa, Glycine max
  Clone ID: PAT_MRT3847_44058C.1.pep
AKTLASPRKGHHKHGGHSGTEKRQHPATRKRNLVKPPQKATSQAQNIEDFTRRNPSYRPAEKQLGHPPMGDHHRKTQRASADSNEPQRNPKHLTRRNHLRRYRPESQPKHTK

SEQ ID NO: 223731 - protein, 59 aa, Glycine max
  Clone ID: PAT_MRT3847_44059C.1.pep
GSAIITIRVADSGRRDRRPVSHPGWLRQIVNDGSPSRPVRRRLSAHYEAEGVSKDSTVR

SEQ ID NO: 223732 - protein, 94 aa, Glycine max
  unsure (1)..(94): unsure at all Xaa locations
  Clone ID: PAT_MRT3847_4405C.1.pep
LLLRYSTNSYTRARWNILIKESNKGTHWTCPXSYTLTINLSGRLDRFVGHLYHIAKSEGSIERTARNHQSMMTILVARSTDSLLTGLVLTTMSF

SEQ ID NO: 223733 - protein, 315 aa, Glycine max
  Clone ID: PAT_MRT3847_44060C.1.pep
VSGSLEVPSGISPGQTFDVQLPKIEGSGEETLLSISFQLKEATSYLKAGFEIATAQISITPATPLKRPQSSGKQITVEKPFRNTLKITADQAIWEFNTLHGSLTSWIQGSTELLSKAPEIDIFRAPTDYDIPQDGWDWKDKQLHHAKPLTRKVEWSQSDSETLKVTVHQRVAPPVLSWSVDCVLTYTFSANNTLSVHVVGTPKGENLPRTLPRIGLVMELPKQFQRVEWFGRGFGETYRDSKLSQPVGKYTASSVDELWVDYEVPQESSNHTDTRYLSLTNGSGAGLLAQFADQKSEQRKLFDFQVSHYRMKDVA

SEQ ID NO: 223734 - protein, 199 aa, Glycine max
  Clone ID: PAT_MRT3847_44061C.1.pep
MDTMACNKGQNVRKAKKKQVKDELDRLKQAEKKKRRLEKALATSAAIISELEKKKQIKKEEQQRLDEEGAAIAEAVALHVLLGEDSDESCKVVIDNGNQNIGISVSGESACFPHLEGGGGWSFERVGWVSDAYRYGCDRGAAENGKWSFTSGPLEKNVYEPLYEEAGWGPTGFSVDLIAAQAVRSLHIAKEADEARIIF

SEQ ID NO: 223735 - protein, 109 aa, Glycine max
  unsure (1)..(109): unsure at all Xaa locations
  Clone ID: PAT_MRT3847_44062C.1.pep
MGKCKGCGKLGRMRPSHMSAYEFSLMLAPVVSVWDCIVRKMRYSYRPEWVYIYYLGALNYMDTMACNKGQNVRKAKKKQVKDXLDRLKQAEKEKRRLEKALATSAVIIS

SEQ ID NO: 223736 - protein, 286 aa, Glycine max
  Clone ID: PAT_MRT3847_44063C.1.pep
MGQALGCYQVDQSNVAIKEHFGKFDDVLEPGCHCLPWCLGYQIAGSLSLRVQQLDVRCETKTKDNVFVTVVASVQYRAVSEKASDAFYRLTNTREQIQSYVFDVIRASVPKLELDSVFEQKNDIAKAVEEELEKAMSTYGFEIVQTLIVDIEPDVNVKRAMNEINAAARLRLAANEKAEAEKILQIKKAEGEAESKYLSGLGIARQRQAIVDGLRDSVLAFSENVPGTTAKDVMDMVLVTQYFDTMKEIGASSKSSSVFIPHGPGAVKDIAMQIRDGLLQATTSQN

SEQ ID NO: 223737 - protein, 43 aa, Glycine max
  Clone ID: PAT_MRT3847_44064C.1.pep
LEHLAEDRLSQSAVPAEVGHLIGKFSSALGRAFLFDLIPTAHN

SEQ ID NO: 223738 - protein, 104 aa, Glycine max
  unsure (1)..(104): unsure at all Xaa locations
  Clone ID: PAT_MRT3847_44065C.1.pep
DSADSCNVVINXCECKTWNYNRLEGLFMDERRACFPHLDGGTWSVSAESGKWSFTSGPLEKNVYEPLYEEAGWGPTGFSVDLIAAQAVRSLHIAKEADEARIIF

SEQ ID NO: 223739 - protein, 286 aa, Glycine max
  Clone ID: PAT_MRT3847_44066C.1.pep
MGQAFGCYQVDQSNVAIKEHFGKFDDVLEPGCHCLPWCLGYQIAGSLSLRVQQLDVRCETKTKDNVFVNVVASVQYRAVSEKASDAFYRLTNTREQIQSYVFDVIRASVPKLELDSVFEQKNDIAKAVEEELEKAMSTYGFEIVQTLIVDIEPDVNVKRAMNEINAAARLRLAANEKAEAEKILQIKKAEGEAESKYLSGLGIARQRQAIVDGLRDSVLAFSENVPGTSAKDVMDMVLVTQYFDTMKEIGASSRSSSVFIPHGPGAVKDIAVQIRDGLLQATASQN

SEQ ID NO: 223740 - protein, 281 aa, Glycine max
  Clone ID: PAT_MRT3847_44067C.1.pep
LNAGTAGIWRIAAINEAGGWKDRTTVEDMDLAVRASLRGWKFLYLGDLQAKSELPSTLRAFRFQQHRWSCGPANLFRKMVMEIVRNKKVRFWKKVYVIYSFFFVRKIIAHMVTFFFYCVVIPLTILVPEVHVPIWGAVYIPSVITILNSVGTPRSIHLLFYWILFENVMSLHRTKATFIGLLEYGRANEWVVTEKLGDSVNNNKNKSGDAAKKNNAIKATPKKTRSKFVERLNLLELGFAAFLFVCGCYDYVHGKHNYFIYLFLQTLTFSIVGFGYVGTIV

SEQ ID NO: 223741 - protein, 106 aa, Glycine max
  unsure (1)..(106): unsure at all Xaa locations
  Clone ID: PAT_MRT3847_44068C.1.pep
RGTHGKLFEGXHIPASNISXAGENHALXLPLMAQEEILSSSASDLRTAMVSKNSKPQATAMHVGAIEIIIARPARPDCNICGALLLGRTYHTNPENAVXSIFVAPL

SEQ ID NO: 223742 - protein, 29 aa, Glycine max
  Clone ID: PAT_MRT3847_44069C.1.pep
SKEGGLLSNSVLCSRQQVQLCSIGPSKNK

SEQ ID NO: 223743 - protein, 122 aa, Glycine max
  unsure (1)..(122): unsure at all Xaa locations
  Clone ID: PAT_MRT3847_4406C.1.pep
QRKHRPLCLKNFTNCRTQLTTKWSKPLLFIILKIFPLKMATCTIITIDQIVIYQKERETSGDGINKKVVCSHLADRKKWNRWNCRRYNTSVIIRMSFFFSNSILNGLDYFKLIXVKIMFKVR

SEQ ID NO: 223744 - protein, 140 aa, Glycine max
  unsure (1)..(140): unsure at all Xaa locations
  Clone ID: PAT_MRT3847_44070C.1.pep
KSDKFDIYQCARFQQDLREVHLTVVKRIFRYXIGTPNLSLCFKHSXQFRLISYCDVDYVGDKLERKSTSGSCXLIGENLVTWISKKQGLVALSNVKAEYKLATSCCTQLIWIKNQLEDCNIYKKEASLSNVPFCRLLAAV

SEQ ID NO: 223745 - protein, 98 aa, Glycine max
  Clone ID: PAT_MRT3847_44071C.1.pep
AITQFFFVFAKTPYFLRFFGERSTLRGHQYRCFWPTTSPPFKFSTPPLLSCKGGFSLTVGFKPGPRTNCGGSPPVLRNWRIFGGFEKPNQAFFPRGFP

SEQ ID NO: 223746 - protein, 53 aa, Glycine max
  Clone ID: PAT_MRT3847_44072C.1.pep
WPQTNSLPLPLEGISILSGFFYPRHSLSIPRLINIYRRTLNIKQKHFWLAPSI

SEQ ID NO: 223747 - protein, 118 aa, Glycine max
  Clone ID: PAT_MRT3847_44073C.1.pep
MMEKEREDEIEDMSMSPPSIGSMQIAGSNGFGHSMEFMSQAYLPNMYTEIDIKVQDSSFNQDPPLPIYLKFEDVEFRVIDSQSASNNPVKTMMSKVGTQHHVEEDRCKKILKSITGSI

SEQ ID NO: 223748 - protein, 144 aa, Glycine max
  Clone ID: PAT_MRT3847_44074C.1.pep
KKKAGGFLGKTTGESGLKKPFFLGGNPKRTPEGENFGEKNGVNSPALFWPGIFFFFRRPWEKPGSKKRGIWGGLTRKRGWNQKQKPAGSLLGPPGGGLCHGPLMKLGWEKPKGGFLIKCRGESPEIRKKPSPYWASGEGGGAPL

SEQ ID NO: 223749 - protein, 39 aa, Glycine max
  Clone ID: PAT_MRT3847_44075C.1.pep
WSCGSYLDCDFILGRCVIPLLKVSLGNDKYNFCRFVRFV

SEQ ID NO: 223750 - protein, 63 aa, Glycine max
  Clone ID: PAT_MRT3847_44076C.1.pep
LSDTYHTNPENGGRNIFGGPFKGGRSIRVDTFRLPSVIIVPDMNLRSQLLSTTTNGDSVQGKD

SEQ ID NO: 223751 - protein, 60 aa, Glycine max
  Clone ID: PAT_MRT3847_44077C.1.pep
MAAQPKPQNRLIFNIVIIIAMHTEALPIANRFQLTDDPDTPFTQWVPCIHYHVTYKDLNI

SEQ ID NO: 223752 - protein, 71 aa, Glycine max
  Clone ID: PAT_MRT3847_44078C.1.pep
LKGCLFGSIKKWAFEKKLGVYAKMLSFVNFNSIDSLWLTWYSNPCRPSFFIVWGDIILHFETGGQLSYGFF

SEQ ID NO: 223753 - protein, 158 aa, Glycine max
  unsure (1)..(158): unsure at all Xaa locations
  Clone ID: PAT_MRT3847_44079C.1.pep
LASAILSCAVNFYHYYDLAWGDGHAKTLTTSNILNISLDKHSGWGLHSTNEPPSGQMDQQLTLLPGHCAGTWNSAYYRASKGSHWDEIDYAFLGNLNEDPYIINTNEFMNGKRSKEXYVYLWLDPSANFHTYSIVWKSQRKISSVDGTTILEFDNMAS

SEQ ID NO: 223754 - protein, 78 aa, Glycine max
  unsure (1)..(78): unsure at all Xaa locations
  Clone ID: PAT_MRT3847_4407C.1.pep
XSXLXNXESCYHGDXXCXLXXQNXHXXLLSSAMLLTSXIXXLPIXRTXFXXXXXXXXFMESGXXGTXXXXRAXXRXIN

SEQ ID NO: 223755 - protein, 72 aa, Glycine max
  unsure (1)..(72): unsure at all Xaa locations
  Clone ID: PAT_MRT3847_44080C.1.pep
XXXNPXLXFTSXIXEASEVSNXXFXVXDXXGGQTHPLCMXIXIITDRLRSTLXTHASXXLSRGVKRTRVPLR

SEQ ID NO: 223756 - protein, 103 aa, Glycine max
  unsure (1)..(103): unsure at all Xaa locations
  Clone ID: PAT_MRT3847_44081C.1.pep
PTNXXVPPLSPXTATTPXHSXPTPPPPIKANAPXPTPAPPPPXPXTXPPPAPPPXPXPSEPPPAPNATTAVHPIHHPKKTSTIKKNALRPVTKHSPQYQPQLH

SEQ ID NO: 223757 - protein, 141 aa, Glycine max
  Clone ID: PAT_MRT3847_44082C.1.pep
QVTELAGYVDLIPWHRFGYCASNNEIYKAITGFQRVHIVDFSITHCMQWPTFIDGLAKRPEGPPSLRITVPSCRPHVPPLVNISIHEVGLRLGNFAKFRDVPFEFNVIGNTEGPLTPAELSDESTSHFEAMLSLLNPTMLN

SEQ ID NO: 223758 - protein, 105 aa, Glycine max
  Clone ID: PAT_MRT3847_44083C.1.pep
FVFFGAAQRVIKGAGYSIRECQKHTRPAPIRIHLMRGHKKNRLFYKRRCLESDNGYFRKSCFGAKYTLSTWVPNLKTELLRPVFVPTPGVNNSQSDDDGCIFRKV

SEQ ID NO: 223759 - protein, 39 aa, Glycine max
  Clone ID: PAT_MRT3847_44084C.1.pep
NTGWAGPTGYLDLVEGMPGSAQSLWSTSCSQEFINRHMT

SEQ ID NO: 223760 - protein, 62 aa, Glycine max
  Clone ID: PAT_MRT3847_44085C.1.pep
LRILSYPNMIMRFSYSVREYSSLYIVFYCILLLSVITVTVRQLQLTPPMLAGPDSIYRVVTQ

SEQ ID NO: 223761 - protein, 71 aa, Glycine max
  Clone ID: PAT_MRT3847_44086C.1.pep
FDFPSRPLALSKHTYPFPSTKPILPNLTNTTFIGPFTLRRPLTPPFSPFGSQTTHPFNRFCPSLPLGVPPH

SEQ ID NO: 223762 - protein, 127 aa, Glycine max
  Clone ID: PAT_MRT3847_44087C.1.pep
FFFFFFFFFFFFFFFFFFFWEKNVFHIYTPPHTPNFLGKKTYRGISGKKKNTLLLTLFFFKPLRITQWDLVEKKNYYLGGDLVFWKGIYINHHILYLEVLRIKVYGVFFAFPGPRGILGREFLVNLL

SEQ ID NO: 223763 - protein, 61 aa, Glycine max
  Clone ID: PAT_MRT3847_44088C.1.pep
GTQKGGPKNGTSLETFKKGVIGLIKDPNPPYYLLVSQNLPVNFWRVKGNPPFLVFGKGAWG

SEQ ID NO: 223764 - protein, 328 aa, Glycine max
  unsure (1)..(328): unsure at all Xaa locations
  Clone ID: PAT_MRT3847_44089C.1.pep
NVLHWHIIDEQSFPLEVPTYPNLWKGSYTKWERYTVEDAYXIVNFSKMRGINVMAEVDVPPHAASWGIGYPDLWPSPSCKEPLDVSKKFTFDVLSGILTRTDMIRKXIFPFELFHLGGDEVNTDCWTNTSTVNKWLRNHNMTAKDAYQYFVLKAQNIALTKNWSPVNWEETFNTFPTKLHPRTVVHNWLGPGVCPKAVAKGFRCIFSNQGVWYLDHLNVPWDDVYTAEPLEGIRKASEQKLVLGGEVCMWGETADTSDIQQTIWPRAAAAAERLWSQRDSTSGNANIIALRRLHYFRCLLNRRGVPAAPVNNFNARTAPVGPGSCFEQ

SEQ ID NO: 223765 - protein, 512 aa, Glycine max
  unsure (1)..(512): unsure at all Xaa locations
  Clone ID: PAT_MRT3847_4408C.1.pep
SASDGMSRFKTSRINLVDLAGSERQKSTGAAGERLKEAGNINRSLSQLGNLINILAEVSQTGKQRHIPYRDSRLTFLLQESLGGNAKLAMICAISPAQSCRSETFSTLRFAQRAKAIKNKAVVNEVMEDNVKHLRQVIRQLRDELHRIKANGYNPMESSGGHSAAWIRRSLTLLQSSLNRPPPLSRLDEDGDEEMEIDEEGLEDHDGVSYNXPICRVILVPVDCHESADKTKKQVIKAVEKVLAGSIRREMALEEFCAKQTSEIMQLNRLVQQYKHERECNAIIAQTREDKILRLESLMDGVLPTEEFMEEELVVLTHEHKILKEKYENHPEVLKMEIELKKVQEELEKYQNFYXIGEREVLMEEIQSLRSQLQFYVDSSSTSARKQYPLLQLTYLSEPSMAATLTAIPVSTEERVETNETLASSRNDIEVQFEQERIKWTEAESRWISLSEELRAELESSRLLAEKRKQELDAERQCTQELQEAMHMAIEGHARLLEQYADLEEKHIHLLA

SEQ ID NO: 223766 - protein, 98 aa, Glycine max
  Clone ID: PAT_MRT3847_44090C.1.pep
KGIRKAPEQKTGPGGKVCMWGETADTSDVQQTIWPRAAAAAERLWSRRDSTSGNVNIIALPRLHYFRCLLNRRGIPAAPVKNFIARTAPVGPGSCFEQ

SEQ ID NO: 223767 - protein, 243 aa, Glycine max
  Clone ID: PAT_MRT3847_44091C.1.pep
MNKFVLVLFTVSWVLLFGLLDGKPPIGSGRVIWDTGGQQLFASYAYYITARHPDLGSGGLKLIKTGNSTCPNTILQYFPKYTHGLPMYLLISVISNFIVYEGTPLAIFMAKKPNCVESLVPDPMKGSPDPPSPLNPPNSSRLLVFVDNSIHKTCVGTAGPEAHPGLLTYSGTFHIEILENVRFGYSSYKLVFCFDGSDYQNCSYIGTYDNGEGGRRLILTETNPFLFSFVHALKFDGTIKSVG

SEQ ID NO: 223768 - protein, 549 aa, Glycine max
  Clone ID: PAT_MRT3847_44092C.1.pep
MLNKYRGLIIPKGSAILLQMSIHFGIYPRGLLNCGNSCYANAVLQCLTSTKPLVVYLLYRSHSKACCAKDWCLMCELEQHIMILRENGDPLSPSRILWHMRSINCHMGEGNQEDAHEFLRLLIASMQSICLEGLGGEKKVDPRIQETTFIQHTFGGRLQSKVKCLNCNHESERYENIMDLTLEILGWVESLEDALTQFTSPEDLDGENMYRCGRCTSYVRARKQLSIHEAPNILTIVLKRFQEGRYGKINKCITFPEMLDMIPFMTGTGDIPPLYMLYAVVVHLDTLNASFSGHYVSYVKDLQGNWFRIDDIEVQPVLVNQVMSEGAYILFYMRSCPRPPVEHTVKAVQQSVYDSSKHNPMEMQKPNKPGHSRHGSHQFFVSESSPNARPEISTHIIDTTNGFLRKSTNRNALPVTQTYAKNVRSEFSDTTSSDWSLFTSSDEASFTTESTRDSFSTVDYGDSCNMDPISSIFNYPPEKSYLKFSHSRPVTRVFPEKGHVKQVQRIDHSKRVSHSSSNEHPPNGNCGMYVYYGSNPVCGTTQTSSQCEF

SEQ ID NO: 223769 - protein, 46 aa, Glycine max
  Clone ID: PAT_MRT3847_44093C.1.pep
DYSRATNHLPCTRNEKVQSLESYRGSFNKQHENFYKFKYWYALRPD

SEQ ID NO: 223770 - protein, 28 aa, Glycine max
  Clone ID: PAT_MRT3847_44094C.1.pep
KSPTDWNWDTGRRMPLNVSSLKQSCLHV

SEQ ID NO: 223771 - protein, 225 aa, Glycine max
  Clone ID: PAT_MRT3847_44095C.1.pep
MSGVVRAALKSTTSVCALVQRSHGLLPMRCFSTEAEQPPLNSTPRPPPFFETDHSGLTYGNLLGVRKHALKTDIINFLEGCNLTLEDVKMDYDRSYSLVSTLLQFPTRDSFDHAVKVILKKGRLYKLDRVNLHQWDQVKPYDGKTILIQGMPRAGTYEDIGRILSGFEFDSSSISLFLRPGGTAGADPIKLATVRFNSRTQAMNAYIAKNGTFCQNNRIWIQVIQ

SEQ ID NO: 223772 - protein, 93 aa, Glycine max
  Clone ID: PAT_MRT3847_44096C.1.pep
FRLPSNWKKWAMRPYWLLPQLSQSGCFSRQVSSVKLGNSQLRCCQPWARKEGWAVSIGEHCTLQERALKLVFATNVNPFFFFTRKLFLINFFF

SEQ ID NO: 223773 - protein, 114 aa, Glycine max
  unsure (1)..(114): unsure at all Xaa locations
  Clone ID: PAT_MRT3847_44097C.1.pep
XXXHXXXXXRXXXRXSXSIXXLXXXXSXXXXXFMXXXCXXXXRXXXTXXXXXXIXXXXXXXXRAPXHXXRXXXXSXXXXGXLNXXXLYVXXXSXCGXXXXXSXXSXXRXXXFXY

SEQ ID NO: 223774 - protein, 202 aa, Glycine max
  Clone ID: PAT_MRT3847_44098C.1.pep
FPDDDTDDVDDYRQGMGIDLLAGVEAVISHLVVKEFQIPCAHAPAMSPLPMSLSLSPKSAAEEIGYTFLPCVLAGLSNAPQYLVMDSKCLEKGCILASDVDSVILPKNACGGDASFAFARNKNKKPLIITVEKNQTVFDDTANKFGLEVLHVSNYWEAIGVIAAPKAGIDPFSLRRNKIFNIGGSFFMPINGHSIPKKKVVS

SEQ ID NO: 223775 - protein, 82 aa, Glycine max
  Clone ID: PAT_MRT3847_44099C.1.pep
NLVNKKGVFHFDQQLFSGGFTDFQVTTYSTSFLTFYADFASAMVKMGNFSPLTGSSGQICSNCRQVYLINGENLSMSLYCAN

SEQ ID NO: 223776 - protein, 81 aa, Glycine max
  Clone ID: PAT_MRT3847_4409C.1.pep
NFSLFALSPQLCTHFLFVICNQITCLISFLISCLIHILFLNPKTEINVFYPCSRNCIYVKTEFQNSKTKNYFHVSKIKKIT

SEQ ID NO: 223777 - protein, 183 aa, Glycine max
  Clone ID: PAT_MRT3847_440C.1.pep
QQLQQMKGFQDLKLPQFKDMKLPNPNPNPNPKAVKFSLPEDDLSDDELDEYDDEFDDEFDDDDMDDPQHPLNKMMMMKPPMGAKPPIGSVPMGNGAQMMSNSMMNAQKGGNGGGNNGKKGGGGSGGPVPVQVHNMGGGNEGKNGNGGKKEGGGGGNNQTQGGGNKNNGGKNGGGVPEGKNGNN

SEQ ID NO: 223778 - protein, 72 aa, Glycine max
  Clone ID: PAT_MRT3847_44100C.1.pep
TPAGTTTTTSSRTTGTSSTAPPTTTPLTSSTATAATIMLTRPGYTAAPTLLKKTLTRRTINAIESIPARWKR

SEQ ID NO: 223779 - protein, 99 aa, Glycine max
  Clone ID: PAT_MRT3847_44101C.1.pep
KLLYLVLCQIRDSFGCQLDHKDMEVAMELEDDLFFADLSKEIALLIMDEDEDPLASCPPDSLQVLYYFHFFQHMPPHILFFFPRAFQLWHFEKRFCLLQ

SEQ ID NO: 223780 - protein, 204 aa, Glycine max
  unsure (1)..(204): unsure at all Xaa locations
  Clone ID: PAT_MRT3847_44102C.1.pep
MMNHDSDDQQHHILHASQDDEIMDSLILHHDDDGSSVHHHHRPTSPQSPNSPFNSFLDPPSYADAIFTSFDSNGHDQAVESPAARFGSGDYLHISVTDPQKEQDLATSTSLVPGAATFYTYLITTLINLPEYGGVGSEFAVRRRFRDVVALSERLALAYRGFFIPXRPDKKXVESQVMQKQEFVEQRRVALEKYLRKLAAHPVI

SEQ ID NO: 223781 - protein, 38 aa, Glycine max
  unsure (1)..(38): unsure at all Xaa locations
  Clone ID: PAT_MRT3847_44103C.1.pep
XXXMLCGSRCPGACXLFYDXPGRLLHGFXXNAAHVGGS

SEQ ID NO: 223782 - protein, 94 aa, Glycine max
  Clone ID: PAT_MRT3847_44104C.1.pep
DNGLKSDIFFVQAWYQMFGGHGGLLKEFVYVGIGLLDYKEDRILAKTIWYKIQFGLFRSYCKIKLALGSSSILPVMKRRVGVFILLEESFKIMI

SEQ ID NO: 223783 - protein, 94 aa, Glycine max
  unsure (1)..(94): unsure at all Xaa locations
  Clone ID: PAT_MRT3847_44105C.1.pep
DTPKGSMXEHKKAQFIIALPKITVGGTILXNDLLANFLAEGXFRACVVLHRTHRFXGMIKMVATVGIPENTSLLLACAMYISFMGPAYSDIYTI

SEQ ID NO: 223784 - protein, 95 aa, Glycine max
  Clone ID: PAT_MRT3847_44106C.1.pep
RSGHIRDAYELIKLIPREPHAGAWGALLGACKLYGDSELGEIVANRLFELEPLNAANYVLLSDIYAAAERWIDVSLVRSKIRERRVRKKPGSSKN

SEQ ID NO: 223785 - protein, 171 aa, Glycine max
  unsure (1)..(171): unsure at all Xaa locations
  Clone ID: PAT_MRT3847_44107C.1.pep
LYKKLKYIHSWRKVSSMIFVATFAAVLICSVVAAAIAAPPVAAAIAAATSIPIGSMGKWIDSLWRNYENALKGQKEVISSMQAGTYVAIKDLDNIRILIDRLEIEIESLLHNVDFAIEEEAVKVAIEEIKKKLGVFMKNVEXLAVQADMCSRDIRRARTVVLQRIIKHPHN

SEQ ID NO: 223786 - protein, 86 aa, Glycine max
  unsure (1)..(86): unsure at all Xaa locations
  Clone ID: PAT_MRT3847_44108C.1.pep
GKTHGMGAARELNSHRKRQKWADESYKXSHLGNKXNKPFTDASHAKDIRLKKMGVKTEQPNCSVLKYTHIQLIKNKKNMTTCIPND

SEQ ID NO: 223787 - protein, 47 aa, Glycine max
  unsure (1)..(47): unsure at all Xaa locations
  Clone ID: PAT_MRT3847_44109C.1.pep
MGDLHWKXKMPSSKTPGLFLCDNKSLPSLVLPFGTTDIYAVASFVCA

SEQ ID NO: 223788 - protein, 70 aa, Glycine max
  Clone ID: PAT_MRT3847_4410C.1.pep
QPRKAFIMAAGCPKATRHSRPPTLRLSTIPKTYMTLHHSTIPPSEYAMNFTVEAIQSENPTYQCEPDNQR

SEQ ID NO: 223789 - protein, 192 aa, Glycine max
  unsure (1)..(192): unsure at all Xaa locations
  Clone ID: PAT_MRT3847_44110C.1.pep
KKFRTGKLYLNIKTQAVLTILSWLARNGFAPRDNLIASLAKSIMEPPVTEEEDIMGCSYLLNLVDAFSGVEIIEEQLKMRKDYQEICRIMSVGMAYSLLHNSGIGIDPSRRKELLKRRFKEKHASPSSDDIDKLGKVQSSFWKEWKLKLEEQXHLTEHSRALEQIIPGGETKRFLARDSIYIENGIIPLIES

SEQ ID NO: 223790 - protein, 548 aa, Glycine max
  Clone ID: PAT_MRT3847_44111C.1.pep
MDEDFDMAAAEPMGEDFDFAGSGSNPVLKVGEEKEIGKEGLKKKLLKEGEGWDTPEAGDEVQVHYTGTLLDGTKFDSSRDRGTPFSFTLGQGQVIKGWDQGIITMKKGENALFTIPAELAYGESGSPPTIPPNATLQFDVELLSWTSVKDICKDGGLFKKILTEGEKWENPKDPDEVLVKYEAHLEDGTLVAKSDGVEFTVNDGHFCPAFSKAVKTMKKGEKVLLTVKPQYGFGEKGKPAHGDEGAVPPNATLQITLELVSWKTVSEVTDDKKVIKKILKEGEGYEHPNEGAIVKLKVIGKLQDGTLFLKKGHDDEGGLFEFKTDEEQVIDGLDRAVLTMKKGEVALLTIAPEYAFGSSESQQELAVVPPNSTLYYEIELVSFEKEKESWDMDTPEKIEAAGKKKEEGNALFKAGKYARASKRYEKAVKFIEYDTAFSEEEKKSSKSLKVACNLNNAACKLKLKDYKQAEKLCTKVLDLESTNVKALYRRTQAYIQLADLDLAEFDIKKALELEPNNRDVKLEYVTLKEKMKEYNKKEAKFLCLFIIF

SEQ ID NO: 223791 - protein, 115 aa, Glycine max
  unsure (1)..(115): unsure at all Xaa locations
  Clone ID: PAT_MRT3847_44112C.1.pep
PRADWXNPGVCQINGVTQLTPFAKRLNFEKGRTSGHSQKVRPSNGYWNPPCKWDLPWDGALSSPLVAVTLGGTLTLASSLSLAFFLASLAFFPLLAGYPGVSLRGGLSFGLRLRP

SEQ ID NO: 223792 - protein, 94 aa, Glycine max
  Clone ID: PAT_MRT3847_44113C.1.pep
LFVLPQGFVGPVVFKGGPVLFLLGAAFQLLVLSSRSGSSLGFNKGPPVFVFFQVSLLVSTCPLVFPLGSGCPAMGFFSRHVYFWFNRRAFACCS

SEQ ID NO: 223793 - protein, 85 aa, Glycine max
  Clone ID: PAT_MRT3847_44114C.1.pep
FLTFNLPISFFCAKSDILLIIYIYIYIYIYIAFELVSYILALYFFSADDFIFLIRFPIIRPNLSVRCEVSLPPYLGGFSKAHKVK

SEQ ID NO: 223794 - protein, 62 aa, Glycine max
  Clone ID: PAT_MRT3847_44115C.1.pep
PRVRKKPMKKKVLFVKNGAVVMCRVQVNNSICIEKFSDFPQLGRFTLRTEGKTVAVGKVTGL

SEQ ID NO: 223795 - protein, 119 aa, Glycine max
  Clone ID: PAT_MRT3847_44116C.1.pep
GPEFPGRPHAFVRRLSQTKTNVQNVTNKRKNLWFSLCFLNCPSYSQPFLSLLPLAMIGSKDRVVDSEGENSRSKLSRHNFEANKEYPDEKGVEFLRDSKVGGGGVDGGFHSKPTNVVAA

SEQ ID NO: 223796 - protein, 232 aa, Glycine max
  unsure (1)..(232): unsure at all Xaa locations
  Clone ID: PAT_MRT3847_44117C.1.pep
CDSGNDDNHDVSLRRSSNRKRRVVFDFSDEDEDEDDPTHAXVVSLASPDLPNKQSSLDSRQNDKKTSEKTTLNFDLQEENKSGVKEERATEQKAHLPLRENVSAISRCTNTGKSSSEKLQSGAPEVHLNKDSVNNAPPCSPKRRKVXKTRIDERGREVTEVVWDGEETEEKKPDKVTTKKSDSNASTKAINSAPATKKPPANSNAISGKGGKKAGNSKDPKQGNILSFFKRV

SEQ ID NO: 223797 - protein, 116 aa, Glycine max
  unsure (1)..(116): unsure at all Xaa locations
  Clone ID: PAT_MRT3847_44118C.1.pep
MPGKGEGAGLGIDLGTTYSSGREWPHDRXEXLSSTDESRPAPTHVGLTETHRLIEDAAPNLIAVDHMNTVSITERKTGRKVSSSSGQGDLKXGAYEVIAGATCKPMVAVDYTGEEY

SEQ ID NO: 223798 - protein, 226 aa, Glycine max
  Clone ID: PAT_MRT3847_44119C.1.pep
MWIQGFSFWIKGFSLLALISVISALEPELGSTRVVFQTKYGDIEFGFYPTVAPKTVDHIYKLVRLGGYNTNHFFRVDKGFVAQVADVTNGRSAPMNEEQRREAVKTVVGEFTEVKHVRGILSMGRYDDPDSASSSFSILLGDAPHLDGKYAIFGKVTKGDETLTKLEQLPTRKEGIFVMPMERITILSSYYYDTETENCEEDRSILKRRLAASAIEVERQRMKCFP

SEQ ID NO: 223799 - protein, 93 aa, Glycine max
  Clone ID: PAT_MRT3847_4411C.1.pep
VDKTLLIHSNFNGNILDTGQILLGIRHQKITLKLTLFLFQLRLERAREREGERETAFSPTWFLLTYPFLCLKLNLFLFSVLQISLVGRLFETH

SEQ ID NO: 223800 - protein, 52 aa, Glycine max
  Clone ID: PAT_MRT3847_44120C.1.pep
VSDSCFPHKLLYITNLNSRVSFSCQNIYAVNRIILSFHHKGFPFLNAGSSIY

SEQ ID NO: 223801 - protein, 559 aa, Glycine max
  Clone ID: PAT_MRT3847_44121C.1.pep
AEDYAKVKRRVAELYKEHEKELLEANKMLMKKIQDDQFLDLLTVKTEVRAVCKEPYSIYKAVLKSKSSINEINQIAQLRIIIKPKQCIGVGPLCNPQQICYHVLGLIHGIWTPIPRSVKDYIATPKPNGYQSLQTTVIPFLYESMFRLEVQIRTEEMDLIAERGIAAHYSGREFVTGLVGSATPSSKSSRGKTVCLNNANIALRIGWLNAIREWQEEFVGNMSSREFVDTITRDLLGSRVFVFTPRGEIKNLPQGATVIDYAYMIHTEIGNKMVAAKVNGNLVSPAHVLANAEVVEIITYNALSSKSAFQRHKQWLQHAKTRSARHKIMKFLREQAARSAADITTEAVNDFVTDSDGDSESEELSKGSSGSKYTWGKMFVNGAEISTLGRSETVLQSNNGSAWIPKVNGKHNKHVQHESFNGKGEMLLQGNLVAKMIQVNIPRYKEVLPGLESWQAQKIASWHNMEGHSIQWLSVVCIDRKGMMAEVTTALATAGIAICSCVAEIDGGRGMAVMVFHVEGNLENLVSACSKVDLILGVLGWSTGCSWPSLMEDRGVLEC

SEQ ID NO: 223802 - protein, 213 aa, Glycine max
  unsure (1)..(213): unsure at all Xaa locations
  Clone ID: PAT_MRT3847_44122C.1.pep
AQVADVANERSTPVNEEQRREAVKTVVGEFSEVKHVRGILSMGRYDDPDSASSSFSILLGDAPHLDGKYAIFGKVTKGDEMLTKLEXLPTRKEGIFVMPMECITILSSYYYDTETENCEQDRSILKLRPAASAVEVERQVINVIRFKTIMFVPLVNIAFMRHFAEDEMLPLIKANLILIWDEHYTAAFSFYIMSKQCIQILLLLCMRNCSKYA

SEQ ID NO: 223803 - protein, 113 aa, Glycine max
  Clone ID: PAT_MRT3847_44123C.1.pep
MPPQFFHGRPGWVWNVPHRAVGGEVTKRGGPRFLRKGVPGGVGPVLPPRGPGGFPLWKVQNVPLQAWAQAQGGKIRPQSPPPGPQPGFLVEGAPLGPVSPFPFDVGHAPQGGF

SEQ ID NO: 223804 - protein, 358 aa, Glycine max
  unsure (1)..(358): unsure at all Xaa locations
  Clone ID: PAT_MRT3847_44124C.1.pep
LTKMKALMFSLFNLISELSSSDMSNKTSSISLNSRFPTVSFLFLLSSSRCFMILSNTVSKQSRIFSSLLLNRDGSRGLADIEDGTDSKSCAAQMENVSEVPKPSVSAVKGEEILEAQDGSRGLSDIEEGTCSKSCAAEMGNLSEVPKPSVSAEKVEGILESQDGSRGLADIEDGTDSKSCAAEMGNVSEVPKPSVSAVKGEGILEAQDGSRGLSDIEEGTDSKSCAAEMGNVSEVPKSSVSAEKVEGILESQDGSRGLADIEDGTDSKSCAAEMENVSEVPKPLVSVEKVEGLSKEGIVGSQAIVQVSEESETVTGDGIDVTPDCLAVPETVSNDGASSLCSSVTCAVSXXGIVGSQA

SEQ ID NO: 223805 - protein, 50 aa, Glycine max
  Clone ID: PAT_MRT3847_44125C.1.pep
RLQKNNKREDRVFIEQSSSEGATYCAGVPSIVIENKWASKTFISSLQHSG

SEQ ID NO: 223806 - protein, 63 aa, Glycine max
  Clone ID: PAT_MRT3847_44126C.1.pep
PPPQKRIPKGRASARHKEVCLRLRQGSLHQSSAWSLVRSWDRSGFTYQRPSVVFSHRSSSRIR

SEQ ID NO: 223807 - protein, 82 aa, Glycine max
  unsure (1)..(82): unsure at all Xaa locations
  Clone ID: PAT_MRT3847_44127C.1.pep
RNFLARFFTKKSLGTLLLNHTKPIILISITSTASYSPRFQLFTLPHLHXQYFPLDPSINGDIIHLHHHNHHHTYITNYNNAL

SEQ ID NO: 223808 - protein, 53 aa, Glycine max
  Clone ID: PAT_MRT3847_44128C.1.pep
ARKEDTESNNLHQYTHLVHLSSLLPSSSCSSSTKGHFNFPSASLSSPQIDVNM

SEQ ID NO: 223809 - protein, 132 aa, Glycine max
  Clone ID: PAT_MRT3847_44129C.1.pep
MTSLSRELVFLILQFLEEEKFKESVHKLEKESGFFFNMKYFEEKVQAGEWEEVEKYLSGFTKVDDNRYSMKIFFEIRKQKYLEALDQQDKAKAVEILVGDLKMFSTFNEELYKEINQLLTLTNFRENEHFSM

SEQ ID NO: 223810 - protein, 79 aa, Glycine max
  unsure (1)..(79): unsure at all Xaa locations
  Clone ID: PAT_MRT3847_4412C.1.pep
QGRVIRAQRTGAESVFTSQTHHXRNGPCKFCRLDFGEHNSYLIGVITDIIHDPARGDLQAKVAFXHSIRVKQQTDLYVT

SEQ ID NO: 223811 - protein, 53 aa, Glycine max
  Clone ID: PAT_MRT3847_44130C.1.pep
LYHAIDVFLEAHPWLINSEREQFGRLMNCQKLSLEASTHAAHNERLPLIVIVQ

SEQ ID NO: 223812 - protein, 42 aa, Glycine max
  Clone ID: PAT_MRT3847_44131C.1.pep
WGLNTGGKNSYIHLIFRYKLLADKLTISLIKHYTLHNYVRTT

SEQ ID NO: 223813 - protein, 96 aa, Glycine max
  Clone ID: PAT_MRT3847_44132C.1.pep
TQAIIIASPFAFTLGLLASFFAVILPIKEYIWTYAALEFALVALTVHLFYTMLHLTAIYAILLSSVLGFGVAMGINYAYIQFVTWRLQVSHVDNPV

SEQ ID NO: 223814 - protein, 160 aa, Glycine max
  unsure (1)..(160): unsure at all Xaa locations
  Clone ID: PAT_MRT3847_44133C.1.pep
PRVRVLVFRVFAETGSQGRNDQGWTXWRPSSSGGDVNIRFEIGINNGDPELESSVPSGQLAGTDRTSDKVEERLSFSICKRIIQLMQGNIWSVPNAQGFPQVMALFLRFQLWRSIAVSNSEPGENSETSNSNSFFRGLQVLLADNDDVNRAVTQKLLQKL

SEQ ID NO: 223815 - protein, 54 aa, Glycine max
  Clone ID: PAT_MRT3847_44134C.1.pep
PFQFLNPPCPFALAPIRVRDQTMPDNPLKHKPRGNKLGGINILMVAKQGRFSCP

SEQ ID NO: 223816 - protein, 305 aa, Glycine max
  Clone ID: PAT_MRT3847_44135C.1.pep
MGAVVECYPPPRTAVLSLNTLPLGFRFRPTDEELIDYYLRSKINGNSDDVWVIREIDVCKWEPWDLPDLSVVRNKDPEWFFFCPQDRKYPNGHRLNRATNHGYWKATGKDRKIKSGSTLIGMKKTLVFYTGRAPKGKRTNWVMHEYRPTLKELEGTNPGQNPYVLCRLFKKQDESLEASNGDDVERTASTPTTANYCPDEIQSDSALVPASSSQVTEDDKPLPVISENSEEAISNIITPGDIHSDECDASDAQYQIVEPIAKEDQLPNVDIFYDPTNQQLDDKLFSPVHAHFPADFYYQANNQSE

SEQ ID NO: 223817 - protein, 77 aa, Glycine max
  Clone ID: PAT_MRT3847_44136C.1.pep
YPQNFFLSAIGLTFGIPPLPGWGSTTYTGGRCQLQSRFSCVISVASFTGEGAMFTDFLLVSFPRRIAHERSLSQSQF

SEQ ID NO: 223818 - protein, 44 aa, Glycine max
  Clone ID: PAT_MRT3847_44137C.1.pep
MSGCECSIAVECLNEHVDYYKDLRILSTISIDMNTTEDDRIQKH

SEQ ID NO: 223819 - protein, 69 aa, Glycine max
  unsure (1)..(69): unsure at all Xaa locations
  Clone ID: PAT_MRT3847_44138C.1.pep
FGVPSNIFFPVLSQGTHKTATTPXRGNQGLKFISLEQSLNTFGTINPILSTPYFAILNTPPGILKKRVS

SEQ ID NO: 223820 - protein, 100 aa, Glycine max
  Clone ID: PAT_MRT3847_44139C.1.pep
LEGRAPQFAFVADHQAPTLDSKAAAASEPNETLPALDINEGSTRAIELTVQELCTAVWQINIHTLGGLVYDDLTHRFHDQGIARTAYNERDCFRDLVTRH

SEQ ID NO: 223821 - protein, 99 aa, Glycine max
  Clone ID: PAT_MRT3847_4413C.1.pep
GWPIMAEQFLNARMVEEEVKVGLRVETCDGSVRGFVKREGLKKTVKEVMEGVKGKKLREKVRELAEMAKFPTQEGGSSCSTLNSLLHQTCAASHKNQIS

SEQ ID NO: 223822 - protein, 44 aa, Glycine max
  Clone ID: PAT_MRT3847_44140C.1.pep
KIIHPSAYVGKGTLQDIRCTHVYHHTRNIWADPINTLVIETSHD

SEQ ID NO: 223823 - protein, 95 aa, Glycine max
  unsure (1)..(95): unsure at all Xaa locations
  Clone ID: PAT_MRT3847_44141C.1.pep
QXXKNEXKEWHNETVEQTTTEXIRSCSSHEXDKRGQHXXSXTLSLTRPSAXXXDKERNAYQKRKXQXKNKXRKXRTSLRENXLEXSEXQXXVALA

SEQ ID NO: 223824 - protein, 81 aa, Glycine max
  unsure (1)..(81): unsure at all Xaa locations
  Clone ID: PAT_MRT3847_44142C.1.pep
KCMIFKFTQSNQPTTYFIXLLFFSLKKKNKIKKKYNINLFKKMFFSLYYPNFLTRSFHFISLLLFHLNSISLSYFLQHLYF

SEQ ID NO: 223825 - protein, 66 aa, Glycine max
  unsure (1)..(66): unsure at all Xaa locations
  Clone ID: PAT_MRT3847_44143C.1.pep
LAXGXXPTYLQQQLLQQIVPALTQLAVANPTGYLQQLLSFTNWLCRTCVYLHTHSTNHYMVTWRTS

SEQ ID NO: 223826 - protein, 207 aa, Glycine max
  Clone ID: PAT_MRT3847_44144C.1.pep
MEPIGNSYESSFSKDEKVEAADLLLEECWFFDNLLKITPRMTRCHSEPYPSSTGLISPPDFLVKDSNSNSSSPSKPLNNGAIVHPKIQRAPYMPPLRLREEEEDQKGSSSTRSKLVHQPTDPVVSHAASKPHCAQMKGRHNSDCVRRKSKLLRTPSLPPSIGRDEKLQVYDTRPGRFHKQPSTPTQIDILPPRQTSKSCSIPRCRPA

SEQ ID NO: 223827 - protein, 41 aa, Glycine max
  unsure (1)..(41): unsure at all Xaa locations
  Clone ID: PAT_MRT3847_44145C.1.pep
XLXPLSXAHQXAVIXXIQXLRLSKIVVQXCPXPXPXSLXAY

SEQ ID NO: 223828 - protein, 57 aa, Glycine max
  Clone ID: PAT_MRT3847_44146C.1.pep
FIALTDAKSCRLHTSGDSYRLLYHVYVSLCWFVHEMFVLCTIVFVISLSFKIYVSYK

SEQ ID NO: 223829 - protein, 90 aa, Glycine max
  Clone ID: PAT_MRT3847_44147C.1.pep
SSRIGSRPSPKALSTCLNLLLDSNRVDLARKLLLHAKRDLTRKPNVCVFNILVKYHCKNGDLDSAFEIVEEVRNSEFSYPNLVTYSTLMD

SEQ ID NO: 223830 - protein, 59 aa, Glycine max
  Clone ID: PAT_MRT3847_44148C.1.pep
VVVLFIDISCPHFVNITTLGRPWLKEHFNSHRYQRVHLLRISPLQFVWVFKMLQLSIKC

SEQ ID NO: 223831 - protein, 354 aa, Glycine max
  Clone ID: PAT_MRT3847_44149C.1.pep
QKTSSSSPTSKWYLLAMSEDDLPHHLRITPNGDLTTVGRYNFNGQLKSTMIAHPKLDPVTNNLHALSYDVVQKPYLKYFRFSPDGVKSPDGEIPLKEPTMMHDFAITENFVVVPDQQVVFKLSEMITGGSPVVYDKNKVSRFGILDKNAKDANDMKWIDAPECFCFHLWNAWEEPENDEIVVIGSCMTPADSIFNECEESLKSILSEIRLNLKTGKSTRKPIISESEQVNLEAGMVNRNKLGRKTKFGYLALAEPWPKVSGFAKVDLFSGEVKKYMYGEERFGGEPLFLPNGVDGDEDDGHILAFVHDEKEWKSELQIVNAKTLKLEASVKLPSRVPYGFHGTFIHSKDLRKQA

SEQ ID NO: 223832 - protein, 67 aa, Glycine max
  Clone ID: PAT_MRT3847_4414C.1.pep
GGFLKNFRRIWSLSFQGFPLRIRVLIPGGGHQFKITPIFFIMCHEFPVGKTDPTEPLDAHRRSHLYT

SEQ ID NO: 223833 - protein, 104 aa, Glycine max
  unsure (1)..(104): unsure at all Xaa locations
  Clone ID: PAT_MRT3847_44150C.1.pep
ALAEPWXKVSGFAKVDLFSGEVNKYMYGEERFGGEPLFLPNGVDGDEDDGYILAFVHDEKEWKSELQIVNAKTLKLEASVKLPSRVPYGFHGTFIHSNDLRKQA

SEQ ID NO: 223834 - protein, 45 aa, Glycine max
  Clone ID: PAT_MRT3847_44151C.1.pep
FFFFFFFLIGLLMHSTFNMKRQKYPYVFLKIFLCTQLIQVDPHRF

SEQ ID NO: 223835 - protein, 134 aa, Glycine max
  Clone ID: PAT_MRT3847_44152C.1.pep
ANPSWKKNGKVEPYGAPDDKFKKPNGQIKWKDFPKVEPKTVHSDDDDLTALLQEEDDLVNAHRKQVEETMNIVREEMNLLVEADKPGNQLDDYIAKLNAILSQKASGIMQLQTRLAHFQKRLKEHNVLASSAGY

SEQ ID NO: 223836 - protein, 45 aa, Glycine max
  Clone ID: PAT_MRT3847_44153C.1.pep
KMFFLVRYVMTAASLIQGHACHRLFAILYKCPIFWIVDFVTQVAS

SEQ ID NO: 223837 - protein, 65 aa, Glycine max
  unsure (1)..(65): unsure at all Xaa locations
  Clone ID: PAT_MRT3847_44154C.1.pep
RSSCEVTAVPCKXPAKKMPSSNVEIFDPNEQGDCSLEHGQKVEKMHLYRTLPGKRSYAPEYVWTL

SEQ ID NO: 223838 - protein, 84 aa, Glycine max
  Clone ID: PAT_MRT3847_44155C.1.pep
AYERTTDGERSAVLMMMIYIFLRSCIISLTTQIRFTSLSPASRSFTFTSSFQCLRVILLYGVTWGIDPEYQNWHRESMSEYHGD

SEQ ID NO: 223839 - protein, 71 aa, Glycine max
  Clone ID: PAT_MRT3847_44156C.1.pep
EPGHGAQKNFTLVGLCTLVWKTRDSGMGKFFNPSGARSFPNDKRIKGLPLLKSTQPSFNNHKSGLQKSNCL

SEQ ID NO: 223840 - protein, 42 aa, Glycine max
  Clone ID: PAT_MRT3847_44157C.1.pep
IYKNNLLPSFILYITSIIIKFYHFIQYKNNHNITHHTHISNL

SEQ ID NO: 223841 - protein, 70 aa, Glycine max
  unsure (1)..(70): unsure at all Xaa locations
  Clone ID: PAT_MRT3847_44158C.1.pep
KKGFQMGSFEWANQTSGDXSSLVEKPNQTPPFDVFLGISQTFEIAGNPLRPAFFVPRAKARFFEKAEFFA

SEQ ID NO: 223842 - protein, 149 aa, Glycine max
  unsure (1)..(149): unsure at all Xaa locations
  Clone ID: PAT_MRT3847_44159C.1.pep
VLHLKCTYGDIDTLGDRQQGILNIGQVTSADILFDANDSLIINVFNSWNQPYLISCNGDHGIRNSFXDGVLGTTCTILLGGNDTYVLXEKDQIVGFYYFPGVALHIAAGGLGGITILSRHTVADLTDDPADDYTVLIADWNKLNHTDMK

SEQ ID NO: 223843 - protein, 112 aa, Glycine max
  unsure (1)..(112): unsure at all Xaa locations
  Clone ID: PAT_MRT3847_4415C.1.pep
VICSPSPTDNDKARSLNTYRRKLAEYKEIENRLKELRTKERESHKLFDKSENEIKSLQSVGQIVGEVLKQLTEEKFIVKATNGPRYVVGCRPTIDKGETXSRGTRVALDMTT

SEQ ID NO: 223844 - protein, 318 aa, Glycine max
  unsure (1)..(318): unsure at all Xaa locations
  Clone ID: PAT_MRT3847_44160C.1.pep
LEPEGELRVTYMQLLXYEICPYLKFGYMAANGAIAQACRNEDHIHIIDFQIAQGTQWMTLLQALSKYARGDGLEVVGNRIINPCDPNMGIDDPVSKYARGDGLEVVGKRLALMSEKFGIPVEFHGVPVFAPNVTREMLDIRPGEALAVNFPLQLHHTADESVHVSNPRDGLLRLVRSLSPKVTTLVEQESNTNTTPFFNRFIETLDYYLAIFESIDVTLPRDSKERINVEQHCLARDIVNIIACEGKERVERHELFGKWKSRLTMAGFRQCPLSSYVNSVIRSLLMCYSEHYTLVEKDGAMLLGWKDRNLISASAWHC

SEQ ID NO: 223845 - protein, 60 aa, Glycine max
  Clone ID: PAT_MRT3847_44161C.1.pep
CSFVVSVSKRCAILDACNFRWSVYFHSDFLLFSMRCRFEYELRSLPRVRVINVVLRNSDK

SEQ ID NO: 223846 - protein, 577 aa, Glycine max
  Clone ID: PAT_MRT3847_44162C.1.pep
MPSSFSMDSQQLFSFELPYMSSLPTVPSLLGSLKYDTGNSPNSPFSTYFDSDTLSALSDGQEQYSPGEILSGVSPSCNSSLETNHYMYRSVSTLDSFPLYSDRNSLLQTMSSNQKIQHALLELETALMAPDDDQVNTPNTLAESSRPMASGQRSRSWSNENHVSQYTQTQPSYATANMQSSEVVHVEKRQKLMEEATLQDFPPNNLKQLLIACAKALSENNTKDFDQLVGKAKDAVSINGEPIQRLGAYMVEGLVARMQASGNSIYHALRCKEPEGEELLTYMQLLFEICPYLKFGYMAANGAIAQACRNEDHIHIIDFQIAQGTQWMTLLQALAARPGGAPHVRITGIDDPVSKYARGDGPEVVGKRLALMSEKFGIPVEFHGVPVFASDVTREMLDIRPGEALAVNFPLQLHHTADESVHVSNPRDGLLRLVRSLSPKVTTLVEQESNTNTTPFFNRFIETLDYYLAIFESIDVTLPRDSKERINVEQHCLARDIVNIIACEGKERVERHELFGKWKSRLKMAGFQQCPLSSYVNSVIRSLLRCYSEHYTLVEKDGAMLLGWKDRNLISASAWHC

SEQ ID NO: 223847 - protein, 193 aa, Glycine max
  Clone ID: PAT_MRT3847_44163C.1.pep
MASTDKHGDTEYRTSSSTPAPAGVDYFKFDVILRFVLFAASLVAVVVIVTGNQTEVILVPQPVPWPAKFRYTPAFVYFVAALSVTGLYSIITTLASLFASNKPALKTKLLLYFILWDALILGIIASATGTAGGVAYLGLKGNTHVVGWNKICHVYDKFCRHVGASIAVALFGSVVTVLLIWLSAYSIHSRVPK

SEQ ID NO: 223848 - protein, 102 aa, Glycine max
  Clone ID: PAT_MRT3847_44164C.1.pep
NYREICWVCLHATWRRRRRSSLPPAARHRSSKMTGAALRKWFEEKNPSASPWRSESLSWSLMPTRSSRRLTADPLLCMVRILACLREPLAFWAACDYIVDGP

SEQ ID NO: 223849 - protein, 110 aa, Glycine max
  unsure (1)..(110): unsure at all Xaa locations
  Clone ID: PAT_MRT3847_44165C.1.pep
LYLGQISKKKSLLDGLFKSGSLDKELQEKGFGQRALNKLGGKGYEKYMDWWGTSPFWGKNYGHRMXRQADLEFXKRTIERCPQFKDTGKSCFRDPLFNDMLLAECYKPYA

SEQ ID NO: 223850 - protein, 193 aa, Glycine max
  Clone ID: PAT_MRT3847_44166C.1.pep
MASTDKPGGDPEYRTSSTPAPAGVDYFKFDVILRFLLFAASLVAVVVIVTANQTEVIRVPQPVPWPAKFRYSPAFVYFVAALSVTGLYSIITTLASLFASNKPALKTKLLLYFILWDALILGIIASATGTAGGVAYLGLKGNRHVVGWNKICHVYDKFCRHVGASIAVALFGSVVTVLLIWLSAYSIHSRVPK

SEQ ID NO: 223851 - protein, 61 aa, Glycine max
  Clone ID: PAT_MRT3847_44167C.1.pep
LSMLRQLGWEVVQDEYSDGDAHHFLVNTDLVKTGMLSFPSLLSNYRSDLDFTFFFLELLCP

SEQ ID NO: 223852 - protein, 148 aa, Glycine max
  Clone ID: PAT_MRT3847_44168C.1.pep
TGLGINYAGYVIHSAIHAARPDLQAVLHTHTRDGIAVSAQKSGLLPISQHSIGFSGRVAYHGYEGVALDLDERERLVADLGDKSVMILRNHGLLTAGISVEHAFQQLQGLERACNIQIAAQAAGNAELIFPPAEVVAKVEKQAEVFKS

SEQ ID NO: 223853 - protein, 129 aa, Glycine max
  Clone ID: PAT_MRT3847_44169C.1.pep
YFIINPQNRLFFVQDGKNPLNFGLCTNRKTGGGNKKKHGTPLAGWGPHPTGAHPLSQSRGKRGGGPIPPKKGLTVLFLPRGKNLRVLLRASKKGGGLQSGKKPRGGPWGKGAFGPKKNPSRVSGGPPQP

SEQ ID NO: 223854 - protein, 127 aa, Glycine max
  unsure (1)..(127): unsure at all Xaa locations
  Clone ID: PAT_MRT3847_4416C.1.pep
VRFCVRATTNGDFVQGKALSMARGYAACAVVDLRSWYSPTPLLESALPKDRWXTVAYFERTSDVDRNDNIPYETDLSWGDLXVGDQSRCRLEKVSSTKAQFVSGKTFKYDIIXGAGSHSLEDFPAKE

SEQ ID NO: 223855 - protein, 37 aa, Glycine max
  Clone ID: PAT_MRT3847_44170C.1.pep
GSSIMLNNRGSIMNNHMTYLHNSNGHLFMTKMLIVLL

SEQ ID NO: 223856 - protein, 51 aa, Glycine max
  Clone ID: PAT_MRT3847_44171C.1.pep
YWITSIIFSVLLCNNGLPQHVNFQVMLTLDISQKNIKQKHVCCCWQGPRNE

SEQ ID NO: 223857 - protein, 109 aa, Glycine max
  Clone ID: PAT_MRT3847_44172C.1.pep
PTRPQTLIQNCIIKFNATQHTTLSIASFPCVPVSALQMSNPIETSTANDRQFHAVHMTISYSHVLNTLLPILLPSTVHLTPPLMLTLPAAPTPLNLTIASITSAMHSFR

SEQ ID NO: 223858 - protein, 95 aa, Glycine max
  Clone ID: PAT_MRT3847_44173C.1.pep
YFFLNFPPIFSALAVLSLHLEAFLLISSFFSSIHNLLYTPVLCLLSPGSLCNPSRILHNPSPSPSISLVCLTMLVPMPPNDAYMKDLGEVCSDLK

SEQ ID NO: 223859 - protein, 332 aa, Glycine max
  Clone ID: PAT_MRT3847_44174C.1.pep
MAQLLSPVYTEPLKSNLSSISSWRILPKTATPSNFVTHNGKRRGCGRVRVAAEEKSFSTSDTVADDYYAVLGLLPDATPAQIKKAYYNCMKACHPDLSDNDPEATNFCTFINEVYGVLSDPIQRMIYDDIHGYSLTSINPFLDDSSPKDHVFVDEFSCIGCKNCANVACDVFGIEEEFGRARVYSQCGKPELVQQAIDSCPVDCIHWTSAAQLSLLEDEMRRVERVNVALMLSGMGSAGTDVFRMASSRWEKRQAKVLEQAKLRMMKEKGSDKTDMFWNNLWGKPKDLSSEEEIKERAKRAAAAARRWREYSRRGVDKPPTFKLPETASTKD

SEQ ID NO: 223860 - protein, 59 aa, Glycine max
  Clone ID: PAT_MRT3847_44175C.1.pep
KHRGESIRLILNNVSPQHEIVHTPGGLMTSCSCNHQMPPFYNKISSSLGQDFVMAIHWT

SEQ ID NO: 223861 - protein, 181 aa, Glycine max
  Clone ID: PAT_MRT3847_44176C.1.pep
HQSTCPHTPQQNGIAERKNHHLLETARSLMLNSNVPTHHWGDAVLTACFLINRMPSSSLENQIPHSIVFPHDPLFHVSPKVFGCTCFVHDLSPGLDKLSARSVKCVFLGYSRLQKGYKCYSPTMRRNYMSADVTFFEDTPFFSSSVDHSSSLQEVLPISSPCPLDNSDHNVRVVPNSPEDS

SEQ ID NO: 223862 - protein, 125 aa, Glycine max
  Clone ID: PAT_MRT3847_44177C.1.pep
AAATSSAGAPRPHPPRAGRVSVPCPAAPGRSCWPALRGTWRSSGLCRSGRACEGLALLGAARVFPPPPLRRGFRLSVCVSVFGSGFNGGTGKMERKERKGKEKERKIKAEAVCCMEFEKVTKRRT

SEQ ID NO: 223863 - protein, 136 aa, Glycine max
  unsure (1)..(136): unsure at all Xaa locations
  Clone ID: PAT_MRT3847_44178C.1.pep
YKASLCKNNTNAINAPSFFIIIPLNRNLKQQQQKNNILAFRYLIRRRFGIPLAAPVCRPAAPPRPPPTPAQGSPRAPPPLAVASPTTTTTSXTPKNSSKLPQASPISPRSKPTRMSPTPTPFTPTHTXTMCPSRDT

SEQ ID NO: 223864 - protein, 190 aa, Glycine max
  Clone ID: PAT_MRT3847_44179C.1.pep
MKVRVVCRKIYDYIRYDLKEISFPSSLPDPPNIKKRRILTWDQRIWVLKRAARLYAASWVRDIGPDLRPDDYKKDDDMTDETNGEKKTTKGKESSTLEDLAVAARGGMETLRPALQRVYMTRASAYRDALKSFIEGYQEGVQQVMENKEDSKPQEDADLPKKINLNLLVGGRVLFFLLQTFSHLDSGMKI

SEQ ID NO: 223865 - protein, 85 aa, Glycine max
  unsure (1)..(85): unsure at all Xaa locations
  Clone ID: PAT_MRT3847_4417C.1.pep
MQIFVKTLTGETITLDAESSDTIXDTSRPXIQDKERITSDHQLLIFTGKQLEDGRTLIYYYIQNESTLHLVLRLRGGMHIFHKTL

SEQ ID NO: 223866 - protein, 48 aa, Glycine max
  Clone ID: PAT_MRT3847_44180C.1.pep
VLRARKPVLCGTSDDSYEFTFRRKRFLEDGPLSMHLLHATHINPAQGF

SEQ ID NO: 223867 - protein, 152 aa, Glycine max
  Clone ID: PAT_MRT3847_44181C.1.pep
MAIGNSFAPHWLPLGNREFPYSVDGPEILDAYKHCGSLIVSPCYPNIRRISTILCSTRFVRDSVERGCGHLKEAPWASNAHTSEYLTHSCYIIVCTSWSLYAGVYWTLYSCGLFIVHRTSIRRVYITSERTPEYDEMENTPKDAYVRTITQR

SEQ ID NO: 223868 - protein, 100 aa, Glycine max
  Clone ID: PAT_MRT3847_44182C.1.pep
QDIKCGNGDLESLLHMVIWCIDCPEKHFAKVVRDSIVGFGTDEDSLNRAIVTRAEIDLLKVRFEYANVYKTSLDDDVIGDTSGNYRDFLMTLLGKGSEGE

SEQ ID NO: 223869 - protein, 51 aa, Glycine max
  Clone ID: PAT_MRT3847_44183C.1.pep
PRYASLSKLEYDFHHQLYCYQRFDRMVMLWLMLPNYPISHYNRLWRPFICR

SEQ ID NO: 223870 - protein, 76 aa, Glycine max
  unsure (1)..(76): unsure at all Xaa locations
  Clone ID: PAT_MRT3847_44184C.1.pep
MSGIIHKIEETLHVXGHXXXEHXGEHHGEHXGEHKGXHHGXHKGXHKXEXHHGEHKXGLVDKIQDKIHGDGLHKVR

SEQ ID NO: 223871 - protein, 133 aa, Glycine max
  Clone ID: PAT_MRT3847_44185C.1.pep
TNTLKTRRRDLADVLINRGVNLDPLSKWSKVGLVVYDSQVPIGATPEYMAGFYMLQSASSFLPVMALAPQEKERVIDMAAAPGGKTTYIAALMKNTGIIFANEMKVPRLKSLTGNLHRMGVSNTVVCNYDGKE

SEQ ID NO: 223872 - protein, 39 aa, Glycine max
  unsure (1)..(39): unsure at all Xaa locations
  Clone ID: PAT_MRT3847_44186C.1.pep
AAXMLXXWSXGSRRXTMRSRXHXWHRKLSWAXXEIDQCP

SEQ ID NO: 223873 - protein, 424 aa, Glycine max
  unsure (1)..(424): unsure at all Xaa locations
  Clone ID: PAT_MRT3847_44187C.1.pep
TKRTNTLKVAWADLSFWVNKLVCLYSCSAKVGLFVYASQVPRRRTSEDVLINRGVNLDPLSKWSKVGLVVYDSQVPIGATPEYMAGFYMLQSASSFLPVMALAPQEKERVIDMAXIPFCRLLAAVXYMKNTGIIFANEMKVPRLKSLTANLHRMGVSNTVVCNYDGKELPKVLGVNAVDRVLLDAPCSGTGVISKDESVKTSKSLEDIQKCAHLQKELILAAIDMVDANSKSGGYIVYSTCSIMVAENEAVIDYALKKRDVKLVPCGLDFGRPGFTRFREQRFHPSLEKTRRFYPHVQNMDGFFVAKLKKMSSSKPGAKSSETAEKEEDTTTFVEEKEKSSYGIKENGNVSSESESKTGRKENSXSKPSNGLKENGKESSESEPKKRNKRQFPSKEEISKAREDKRNALREKRRKGGKQQKNKK

SEQ ID NO: 223874 - protein, 84 aa, Glycine max
  Clone ID: PAT_MRT3847_44188C.1.pep
YIRVPDYFVNIIFWFPSEAGRGSPHKACPGGFFSTTGFFRLVKGGAFLRVKRPTPPKVILTFSLTLLPNNFEIGKPKGSSVETS

SEQ ID NO: 223875 - protein, 253 aa, Glycine max
  Clone ID: PAT_MRT3847_44189C.1.pep
GKMKLKSKKGWKSIVPLHLKGKSASRFSLFRKVNSAGYGPGKTPVYLNVYDLTPMNGYVYWAGLGIYHSGVEVHGVEYAFGAHDYPTSGVFEVEPRQCPGFKFRKSIFIGITSLDSTQVREFMERQSARYNGDTYHLIVKNCNHFCKDICYKLTGKSIPTWVNRLARLGSICNCILPEALRISAVGHDPNYQPHDSEKRRLRSGFNCLSSISMRQKHLSTSSLFLQSPIRGCLSSSWPSSELRKSINRSLKER

SEQ ID NO: 223876 - protein, 65 aa, Glycine max
  Clone ID: PAT_MRT3847_4418C.1.pep
MKIKVLGFIVATILGAWECHAYEMFPLPMNTGYGARNPEVKCANWKLAVETHNIFGFETIPQKCV

SEQ ID NO: 223877 - protein, 56 aa, Glycine max
  Clone ID: PAT_MRT3847_44190C.1.pep
KENDPNTTTTFVGNLDPKVADDHLTQVFIQYGELLHVKIPACKRCAYGQFAYRSCA

SEQ ID NO: 223878 - protein, 37 aa, Glycine max
  Clone ID: PAT_MRT3847_44191C.1.pep
SCTSDHLTRKRWFMCEINWYSLTASHKPRLYIVIIIF

SEQ ID NO: 223879 - protein, 107 aa, Glycine max
  unsure (1)..(107): unsure at all Xaa locations
  Clone ID: PAT_MRT3847_44192C.1.pep
GKMKLKSKKGWKSIVPLHLKGKSASRFSLFRKVNSAGYGPGKTPVYLNVYDLTPMNGYVYXAGLGIYHSGREVHGVKYAFGAHDYPTSGVLRVNLTMPWLQFRNQYS

SEQ ID NO: 223880 - protein, 70 aa, Glycine max
  unsure (1)..(70): unsure at all Xaa locations
  Clone ID: PAT_MRT3847_44193C.1.pep
XXXSXXGVXXXSXXALXXNXXYXXXXXXGFXXXLXISXXLXXATYSLTNLYXLXCNPTRIXNXVXSSXXK

SEQ ID NO: 223881 - protein, 65 aa, Glycine max
  unsure (1)..(65): unsure at all Xaa locations
  Clone ID: PAT_MRT3847_44194C.1.pep
SPKFYTFLFPASPTSCFMSPPLFDGPPPLGSXIFXCLAXSAPPSAXFFFFLFPPPXXXXXXPPPP

SEQ ID NO: 223882 - protein, 88 aa, Glycine max
  Clone ID: PAT_MRT3847_44195C.1.pep
GLWKPPKIMENPLTPGGEQTPREALFRVMLNQLHLTPASLVIWSRKEQVSICFWFLEATGRARTFFIETKKKSLFSKQKEMEKPAQTT

SEQ ID NO: 223883 - protein, 45 aa, Glycine max
  Clone ID: PAT_MRT3847_44196C.1.pep
IAVSVYDFKTGLSVEPCFFSCPIWVLVCDSCHQSHPVYRGLLNIF

SEQ ID NO: 223884 - protein, 62 aa, Glycine max
  Clone ID: PAT_MRT3847_44197C.1.pep
FLTLLCNHFIRFWYNQTLILFFMLAMLFFCVWDWCLRMTEEATNENPWPPDTRSTSIIARAA

SEQ ID NO: 223885 - protein, 64 aa, Glycine max
  Clone ID: PAT_MRT3847_44198C.1.pep
TWIVTSILINECLGLNLLIPNSLLISLAHPQFTNVFYPSFRMVANSKLLADTQSLGHIDTSNQH

SEQ ID NO: 223886 - protein, 89 aa, Glycine max
  Clone ID: PAT_MRT3847_44199C.1.pep
LPQMRAETAGKFTTVKRFFTHRMKCHTSHYQFTGSKPCWLKNKQVMNLKTNSKIQPISIRDSIGNHKKIKFFFFFLIPHDLSSKQELEA

SEQ ID NO: 223887 - protein, 97 aa, Glycine max
  unsure (1)..(97): unsure at all Xaa locations
  Clone ID: PAT_MRT3847_4419C.1.pep
KLGGLFEIVGGVFFWRDRGCLSLGGGAPPPLGGVGGPPVLCGGAPXHEAALTFFVFKTKRGARGPGRKEKRIQGEKKKEKKKKKKKKEKEKKRKGTP

SEQ ID NO: 223888 - protein, 71 aa, Glycine max
  Clone ID: PAT_MRT3847_441C.1.pep
RRMRAYVTSGFRYTPNHESPASPWRGLSRASSTPVWTLMIPIGKNNNTVIDHLSINSCAELNILTINNITL

SEQ ID NO: 223889 - protein, 57 aa, Glycine max
  Clone ID: PAT_MRT3847_44200C.1.pep
CTTSRFNKKLADTKIPKSKSKASHSQIRRSVKKKKKLETSYLNQKENRREGYLETVS

SEQ ID NO: 223890 - protein, 85 aa, Glycine max
  unsure (1)..(85): unsure at all Xaa locations
  Clone ID: PAT_MRT3847_44201C.1.pep
MNFFRLAGDMTHLACVLVFLLKIYTIKSCVXSYCKLXELYALVFACRYLDIFTYYVFLYYIFFXLIILGSXFSILWFLMFHKCFL

SEQ ID NO: 223891 - protein, 87 aa, Glycine max
  Clone ID: PAT_MRT3847_44202C.1.pep
GIETGTASSYIHAGNMADHTMNSDAIPRELILCVEVDEKVLSRYSHNDVTPVCTTPVRSAAYLVPDYCPCYHATMHNDVIWYNTSAY

SEQ ID NO: 223892 - protein, 38 aa, Glycine max
  Clone ID: PAT_MRT3847_44203C.1.pep
LKYYGKYVIIVWKFDIVGKAFFVGTLPHKGNQLFKFYD

SEQ ID NO: 223893 - protein, 67 aa, Glycine max
  Clone ID: PAT_MRT3847_44204C.1.pep
KKGLKGCDVTERKGSPSIYRKMSLYLSPNCQDEIHLLIKHNALTLFQGRKHIEHDNIKPKIGGLLGG

SEQ ID NO: 223894 - protein, 50 aa, Glycine max
  Clone ID: PAT_MRT3847_44205C.1.pep
PPPIDNQIPAGIPAILTNHYHLADGQNCVNFLTDRSSTKAHAAPDGGSIL

SEQ ID NO: 223895 - protein, 87 aa, Glycine max
  Clone ID: PAT_MRT3847_44206C.1.pep
MCPLRFILVFFSAVLAGYFAWKTVRSDPKIEVFSEDSANEDKSFKKEDFDFKKMIQNGFWGFVDMASGSYLWRNLRPTNKDAELKSS

SEQ ID NO: 223896 - protein, 191 aa, Glycine max
  unsure (1)..(191): unsure at all Xaa locations
  Clone ID: PAT_MRT3847_44207C.1.pep
ARNSRFRRHAPRLSFLEIINDSLASSDCNIVGAMLLVDTYHTNSENVPRXISVSSFKGGRPIRMDTFPNTIVQIEPDFFSCLYALVTTTYWNLPLXKYTVMVIGNAXCLVLGLTSSYTPTPLFGFWFXKDRRLIVESFGRMSYVAHNCNHPQEKRLVGGELSFDIKIRTKLEKVFSSKAQFCMCINLPKSS

SEQ ID NO: 223897 - protein, 56 aa, Glycine max
  Clone ID: PAT_MRT3847_44208C.1.pep
RAATHDYTQLASSRCPATPLLTLASPPRDQILVPEDLLKKRKYAEKEAADKGCQRE

SEQ ID NO: 223898 - protein, 84 aa, Glycine max
  unsure (1)..(84): unsure at all Xaa locations
  Clone ID: PAT_MRT3847_44209C.1.pep
ERIDYNRSGGRRYPISDKAGPMYITIGEGGKLEGFAKRKMDPQPENSAFREASYGNVFLEXKNRKHAIXNGXRNDEGKKVPADT

SEQ ID NO: 223899 - protein, 90 aa, Glycine max
  unsure (1)..(90): unsure at all Xaa locations
  Clone ID: PAT_MRT3847_4420C.1.pep
ESVNIMHNRLKIVICAQGGDTIKALGENKNDGICFSDWLLESYQHLPCAQIDVYVLLXYLYVDLIINGLSMCSYWQSWTLFQFFELRKIK

SEQ ID NO: 223900 - protein, 149 aa, Glycine max
  Clone ID: PAT_MRT3847_44210C.1.pep
NSTALSKNYPPYHCILSRFFHSHYNHQRVVPSPIYRGQHISIFFSKQTFLSKTNILSKIFPPFHFNLFLTSHFHYIHLLIISSHSQLPPFFSHHLLHLHFSSFIFLQHHHSCLHLHLTTFFLLIILHHPYVHLLFPLSLFLPFTIISQS

SEQ ID NO: 223901 - protein, 38 aa, Glycine max
  Clone ID: PAT_MRT3847_44211C.1.pep
QHKKASMVAVNIDTAFIDSCIIFPCITVSSRKVVLSHY

SEQ ID NO: 223902 - protein, 93 aa, Glycine max
  Clone ID: PAT_MRT3847_44212C.1.pep
GINPKATSQVQRSRRIGNQKIEPTRMTLQLADHSITRSFGVVEDILVKVHQLIFLVDFVIMDIEEDAEIRLILGWPFMVTAKCVVDMGKGNLE

SEQ ID NO: 223903 - protein, 123 aa, Glycine max
  Clone ID: PAT_MRT3847_44213C.1.pep
YITFDFFYSLINFTRHGRRLYLKATQSKYKYDCIIESVVCGEEKRKDHGWNKLFILGTPLAKVNNENKLPEHVIGNAKGKAKVQFASQRKLPKPNYLVLQIYFRTQLNTLLVSSVCKFDSSIN

SEQ ID NO: 223904 - protein, 86 aa, Glycine max
  unsure (1)..(86): unsure at all Xaa locations
  Clone ID: PAT_MRT3847_44214C.1.pep
RNEEKAXREANKKIEKQLQKDKQVYRATHRLLLLGAGESGKSTIVKQMRILHVNGFNGDEKATKVQDIKNNLKEAIETIVAAMSNL

SEQ ID NO: 223905 - protein, 112 aa, Glycine max
  Clone ID: PAT_MRT3847_44215C.1.pep
LLKEVEDERMANDQQEALVVAADALAAFQVVEMHPLATLEGTSVFQDRDQYTLFTGRGVPSSSRRRAFGRPPPPSSPLRYWIILCLTPEVPSIMSLSIVSSPLLILPLPGRV

SEQ ID NO: 223906 - protein, 80 aa, Glycine max
  unsure (1)..(80): unsure at all Xaa locations
  Clone ID: PAT_MRT3847_44216C.1.pep
MLKKPTTVSSTLNHIDLAYNTYSRYAHSLPSCNCXTEDISRSTTFDVLNLVHGKSLASSNXNTELNPFNGHSFIKDAKDY

SEQ ID NO: 223907 - protein, 31 aa, Glycine max
  Clone ID: PAT_MRT3847_44217C.1.pep
GGKSRTARMRKRQSEALREAISGIRADAKEK

SEQ ID NO: 223908 - protein, 57 aa, Glycine max
  unsure (1)..(57): unsure at all Xaa locations
  Clone ID: PAT_MRT3847_44218C.1.pep
FWRCAALRSLTLPLRPTEKVIAEYXWIGGSGMHLRSTARTLPGPASDPSTLPTWPYH

SEQ ID NO: 223909 - protein, 110 aa, Glycine max
  unsure (1)..(110): unsure at all Xaa locations
  Clone ID: PAT_MRT3847_44219C.1.pep
KVNKPPIFLSRLINVTKGKEDKIAGIVGTVTDDIRVYDGSALXITALXFTVRARARLEKAGGECLTFDDHALRAAFRHNTALIRGLINAREDCAHCGPAAGVSQSHAGPF

SEQ ID NO: 223910 - protein, 59 aa, Glycine max
  unsure (1)..(59): unsure at all Xaa locations
  Clone ID: PAT_MRT3847_4421C.1.pep
LLLFEPALLSSGFSLVGPFSFADWIRRMLKLGLTCDXDAGEAYAEMPPLEEAEAHAEGS

SEQ ID NO: 223911 - protein, 105 aa, Glycine max
  unsure (1)..(105): unsure at all Xaa locations
  Clone ID: PAT_MRT3847_44220C.1.pep
TKDKQAPGQTDRGTQQPTEXXQDAPETTQPQERPRGRKARQPXPPPQKXXPXKKKSRKXEGSXSQKTKXERERXGTXRQGEASXKNXXRXXXXXPAPPXXRAENE

SEQ ID NO: 223912 - protein, 97 aa, Glycine max
  unsure (1)..(97): unsure at all Xaa locations
  Clone ID: PAT_MRT3847_44221C.1.pep
HARVRKLGIRLEVLDRXRPPFFFFFXXXTXXXXXXXXXXXIXSXXKXSXQQXXXKXKXXKXXXKKXXXXXALMXXSYXXXXXXRFGXXXXGXYPXGX

SEQ ID NO: 223913 - protein, 194 aa, Glycine max
  unsure (1)..(194): unsure at all Xaa locations
  Clone ID: PAT_MRT3847_44222C.1.pep
MLLSTLQTPRSLSRLTRHPHSFTSRASLTHQTQTLTPSSPSPPPQSEILSIRHALLSRRASAADLVLSQLARLRLAEPRLRSFLHLPDDDALLAHARRLDARIAAGEDPGPLAGVLVGVKDNICTADMPSTAGSRILEGYRAPFDATAVKRVRELGGIVVGKTNMDEFGMGSTTEASAFQXVTANPWDETRGPG

SEQ ID NO: 223914 - protein, 214 aa, Glycine max
  unsure (1)..(214): unsure at all Xaa locations
  Clone ID: PAT_MRT3847_44223C.1.pep
MGHVNLPASKRVRQWRVLDLVSAAFFGLVFLFFLLVFTPAGDSLAASGRQTLLLSASSADPRLRLRVSAAIEEAGQRQPRVIEACPADTAADHMPCEDPRLNSQLSREMNYYRERHCPPLETTPLCLVPPLKGYKVPVKWPESLHKIWHSNMPYNKIADRKGHQGWMKLEGPHFIFPGGGTMFPDGAEQYIEKLGQYIPINGGXLRTALDMGCG

SEQ ID NO: 223915 - protein, 80 aa, Glycine max
  unsure (1)..(80): unsure at all Xaa locations
  Clone ID: PAT_MRT3847_44224C.1.pep
ETELSILRRGVKLARQLEXMECDRCWKVLADFWSEMLLYIAPSENVKEHIEALANGGEFITHWWALLTHAGILDRNVHSA

SEQ ID NO: 223916 - protein, 518 aa, Glycine max
  Clone ID: PAT_MRT3847_44225C.1.pep
METSEWHIERRSSFGSESPLAREAGNVPETGSLSIVVLGASGDLAKKKTFPALFHLYLQGFLPPDEVHIFGYARTKISDDELRNRLRGYLVPKRGASPQQLEDVEKFLQLIKYVSGSYDSEDGFRLLDKEISEHEYLKNSVEGLSRRLFYLALPPSVYPSVCKMIKTCCMNKPDLGGWTRVVVEKPFGKDLESAEELSTEIGKLFEEPQIYRIDHYLGKELVQNLLVLRFANRFFLPLWNRDNIDNVQIVFREDFGTDGRGGYFDQYGIIRDIIQNHLLQVLCLVAMEKPVSLRPEHIRDEKVKVLESVLPINDDEVVLGQYEGYKDDPTVPDESNTPTFATVALRIHNERWEGVPFILKAGKALNSRKAEIRVQFKDVPGDIFKCKKQGRNECVIRLQPSEAIYMKLTVKQPGLEMSTVQSELDLSYGQRYQGVTIPEAYERLILDTIRGDQQHFVRRDELKASWQIFTPLLHRIDEGEFKPLPCKPGSRGPAEADQLLEKAGYVQTHGYIWIPPTL

SEQ ID NO: 223917 - protein, 148 aa, Glycine max
  unsure (1)..(148): unsure at all Xaa locations
  Clone ID: PAT_MRT3847_44226C.1.pep
EGTGRSFVCFEKNYYTVGLKKKVLGDFLVTFLAAXQCLAYDMVPVRXMNTVYGARTPAAKXCKWKALMCQAHNIFGFXSTIPVQCDKTSKEYIHGEQYRSHSKTSNQQSHFSCQRPLILXPKDTFEFSIXGTVLCNIPYYKIHGYGDG

SEQ ID NO: 223918 - protein, 251 aa, Glycine max
  Clone ID: PAT_MRT3847_44227C.1.pep
INIARIIQNHLLQVLCLVAMEKPVSLRPEHIRDEKVKVLESVLPIRDDEVVLGQYEGYKDDPTVPDKSNTPTFATVILRIHNERWEGVPFILKAGKALNSRKAEIRVQFKDVPGDIFKCKKQGRNEFVIRLQPLEAMYMKLTVKQPGLEMSTVQSELDLSYGQRYQGVTIPEAYERLILDTIKGDQQHFVRRDELKASWQIFTPLLHRIDEGEFKPLPYKPGSRGPAEADQLLEKAGYVQTHGYIWIPPTL

SEQ ID NO: 223919 - protein, 518 aa, Glycine max
  Clone ID: PAT_MRT3847_44228C.1.pep
METSEWHIERRSSFGSESPLAREAGNVPETGSLSIVVLGASGDLAKKKTFPALFHLYLQGFLPPDEVHIFGYARTKISDDELRNRLRGYLVPKKGASPQQLEDVEKFLQLIKYVSGSYDSEDGFRLLDKEISEHEYLKNSVEGLSRRLFYLALPPSVYPSVCKMIKTCCMNKSDLGGWTRVVVEKPFGKDLESAEELSTEIGKLFEEPQIYRIDHYLGKELVQNLLVLRFANRFFLPLWNRDNIDNVQIVFREDFGTDGRGGYFDQYGIIRDIIQNHLLQVLCLVAMEKPVSLRPEHIRDEKVKVLESVLPINDDEVVLGQYEGYKDDPTVPDESNTPTFATVVLRIHNERWEGVPFILKAGKALNSRKAEIRVQFKDVPGDIFKCKKQGRNECVIRLQPSEAIYMKLTVKQPGLEMSTVQSELDLSYGQRYQGVTIPEAYERLILDTIRGDQQHFVRRDELKASWQIFTPLLHRIDEGEFKPLPYKPGSRGPAEADQLLEKAGYVQTHGYIWIPPTL

SEQ ID NO: 223920 - protein, 47 aa, Glycine max
  Clone ID: PAT_MRT3847_44229C.1.pep
KTAGITCIVTKSGYTANENFLNAEAVFDCIGEPPKERIYLAFCGSLL

SEQ ID NO: 223921 - protein, 71 aa, Glycine max
  unsure (1)..(71): unsure at all Xaa locations
  Clone ID: PAT_MRT3847_4422C.1.pep
KNGVGGQFVILPFIFHLXIFKCTKPTPRERENEKMWKAHKLSTCILFNTKNAFHSPQPLACGEWMVCMIYF

SEQ ID NO: 223922 - protein, 123 aa, Glycine max
  Clone ID: PAT_MRT3847_44230C.1.pep
LTHCLTLRFSFPKTTKLISKHDPKNLTLTTKRFFRNKEQSLDSRYHPPLFGAGYSFDNYTTKHKPSAGYQTPTRALPGDSGDCADGPMRDKARDLLQGLRLIDRDNDSIFTRQDLQDLLTCLG

SEQ ID NO: 223923 - protein, 89 aa, Glycine max
  Clone ID: PAT_MRT3847_44231C.1.pep
KLDGSKDRLHICTGDLMNEGTSDSALAGCDGVSHTASPEHLIATDPQNTLPAPIINRTVNFATTCAISPSMKQAVLTPSVAAVIYNGKP

SEQ ID NO: 223924 - protein, 87 aa, Glycine max
  unsure (1)..(87): unsure at all Xaa locations
  Clone ID: PAT_MRT3847_44232C.1.pep
VFGPLGACLSLGPVVVRCPSRCFVCSGGRFSSCAPCXGLAPFRPRGGPLXGGSPCRLWWALLSRWPFGLMLLGLVGACSFASSALFS

SEQ ID NO: 223925 - protein, 45 aa, Glycine max
  Clone ID: PAT_MRT3847_44233C.1.pep
KSCYPTHPCRSLKHVLFSFGLILKLCTFTSPSKSSSCSQHKLIKQ

SEQ ID NO: 223926 - protein, 84 aa, Glycine max
  Clone ID: PAT_MRT3847_44234C.1.pep
TDLLHMKSHFLRKDKMIISNFNALNPLNNPLLQYPYTNAVTTILTNVDRIFHKWLIHYFKIVTFYGINKKAPINFNVNTFTNFF

SEQ ID NO: 223927 - protein, 130 aa, Glycine max
  unsure (1)..(130): unsure at all Xaa locations
  Clone ID: PAT_MRT3847_44235C.1.pep
FASGDAWEKVSSTKAQFVSGKTFVYDIIGAGAHAPGDLAGKEDHRIPRKIDAMRRQRMYPEYNXVHAQMETNLRKWSLDDVETTKGSMLDLKIFQSKMGLPKSTXGGTILRIDLFGNVVTEGHSIASVDL

SEQ ID NO: 223928 - protein, 57 aa, Glycine max
  Clone ID: PAT_MRT3847_44236C.1.pep
LSIYCVAMHYSLISSLEYLNFQVCHLICDILYRSGPIFILSLGIQYCLLLWSSIIVI

SEQ ID NO: 223929 - protein, 140 aa, Glycine max
  unsure (1)..(140): unsure at all Xaa locations
  Clone ID: PAT_MRT3847_44237C.1.pep
LFFLFFFFFLFFIPTSVSGAWESAITNTLFPGERKGLVLKAQFKLLWIERAXHMKNNGDVVESEWGHGANLDVLESKIALNTSHXFRLLGTDHNEXTVTGVHTYDIGLCETXIESYHHPALLIADGVSPMRAFDFRMDEW

SEQ ID NO: 223930 - protein, 94 aa, Glycine max
  Clone ID: PAT_MRT3847_44238C.1.pep
FSPKKPGGERPPPQGFHRAPPFKFPFLNPKSPLGFLWGPVGGRGLILGPGSFGPGGHSRNRGTIGIGPPPHWPNKRPPLKGGGGGAPLFLKDIK

SEQ ID NO: 223931 - protein, 61 aa, Glycine max
  Clone ID: PAT_MRT3847_44239C.1.pep
FFIFFLAQHKTIMLSWTRLFVCREYKMLQCLQHKTAKRHSGLLKNTRDDSYVKYREVHFAF

SEQ ID NO: 223932 - protein, 51 aa, Glycine max
  Clone ID: PAT_MRT3847_4423C.1.pep
SQQKVNLNLSNYSAPRQRYLCNFNTSKSQGILIADFIQYMVDCISVLGRIL

SEQ ID NO: 223933 - protein, 101 aa, Glycine max
  Clone ID: PAT_MRT3847_44240C.1.pep
NNADAGRFTFDESPVFVVGTTILLVHLTAMLIKFWGLQPNHSGNGSGLGEFICSTYLVVCYWPYFKGLFARGKYGIPLSTICKSAVFALVFVHFCGSKVIS

SEQ ID NO: 223934 - protein, 52 aa, Glycine max
  Clone ID: PAT_MRT3847_44241C.1.pep
TVDTNGIRTYKHYTNKLPDKAGVLFINHHNLSMKNHLGWAQGKRAFLVQDTR

SEQ ID NO: 223935 - protein, 75 aa, Glycine max
  unsure (1)..(75): unsure at all Xaa locations
  Clone ID: PAT_MRT3847_44242C.1.pep
VRGKPFFTLSLSSLCLLLLSSVCCAITSSKFNEWQLNNLNALEPEHRVESXGGLIETWNSRDPELECGGVTVSKR

SEQ ID NO: 223936 - protein, 157 aa, Glycine max
  unsure (1)..(157): unsure at all Xaa locations
  Clone ID: PAT_MRT3847_44243C.1.pep
MGGEEKRHQMMQNLFGDQSEEEEELDVDSEHESNPQLNYPSVHPNSTNPNLFLTPRLDPEPFPNSFRVFFFLFNFSGRXEGVGEQEGEVEGQGEVEIESDGDGEPDRESEGEREQSSQEVEVVEREEESEGRDSDSDAKDGGYSQHGVTSKRRDDVV

SEQ ID NO: 223937 - protein, 168 aa, Glycine max
  Clone ID: PAT_MRT3847_44244C.1.pep
GKGRRRRAKMLDIQKRRVQLLLFIVGVLALSMTAEKFRELVGKEEASKSGQFTFMNCFDMGSGSLACAVKEGIKLYVYNLQTAHTERVRHRAIEKALADAVTEGLSAAEAAKQAQKVGAKAAKVAARQAKRILGPIISSGWDFFEAMYFGGSMTEGFLRGTGTLFGTY

SEQ ID NO: 223938 - protein, 141 aa, Glycine max
  Clone ID: PAT_MRT3847_44245C.1.pep
SVVFIGKWGLERGNLGSWVDLCEREREREKKKAVMLTADNEIDEDQKEIGAPKSPWKTPTTVDGKGGGDVSVMMGTESWPRLSDAQRPLKNLETAAASVSSAGEIASRPSSMQKVNGAGNVNPMHKLPSSRDQKPGAKRNS

SEQ ID NO: 223939 - protein, 55 aa, Glycine max
  Clone ID: PAT_MRT3847_44246C.1.pep
IQLYLHLFPSTCLFSKVRLSDLFPSTLILYLSTLSTLHHQPHLSPLIINNILNII

SEQ ID NO: 223940 - protein, 37 aa, Glycine max
  Clone ID: PAT_MRT3847_44247C.1.pep
KRESDIKKQERKKKRTRYTIGSKLTLHCMSYHIYTVM

SEQ ID NO: 223941 - protein, 92 aa, Glycine max
  unsure (1)..(92): unsure at all Xaa locations
  Clone ID: PAT_MRT3847_44248C.1.pep
DLSLSELAALYMXHKRAIFKPMWTEQHLHLKLRCGCSWXLSLRYLMAAEACLMRVKSQAIRGCGHRLAVTCKGGAYSFGSNRSGQLGHGTTD

SEQ ID NO: 223942 - protein, 148 aa, Glycine max
  unsure (1)..(148): unsure at all Xaa locations
  Clone ID: PAT_MRT3847_44249C.1.pep
FRLRFCXLGSSPSLXLXLGGSXXRPGVRVSAGSXXGLXLCCRPSXCRFXGXAXXRSGPPFXGPAXSCLXXXXPFXXXGACXVRCLALAXXAXPASVXAPFGPSRPSRXXRFSAXXXALASVFFLRPSGCWPFXGSSVSCGRSWXCVSV

SEQ ID NO: 223943 - protein, 40 aa, Glycine max
  unsure (1)..(40): unsure at all Xaa locations
  Clone ID: PAT_MRT3847_4424C.1.pep
SWESKKYFYSKNNKPFLLNNGLILKKKLXLLKLAVLYCNL

SEQ ID NO: 223944 - protein, 114 aa, Glycine max
  Clone ID: PAT_MRT3847_44250C.1.pep
GEASTRLRTTTDLVLGNRMGREAYLTFCLIPFSNPFFRTNLECKQGRKGLKSPYLIQQKKPDLSSDRDSIAVDRGRARITFSIRIRKGIALIACDSLSMLVSGEVPQTRSFKSF

SEQ ID NO: 223945 - protein, 53 aa, Glycine max
  Clone ID: PAT_MRT3847_44251C.1.pep
GATKNLLFKNKDFQFFFGESKKKKACLVFANNKEGGADPTFLNFAKALKEVKC

SEQ ID NO: 223946 - protein, 252 aa, Glycine max
  Clone ID: PAT_MRT3847_44252C.1.pep
RLREDDRRGSRAEAERLLAIGEKLLQSRDLSSSRDFAILAQEAEPLLEGSDQILAIVEVLLAAEKPITNDHLDWYAILQVDRTCQDLDLIKKQYRRLGLLLHPDKNPFSLADHAFKLVSDAWAVLSDPVQKAIYDRDVAGSVEPESFWTACPYCYFLYEYPAVCEGCCLRCQNCQRSFHGLSIPSLPPLVPGQEAYYCNWGCLPMGFVFGNLGSDGPGPGPGPMVENGPTAVAVSNGVNVASRKRGRPRKGV

SEQ ID NO: 223947 - protein, 50 aa, Glycine max
  Clone ID: PAT_MRT3847_44253C.1.pep
DVSIVIVLSKSNRRIHCSLKCHCCNQSEDYQKNVSCFAWCVPYLFILKVC

SEQ ID NO: 223948 - protein, 111 aa, Glycine max
  Clone ID: PAT_MRT3847_44254C.1.pep
GLPLCDRVYDFVGCLLYNGPCFHSLLLTEPHCRAKCSYLTHTWALVQVNASFIMCGDNRLTEKTTCTGRDVDVSAVYYTIATDFRKFLPDYIRWDQHTLWIYIARIFVNLA

SEQ ID NO: 223949 - protein, 43 aa, Glycine max
  Clone ID: PAT_MRT3847_44255C.1.pep
KNYKLGFFRVIHKGQIEEHHQDTVEYVLKVEDDFIKHESREEG

SEQ ID NO: 223950 - protein, 71 aa, Glycine max
  Clone ID: PAT_MRT3847_44256C.1.pep
MRAAVLVALQAAVACAEDEKKTEKKQEKRGLVDSLGYGYGGLDHGLTSHSYSSLDLGHSYGHGYGHDYGHS

SEQ ID NO: 223951 - protein, 271 aa, Glycine max
  unsure (1)..(271): unsure at all Xaa locations
  Clone ID: PAT_MRT3847_44257C.1.pep
MFRCCIAPLWSIFGDVSVSVTDILMLLLMDKSNDRSCSNIFSIASFLSVSFCCFLIFDRLCYVLYCWSQSLIIRSSKPFSTLIILGSGGHTAEMLNLLAVLQKGRFNPRFYIAAATDNMSLQKAQLLENSLAAEMLIRNRFYCRMQQGSLXTAQFMKIYRSREVGQSYITSVWTTFVAMVHALWLMIKIRPEVILCNGPGTCIPLCAIAFIFKVLGIRWSLIFYVESIARVRRLSLRGLLLYKLRMADKLFVQWPQLQRQYPRATYAGRLM

SEQ ID NO: 223952 - protein, 132 aa, Glycine max
  unsure (1)..(132): unsure at all Xaa locations
  Clone ID: PAT_MRT3847_44258C.1.pep
MAAAFLMPLSKRASKPVSTLIILGSGGHTAEMLNLLVVLQKDRFNPRFYIAAATDNMSLQKAQLLENSLAAEILIRNRFYCRMNKGHXTAQFMKIYRXRGKVGQSYITXVWTTLVAMGHALWLMIKIRPEVI

SEQ ID NO: 223953 - protein, 161 aa, Glycine max
  unsure (1)..(161): unsure at all Xaa locations
  Clone ID: PAT_MRT3847_44259C.1.pep
TSKGSSEHKSLSLGWLXHVYGSLIXILFXPWKWYSLWLLXXALSSGXXVSKSLKMYVCFXTAKHSNLRNFTXPEVRAPXKPVVHSGRREHIRTXXALXXATKXLVANEENPRTLHFXITLGFSRYLDPQQTQXWCHTLLYVLLAKAVRRRRGVAPGNSENR

SEQ ID NO: 223954 - protein, 71 aa, Glycine max
  Clone ID: PAT_MRT3847_4425C.1.pep
PKESQAFQEGYSTNTAVYFWTTLRDSLYAVTVRTPMQHTDHVRTHSDDPSNTIDLALLLSISFQTHTRASH

SEQ ID NO: 223955 - protein, 44 aa, Glycine max
  Clone ID: PAT_MRT3847_44260C.1.pep
RCECVPLAAIARIDSLLLLATAFYLRADVLEYCHLESRLRCLCS

SEQ ID NO: 223956 - protein, 150 aa, Glycine max
  Clone ID: PAT_MRT3847_44261C.1.pep
TSSVSHGSGSVVEAEVSVSYRGVRRRPWGKFAAEIRDSTRNGVRVWLGTFDTAEAAALAYDQAALVMRGSMAVLNFPAEIVRQSLRNMEQYGSFQEGSSPVLELKKRHSMKRKSETKKHQLHDVMVLEDLGAEYLEHLLTLSQDMDMDAC

SEQ ID NO: 223957 - protein, 242 aa, Glycine max
  Clone ID: PAT_MRT3847_44262C.1.pep
MKMSVIRVAPCLPGVYAPPITSSQLRRRDFNSTPPSLPTAFDPISVTSLSLKAEPSPRLHCLHGLKSRQPLHVCFAGGQEMMENNGDFQSKSLQKAMGQLKGYSIEDILRQQIEKGGSGGKPPGGRGSGGGGSDNSSGGSDGMSNETLQVVLASVCFILMYIFVINGLELLKLAKDCIKFVSGRGQSVRLKQAVYKWVRIYKNIIEKMEAARNGLEKASTCLLDHDFFRGVFRHNMKSNPEE

SEQ ID NO: 223958 - protein, 50 aa, Glycine max
  Clone ID: PAT_MRT3847_44263C.1.pep
VVKFKVNKKVIVKIRLTRDDSDFIWKMRIFERQTDRVWMITNTEDFIFFG

SEQ ID NO: 223959 - protein, 77 aa, Glycine max
  Clone ID: PAT_MRT3847_44264C.1.pep
HVRINTAKEFIFFYFYIIHPHVKRNFSAIPYLIRTHVKRIKLNHIPLLMTLWRLVILLGVLGPFAFNNAAQVYAREN

SEQ ID NO: 223960 - protein, 97 aa, Glycine max
  Clone ID: PAT_MRT3847_44265C.1.pep
DLAVPVFYDPGGPLCGACGGPFGPDEFWICCALCQKWFPGKCVKIPPVRAGPFHPFRCPFSRTKRARPCLPWAQFPPFPSLLGPVFLLFFLDVPVNG

SEQ ID NO: 223961 - protein, 380 aa, Glycine max
  Clone ID: PAT_MRT3847_44266C.1.pep
MTNEPNNKYDVFLCLVGPDTRYTFAGNLYNALRRNRINTFFTEDNHHDELLLMNGDQISPFALRAIKESNLLIVVLSPNYASSPRNLDEFVAIVRCIKRKKQLLLPVFYKVERGEIMDAIFSGPDQQALCVFEERFGDYKERVNEWKDALLEVYGWTAMEYQNGSGYEYEFIREIVDIAKRRQRRRYDVFLSFRGRDTRHSFTGFLYKAFCREGFYVFMDDEGLEGGNQISPTIMGAIERSRLSIVVFSENYGYSTWCLDELSKIIECVKTRNQMVWPIFYNVEKSDVCNQTKSYGDAMTAQEKRFGKDSGKVHKWRSALSEIANLEGEHLRENQYQYEFIERIVEKAINIPSPCSNDSYEEESRVSKCTHWEIGSCVVS

SEQ ID NO: 223962 - protein, 69 aa, Glycine max
  Clone ID: PAT_MRT3847_44267C.1.pep
YLKLQHKLHISILPVLTNSDIYWQEAVHNSSFCQILSKWETKQQTLNSRKGSRGTKLETYCHKGQFVHK

SEQ ID NO: 223963 - protein, 76 aa, Glycine max
  unsure (1)..(76): unsure at all Xaa locations
  Clone ID: PAT_MRT3847_44268C.1.pep
SSSRAPKQTXADTTIAYHATLCNLQEESGQMLVVNSDNVGSKQLDNISXGHRRDAVVLMGNKTLMKRSIRMHADTR

SEQ ID NO: 223964 - protein, 87 aa, Glycine max
  Clone ID: PAT_MRT3847_44269C.1.pep
QEKKIGVFQVFFVCTPFLFVFCPPPNPLRGDNMFLFLFPMSKKKFVVNEAFFGYLCLWKHLILYVQRRVIYAVMLDLLGGCFFCLVR

SEQ ID NO: 223965 - protein, 129 aa, Glycine max
  Clone ID: PAT_MRT3847_4426C.1.pep
LTLRSVCDGPSTPPTRRSSSASSSRTRRSSTTRTPRLPASPTPTCTSPRRSATAISARPSLPPATKTPARPSTRLIRRHSCSPPPPATSTSSTCSATTTPRASCDATPAAAMPSWRPAAAATTPSSSCC

SEQ ID NO: 223966 - protein, 43 aa, Glycine max
  unsure (1)..(43): unsure at all Xaa locations
  Clone ID: PAT_MRT3847_44270C.1.pep
FGXRMSXASAIIFGXVFWXMGXFXRLPXXXSAXDHFXCSSXXQ

SEQ ID NO: 223967 - protein, 46 aa, Glycine max
  Clone ID: PAT_MRT3847_44271C.1.pep
NSSQSFSKSKKFGQNRRVSHGQEQPPKDHDPLTILLDVGPLFSVTG

SEQ ID NO: 223968 - protein, 50 aa, Glycine max
  Clone ID: PAT_MRT3847_44272C.1.pep
TPFNKPATLLIPPVGAAKAKNPAQGIPQVAMMVKCYSGVAMSLLSSSRSR

SEQ ID NO: 223969 - protein, 59 aa, Glycine max
  Clone ID: PAT_MRT3847_44273C.1.pep
CFLAPIILMFYEYLQLNNMDLTPFAFVVKPTHETFSHNTDVFFFFFSYRIWIFPHPQNG

SEQ ID NO: 223970 - protein, 54 aa, Glycine max
  Clone ID: PAT_MRT3847_44274C.1.pep
RSSLLGILRAKIGKHTRHKERHTHRTHQLPSHMSGAEFKKTDSIASLEQLPLTD

SEQ ID NO: 223971 - protein, 97 aa, Glycine max
  unsure (1)..(97): unsure at all Xaa locations
  Clone ID: PAT_MRT3847_44275C.1.pep
MSILSLSNHTRLDSIHKGATLNQLSTNTFLKSSPSTALVKKPHMFMPXTVALMDIKKYHNSTELLIQKLPFQRFFHEIAQDFITHLSFHNITLFFLQ

SEQ ID NO: 223972 - protein, 59 aa, Glycine max
  Clone ID: PAT_MRT3847_44276C.1.pep
ISRIAIRPQLVTSPNTQQSRPRCRHNCGSDAATVSKRVLMLWPQFWLLAVFFFFLIWSR

SEQ ID NO: 223973 - protein, 67 aa, Glycine max
  Clone ID: PAT_MRT3847_44277C.1.pep
EGCSSYYTRLRSFLTFVNEREEEEEKNIMSKRKRTEKGSSRRVAHEDGLIMDGSSVSVHIENDAAQG

SEQ ID NO: 223974 - protein, 65 aa, Glycine max
  Clone ID: PAT_MRT3847_44278C.1.pep
SVLILFLYLMKLLNELMKWGGKTKILLFLPGSNIYLLKTFQDGSGLGCLCLKFSLFTKINIKKTF

SEQ ID NO: 223975 - protein, 98 aa, Glycine max
  unsure (1)..(98): unsure at all Xaa locations
  Clone ID: PAT_MRT3847_44279C.1.pep
KKNQPPWEIKRAPKKNNGLQGKKPPSTILNLKSRHGQSKPVINKAMVKIXGAPFKKLASLRDEWAKNNCYISAGPIQLFGPESKVINHTLLLEFVPQD

SEQ ID NO: 223976 - protein, 55 aa, Glycine max
  Clone ID: PAT_MRT3847_4427C.1.pep
MKADRIVCADQVLPFQWSITSEKSTPFLYFTVLNHALNRYSICLRIKIASYHQLV

SEQ ID NO: 223977 - protein, 88 aa, Glycine max
  unsure (1)..(88): unsure at all Xaa locations
  Clone ID: PAT_MRT3847_44280C.1.pep
KAGFDGLLAXANLLDQDDHNLGFEAAKGVYAEMVKAGIIDPLKVVRTALVNAASVSLQLTTTEAAVVDNSHAKNNPPSGVPNMDDLDF

SEQ ID NO: 223978 - protein, 71 aa, Glycine max
  Clone ID: PAT_MRT3847_44281C.1.pep
LKCRAVTPVKESSSVLIVFRQALNYLNWDRCCIQKLTSYHFKITYVIRASIFPLLTSFFRMSKYPGFHSRI

SEQ ID NO: 223979 - protein, 196 aa, Glycine max
  Clone ID: PAT_MRT3847_44282C.1.pep
MAEIRLTRVEQGQTKIKNVPIAVTPEGFWCCPSPVVFQKSLKTQNTLNKHKPSSPPPPKTSVQKKPVPVSVSVPVCERRTTTPAPSGLVLSDEKQCATAPERPPPPTATSVAAAERAPRQKIESLPKKVAIEFGEPGTCDMKVVLLGKQGFCVKLSVHRDVLTQKSGFFFEKLFEQSGLSCLQIGDCEDVEIYVET

SEQ ID NO: 223980 - protein, 75 aa, Glycine max
  unsure (1)..(75): unsure at all Xaa locations
  Clone ID: PAT_MRT3847_44283C.1.pep
AHSYLSLLVLFLAALLLTPLGLAVESDSYYIPPVFXIPPLFMLLPVPPFFMPRPPVYTPKPPVYSKPPYGECPPV

SEQ ID NO: 223981 - protein, 152 aa, Glycine max
  Clone ID: PAT_MRT3847_44284C.1.pep
WGGASVIYVDTVGDLGFASELGNYAEYSGAPKKEEVLQYARVVIDCATANPDGQKRALVIGGGIANFTDVAATFSGIIRALKEKESKLKAARMHIFVRRGGPNYQKGLALMRALGEEIGIPIEVYGWYMQRGQPLLKVNNTFIYSIFMVSLK

SEQ ID NO: 223982 - protein, 423 aa, Glycine max
  Clone ID: PAT_MRT3847_44285C.1.pep
MARKKIREYDSKRLLKEHFKRLSGKELPIKSAQITASTDFTELQEKEPWLSSSKLVVKPDMLFGKRGKSGLVALNLDFAQVVSFVKERLGKEVEMSGCKGPITTFIVEPFIPHNEEFYLNIVSERLGNSISFSECGGIEIEDNWDKVKTAFVPTGMSLTSEIVAPLVATLPLEIKGEIEEFLKVVFTLFQDLDFTFLEMNPFTLVDGKPYPLDMRGELDDTAAFKNFKKWGDIEFPLPFGRVMSATESFIHGLDEKTSASLKFTVLNPKGRIWTMVAGGGASVIYADTVGDLGFASELGNYAEYSGAPKEEEVLQYARVVIDCATANPDGQKRALVIGGGIANFTDVAATFSGIIRALKEKESKLKAARMHIFVRRGGPNYQKGLALMRALGEEIGIPIEVYGPEATMTGICKQAIQYITAAA

SEQ ID NO: 223983 - protein, 297 aa, Glycine max
  Clone ID: PAT_MRT3847_44286C.1.pep
MFKHDSNDGVLVGGRVLRPRSKSGDCKRLYYGENDDVVSGDNGEHSGCERVKVKKEHEEADDFLADSCEKEIIKPKKEGDGRRKLKRKRGRPPKIDLKGEDEPGDQLPRKRGRPPLAGRQNHLVTVVTHNRKGKATLRKGKKGLTKSDGAKVNAIGDTNSRNSTGGELEKKEDSLVKRNAVKQLVRDQIKEQLSAAGWTVDFRPRNGREYHDAVYVSLDGHTHWSITLAYKRLKEYYEAGNGEGKAYKPGFKFTPIAEEDFKMLTKVMNKQRKKGGKGGKKVDGVNGKKNKEKSGYG

SEQ ID NO: 223984 - protein, 168 aa, Glycine max
  unsure (1)..(168): unsure at all Xaa locations
  Clone ID: PAT_MRT3847_44287C.1.pep
DVTTTYIELPCGRDFNITCGQSCWVFEWDDMDIFQRTSTLFNDYFHARLTGVLYNICENKRYELDVSEQCSQALVQVQSHQIESVSIGALDMRGNLRCGNQNYGVQVTTYSTQLYSDCRTIFYEQEKNTSPTHSQCISASRAXKPKNCLXQPSVQLICGXGSMIGSPP

SEQ ID NO: 223985 - protein, 53 aa, Glycine max
  Clone ID: PAT_MRT3847_44288C.1.pep
LIPGGIKSHLFLSPKLGHGKNNVFHIPQEYYDKANEFNARKVTTKMTSKKNQI

SEQ ID NO: 223986 - protein, 75 aa, Glycine max
  Clone ID: PAT_MRT3847_44289C.1.pep
YISKFRNLGKVKKPKNPTRTKQRYVNEAKMCIQIAITLFKMKIGRVHVKANKVVSRAIIMVIANLEEATQHNPGT

SEQ ID NO: 223987 - protein, 65 aa, Glycine max
  Clone ID: PAT_MRT3847_4428C.1.pep
LSWGAFMRILSSKVLFVEKVIDQTFVPRVKLAYAFPGQGFGVYIIPEAQKDEGFLDGLVGFLTNF

SEQ ID NO: 223988 - protein, 70 aa, Glycine max
  Clone ID: PAT_MRT3847_44290C.1.pep
IQRIIILHASSLLYIPLKQVKRAVRVFVSLLLDKDAICCVHEDGTQRPPMNEYVRVMEYVLQLDYIGVPG

SEQ ID NO: 223989 - protein, 75 aa, Glycine max
  Clone ID: PAT_MRT3847_44291C.1.pep
FVCLVLIKLPGYRSVFEQFLRWIELAMNTGYVSRLPIEIFFLFENNDIVRGACVFSLLVMRIRDTIPMAHTIWYF

SEQ ID NO: 223990 - protein, 42 aa, Glycine max
  Clone ID: PAT_MRT3847_44292C.1.pep
TIKIFFNGLKWKPFNMFLYTKFNIEFKIICLKNLNHFTSNPK

SEQ ID NO: 223991 - protein, 50 aa, Glycine max
  Clone ID: PAT_MRT3847_44293C.1.pep
HALTTGHTFLARRGGVFIMIAQVELNLIQLWAFIEPFVSLVCSFHLMTLW

SEQ ID NO: 223992 - protein, 72 aa, Glycine max
  Clone ID: PAT_MRT3847_44294C.1.pep
MGKQIVPVKSPIYALSPFQQKIMPGLWKDLPTKIHHTVSENWISATLLRGPLGGTYTYVQNYLANEKLSHRC

SEQ ID NO: 223993 - protein, 185 aa, Glycine max
  unsure (1)..(185): unsure at all Xaa locations
  Clone ID: PAT_MRT3847_44295C.1.pep
PRVRPRVRMYDLPPEFHFGILGWSPPTDGAADAAMWPDVGSGAAAPRYPGGLNQQHSVEYWLTLDLLSSSSPPCGAAVRVADSRDADVVFVPFFASLSYNRHSRVVPPEKVSRDKELQEKLVRYLMAQPEWKRXSGGADHVIVAHHPNSLLHARSVLFPVVFVLSDFGRYHPRVASLEKDVIAPY

SEQ ID NO: 223994 - protein, 165 aa, Glycine max
  unsure (1)..(165): unsure at all Xaa locations
  Clone ID: PAT_MRT3847_44296C.1.pep
MGKLTLRQGTSQSVKRMPLSIGGGAGAQNAMLMNMPNAALSMRTYLVGDLVLEVSKMTSPYIKCTDSLFIAFGHMADDTTKIEAVPHMLVQSGEIQAIAXLQLSQEEFLTARTTXVRPATTLLADGCPYWHAMEHDSSRSTIPGDFGIGVNLATLNNICAYGLNP

SEQ ID NO: 223995 - protein, 83 aa, Glycine max
  Clone ID: PAT_MRT3847_44297C.1.pep
APQIQKFHFQSLRKPSLDPSFTEMHHMWLLSFLLTSHLVTGITPDTMVLICSWVFTFQLTTQPYHDCNCGGISCIFPQCQGSR

SEQ ID NO: 223996 - protein, 65 aa, Glycine max
  unsure (1)..(65): unsure at all Xaa locations
  Clone ID: PAT_MRT3847_44298C.1.pep
LXQKSDTLYFLRHSKLTCYISTKTXVANNNPXKFKPLHPKKIYILYKNARLTKWNQNSHFFKRWH

SEQ ID NO: 223997 - protein, 164 aa, Glycine max
  Clone ID: PAT_MRT3847_44299C.1.pep
GNMTNLVVHWTSRTRNFRDTVKAASEFASRNHLPHRIQDQMLSHICLRFKTEGLKQQETLNDLPKAIRSSIAHHLFFPVVQKVYLFQGVSHDFLFQLVSDMEAEYFPPKEDVMLQNESSTELYVLVSRAEDLVRYMDGHDHVHGKAVAVDAFGEIGVLYHILQP

SEQ ID NO: 223998 - protein, 64 aa, Glycine max
  Clone ID: PAT_MRT3847_4429C.1.pep
SWSDAVPQPFQKALGVNWGAPPKAPAVVSKENWGKVVPPPQQIPVPPLGIDSVQPTGWEKKSVF

SEQ ID NO: 223999 - protein, 85 aa, Glycine max
  Clone ID: PAT_MRT3847_442C.1.pep
SFSNNEEPNQEAYCVQRNTVKNKELNIYTWPHTEKHPQLSRCHRDTLTFLLTLMAECLLQEQPPLPLDDYQLTYHRPSRLEFFHL

SEQ ID NO: 224000 - protein, 132 aa, Glycine max
  Clone ID: PAT_MRT3847_44300C.1.pep
LIPFFVNLPLSLVFFFRFVSWFFALFFFSVLYRLFPSLGLFVLPPLFLIYCPPAFPLRYYMVLPVRPFSLPLFSQPFPFLAPVFLAFGPVLFDSLWGSGCPFQEKNQNTRINKINNPKKKIKKKKIEKKKKF

SEQ ID NO: 224001 - protein, 139 aa, Glycine max
  Clone ID: PAT_MRT3847_44301C.1.pep
PLVARFEASEPPAGGSPKPITQFSVLEIADTSKHAQARDAFENLAKAAGIEAAGGVSAGDGQKAGLGVTGWNTLEEAKAARDDPKFAAAIAALESLGKTHNIFVQIQRLQRSPGVAAAFMQFEGITWRLTMSREIAEHS

SEQ ID NO: 224002 - protein, 73 aa, Glycine max
  Clone ID: PAT_MRT3847_44302C.1.pep
LLYQSNLYCWKELSILLYHSNLISSKKNKKNNKKNQKKKKKKRGAPPNGPPPPREFFRGGIREGPLFPPKGAF

SEQ ID NO: 224003 - protein, 72 aa, Glycine max
  Clone ID: PAT_MRT3847_44303C.1.pep
FPVLLGGKKKKGLKKRPWFKKTKKSFYKPKLTPLFPGQTPKKGPPRFFLVAQGKKRHTLKTPYKKPLPFVVV

SEQ ID NO: 224004 - protein, 69 aa, Glycine max
  Clone ID: PAT_MRT3847_44304C.1.pep
MLGNFTGQKIYLFTFICLLNNYQILIANELGNNPKVHITDGQEPNAQMRHLDCADSFVVTTYSPNMISE

SEQ ID NO: 224005 - protein, 58 aa, Glycine max
  Clone ID: PAT_MRT3847_44305C.1.pep
VRVLDHLHDRELPLHKIHHLVIVHIFFSYALISHIFPRLQVQRDGRTMLKLSVPQHGT

SEQ ID NO: 224006 - protein, 72 aa, Glycine max
  Clone ID: PAT_MRT3847_44306C.1.pep
GRPTPTSTRPEENCLTTPSHKHPTYHSRFYFKCGTTHIYLNKFQPFFLLSQPHLSSTQLYCKSYSYFPFFVI

SEQ ID NO: 224007 - protein, 63 aa, Glycine max
  Clone ID: PAT_MRT3847_44307C.1.pep
MAVMERLKMFVVQEPVVAASCLIAGFGLFLPAFVRPMLDSYQATKQPPQPALSDVVAGMTGKK

SEQ ID NO: 224008 - protein, 68 aa, Glycine max
  Clone ID: PAT_MRT3847_44308C.1.pep
VFLVHLNTIPITETGITPARSLIAAIIYNIGHAWDDQWFFWVGPFIGAALGAEYHQIVIPPIPFNTKT

SEQ ID NO: 224009 - protein, 679 aa, Glycine max
  unsure (1)..(679): unsure at all Xaa locations
  Clone ID: PAT_MRT3847_44309C.1.pep
INKVYYSCLVKAMPKSNIPSEPERNLDQIIYKIKLPGPAILGEGKPENQNHAIIFPRVRGLQTIDMNQDNYMEEALKMRNLLQEFLKKHDGVRFPSILGLREHIFTGSVSSLAWFMSNQETSFVTIGQRLLANPLKVRFHYGHPDVFDRLFHLTRGGVSKASKVINLSEDIFAGFNSTLREGNVTHHEYIQVGKGRDVGLNQISMFEAKIANGNGEQTLSRDVYRLGHRFDFFRMLSCYFTTVGFYFSTLITVLTVYVFLYGRLYLVLSGLEEGLSTQKAIRDNKPLQVALASQSFVQIGVLMALPMLMEIGLXERGFRTALSEFILMQLQLAPVFFTFSLGTKTHYFGRTLLHGGAKYRPTGRGFVVFHAKFADNYRLYSRSHFVKGIELMILLVVYEIFGHSYRSTVAYILITASMWFMVGTWLFAPFLFNPSGFEWQKIVDDWTDWNKWISNRGGIGVLPEKSWESWWEEEQEHLQYSGMRGIIVEILLSLRFFIYQYGLVYHLNITKKGTKSFLVYGISWLVIFVILFVMKTVSVGRRKFSANFQLVFRLIKGMIFLTFVSILVILIALPHMTVQDIVVCILAFMPTGWGMLQIAQALKPVVRRAGFWGSVKTLARGYEIVMGLLLFTPVAFLAWFPFVSEFQTRMLFNQAFSRGLQISRILGGQRKERSSRNKE

SEQ ID NO: 224010 - protein, 52 aa, Glycine max
  Clone ID: PAT_MRT3847_4430C.1.pep
NVTYKMFSFFTFSISRISSLHFFPTNLIHHYFIVQFWSICYLNILCLTEMMT

SEQ ID NO: 224011 - protein, 45 aa, Glycine max
  unsure (1)..(45): unsure at all Xaa locations
  Clone ID: PAT_MRT3847_44310C.1.pep
MAVSSFHIXFTFVCRSDPDIWPPPSYFDNLRRRNFRSSAGSVAAF

SEQ ID NO: 224012 - protein, 49 aa, Glycine max
  Clone ID: PAT_MRT3847_44311C.1.pep
INHARLMAPWGPSMKSRIPNNPLAPKLPPMLIQNPLAGGTLCHKSMILS

SEQ ID NO: 224013 - protein, 84 aa, Glycine max
  unsure (1)..(84): unsure at all Xaa locations
  Clone ID: PAT_MRT3847_44312C.1.pep
VSPAAGLALVPLVXPVAPLLLFCPLGGSSPVXAVAFVSRCLAAPXLFAPSLGLLLLAWCGPXVLCWCAPLXSLPPPFACLFRRS

SEQ ID NO: 224014 - protein, 112 aa, Glycine max
  Clone ID: PAT_MRT3847_44313C.1.pep
MNTPEMGSASENSVKRERTSEGICCSCSKKSLCKTNKCKCRSSGGSCGASCGCTRLKCTNREPNQLEGSEPLKSGNTECTQEASAEDKDGSVIASECAKLLQSALVQKPASC

SEQ ID NO: 224015 - protein, 186 aa, Glycine max
  Clone ID: PAT_MRT3847_44314C.1.pep
MASSLHNYVLAILLLAITQFKTTSAGSHHHLQHLKSLHFSLFQHETINKTGYIIVDGIKGGAGVTQTTTPFGTLFAFQDPLTVAANRSSKLVGIAEGTTVTSSLDGLRSISIAKLTLRLKHHKGSLSIVGVTNNVKPSDLPVVGGTEDFMFVQGYISTSPVDLKGLTVVYKIEFHLYWPPYATQAS

SEQ ID NO: 224016 - protein, 121 aa, Glycine max
  Clone ID: PAT_MRT3847_44315C.1.pep
KCILRREAPKRARGENKQHKKPTSARRLQAEDHPQGQRATRAENRHDTEKGARHQRQGNNTRTGGPNNNNTRTAEPTTKTPQPTRGNSRPHPNVPRPREENIKQTGGKFQLPRNLAQGMKK

SEQ ID NO: 224017 - protein, 80 aa, Glycine max
  Clone ID: PAT_MRT3847_44316C.1.pep
WEPKIAGVKKKRPAYVSTPSNINGQYRLQGAYPSYGLNPSNLKIILANFPASYPQREPIAMLFALKNPTLFWHFSKNFPR

SEQ ID NO: 224018 - protein, 109 aa, Glycine max
  Clone ID: PAT_MRT3847_44317C.1.pep
VIERERPDCLQWARMGTSLGSNIHENGQTEFYSKMSGSQTDMSLTPESSVSSDTKYVQQADDTKNVQARPSGRYDSRSSNTLFPMSIYNNTTTFMQSPTDSMMVSQNYL

SEQ ID NO: 224019 - protein, 58 aa, Glycine max
  unsure (1)..(58): unsure at all Xaa locations
  Clone ID: PAT_MRT3847_44318C.1.pep
KKKAFLVRWVRGLVGNNKVSRPFGPKILXTGAKGQMEGALKIGYFCPVALPSKGPGMQ

SEQ ID NO: 224020 - protein, 49 aa, Glycine max
  Clone ID: PAT_MRT3847_44319C.1.pep
TPNIINAYSLHNGLKHRLDCICTSLHSISCKMLQMEALSHFPIPFFSLS

SEQ ID NO: 224021 - protein, 210 aa, Glycine max
  Clone ID: PAT_MRT3847_4431C.1.pep
PFFRCSKLINVAVPGTIDERTINCKRNPSFWEVNENHTLCLNSAKAIGCTVVNIGAQDLVEGRPHLVLGLISQIIKIQLLADLNLKKTPQLVELVDDNEEIEELLNLSPEKVLLKWMNFHLQRAGYEKTETVRNFSSDVKDGEAYAYLLNVLAPEHCSPATLDTKDANERANLVLDHAERMGCKRYLTPMDCCKGTSNLNLAFVAQLFHH

SEQ ID NO: 224022 - protein, 91 aa, Glycine max
  Clone ID: PAT_MRT3847_44320C.1.pep
MHQDVVFQCPPGVKLLGSTDVCPIQGMFVPRKLLTLQGHPEVNAEIMTEVVDSRYNRGVFTEEQWVKAREEVQRPHDGFIVGRAFYRFLLK

SEQ ID NO: 224023 - protein, 392 aa, Glycine max
  Clone ID: PAT_MRT3847_44321C.1.pep
DSAPAASGEDITWLEEHCQGQISNRKCLLDRLLKSASVTKELQEKDFEQNALDKLVMMAYEKYMASRGPSSSGGKNASNKIAKQAALGFVKRTLERCQQFEDTGKSCFNEPLYKDMFLAASSQLSIVRQLDGIEAESTKPCASFSLEARTASMGSQQNHSHLSQNMKNHDLDSSDILPAINGSSEQTSGKEDLWSNKVKKRELSLDDVGGSIGSSSAPSGIGSSLSNSTKGKRSERDRDGKGQSREVLSRNGTTKVGRPAISSAKGQRKLKTKPKQKATKHSVSVNGLLGKLSEQPKTALPSVSKSNEMSTNRTPKEKDEFGMGEFDDHEPIDLSNLQLPGMDVLGVPGDLDDQGADLGSWLNIEDDGLQDHDDFMGLEIPMDDLSDLNMMV

SEQ ID NO: 224024 - protein, 55 aa, Glycine max
  Clone ID: PAT_MRT3847_44322C.1.pep
TLSKRNAITDLDTLINSTIGGEPRSWCTLFVYLSLKLDLLTTIYYLLSNDPFILL

SEQ ID NO: 224025 - protein, 49 aa, Glycine max
  Clone ID: PAT_MRT3847_44323C.1.pep
HLNSNLNYFFTKNPPFTLFFKNFIISHIKNSNIFIHSFFTCTLTTTIYK

SEQ ID NO: 224026 - protein, 99 aa, Glycine max
  unsure (1)..(99): unsure at all Xaa locations
  Clone ID: PAT_MRT3847_44324C.1.pep
SSKPPPKKPVSIFHFFDKDQNKHGRXENLGTGGGHGNSVTGVCFSRDXLNLSTDWADGVERVFKXDDALSKSFKFLRINSPAGFHITAFPLFGDAYFQS

SEQ ID NO: 224027 - protein, 141 aa, Glycine max
  Clone ID: PAT_MRT3847_44325C.1.pep
EKEGGVGYSTSNAVSLSFLVIKFCASTSRTTPTQQFLYRQKYAYLTCPSFKFSTITKNLIPLEKLAISIIKPLRLHFGACLDQLILWSNLLFLWSFLKNIFGRKITIISPKRLVSKDAPKLENKAVDRNSNSITMLIVGIL

SEQ ID NO: 224028 - protein, 34 aa, Glycine max
  Clone ID: PAT_MRT3847_44326C.1.pep
GEPLMTYTKPEQCFHYPQVKIPLRGTNIPVSHCP

SEQ ID NO: 224029 - protein, 52 aa, Glycine max
  Clone ID: PAT_MRT3847_44327C.1.pep
PRVVCPWKARLRSSYSIILLQGPPGTGKTSLCKALAQKLSIRFNSRYPQAQL

SEQ ID NO: 224030 - protein, 294 aa, Glycine max
  Clone ID: PAT_MRT3847_44328C.1.pep
MANSSENNFPPQKQDTQPGKEYLMNPPPQYNSSQYKPSNKLQGKIAVVTGGDSGIGRAVCNLFSLEGATVIFTYVKGQEDRDASDTLEIIKKAKTEDAKDPLAIPVDVGYEENCKKVVDEVINAYGRIDILVNNAAEQYESDSLEDIDDARLERVFRTNIFSHFFMTKHALKHMKEGSSIINTTSVNAYQGDGTLVDYTSTKGAIVGFTRALALQLVSKGIRVNGVAPGPIWTPLIVATMNEETIVRFGSDVPMKRAGQPIEVAPSYVFLASNICSSYITGQVLHPNGGIIVNA

SEQ ID NO: 224031 - protein, 140 aa, Glycine max; identical to SEQ ID NO: 222679
  Clone ID: PAT_MRT3847_44329C.1.pep

SEQ ID NO: 224032 - protein, 224 aa, Glycine max
  unsure (1)..(224): unsure at all Xaa locations
  Clone ID: PAT_MRT3847_4432C.1.pep
MAWIWRNTLGLNHFKSPVTLDTKDGNERANLVLDHAERMGCKRYLTPRDVAEGTLNXLNLAFVAQLFHHRSGLSTDTKKMSYAEMMTDDVQTSREERCFRMWINSLGISTHVNNLFEDVRNGWILLEVLDKIFPGSVNWKHATRPPIRMPFRKVENCNQVIKIGKQLRFSLVNVAGNDIVQGNKKLILALLWQLMRFTMLQLLKKFEXHSQGKEISDADILKWV

SEQ ID NO: 224033 - protein, 140 aa, Glycine max; identical to SEQ ID NO: 222679
  Clone ID: PAT_MRT3847_44330C.1.pep

SEQ ID NO: 224034 - protein, 93 aa, Glycine max
  unsure (1)..(93): unsure at all Xaa locations
  Clone ID: PAT_MRT3847_44331C.1.pep
SVKRPALILLKKEEEKLNHFDGXLVKPELPVFVPSTRLLWVPPLTREXGPVIFESQIKKQLLLFVTLNDTEKFVSVFKETAKIFKGKLIFVHV

SEQ ID NO: 224035 - protein, 112 aa, Glycine max
  unsure (1)..(112): unsure at all Xaa locations
  Clone ID: PAT_MRT3847_44332C.1.pep
SLGFGGGAPPPRVAPFFFAPRGCFLVGPPQLXVGGHPYPFFPLRGAKSTAPGFFLGGQVGPFTRALIFPCSQXKLVGAPARVALEKKFGFPFPGAPPPIWVPVPGVTPSPPF

SEQ ID NO: 224036 - protein, 44 aa, Glycine max
  Clone ID: PAT_MRT3847_44333C.1.pep
LLHTLEQNIEAKLLGSPHVLTRETSGLFWPAKSSGENYINFRHH

SEQ ID NO: 224037 - protein, 64 aa, Glycine max
  Clone ID: PAT_MRT3847_44334C.1.pep
YYLCVINTINFSFFKTLIIKLYREYYLCITISVTQNELLATPIPHKDITVIDDFHLIIVSNYCY

SEQ ID NO: 224038 - protein, 64 aa, Glycine max
  Clone ID: PAT_MRT3847_44335C.1.pep
VISGFTSHKSSFFTKPRALEVKVLHEAQQHVHYTVTHATTYGSDHNSCTDCNNHGAANPIRRVP

SEQ ID NO: 224039 - protein, 82 aa, Glycine max
  Clone ID: PAT_MRT3847_44336C.1.pep
QKTIYGPDNIHKSHFPPQKPHIQYHFRIIFLHIILPAPNIPPFPPPSPSSSPINYIPPFPWPPKSTPSFFLFLYTHNPPIHL

SEQ ID NO: 224040 - protein, 73 aa, Glycine max
  unsure (1)..(73): unsure at all Xaa locations
  Clone ID: PAT_MRT3847_44337C.1.pep
YFLQVEQMLNALLCEAEIKLSYEMIETIINKTFLDADLNQDGKIDKSEXLNFVCENPSLLKVMTLPSVVFRSR

SEQ ID NO: 224041 - protein, 551 aa, Glycine max
  Clone ID: PAT_MRT3847_44338C.1.pep
MTATHLRSFLAEVQREDNATEEEAQAIIDGHKHLSIFHRSGLNLESFFNYLFSHHNNPPLLPSLGVHQDMSSPLSHYFIYTGHNSYLTGNQLSSDCSDVPIINALEKGVRVIELDIWPNESKDNVDVLHGRTLTSPVALIKCLRSIKQHAFVASEYPVVITLEDHLTPDLQAKVAEMITQTFGDILFAPTSESLKEFPSPESLKGRIIISTKPPKEYLEAKEVQEKEEESQQEKPADDEEAWGKEVPSLRGGTISDYKNIEDDDVLDDEEDIDEAEKSRQDAADEYRRLIAIHAGKPKGGLTECLKVDPDKVRRLSLSELQLEKAAETHGKEIVRFTQRNILRVYPKGTRITSTNYNPLIGWVHGAQMVAFNMQGYGRSLWLMQGMFKANGGCGYVKKPDLLLKVGPNNEVFDPRSHLPVKTTLKVTIYMGEGWFLDFKHTHFDKFSPPDFYARVGIAGVPNDTVMKKTEKVEDNWSPSWNQVFKFPLAVPELALLRVEVHEYDMSEKDDFGGQTCLPVWELRSGIRAVPLYSRKGDKYANVKLLMHFEFI

SEQ ID NO: 224042 - protein, 57 aa, Glycine max
  Clone ID: PAT_MRT3847_44339C.1.pep
FDLAFGGPYCCNCNQNPKYREETNCIPTGIRPHADNKEDQPTCNHTSVYFARLPVTQ

SEQ ID NO: 224043 - protein, 532 aa, Glycine max
  unsure (1)..(532): unsure at all Xaa locations
  Clone ID: PAT_MRT3847_4433C.1.pep
LLCKLINVAVPGTIDERAINCKRNPSLWEVNENHTLCLNSAKAIGCTVVNIGAQDLVEGRPHLVLGLISQIIKIQLLADLNLKKTPQLVELVDDSEEIEELLNLSPEKVLLKWMNFHLQRAGYEKTVRNFSSDVKDGEAYAYLLNVLAPEHCSPATLDTKDASERANLVLDHAERMGCKRYLTPMDVAEGTSNLNLAFVAQLFHHRSGLSTDXKRMSYAEMMTDDVXTSXEERCFRLWVNSLGISTHVNNLFEDVRNGWILLEVLDKIFPGSVNWKHATRPPIRMPFRKVDNCNQVIKIGKQLRFSLVNVAGNDIVQGNKKLILALLWQLMRFTMLQLLKNLRSHSQGKEISDADILKWVNRKVKIIGRTSHIESFKEKSLSSGLFFLELLSAVEPRVVNWNLVTXGESDDEKRLNATYIISVARKLGCSIFLLPEDIXEVNQKMILTLAASIMYWSLQQQTEDTDSFPSPVNTATTTTPEASPAPSVCGEDESSSIGGEFSNLSVDDATSDTTATSSQPESDSVSAGDELL

SEQ ID NO: 224044 - protein, 181 aa, Glycine max
  Clone ID: PAT_MRT3847_44340C.1.pep
QSNNRVGSRFEVQTSSDIPRMYHSSAVLLRDGRVLVAGSNPHIYYKFTNVLFPTELRLEAFSPWYLEPGFSSVRPTIVFPASQTKLKYGQTLRLRFEVMSATLVGDSVSVTMLSPPFNTHSFSMNQRMLVLEPHDLSKVGESTYEVEVTAPVSAVLAPPGFYLLFLVHQEIPSQGIWVQMV

SEQ ID NO: 224045 - protein, 284 aa, Glycine max
  unsure (1)..(284): unsure at all Xaa locations
  Clone ID: PAT_MRT3847_44341C.1.pep
MPSKQTYSFCFCFRRRFRLPVSEAPPEIRTLFDRYSDQNGVMTATHLRSFLAEVQREDNATEEEAQTIIDGHKHLSIFHRRGLNLESFFNYLFSHHNNPPLSPSIGVHQDMSSPLSHYFIYTGHNSYLTGNQLSSDCSDIPIINALEKGVRVIELDIWPNESKDNVDVLHGRTLTSPVALIKCLRSIKQHAFVASEYPVVITLEDHLTPDLQAKVAEMITQTFGDILFAPTSESLKEFPSPESLKGRIIISTKPPKEYLEAKEVQEKEGESXTEKPADDEEAWG

SEQ ID NO: 224046 - protein, 227 aa, Glycine max
  Clone ID: PAT_MRT3847_44342C.1.pep
QSGHFTARNKFQQEGDSGSLIMLKGDIGEKPRPIGIIWGGTANRGRLKLKVGQPPENWTSGVDLGRLLNLLELDLITTDEGLQVAVQEQRAVSATVIGSTVGDSSPPDGVLPKDKAEDKYEPLGLQIQSIPLGVVPSSQDMKPSIMETEFKLEDGIKVGPSIEHQFIPSFIGRSPLHKNSIQDRTATENLSSLRNNCDEDLCVSLQLGDNEAKRRRSEASTSTEEPQ

SEQ ID NO: 224047 - protein, 485 aa, Glycine max
  unsure (1)..(485): unsure at all Xaa locations
  Clone ID: PAT_MRT3847_44343C.1.pep
MGENEEAMQRLHFLKQPLNMEQLSIPQFNPSQMRARQHHHQNQFDGGNSNKRAGIPPSHPHPIPPISPYSQIPVSRQHNNISPTPTHTRSLSQPSFFSLDSLPPLSPSPFRDSSSTSVSEAADVSMEDRDVSSHSLLPPSPFSRTLNNSNLPLPPRKAHRRSNSDIPFGFSTVLQSSPPLIPLRNPVSAKPAQLVKRETPWDRVVEHNTNTNNNNNVEGSGEKKSPEGEVVDDLFSAYMNLDSFDALNSSGTDDKNGGENRDDLDSRASGTKTNGGDSSDNSARXESGHGGSEKREGMKRSAGGEIAPTTRHYRSVSMDSFIGKLNFDEESPKLPPSPGQRSALMSPAGGIDGNSAAFSLEFGNGEFSGPELKKIMANEKLAEIALIDPKRAKRILANRQSAARSKERKMRYISELEHKVQTLQTEATTLSAQLTLLQRDSAGLTNQNSELKFRLQSMEQQAKLRDALNEALTAEVQRLKIATAD

SEQ ID NO: 224048 - protein, 63 aa, Glycine max
  Clone ID: PAT_MRT3847_44344C.1.pep
VISNSKKNIDLYILKSNIPRILLALFTLCLVVRKSRRLDFFFNFIVFGPKKKKKKKKKSGRSN

SEQ ID NO: 224049 - protein, 51 aa, Glycine max
  Clone ID: PAT_MRT3847_44345C.1.pep
RNSARVGTRPLEKLRVAFSLHKTNTNHMERVKGHIHMKGPQCTSLRITLER

SEQ ID NO: 224050 - protein, 300 aa, Glycine max
  Clone ID: PAT_MRT3847_44346C.1.pep
THQQNETSILKTLSSVMLSLQGYEFKTNHEEWVKSLKYKLGCGVSDHVIAAINTTYDNIKALYKVRTEMRGAFQSLLKDDGILVIPTVAGSQLKLNTKKGFSSEFHDRTFALSSIASVSGCCQVTIPLGYHDDCSLSVSFISFHGADKFLLDTILDIYSTLQEQVSVGSYSLPLPNINGNRETSELLKEKGNAAFKERQWSKALSYYSEAIKLNGTNTTYYCNRAAAHLKLGCFQQAAEDCGKAILLDKKNVKAYLRRGTARESLLCYEEALEDFKHALVLEPQNKDASLAEKRLRRLMS

SEQ ID NO: 224051 - protein, 54 aa, Glycine max
  unsure (1)..(54): unsure at all Xaa locations
  Clone ID: PAT_MRT3847_44347C.1.pep
MTERFPLLELLETVPLSSNGVSLTVREDXNGPFYLRSSDRFQTLFENHNGPIRL

SEQ ID NO: 224052 - protein, 109 aa, Glycine max
  Clone ID: PAT_MRT3847_44348C.1.pep
FRNTDQCNNHHLSSLFFLIKLSNPKNRKQIKKMKTERNCKLISNIKRRGRAELIIRDLNTRNHGTNPIILLQFFSHHMIDITKKKQRRRKRRFRKRENLIEPKGNRTTK

SEQ ID NO: 224053 - protein, 82 aa, Glycine max
  Clone ID: PAT_MRT3847_44349C.1.pep
AMIQKLPHAKYGVNVVSESRIRHHFARPNWEKVFPQLANAHQSSRIGVFYCGSPPLTKTLKDLCLEFSLNSSTRFQFHKENF

SEQ ID NO: 224054 - protein, 48 aa, Glycine max
  Clone ID: PAT_MRT3847_4434C.1.pep
LFGISSTILRKRDADSLFSACEKRIYLDPEHANENLRSNCPEEGVVRA

SEQ ID NO: 224055 - protein, 60 aa, Glycine max
  Clone ID: PAT_MRT3847_44350C.1.pep
GYLTDWKFDDEISFMTEVATKGSDTSFYNSSASFSIVGGADYSPIDASKPILHETLSESS

SEQ ID NO: 224056 - protein, 181 aa, Glycine max
  unsure (1)..(181): unsure at all Xaa locations
  Clone ID: PAT_MRT3847_44351C.1.pep
DPRRTPGGQQHGGRRQEAHTEEEKTQGKDAEPTEXEEXXGQATPDPENTNNEPKRXXKDXXTNAGGQTARXGNRKAGXSHXPHRRRKGNRKKQGRXAREPEKKXRGKEASXXATRRTERPPKKGXAXQRPRTRTXXAAHEAXREDTGAPAEKXGKRXRXKXEXPKXXKXXXDPKERNXTEH

SEQ ID NO: 224057 - protein, 88 aa, Glycine max
  Clone ID: PAT_MRT3847_44352C.1.pep
DGSYVNCLMMDHPHYTTRTARKRVMSKISDAWKSLNQECLFGNHFHSTFTKASLNLARMVPLMYSYDDKQSLPGLEEQVKSLLYDDFL

SEQ ID NO: 224058 - protein, 66 aa, Glycine max
  Clone ID: PAT_MRT3847_44353C.1.pep
FELAIERLRVIPENAPGVLSILSLLQDSRLSEINNAIVSGDSSSVSNLLQTEATISRVLSVLIRFE

SEQ ID NO: 224059 - protein, 78 aa, Glycine max
  Clone ID: PAT_MRT3847_44354C.1.pep
LPLLPPLNQHFPGVSQTRAPRRGPLSQPLPVPGGKLFSVSVVKRGPPVARHGQPSSPRVLAGFLKLLDGPVSPVLRGQ

SEQ ID NO: 224060 - protein, 119 aa, Glycine max
  Clone ID: PAT_MRT3847_44355C.1.pep
FVINLWSLSYLRKFCHLHTIIFLTICISFNPKYKLSNKMYQKVKKKKKRLQKSKRIIDYNFFINAYQFPRATSSTLSTFGIICPQLGMKSKSKHLCCLQVCIKAKRDYWAELVPATSQR

SEQ ID NO: 224061 - protein, 228 aa, Glycine max
  Clone ID: PAT_MRT3847_44356C.1.pep
MLILRLAIFVASLVVVVQSHVPNIWEAKPFHHMLSLVQPDPVVLNYHRGPLLKGNVTVHINWYGNFTPIHRSIIVDFIQSLGSIPHSRHHPSPFSWWRITARYRGGPRTLTVGNQTLDNTYSLGKSLKTSHLLALASKNSAPTTRSNANAIHVLLTSADVAVDGFCMSRCGTHGSGRVAKRRIAFAWVDNPVTQCPEECAWTVHQPGYGPETPPLVPPNGDVGVDGML

SEQ ID NO: 224062 - protein, 115 aa, Glycine max
  Clone ID: PAT_MRT3847_44357C.1.pep
VGVFFLFVFLGTNLYTELVPMHKNIYFIQNYPGNQISNLKGKTLSLPFPILKTPVLLKPNLNPRSTPRRRKPLINAPTDILNRGHEKDKLALTLITWHRAGIGEPNPFKTFREGE

SEQ ID NO: 224063 - protein, 172 aa, Glycine max
  unsure (1)..(172): unsure at all Xaa locations
  Clone ID: PAT_MRT3847_44358C.1.pep
MQDEPEVIDVAELMKDLEEEDDYNDNKENIGPCSQKPQQHHKGVLQNGNRAKTDSKQRGVLEEKKSSPENADNNNNRNSNRKIPLLDTDVPSFRRPDLNSGSLFDPNLLAAFEQAVKEHSRITEEQRRSRVEEESSQKVEDDDPDPXMFFEEKCPPXGDXMVIFYTTTLRGI

SEQ ID NO: 224064 - protein, 380 aa, Glycine max
  Clone ID: PAT_MRT3847_44359C.1.pep
MKGVKGKFLKKLKSIKPILKQDLILQIKASDGYVHFLPKIPSFNLHSPFVSRENKPEKVVQSCEKMQDEPEVIDVAELMKDLEEEEDDEMDLDDYNDNKENIGPCSQKPQQHHKGVLQNGNRAKTEPKQRGVLEEKWSSPAKAASNSNRKTPSLETDIPSFRRPDLNSGSLFDPNLLAAFEHAVKEHARMTEEQRRARVEEESSQKVEDDDPDPDPDPDPDPLMFFEEKCPPGGDGTVIFYTTTLRGIRKTFEDCNKIRFLLQSFKVLYFERDISMHKEFKDELWSSLEGKSLPPRLFVKGRYIGGAEEVLSLHEQGKLRKILVGVPMDYSNGPCDACGGIRFVLCFKCNGSHKVVEENGESNQCLQCKKKGLIVCPYCC

SEQ ID NO: 224065 - protein, 85 aa, Glycine max
  Clone ID: PAT_MRT3847_4435C.1.pep
GLSFLKLEDRISSYGVSSSVRNGGRRTPRGRMFLNGMAMGKKDMCTACGWLIWPRPRDAHDLPSRFMKEGLASLSAREGYSLCEG

SEQ ID NO: 224066 - protein, 144 aa, Glycine max
  Clone ID: PAT_MRT3847_44360C.1.pep
FDLKSGRWKRPVWEFPSHHLTFVRLVSDGGGKLYLVGGVGSNGISRSIKLWELGGDGNYWVEVQSLPDLMCRKFVSVCYHNYEHVYCFWHEGMICICCYTWPEILYYLLSRRTWHWLPRCPSLPLKCSCGFKWFSFVPNLYASV

SEQ ID NO: 224067 - protein, 78 aa, Glycine max
  unsure (1)..(78): unsure at all Xaa locations
  Clone ID: PAT_MRT3847_44361C.1.pep
KRRGRSIDLDWLERSESLFLTYLKRALPSFSLWLEYPLCPSVKRVALFPMALLPHSCASKAFRLLRSIGFRKXXXXXV

SEQ ID NO: 224068 - protein, 79 aa, Glycine max
  Clone ID: PAT_MRT3847_44362C.1.pep
SSLIMNAKGHKFVRVEDWKSKSSFNPEQENSINNGNHKKRPNVGAGLKSIRRRLESVSKKMKNLTRASAVHPVSDGKKK

SEQ ID NO: 224069 - protein, 66 aa, Glycine max
  unsure (1)..(66): unsure at all Xaa locations
  Clone ID: PAT_MRT3847_44363C.1.pep
WVLGGFFIFFIFFFFLINVGVFXIIYYIIIFWFNKPLHACPAGAIPHLMQDYGEGGINPEQCLKTL

SEQ ID NO: 224070 - protein, 120 aa, Glycine max
  Clone ID: PAT_MRT3847_44364C.1.pep
MANLGVPVKLLHESLGHIITVELKTGEMYRGKLMEAEDSLNIALREITVTARDGRVSQLEQVYIRGSMIRFIIVPDLLSKAPMFKRVGPNAMRGRGIGAARGRATIQRANARAPPERTRR

SEQ ID NO: 224071 - protein, 408 aa, Glycine max
  Clone ID: PAT_MRT3847_44365C.1.pep
ISDRELLSSYIWGLWCEWRDIVARAEDESTGYVLPNKSVLEIAKQMPLTTSKLRRLVKSKHPYVEHNLDTVVSIIRHSIQNSAAFEEAAQQLKEAQAGTASDVVPFTDGTEDPQSHTQDSKESSNHQDTNVPINLKSNSLRSEPPKDSLTIADQNRDANVGALSTTKGNGATVQVLKKPTGAFGALLGNSASKRKLGPDKGKEDSKLEQIRSSVSLPFHSFLGSSEKSEPTVETHTVASEMLESQRPVSDVVSVSPLDEIIMLESGTGAENMEQNNLESSSEHREKDSVVSISGKEDEDESVSLSELSSNFKKCFHSNDQNYKTRRPKKTEQPSGLVPMKPFDYEAARKHVKFGEHTKHASSKGSDSHMEVEDSGSKKQRSTIGQGQLPQGRRRQAFPASGNRSSTFR

SEQ ID NO: 224072 - protein, 139 aa, Glycine max
  unsure (1)..(139): unsure at all Xaa locations
  Clone ID: PAT_MRT3847_44366C.1.pep
VSGFSRGVNLVDVLRELYLARTKDARQLXRXPLSHIEWLXHACVPTTGHIEEFHSQHRMMNAPDTNDNKDLLMSIDTLGPQRAGDGYANTTVFEDELVFGHTQXFLDGKISVDTWVPIGVNCVYPWSHIPLKAVFVLLH

SEQ ID NO: 224073 - protein, 114 aa, Glycine max
  Clone ID: PAT_MRT3847_44367C.1.pep
MLESQRPVSDVVSVSPLDEIIMLESGTGAENMEQNNLESSSEHREKDSVVSISGKEDEDESVSLLELSSNFKKCFHSNDQNYKTRWPKKTEQPSGLVPMKPFDYEAARKHVKFG

SEQ ID NO: 224074 - protein, 56 aa, Glycine max
  Clone ID: PAT_MRT3847_44368C.1.pep
DITGLILTFLLWHDCQVSWHSLVVTKKKTSALRPNRSTLTVVHRICMHHSFPWAFH

SEQ ID NO: 224075 - protein, 249 aa, Glycine max
  unsure (1)..(249): unsure at all Xaa locations
  Clone ID: PAT_MRT3847_44369C.1.pep
MLRRFLRIPCMRWGIFSSICNRSHIPRSDSLCFFQPDAFPGSTRASVTLKLPSIGPYLRXEIFKDPAKRKVMHGADRDIAWLQRDFGIYICNLFDTHQASKLLNLXERNSLEHILQIFCEVTANKEYQNADWRLRPLPDEMIRYAREDTHYLLYIYDLMRIKLFALSKESESSESSDTPLVEVYKRSYDVCIQLYEKELLTENSYLHIYGLQGAGFNAQQLAIVSGLCEWRDIVARAEDESTGYVLPNK

SEQ ID NO: 224076 - protein, 104 aa, Glycine max
  unsure (1)..(104): unsure at all Xaa locations
  Clone ID: PAT_MRT3847_4436C.1.pep
FFSPKLCTYWGLLRLPFGRDPYLLLHLFKSNLLSRFNKNDFNLESKSTIFVXFATRTFNVYFKVINAHIFDTACQERYRAITSAYYSGSICSLFVYDVTPHSTF

SEQ ID NO: 224077 - protein, 59 aa, Glycine max
  Clone ID: PAT_MRT3847_44370C.1.pep
LSRLVRSAATQVTKFRLFKVIQRYIPVELAAIVLFILHRWERWCLSFRKQPPRLVNRAY

SEQ ID NO: 224078 - protein, 268 aa, Glycine max
  Clone ID: PAT_MRT3847_44371C.1.pep
MERKRSHASFTMFAMLVGLLSQSLVIPVISTTVADQKNYYTPDPHAGSPPTAPGSHNSSPPSHGHGSSPPSHHHSSPSTPSTPSGGNCGSSPPQHHDPTTPSTPSTPSNPPSGGYYGGSPPTPVTVSPPSTPVDPGTPSIPSPPLIPSPSPFTGTCNYWRNHPAIIWGILGWWGTLGSAFGVTGTTVPGFSPGLSLPQALSNTRTDGLGALYREGTASFLNSMVNNKFPYTTNQVRDRFVASLNSNKAAEAQAQLFKMANEGRMKPRP

SEQ ID NO: 224079 - protein, 161 aa, Glycine max
  Clone ID: PAT_MRT3847_44372C.1.pep
MGLSASKRVEKSLSNSGDFDSACDSAFSHCLALTQHAFEGVFPYQLKTASDYIHANTTHPLIRNWLPTPPDRTQIDAALRRLPPNSDDTLPLPLFKNWAHHLYTDAVVSAAAKSLKVRVPVGIAGIVGVSALTRPPLRMVGTFIGAYSLAVALSILDGLST

SEQ ID NO: 224080 - protein, 119 aa, Glycine max
  Clone ID: PAT_MRT3847_44373C.1.pep
MALRGVWQLNKLIVSYCNWGGSSRGIRAFMESHLPAFKEKNPQLEVVTELIRGQHPHLKGYYKNKNQRVISVKNMDPEDILLHATRLRNALGRKVVKLRTRHVTKRPSVQGTWTTAVEY

SEQ ID NO: 224081 - protein, 48 aa, Glycine max
  unsure (1)..(48): unsure at all Xaa locations
  Clone ID: PAT_MRT3847_44374C.1.pep
XTXGEGKXSSNXHGCXKSGPGYXYPTXSQQXXPERXXXXXXLPTQXPE

SEQ ID NO: 224082 - protein, 118 aa, Glycine max
  unsure (1)..(118): unsure at all Xaa locations
  Clone ID: PAT_MRT3847_44375C.1.pep
QESQVASDLPEIYLRSQVFSRDVFIXLGPCLCYPCQTHNAACINXLVYVHGKLARILLGIXNPRHXFTFFHVMRESIKDGRFEKVRPTFYREQACPSGKGSCLCLRSNELRCIHLGFN

SEQ ID NO: 224083 - protein, 257 aa, Glycine max
  Clone ID: PAT_MRT3847_44376C.1.pep
MKVNKEKEKELSSSSNNNSLDDETAVTVALHLGLPSTTIASSESADLASSLYSDKEEEEEKVALMLRGILLSNRINRGQYWIPTSSQILIGPTQFPCPLCFKTFNRYNNMQMHMWGHGSQYRKGPESLRGTQPTAMLRLPCYCCAPGCKNNIDHPRAKPLKDFRTLQTHYKRKHGIKPFMCRKCCKAFAVRGDWRTHEKNCGKLWYCSCGSDFKHKRSLKDHIKAFGNGHKAYGIDSCLDQDDEAGSEIEQENNESF

SEQ ID NO: 224084 - protein, 85 aa, Glycine max
  Clone ID: PAT_MRT3847_44377C.1.pep
MRTLCDACESAGGIVFCAADEAALCRACDEKGHMCNKLASRHVRVGACRPSDVPRCDICENAPAFFYWETDGSSFWLQCDMIGHG

SEQ ID NO: 224085 - protein, 123 aa, Glycine max
  Clone ID: PAT_MRT3847_44378C.1.pep
MLAGLFVCVVWKEEDSMIIRSPEPEVKILVDRDPIKTSFEEWAKPGHFSRTIAKGPDTTTWIWNLHADAHDFDSHTNDLEEISRKVFSAHFSVLSIIFLWLSGMYFHGARFSNYEAWLSDPTH

SEQ ID NO: 224086 - protein, 113 aa, Glycine max
  Clone ID: PAT_MRT3847_44379C.1.pep
NSLYRDMVMFLTEQIANASDAIYNIRFLYAPDIVEWGERETTKLAYHIKLNRDKKIISTQDRRFSVTKEDSINNKGTTSKSRTCAFVEKMQTNAHLNLMRDGWKMRCTHGYLA

SEQ ID NO: 224087 - protein, 38 aa, Glycine max
  Clone ID: PAT_MRT3847_4437C.1.pep
IGLGGQSDIAQNLGLDLTDNGSTKAGYNPTACQVDETL

SEQ ID NO: 224088 - protein, 64 aa, Glycine max
  Clone ID: PAT_MRT3847_44380C.1.pep
GMGKLGYFHGGEILRAISSIECPGYLCIFFFSPMCREGSVLVLGWLLVPFGFYIGFANIICFVL

SEQ ID NO: 224089 - protein, 173 aa, Glycine max
  Clone ID: PAT_MRT3847_44381C.1.pep
MAEGSGRRLMVEVCNAKNLMPKDGQGTASAYAIVDFDGQRRRTKTKSRDLNPQWDETLEFIVHDKDSMPSETLEVNLYNDKRTGKRSTFLGKVKISGSTFVKSGSEAIVYYPLEKRSVFSQIKGELGLKVWYVEEDPPETENAGEEKAESAPSGTEEKLPKTREKKTETPHMR

SEQ ID NO: 224090 - protein, 44 aa, Glycine max
  unsure (1)..(44): unsure at all Xaa locations
  Clone ID: PAT_MRT3847_44382C.1.pep
WSNALNDLSFNKNIFCKKNKNNLTKHFVHKELRRFDFLIAIXNT

SEQ ID NO: 224091 - protein, 115 aa, Glycine max
  Clone ID: PAT_MRT3847_44383C.1.pep
MASSVTRATSGFSFSEIWLLVAATALICGFLGYIVYDAIMATASELLQRLLVISPLFLIIIVHWLSTASQISFPMPGSEPSAIHRAGGSPWGVAFVLLLLFLLISYQPSLHDLIS

SEQ ID NO: 224092 - protein, 113 aa, Glycine max
  Clone ID: PAT_MRT3847_44384C.1.pep
LFSVSAKRVHQLQDSLNRMISSMSSQVAELKAILSTSSRLSSTFRPIARVDIASSNSDTSSTDSDFTFPAPVSNTELLSSPESNSFQLVVQDVTAGDGSGSESGKEGSFDDFF

SEQ ID NO: 224093 - protein, 105 aa, Glycine max
  Clone ID: PAT_MRT3847_44385C.1.pep
MLRRIAAIFLIGFLALAYQAIHPPPPRTCGSSPEGPLITGPRIKLRDGRHIAYKEHGVPREEAKKKIVFLHGFGSSRHDAVIATHLPQVHIYLLLVRFIYDLFYN

SEQ ID NO: 224094 - protein, 327 aa, Glycine max
  Clone ID: PAT_MRT3847_44386C.1.pep
RKGNGSGNLHLSCHCHHRFPWRLFGHCTSALFLFAHASTLVAIAVALPLEIALASEIESPIGALAPNNSNTIPSIPLPNFTINLFIPLPFLHSCSRPLKYEDPFNNPFVKVGKSDSTVEMCGKVYRLAPITLTQEQQATHQKRRLRAYQWKRPTIFLREGDSVPPDVDPDTVRWIPANHPFATTATDLDEDLAQNNVYQKHGVPFRIQAEHEALQKKLEALQNDQKLDKLVIDPINAKEFERPFNSHARLNDQADKSSVNNQEQKLNKQVIDPINAKEFERPFNSHTRLNDQAEKSSAHNQASDSDSPRIDSGPNHFESTSSEDPTL

SEQ ID NO: 224095 - protein, 161 aa, Glycine max
  unsure (1)..(161): unsure at all Xaa locations
  Clone ID: PAT_MRT3847_44387C.1.pep
AGQILAEDFTGSAILKNVGIHGHHTNVKVMCADVTCPNLHISEGSADLILSKWILMYLSDIEDDTLSAMLIXRPKVGGYVLFRLSCVHQSGHSKRNFHPTDYREPIFHTEVFKECRMSDDTMNSLVLWLAGXQCIGAYVRHEKSHTQICWVWTNLRSQADR

SEQ ID NO: 224096 - protein, 102 aa, Glycine max
  Clone ID: PAT_MRT3847_44388C.1.pep
PPPFPMASVWTLHFRSLSLRPCLYISSNCSSAATRNRISIRNRISNWRSCAQQVKHDSINSITKFHHQLVHSVTIPPFLLNQNGGSNFPIWVCVSVVVLVVA

SEQ ID NO: 224097 - protein, 54 aa, Glycine max
  Clone ID: PAT_MRT3847_44389C.1.pep
NGPPLLFFYYLINLLILLFFIFFFLFYFIFFFFFFFFFFFLIMSQLNDNQLLHP

SEQ ID NO: 224098 - protein, 65 aa, Glycine max
  Clone ID: PAT_MRT3847_4438C.1.pep
EIKLLIYFRILDCQFFLRKSKLSLNLIDGYLNSIHLYLLLLLFSIFMGLELASHFSPLRILKFII

SEQ ID NO: 224099 - protein, 176 aa, Glycine max
  Clone ID: PAT_MRT3847_44390C.1.pep
LNQNGGSNFPIWVCVAVVVLVVAVRMRVVVSRKKERPGSVADLVRRGQLRSDRRGISRPLKYEDPFNNPFVKVGKSDSTVEMCGKVYRLAPITLTQEQQATHQKRRLRAYQWKRPTIFLREGDSVPPDVDPDTVRWIPANHPFATTATDLDEDLAQNNVYQKHGVPFRIQAEHEAL

SEQ ID NO: 224100 - protein, 68 aa, Glycine max
  Clone ID: PAT_MRT3847_44391C.1.pep
KVNISTQVCKCMWSNFSYPQGIMSPRSRRVECSSTDHRGKESFVKNASMVWFSSSKVSIFRWICLLSI

SEQ ID NO: 224101 - protein, 94 aa, Glycine max
  Clone ID: PAT_MRT3847_44392C.1.pep
LLPWVLLWWRCSTKFSGLCRCRTWFPPGCWGAVGCSLACAFGYPNQHAHTSAAVSNNRNPGRYFAHFCELSGPPPLLIECDRTLDSSIEIARPC

SEQ ID NO: 224102 - protein, 54 aa, Glycine max
  Clone ID: PAT_MRT3847_44393C.1.pep
ICGRKIRKGGMCALIPHQFKYEGGSFAFASFYVFMLHTNISIKLLKTLNPFFFF

SEQ ID NO: 224103 - protein, 60 aa, Glycine max
  Clone ID: PAT_MRT3847_44394C.1.pep
MIHFANTVTGDNNNVEEKGCDAMHKCEDMIHDMGWISPNQTKLNFSSKNLKNIVASLYTA

SEQ ID NO: 224104 - protein, 396 aa, Glycine max
  Clone ID: PAT_MRT3847_44395C.1.pep
TTVCSPFYLSLCKVVYSFKNCWVSLKYTLGCYLTDSLMVIFFLAGIVFVIFLRTVRRDLTRYEELDKEAQAQMNEELSGWKLVVGDVFREPDGSKLLCVMVGDGVQILGMAAVTIVFAALGFMSPASRGMLLTGMIILYLILGIAAGYVSVRLWRTIKGTSEGWRSISWLAACFFPGIAFIILTVLNFILWGSKSTGAIPISLYFELFFLWFCISVPLTLIGGFMGTKAQPIEYPVRTNQIPREIPARKYPSWLLVLGAGTLPFGTLFIELFFILSSIWLGRFYYVFGFLLVVLLLLIIVCAEVSVVLTYMHLCVEDWRWWWKAFFASGSVALYVFLYSINYLVFDLQSLSGPVSATLYLGYSLLMAIAIMLSTGTIGFLMSFYFVHYLFSSVKID

SEQ ID NO: 224105 - protein, 130 aa, Glycine max
  unsure (1)..(130): unsure at all Xaa locations
  Clone ID: PAT_MRT3847_44396C.1.pep
FIELFFIXFPSIWLGRFYYVFGFLLVVLLLLVIVCAEVSVVLTYMHLCVEDWQWWWKSFFASGSVALYVFLYSINYLVFDLQSLSGPVSAILYLGYSLLMAIAIMLSTGTVGFLMSFYFVHYLFSSVKID

SEQ ID NO: 224106 - protein, 123 aa, Glycine max
  Clone ID: PAT_MRT3847_44397C.1.pep
YPFRIWLGRFYYVFGFLLVVLLLLIVVCAEVSVVLTYMHLCVEDWRWWWKAFFASGSVALYVFLYSINYLVFDLRSLSGPVSATLYLGYSLLMAIAIMLSTGTIGFLMSFYFVHYLFSSVKID

SEQ ID NO: 224107 - protein, 60 aa, Glycine max
  Clone ID: PAT_MRT3847_44398C.1.pep
YSGLFFSLSFIFLFFVFCALPCLFSAFFLFFFFCQFFVCRLDLFYLSFQALASHSLSIKW

SEQ ID NO: 224108 - protein, 218 aa, Glycine max
  unsure (1)..(218): unsure at all Xaa locations
  Clone ID: PAT_MRT3847_44399C.1.pep
TRPCFFATLPXELRPLYVSTGSAVPSPRSSTSAMDFAAAMNMLPGSPSSMSVMSPSRFTPPMSPSANGMSHPSVAWPQPNVPALHLPGSNIYSSRLRSSFNARDIPVDDFDLLPDYDVQQQLLNEFSCLSKQPMNSNAMNRSGRIKTLTPSNLDDLFSSESSSPRFADPALASAXFSPTHKSAFLNQFQQQQSLLSPVNTNFSSKNVEIPYCMVPLLG

SEQ ID NO: 224109 - protein, 93 aa, Glycine max
  Clone ID: PAT_MRT3847_4439C.1.pep
NFISFFVLLPTKIWGKQTGLFLPFLIFFDPRKKIKTFLPSLLIKGKPPKKTLKPRRRKLDQRGGKSTKGQVGIKGKFGANFYHIQIRVRLYFS

SEQ ID NO: 224110 - protein, 115 aa, Glycine max
  Clone ID: PAT_MRT3847_443C.1.pep
MASRKSFLSNPNRYIFPTTSDTHLSQTQEGMFELDEAELWNNHNHSSTTTDQGKKGLPSSGSRSVLKRASRNHNNNNGGRDRITTPASLPVNIPDWSKILKEDYKEHPKYWESEG

SEQ ID NO: 224111 - protein, 57 aa, Glycine max
  Clone ID: PAT_MRT3847_44400C.1.pep
HIPIQAQKIPNRGHINATHPNLLKHANLCHSSKKSNIFFSFKQKHPDSKSKLIPPYT

SEQ ID NO: 224112 - protein, 61 aa, Glycine max
  Clone ID: PAT_MRT3847_44401C.1.pep
IYMGMAPLGKKLPRSYPCLTAIKSHHLLQFQEFRSEILALLSGTCLFHLYYKFPKEKFLYK

SEQ ID NO: 224113 - protein, 236 aa, Glycine max
  Clone ID: PAT_MRT3847_44402C.1.pep
MIKRRFFKLDHGDREASDPSSSSSDSELEAVAETSEEESEEDAIAEVKPNDDEAGSNSSGYASEDSSANDVDVNSAGLLFSEDDAGAINERQMLINRELLSKGDTEKSNVLAEKKSLPTDLPSHVLKCKSVFKCRLCPRIICLSEETLRDHLQSKRHARSEKLLSEGRLKAILNSDGEIENQEISEIQTKDTEDNAEKNHKRKNQHKKRLRKKKRDKANARKMLSTKGAAKRGRNK

SEQ ID NO: 224114 - protein, 135 aa, Glycine max
  Clone ID: PAT_MRT3847_44403C.1.pep
TQRGSQLNEVMVFPDQTPTLKMKLDTKRRKLNTQREMFNFNYIVLLAFNCFGEMKCFLSISFFFCCLLLLLDSSSFQHLLRQRPSSPTTTISCPLRLVPFEAAADKGPWLSSSWSTLYYLRKIRWFHKWGLCGAR

SEQ ID NO: 224115 - protein, 101 aa, Glycine max
  Clone ID: PAT_MRT3847_44404C.1.pep
RRQQTTKCSKGSFRSASQEKYDRNPSLDDELAKSQIPNNMESARSYSRVCPSHVLHLQPREAFDVTNVPNIVPPYEQSEYAGNWRTHLTMHDIAGHDARGL

SEQ ID NO: 224116 - protein, 95 aa, Glycine max
  unsure (1)..(95): unsure at all Xaa locations
  Clone ID: PAT_MRT3847_44405C.1.pep
MPPKKAAAPEKKALLGRPSNNLYVGIVGMPNVGKSSLFNTLTRCDLGKVANFPYATIEPEETRVPVPDSRFDWFCDLXQPASKVPAVLTCVDIAV

SEQ ID NO: 224117 - protein, 141 aa, Glycine max
  unsure (1)..(141): unsure at all Xaa locations
  Clone ID: PAT_MRT3847_44406C.1.pep
LEEQLRTSTFQRLKSHTLHLLDLLQNPHIQYQKHCSLTVIPQLLRFLQSSSPSTLQPFFDYTLFPLLLLLDAAIQCRSTQKVDSQENYNMPGVLKTPVNVSDGVAESVVNWLEELLXKCRLNSVDQMXVVLLKKLTYGAMY

SEQ ID NO: 224118 - protein, 121 aa, Glycine max
  Clone ID: PAT_MRT3847_44407C.1.pep
YNTIKFSHTNIYSCLSYIVFLYLVIYQIINHLHDYYDSTGGKNGVALSYEVKAALTKAGLPLATPPRGDNSKAGDAKTPGTTVANVAQQAYFADVAAKVVLPMFKARNKPFVLVFWSRDPD

SEQ ID NO: 224119 - protein, 456 aa, Glycine max
  Clone ID: PAT_MRT3847_44408C.1.pep
GVGINTEWGLLMASISEDTGEETPLQVRLNGVATFIGIVGLTVAVIVLIVLLARYFSGHTKNPDGSVQFIAGKTKVGDAIDGAIKIITVAVTIVVVAVPEGLPLAVTLTLAYSMRKMMADKALVRRLSACETMGSATTICSDKTGTLTMNQMTVVEAYAGGKKIDPPHKLESYPMLRSLLIEGVAQNTNGSVYAPEGANDVEVSGSPTEKAILQWGIQIGMNFMAARSESSIIHVFPFNSEKKRGGVAIQTADSNIHIHWKGAAEIVLACCTGYVDVNDQLVGMDEEKMTFFKKAIEDMAADSLRCVAIAYRSYEKEKVPTNEELLSQWSLPEDDLILLAIVGLKDPCRPGVKHAVELCQKAGVKVKMVTGDNVKTAKAIAVECGILNSYADATEPNIIEGKTFRGLSDAQRDEIADRISVMGRSSPNDKLLLVQALKRKGHVVAVTGDGTNDAPA

SEQ ID NO: 224120 - protein, 344 aa, Glycine max
  unsure (1)..(344): unsure at all Xaa locations
  Clone ID: PAT_MRT3847_44409C.1.pep
MNSVTCSENIFVRGLSDAQRDEIAERISXVMGXRSSPNDKLLLVQALRRKGHVVAVTGDGTNDAPALHEADIGLAMGIQGTEVAKESSDIIILDDNFASVVKVVRWGRSVYANIQKFIQFQLTVNVAALVINVVAAVSSGDVPLNAVQLLWVNLIMDTLGALALATEPPTDHLMDRTPVGRREPLITNIMWRNLLIQAMYQVSVLLVLNFRGISILGLSHDRKDHAIKVKNTLIFNAFVLCQIFNEFNARKPDEFNIFKGVTRNYLFMGIIGLTVVLQIVIILFLGKFTTTVRLNWKQWLISVVIGLIGWPLAVIGKLIPVPTTPINNVFSKFRISRKDHEESQ

SEQ ID NO: 224121 - protein, 39 aa, Glycine max
  Clone ID: PAT_MRT3847_4440C.1.pep
NTTSYNFLSRHYMTDHSLQPTDFLDYLTAPDLIDGPTLQ

SEQ ID NO: 224122 - protein, 437 aa, Glycine max
  Clone ID: PAT_MRT3847_44410C.1.pep
MNQLVESSMNTQRVSRVQAPLVDSVSCYCKVDSGLKTVVGARKFVPGSKLCIQPDINPNAHRSKNSRRERTRVQPPLLPGLPDDLAIACLIRVPRVEHGKLRLVCKRWYHLLSGNFFYSLRRSLGMAEEWVYVIKRDRDGRISLHAFDPIYQLWQSLPPVPGEYSEALGFGCAVLSGCHLYLFGGRDPLKGSMRRVIFYNARTNKWHRAPDMLRKRHLFGSCVINNCLYVAGGECEGIQRTLRSAEVYDPNRNRWSFISEMTTAMVPFIGVVHNGTWFLKGLGSNRNVICESYSQETDTWTPVSNGMVNGWRNPSISLNGQLYALDCQDGCKLKVYDRASDSWKKFIDSKLHLGRSRALDAAALVPLNGKLCIIRNNMSISLVDVSSPNRRVESNPQLWENIAGKGHVRSLVRNLWSTIAGRGSLKSHIVHCQVLQA

SEQ ID NO: 224123 - protein, 467 aa, Glycine max
  Clone ID: PAT_MRT3847_44411C.1.pep
MNQLVESSTTTQKVSRVQAPLVDSVSCYCKVDSGLKTVVGAMENFTGSKLCIQPDINPNAHRSKNSRRERTRVQPPLLPGLPDDLAIACLIRVPRVEHGKLRLVCKRWYHLLSGNFFYSLRRSLGMAEEWVYVIKRDRDGRISLHAFDPIYQLWQSLPPVPGEYSEALGFGCAVLSGCHLYLFGGRDPLKGSMRRVIFYNARTNKWHRAPDMLRKRHLFGSCVINNCLYVAGGECEGIQRTLRSAEVYDPNRNRWSFISEMTTAMVPFIGVVHNGTWFLKGLGSNRNVICESYSQETDTWTPVSNGMVNGWRNPSISLNGQLYALDCQDGCKLKVYDRASDSWKKFIDSKLHLGRSRALDAAALVPLNGKLCIIRNNMSISLVDVSSPNRRVESNPQLWENIAGKGHVRFFKPEIQTPLMIILVIQLGKLLVFWENQIETGLSTFLCGKEIVLHCKEEVNCMILAIE

SEQ ID NO: 224124 - protein, 75 aa, Glycine max
  Clone ID: PAT_MRT3847_44412C.1.pep
RKKFQWGYFYKGMPPKIIKVNPRNQNLNALNNLYGGEPAVQRAKRKNSTIMLTKRGRCLAQHPRPGEPLGGALLT

SEQ ID NO: 224125 - protein, 79 aa, Glycine max
  Clone ID: PAT_MRT3847_44413C.1.pep
DRLTWCTTICPLISSPMGGALDPNEHVPRTLCLARIYASPSRIYDFAYHGTRLKLWWVLIAVFYAPLLLSLDTEYSCPP

SEQ ID NO: 224126 - protein, 79 aa, Glycine max
  Clone ID: PAT_MRT3847_44414C.1.pep
NHLTLHALIVLVYALIPEFNIVCELNSTRVVILHDLWRASGSSHDRPECIIGSCELCNVVRPPYPVCQGYIFERKLEGQ

SEQ ID NO: 224127 - protein, 75 aa, Glycine max
  Clone ID: PAT_MRT3847_44415C.1.pep
SRSSAGPPFFFFFFFFFFFFFFFFFFFFFFFFKKKAPSFFLLFPKGGTNLKFKIPCYLLKPHLLNKFSQTPNPGF

SEQ ID NO: 224128 - protein, 108 aa, Glycine max
  unsure (1)..(108): unsure at all Xaa locations
  Clone ID: PAT_MRT3847_44416C.1.pep
XMAIDRGYISPQFVTNPEKLIAELENARVLITDQKISAIKDIIPILEKTTQLRAPLLIIAEDVTGEALATLVVNKLRXILNVAAIKAPSFGERRKAMLQDIAILTGAE

SEQ ID NO: 224129 - protein, 90 aa, Glycine max
  Clone ID: PAT_MRT3847_44417C.1.pep
PLESRPPTGYLGVSRTRSGAEHGAIGDNFSGSNVNSGGVRDQVKNLQMLEAAHFTIRLPKDSECHRTYTPKHPSITPPSYPQVQAATVKN

SEQ ID NO: 224130 - protein, 162 aa, Glycine max
  unsure (1)..(162): unsure at all Xaa locations
  Clone ID: PAT_MRT3847_44418C.1.pep
CLCLKNCLLPQAEENKVVILHTKSFEPMVNLRQLQINNRRLEGKFLPAELKWLQWQGCPLKHMPLKSWPRELAVLDLKNSKKIETLWGWNDYKVPRNLMVLNLSYCIELTAIPDLSGCRRLEKIDLXDCINLTNIHDSIGSLSTLRSLKLTRCSSLINLPID

SEQ ID NO: 224131 - protein, 132 aa, Glycine max
  unsure (1)..(132): unsure at all Xaa locations
  Clone ID: PAT_MRT3847_44419C.1.pep
QDDLKKAYKKADIXNHPDKGGDPXEKFKQLAQAYEALTDPDKPEIYHQYGEYALKEGMGGGGGHDPLESFHLSTEVXRPFGSSGTSLGTMQMLVEDADHTIXVSLEDLYQASCXELSLSXNVICSKCTGKGS

SEQ ID NO: 224132 - protein, 33 aa, Glycine max
  Clone ID: PAT_MRT3847_4441C.1.pep
QIDGVDSNNACDIGIAAQFNCVMWVSNDSWEWM

SEQ ID NO: 224133 - protein, 85 aa, Glycine max
  Clone ID: PAT_MRT3847_44420C.1.pep
ESRTLSMMTNRVFCFGLYIWLQQLLVKRLLINMTMIRCSRLGAALPWQGEEQGRLGALYCGTNQLNSISHFDPTTIPQIDSNFLH

SEQ ID NO: 224134 - protein, 286 aa, Glycine max
  unsure (1)..(286): unsure at all Xaa locations
  Clone ID: PAT_MRT3847_44421C.1.pep
MRRQGHYGDPSANTWCWWWPDASYGWSKXEAKSGNFEGRLEAFTPERENPYGNSKPEGQWRWEMDESKMSNSMASRMFNEXGQGVDASKPYFQGQSRNNSDSRSQAHEEDMDVRYEGEHLSQXFEGLEQNFHDDIIKLTKEQNDAEDAEYARHREKINAINAQYEEKLAALRAQHSSRRAEFLQRESHARQQQYQQIIRDPYPGGGMAPRDPHAPRDPHAPRDPHGYNNVNDSGAGGEVQRGYSADHFDPYRERARFLGGGRDQGFEPRGPYPGGRVYDTGSRYYN

SEQ ID NO: 224135 - protein, 105 aa, Glycine max
  Clone ID: PAT_MRT3847_44422C.1.pep
GRSPVQPLEQGGDLVTCVRRAIQASVPTSELFDKRLNLSAPKTVEEMSLILKIALFCTSTSPLNRPTMREVIAMLIDAREYVSNSPTSPTSESPLDEDDGISSKG

SEQ ID NO: 224136 - protein, 49 aa, Glycine max
  Clone ID: PAT_MRT3847_44423C.1.pep
SIQLYLVAGMNQARQDAYVAYRGCVLQGQCRHCRDAATLLTWLALSRME

SEQ ID NO: 224137 - protein, 59 aa, Glycine max
  Clone ID: PAT_MRT3847_44424C.1.pep
GSQLFRILLLAYLNHIINHPFIIHHDISDKNHAEEFVQRCKSWNLGRSAGVANTKAHNR

SEQ ID NO: 224138 - protein, 274 aa, Glycine max
  unsure (1)..(274): unsure at all Xaa locations
  Clone ID: PAT_MRT3847_44425C.1.pep
MRRQGHYGDPSANTCVGGSQMHHMAGQRGEAKSGNFEGRLEAFTPQRENPYANSKQXGQGQWRWEIDEAKMSNSMASRMFNEGQGVDASKSYFQGPSRNNSDSRSQAHGEDMDVGYEGNHLSQSFEGLEQNFHDDIIKLTKEQNDAEDAEYARHREKINAINAQYEEKLAALRAQHSSRRAEFLQRESHARQQQYQQIIRDPYPSGGMAPGDPHGYNNVNASGTGEVQRGYSADHLDPYRERARFLGGGRDQGFEPRGPYPGGRVYDTGSRYYN

SEQ ID NO: 224139 - protein, 85 aa, Glycine max
  Clone ID: PAT_MRT3847_44426C.1.pep
IIIMPVCHFLLKFEVTSNLLDPRLERLTQGKLVRKSHIVCLNSWDEAYISVGQLHLMPICFNCLSSWDVAYISVGQLHLVPLILS

SEQ ID NO: 224140 - protein, 39 aa, Glycine max
  Clone ID: PAT_MRT3847_44427C.1.pep
SWHKNSINLCVNYVNFQVYNTLYGHNLHTNLCYFHGTKI

SEQ ID NO: 224141 - protein, 119 aa, Glycine max
  Clone ID: PAT_MRT3847_44428C.1.pep
TWRYVTNSLATAIAHCVPLPLRAFAVSRHHYPFTRLHLMSRQWAMSGPVRAPAPTQVAVPYSCSCLVCSSSIGAFAVSRHHCPFTRLHLMSRQWAMSGPVVPLFLNPGVLCYSPLRSSL

SEQ ID NO: 224142 - protein, 135 aa, Glycine max
  unsure (1)..(135): unsure at all Xaa locations
  Clone ID: PAT_MRT3847_44429C.1.pep
LENNLITNKVLQAAPSMNYAAAVATVNLAMTGMGAPXTGLKHMGGFRTRMTTMDLAXIASIRGRLQSMQVWPPVAKNXLETLYYLPDLDDAXQLAKEGTLSQYEGRGSLIGIRARSTESLFREHNTSRGYYHGLY

SEQ ID NO: 224143 - protein, 90 aa, Glycine max
  unsure (1)..(90): unsure at all Xaa locations
  Clone ID: PAT_MRT3847_4442C.1.pep
KKRRTGKSKLGRKKIKKKVNGKNKIESKMKKKKXKRTVKRKDGKEKEGKKKKMNREKKNGQREKHRKNKQKVKLEDLREEKRLERKGGQG

SEQ ID NO: 224144 - protein, 62 aa, Glycine max
  Clone ID: PAT_MRT3847_44430C.1.pep
QTSGLDWLHARNFLNHGYVVFDYLVRNAVSRFANWLLTALVRELIPASSCLVLALYDPLKSG

SEQ ID NO: 224145 - protein, 60 aa, Glycine max
  Clone ID: PAT_MRT3847_44431C.1.pep
SLVSSEEHTRHQICYYRKATASIICPGTCRERRGGRCSTSIIMLSYSGIFKAFSHSGKGV

SEQ ID NO: 224146 - protein, 148 aa, Glycine max
  Clone ID: PAT_MRT3847_44432C.1.pep
TSLSVTFNLPIPAKNPNKKIGIAYRGGSPIRAWDMDPKLCEGCLPKFYQGPRNPTIFSIPLPGKTQDAPGLQKTLQNQLQKTGNVPLNLRGNHPVRTKLGKFKLFKIKFRVRGRIVVETLSANSFIKIQSSSCKFRFRLGFFIFPPDH

SEQ ID NO: 224147 - protein, 105 aa, Glycine max
  unsure (1)..(105): unsure at all Xaa locations
  Clone ID: PAT_MRT3847_44433C.1.pep
IEVDDDHIYQNIEAPKFVDLXTAPDCRRPDHDRHCICFRVGCDQKHEQELDSEANYKNSGLQVMAARSPNVRLRKALNTKEASANLKCPLTATAKSRVSRMDLIS

SEQ ID NO: 224148 - protein, 85 aa, Glycine max
  Clone ID: PAT_MRT3847_44434C.1.pep
MNMRWMLHVQGGQCGNQSSSKPRRVSCDEHGIDPTAHHVEYSDPQLQGVNVHYNEPSYRLIVPHAVLIDPKPGTMDRLRSGPYTT

SEQ ID NO: 224149 - protein, 146 aa, Glycine max
  unsure (1)..(146): unsure at all Xaa locations
  Clone ID: PAT_MRT3847_44435C.1.pep
FAIGTPFTCLVGGTSHDDHTVLPRXLHDDDXLSFTATGTSLKYKIGIXILDATSDSASXAVRIPTGGAYIGSFYFKVTDXAGARVIALMCNESTXDLSKNVDVXNEVLFTGGRAVXGAYRDALGNVCNKGLRRXDAGDRLPRIGFK

SEQ ID NO: 224150 - protein, 53 aa, Glycine max
  Clone ID: PAT_MRT3847_44436C.1.pep
WPKLPPVGHCYPLALITQHTIRAHNVASLGGLMRELTNTKSGALTVRAADRNP

SEQ ID NO: 224151 - protein, 108 aa, Glycine max
  unsure (1)..(108): unsure at all Xaa locations
  Clone ID: PAT_MRT3847_44437C.1.pep
HACACLRNSQLGKMKWMPNNRNVSAESPRGSVLRPVFLSLPTTLTYQPVRTGAKCIDVWNNSFEEEPXWRGVEQGRGIRAKMFEKLSKENSLDSLSLDFRSSVTIGTS

SEQ ID NO: 224152 - protein, 82 aa, Glycine max
  Clone ID: PAT_MRT3847_44438C.1.pep
GLCWSLRMMAYASLRLALPALTLRLHLFNWSFPFLPPSPFLTIPPCNVQTSSILLLSCNYVPTTSAAVSLPIYAQPLYAFLR

SEQ ID NO: 224153 - protein, 75 aa, Glycine max
  Clone ID: PAT_MRT3847_44439C.1.pep
EKRPKKKHEETAASNPPRPALQVVCPMTTLSKKSPRKHVENKTTIQVLRDLNETEDEAPLVPRKGKGHTQPTLVV

SEQ ID NO: 224154 - protein, 106 aa, Glycine max
  Clone ID: PAT_MRT3847_4443C.1.pep
LEQLLLSLLLYGGPTIYLEQDRLFLLQAKLQLSDHQNALFDWNHRDATRCNWTAVTCDAATGGEATIDFSNLQLFGPDRDTTLCRLPSLACLNFFYNNLNATLPAD

SEQ ID NO: 224155 - protein, 73 aa, Glycine max
  unsure (1)..(73): unsure at all Xaa locations
  Clone ID: PAT_MRT3847_44440C.1.pep
GAGLPRLGLHLKNFPCXAEPATYAPLLHRDIPGTLLLLELLCVKLDLFTTLKTVGSLGTILLLVGQRFLIHNA

SEQ ID NO: 224156 - protein, 64 aa, Glycine max
  unsure (1)..(64): unsure at all Xaa locations
  Clone ID: PAT_MRT3847_44441C.1.pep
VWXXXXXFXXKXXPGFXKFPILGKXXTWXVXKXVFXLXNKPCXNXGVXTNYERALISRATMLTT

SEQ ID NO: 224157 - protein, 26 aa, Glycine max
  Clone ID: PAT_MRT3847_44442C.1.pep
KNIGPLCISIMSKTHSPSQFSWIRHN

SEQ ID NO: 224158 - protein, 462 aa, Glycine max
  Clone ID: PAT_MRT3847_44443C.1.pep
MDQMSQQRHGYFHSESIHFRGSNISPPNVCTLVTASGHGTNLDSHYLLDAYDNGMMYGMTQYNGVQHQHNLDMGVPAAANIYYSSMNPSSGTAASLNAEVRRGNYQYFNASASSTVAPPNARHTENGIPSLPHCTSWSRSGESMMVRDPNRITQGNYLSQHFQPAAPPPWLDQQLNSNNNDGHALPWHQSLPMPYVQAPSANGSSLEKCKNGGHRFPHPPLVNPHYHSFHHQTQPVQEMRGHSINFHPPPPVTAPSYRVPTNASRSSSIFIQDAIEMGARHVGAAPLAGSHIYRPHRGSTHETTLRHRNLPPVTFLQVDQVSLERFQPSFFLQVDDVTLLVDHHNDMRLDIEDMSYEELLALGERIGKVNTGLSEEMITSQMKTKSYLLLATNAINLEEAASEEQETDSCIICQDEYKNQEKIGILQCGHEYHADCLKKWLLVKNVCPVCKSEALTPGEKCV

SEQ ID NO: 224159 - protein, 60 aa, Glycine max
  Clone ID: PAT_MRT3847_44444C.1.pep
NFDYLKNYQLRAGLHGKKTIVPLTLQPHKFMLLVRNVKQQRPLFIVRYIMLSIPTLYFAE

SEQ ID NO: 224160 - protein, 41 aa, Glycine max
  Clone ID: PAT_MRT3847_44445C.1.pep
LQNYKMSSRMQILLDKQSLFYRDAFNRQTLHIRTLLREGLP

SEQ ID NO: 224161 - protein, 129 aa, Glycine max
  Clone ID: PAT_MRT3847_44446C.1.pep
SWNTHIKIMLMLNSIVLCHSIHHTIVISIIFSSVPRCHECAYIRRRDAAASFRNENSHAFADSFDPYHRDLLMQFNPNVPTRVNKIVTRKVIKSLNPCKENLVIIKVTRFFPNLKSTNPPPIHPTQESA

SEQ ID NO: 224162 - protein, 86 aa, Glycine max
  Clone ID: PAT_MRT3847_44447C.1.pep
NYKIYPKHPTSTKSTTSPKNSDPDPKSRKILNTHNSSKKNRKRKKPTIKIKRTTTKTQTLSQKTKNQTCWNGIESKKRVEPYQRHS

SEQ ID NO: 224163 - protein, 61 aa, Glycine max
  Clone ID: PAT_MRT3847_44448C.1.pep
VGIVKLVSLEKIWYNNENKALCWEFTDNKSQGFMRNQGGYGIMQVGEGPVQNRKQFKGKCL

SEQ ID NO: 224164 - protein, 358 aa, Glycine max
  Clone ID: PAT_MRT3847_44449C.1.pep
MNSQYLITLSFVLLTLVLPLSSATNSFESYDTKKFPALYVFGDSLIDCGNNNHLPSGGADYLPYGIDFMGGNKPTGRATNGKTVADFLAMHLGLPFVRPYLDLTNHQRNKISTGINYASGGSGILPDTNNVTSLTLDKQIKFFHSTVKHNLHKVFKEKEEIEMHLSESLFFDSTVVNDYFHNGTFRGNKNLALFLLNEFTLRIQRIYNLGARKFLVNNIPPAGCFPSKAIRARPRGKCDEKINKAISFYNRRLPEVLHELQSKLPGFSFVHADLFGFLKGVRETGKSYGIVETWKPCCPNTIYGDLKCHPNTVPCPNRDTHLFWDEHPTQIVNQIYAWLCFNEGTICKSWGLKLIYHA

SEQ ID NO: 224165 - protein, 51 aa, Glycine max
  Clone ID: PAT_MRT3847_4444C.1.pep
CIDCSIRLIIKCDQGRCTRGSRFSSRGPPSVRSHKILCAASKKKCSPTFFA

SEQ ID NO: 224166 - protein, 76 aa, Glycine max
  Clone ID: PAT_MRT3847_44450C.1.pep
TFSYTGIQQVYSYMLLLIKRDQIPSKKIYLRRPHPTFSVHTQQYPAFSSQIQPFLVNSTNIAEVILPKMHDESSSL

SEQ ID NO: 224167 - protein, 100 aa, Glycine max
  Clone ID: PAT_MRT3847_44451C.1.pep
LDFDPFHFQQNRFNFLFFFPSVSTRMYYDSLLIFSYLTFPMNLSFLFSFSKPKRNERKRKRTEQNLYFAAFIFGVFAFDEIRGPAEPSSRGDARPRGGAP

SEQ ID NO: 224168 - protein, 106 aa, Glycine max
  Clone ID: PAT_MRT3847_44452C.1.pep
PPPPVGNPTFKMKSGVAFVFPGLFPIQFFRGPLKGGSPPLLEIPEFFVFAPPVFPPLVFFPLCFLVGFFRGFSPLLFFFFNPSPPVVVSVHSCFFPPLLPPPPFFF

SEQ ID NO: 224169 - protein, 171 aa, Glycine max
  Clone ID: PAT_MRT3847_44453C.1.pep
YLKRLWVMNSPGWMIAYKSQMKRNRMVIKLVGNSRSEEVENGDMCLTVYFLSVEVPVWVLFFALGVSSDKEIVDLIGCGNDDVRIQNILFASVRDADEKCGAFRRVRNAVQYLEKCVKSVQFPPSESMQECLEMYVFPGISGLNRKARFLAYMVKGLLLAYTCRRKCDNRD

SEQ ID NO: 224170 - protein, 181 aa, Glycine max
  Clone ID: PAT_MRT3847_44454C.1.pep
MHYQAPESLLALPNSQLLGSVSEDLGLIQYLRHIDLSNNFLNGSLPNTIFNSSQLQVLSLSNNVISGKLPELIGKMTNLKLLNLSDNAFSGLIPENLSTLPNLTVVSLKSNYFSGSVPTGFNYVEILDLSSNLLNGSLPNEFGGESLRYLNLSYNKISGTIPPAFAKQIPVNTTMDLSFNN

SEQ ID NO: 224171 - protein, 88 aa, Glycine max
  Clone ID: PAT_MRT3847_44455C.1.pep
IYQARETCPIMRCSHAGKFFSLYSYLSFLVVINLLIVLNCSQTPLIFHTLSNRRQWLDIWRNLDSFCVSFWLELLMQIPTQHVVYKYS

SEQ ID NO: 224172 - protein, 51 aa, Glycine max
  Clone ID: PAT_MRT3847_44456C.1.pep
VKHSQPTGPPLECDQGDPPRSWSLLWYMQPLKSPRSYNMASDAVCMSNKGL

SEQ ID NO: 224173 - protein, 128 aa, Glycine max
  Clone ID: PAT_MRT3847_44457C.1.pep
MGGSGRWLKSLISLRKPSTIDQEKGGDKSKRKWKLWKSTSEGFGIGSSMQKGHGGGGSFVVDDGAFAAALAAVVRTPLKDFMVIKQEWAAIRIQAVFRGFLARRALRALKAVVRLQAIFRGLQVRKQA

SEQ ID NO: 224174 - protein, 52 aa, Glycine max
  Clone ID: PAT_MRT3847_44458C.1.pep
MVEDQDLVTGDEFFFDFLRYKEIENGMLWEVEGKSAEFGSPSGTATAAHHFL

SEQ ID NO: 224175 - protein, 157 aa, Glycine max
  unsure (1)..(157): unsure at all Xaa locations
  Clone ID: PAT_MRT3847_44459C.1.pep
VGVLSSGGRRSMLKLAHKMTHNMCNSVCACTGHKWNKLNARHVAEDVRVITRKSADNTVDHPGIALSTVTXAWIPVWFHRLFDLLRDXLLQNQWDILCNSGPMREMVHIADGHDHAHCDSLRRASAINANQNTMLILQETFTDTCSXPVVYAPVDIP

SEQ ID NO: 224176 - protein, 92 aa, Glycine max
  Clone ID: PAT_MRT3847_4445C.1.pep
RGCTSHNFHGGSPFSRWSVDRDPGQCDAEAIPVRTFPAVSSPLTVRVMRHCLSMPMNSIQRPRWPLQHTMGFHFVVIIRSGMRSSFCPFSRL

SEQ ID NO: 224177 - protein, 65 aa, Glycine max
  Clone ID: PAT_MRT3847_44460C.1.pep
HQPNHETTQQQPPPPSSFSKSSCSKHKEPQNKNQKRVLVVCIVTLCTTQLNYGLRWKGSSKVSFV

SEQ ID NO: 224178 - protein, 62 aa, Glycine max
  Clone ID: PAT_MRT3847_44461C.1.pep
VLESVEVVKSVGLSVVLHDLSAPSELFHQERVVLHYDRPYKPSWDGSHTYSIHRVRTACARL

SEQ ID NO: 224179 - protein, 73 aa, Glycine max
  Clone ID: PAT_MRT3847_44462C.1.pep
NHSSQGLCTLHLNLSLNDKTRTWLRLSNSHRFSRSASSSEACFLQPLARAHPDYTPVTPKSLLLSSKLTKYSS

SEQ ID NO: 224180 - protein, 104 aa, Glycine max
  Clone ID: PAT_MRT3847_44463C.1.pep
KEETWPIITFYVLSKSLFLFLPFFLAVPFPLSFGLNISFFQWRVVFSFLVSFFPVSFFFFINSFLNYISSSLVIIFPIFHLRIFIPVLLLCFLFGFQPVIFFLI

SEQ ID NO: 224181 - protein, 139 aa, Glycine max
  unsure (1)..(139): unsure at all Xaa locations
  Clone ID: PAT_MRT3847_44464C.1.pep
LEFQTLKSTQAMGEATKGITKAMGQMNRWXRMNLPSVQRMMQEFERQNDKMXLVSEVMGDAIDDALEGGEEEEETEELVNQFLDEIGIDINSELVNAPATTSVSAPAAKNRVAQAESTANEDSGIYDDLQARLNNLRKM

SEQ ID NO: 224182 - protein, 55 aa, Glycine max
  Clone ID: PAT_MRT3847_44465C.1.pep
KKKKLKKKKKKKKKEKKKKKKKKKKKKKKKKKKKKKKKKKKKGGGPPLGTSSPRK

SEQ ID NO: 224183 - protein, 50 aa, Glycine max
  Clone ID: PAT_MRT3847_44466C.1.pep
MLMNLIPTFKGTLKNEKENKGKDDNIEFMRQVLPAKDKTSCFQRASYLEN

SEQ ID NO: 224184 - protein, 98 aa, Glycine max
  Clone ID: PAT_MRT3847_44467C.1.pep
RSAESMDIDELHLIFNGREREFHSQLEENAKIFLPYINNFDFVGGARCIEIHGNVNSVWSSTSLLSMSWKITCSSWSNGNIDFQCKQNSAKCSLCLLV

SEQ ID NO: 224185 - protein, 339 aa, Glycine max
  Clone ID: PAT_MRT3847_44468C.1.pep
MSFSFFKALRPKTPQEVAKSIKESLMALDTKTVVEVKALEKALEEVEKNFVTMRTMLSGDGESEPNLDQVSQLVEEICKEDVLTLLIHKLPILGWEARKDLVHCWSILLKHKVETNYYCVEYIEQHIELLDFLVVCYDNKDIALSCGIMLRECIKFPSLARYILESASFVLFFKFVELPNFDVASDAFSTFKDLLTKHVNVVSEFLTAHYDEFFDLYEKLLTSPNYVTRRQSLKLLSEFLLESPNSQIMKQYILEVRYLKVMMTLLRDSSKNIQLSAFHIFKVFVANPNKPREVKIILSKNQEKLLDLLHNLSPGKGSEDEQFEEEKEFIIKEIERLSI

SEQ ID NO: 224186 - protein, 57 aa, Glycine max
  Clone ID: PAT_MRT3847_44469C.1.pep
VFVANPNKPREVKIILSKNQEKLLDLLHNLSPGKGSEDEQFEEEKEFIIKEIERLSI

SEQ ID NO: 224187 - protein, 58 aa, Glycine max
  Clone ID: PAT_MRT3847_4446C.1.pep
DIKLFRLTRIETSMRNSQSQAHRKQHFCTRLSISITKPRIPKLMIKFYCLGNLFGKVM

SEQ ID NO: 224188 - protein, 76 aa, Glycine max
  Clone ID: PAT_MRT3847_44470C.1.pep
MSVMVELPGGCLIGHCQSASEVILATCYSVLISYGAVVPLFDESTNLLQSSNIQFLIAEFIAILLFLYVIVLTIIR

SEQ ID NO: 224189 - protein, 35 aa, Glycine max
  Clone ID: PAT_MRT3847_44471C.1.pep
SRKILCTNHIASRCDWHTRINMCCFSLRRREILRY

SEQ ID NO: 224190 - protein, 54 aa, Glycine max
  Clone ID: PAT_MRT3847_44472C.1.pep
PPSNLSSALCLGYEGGSPSSQIGPHFTSCLLASGRKQGRASGSTQPGRAGPAGA

SEQ ID NO: 224191 - protein, 307 aa, Glycine max
  Clone ID: PAT_MRT3847_44473C.1.pep
MAVPVIDFSKLNGEERTKTMAQIANGCEEWGFFQLINHGIPEELLERVKKVASEFYKLEREENFKNSTSVKLLSDSVEKKSSEMEHVDWEDVITLLDDNEWPEKTPGFRETMAEYRAELKKLAEKLMEVMDENLGLTKGYIKKALNGGDGENAFFGTKVSHYPPCPHPELVKGLRAHTDAGGVILLFQDDKVGGLQMLKEGQWIDVQPLPNAIVINTGDQIEVLSNGRYKSCWHRVLATPDGNRRSIASFYNPSFKATICPAPQLVEKEDQQVDETYPKFVFGDYMSVYAEQKFLPKEPRFQAVRAM

SEQ ID NO: 224192 - protein, 54 aa, Glycine max
  Clone ID: PAT_MRT3847_44474C.1.pep
NRFEPGNVILISWKASDGTPRWESLLPFFYRVVIWRYYKFEGFHRHKLKFCYFP

SEQ ID NO: 224193 - protein, 115 aa, Glycine max
  Clone ID: PAT_MRT3847_44475C.1.pep
ELFSFITVASSSQQNSLVEQQDASINIEGSNQISATTVTTHRERGFDLIFIPGQEEEYRRVWETQVLLSTSLNNKTICFVGPYRPRVDLEDIEEWFHTHDGEYPIIHKESIRTDF

SEQ ID NO: 224194 - protein, 42 aa, Glycine max
  unsure (1)..(42): unsure at all Xaa locations
  Clone ID: PAT_MRT3847_44476C.1.pep
HTHSQTENNXXGYTASTSLTXDNGNASVCFWMIFLSXXSXAL

SEQ ID NO: 224195 - protein, 73 aa, Glycine max
  unsure (1)..(73): unsure at all Xaa locations
  Clone ID: PAT_MRT3847_44477C.1.pep
NFHGVRRQKNWEQGDLAIKNQVTFSLVGFFSCIAQGMVCFLSIHTEHGLIKMYNWTANDARAEFRAYVRVXKT

SEQ ID NO: 224196 - protein, 88 aa, Glycine max
  Clone ID: PAT_MRT3847_44478C.1.pep
VVIVGNNFHSHGNITYPPSPHGNRNCLQCESTTFLGIKICPGIYYHNILTNMGIFIPTLIFSGIIENDVKQTPPHVIGPRSSKVSNSL

SEQ ID NO: 224197 - protein, 80 aa, Glycine max
  unsure (1)..(80): unsure at all Xaa locations
  Clone ID: PAT_MRT3847_44479C.1.pep
RGSMLALKISQSKIALPKNTVXRTSLRNDLLANFLTKGNFRASVDLQRTHRIRGMINLVATVSIPEHTGIALAWCHNSSF

SEQ ID NO: 224198 - protein, 124 aa, Glycine max
  unsure (1)..(124): unsure at all Xaa locations
  Clone ID: PAT_MRT3847_4447C.1.pep
FPINLGFQERGGKKPGFCKTCLPNGPLWKKKDPGLHHWKVVQTPSKWEERPISNSIPLRSKVGSFFNRWPLKKSFKNPKPFPVFLHSGWVSFPSSLPNFGNXEGPLVNFLPGTTIKPRTFLVGR

SEQ ID NO: 224199 - protein, 97 aa, Glycine max
  Clone ID: PAT_MRT3847_44480C.1.pep
SMLSGCCFFISWFNGSCRAQVSIQEYWHLFCILIEWVLFKLAGISGYCTVVPTLVCVWVPVVVCFEFCNGFGGVRCHGGCGVYSGIHAFFVVWLGLV

SEQ ID NO: 224200 - protein, 48 aa, Glycine max
  Clone ID: PAT_MRT3847_44481C.1.pep
DHVIELIGIKQHSQFSWHDCGAPSITTSWDPLGHAHASFTQIFQNSTR

SEQ ID NO: 224201 - protein, 157 aa, Glycine max
  Clone ID: PAT_MRT3847_44482C.1.pep
KKFNLPILPTTTIGSFPQTVELRRVRREYKANKISEEEYVSSIKEEIRKVVELQENLDIDVLVHGEPERNDMVEYFGEQLSGFAFTVNGWVQSYGSRCVKPPIIYGDVSRPKPMTVFWSSTAQSMTKRPMKGMLTGPVTILNWSFVRNDQPRSETTY

SEQ ID NO: 224202 - protein, 61 aa, Glycine max
  Clone ID: PAT_MRT3847_44483C.1.pep
KGFQQPGFPSSYPTHSPVSSSYSSCFVSTNPNLNPNLHCPIHIERKGGLKFPRADSARARA

SEQ ID NO: 224203 - protein, 85 aa, Glycine max
  unsure (1)..(85): unsure at all Xaa locations
  Clone ID: PAT_MRT3847_44484C.1.pep
MAKLVLSLRVHHFSGXFVLRKHVQHNECQIQKLNALKPDNRIESEGGFIENWNPNNKQFQCVGVDLSRCTLNSNALRRSSYTNGP

SEQ ID NO: 224204 - protein, 55 aa, Glycine max
  Clone ID: PAT_MRT3847_44485C.1.pep
HYCDKGGGSKLDLQPFLSAIPNLKQTFVCPSPTTHSNPPRSLKNYVLGLPYRTRG

SEQ ID NO: 224205 - protein, 63 aa, Glycine max
  Clone ID: PAT_MRT3847_44486C.1.pep
PGSDIFKLQLLFIIEHGKSQEIMLSMKQQHQFYLHICSNTTPITRRHYLFKVGCLQIGVSKCD

SEQ ID NO: 224206 - protein, 81 aa, Glycine max
  Clone ID: PAT_MRT3847_44487C.1.pep
GYVYEYVPPHLGLPVFDPSSWKYGFHPPRGKHLSNKLELGISLRLILLSLQTGILVPLINILHRNGGSLRATLHIYITSNV

SEQ ID NO: 224207 - protein, 64 aa, Glycine max
  unsure (1)..(64): unsure at all Xaa locations
  Clone ID: PAT_MRT3847_44488C.1.pep
FEVSNMLKQEATRGLHFTXNISLCTSCFLLFTQIFVLSHLYSGLVFCTCAKTEFVFNKYIHFAF

SEQ ID NO: 224208 - protein, 43 aa, Glycine max
  Clone ID: PAT_MRT3847_44489C.1.pep
HHYYLRHLLTSKTTSNPTNFIQTQTLLSHIHLIYHSHLQFTYT

SEQ ID NO: 224209 - protein, 70 aa, Glycine max
  Clone ID: PAT_MRT3847_4448C.1.pep
KFSYSPQRWFFIFWPRNCKTRKILNLTLRLSHLKFFLSCINICFKKCSLPNESQIRLDGMSNHKIDFACK

SEQ ID NO: 224210 - protein, 54 aa, Glycine max
  Clone ID: PAT_MRT3847_44490C.1.pep
PQFGKIKIKLKIKIIKIHPPEEEEIILKLKLKLRLSFQSETSLSCLIQRCPGRV

SEQ ID NO: 224211 - protein, 136 aa, Glycine max
  unsure (1)..(136): unsure at all Xaa locations
  Clone ID: PAT_MRT3847_44491C.1.pep
SVSTIPGDFVIGVKVTTINNMGAYGLNPGISSSWLLGTIPXSISQQTGWNQMATGETPLDFDSNQPNFCQVSIDLLGGGILVDKTGDGITLIQNSPISNLXLRSAAWKKRLLMVKIVMSGNAAVKKSDWASLVQVF

SEQ ID NO: 224212 - protein, 83 aa, Glycine max
  Clone ID: PAT_MRT3847_44492C.1.pep
MESSTIAVQTALTCLLAQGSKWWRLHKKKREGIRYNGLMKKKVKLVKEGLMMESRIETLPKLGVWERGSKACGKFKGAVTREG

SEQ ID NO: 224213 - protein, 122 aa, Glycine max
  unsure (1)..(122): unsure at all Xaa locations
  Clone ID: PAT_MRT3847_44493C.1.pep
KKKGGGRFKKSKLTSPCLKRNNFFLGSPKLNSLAAFLQLRNWKNPGFTQFICFEKNPLFASWVINKKAPTNRPSKKLPTLNGKXNPPFTGPLNAAGVVVTPSLTVTFASALTPVPLVFFPSF

SEQ ID NO: 224214 - protein, 164 aa, Glycine max
  unsure (1)..(164): unsure at all Xaa locations
  Clone ID: PAT_MRT3847_44494C.1.pep
RHESPPSRPDNCQTSYHSNHLQKQADNSYGSQAAGAGHQDFRPSPGETGRAVSRIPPCSPGGGTPSAPGPGSPFGNNVSWEERIVCPRPKIWRPLAXGKSIVNQKRYAXVVSGIAGFVIPFLVLARCHRIESRPELPLVVSDSAESVEKTKKAIKVLKQIGAFS

SEQ ID NO: 224215 - protein, 126 aa, Glycine max
  unsure (1)..(126): unsure at all Xaa locations
  Clone ID: PAT_MRT3847_44495C.1.pep
LAPRSTSFLALTADLRVGGSPSSLLLGGVWFGPXRQGGPFFKGAGRITLLMVRTLVVSXHLSVLTSWSCRVGLAWLLVPFLGAPAPXSPFFISCAPXXLLLFALCPFCLRLLLCGTPGPLRFPSLP

SEQ ID NO: 224216 - protein, 61 aa, Glycine max
  Clone ID: PAT_MRT3847_44496C.1.pep
SIVDPLHCCCCLLRFRLVSVMSRTQESVSVRKGKNLSSGTTLLSKTSKDPFLPLHQKFFYS

SEQ ID NO: 224217 - protein, 229 aa, Glycine max
  Clone ID: PAT_MRT3847_44497C.1.pep
RASERARNVTYHTTLNHRPPFQDHMMLMSQLFPADAYTQIISQQGETNKKPRRRRNKQHREDERRGSLVMKKWKLSEVQVNLLEQNFGNERKLESERKDRLAMELGLDPRQVAVWFQNRRARWKNKKLEEEYSSLKKNHEATLLEKCCLESEVLKLKEQLSEAEKEIQRLLESAERVPSNSSSSSQSQSMEAVDPPFFGEFGVDGYEDDVFYVPETHYINGMEWINLYM

SEQ ID NO: 224218 - protein, 79 aa, Glycine max
  Clone ID: PAT_MRT3847_44498C.1.pep
HLSATLLATSKADYTHCHSSPNLRSRAYKPTQSYVEMCIFISIIISTITHERSNYITGYQSDAYTKVHEHELKLWRPLS

SEQ ID NO: 224219 - protein, 78 aa, Glycine max
  Clone ID: PAT_MRT3847_44499C.1.pep
SDLEILHAFVFALCITPQCMISTRILKPVPHMMLTMQTKYTHTTTVMRLLPRSYHYNHMNLCLNQIVCHFHYLPYMHC

SEQ ID NO: 224220 - protein, 47 aa, Glycine max
  Clone ID: PAT_MRT3847_4449C.1.pep
RPRDKHALLQILIDLGNSTTLFSWLLTTYCCNISWLGVSCYSGTHTY

SEQ ID NO: 224221 - protein, 120 aa, Glycine max
  Clone ID: PAT_MRT3847_444C.1.pep
KIQNKQKSENLCKRSVSAKSTAAALITPTNEKDDHSGQWGRYPHGVKLLIYVSCLIFIPTNEKDDHSGQWGRYPHGVKLLIYVSCLIFIFIFKKYKKYVINIFLFEKERDKKNIEFREFL

SEQ ID NO: 224222 - protein, 72 aa, Glycine max
  Clone ID: PAT_MRT3847_44500C.1.pep
LFHVYHYFSGETNKKPRRRRNKKNKGGENGASEANKKRKLSEVQVNLLEQNFGNERKLESERKDRLAMELGL

SEQ ID NO: 224223 - protein, 102 aa, Glycine max
  unsure (1)..(102): unsure at all Xaa locations
  Clone ID: PAT_MRT3847_44501C.1.pep
FGPGGVSLLVGRGSFLLGGLWLLVVPWLVPLFXGGPLCFLSLAPPVGGGFFPFXXVVXXPPPVGRGFPLXLCFASLVSGLLFVMFLRGVLRSFPPXVCCFCF

SEQ ID NO: 224224 - protein, 108 aa, Glycine max
  unsure (1)..(108): unsure at all Xaa locations
  Clone ID: PAT_MRT3847_44502C.1.pep
SSARKRGEXEEGEXXXXSSQPRDXEKQEGGQGTGTXXEKRQXXXRRERDQAAKEEQEQARRGEXXATEQKEQGAEKQRRKXNPAATKGKRQAREKRXGEKTEXAQENN

SEQ ID NO: 224225 - protein, 45 aa, Glycine max
  Clone ID: PAT_MRT3847_44503C.1.pep
PRGPKVLAFVKLWTGLIKHIIPISRYPMLVVKCVMGCICYPKVKS

SEQ ID NO: 224226 - protein, 527 aa, Glycine max
  Clone ID: PAT_MRT3847_44504C.1.pep
MEISQIPFFTQEDYSHFYNLYEDTDSNNSLNNNNSNNKRKRNNRKEEGSGGGAEQKGHNGNNNNENSESNLKDLLASLIMLDEEEIQEERNRKVEYEQHRNMYNANFENQTRAMNTYKAQFEAHYAQSEEFEQTITKKARRAVAAATGTGSVMLYESGSVQVQPRTDSEPGSTVQRRLWVKDRSKDWWEKISRKDFPEEEFRRWFRMSRSTFDMICDELDAAVTKKNTMLRDAIPVRQRVAVCIWRLATGDPLRLVSKRFGLGISTCHKLVLEVCSAIRTVLMPKFLQWPNEEKTKQIKDEFEKISGIPNVGGAMYTTHVPIIAPKISVSAYFNKRHTERNQKTSYSITVQGVVDSKGVFNDVCIGWPGSMPDDRVLEKSALFQRASRGNLKGVWIVGNSGHPLMDWVLVPYTHANLTWTQHAFHEKLAEIQGVAKEAFARLKGRWGCLQKRTEVKLQDLPVVLGACCVLHNICEMRNEEMDDEWRFQIFDDEMLPENGIRSSASLQARDHIAHYLLHHGRAGTGFF

SEQ ID NO: 224227 - protein, 70 aa, Glycine max
  Clone ID: PAT_MRT3847_44505C.1.pep
MSQRVLCLTPLFLLQMMPHLAADDLLHQFQYYLFISLMSICWDKAYYSYACGITRIFQRRYTRLFHKQAP

SEQ ID NO: 224228 - protein, 262 aa, Glycine max
  unsure (1)..(262): unsure at all Xaa locations
  Clone ID: PAT_MRT3847_44506C.1.pep
MMKTRCRLPLLAFFAFASFLFLMRSSLLEKTSSTMPHSFNTDQALSILFGEFSNQEKAVFLGNNEPSLVAAPRKLCGYTPEAKKAALQKLENVLLEPPRAASGKSPNYLKRTRFLPDLMGDSLEHYPRRVFIDVGPPEKEGGSGTEWFSKNYPTRDKKFEMYNIETVTEEWSXGKEQIEMSDWVRKNVKEEEYVVMKAEAEVVEEMMKSSSIGLVDELFLECKPNRGSRSSGINSNRRAYWECLALYGKLRDKGVAVHQWWG

SEQ ID NO: 224229 - protein, 69 aa, Glycine max
  Clone ID: PAT_MRT3847_44507C.1.pep
FVITLSKPTWAFKKQILFKTLTGKTITLEAESSDTIDNVKATIRDKEGIPLDNNRLIFPERKLMDKPNP

SEQ ID NO: 224230 - protein, 43 aa, Glycine max
  Clone ID: PAT_MRT3847_44508C.1.pep
LNFTLKMSDPTLAQPHLVEVHTTLETVVTTHNHNHRPSINVCY

SEQ ID NO: 224231 - protein, 60 aa, Glycine max
  Clone ID: PAT_MRT3847_44509C.1.pep
LAQLFSFPLVLSVGSPRFTVCSSRVDPPGRFSFVTNSLSPCYIFLYAWLFLVFLSVFCAR

SEQ ID NO: 224232 - protein, 190 aa, Glycine max
  unsure (1)..(190): unsure at all Xaa locations
  Clone ID: PAT_MRT3847_4450C.1.pep
MEEFEDAVSFVSKNSGMKTSQDDKLRFYSMYKLATVGPNDTPRPGFFDFAGRAKWDAWKSCGELSPEDAKTEYVKLLDRLDPKWRETLPNLPKHSKAQSNNEDVGGPVFSMPQFEEEIIPEEDRTLAYYVSSGEDSKVLELIATAHNKTSLIDKRDKDGIAAIHYACDRGHQQLXKILLDNGADIDIPDE

SEQ ID NO: 224233 - protein, 490 aa, Glycine max
  Clone ID: PAT_MRT3847_44510C.1.pep
MAEDSEGTAKKEEILESQIETAMRSRVSLFKEQSDSLTFEGVRRLLEKDLGLEEYALDVHKRFIKQCLLKCLEGVGDDDGAKISGKEGEKGTSTQESEEPKEECEAKDAKDLCPEDEEKMEDSPVLGLLKEQKRAKLETKDDKGNGTKVVPIEALIKKAVRKRSSYIKANAEKITMAGLRRLLEEDLKLDKFTLDPYKKFVSQQLDEVLASSEVPKPSNNAKKIVKKKPDTKVTKKVSSEENSDTSDKETDEEESEEDEVKPRKKIVPKGKVKTSVQPKKRKGEETDLSSKKRVKPAKATSEDNNDAKDDGKNSEDDQSSSSPEKPYKKKEVSTPVYGKHVEHLKSVIKACGMSVPPVIYKKVKQVPENKREEQLIKELEEILSREGLSSNPSEKEIKEVKRKKARAKELEGIDLSNIVSSSRRRSTSSYTSPPPKPKVPVETSGNGAEGSDNDDEDNDNEEDEEDEEEDSGDDDGSQSEEFNDDEEDSD

SEQ ID NO: 224234 - protein, 68 aa, Glycine max
  Clone ID: PAT_MRT3847_44511C.1.pep
GTIAFESILNIGKIKQQLGNICIYINHGKNTSSSMAKKNISSNGTYPPPPPHTHTHLFPKKNPKLKIP

SEQ ID NO: 224235 - protein, 191 aa, Glycine max
  Clone ID: PAT_MRT3847_44512C.1.pep
PTRPYGCEKTTEGEVYVLKPSHKSTLQSKIIENSIPDSVSAIPNVTHVESEFEAGHDADPPKSKGDLVSVLKAEKEELESSLSKEKQHALQLKQDLVEAESRNSDLYKELQSVRGQLASEQSRCFKLEVEVAELGQKLQTIGTLQKELELLQRQKAASEQAALNAKQRQSSGGVWGWLAGTPPPSRNADDA

SEQ ID NO: 224236 - protein, 42 aa, Glycine max
  Clone ID: PAT_MRT3847_44513C.1.pep
EREILLSSLFQLYIFNIFSFSLINVHFTLLLQSTKIFLFQPP

SEQ ID NO: 224237 - protein, 277 aa, Glycine max
  Clone ID: PAT_MRT3847_44514C.1.pep
MEEESTSAESNPSSSDRIKLNVGGKLFETTFSTLRSGGPDSLLFALSNRRSADPSPVFIDRDPEIFSVLLSLLRTSHLPSAARRFSKHELASPSGGVWIAHGGQISCYDPILTHAATVRTHLDEIDSICRVWPEIAAVGSKSDTGLHFYNFSGSRHVGSVHWTDPLDPRIFKASVNAITSSSNSVFASFDCPHRENCIIEVDKEKLLIANQFARQSGNQAKNMVPRKLTWIPATGVLVGSAVTGGAFGYSGYVRLWDPRSGDVVWETNEPGGSGRSS

SEQ ID NO: 224238 - protein, 94 aa, Glycine max
  Clone ID: PAT_MRT3847_44515C.1.pep
GRRAAPVPVPIRARARVRLFKGLKKTRGALDIKKPGYCDCVTISFDRITGVALDSPEGRASFLKQLIYILCRNGDMLYTDLIKPFGGSRERNFL

SEQ ID NO: 224239 - protein, 110 aa, Glycine max
  unsure (1)..(110): unsure at all Xaa locations
  Clone ID: PAT_MRT3847_44516C.1.pep
MARTKHTARMSTXCEAPRKHLATNAARKSAPTTGGVNKPYINPTGTVALHEIRKYHISSELLIRKLLLQRLGREIAHDFKTDLQLQSHAVLXALHEATDAFIVGLNEDTN

SEQ ID NO: 224240 - protein, 96 aa, Glycine max
  Clone ID: PAT_MRT3847_44517C.1.pep
TSCFYLAAEMAAAFTACYIVLMDNRPSSQKLVHGATTLLNFSTDQRGMYSPYSMDASLFYNITTYCDKFLLGRTWVYLATGNSSDLNICTADSITK

SEQ ID NO: 224241 - protein, 109 aa, Glycine max
  unsure (1)..(109): unsure at all Xaa locations
  Clone ID: PAT_MRT3847_44518C.1.pep
MPGFRAKIRIGILIIVVVGICLAALYGLLKPISNGCIMTYMYPTYIPISSSESISPVKYGLYLYHEGWKKIDYKEHLKNLXXVVPVLFIPXKWWQLQQGRXRSLAAESD

SEQ ID NO: 224242 - protein, 105 aa, Glycine max
  Clone ID: PAT_MRT3847_44519C.1.pep
LFRPQTRWIAREELRAHGGMAKTVPIHGVDKLSDTTQVDNDKNAKGENTPGEQESDNTKKGNRISYQSSRVINNHGTHNGNGNGSFNENCTQTQTTQQHFYYARK

SEQ ID NO: 224243 - protein, 44 aa, Glycine max
  Clone ID: PAT_MRT3847_4451C.1.pep
SGRSFFFFFFFFFKIIIQHFNTLIEQNSKPQCSSSISHNKNSPV

SEQ ID NO: 224244 - protein, 65 aa, Glycine max
  unsure (1)..(65): unsure at all Xaa locations
  Clone ID: PAT_MRT3847_44520C.1.pep
MPGFRGKIRIGILIIVVVGICLAALYGLLKPISNGCIMTYMYPTYIPXSSSESISPVKYGLYLYH

SEQ ID NO: 224245 - protein, 77 aa, Glycine max
  Clone ID: PAT_MRT3847_44521C.1.pep
PSLAAWIVPADELAWSRRWDWREPASGSRIRKRTTRRLHDCESLISLAYGCSRSVMALIRTTNRTVDDSSRIGSSAS

SEQ ID NO: 224246 - protein, 296 aa, Glycine max
  unsure (1)..(296): unsure at all Xaa locations
  Clone ID: PAT_MRT3847_44522C.1.pep
MELIFYFFFFFFFFFFFFFFFFFFFLFARLSSPGAGPRPPPPPPPPAYPAPPPPPTPPPPPPPPPHPPPPPPPPSPPPPPPPPPPPPPPPPLPPHPPPPPPPPPLPPPPPHPPTYTXPQLLPHPHPQSARSAGPQQPPPPPSPPPPPPARPPPTPXPPPAPPTHPPPPLPPPPPPPPPPPLPPPPPPXPPPPSPQPPPPPNSNLPPFQPSSPPPQFQLNXPSPISPYPPPITPPLPPTPPXPPPPPPPXPNPFPQPPPPPPHSTPHPPPISPPPPPPIPPSPPHPYFPIPPPSPPP

SEQ ID NO: 224247 - protein, 127 aa, Glycine max
  Clone ID: PAT_MRT3847_44523C.1.pep
RKVYRDSTLDPRRKAYLVQNLMTSRWIAAQQKLPKALSGESSKQIEGCSPSFRDPEKEIFGCEHYKRNCKLRAACCGKLFTCRFCHDNASDHSMDRKATLEMMCMQCLTIQPVGPICMSPSCNGLTM

SEQ ID NO: 224248 - protein, 71 aa, Glycine max
  Clone ID: PAT_MRT3847_44524C.1.pep
VRIRSNKSSGITSEQSAVASFSQSALSSSNESYAPVALGLSSEWMIQHVSLSIGVQVKPLLQRVLIDRVCS

SEQ ID NO: 224249 - protein, 46 aa, Glycine max
  unsure (1)..(46): unsure at all Xaa locations
  Clone ID: PAT_MRT3847_44525C.1.pep
KAISGWQIDESIGPLKRGTARVYKFFSFYIFFLFFXXXXXXXXXFF

SEQ ID NO: 224250 - protein, 57 aa, Glycine max
  Clone ID: PAT_MRT3847_44526C.1.pep
LGKLDTASSPDFDSFEGNARLRMKQQDSGKDPLTEMFEDIGGHTNDKNYSLGVRKSL

SEQ ID NO: 224251 - protein, 145 aa, Glycine max
  unsure (1)..(145): unsure at all Xaa locations
  Clone ID: PAT_MRT3847_44527C.1.pep
MAVSTTFSGAKLEALLLKCSSSSSSPPPSRSSFTTFPGQNRRTLIQRGVIRCDAQPSDASSVAPNNATALSALEQLKTSAADRYTKERSSIIAIGLSVHTAPVEMREKLAIPEAEWPRAIAELCSLNHIEEAAVLSTCXRMEIYV

SEQ ID NO: 224252 - protein, 123 aa, Glycine max
  Clone ID: PAT_MRT3847_44528C.1.pep
PRRSRRGERPAAAAQELNAAVAEGQVSPACRKVLEDTVDWLISLRFRDSGNYPAQLDDADDVLVHWCHGAPGMGLLFCRAYEVFRHARYLNAALAAGDVVWERGLLKKGLGLCHGVAGNGYLF

SEQ ID NO: 224253 - protein, 77 aa, Glycine max
  Clone ID: PAT_MRT3847_44529C.1.pep
MLPPKPKSTRSNRNIQAPPVVHQARHPLSTAATAPAPQPVKSRTHAARTSPPPPGHRASAPPMSGPQSPRAARQRSR

SEQ ID NO: 224254 - protein, 70 aa, Glycine max
  unsure (1)..(70): unsure at all Xaa locations
  Clone ID: PAT_MRT3847_4452C.1.pep
MVEPDKNCETRVEDVAWLCSLSESEIDMLISLKLLIIQRAKXWGCKELASKFNLKMIRAIGIDVCLFFPN

SEQ ID NO: 224255 - protein, 61 aa, Glycine max
  unsure (1)..(61): unsure at all Xaa locations
  Clone ID: PAT_MRT3847_44530C.1.pep
GKSMVSPLWCQILIKQNLTNFFKWLGVSQVKLHDLFFRIRSLFFKLIRTKYQYXWVFWXGG

SEQ ID NO: 224256 - protein, 205 aa, Glycine max
  unsure (1)..(205): unsure at all Xaa locations
  Clone ID: PAT_MRT3847_44531C.1.pep
VVAYFGERLISEKTLSRNAVRQLSNNKTVIAFTYKQNGLLVGCKYRTMEKRFWQGKGADKILYGIDDISQASEIIIVEGEIDKLSLEEAGFQNCVSVPVGAXPEKVSSKDLPPIEKDTAFRYLWNCKEYLDKAVRIILATDNDPPGQALAEELARRLGRERCWRVLWPKKDEFSSFKDANEVLKYMGADALKKLVENAEPYANAN

SEQ ID NO: 224257 - protein, 67 aa, Glycine max
  Clone ID: PAT_MRT3847_44532C.1.pep
NRFHDFLVWALPVNQENQSSYESFFLPPPKRKPAWDFSGLLIIPSYGPFSCFTWHKTQPNYPMLKGW

SEQ ID NO: 224258 - protein, 137 aa, Glycine max
  unsure (1)..(137): unsure at all Xaa locations
  Clone ID: PAT_MRT3847_44533C.1.pep
RKLKALESWRAISDKEDCDAEIAGSECMDYSEVVPYVHQAFLADWRPHTSTLTYPECISTTSREGNVAHNAFSQKDIQFYRGTHDYGLSGKVPLENGNQSALPSVSKLPQLFHTTSDLRNGMKGAPSTINPXXQXLT

SEQ ID NO: 224259 - protein, 99 aa, Glycine max
  unsure (1)..(99): unsure at all Xaa locations
  Clone ID: PAT_MRT3847_44534C.1.pep
LTGSQGIEKIAWDNSGERXAVSFKGGDDMYRGLIAIYDTRRTPLISTSLIGFIRGPGDKPKPISFSFHGKFKQGPLLSVCWSSGFCCTYPLLFRSHMLP

SEQ ID NO: 224260 - protein, 68 aa, Glycine max
  Clone ID: PAT_MRT3847_44535C.1.pep
KMNICHHHVELKLESKILETSWTLNKMDMLYPIDYTLDTLPFEVWIHIATLLVRALLTTMNWREKASE

SEQ ID NO: 224261 - protein, 67 aa, Glycine max
  unsure (1)..(67): unsure at all Xaa locations
  Clone ID: PAT_MRT3847_44536C.1.pep
MPNPKVFFDMTIGGQSAGRIVMELYADVTPRTAENFRALCTGENGVRRSGKPLQXKGSSFQRVDPSF

SEQ ID NO: 224262 - protein, 59 aa, Glycine max
  Clone ID: PAT_MRT3847_44537C.1.pep
LHAWVAGEKLWGEVESGGLMSYAKINVENGSDSCTNMASVGGTDLPDKRVYVLACGLSL

SEQ ID NO: 224263 - protein, 71 aa, Glycine max
  unsure (1)..(71): unsure at all Xaa locations
  Clone ID: PAT_MRT3847_44538C.1.pep
MGQGTXEXLXXXXLXXXRXPXGGDKKEKKFEPAAPPXRVGRKQRKQKGPEAAARLPTVTPXVXCELXLLKA

SEQ ID NO: 224264 - protein, 57 aa, Glycine max
  Clone ID: PAT_MRT3847_44539C.1.pep
LQGNLRTIFVARRHFHCKHIAYLQHLGTLPPHIFIKLRNMISKYILKKRAQHAPYIT

SEQ ID NO: 224265 - protein, 216 aa, Glycine max
  unsure (1)..(216): unsure at all Xaa locations
  Clone ID: PAT_MRT3847_4453C.1.pep
MEKVNFVKNGELRLPPGFRFHPTDEELVLQYLKRKVFSCPLPASIIPELHVCKXLEQERYFFSTKVAKYPNGNRSNRATNSGYWKATGLDKQIVTSKGNNQVVGMKKTLVFYRGKPPNGSRTDWIMHEYRLILNASQSQSHVVPMENWVLCRIFLKRRIGAKNGEESNSKVVFYDFLAQNKTDSSSSVASGITHESDEHEESSSSNTFPYTIRRKP

SEQ ID NO: 224266 - protein, 139 aa, Glycine max
  Clone ID: PAT_MRT3847_44540C.1.pep
MARGSKQAVNGASLVERDPSLALTKTKKSTTSKELPPLEELKVLPSDEGFSWANENYNSLQRSIDVWSFVISLRIRVLLDNAKWAYLGDFTEEKQKSRRRKTAAWLRECVLQLGPTFIKLGQLSSTRSDLFSREFVEEL

SEQ ID NO: 224267 - protein, 74 aa, Glycine max
  Clone ID: PAT_MRT3847_44541C.1.pep
ASSIQGTWALNPYQGGEGINIQSGQSTSLEPLQLNTLKMGFFKPFKAFLCSSKGRGKLPSHCFIQRLLNKRPSF

SEQ ID NO: 224268 - protein, 46 aa, Glycine max
  Clone ID: PAT_MRT3847_44542C.1.pep
KKKYNVTIRRKISINDNVILKKIYKFKINLLLSIKLNTFNFDKLDN

SEQ ID NO: 224269 - protein, 236 aa, Glycine max
  Clone ID: PAT_MRT3847_44543C.1.pep
SYNGLCVIFLLTVKVYVYSGPARCYRQIKNKPYPKSRFCRGVPEPKIRIYDVGMKKKGVDEFPFCVHLVSWEKENVSSEALEAARIACNKYMAKFAGKDAFHLRVRVHPFHVLRINKMLSCAGADRLQTGMRGAFGKPQGTCARVNIGQVLLSVRCKDANSHHAQEALRRAKFKFPGRQKIILSRKWGFTKFSRSEYLKLKSENRIVPDGVNAKVLGCHGPLANREPGRAFLPATA

SEQ ID NO: 224270 - protein, 46 aa, Glycine max
  Clone ID: PAT_MRT3847_44544C.1.pep
CNSFLDQLICIFVNVLWSAVGGKPKSESGCCRSTQVSGGEQGKVDL

SEQ ID NO: 224271 - protein, 471 aa, Glycine max
  unsure (1)..(471): unsure at all Xaa locations
  Clone ID: PAT_MRT3847_44545C.1.pep
MLQAPNLPSFQVEEHVPINSQIPGFAHDCLLKDGSSQSMMTMDPKHKLDCAKPPSGDDLFDVLGVDLKNQLLNGNWDNLFTYESDANAENMDKKIAPMNMQGATTNPDVYAVKEAISDCGIFSGMGTDHLLDAVVSKAKSVVKQDSDDMSCRTTLTRNSTSSVPSPARRTVVSGHFQGGLFDLPKNDGKTGATETSFLRSGCNKDDAGNCSQTSSVYGSQLSSWVENSGSVKCENSASTRYSKRPDEACKPNRKRLKPGENPRPRPKDRQMIQDRVKELREIVPNGAKCSIDALLERTIKHMLFLQSVTKHADKLKQTGESKIINKEGGLLLKDNFEGGXEATWAYEVGAQSMVCPIIVEDLNPPRQMLVEMLCEECGFFLEIADLIRGLGLTILKGVMEARNDKIWARFAVEANRDVTRMEIFMSLVRLLDQTMKGGASSSNAIDNNMMLYHSFPQATQIPATGRPSSLQ

SEQ ID NO: 224272 - protein, 195 aa, Glycine max
  unsure (1)..(195): unsure at all Xaa locations
  Clone ID: PAT_MRT3847_44546C.1.pep
MGTDNLLDGAVSKAKSIMKLDSDDMSCRTTLTRNSTASVPSPACRPVMSGHFQGGLFDFPKNWGKTGAIETSLLRSGCNKDDAGNCSQTSSVYGSQLSSWVENSGSVKRENIVSTGYSKQADESCKPNRKRLKPGENPRPRPKDRQMIQDRVKELREIVPNGAXCSIDALLERTIKHMLFLQSVTKHADKLKQTG

SEQ ID NO: 224273 - protein, 49 aa, Glycine max
  Clone ID: PAT_MRT3847_44547C.1.pep
LNFPYIIDHKSSINNFPHIINQVNLIYHNLIIFSCQGYFFVSIPHLLTH

SEQ ID NO: 224274 - protein, 85 aa, Glycine max
  Clone ID: PAT_MRT3847_44548C.1.pep
GCVFWGLNPEETGVDVFNSRMLKKLTQSFNPNPSPVSGETQKRDIFFQTKRRKKKCVLSNQGIPSHFWGGIFFPLSSKSLIGIEF

SEQ ID NO: 224275 - protein, 134 aa, Glycine max
  unsure (1)..(134): unsure at all Xaa locations
  Clone ID: PAT_MRT3847_44549C.1.pep
NISCVGIIVYRGLSFGLYDSLXPVLLTGNAANNPXASFLLGWSLALGAGXLASYPHATIRRRMLMTSGEAAQYKSSCPCFQEIIAKEGDKSLFKGAGANVLRAIAGAGVLAGYDRLQMMVFGKTYGSGGGSIPL

SEQ ID NO: 224276 - protein, 93 aa, Glycine max
  Clone ID: PAT_MRT3847_4454C.1.pep
GLLWVSCLGVCLSMPMSFGLPVLIGSSALLYSFLCSLIKACFRFSFHLCPVTLLPVFSICRSLGSLFILSLSCTCSIFLLILLALLVFLLAML

SEQ ID NO: 224277 - protein, 134 aa, Glycine max
  Clone ID: PAT_MRT3847_44550C.1.pep
CACTCRYGFNNCLSSLRSDGCEKTTEGSREFFSTAFYRLILIAIGAGICLFVNIFIYPIWSGEDLHKLVVKNFNGVAASLEGCVNGYLQCVAYERVPSKILVYQASDDPLYRGYRAAVQSSSQEESLVDFALWD

SEQ ID NO: 224278 - protein, 165 aa, Glycine max
  unsure (1)..(165): unsure at all Xaa locations
  Clone ID: PAT_MRT3847_44551C.1.pep
MSPTHSDTQLRIEERALSASGAAFVSAIIVNPLDVAKTRLQAQAAGVPYQGVCQLANTTLHDVRCFAISSSEPPRPCPSGCNRYKGTLDVLYKVTRQEGFMRLWRGTSASLALAVPTVGIYMPXCYDILRNKMEGFTTXNASILTPYVPLVAGSAARSLAWISWY

SEQ ID NO: 224279 - protein, 100 aa, Glycine max
  Clone ID: PAT_MRT3847_44552C.1.pep
VDANLPSHHRHHHARDRPNHRHNKGHPSRHHNKGHYAHHHSHHASLHSHHANHHHANHHSRHSHHANICFHLPHLHYASHLFCQNSGMHHRVQPQRRSKV

SEQ ID NO: 224280 - protein, 60 aa, Glycine max
  Clone ID: PAT_MRT3847_44553C.1.pep
LTILRPALYICFGFSAHTTPSSLPREIPYRKGKAMHFPLRASGPKRKGSLILFLFTNLER

SEQ ID NO: 224281 - protein, 44 aa, Glycine max
  Clone ID: PAT_MRT3847_44554C.1.pep
RLSAYLQGLYGAWMSFIQIQAQYFRRPHTWQNLHHNIAYMPHIR

SEQ ID NO: 224282 - protein, 76 aa, Glycine max
  Clone ID: PAT_MRT3847_44555C.1.pep
LTKYHLEKKKDHSQKISKEQSYLFAPCRYKYYSDLKYKKNLGLKYNKKNQLTLPHLISNIKQFQLILSYLMLLSLK

SEQ ID NO: 224283 - protein, 42 aa, Glycine max
  Clone ID: PAT_MRT3847_44556C.1.pep
AQQGYKHTRYLSQGTPAMSQVCQYEFKTLNLPCPTSTCACTL

SEQ ID NO: 224284 - protein, 80 aa, Glycine max
  Clone ID: PAT_MRT3847_44557C.1.pep
HAHRRNSNKQTNKLNVRSQLKASAQTKRFFNSKTKVRNTQIAITVTSERKIVSRFSLSVSLSLSLCVYICISFSLFCVES

SEQ ID NO: 224285 - protein, 117 aa, Glycine max
  Clone ID: PAT_MRT3847_44558C.1.pep
SFFFFFFFFFFFFFFFFFFFFFFLFFVSKNKMNSRNRLIRLFSPSAKPGKFTPFTLEKTKFVKEGPMGKLNRREQPLGTDINSQGLVPPYHLLGEGNEKNGGGPYPPRTPWKSHRAP

SEQ ID NO: 224286 - protein, 51 aa, Glycine max
  Clone ID: PAT_MRT3847_44559C.1.pep
CHILSEHCVPVSSNMRFFIVIHLFISKRAHMSSDNDSGISSKFLRFLNFFL

SEQ ID NO: 224287 - protein, 284 aa, Glycine max
  unsure (1)..(284): unsure at all Xaa locations
  Clone ID: PAT_MRT3847_4455C.1.pep
MEKVSFVKNGELRLPPGFRFHPTDEELVLQYLKRKVFSCPLPASIIPEVDVCKSDPWDLPGDLEQERYFFSTKEAKYPNGNRSNRATNSGYWKATGLDKQIVTSKGNNQVVGXKKTLVFYRGKPPNGSRTDWIMHEYRLILCLSATGLDKQIVTSKGNNQVVGMKKTLVFYRGKPPNGSRTDWIMHEYRLNILNASQSQSHVVPMENWVLCRIFLKRRIGAKNGEESNKVRNSKVVFYDFLAQNKTDSSSSAASGITHEHESDEHDHEESSSSNTFPYTIRTKP

SEQ ID NO: 224288 - protein, 80 aa, Glycine max
  Clone ID: PAT_MRT3847_44560C.1.pep
SPKKRGPPAFFFFFKQRSKFFWAPQRKIVYYQNSLGAIPKKKVLLSPQRVGGTSIFWIKKLTSCKLILIPPKKKKVVCMF

SEQ ID NO: 224289 - protein, 108 aa, Glycine max
  unsure (1)..(108): unsure at all Xaa locations
  Clone ID: PAT_MRT3847_44561C.1.pep
MTGIIHXIEETLHVLGHKKXEHTGDHHGEHIGELKGDLLGEHNGDLKGYQLHGVHKEGLVDKIKDKIHGDGHVKGEKPKKKDKKKKEHGHDHHGHSSSCDSDQILYVK

SEQ ID NO: 224290 - protein, 90 aa, Glycine max
  unsure (1)..(90): unsure at all Xaa locations
  Clone ID: PAT_MRT3847_44562C.1.pep
IRPLSKNMETIMNSIXFPIVDLTPDNSVISTALNDLLNWSRLYSLCPLLYGASWCFIECAPLIGSRFNFDRYGVGTRPSPGQAGLILTAG

SEQ ID NO: 224291 - protein, 48 aa, Glycine max
  Clone ID: PAT_MRT3847_44563C.1.pep
MPPDDEGMFRHCPIVHKLARKDYCLYVGVRVRSQATVKHRFSKVLGKG

SEQ ID NO: 224292 - protein, 134 aa, Glycine max
  Clone ID: PAT_MRT3847_44564C.1.pep
SDSFSSFPDPPNMECTYGICTCPKTWDRLHATAREQDVKEAPLCNFVLDKGIRTKCCYYSCNNRSFCISGHAKLEEVIQCSHFQISAHAKRTRPLNRSHSTLTCSIRGSWHQKIEMPMHLQPHLLSAKSYSYQR

SEQ ID NO: 224293 - protein, 45 aa, Glycine max
  Clone ID: PAT_MRT3847_44565C.1.pep
HSVLVAIGRFNIGSRYLLIKNHLLEWLIFFRDVKGFNFKYYITKS

SEQ ID NO: 224294 - protein, 90 aa, Glycine max
  Clone ID: PAT_MRT3847_44566C.1.pep
SFLRGRILPCFGDQARAMAHCSHVILYLQRTLLLARHYSNVKVAYYKLVEEARNVRAYDLITAYRMLATKDYIDGNPFSSEYAAANSQPI

SEQ ID NO: 224295 - protein, 60 aa, Glycine max
  Clone ID: PAT_MRT3847_44567C.1.pep
FHYLQGCPYAYCAVGVITFYTHEYSCTSEFIFPSSESLRSRGWVQPVRPGACRRASQPYS

SEQ ID NO: 224296 - protein, 73 aa, Glycine max
  Clone ID: PAT_MRT3847_44568C.1.pep
NTSPQSYCTKKGQFCQATLKTQLASTQDTLPRVLGEFPWVFLMRTKTKVDETTGESYLFLKNSGHFHHLIRLV

SEQ ID NO: 224297 - protein, 73 aa, Glycine max
  Clone ID: PAT_MRT3847_44569C.1.pep
IPFNFKIPTFTSQPIQRAYLIYEISYARLLSQPATIFHDLYEQAPCPVPERNSFLDHTTLYPPVSPPCTYYVN

SEQ ID NO: 224298 - protein, 63 aa, Glycine max
  Clone ID: PAT_MRT3847_4456C.1.pep
CAIHGNIILWLCFIISLLLYPSICDIIHLCLGSQAKLPHHYFHDYGPSSYFFSNLGLFVCRNF

SEQ ID NO: 224299 - protein, 189 aa, Glycine max
  Clone ID: PAT_MRT3847_44570C.1.pep
MILQHASPTSPPLCPCNLFANSASLKFRRKCTVLLCAVPSDNPNWNADFANSARRTATTFVLKRISNQLEPHTTTTTTTTNDNGVIDSELQATPPVQLGSNFTAFSEDPIVDKLRTQLGVIHPIPSPPINRNVVFLFVFFFFVGVVFDKLWTSRRRNKNNSEDRLRGGVWPQVPTSFSLFLRRITEEGV

SEQ ID NO: 224300 - protein, 64 aa, Glycine max
  Clone ID: PAT_MRT3847_44571C.1.pep
TARSKNLLSFLFTRFGFYFYPHFIHLLPHGWSPSIYKLLELLLCLKIYRGENTIGVDALPACCG

SEQ ID NO: 224301 - protein, 84 aa, Glycine max
  unsure (1)..(84): unsure at all Xaa locations
  Clone ID: PAT_MRT3847_44572C.1.pep
LVLKTRFSLLSLYGDTLCSTDKTRVPYLRPSCLQDLPDRRCWALHKIADSLELPCILISLGRTKTLPXYRKLPPGAVCNFIPFN

SEQ ID NO: 224302 - protein, 148 aa, Glycine max
  Clone ID: PAT_MRT3847_44573C.1.pep
MASKRILKELKDLQKDPPTSCSAGPVAEDMFHWQATIMGPPDSPYAGGVFLVTIHFPPDYPFKPPKVAFRTKVFHPNINSNGSICLDILKEQWSPALTISKVLLSICSLLTDPNPDDPLVPEIAHMYKTDRSKYETTARSWTQKYAMG

SEQ ID NO: 224303 - protein, 155 aa, Glycine max
  Clone ID: PAT_MRT3847_44574C.1.pep
IEREYSSMASKRILKELKDLQKDPPTSCSAGPVAEDMFHWQATIMGPPDSPYAGGVFLVTIHFPPDYPFKPPKVAFRTKVFHPNINSNGSICLDILKEQWSPALTISKVLLSICSLLTDPNPDDPLVPEIAHMYKTDRSKYETTARSWTQKYAMG

SEQ ID NO: 224304 - protein, 44 aa, Glycine max
  Clone ID: PAT_MRT3847_44575C.1.pep
LLWKDMGYLDIMTHWDLEPVGEGKLGVKNRKIGTVLECNWMIEH

SEQ ID NO: 224305 - protein, 69 aa, Glycine max
  unsure (1)..(69): unsure at all Xaa locations
  Clone ID: PAT_MRT3847_44576C.1.pep
RXSAXXSPSHXXPFSQLSRXXXIYVGEGGSRPNDSEXLSXXLLVFREARXRWHSFGHSTGSSLRGLIRH

SEQ ID NO: 224306 - protein, 90 aa, Glycine max
  unsure (1)..(90): unsure at all Xaa locations
  Clone ID: PAT_MRT3847_44577C.1.pep
RXXXRXXLRVESYXQXXXAXXXAXLMLXIXTTFLXAPXGVXGGSXSFSGCIQPLGXCAFESXVXIFRPXXMKMRXQYIPEEXXSTIMNFF

SEQ ID NO: 224307 - protein, 83 aa, Glycine max
  Clone ID: PAT_MRT3847_44578C.1.pep
IVNSTRIAGYGKKVESLITVRNGMFVKSVGVIDIKKLIRLNILKENLHCIYKIVYIESSIMDCDFLLYLNPDYLMYAKYNFFM

SEQ ID NO: 224308 - protein, 94 aa, Glycine max
  Clone ID: PAT_MRT3847_44579C.1.pep
LLLIWHIACKSENDVARRWRVKYNRQTTVYGRSAAFMCNVYLIDARTRYQAKHNCTALQRDKGRTRSLVDWRSSGGGPGVNRKKFDNGLHVIGC

SEQ ID NO: 224309 - protein, 242 aa, Glycine max
  unsure (1)..(242): unsure at all Xaa locations
  Clone ID: PAT_MRT3847_4457C.1.pep
MSLRRCLPSLFSDTEGFAAARIEVEMKVAPIVVFLFRDTEGFASTISQAFRPKPSSSFTRQEDSFELSLEAYGIKHLKASGSVSHFVDDHCFINEVLXKSSFLPTLLVPFLVESSKVKGHSKSLRSDESKPLIFGIKIGQNTDIMQALLNKIQEPPSSLGVQHETFACFLHFVHVMQLPTFFLIGQASQYLDNKSTKQHEILHAIGEILASTTGLQFSEDRVVWNPKKASGESKEPWRALYG

SEQ ID NO: 224310 - protein, 56 aa, Glycine max
  unsure (1)..(56): unsure at all Xaa locations
  Clone ID: PAT_MRT3847_44580C.1.pep
HSXXAGIRYRRAXNGQYDRXXXQXLELCSSXTSSGYAXXXXXINIISFINXXYIXX

SEQ ID NO: 224311 - protein, 93 aa, Glycine max
  unsure (1)..(93): unsure at all Xaa locations
  Clone ID: PAT_MRT3847_44581C.1.pep
MVSGGCSSAIVTXNPMLPALCXDVQAQHVAVILYLLSSTAGSLVLITPTYVIDALSKSGYSVKARAHPVXMRAPDLSLGSIPYGSRVGGLSMV

SEQ ID NO: 224312 - protein, 115 aa, Glycine max
  Clone ID: PAT_MRT3847_44582C.1.pep
GKEIKCMNPNYTEFKFPQIKAHPWHKIFHKRMPPEAVDLVSRLLQYSPNLRCTALDTLTHPFFDELRDPNTRLPNGRFLPPLFNFKSHELKGVPVEILVKLIPEHARKQCPFLGL

SEQ ID NO: 224313 - protein, 106 aa, Glycine max
  Clone ID: PAT_MRT3847_44583C.1.pep
STATFFYHYTLFLWLFMAIYHLTFLTNENNLAPWLILVGYITVLNTIYCKFNLIAFWLGQFMSLLTTKFIQILVCDVHPMFASDFLRFQLTWINKYNKSSHMSSVN

SEQ ID NO: 224314 - protein, 44 aa, Glycine max
  Clone ID: PAT_MRT3847_44584C.1.pep
GFVQQDISHRSMFIIKTFCYNNNHRPMFLINFPILLQQNNLVAS

SEQ ID NO: 224315 - protein, 406 aa, Glycine max
  Clone ID: PAT_MRT3847_44585C.1.pep
MASVGVAPTSSGLRESSGVDRLPEEMNDMRIRDDKEMEATVVDGNGTETGHIIVTTIGGRNGQPKQTISYMAERIVGHGSFGVVFQAKCLETGETVAIKKVLQDKRYKNRELQTMRLLDHPNVVCLKHCFFSTTEKDELYLNLVLEYVPETVNRVIKHYNKLNQRMPLIYVKLYTYQIFRALSYIHRCIGVCHRDIKPQNLLVNPHTHQVKICDFGSAKVLVKGEPNISYICSRYYRAPELIFGATEYTTAIDVWSVGCVLAELMLGQPLFPGESGVDQLVEIIKVLGTPTREEIKCMNPNYTEFKFPQIKAHPWHKIFHKRMPPEAVDLVSRLLQYSPNLRCTALDALTHPFFDELRDPNTRLPNGRFLPPLFNFKSHELKGVPVEILLKLIPEHARKQCPFLGL

SEQ ID NO: 224316 - protein, 128 aa, Glycine max
  Clone ID: PAT_MRT3847_44586C.1.pep
GIQLCCHLFQISIMILAALLTSVVINLGLCFIFFTLYSVLRKQPGNITVYAPRLVSEGKRQEGDQFNLERLLPATTAGWVRKAWETSEEEFLSTAGLDAFVFMRIFVFSLKIFTFGGIVGLLILLPIN

SEQ ID NO: 224317 - protein, 82 aa, Glycine max
  Clone ID: PAT_MRT3847_44587C.1.pep
LGCSGITKLQNMRALHPVLTQASYHYKPCRYQNGLSRVRHLIQRWLRDKVYARLTLLVSDSTGWRLHWMYAKRTTGKMKTAT

SEQ ID NO: 224318 - protein, 103 aa, Glycine max
  Clone ID: PAT_MRT3847_44588C.1.pep
IRFCSFFSLAFALLAIYRAKLTTWKGSRLTNTWFYKEIGAGLLHLPGFRDKKFMKLPPLGGDSYWVFFMRTPQSPCDILTICLFVAYRPPLPNTDEMILGFMA

SEQ ID NO: 224319 - protein, 79 aa, Glycine max
  Clone ID: PAT_MRT3847_44589C.1.pep
HSLNGTKNRYTHCEKSNSLQHTKNLRKEKPILDDYTFCSELKHSEHIGYNLTALFPCMLTNSVSDNQFFAEDSSICKHS

SEQ ID NO: 224320 - protein, 104 aa, Glycine max
  unsure (1)..(104): unsure at all Xaa locations
  Clone ID: PAT_MRT3847_4458C.1.pep
GATHASXLIPYPFKTFPCLPXXLLFFSQPSLSELXNLSVLPNASPRPSPSPLTPNPFPFPPFSSKQRCLRRHRFRCRLASFPMSLCLIMKRTPFSTDTAPASLS

SEQ ID NO: 224321 - protein, 102 aa, Glycine max
  unsure (1)..(102): unsure at all Xaa locations
  Clone ID: PAT_MRT3847_44590C.1.pep
PNFSYSLAISAANLERQACKDEXTDAEKASPSDLMKQALTLHPSITKKLVAKAPSKDHTPTDILKHTFFRTHQTRDPSQEHSINIYSERKYLKXRLPDLQKL

SEQ ID NO: 224322 - protein, 51 aa, Glycine max
  Clone ID: PAT_MRT3847_44591C.1.pep
NSQLMLHRKNTLYHWLVEKIEKKNISLAKATLGGWLFSRGKGCVRNCNCQG

SEQ ID NO: 224323 - protein, 29 aa, Glycine max
  Clone ID: PAT_MRT3847_44592C.1.pep
NSAALDDPGVRMRACYVRALPRVSPTFAS

SEQ ID NO: 224324 - protein, 215 aa, Glycine max
  Clone ID: PAT_MRT3847_44593C.1.pep
APARYPFVFPRVRPRVRRLREDHRRGTAKGLAHVHSVGGPKFTHGNIKSSNVLLNQDNDGCISDFGLAPLMNVPATPSRTAGYRAPEVIEARKHSHKSDVYSFGVLLLEMLTGKAPLQSPGRDDMVDLPRWVQSVVREEWTAEVFDVELMRYQNIEEEMVQMLQIAMACVAKVPDMRPSMEEVVRMIEEIRLSDSENRPSSEENRSKEESTAQTP

SEQ ID NO: 224325 - protein, 131 aa, Glycine max
  Clone ID: PAT_MRT3847_44594C.1.pep
MERSIPEAAECDLSIPIPRGGPIYVPNMVGPSTRVPHFQTCLLSELRNLEAELSEDFSHLDISVDDLKIFTEDDLMDMALKEVFQGRENDENHPPLLDQPNASRFGEKKSNRKRKGTNDSVLESDCIEKVE

SEQ ID NO: 224326 - protein, 639 aa, Glycine max
  unsure (1)..(639): unsure at all Xaa locations
  Clone ID: PAT_MRT3847_44595C.1.pep
MAAGTMATAAGAAVMLYYVLSRRLARKEEDDGEDHGGEVSKSSRSVRRRRISRRPAQAPATLLESIVTLSETIRFTYSETLGKWPIGDLAFGINYFMRKQGNLEPRTVDARSVXLLGLTEKELAKPELLVNTDFSSLLFPSVVKNFDCTDXFFLDDVLIQKPKAGLLKPAFTIIRDTQSKCLLLLIRGTHSIKDTLTAATGAVVPFHHSVLNDGGISNLVLGYAHCGMVAAARWIAKLCTPTLLKALGECPHFKVKIVGHSLGGGTAALLTYILREQKEFSSSTCVTFAPAACMTWELAESGKHFITTIINGSDLVPTFSTSSIDDLRSEVTASSWLNDLRVEVEHTKVLNVVYRSATALGSRLPSISSAKARVAGAGAILWPVTSSTQVVMKRAQSVAEAVVRTRSSLSSWSCMSARRRNVGSSVNSKTDDLTETSLISERSTESRMTEEVVREPMLKDENTSSSGGSGHDDTDEEEQLIPANQDITASAVDDFTEGQLWYELEKELQKQDNTMNIDAQEEEAAAAKEITEEENQLVDAAAECSSSSITTADNVDSHRFYPPGRIMHIVSVPSLDESNSNSDDPLEEHVGLYETPRELYSKLRLSRTMINDHYMPMYKKMMELLIRELEKDSSCNILD

SEQ ID NO: 224327 - protein, 51 aa, Glycine max
  Clone ID: PAT_MRT3847_44596C.1.pep
MRTIQSGMEEFLNKWIWGLRKYHSLKNNMSLMVRKKDLMLSPYLAIAFTRN

SEQ ID NO: 224328 - protein, 59 aa, Glycine max
  Clone ID: PAT_MRT3847_44597C.1.pep
VGIRSALVEKDLGAFIYAGTGIVEGSSPYLEWDELELKTSQFTKLLKLDLPRRQKVDCK

SEQ ID NO: 224329 - protein, 65 aa, Glycine max
  Clone ID: PAT_MRT3847_44598C.1.pep
MSDDVGVLDIWPSPFDMTVNTALAEKDRNYDYREEDLRIKRPILLHKNPVDMKKAVPIHNGNPHS

SEQ ID NO: 224330 - protein, 63 aa, Glycine max
  Clone ID: PAT_MRT3847_44599C.1.pep
IGFGDENREIIFIFVYPVALLGFVRPGSGIKRGFLICEKLVFLLNKGHGICLASFLVGSGRIY

SEQ ID NO: 224331 - protein, 53 aa, Glycine max
  Clone ID: PAT_MRT3847_4459C.1.pep
SNPMSLNGYLDADLVFETLCWWMSHNMHLAPKTAEVLISQLNDPIITPAWLIQ

SEQ ID NO: 224332 - protein, 81 aa, Glycine max
  Clone ID: PAT_MRT3847_445C.1.pep
VSNSMNSVAMTVASMLFAGGCRILAVPARARAIRIPRAALSSHHNKHAPSWGCRSSHNSNTALAGEAEFSTTDAGNLTATS

SEQ ID NO: 224333 - protein, 107 aa, Glycine max
  unsure (1)..(107): unsure at all Xaa locations
  Clone ID: PAT_MRT3847_44600C.1.pep
KPTRNNKARHPTPKHKQTGGTRNENDRQDTDTHQERHEANXSTNTTPPQPTRNRTKKHHRGARRRPRGKDAXETRDTARHGARTGHGTTQTXEEXAXAXDRAAHKKR

SEQ ID NO: 224334 - protein, 458 aa, Glycine max
  Clone ID: PAT_MRT3847_44601C.1.pep
MASRVVSVLVIAMMLFAMNCNCTSVGHMPSTKEEGHDFQEAKAKTTQTANKAMETGKDGKEAAESWTEWAKEKLTEGLGFKHDQESTTKKVSDYAGDAAQKSKDYAGDTAQKTKDYAGDTAQKTKDYAGDTAQTSKDYAGDAAQKSKGYVGDAAQKTKEYVGDAAQKTMDYATDAAQKTKDYATQKTKDYASDATDAAKKTKDYAAQKTKDYASDATDAAKKTKDYAAQKTKDYASGGAQKTKDYASGAAQKTKDYASDAAQRTKDHASDGAQKSKEYAGDVAQNAKDYAQKSKDYAGDAVQNIKDYANDAAHKSKDYAGDASHKSKEASDYASETAQKTKDYVGDAAQKSKEASEYASDAAQRTKEYAGDATKRSKEASDHANDMARKTKDYASDTAQRTKEKLQDIASEAGQYSTEKAREMKDAAAEKASDIAKAAKQKSQELKDKLGGQHRDAEL

SEQ ID NO: 224335 - protein, 53 aa, Glycine max
  Clone ID: PAT_MRT3847_44602C.1.pep
RGKWGVWCFVLLFCIFGCRSTTQQRHFPTNISTPRRKQLIRFAAESPLLYIRR

SEQ ID NO: 224336 - protein, 473 aa, Glycine max
  Clone ID: PAT_MRT3847_44603C.1.pep
MASKVVSVLVIAMMLFAMNCNCTSVGHMPSTKEEGHDFQESKAKTTQTANKAMETGKEGQEAAESWTEWAKEKLSEGLGFKHDQESKESTTNKVSDYATDTAQKSKDYATDTAQKSKDYAGDAAQKSKDYAGDAAQKTKDYASDTAQTSKDYAGDAAQKSKGYVGDAAQKTKEYVGDAAQKTKDYATDAAQKTKDYATQKTKDYASDATDAAKKTKDYAAQKTKDYASEASDVAQNTKDYAAQKTKDYASGGAQKTKDYASGGAQKTKDYASDAAQKTKDYASDGAQKSKEYAGDVALNAKDYAQKSKDYAGDAAQNVKDYASDAVQKRKEYSGDASHKSKEASDYASETAKKTKDYVGDAAQRSKGAAEYASDAAQRTKEYAGDATKRSKEASNDHANDMAQKTKDYASDTAQRTKEKLQDIASEAGQYSAEKAREMKDAAAEKASDIAKAAKQKSQEVKEKLGGQHRDAEL

SEQ ID NO: 224337 - protein, 32 aa, Glycine max
  Clone ID: PAT_MRT3847_44604C.1.pep
SRYTLPRIYFKVSLMSKRMYIFLVTIGLLTQL

SEQ ID NO: 224338 - protein, 84 aa, Glycine max
  unsure (1)..(84): unsure at all Xaa locations
  Clone ID: PAT_MRT3847_44605C.1.pep
KAHFNHTTKNSSPRPIKNIHILNTKIRPFHLXCVPLNTLLGNCVGFARLNKVSKFHLQTIFSKGVGFLTKQTPFLWLSSGFPPH

SEQ ID NO: 224339 - protein, 47 aa, Glycine max
  Clone ID: PAT_MRT3847_44606C.1.pep
FLDMSVCRLAMMSSSGGCTQRDTIAHGGRLPNINPDLLSIKTVKEAM

SEQ ID NO: 224340 - protein, 44 aa, Glycine max
  Clone ID: PAT_MRT3847_44607C.1.pep
DDQLSRGKLELRRLTLMSGRTMTRIYDQSKKGKAFASSLVQKVD

SEQ ID NO: 224341 - protein, 86 aa, Glycine max
  unsure (1)..(86): unsure at all Xaa locations
  Clone ID: PAT_MRT3847_44608C.1.pep
PRSXASDARSRSRRAIVFLDESGFAFVVVXISCTASTSRVAASRLGAWIVGAFSFSFIACRMRQTSLRRVGASAISSPHLHCMDVP

SEQ ID NO: 224342 - protein, 67 aa, Glycine max
  Clone ID: PAT_MRT3847_44609C.1.pep
IIECKLIIQTKHFHTNNFVLRYKYFLHKLITMKPLIQYSMLSRKYHSSSQGNQIKNTRVKQIKRKSQ

SEQ ID NO: 224343 - protein, 34 aa, Glycine max
  Clone ID: PAT_MRT3847_4460C.1.pep
AQKQLYQDNSSAPETLAAVTRLAEGASAMISYYA

SEQ ID NO: 224344 - protein, 162 aa, Glycine max
  Clone ID: PAT_MRT3847_44610C.1.pep
ELISTECLFEKALDELEPEEAVAIMSAFVFQQKNTSEPSLTPKLSEAKHRLYQTAIRLGELQAHFNLPINPAEYAQENLKFGLVEVVYEWAKGTPFADICELTDVPEGLIVRTIVRLDETCREFKNAAAIMGNSALCKKMEIASNAIKRDIVFAASLYITGV

SEQ ID NO: 224345 - protein, 338 aa, Glycine max
  unsure (1)..(338): unsure at all Xaa locations
  Clone ID: PAT_MRT3847_44611C.1.pep
GSTWMELSVSGTLPHPRCGHTATMVEKRLLVYGGRGGGGPIMGDLWALKGLIEEGXENEAPGWTQLKLPGQAPSPRCGHTVTSGGHYLLMFGGHGTGGWLSRYDIYYNDCIILDRVSAQWKRLSIGNEPPPARAYHSMSIIGSRYLLIGGFDGKSTYGDPWWLVPQEDPIASRLTASPPKNIRESKDVTLLNDDFQPQFKESQTEKFPFSELQRRLQISVSESNSRLHIVNELEDKELLELASRLAGENVSTNSLAIEALREHWRKSESNMVKLKELGPLLRDYQRLIYRQYLERSASAQQPGFGEQVMHQLYHVKNATQLRMDDIPKLLAEYKQLPI

SEQ ID NO: 224346 - protein, 693 aa, Glycine max
  Clone ID: PAT_MRT3847_44612C.1.pep
AGTNYASDLSSSSSSATTTLPVLAFLLLSTAISAAPIIGLDSFLTHQSRIDPQASNDSFLSLPSSIKTPLSHSLDFSSNSLLSLSLPISLSLHLLGDFPSDTPSLLSAFLSAATTTTTHFHVITPFDSHPLSHTLSLSHTLHLLVTPSQTLTSLTNSLSQTLTSHLHSTPSSLRSPLLTIPHSSIDQIIQNHFITQNPNPNPNQVHLYLLNLPPASSSNSKAYAYSYSPGDSSAAVTKCSGTFFTSSHRYFWIDLRAGPVDYGPAISGDGVIPRGEFHPLAALHGRPKSNKAFAADLASLVWSAYHVFLAPSLRISVPFEKSLVIQFIHIHGGNDNKDLAGLDWKSIEKSFRFESKSSGLLLGDQSLSFRQHEIRYSECSICSFAISRSINSYTSRFLFDNYTLIVSEYLDSKRLHQILSDSGDELRKLAGVLEEDFGRVVPVYVFDLDYTSLLLLDRYHQSVAFKDMVIAVRTRNTQTVSDYSCNGRHVFTQTRELERPIVGSILQSMWGVSPTHLNWSPQHNETLVDYTWSMGQTPFGPFSEMLSLSFVQKDAARRNVLLTSLNYSITSAIDVLQSVETHGGAKNLLKQKQHVEFVQRWNLFKYKLNKAMSALSHLDFEMALFYLRSSDHDLYAIHSIVYHASQEIEASLVCFRDPPFPWGSVLLSASAFLSVSYIYARRDKLFRNKRKQF

SEQ ID NO: 224347 - protein, 99 aa, Glycine max
  Clone ID: PAT_MRT3847_44613C.1.pep
QIIFGIRLNDGEWFWNRLHHGNWLWNKSLKLCFIIMSCRLGFANCSFKTLPSVLTSFLEISVARTKGAQLKLASSSKGTQKRQSAQGGGEILLIEKNNN

SEQ ID NO: 224348 - protein, 208 aa, Glycine max
  Clone ID: PAT_MRT3847_44614C.1.pep
MEGVILRRVIPSDNSCLFNAVGYVMDHDKKKAAELRQVIAATVASDPQKYCEAFLGKPNAEYCNWILDSEKWGGAIELSILADYYGREIAAYDIQTTRCDLYGQESNYSERVMLIYDGLHYDALVMSPFEEAPEEFDQTIFAVQKNRSIGPVEGLALTFVKDQQRKRSYTDTSNFTLRCGVCQIGVIGEKEAVEHAQATGHVNFQEYR

SEQ ID NO: 224349 - protein, 42 aa, Glycine max
  Clone ID: PAT_MRT3847_44615C.1.pep
YRVSKKEDYVNLSVSQMRGQVLSPPIPANAHLECFRIKLGLP

SEQ ID NO: 224350 - protein, 272 aa, Glycine max
  Clone ID: PAT_MRT3847_44616C.1.pep
ITPTKSAREWKKLLAKVPKENISKFLLDSFGTEISEDLMENEEFDFNLESGLIPTEKPSNLQSHTQESYPQQAHGSTNSIPPVLPQQNSSNQIPPHMMPPVLPQQNSSNQIPPHMMPPVLPQQNSSNQIPPHVMPPVLPQQNSPTQFPPNAMTPENSAHLGYYPPPVPHIPNYNPYPSPISDPNFPHYYGNHPNQNFSYSQFNNPYVKPIKISIPEFNRKDPMSFLRSFELIAKMENWNDEIKSRQLSTALLKSQDLWFQNNFEHLSRDDLQ

SEQ ID NO: 224351 - protein, 95 aa, Glycine max
  Clone ID: PAT_MRT3847_44617C.1.pep
VVLKVCLVLLFLVGGTTIASLRLSDLGLLMKSDHHQHSNDYDFSKPCCDQCACTNSNPPYCHCSYVRLNSIHLSSIMIIIAYLYIDQDILCIDIT

SEQ ID NO: 224352 - protein, 47 aa, Glycine max
  Clone ID: PAT_MRT3847_44618C.1.pep
PAIFFEQLRGNPKQKVTLLLRYESFYTKPKLRSSCYSTLWALLNLSV

SEQ ID NO: 224353 - protein, 99 aa, Glycine max
  Clone ID: PAT_MRT3847_44619C.1.pep
FGLIYVLGKIQITKRKRLRVSRPPGLRVSSFRRLASLPSRSKGITDLRTLPYRALLPAAPAHAVRLRLLIHFRRSKKFLQKDVKYEYSSRLWGPTTTHS

SEQ ID NO: 224354 - protein, 66 aa, Glycine max
  Clone ID: PAT_MRT3847_4461C.1.pep
FSTLTNFLSVLTPSLIMSTKNPLLTRSNTGPEIIPRATIKIQCCPPLFLFDFQTVCCLLYFLIAVH

SEQ ID NO: 224355 - protein, 69 aa, Glycine max
  Clone ID: PAT_MRT3847_44620C.1.pep
AKKIDTNAEYIRKDKVIKPVGLDEQTPIGNMMRHVTKILHGFSVPKGKFKVHFYVQTFVCAGWGKCQLS

SEQ ID NO: 224356 - protein, 47 aa, Glycine max
  Clone ID: PAT_MRT3847_44621C.1.pep
VCHQAILLLACVQRLLLRESACANLAFAPLSIAMLRDDCSCAALSIH

SEQ ID NO: 224357 - protein, 306 aa, Glycine max
  Clone ID: PAT_MRT3847_44622C.1.pep
MAICSSLSSSSSSSSSSTSSFGSSSTAKAWIIHGIVAGVAIAAAVGARAYMTRFSKFRSRVVGIIPARFASSRFQGKPLVQILGKPMIQRTWERAKLAATLDHIVVATDDEKIADCCRQFGADVIMTSESCRNGTERCNEALQKLGKKYDIVVNIQGDEPLIEPEIIDGVVKALQAAPDAVFSTAVTSLKPEDAHDPNRVKCVVDNRGYAIYFSRGLIPFNKSGMVNQQFPYLLHLGIQSYDAKFLNIYPDLQPTPLQLEEDLEQLKVLENGYKMKVIKVGHEAHGVDTPEDVGKIESLMRERNLS

SEQ ID NO: 224358 - protein, 69 aa, Glycine max
  Clone ID: PAT_MRT3847_44623C.1.pep
AYPNSKTFIYPWHVFNTQIQIKTGRDCRLHSGGYRLTRKQLASSYGGTIQWWYPKHSPPPDLKTTEKGP

SEQ ID NO: 224359 - protein, 57 aa, Glycine max
  Clone ID: PAT_MRT3847_44624C.1.pep
TTQTQTKSNCISSNSSTSHITHTQPHTAKPTPYFIINLPNLLINPQTHTSNTIPINK

SEQ ID NO: 224360 - protein, 34 aa, Glycine max
  Clone ID: PAT_MRT3847_44625C.1.pep
VPLSSLLKAEPLWWHHPTGPIRRPFARGPFRRPF

SEQ ID NO: 224361 - protein, 32 aa, Glycine max
  Clone ID: PAT_MRT3847_44626C.1.pep
ALRVMHYWDLSKKFVDVLYLIEMFKKLDGFCN

SEQ ID NO: 224362 - protein, 82 aa, Glycine max
  Clone ID: PAT_MRT3847_44627C.1.pep
ATSPSTAFLHLTPKINFILWFISIAIVATIFTTYLFRIILHFEAVRREYQHPICVNFFFAPWIALLFLALGVPPSVTKDLHQ

SEQ ID NO: 224363 - protein, 39 aa, Glycine max
  unsure (1)..(39): unsure at all Xaa locations
  Clone ID: PAT_MRT3847_44628C.1.pep
AGHPSCPFYYSXHFHMLATNIYILRPYASKASICSIVMS

SEQ ID NO: 224364 - protein, 64 aa, Glycine max
  Clone ID: PAT_MRT3847_44629C.1.pep
EYQSEKDGETQILQSGAQKQEPPRAKSFQMKYSFASKQQRKGIELDHSGVEEYLTYGMIFLKHT

SEQ ID NO: 224365 - protein, 522 aa, Glycine max
  Clone ID: PAT_MRT3847_4462C.1.pep
RRLGGCCKGKMPKNAHAHFILGLMYQRLSQPQKAVLAYEKAEEILLRPEAEIDRPELLSLVQIHHAQCLILESSSENSSDKELEPDELEEILSKLKESVKSDIRQTAVWNTLGFILLKTGRVKSAVSVLSSLLSIAPENYDCLGNLGIAYLKIGNLELSAKCFQELILKDQNHPAALVNYAALLLCKYASVVAGPGASAAEGAMTDQIMSANVAKECLLAAVKADSKSAHVWANLACAFSISGDHRSSSKCLEKAAKLEPHCMSTRYAVAFHRIKEPERSQDPSELLSCAGNEMASIIRDGDSSLVEIPIAWSGLAMVHKAQHEIAAAYESEQNGLREVEERAVCSLKQAIAEDPNDAVQWHQLGIHSLCARQFKTSQKYLKAAVACDKDCSYAWATLGVSLQLSEEPSQAEEVYKQALSLATTKQAHVILSNLGILYRHQKQYQRAKAMFTKSLELQPGYAPAFNNLGLVFVAEGLLEEAKYCFDKALQSDPLLDAAKSNLIKVVAMSKLCKGLSSCGLKE

SEQ ID NO: 224366 - protein, 95 aa, Glycine max
  Clone ID: PAT_MRT3847_44630C.1.pep
PPVGIPPPGQKKKGGVPHPGEIPPPPAKPFEREGFFQKNKEGFNLLGPMKGTPPKSGKGTSSRSESFDLRDCFFAKRISLSFSFKFWAKLGGGII

SEQ ID NO: 224367 - protein, 58 aa, Glycine max
  unsure (1)..(58): unsure at all Xaa locations
  Clone ID: PAT_MRT3847_44631C.1.pep
NFLISGAATKFRTXNTDEEDGYADVILGTDEIAVSASPANKSHALCNIDSIPSIFFIG

SEQ ID NO: 224368 - protein, 319 aa, Glycine max
  Clone ID: PAT_MRT3847_44632C.1.pep
MEGGVSYARMPRVKIRELKDDYAKFELRDTDASIANALRRVMIAEVPTVAIDLVEIEVNSSVLNDEFIAHRLGLIPLTSERAMSMRFSRDCDACDGDGQCEFCSVEFHLRVKCMTDQTLDVTSKDLYSSDPTVSPVDFSDPSATDSDNNRGIIIVKLRRGQELKLRAIARKGIGKDHAKWSPAATVTFMYEPEIHINEDLMETLTLEEKREWVDSSPTRVFEIDPVTQQVMVVDAEAYTYDDEVLKKAEAMGKPGLVEIIARQDSFIFTVESTGAVKASQLVLNAIEILKQKLDAVRLSEDTVEADDQFGELGAHMRGG

SEQ ID NO: 224369 - protein, 91 aa, Glycine max
  Clone ID: PAT_MRT3847_44633C.1.pep
QVMVVDAEAYTYDDEVLKKAEAMGKPGLVEIIARQDSFIFTVESTGAVKASQLVLNAIEILKQKLDAVRLSEDTVEADDQFGELGAHMRGG

SEQ ID NO: 224370 - protein, 36 aa, Glycine max
  Clone ID: PAT_MRT3847_44634C.1.pep
KLGFLGPPPPPPPPPPPPPPPPPPPPPPPPPPPPPP

SEQ ID NO: 224371 - protein, 118 aa, Glycine max
  Clone ID: PAT_MRT3847_44635C.1.pep
MEGGVSYARMPRVKIRELKDDYAKFELRDTDASIANALRRVMIAEVPTVAIDLVEIEVNSSVLNDEFIAHRLGLIPLTSERAMSMRFSRDCDACDGDGQCEFCSVEFHLRVKCMTDQT

SEQ ID NO: 224372 - protein, 50 aa, Glycine max
  unsure (1)..(50): unsure at all Xaa locations
  Clone ID: PAT_MRT3847_44636C.1.pep
EVATKMDVKAMPTFLRLNDRAAVDNVVGANPXEINNRIDVAAESTRVSLA

SEQ ID NO: 224373 - protein, 32 aa, Glycine max
  Clone ID: PAT_MRT3847_44637C.1.pep
KKFIDSFYFFIFFSFKCLLRNYLVETSNECFK

SEQ ID NO: 224374 - protein, 57 aa, Glycine max
  Clone ID: PAT_MRT3847_44638C.1.pep
VCVYIYISSDLRNRHLNILTFHHQSSVVFRWHWPGFQKSTIPIFHSGFASWLSILCF

SEQ ID NO: 224375 - protein, 192 aa, Glycine max
  Clone ID: PAT_MRT3847_44639C.1.pep
ELLGHPRVMKNLQDELDNVVGRDKMVEENDLAKLSYLDIVIKETLRLYPPGPLVPRESTEDAMVQGYFLKKKSRIIINIWAMGRDSKIWSDNAEVFYPERFINKNLDFRGLDLQYIPFGFGRRGCPGIHLGLATVKIVVAQLVHCFSWELPGGMTPGELDMSEKFGLSIPRVKHLIAVPKYRLFREACNESK

SEQ ID NO: 224376 - protein, 49 aa, Glycine max
  Clone ID: PAT_MRT3847_4463C.1.pep
ITWPPFNNYLPGKTRALPNLIALQKIPFWPVGLIAKGPAPFAFPKSGSA

SEQ ID NO: 224377 - protein, 104 aa, Glycine max
  unsure (1)..(104): unsure at all Xaa locations
  Clone ID: PAT_MRT3847_44640C.1.pep
XTQVGCEDQSLPFTFLHSLPLCLWVWGGGGAAAPPPPTGDPRGGRENKKRTGAMRWEGEAFCLESERRTTHPRLGGGGGDRSAATATQSTRDKARRALDAPXCP

SEQ ID NO: 224378 - protein, 55 aa, Glycine max
  Clone ID: PAT_MRT3847_44641C.1.pep
ESKFGFLKRLLLHFASPSLSHTLTHSGGSFLPTDSRNPNIYGSYSVERIFRVRLS

SEQ ID NO: 224379 - protein, 127 aa, Glycine max
  unsure (1)..(127): unsure at all Xaa locations
  Clone ID: PAT_MRT3847_44642C.1.pep
MSFPQSLILTSHSSRNQTSLSSMNTQNLIPFILLLFIPFSVSFSTTDNFLLSCGSHSNASLFNRVFVGDSTDSGSTFLSSGDSISLTYQKPPQNLPTLYHTARLFRSTXRYRFNMKKNGTHLVRFHF

SEQ ID NO: 224380 - protein, 265 aa, Glycine max
  Clone ID: PAT_MRT3847_44643C.1.pep
PRVRDGSAEVAMLLAEGEGAVRKKRRPKRGEDFKFTEALVKADYWLLFFVYFVGVGTGVTVLNNLAQIGIAQGMEDTTILLSLFSFFNFVGRLGGGVVSEYFVRTKTIPRTIWMTCTQIIMIFLYLVFAYAIKGTLYPAIAILGICYGVQFSIVIPTVSELFGLKDFGLLSNFMALGNPLGAFLFSALLAGHIYDNEAAKQHGVGLIASSVACMGPNCFKLTFLTLAGVCVAGTISSIILTVRIKPVYQMLYAGGSFKLPQTSGQ

SEQ ID NO: 224381 - protein, 218 aa, Glycine max
  unsure (1)..(218): unsure at all Xaa locations
  Clone ID: PAT_MRT3847_44644C.1.pep
MFTRIFGKPKPEVNTLTALDELNDKLEMLEKKEKVLLKKAAAEVEKAKEFTRAKNKRAAIQCLKRKRLYEQQIEQLGNFQLRIHDQMIMLEGAKATTETVDALRTGAAAMRAMQKETNIDDVDKTMDEINEQTENMKQIQEALSTPIXAAADFDEDELEAELENLEGAELEEQLLQPATTAPAAPVQVPAGQQPTRPVPAKRTPEEDELAALQAEMAL

SEQ ID NO: 224382 - protein, 126 aa, Glycine max
  Clone ID: PAT_MRT3847_44645C.1.pep
GCLSAVVSSSLQSPGPAPAPEQRHGPARSTEFSQEPGLSALRRQALGRSFLCKLEPASTAHLQATSSARPAVVLMSCLTVVRSGCACFGAVVPAVAWCSIGRFGPRATPAGWCHFDCCWPGATLAL

SEQ ID NO: 224383 - protein, 130 aa, Glycine max
  Clone ID: PAT_MRT3847_44646C.1.pep
QDRLSSVASLVSDEMHLRPQYTSSEMDRPASCRTQRSLPFINPVPGEACLAISNFWLCTHQEASSSFCSSSIIGDGVVIIIVIKFVPLKHVASLSPPLTILFPIDVNVVGNRDPFPLTSISSFRSVRTSS

SEQ ID NO: 224384 - protein, 77 aa, Glycine max
  unsure (1)..(77): unsure at all Xaa locations
  Clone ID: PAT_MRT3847_44647C.1.pep
RGQICQKGYTPGYGASPLRKPLIXLLGASLAEKILAKEIKEGVFVKRNPVFNGKVIGFNGRRGAPEPLQKTLPVKNG

SEQ ID NO: 224385 - protein, 78 aa, Glycine max
  Clone ID: PAT_MRT3847_44648C.1.pep
TRVRTTLPVTVTVEHTLTALRNMRLHRCEKTVLATQLAEFTSRRLLKEVNIKLGSVSAELSQRQQSVELLKIEYWRRT

SEQ ID NO: 224386 - protein, 213 aa, Glycine max
  Clone ID: PAT_MRT3847_44649C.1.pep
LGIRLEEEPSAPAEKKEGPKRRGAAKKKSSAIVLDDSDSDNEVHNVDDDDDDEDFEIMQPVAPGRKKGGRKPAAQNAKKAPAAAARKRNVGGKQSQFLGQKLITDMLESTGISPEKKVRKMRASPFNKKSSSVLGRVAAADKDESVSKDLSGGSDASGSSPSITEEVVEIAPPAARARPQRANRRQTTYVLSESESDNDSDNEDYSDFEEDED

SEQ ID NO: 224387 - protein, 36 aa, Glycine max
  Clone ID: PAT_MRT3847_4464C.1.pep
MASHRQSYEAGQPNGRTDENTNQTMGNIWDKAQTAK

SEQ ID NO: 224388 - protein, 76 aa, Glycine max
  unsure (1)..(76): unsure at all Xaa locations
  Clone ID: PAT_MRT3847_44650C.1.pep
NQVSDKNKRAVKLESHEKKKVXTSVKXALEWMDNNQSVHKKEYVXKLKQVEAVCTPNTRPVYHRTGGAPGGGASAE

SEQ ID NO: 224389 - protein, 97 aa, Glycine max
  Clone ID: PAT_MRT3847_44651C.1.pep
GPEHPGCPRERSPPDRQQTAQEGARHKKARQAPNRTTDREPEREKKKKKGGPPKGPKTTDPSQRPQNPPIGTPKPNPRAAEQPATGPGKPRAPPNPS

SEQ ID NO: 224390 - protein, 79 aa, Glycine max
  unsure (1)..(79): unsure at all Xaa locations
  Clone ID: PAT_MRT3847_44652C.1.pep
VNSIFKRLTQQILSLCECVYTHINPRLCFKQIKHILLELTNNLKQTHHCIKDSYSTKYDGRXIYARTVSTLHISMTVSF

SEQ ID NO: 224391 - protein, 89 aa, Glycine max
  Clone ID: PAT_MRT3847_44653C.1.pep
AFFHGLFSKPGRPRSHPHSNSDYENDAYTAPYEDAKTTHSTDLAGVHARLMALLLKHHSPYNSDTPIEQNAAKLYPCICGNTPNAQCFL

SEQ ID NO: 224392 - protein, 103 aa, Glycine max
  Clone ID: PAT_MRT3847_44654C.1.pep
LESRATVPGLQMLTKQLPMAFLHIFSLMRNNMHVEKTYLKSSFIFFQIKSLFNNLYMLLEWLHFCSPLYFVVVEIVSLLNSKLFLFLISRYLKYYFCRVCTGP

SEQ ID NO: 224393 - protein, 128 aa, Glycine max
  Clone ID: PAT_MRT3847_44655C.1.pep
VNVHIVYGACITIQFVTNVIIHGLHIHDCKVTGNAMVRSSPSHYGWRTLADGDGISIFGSSHIWIDHNSLSNCADGLVDAVMGSTAITISNNYFTHHNEVMLLGHSDSYVRDKQMQVTIAYNHFGEGL

SEQ ID NO: 224394 - protein, 104 aa, Glycine max
  unsure (1)..(104): unsure at all Xaa locations
  Clone ID: PAT_MRT3847_44656C.1.pep
EGWEKLTFPQGTYRRVKRMPLSVGGGSGAQNAILMNMPNAVFSMGTXNFNGDLVFEQPKKTXPTLNAQLNFFIAYANXLADDTINXEALTHKLSQHGEIQDEDG

SEQ ID NO: 224395 - protein, 61 aa, Glycine max
  Clone ID: PAT_MRT3847_44657C.1.pep
DSFCLDLFRTGIVEGCLSLVVVSICFCDKNEEPWLGYVITPCTTIKPLMKISIGRVDARVV

SEQ ID NO: 224396 - protein, 75 aa, Glycine max
  unsure (1)..(75): unsure at all Xaa locations
  Clone ID: PAT_MRT3847_44658C.1.pep
KCRNKNQRACSGIIHKIGETXHVGGHKKEEEHKGXHHAGEYXGEHHGEHSTEYKGDPSGEHXAWRPCETQSTKGS

SEQ ID NO: 224397 - protein, 46 aa, Glycine max
  Clone ID: PAT_MRT3847_44659C.1.pep
IPAFPVTYICQSFAASPSQKKKTYKTKLKDPGSTVLHYYCYYLLKF

SEQ ID NO: 224398 - protein, 68 aa, Glycine max
  Clone ID: PAT_MRT3847_4465C.1.pep
PPFFFFLGQNPIFGFLIRQKQIAHKFPKKNMLIHPNLVPYPKTQQDVFPLTGPTHWNRISREFKIKKG

SEQ ID NO: 224399 - protein, 82 aa, Glycine max
  Clone ID: PAT_MRT3847_44660C.1.pep
TAARRRQKGVMLIMSTRVRHYSLQRERGRTHIAETQHARDGERDLPRYRRPTFLRISITPFVETNTTTRHFTVMRIDVSTLC

SEQ ID NO: 224400 - protein, 83 aa, Glycine max
  Clone ID: PAT_MRT3847_44661C.1.pep
SKRCIRLAYLLVPWRIQDRQAGASVEGTRVFDHLSSFDATWGLSSSPDPGHKAEWVRGLKCCSMVSVNETPGSVRVKWKWKRA

SEQ ID NO: 224401 - protein, 60 aa, Glycine max
  Clone ID: PAT_MRT3847_44662C.1.pep
YGCPLYIFFAFYIMCLFVLLKKEATTFTGRSCYPTPKNWPEKVFQAGTEPWPLSEELQRK

SEQ ID NO: 224402 - protein, 471 aa, Glycine max
  Clone ID: PAT_MRT3847_44663C.1.pep
MDHSVSVSSNKPLHVVMFPWLAMGHVYPCFEVSKILAQKGHYVTLVSTPKIIDRLPKLPQTLSPFVKLTKLLLSPHIDKNHLPQDADSTMDIPSNKLYYLKLAYDALQEPVFEVLKTSNPDWVFYDFAASWIPQLAKTLKIHSAYFSPCPAWTICFFDTPKQQLGDAAAANRSNPEDYYGPPKWVPFPTKIGLRPYEVRKLLEDIKVNETGASPVFDLNTANSGCDMFVIRSSRDLEQEWLDYLAEFYHKPVVPVGLLPPLRGSDEEDNSPDWLQIKAWLDTQKGSSVVYIAFGSEVKLSQENLNELALGIELSGLSFFWVLRKGSVEFLREGFEDRTKDRGVVWKTWAPQPKILAHASVGGCLTHCGSGSMIENLIFGHVLVMLPFLLDQALYSRVMEEKKVGIEIPRNEQDGSFTRSSVAKALRLAMVEEEGSAYRNNAKELGKKFSNKELDDQYIEDFIASLHNHKHT

SEQ ID NO: 224403 - protein, 58 aa, Glycine max
  Clone ID: PAT_MRT3847_44664C.1.pep
CLGQRKHCLTLLDYKYASCSSHLWHRECTVFPFSPPMQYDHKDVQAACPSLDCVARRN

SEQ ID NO: 224404 - protein, 168 aa, Glycine max
  unsure (1)..(168): unsure at all Xaa locations
  Clone ID: PAT_MRT3847_44665C.1.pep
NLMIYPGYVPREGIEPILLHYGLPFSVGNWSFNKLAHHDDGIVYECNQLFPEPPYPKEVRQLELDPNRRRGLFLSLECINIINEGLLLQHAANGCPKPTWSKYLSFPQSKAYADLTHPKYVNCYTLQMMEDIKEEHVDDGAGKPHPKIHTIFSTECTPYFDWQTVXLM

SEQ ID NO: 224405 - protein, 50 aa, Glycine max
  Clone ID: PAT_MRT3847_44666C.1.pep
LSRYYGGHPSTPVYYTVTDSILAPRGNRLKSHIYPVLNELWCPMQPIGQT

SEQ ID NO: 224406 - protein, 218 aa, Glycine max
  Clone ID: PAT_MRT3847_44667C.1.pep
MMKALTSSCSKAMVETLGPFSPRVPLCVSDRPEFCFTLRSKNEKKGWNLLLLKLVRNNDLYPVHAVPPKDQVDLETVEPQAQQSEQTNESKFVRVSFQLEKTCNFGEQFLIVGGDPVLGSWDPLEALPMTWSEGHVWAVELDMPAGQTFQYKFILKGEGGDIIWQPGSDRLIHTWETMNRIVVLEDWENVELQEITEEDQLAEPNEEPQVDFEVPTLA

SEQ ID NO: 224407 - protein, 65 aa, Glycine max
  Clone ID: PAT_MRT3847_44668C.1.pep
HNNFTLLFSLAIYIFVLHIFIGYSHTATLLSLIKAFSSYSNTTPVQSKSDHHSKKNFHLKPQHSQ

SEQ ID NO: 224408 - protein, 235 aa, Glycine max
  unsure (1)..(235): unsure at all Xaa locations
  Clone ID: PAT_MRT3847_44669C.1.pep
MIMEESSVHEIKTPLLSSNKEEDEVGSSTSHRQQNEENSPIKQVALTVPTTDDPSLPVLTFRMWVLGTLSCVLLSFLNQFFWYRIQPLTITAISAQIAVVPLGQLMAATITKRVFFRGTRWEFTLNPGPFNVKEHVLITIFANSGAGTVYAIHVVTAVKIFYHKHISFFVSLLVVITTQVLGFXGWAGIFRRYLVEPAAXMWWPANLVXQVSLFRALHEKDERPKGGLTRIAVLS

SEQ ID NO: 224409 - protein, 144 aa, Glycine max
  unsure (1)..(144): unsure at all Xaa locations
  Clone ID: PAT_MRT3847_4466C.1.pep
NVTYVRSYLSSGFYSGTLRHCCRSFCRRVLFRKITSLVPAVLTKGSCFELEERACSYAMLVMRTETCTVDRVAKERMERYEIVDNVVAAIAGIVDAVPNKWCTVRSLHXQLLESLAVPVYQTVPDVKLKIDGSKAEAKKNENDT

SEQ ID NO: 224410 - protein, 67 aa, Glycine max
  Clone ID: PAT_MRT3847_44670C.1.pep
SFLESHPENLPFPLILNPKGSSGRLPPMFCSPPDSSFVYSPFFFKKKENPPPNKKLNKLGPLFLFSA

SEQ ID NO: 224411 - protein, 88 aa, Glycine max
  Clone ID: PAT_MRT3847_44671C.1.pep
NKISKAFPFSANFTGPSCEKKSFIESHPENLPFPRILNPKGSSGMLLTMFCSPPDSRWVYSPFFFKKKENPPPNKKLNKWGPLFFFSA

SEQ ID NO: 224412 - protein, 38 aa, Glycine max
  Clone ID: PAT_MRT3847_44672C.1.pep
LCCALTKNVNHGSSRLNTAHAVRPTRTRLTRTSPQRSA

SEQ ID NO: 224413 - protein, 106 aa, Glycine max
  unsure (1)..(106): unsure at all Xaa locations
  Clone ID: PAT_MRT3847_44673C.1.pep
MSWQAYVDDHLLCEIEGNHLTHAAIIGQDGSVWAQSTNFPQFKPEEITAINNDFNEPGSLAPTGLYXGGTKYMVIQXEPGAVIRGKKVTTVSDLCLNSDHGFADCV

SEQ ID NO: 224414 - protein, 197 aa, Glycine max
  Clone ID: PAT_MRT3847_44674C.1.pep
MVKGKGKRMSLSLSLSELEFNSSLSLSLLFCRRRRSRSSYRNMLENLQAPPPTESAPVVKRYAPPNQRNRSANRRKSSDRLDRTNSIGNDLEKNQVAYSRSVHIPDHGDAGSSNLLNENHYSRLIALEGCSCSAAAQLLNDRWTAALQSYNNPKDSSEKPVMYSSGTSGWTPFRPPQQDFLGELRRQMHSANPSFTT

SEQ ID NO: 224415 - protein, 79 aa, Glycine max
  Clone ID: PAT_MRT3847_44675C.1.pep
GLFFLAHYSKGFVPNNFKVGIFWTWGLVSPLGFVNNGIPLLWWVFFFPQFSCFLKAFFTCVSPALLSYFCTNFVHVVLE

SEQ ID NO: 224416 - protein, 268 aa, Glycine max
  Clone ID: PAT_MRT3847_44676C.1.pep
MLENLQAPPSTTESAPVVKRYAPPNQRNRSANRRKSSDRLDRTNSVGNDLEKNQVASSRSVHIPDHEDAGSSNLLNENHYSRFIALEGCSCSAAAQLLNDPLHKTEFKFIGLQRDRDEWVRLKFVHLLTSPVGQLQYNPTIIPKIHLTNYCRPNIFACLAGNFLSPSALMYFKLKTQLSSGVDYFCFYIAVGISCLTIFLTSASDNKLCAAYELLSMGMFCIAEKPVMYSSGTSVWTAATSASSSVSQRDFLGELRRQMHSANPSFTT

SEQ ID NO: 224417 - protein, 120 aa, Glycine max
  Clone ID: PAT_MRT3847_44677C.1.pep
NPLDLIQPHIIIQFPLPSSMGASIKLYIVAVAQILSMKVPCPQHLPSFSNWWFGIPNFIHDRLTFSCYNRISKSSILHGMFLPKYMDSPITGWARDLYNAAMLHSHGSIHFGKAPHTSCF

SEQ ID NO: 224418 - protein, 63 aa, Glycine max
  Clone ID: PAT_MRT3847_44679C.1.pep
IEGTGFHIRQLQSHMGIKLIGLYNIPKTDRLSIKKFQLLATSQLLIITYSRLLAQRPTDLPSL

SEQ ID NO: 224419 - protein, 35 aa, Glycine max
  Clone ID: PAT_MRT3847_4467C.1.pep
HRGEKRRSTTQGRGNLGHCSHCKSLNAPLIIELSC

SEQ ID NO: 224420 - protein, 58 aa, Glycine max
  Clone ID: PAT_MRT3847_44680C.1.pep
PPQPRFPFEEEPLVVLTKAIISYPNWSHKPNQPLQFPPIASSHLNKRGAPFCRLLAAV

SEQ ID NO: 224421 - protein, 206 aa, Glycine max
  unsure (1)..(206): unsure at all Xaa locations
  Clone ID: PAT_MRT3847_44681C.1.pep
LCPFAARPPPPPPPPSPRLPPPPPPPPPPPPAPTCTPACDXPPANPTGAPLPPACRVSYHGPPRCPRADRPHITRPTSPPHHTPPAAHPPPLRPMRTRLPPPPPPPPTRAPPPPPTPAPCSPPPXPHPPLCPPPPPSASPPLPPPPPPXPPPSPPPLHISPLPTPPPTSPPPPHYTPSPXPPPPPPPPPTPPHLPPPAPLPPFTRP

SEQ ID NO: 224422 - protein, 60 aa, Glycine max
  Clone ID: PAT_MRT3847_44682C.1.pep
LYSPRPSIFLILNRIPWKANQLSQNPACIKRWATLQSIILSEKVMHLKLQIRTVTNVGKI

SEQ ID NO: 224423 - protein, 55 aa, Glycine max
  unsure (1)..(55): unsure at all Xaa locations
  Clone ID: PAT_MRT3847_44683C.1.pep
ITTAHVTIPMPGTPKHGNESNQSDVVSSSLSSSAAFYDCCSLASARQPPAVVFXR

SEQ ID NO: 224424 - protein, 69 aa, Glycine max
  unsure (1)..(69): unsure at all Xaa locations
  Clone ID: PAT_MRT3847_44684C.1.pep
LNFGIQCSCGTLHSGTIIICMTIMCYDCTKSFGIQQTTALNINYSTAPAFNLXKLMHYFKICFLKXEQN

SEQ ID NO: 224425 - protein, 51 aa, Glycine max
  unsure (1)..(51): unsure at all Xaa locations
  Clone ID: PAT_MRT3847_44685C.1.pep
RLRFGLCIVTSDASSNLVSTYLFGNVTNLNKRAFLXKKWGSKKKKKXKGRP

SEQ ID NO: 224426 - protein, 41 aa, Glycine max
  Clone ID: PAT_MRT3847_44686C.1.pep
TKGPYGEKGRGKKRDFPIQGFTLKFHINQRVGWPGTWSPTQ

SEQ ID NO: 224427 - protein, 86 aa, Glycine max
  unsure (1)..(86): unsure at all Xaa locations
  Clone ID: PAT_MRT3847_44687C.1.pep
FRSRTNQAPHISFFVIPKHGFPCHCWFPGMSXMXGXPHXPQCATRPAPSASSPASFKXVALFXKKKAAPPKKAXAAXPANDELGKW

SEQ ID NO: 224428 - protein, 87 aa, Glycine max
  Clone ID: PAT_MRT3847_44688C.1.pep
KKKKKKKKKKKKKKKKKKKKKKKKKKKKKKKKKKKKKKKKKGGRFLVLKFTHFNIFNLRFFMVLTKKNFFAPFLKKKKMGKPKKFPN

SEQ ID NO: 224429 - protein, 63 aa, Glycine max
  Clone ID: PAT_MRT3847_44689C.1.pep
LEPKKSESLVAFITCFICCYTTVILWIGSFVAAQTLCYIYYCQKKKNKNKENLIKKKKPKYEI

SEQ ID NO: 224430 - protein, 61 aa, Glycine max
  unsure (1)..(61): unsure at all Xaa locations
  Clone ID: PAT_MRT3847_4468C.1.pep
KNFFYFFLSPRQLNGRGVKXGGGKKTWDGKTQPKLSLYRSNKRPLIVPKSTGGGNPTIIII

SEQ ID NO: 224431 - protein, 64 aa, Glycine max
  unsure (1)..(64): unsure at all Xaa locations
  Clone ID: PAT_MRT3847_44690C.1.pep
QTAETCKLFNDKNRCWELSXIAEQPKRPSEFARLTELHTVNGHVESVVKLKGLDIDTIQQHYTL

SEQ ID NO: 224432 - protein, 34 aa, Glycine max
  Clone ID: PAT_MRT3847_44691C.1.pep
SVMCHVYCCVLIKVHPDDEWSRTSTTTPSRRPEN

SEQ ID NO: 224433 - protein, 32 aa, Glycine max
  Clone ID: PAT_MRT3847_44692C.1.pep
MDNGASISANTHKVLLEFPEARDTICFMDEYV

SEQ ID NO: 224434 - protein, 129 aa, Glycine max
  unsure (1)..(129): unsure at all Xaa locations
  Clone ID: PAT_MRT3847_44693C.1.pep
MASLSLCIAMTAPTPSASLILTAPKPSSLSLNLTRTCSNARSPLLHCSFLSSPSLLSPPSSISEEEKXSGLVVRAGKAALCLTKRSRSRKSLARTHGFRKRMSTPGGRAVLRRRRAKGRRVXMHKTHPN

SEQ ID NO: 224435 - protein, 96 aa, Glycine max
  Clone ID: PAT_MRT3847_44694C.1.pep
FFFRNVTELYELRNDTCFLSVMSQNLMDYAIVPSLASGMLQNFTDYALTLPFNSRHVAELHELPNDGCQVPRSGQAKVASHQTDGPRTKLGYDWRV

SEQ ID NO: 224436 - protein, 75 aa, Glycine max
  Clone ID: PAT_MRT3847_44695C.1.pep
NSFSPLSVIAWPDRSTLLSPPSQNTLCWVMCMPCLCSHTSHITDIMPTGLCRHTSLITTLILKSSSTYHLNSLVQ

SEQ ID NO: 224437 - protein, 146 aa, Glycine max
  Clone ID: PAT_MRT3847_44696C.1.pep
MASLSLCIAMRAPTPSASLILTTPKPSSLSLNLTRTCSSARSPLLHCSFLSSPSHLSSPSSVSGLSLGLDLTSNVGTRRGKGSGLVVRAGKAALCLTKRSRSRKSLARTHGFRKRMSTPGGRAVLRRRRAKGRRVLCTKTHPNSGK

SEQ ID NO: 224438 - protein, 60 aa, Glycine max
  Clone ID: PAT_MRT3847_44697C.1.pep
FVIQTRICRFSSAWSLEWENFCSRPYQRELASRLDRSRLKSHPQLTSTEMGYENTITAMC

SEQ ID NO: 224439 - protein, 140 aa, Glycine max
  Clone ID: PAT_MRT3847_44698C.1.pep
GTCYTNIELIYHELGNYELAYTYFCEPLRVCIELQGEEHFDTAKLFNNIGLSLYNLHDYSKSMEYFQKALEIYSELCQDDHIDMANFYTNIASIYDQEDNLDIALQYYDECKRIRRQYLTQDHSEIGTVYYSLGTIYHSQ

SEQ ID NO: 224440 - protein, 53 aa, Glycine max
  Clone ID: PAT_MRT3847_44699C.1.pep
SHYSISIYSHYLPLLLYSFYTFITLTFLYITLSYFYYLSKCIHYIYLYSFDSH

SEQ ID NO: 224441 - protein, 103 aa, Glycine max
  Clone ID: PAT_MRT3847_4469C.1.pep
TNLDHSEKKKIRITGCKINRIQKTFGDQGLPCKIAKPLQISTFCFTWITVASFASSRFARVTCGIPKSFIPRCRHKRNTSNVLPQIEESTDPETLKPESADEW

SEQ ID NO: 224442 - protein, 95 aa, Glycine max; identical to SEQ ID NO: 221130
  Clone ID: PAT_MRT3847_446C.1.pep

SEQ ID NO: 224443 - protein, 58 aa, Glycine max
  Clone ID: PAT_MRT3847_44700C.1.pep
MDPYKLQPAVSFKTPFWTTNSGAPVWNNNSSLTVGARGPILLEDYHLDVESCKLILGT

SEQ ID NO: 224444 - protein, 72 aa, Glycine max
  Clone ID: PAT_MRT3847_44701C.1.pep
FLVRGFKLDQSMALSFFHYCCFSESSESKEFICEGEVCMLRDRKKYKAKKSKSQKMQRDHYFSVFLFLNKSS

SEQ ID NO: 224445 - protein, 164 aa, Glycine max
  Clone ID: PAT_MRT3847_44702C.1.pep
ISDFVFRQSVVLEKLYQWILRQQQEGSRVATIDIVTHLQNELEYGGEEAPVSPRQPMHQQNSQTAMHNTNFGASIPSNAFGATVAGQGIRAGQPDQQPKNSVFSNALSSPIRRSLQPYHLAQGSFPSCNIMSSGNGTRNSDMTYPNGQNRGTNLHGYAFNDFSC

SEQ ID NO: 224446 - protein, 215 aa, Glycine max
  Clone ID: PAT_MRT3847_44703C.1.pep
MAKKRKSVATRLDEVDRTMYSTFCSTANSLSHLYTHAMNQQKLSFQAGERHALEKLYQWILRQQQEGSRVATIDIVTHLQNELEYGGEEAPVSPRQPMHQQNSQTAMHNTNFGASIPSNAFGATVAGQGIRAGQPDQQPKNSVFSNALSSPIRRSLQPYHLAQGSFPSCNIMSSGNGTRNSDMTYPNGQNRDTNSSNSSDCMDMHSDSPGHDFSY

SEQ ID NO: 224447 - protein, 412 aa, Glycine max
  Clone ID: PAT_MRT3847_44704C.1.pep
NCHTGNLSGKDDYMEIDGQGSRSETSGYHSDTDLEDDCRETSEPPVPPQRVVNMLQGCRSFDEFERLNKIDEGTYGVVFRAKDKKTGEIVALKKVKMEKEKEGFPLTSLREINILLSFSPTHALVDVKDHVVGTRRESMLMVVVYMEHDLKGLMEGMKQPFSQSEVKCLMLQLLEGVKYLHDNWVLHRDLKTSNLLLNNRGELKICDFGLARQYGSPLKPYTHLVVTLWYRAPELLLGTKQYSTAIDMWSLGCIMAELLSKEPLFNGKTEFEQLDKIFRILGTPNETIWPGFSELPRVKVNFNVPFRYNLLRKKFPVTSFTGSPVLSDSGFDLLNKLLTYDPEKRITAEEALNHEWFREVPLPKSKEFMPTFPAQNAQDRRMRRILKSPDPLAEQHWKEMQQGESGTGGIFG

SEQ ID NO: 224448 - protein, 42 aa, Glycine max
  Clone ID: PAT_MRT3847_44705C.1.pep
HIIFVHIVQITISNRKKSKKGFHVFCKTVIVDSIRLGSRLLV

SEQ ID NO: 224449 - protein, 75 aa, Glycine max
  Clone ID: PAT_MRT3847_44706C.1.pep
TTPPERKEEKKRGQNHPARNNPNSKIKARGQLPLKKLPPLGQDNRLGGPAEAGPHLFDVLDNGQYFENLCQHEML

SEQ ID NO: 224450 - protein, 28 aa, Glycine max
  Clone ID: PAT_MRT3847_44707C.1.pep
GHQCTSKYAALTRIPRREFCGKGCDSGL

SEQ ID NO: 224451 - protein, 86 aa, Glycine max
  unsure (1)..(86): unsure at all Xaa locations
  Clone ID: PAT_MRT3847_44708C.1.pep
ATMTNRVEEMLTPDERAARDAQDLLIERWDPVINHVXAEINEVCNKEERMTIXPEYVLKALXFLEFGEYIEEVYAAFEQHKVGDNA

SEQ ID NO: 224452 - protein, 64 aa, Glycine max
  Clone ID: PAT_MRT3847_44709C.1.pep
IDILFLYGNIENYHEINLLTLILILTFFSYNLSLKENIPHYISKKVITKHVLKFNQKKHNYSRK

SEQ ID NO: 224453 - protein, 58 aa, Glycine max
  Clone ID: PAT_MRT3847_4470C.1.pep
PTNVHIFLFMFSIHCAQLHHHMFIIKILYNFFRYYDIGIGVKCESLLKYLRINYIQGM

SEQ ID NO: 224454 - protein, 73 aa, Glycine max
  Clone ID: PAT_MRT3847_44710C.1.pep
GEVFRNTFYPWELDKLGHNRELYFCCNILAWSQGPLSYYLFLVQQSIAIGRQQSSVSTPYRQFSCLFVKFVFN

SEQ ID NO: 224455 - protein, 133 aa, Glycine max
  Clone ID: PAT_MRT3847_44711C.1.pep
SKQAKKKKREVTKGKTKKSDSKISKSSNTKKEEEMWMDEEDLDAPVRSDRSILHAVKWQRIILDEAHYIKSRHCNTAKAVLALESTYKWALSGTPLQNRVGELYSLIRFLQITPYSYYLCKDCDCRILDHSTK

SEQ ID NO: 224456 - protein, 36 aa, Glycine max
  Clone ID: PAT_MRT3847_44712C.1.pep
EKVHINIVVIGHVDSWKSTTTGHLIYKLGGIYKRVI

SEQ ID NO: 224457 - protein, 135 aa, Glycine max
  unsure (1)..(135): unsure at all Xaa locations
  Clone ID: PAT_MRT3847_44713C.1.pep
LNKEKKKLCNGMLWISRWEKRLLKELAYCITCGANXPSAGGGGYNVGVDDALVKADVIVDTLXFMSNPAFNKKQVVTFMNRFMKNLTTKLGAEHLELFKKHMGGXVKYLLSHINDFHFFAGAIMCDDSFLGFAYY

SEQ ID NO: 224458 - protein, 82 aa, Glycine max
  Clone ID: PAT_MRT3847_44714C.1.pep
GFAAGSYPHVGGGGVSGGGLYEREFSFRLGFLHELSHRRGALRHGKVGSPVTAAKHSGGSSHRWFGFPVVLFCSASSHIERI

SEQ ID NO: 224459 - protein, 51 aa, Glycine max
  unsure (1)..(51): unsure at all Xaa locations
  Clone ID: PAT_MRT3847_44715C.1.pep
KLRATRGNKTKTPCPGAQSALRALARSXMKIGRIEDVTPIACDSTRRKRGR

SEQ ID NO: 224460 - protein, 53 aa, Glycine max
  unsure (1)..(53): unsure at all Xaa locations
  Clone ID: PAT_MRT3847_44716C.1.pep
TFCRFHTSFFDCRRHYVQKRNYVLGPDDPPNSAXFYDCCGAEDHLMLCLHNQF

SEQ ID NO: 224461 - protein, 47 aa, Glycine max
  Clone ID: PAT_MRT3847_44717C.1.pep
KVWFIILNHPNQFVFQFYVTKRVYGVPKVVFWFKFELGTKFLCPINF

SEQ ID NO: 224462 - protein, 36 aa, Glycine max
  Clone ID: PAT_MRT3847_44718C.1.pep
GNFLKKINVYSKKPKLVQLGGFCSKEKNNFVLVMHK

SEQ ID NO: 224463 - protein, 66 aa, Glycine max
  Clone ID: PAT_MRT3847_44719C.1.pep
PFEPQSMAWRFGLLVRPGTPPFSQETSKMIIFLVSFSPEQMRFIMCLLPLLDCECTIRRLSQSVRF

SEQ ID NO: 224464 - protein, 59 aa, Glycine max
  Clone ID: PAT_MRT3847_4471C.1.pep
SGCIPAITVKQILVGIRALLVQPNLADPAPTEGSHLLTQYAAEIQTRVRQQATQHPPLL

SEQ ID NO: 224465 - protein, 55 aa, Glycine max
  Clone ID: PAT_MRT3847_44720C.1.pep
SLHPKTSADILGTARVTPYCLDHPQYSYTNSLSFPSKASLFLFSFSHTHAPSFFF

SEQ ID NO: 224466 - protein, 121 aa, Glycine max
  Clone ID: PAT_MRT3847_44721C.1.pep
RPRRRPTRPSRLAVSCSRSARTPARTSPCGALIGVPVVSSGVSTWGTILGADPVAEASTASSSPTTSRCSSVSCAIRRRLPPLLSKLSASGSHCRSPASSPAPHTSSHRSSYGIKAAYHRL

SEQ ID NO: 224467 - protein, 60 aa, Glycine max
  Clone ID: PAT_MRT3847_44722C.1.pep
SADVIMQNESDNVNYRMEHYLDPIKVGWKSKPKIPIGKRCLVKTGLLFKICYYCCLVYFE

SEQ ID NO: 224468 - protein, 63 aa, Glycine max
  Clone ID: PAT_MRT3847_44723C.1.pep
DMLDSGTGLPLVIRVILSSSFKVVPSLIKPRFHHHAECLVFLKKAYDKKHRTLAFDSTCKVTS

SEQ ID NO: 224469 - protein, 152 aa, Glycine max
  Clone ID: PAT_MRT3847_44724C.1.pep
MQGGKKAGESIKETAANIGASAKAGMEKTKATVQEKAERMTARDPMQKELATQKKEAKMSQAELDKQAARQHNTAAKQAATAGHMGQPMGTHQTSAMPGHGTGQPTGHVTEGVVGSHPIGTNRGPGGTATAHNTRAGGNPNDYGYGTGGTYN

SEQ ID NO: 224470 - protein, 179 aa, Glycine max
  unsure (1)..(179): unsure at all Xaa locations
  Clone ID: PAT_MRT3847_44725C.1.pep
PRVRENRGSDDDENGNGCPCPVKLCDCLEELVRFTLNSNSHHLNLSSQFFSNLLKDDATHPSSSHSLSQPNDSLEGVPPYPLYKRISSALLRCMESETFCRTGGNLAMTNEFEDSSMQQKRNEWHRLIVEKGFEIENILKSVSFEFHVQEPFFSQLNDGLKTXEGRCATGKYNRFQYFF

SEQ ID NO: 224471 - protein, 118 aa, Glycine max
  Clone ID: PAT_MRT3847_44726C.1.pep
MAAASSMAFLSPSLAGKGVKLGPSTPKVGRVGLEETRTKQVFLRRPLYRPNRVKDLGPFFGQPPSYLTGEVPSHYRWDTGGLFANPETFAKNRELEVIHFRWAMLGAFGWVFPELLSR

SEQ ID NO: 224472 - protein, 113 aa, Glycine max
  unsure (1)..(113): unsure at all Xaa locations
  Clone ID: PAT_MRT3847_44727C.1.pep
RREGGSQXXSALPLITEXSEXSGAKGGXXRXATAEAFXCXLLWSTSLRRCXHTGGSXGAXLGXYSNWVREPSXESLRAGEGXPPXCCVGDIFLGSSLLRFLGFFLALLCSLPT

SEQ ID NO: 224473 - protein, 95 aa, Glycine max
  unsure (1)..(95): unsure at all Xaa locations
  Clone ID: PAT_MRT3847_44728C.1.pep
XXVXXTAPILTPFQXXIEXXGRLKXKRGXKSCMXTVXALXKXAXRFWGIFVPRSXQKVXREVWGISXAVKEPDAYVXXWXXIXXXXQMMQXHXAQ

SEQ ID NO: 224474 - protein, 172 aa, Glycine max
  Clone ID: PAT_MRT3847_44729C.1.pep
MASAPTPREEFVYMAKLAEQAERYEEMVEFMEKVSASAESEELTVEERNLLSVAYKNVIGARRASWRIISSIEQKEESRGNEDHVAVIRDYRSKIEAELSNICDGILKLLDTRLVPSAASGDSKVFYLKMKGDYHRYLAEFKTGADRKEAAESTLSAYKAAQVYFFFFLSIL

SEQ ID NO: 224475 - protein, 91 aa, Glycine max
  Clone ID: PAT_MRT3847_4472C.1.pep
SPISALTCSSPLPLCQRRNVSPLPLPVLVQCLTTMVHTENWLSLSFGSDWNDTPWPCMKCCVSCSTRHQGLSCPSNDYIFVDPSELQLCGA

SEQ ID NO: 224476 - protein, 66 aa, Glycine max
  Clone ID: PAT_MRT3847_44730C.1.pep
EHILSSVQTSIYTFILINLTHTLFTLAHFDNRSYTNNHCLYFIGICHLLHLFISLKYMLHHHAFHS

SEQ ID NO: 224477 - protein, 76 aa, Glycine max
  Clone ID: PAT_MRT3847_44733C.1.pep
FIVEILHTYLMLIVDEGTSTNSSRPADAFLFSHSFSIRLAKGEERNMNHMQKFVRVVVSTLKKFHKHCISIVFLSM

SEQ ID NO: 224478 - protein, 441 aa, Glycine max
  unsure (1)..(441): unsure at all Xaa locations
  Clone ID: PAT_MRT3847_44734C.1.pep
MPMLSSRGFIAYLVSAFSCAVLSALFLTNHIHHDDNKPITLLASRVSETLKVWPDLEPSWRLVLATVIGLIALLVFGYGAVKLYKEQSVWMNTRVLESATQAPIVGSDFTIMGASASSVGYSVSVPHPSVWGSLCFRTSSPCVCRPSSGLGITVGXVALSVVFPXWLITLPSGSLSLGTSPRPCVCGIGVRGTVLCKKIDYMSXRASIIVFILSGVIFASALTMGVVGIENSIQMINNHEFXILRLLFQSVIYFILECTALGIVNXEKSKLTKEQKRSMITRNSECICDASIEWTAMNLAFCALCGIVGGIVGGLLGSGGGFVLGPLLLEIGVIPQVASATATFVMMFSSSLSVVEFYLLKRFPIPYALYLTSVSVLAGFWGQFFVRRLIACLGRASIIVFILSGVIFASALTMGVVGIENSIQMINNHEFMGFLGFCSSQ

SEQ ID NO: 224479 - protein, 101 aa, Glycine max
  unsure (1)..(101): unsure at all Xaa locations
  Clone ID: PAT_MRT3847_44735C.1.pep
SRHSNGQGRWPVKSVKFILNLLKNLKSNIEVKGLDVNVLNISHVQVNQAQKQRGGTYKGKGRINPFKXFPSPIDFILFQKEKPVKKKGETLLAPSKKKGAL

SEQ ID NO: 224480 - protein, 106 aa, Glycine max
  Clone ID: PAT_MRT3847_44736C.1.pep
MGVLNFGVWGIFENPGPGPGPHSPRGKKAPKSPCLTGVHVGVGAKPRVFPRTPFLFQIKNFWKRDREGPPVFFIKIPLPPKKKKKKKKKKKKKKKKKKKKKKKKKK

SEQ ID NO: 224481 - protein, 254 aa, Glycine max
  unsure (1)..(254): unsure at all Xaa locations
  Clone ID: PAT_MRT3847_44737C.1.pep
FPFYNLSEGSISATESLAVIASILILLCFCFRSSSIYLLDYVCYMPPDNLRLPYSHIVEHFELCNFDPELIGFELKVLERSGIGVEACVPESVHELPPDDSMKRAQAEVESVLFRIVKDLLSKHKVHPKSIDILVSNCSLFCPTPSITSMIINKFGFRSNVKSVNLSGMGCSAGLLSINLAKDLLRVHKNSLALVLSMEAVAPNGYRGNTKSKLIANVLFRMGGAAILLSNKXQHKPVAKYKLEHLVRTHMGSN

SEQ ID NO: 224482 - protein, 85 aa, Glycine max
  unsure (1)..(85): unsure at all Xaa locations
  Clone ID: PAT_MRT3847_44738C.1.pep
TLDAVEAREKKLYESDVRVKPXFNMLELQQSMPAGDAPYTTYGDLGVKKDGTQTTWWSTPSLTINFMIAQCCDHTIHKGLRTNSL

SEQ ID NO: 224483 - protein, 573 aa, Glycine max
  Clone ID: PAT_MRT3847_44739C.1.pep
WFWRPLTSLNVHQLVTVPDAVKSSSSQVREEEKIGVSSDSKLVVRSVSENDMEGTDLLPENPLLEINKMSSDSPMIISHSVKGRVSFVKEDNSVIKISDQMDASQVSENNSERVTSKCMDVPSCFQMVEGDNVDMLSDKGPLCSSLAPSEPRDPLIENSRDGIEDSVANPLPQQKSKCSESGKVDEMKTSDVVRVDPGLKSKIADFPSSLVMEQDKAAASYDSPLAAAEPKYCLTGENCENANEEPNPSEAEIGNEMNASDVAGVNTQLSSSSIIVPSSSLMTEDDNIVVSSDNGPQCSMQVLKESKDCQTEEGSCKDATEGPSTNPVLLQELIINSEAETCNEGKTQIGGLSVEDVTASEGKREVETLPDEGPQGILEAQDGSRGLADIEDGTDSKSCAAEMENVSEVPKPSVSAEKGEDLSKKGIIGSQAKRQVSEESEAVTGGGIDVTPDCLAVPETATNDGASSLCSSAEGSEHVDSLSEKDLVGNPVAELDTKVSEAGVSDQENQVVQENALEDMEHEENLSETGLVGNAVAKLSTNKSEAGVSNQEKQENALKDIEKSPPSAAEGCS

SEQ ID NO: 224484 - protein, 87 aa, Glycine max
  Clone ID: PAT_MRT3847_4473C.1.pep
SQILSPFIVKEEKRKHLFTCMLINQNLYGRLELYNIPSLNCSTTPYILDMMQPAPERPRMLRRRAHASLHRTTLSRAATIMNLPCQW

SEQ ID NO: 224485 - protein, 176 aa, Glycine max
  unsure (1)..(176): unsure at all Xaa locations
  Clone ID: PAT_MRT3847_44740C.1.pep
GPEYPGRPTRPIFSYFATDREKMGVEYDNCXVLLLDRKITNXARDRINILQDAIRSGHPKKNIDEDIEQEALKLLGNKLTGXLKMXITEAPSLRTLDQTENXIDGALXIEEEIALLWHKAXKKELGYASKVVLTKDTTTMVGEGSTHQAPIERVALIRNLIRACXDKHYEKEKLNE

SEQ ID NO: 224486 - protein, 44 aa, Glycine max
  Clone ID: PAT_MRT3847_44741C.1.pep
TTLGPFLKGDRPHFKWHDQRPCLKMCFPSRGSINKGFFSKPHQA

SEQ ID NO: 224487 - protein, 95 aa, Glycine max
  Clone ID: PAT_MRT3847_44742C.1.pep
PRGRNLYYFDFIRRTLRNLTPRIVTKERKIGSIKIRIATSTVNPASTEEEDTAAAATRVTSFVPVLSPSIIFSRPCKHIIKHLNKHINQPKGSEP

SEQ ID NO: 224488 - protein, 52 aa, Glycine max
  Clone ID: PAT_MRT3847_44743C.1.pep
TQYLYSNKYTIQGKVNPFFMLFTPKHRYRGFHFGRATRNGTTGVNRLEPPTR

SEQ ID NO: 224489 - protein, 81 aa, Glycine max
  unsure (1)..(81): unsure at all Xaa locations
  Clone ID: PAT_MRT3847_44744C.1.pep
NSSFDPSSMIVLCDPXHSKYMVHLPMGRGHVXPKACNAASSTIKTNRTIQLXDWCPTAFKCGIYYQPLTGVSGGDLGRVHK

SEQ ID NO: 224490 - protein, 68 aa, Glycine max
  unsure (1)..(68): unsure at all Xaa locations
  Clone ID: PAT_MRT3847_44745C.1.pep
SELFSSNLLNLFLELLLHKTERXCHLLMKALYRLEXLQKADLPTISQIEECHSKHMMINAPDSNDNID

SEQ ID NO: 224491 - protein, 188 aa, Glycine max
  Clone ID: PAT_MRT3847_44746C.1.pep
MKATKELSEQVEENEVKVLVEEDDEEYESVDEVVDDAEDDEDEEEDDDDDEGDDNDDEEDDAPDGGDDDDDEDDEEEGDVQRGGEPDDDDNDSDDDSDDDEDEDEEDEEEQGEEEDLGTEYLIRPLETAEEEEASSDFEPEENGEEEEEDVDDEDCEKAEAPPKRKRSDKDDSDDDDGGEDDERPSKR

SEQ ID NO: 224492 - protein, 43 aa, Glycine max
  Clone ID: PAT_MRT3847_44747C.1.pep
DLIEVEDIISPMEKFVWSIPFYLHPRWLGYMIMMWKNYPSILI

SEQ ID NO: 224493 - protein, 66 aa, Glycine max
  Clone ID: PAT_MRT3847_44748C.1.pep
RISLAAAYGTPSALLGHPDCQCNFPVSMFFTRVCWFFFGFFSFFFGVFAYFSVSFNTFLTSFQGLF

SEQ ID NO: 224494 - protein, 116 aa, Glycine max
  unsure (1)..(116): unsure at all Xaa locations
  Clone ID: PAT_MRT3847_44749C.1.pep
HIPHRAPDLXAKLTFLLVLGLIQALLXTGNWRIYELRDYSKTVRTDXNISRGEPDDDTNXPETELLTIAQFKLRLCTGTDGIPWRDLNSIAMLQRPMVVHMRDTGHTHHFTAYKHD

SEQ ID NO: 224495 - protein, 115 aa, Glycine max
  Clone ID: PAT_MRT3847_4474C.1.pep
ILVVVVVTGTRADSHLSEVVYFVEVAGLPHLVLLVLVNEGTIFRGITFYVVGLPGLFNSSRFRISNTNKKRASCRQIPSFSLLINVFEALMKGGRYHAVDPSRKFRRCHRQSRKK

SEQ ID NO: 224496 - protein, 63 aa, Glycine max
  Clone ID: PAT_MRT3847_44750C.1.pep
PLVRRDDHSGGRIQMRGGDGLHTFLFLCSIHLPFADTKNPNRRSYIKTHKLKSTKMIVLHVAI

SEQ ID NO: 224497 - protein, 51 aa, Glycine max
  Clone ID: PAT_MRT3847_44751C.1.pep
PFLFFCFNQTAWVLMSRLNVLRQLLFSYIATSGRIPETILQQQSHIYNAHT

SEQ ID NO: 224498 - protein, 63 aa, Glycine max
  Clone ID: PAT_MRT3847_44752C.1.pep
PRVRMYRYGWIDYGYSRLTWMTRGGSSYSILKAVELNHKCSRIYFNRLGQLPKKVTLKLFMNT

SEQ ID NO: 224499 - protein, 73 aa, Glycine max
  Clone ID: PAT_MRT3847_44753C.1.pep
TQCKSPLHSNRIISLSPITYATKAASTESRSYDSNSIHSRNSHILLTFPKGKTGDSNESCFGSHPESVPIFQS

SEQ ID NO: 224500 - protein, 135 aa, Glycine max
  Clone ID: PAT_MRT3847_44754C.1.pep
CLCCDRATFPLQAMLWRIKKDCGGDRRDDARMGSQPQLEFRRNTRGIAFQRGPDTTQNWHKDEMENSPCKQSSRPLLTPSAGLGQPAQALFLSPISMVNQVYERLHPWRRPQRDLDCFYIGTFRHIVVHGCWTTA

SEQ ID NO: 224501 - protein, 35 aa, Glycine max
  Clone ID: PAT_MRT3847_44755C.1.pep
MTTSQRLTDRLVEKFEQNITKRGFVPDTTTKTGDD

SEQ ID NO: 224502 - protein, 171 aa, Glycine max
  unsure (1)..(171): unsure at all Xaa locations
  Clone ID: PAT_MRT3847_44756C.1.pep
HMLVQFGEIQEKVVLKSSQEELLTAWTTQVRSATSMLADGCPYXLHAMVHDSPLSTIPGDFAIGVKXLATINNXCAYGLNPGISGSSPLGTIPQSISHQTVWNQMATVRTPLIIDPSKQSVCQFSIDLLGGGILVDNTGDCITLIHNSTISISLRVAVWKKGCSMLRLRCL

SEQ ID NO: 224503 - protein, 98 aa, Glycine max
  Clone ID: PAT_MRT3847_44757C.1.pep
MKNRSGSAHKMLLEFIAGILTTMVGALLYCLFWRKVIPFLKQRKTLKGKEHDKISLRYFDFKELERATKNFSQDCLLGSGAFGNVYKGTFDLEGTLAH

SEQ ID NO: 224504 - protein, 71 aa, Glycine max
  Clone ID: PAT_MRT3847_44758C.1.pep
ACIVSVGCVCYCNASDAFSKQLFLCTHTVHISIYFVHGVSIQVSPNIMVYDLQSPTYMVYKAPRQSLTCRM

SEQ ID NO: 224505 - protein, 59 aa, Glycine max
  Clone ID: PAT_MRT3847_44759C.1.pep
GKGPNLNTFGLQTIFESPKFGPNPRLVFITQAKGNLESKNREIQIPQQGIVFYFSLENK

SEQ ID NO: 224506 - protein, 133 aa, Glycine max
  Clone ID: PAT_MRT3847_4475C.1.pep
GHPRQSSISFSVSSRSAMPRNSSTYGHSSTRRDRRAVVNDKAHSSSSRTYSEKVNSVLASTGGSIVRSEKAHSSSSRTFSEVVDWLLESTGGSILRSEKPVSHRHTVSLLLASQVSNSTSNRLASTGGISSYN

SEQ ID NO: 224507 - protein, 103 aa, Glycine max
  Clone ID: PAT_MRT3847_44760C.1.pep
QKVTGANDINTIRLLNNIMPILMVRTRLIGTSPPFVQVGSSSETTTLTCRYACTVQCTALTPIKPWSDTCVQQCASDSKHQLSVANDCFTSCALIKSINIIND

SEQ ID NO: 224508 - protein, 73 aa, Glycine max
  Clone ID: PAT_MRT3847_44761C.1.pep
GITFNGHILQRCNIIAIAEHCFLTKGSTTNKNNPTPIIITTSSLIHVRGSLKRGGTHRGALETLFIKGMPQKI

SEQ ID NO: 224509 - protein, 91 aa, Glycine max
  Clone ID: PAT_MRT3847_44762C.1.pep
LLLLLLLLLLLLLLFIPFYVSNTFLKLCTTTFFNLNSKYAVCLRSKSLCSFIQSQFSITICFFNSPISIFLFCFEILSTTLCSMSLLIRFL

SEQ ID NO: 224510 - protein, 191 aa, Glycine max
  Clone ID: PAT_MRT3847_44763C.1.pep
MTTSLLLPSPSCAAILSKGTNRICTRASFHSLKSHVKKGFRVRALKEKTEEIESPSQPSSPEEVTKKYGLEAGLWQIFSSKEEGKDNSQQKSKGDQAKELLAKYGGAYLATSITLSLISFALCYALISAGIDVQALLQKVGISTDATGEKVGTFALAYAAHKAASPIRFPPTVALTPIVAGWIGKKVEKDK

SEQ ID NO: 224511 - protein, 164 aa, Glycine max
  unsure (1)..(164): unsure at all Xaa locations
  Clone ID: PAT_MRT3847_44764C.1.pep
MTTSLLLPSPSCAAILSKGTNRICTRASFHSLKSHVKKGFRVRALKEKTEEIESPSQPSSPEEVTKKFSAQXEEGKDNSQQKSKGDQAKELLAKYGGAYLATSITLSLISFALCYALISAGIDVQALLQKGGISTDATGEKVGTFALAYAAHKAASPIRFPPTV

SEQ ID NO: 224512 - protein, 37 aa, Glycine max
  Clone ID: PAT_MRT3847_44765C.1.pep
MSKSKDDAPHELESQFILRLPPEYASTVRRAVQSGHV

SEQ ID NO: 224513 - protein, 49 aa, Glycine max
  Clone ID: PAT_MRT3847_44766C.1.pep
HRPPTHPPTRPPTRPPTRPTTRPPTRPVMHCLPQKPHLFFRNCPNLRNI

SEQ ID NO: 224514 - protein, 67 aa, Glycine max
  Clone ID: PAT_MRT3847_44767C.1.pep
FDVIMTTVRQEFARGDCAAYQDLKHMRDQFFLTSMASFQTVSNGPECSRKQLALDIEYRALSCKFHS

SEQ ID NO: 224515 - protein, 42 aa, Glycine max
  Clone ID: PAT_MRT3847_44768C.1.pep
LLNSIFFHTIVEFWISRMYVCVVSTFCPRESIINGYNKTNGI

SEQ ID NO: 224516 - protein, 57 aa, Glycine max
  Clone ID: PAT_MRT3847_44769C.1.pep
SPKGDVEELKPVSKEGGIGVIPPFLFLKKGKLVDKVVGPKKDELQLPIANHPAIVGA

SEQ ID NO: 224517 - protein, 76 aa, Glycine max
  unsure (1)..(76): unsure at all Xaa locations
  Clone ID: PAT_MRT3847_4476C.1.pep
FEVGLLPLGLVVGALSVLCLSGFGSVGSRLVPLRVSVRFCLWRCLSPLRLLFFGLIPGCWLKVPPCNQXGGWWFSS

SEQ ID NO: 224518 - protein, 72 aa, Glycine max
  Clone ID: PAT_MRT3847_44770C.1.pep
VFLTNSINFQIPLVPHLNKDPHGIHLHHFIHIHYLTMYCTSLKKISSSRAIMRVEIFQIQPKIELFPSCCDS

SEQ ID NO: 224519 - protein, 50 aa, Glycine max
  Clone ID: PAT_MRT3847_44771C.1.pep
NEEIHIEASSSSSSSLLLLRKHKVSPNQSQLTSICLKSIFSLIQSSNCPR

SEQ ID NO: 224520 - protein, 154 aa, Glycine max
  unsure (1)..(154): unsure at all Xaa locations
  Clone ID: PAT_MRT3847_44772C.1.pep
ASASKFWAEKASLCQDVQYESLESMYNTKHFVARRESPWKVDGDSAGVSSKLKLLEQDLLNLEKIGKSDPSKVPSLIKKQAKRYQAISEKIDDLCRRIXFRTQTQTEFLLEAFRLQLGASETGQKLMALQTEIGKSHYIYRDELSETTLTTRRS

SEQ ID NO: 224521 - protein, 59 aa, Glycine max
  Clone ID: PAT_MRT3847_44773C.1.pep
PPPYRKPWDPLVVGAPPSPPPPPPPPPPPPPPPLFFFKKIKNLIVVPFKRPLGKFSESR

SEQ ID NO: 224522 - protein, 253 aa, Glycine max
  Clone ID: PAT_MRT3847_44774C.1.pep
MVGSTATSLEEDAASDVIYEEQHSQHFGNNNGFDSKFMASASKFWAEKASLCQDVQYESLESMYNTKHFVARRESPWKVDGDSAGVSSKLKLLEQDLLNLEKIGKNDPSKVPSLIKKQAKRYQAISEKIDDLLFEQANDPCEPSLSTEFRTQTQTEFLLEAFRLQLGASETGQKLMALQTEIGKSHYIYRDELSETTLTTRRSFDSIRNNFKEIQRNLEIWLARIIGDLEGILAREGASRVREYYISRYPFVQ

SEQ ID NO: 224523 - protein, 74 aa, Glycine max
  Clone ID: PAT_MRT3847_44775C.1.pep
AKVYSLYMLREFFSRPTFLLGCIPGVIGLVFCIDNHSTGVVQWLKKAGWGNKCGNLFLLRAITCQCLTISDTYS

SEQ ID NO: 224524 - protein, 165 aa, Glycine max
  unsure (1)..(165): unsure at all Xaa locations
  Clone ID: PAT_MRT3847_44776C.1.pep
XXKXXXXMXXXGXXGXXXVMEXXXXXIXXXXEXXXXXXXXEKGLGXXXKXXXXKXLXXXXVXXSXMCXGXEXXXGXGXXGEXIYXXKXXEEXXVKKXXGXGIXXMXKXGPGKKGFXFFIWXEKKEWVEGKNVVFGKVIEGLKGCKEIEKVGLRLGKKLKRGVIGK

SEQ ID NO: 224525 - protein, 85 aa, Glycine max
  unsure (1)..(85): unsure at all Xaa locations
  Clone ID: PAT_MRT3847_44777C.1.pep
RGLFLGLFFMTVGMXIDPKLFVXNFAVIMGALRLSLXGTTFSDRGFAQRFGMAINTSLHXVNDQAAGGECGFVTTTEAVNELIYV

SEQ ID NO: 224526 - protein, 48 aa, Glycine max
  Clone ID: PAT_MRT3847_44778C.1.pep
IIRTKKTTIKIIGIKRELKCKLYELNKPLSNYRDKKDKNRETSRNQSK

SEQ ID NO: 224527 - protein, 67 aa, Glycine max
  Clone ID: PAT_MRT3847_44779C.1.pep
FFSNSLIFPKHTYTSFGFLIIQISPSPLLLHTFSYLNYINFIHIYTPYFLFFSFSFIYLIRINLYST

SEQ ID NO: 224528 - protein, 115 aa, Glycine max
  Clone ID: PAT_MRT3847_4477C.1.pep
LLGVRPQEGEIEGSVVKLSWLAHHFSHMNIDEDNVEQLQRFTRAWILRFIGGVLFINKSSSRVSLRYLQFLRDFEQCSTYAWGPAVLAYLYRKMYVSHDESFAYDSSQSPYSIAM

SEQ ID NO: 224529 - protein, 120 aa, Glycine max
  Clone ID: PAT_MRT3847_44780C.1.pep
MGLPLLSSALWDPSHNCVSSSVEFIRPLLSASKSYSLGLKFNCQQFCKGRSKLPGVLVCASRRPKGTVWRRKTLPQNEDLPPILPKNKKKPYPIPFKEIKQAGREDRKLAHMGIEKPLEP

SEQ ID NO: 224530 - protein, 113 aa, Glycine max
  Clone ID: PAT_MRT3847_44781C.1.pep
RWFFVFEWAGYGLGGGFLVWSGACVMVNAWSFGSDCFFWEVSVTCQPGRFFSPGRALFLGQVVRVHSFWVGSTFFSPGWCWGSTCCAWRAPLVEHFVTWPLGDGLSPSLMFMR

SEQ ID NO: 224531 - protein, 58 aa, Glycine max
  Clone ID: PAT_MRT3847_44782C.1.pep
TFTIAFSHSHAYHMFIYYTHILNFFLSIFNSFTSYIYFLILTSFLSLYTFLNPSILFI

SEQ ID NO: 224532 - protein, 76 aa, Glycine max
  Clone ID: PAT_MRT3847_44783C.1.pep
HSKYMVHHELHDYSLRYRPETIYGCNCGYNHYIDPRLCNHAHNLIYLDTKVFGAGFYDICVYSWKRTYGVIHESLP

SEQ ID NO: 224533 - protein, 57 aa, Glycine max
  Clone ID: PAT_MRT3847_44784C.1.pep
FIKRKLEYIFFFVLRFWYVKKRGRRFDVFFFFLINKNPYRNLKFILGLFNKQRRGKK

SEQ ID NO: 224534 - protein, 42 aa, Glycine max
  Clone ID: PAT_MRT3847_44785C.1.pep
FEVEQKHRANAGYLNALKLFQAIRDKYSGVTYADLYELASAT

SEQ ID NO: 224535 - protein, 176 aa, Glycine max
  Clone ID: PAT_MRT3847_44786C.1.pep
MMNYFCGCHGLVIILVLIASPAEGEDNHPLLELLSSRDEVVQIAGYGEEKLSTVLITGSVTCEAPHRPQPHAWPIQGASVGVNCKSHGRNNKWNKGKSMVATGVTDEFGDFMIDLPSHLHAIPNLEKVCIVKIHRIPKASLCRPAHVIKKHKGLTLSSFGNGIRTYNAGNIRIQHI

SEQ ID NO: 224536 - protein, 58 aa, Glycine max
  Clone ID: PAT_MRT3847_44787C.1.pep
KIKMSYIGCLDSAAGCKIQKIVHIKMNILRSFWNSPTGLKTTHFWGPAKKRSLPFAVD

SEQ ID NO: 224537 - protein, 97 aa, Glycine max
  Clone ID: PAT_MRT3847_44788C.1.pep
PGKLFKHYGLRFVTSSIEKKKLAVAAEKNQTTFAATQKEETNEENGGETKEEKNNGGYMISASAAYEIAASAASYLHAQTRSILPFKSSDAVEGEGS

SEQ ID NO: 224538 - protein, 64 aa, Glycine max
  Clone ID: PAT_MRT3847_44789C.1.pep
DIEFISDRGLYTMMYQNMCVAENDSGKCKKESVPDKICCVIDRNIACVRTRGRRRGSTREFKTE

SEQ ID NO: 224539 - protein, 214 aa, Glycine max
  Clone ID: PAT_MRT3847_4478C.1.pep
GHHPRQSSISFSVSSRSAMPRDSSTYGHSSPRRRRRAVVNDKAHSSSSRTYSEKLNSVLASTGGSIVRSEKAHSSSSRTFSEVVDWLLESTGGSIVRSEKAHSSSSRTFSEVVDSLLESTGGSILRSEKPVSHRHTVSLLLASQVSNSTSNRLASTGGISSYNYERRVSSAIRSEIAYSISQYVSNQQLLDLMIRSVESRNYSLYATRPSQRYY

SEQ ID NO: 224540 - protein, 156 aa, Glycine max
  Clone ID: PAT_MRT3847_44790C.1.pep
STFPAAYRRNSRDSFDEAAAAAAASSTATATGFFYGRRSMEEGSTTQTITECYEPSEASIEWSVTTAEGHDEAISNGVAVEEKWKRKGGNGLLVSCRSQKAVSVGPQPVKCGSEGQRNATSSLSSHVNVIGSVNKPPLAHARGHRNAPRVSLAFAT

SEQ ID NO: 224541 - protein, 79 aa, Glycine max
  Clone ID: PAT_MRT3847_44791C.1.pep
GLLSLVSVLNTYSTVTSLLLFLERKKKSCLSIYLFIVMDLNYALWWGCRCRTLGVFWFSLVIILFLAFFLRDKGNSTSE

SEQ ID NO: 224542 - protein, 56 aa, Glycine max
  unsure (1)..(56): unsure at all Xaa locations
  Clone ID: PAT_MRT3847_44792C.1.pep
EQLQERLMPCGTNSDRXIVKXXSXSQLGRGLQXAVXSINLXXXRXXXXQGXSXGRX

SEQ ID NO: 224543 - protein, 60 aa, Glycine max
  Clone ID: PAT_MRT3847_44793C.1.pep
TITLETESTYTILNPNVKIQHMYTIPPDHPRFNLSQKHLKNGRTLFYYIIYNYRTFHLFL

SEQ ID NO: 224544 - protein, 50 aa, Glycine max
  Clone ID: PAT_MRT3847_44794C.1.pep
ERFVSYDPGISTLVNGLSGKTLAIICDAFLFRKALNCCCSPDMYHKVIYC

SEQ ID NO: 224545 - protein, 106 aa, Glycine max
  Clone ID: PAT_MRT3847_44795C.1.pep
MVASDGGGGGRLMKKVLGLGYWVQGFRCFPWLVVSFYLKDGLNVDPSILQILQSSANLPMVGKPLYGLLSDSVYISGQHRVPYIALGGTLIFTLFAVSMYPFAFSL

SEQ ID NO: 224546 - protein, 37 aa, Glycine max
  Clone ID: PAT_MRT3847_44796C.1.pep
HLMIDRSLCSTKLLYGSSSKLVTDTSCSSLHEGGSEF

SEQ ID NO: 224547 - protein, 276 aa, Glycine max
  Clone ID: PAT_MRT3847_44797C.1.pep
MVKGPGLYSDIGKRARDLLFKDYQNDHKFTITTYTSTGVEITSTGVRKGEIYLADVSTKVKNTNITTDVKVDTNSNLRTTITVDEPAPGLKTIFSFNFPDQKSGKVELQYQHEYAGINTSIGLTANPVVNFSGVVGNNLVAVGTDLSFDTASGNFTKYNAGLNITHADLIASLTLNDKGDNLTASYYHIVNPLTNTAVGAELSHSFSGNENILTFGTQHALDPLTLLKSRVNNYGRASALIQHDWTPRTRFSLVGEVDTGAIEKSAKVGLAVALKP

SEQ ID NO: 224548 - protein, 76 aa, Glycine max
  Clone ID: PAT_MRT3847_44798C.1.pep
LIKRPPRLFLCAWGCYPRSPLRPLAGVNPALLALEDPIQPPKMSFCSPLFHKKTIVPNMKGGESGHHLLLNFENLL

SEQ ID NO: 224549 - protein, 96 aa, Glycine max
  Clone ID: PAT_MRT3847_44799C.1.pep
ECAIVDKYGERVVSLKLQKLLAARLLMCGRGKVWLDSNEFNHISMANCGQNIWKFVNAGPIIWNPAKIHSRSRARMMNDAYKKGRLSGYCKRKGTR

SEQ ID NO: 224550 - protein, 117 aa, Glycine max
  Clone ID: PAT_MRT3847_4479C.1.pep
MVAHTLQPHLVAVGTNIGVIICEFDARSLPPVAPLPTPSDSKEHSAIFVIERELKLLNFRLNNSANPSLGNNSSLSETGRPKGDFFEPLPIKQGKKHISTPVPHDSHSVLSVSSSGK

SEQ ID NO: 224551 - protein, 73 aa, Glycine max
  unsure (1)..(73): unsure at all Xaa locations
  Clone ID: PAT_MRT3847_447C.1.pep
RAIRIAIIANPGEGELHSIYGTIIXETQRDEDRAKSYFDQAIHAAPNDCTVQGSYAHFMWEAGEEEEVVNGGV

SEQ ID NO: 224552 - protein, 78 aa, Glycine max
  Clone ID: PAT_MRT3847_44800C.1.pep
DRFIRGFFFPFRQFLMGIWLLLNLFMMTKFWDLEKKLNYFRQASVVLGKLNQELYSIWLYVMVEEIKINSLFLGLTSS

SEQ ID NO: 224553 - protein, 53 aa, Glycine max
  Clone ID: PAT_MRT3847_44801C.1.pep
MGRPPCCDKVGIKKGPWTPEEDIILVSYIQEHGPGNWRSVPTNTGLSRCSKSC

SEQ ID NO: 224554 - protein, 74 aa, Glycine max
  Clone ID: PAT_MRT3847_44802C.1.pep
PGPLVILLGIVPHHIDLRSHHTHYLIVILHQGEFFRQLPPLCSIASNMSWAASLLTTSTSSCTTSTRNGSSVEP

SEQ ID NO: 224555 - protein, 53 aa, Glycine max
  Clone ID: PAT_MRT3847_44803C.1.pep
QKIELSCSNNFYILFHTITGAILVCMKQVTHEIQETDNSSSPSENAVFPTPGS

SEQ ID NO: 224556 - protein, 39 aa, Glycine max
  Clone ID: PAT_MRT3847_44804C.1.pep
TLLTGQQHVWRPQRGLPERSVAMLGASLFEHLLHQYTTD

SEQ ID NO: 224557 - protein, 100 aa, Glycine max
  Clone ID: PAT_MRT3847_44805C.1.pep
STTRPLKVGVLGSDLCTEDGVCTREGDAELNGDVGFDGSKEEGKGVNPSGGEAAEALGEGSQVVRSLEGKSENEIAELDGNDATLKTLDEKKNITVWNVK

SEQ ID NO: 224558 - protein, 112 aa, Glycine max
  Clone ID: PAT_MRT3847_44806C.1.pep
MVKGRQGERVRLYVRGSILGYKRSKSNQYPNTSLIQIENVNTKEEVAWYCGKRMAYIYKAKVKKDGSHYRCIWGKVTRPHGNSGIVRAKFKSNLPPRSMGARVRVFMYPSNI

SEQ ID NO: 224559 - protein, 103 aa, Glycine max
  Clone ID: PAT_MRT3847_44807C.1.pep
QSSKNMPLPFNGALASMTLALTKNALFDLGISFWQTMTSSMEMKFHFTSGLLIKSGKWLSEDNKIGKTLTQIKFAYSLFHLQTIFCMFYHNIIIHIQFFFCGV

SEQ ID NO: 224560 - protein, 92 aa, Glycine max
  Clone ID: PAT_MRT3847_44808C.1.pep
FHSPSNPGGWCLWGRACPTTNSGPTNKRSQHLCKGVYEEADVEGALRINVLMEESWCELTSVSVNGYVNGSCTEGRIEVALRCYLSGGRVLR

SEQ ID NO: 224561 - protein, 43 aa, Glycine max
  Clone ID: PAT_MRT3847_44809C.1.pep
TRPEARTMLVPLLVATMAGWMHCRRRQVLGLNKEVLIHVRGLS

SEQ ID NO: 224562 - protein, 51 aa, Glycine max
  Clone ID: PAT_MRT3847_4480C.1.pep
LKLFKIYTLLIDTKMRIHNIKCLNKGIHNWERSTILCCGFSSLYRLAMYSS

SEQ ID NO: 224563 - protein, 137 aa, Glycine max
  unsure (1)..(137): unsure at all Xaa locations
  Clone ID: PAT_MRT3847_44810C.1.pep
MGSQNCMDRKHYVLVHGACHGAWCWYKLKPRLESAGHKVTVLDLAASGTNMKKIEDVDTFSEYSAPLEKCLXNIPLYEKLVLVGHSLGGLNIALAMEKFPEKVAVGVFLTAFAPDTEHHPSYVLEQIQCLTMQLTGS

SEQ ID NO: 224564 - protein, 46 aa, Glycine max
  Clone ID: PAT_MRT3847_44811C.1.pep
LSKKKKKKKKKKKKKKKKKKKKKKKKKKNKKKKKKKKKKNKMGGPF

SEQ ID NO: 224565 - protein, 152 aa, Glycine max
  unsure (1)..(152): unsure at all Xaa locations
  Clone ID: PAT_MRT3847_44812C.1.pep
XSXXHVIFLDVGMTTXXSKRERGYLVEFFKAIALQDXXTAAGLELRLSKRQNCPDPKFFIEEVDKSFEFWRSPEGESVHTADRMQQLLEHVRRCKVNIDGNVCAVIVTTLVLEGWQRRLDPEYDMLHALQTLLFKADLAQSLSYAIEGLVAP

SEQ ID NO: 224566 - protein, 320 aa, Glycine max
  Clone ID: PAT_MRT3847_44813C.1.pep
MASIYNIPSHIKAWVYYEYGNIEEILKFESNIPIPDIKEDQVLIKVVAAALNPADYMRALGFFKDTDAPLPIVPGFDAAGVVVRVGSKVSKFKVGDEVYGDIIEYAWNNPKTIGTLAEYTATEEKVLAHKPSNLSFIEAASLPAAIITAYQGFDKIEFSAGKSILVLGGAGGVGSLVIQLAKHVFGASKVAATASTPKQDLLRSLGADLAIDYTKENFEELVEKFDVVYDTVGESNKALKAVKEGGKVVTIVPPATPPAITFSAVSDGAVLEKLQPYLESGKVKPVLDPKGPFPFSQTVEAFAYLKTNRAIGKVVLHPIP

SEQ ID NO: 224567 - protein, 72 aa, Glycine max
  unsure (1)..(72): unsure at all Xaa locations
  Clone ID: PAT_MRT3847_44814C.1.pep
TYIFPFSLYFFLFFIXLFFFYFYNFFFYFYFILYYLLFYFLLMFYFFFIFSIFFFIFFLLYYLFIFFLSFFL

SEQ ID NO: 224568 - protein, 55 aa, Glycine max
  unsure (1)..(55): unsure at all Xaa locations
  Clone ID: PAT_MRT3847_44815C.1.pep
IRLQKRGNYFYTIIQLTLSFFGNTSLHFHNSSPVVRKNYFLXVLFQRIPKLPPES

SEQ ID NO: 224569 - protein, 144 aa, Glycine max
  Clone ID: PAT_MRT3847_44816C.1.pep
GDMACPWVPEGAYAVRLGNEASIKQRIKVIKGMYYSITFMVARTCAQEERLNISVTPDWGVIPIQTLYTSSGWDPIAFGFKAENETVEMLIHNPGKEEDPACGPLVDSVALRTLYPPRATNRKFILSLLLFLYFLLKYVYSLFN

SEQ ID NO: 224570 - protein, 62 aa, Glycine max
  Clone ID: PAT_MRT3847_44817C.1.pep
LCLELPTTEEGICSRVAREHTHMRGSSTLQPLQRAYALMICAAAVDHTPYGSSKISSTPSKV

SEQ ID NO: 224571 - protein, 64 aa, Glycine max
  Clone ID: PAT_MRT3847_44818C.1.pep
ELMIITMFVSCNLEGGINTTIRFPSNIGKRFGKQLGRSRPLNPPTGWTDESNSSISNFDYSTYM

SEQ ID NO: 224572 - protein, 80 aa, Glycine max
  Clone ID: PAT_MRT3847_44819C.1.pep
HVDMVCVSVYQCAAVAFTTRLQKQSLSAKRTQSPSRHWLLSRERISELPIGPKQVLVVSMINNIFPRRYSIGHIRTSARA

SEQ ID NO: 224573 - protein, 171 aa, Glycine max
  unsure (1)..(171): unsure at all Xaa locations
  Clone ID: PAT_MRT3847_4481C.1.pep
GFPGLGFWLGSGPRVGVRVPLGCFLLPPGXPFAWFPXGVCXAGXLVVVASXWPLVAFCLARARXCRLWGVSXALFARLASGAVLXPLGRFAGSPLAGXFPPLCAGXXVXLXLSVFLLRGAPGLSLLALVVGSFFFRGSLSPCLRVVCPFGPALGVGLVFVPFPPPGVPLSC

SEQ ID NO: 224574 - protein, 125 aa, Glycine max
  Clone ID: PAT_MRT3847_44820C.1.pep
AYISSSKFTVKSDIYSLGIIIFELITAIHPHQNLMEYIHLAAMDYDGVDGILDKQLVGKCNLEEVRQLAKIAHKCLHKSPRKRPSIGEVSLGILRIKQKRLMKEDSMSFASSNFSRSAFGNQGSL

SEQ ID NO: 224575 - protein, 82 aa, Glycine max
  Clone ID: PAT_MRT3847_44821C.1.pep
GVTTQSYHRTLTRRHCYDLMKMVCTSLISMFQSLHLFCMLFPLYKQDICQLIQHHAIHFNWNRILYYTIHKEGLLLICWLTP

SEQ ID NO: 224576 - protein, 81 aa, Glycine max
  Clone ID: PAT_MRT3847_44822C.1.pep
SYHARYLSFFLHSILFLSFLNTKSFPAPPLLFTLQMTSCFSSCCSSLPLLIGLLIFLLFIFFLIFLRVCAVPEGVLLWMKI

SEQ ID NO: 224577 - protein, 427 aa, Glycine max
  unsure (1)..(427): unsure at all Xaa locations
  Clone ID: PAT_MRT3847_44823C.1.pep
MVDQADLVIICVSVGVALGVLIACLIYFGIRWYKKRAHLSRCSGFXCWALKPTRXDGGKSVVTFAXSLHRSCIPSLKQPHTENSHLSSWYNQXKIRINQHPAFVSGCPKYFNKPHKNAQQGFINXPSGAGSFGTIYKAVMPTGKVVAAKILEAKSKQGEEVFQTEVLQLGRLHHRNLVNLLKYQLVQGYESMSDEFMSNGSLENLLYGEEKELSWDERLQIAGDISHGIEYLHGWEKPTEGHRDLKSANILLDHSMRAKVSDFGFSKEEVFDGRNSGLKGTYGYMDPAYISSSKFTVKSDIYSLGIIIFELITAIHPHQNLMEYIHLAAMDYDGVDGILDKQLVGKCNLEEVRQLAKIAHKCLHKSPRKRPSIGEVSLGILRIKQKRLMKEDSMSFASSNFSRSVSQIEEQQVELTKITTINHREMG

SEQ ID NO: 224578 - protein, 128 aa, Glycine max
  Clone ID: PAT_MRT3847_44824C.1.pep
MGQHTSLFTSEYKNNGHPGKLCDQIAESGDLSMHRSKTLTGRGDRPTYTKTNKVMVIGETTTKANENHDKIVRDTCRNIDCGSDEVSIDADNCQERVNMEQQRPDMGQGVHGHMTTTPEGKGAGDQGD

SEQ ID NO: 224579 - protein, 40 aa, Glycine max
  unsure (1)..(40): unsure at all Xaa locations
  Clone ID: PAT_MRT3847_44825C.1.pep
LMXVTELSQXARMGYXDIYRYIXIYLSIDIFXKKKXKXTX

SEQ ID NO: 224580 - protein, 88 aa, Glycine max
  Clone ID: PAT_MRT3847_44826C.1.pep
EKERNNMALRGRVYKINQRFTGGKPPQNPQMGWGPQAKGFQQKGGLEKPPAWGFLCKNKLGGKGWALSYFDSALPDSPRGGEGGPLGG

SEQ ID NO: 224581 - protein, 66 aa, Glycine max
  Clone ID: PAT_MRT3847_44827C.1.pep
RKSLIILCYPYILCSSFILSHFLSPSTTYALCYFNLAHAVFQYLLSLYLLDQEPPDTYMYFKSEFV

SEQ ID NO: 224582 - protein, 96 aa, Glycine max
  Clone ID: PAT_MRT3847_44828C.1.pep
MATTASLSGTIVSTSFMRKGPMTTKSLKTFHNALSGLKGGRGGRVTCMDSCKVKLITPEGEVESECPDDAFIVDKAEEEGIELSYSCRAGYCVSCV

SEQ ID NO: 224583 - protein, 61 aa, Glycine max
  Clone ID: PAT_MRT3847_44829C.1.pep
RDQHLSHIFHFQSTVNPFSKFSINISTATYPKVNITESSNNHLSHPTFPLMKSDRDTYSQG

SEQ ID NO: 224584 - protein, 241 aa, Glycine max
  Clone ID: PAT_MRT3847_4482C.1.pep
TRRNIILMSNKKTEADPAIIALLLETRIPYIAESMTYVAGDRVITDLLSKPFSIGRNLICVYSKKHMLDDPALIEMKRNANIRALKEMAMLLRSGSQIVWIAPSGGRDRPDPHTGEWAPAPFDTSSVDNMRRLVEHLKPPGHVYPLAILCHDIMPPPLKVEKEIGEKRIISFHGAGISVAPALSFSETTATSENPEKAKELFSKALYDSVTEQYNVLKSAIHGKKGFEASTPVVSLSQPWK

SEQ ID NO: 224585 - protein, 60 aa, Glycine max
  Clone ID: PAT_MRT3847_44830C.1.pep
TMPPLILLGGNPPKFLTPQSLVGSVLRTNQTLIYSWQWEYPIQLLLSLRDSLLDWFLCDI

SEQ ID NO: 224586 - protein, 163 aa, Glycine max
  unsure (1)..(163): unsure at all Xaa locations
  Clone ID: PAT_MRT3847_44831C.1.pep
GSSLHSTYTLLDSTQRVHGIDGTGPKFYMGYTATEQTMHLPHTGTSRTMTYHRPEIEELHYSXGENEEHICVQKDRTKPTILTMARLDRVKNITRLVXWYGKNAKLNELLNLVNGAGDNXKDLKDLEHKAHMKNMYGVFDNYKVNCQLKWITDDINRERNGEL

SEQ ID NO: 224587 - protein, 188 aa, Glycine max
  unsure (1)..(188): unsure at all Xaa locations
  Clone ID: PAT_MRT3847_44832C.1.pep
MQPQLSSRINLVELKAQIVKRIGVDKSKRYFYYLNRCLSXKLSKAEFDRSCYRVLGRENLPLHNHFIKSILKNACQAKTPPPVQLTGPPKSGALVNNLSPGREDGHEQSVANFQNQNASIWANGVLPGSPRKARSGVRDRKLKDRASPLGPNGKSDSGAHQSTATEESGSKGDMGKWNFLLHAIIKDQ

SEQ ID NO: 224588 - protein, 49 aa, Glycine max
  Clone ID: PAT_MRT3847_44833C.1.pep
GPFPSSPSDSIKGFMFNQVGTPPPTKNQPNVWGFGFHFIKKNGLSLFFF

SEQ ID NO: 224589 - protein, 472 aa, Glycine max
  unsure (1)..(472): unsure at all Xaa locations
  Clone ID: PAT_MRT3847_44834C.1.pep
MWTGTGRALVKLALCEEHDERMRDLRNELQSFEVEEYDESHKKKAIEALKRMESWNLFSDTYEEFQNYTVARDSFLAHLGATLWGSMRHIVSPSVADGAFHYYDKISFQXINNEXEKVGHIKQLPVDMKAIMDGFSSLMVPSQKPMFSPHVLPLSEDPALAMAFAVARRAAAVPLLLVNGTYRKTVRTYLDSSILQFQLQRLNKHGSLKGSQVHSRSVLEVPVFWFIYSEPLLLDKYFQAKALSDMIIDDKXEPSSWESQLHCNGHSLLLNLRQPIKAAVASTAEHLAGLLPLHLVYGQAHETAVEDWLWSVGCNPFSITSQGWHISQFQSDSIARSYVITTLEESIQLVNSAIHLLLMERTTEKTFRIFQSQEHELVNKYNYVVSLWKRVSTVTGELHYGDALRLLNNLEDASKRFVDQVNVTLALLHPINCTRERKIHMVFDMTTIPAFLIVLGCLFMVLRPRRPKPKIN

SEQ ID NO: 224590 - protein, 77 aa, Glycine max
  Clone ID: PAT_MRT3847_44835C.1.pep
AYFAPQDFWRLSCQIGGISMVCILSSVSLVREWEATERSKQAPRGMYAYSQPKRVHSCLNCRKDVCSVRYFILKYVF

SEQ ID NO: 224591 - protein, 109 aa, Glycine max
  Clone ID: PAT_MRT3847_44836C.1.pep
QKTFSLEAIEKLPNWGAKLQFIYRTTQILWISNCHRPLPINLRTDPNHGHYIHNDPIFCRQNINNYEQYDFQILNILITIHNTFNDPKTLADACYNLSQHIHCHSTRPI

SEQ ID NO: 224592 - protein, 233 aa, Glycine max
  Clone ID: PAT_MRT3847_44837C.1.pep
DIKQLGFTERKIIVDRLVKIAEEDNERFLLKLRERMDRVGLDIPTIEVRFEHINVEAQVYVGGRALPSMLNFFANVIEGFLNYLHIIPSPKKPLRILQNVSGIIKPRRMTLLLGPPGSGKTTLLLALAGKLDKDLNHSGRVTYNGHGLEEFVPQRTSAYISQYDNHIGEMTVRETLAFSARCQGVGQNYEMLAELLRREKHAKIKPDPDIDAYMKAAALGRQRTSVVTDLVPN

SEQ ID NO: 224593 - protein, 47 aa, Glycine max
  Clone ID: PAT_MRT3847_44838C.1.pep
KERPLLRKLTQFSRQSMLRSSITVGHNNLGNLENGGGLNYRWGWCLL

SEQ ID NO: 224594 - protein, 96 aa, Glycine max
  Clone ID: PAT_MRT3847_44839C.1.pep
GGAMLPLGAMNYADQKCPSSFLSFKIPHNLKRGFWVFLFFFMEKFLFKNRDEFLTICYGGGLISTGSGLTNENSPSLLLGGSPPLSWLCSAWGGAP

SEQ ID NO: 224595 - protein, 124 aa, Glycine max
  Clone ID: PAT_MRT3847_4483C.1.pep
SINSSSFFVTVMEVDEICISSLQFALMQAPTAMFPFRSKLQDFSQTISTDSLLRDCLLLHRSPNDLACWKFAVKYIFFISFFLLLLVAVISIQFIWNLFQFRRFKFCCLLYRSLLVRCQIWFVD

SEQ ID NO: 224596 - protein, 82 aa, Glycine max
  unsure (1)..(82): unsure at all Xaa locations
  Clone ID: PAT_MRT3847_44840C.1.pep
SRLNPRPRPNPHPPPRPXXRLHELARXWHPSXPXPXEXLGSELXRLVXLXRXLLGSRGGXRXAXXALXCSAXMSLEGPXGRH

SEQ ID NO: 224597 - protein, 72 aa, Glycine max
  Clone ID: PAT_MRT3847_44841C.1.pep
IRDPPRHARRGSTKVNAFGSGPYTIVVWPGAGLSLIFLSAVLGKIWLCMTDYLRIMELVLKLQAYVVYEVKL

SEQ ID NO: 224598 - protein, 100 aa, Glycine max
  unsure (1)..(100): unsure at all Xaa locations
  Clone ID: PAT_MRT3847_44842C.1.pep
LSISEFSGNGTLILSSAITFANTFLLFFSAELFDKSFFSTISLTTXSSSLVVISASLAVHFIATFLPLLGGSLLVTYFLXKVITYISSFLFLFYSAITSF

SEQ ID NO: 224599 - protein, 95 aa, Glycine max
  Clone ID: PAT_MRT3847_44843C.1.pep
AIFNNSCFEIMIINKIFFYKILQAFTFFPSFNYLLFSSHFLYFFSCVGYLIYRCFSSRESRWGHLYLSQQYISFKVFFVTLIGYILRKILLTPVI

SEQ ID NO: 224600 - protein, 121 aa, Glycine max
  unsure (1)..(121): unsure at all Xaa locations
  Clone ID: PAT_MRT3847_44844C.1.pep
EEFHSMQRMMNAPDSNDNIDLPLTIDSLGLQGACKAFPNKSGFDDKLVLANTQQLFYGHFPLDSWLPLLANSIYSVSKLPSQSCVVNATCXSGRSGCLTTSWINLVHCNRSYDYLKRIPST

SEQ ID NO: 224601 - protein, 80 aa, Glycine max
  unsure (1)..(80): unsure at all Xaa locations
  Clone ID: PAT_MRT3847_44845C.1.pep
MVKALRPHYELNNAVHIXRLGTTYRILADXIATTFTADXTHNMTVRSRHNVITTALRDISISNSRITLADVANKLRLNSD

SEQ ID NO: 224602 - protein, 106 aa, Glycine max
  Clone ID: PAT_MRT3847_44846C.1.pep
NIAMTKNEMHIIGIVIIIMIVMDFSQANYNPSFGQIERNHVSNLACEDKCRLKCAFLLIPPFTPGYLICLYKCMATNCKANPIVQDCKSGCGLTKSVSVNDDAHGV

SEQ ID NO: 224603 - protein, 185 aa, Glycine max
  Clone ID: PAT_MRT3847_44847C.1.pep
LKSKLREIAYPDQNSMCHPPAKVNTKGAPKKSMNRNPRSTKRDPSYWKYVDAFHSVQNSNSSVRHSVSSSYQPNPRRIMPMLDQFQSFIQDFIDNIVDVKPDRNCGYRSVASLLGMGENSWSLVCNHLLKELDKFSNDYIKLFGGMDRFKELRMSLLVDGLTKVNMDKWMDIIDMGYVIASRYNV

SEQ ID NO: 224604 - protein, 46 aa, Glycine max
  Clone ID: PAT_MRT3847_44848C.1.pep
TPGCLNPGIQNHYLLLREGLKAKPWDHPTARGTLHFPKKLPLCVRQ

SEQ ID NO: 224605 - protein, 74 aa, Glycine max
  Clone ID: PAT_MRT3847_44849C.1.pep
SFLIKFTHNLYKKKIPTPEMETTTTSNDACLVRQFPHFLISLPMHPQIMDPVMVGNGHGHGSKVSTLASSNFPC

SEQ ID NO: 224606 - protein, 71 aa, Glycine max
  Clone ID: PAT_MRT3847_4484C.1.pep
VHVAVMFALHSSLPSHCFPDGRGGLRGGHRLLGPETGHHAGARDARPDGLLQHVCCGPVARDVHPPRLPPA

SEQ ID NO: 224607 - protein, 133 aa, Glycine max
  Clone ID: PAT_MRT3847_44850C.1.pep
MKILLTNSICMLKFMCAILAHFIIKERLHIFGVLGCALCMVGSTIIVLHAPHERVIHSVKEVWQLATEPGNFLQLTYKEWDTEDASQIATEVCGFVTILSGTFLHKTKDIANRPVELPVFTSTPQHDNSHSGT

SEQ ID NO: 224608 - protein, 73 aa, Glycine max
  unsure (1)..(73): unsure at all Xaa locations
  Clone ID: PAT_MRT3847_44851C.1.pep
XWSXNHVRGTGATVXXVXXTAGXKRLPLRKKPFGLSPFLKFLNYPWFLTAARDPPSGRSSGRGVESDPGIPRP

SEQ ID NO: 224609 - protein, 234 aa, Glycine max
  unsure (1)..(234): unsure at all Xaa locations
  Clone ID: PAT_MRT3847_44852C.1.pep
GPNSIIISAILAHFIIKERLHIFGVLGCALCMVGSTIIVLHAPHERVIHSVKEVWQLATEPGNFLQLTYKVYLVXVIALFYYFKELFFYEKAKSHLIHTVCTCITIFNLKMXMIYSIRTKPNLGISDKRLLFLLIALICKFQLEFLLKIIMSLKXTLYIFVGSLRMDCXVIICFIYLKQEWDTEDASQIATEVCGFVTILSGTFLHKTKDIANRPVELPVFTSTPQHDNSHSGT

SEQ ID NO: 224610 - protein, 110 aa, Glycine max
  Clone ID: PAT_MRT3847_44853C.1.pep
MSDAFCSDCKRQTEVVFDHSAGDTVCSECGLVLESHSIDETSEWRTFANESGDNDPVRVGGPTNPLLTDGGLSTVIAKPSGGSSEFLSSSLCRWQSRGSNSDRGLIVIFK

SEQ ID NO: 224611 - protein, 47 aa, Glycine max
  Clone ID: PAT_MRT3847_44854C.1.pep
DFIEGLDIPDRAHHNLFQFTLDLYVGAAVQLAKTVKNVVHPVLGIKI

SEQ ID NO: 224612 - protein, 51 aa, Glycine max
  unsure (1)..(51): unsure at all Xaa locations
  Clone ID: PAT_MRT3847_44855C.1.pep
SGIFLIHWMCLTNKLMXLYIITFLESGRLRIALLGEVKKKNETLHNIPADA

SEQ ID NO: 224613 - protein, 87 aa, Glycine max
  unsure (1)..(87): unsure at all Xaa locations
  Clone ID: PAT_MRT3847_44856C.1.pep
GPYGQIVKFDNFVFGQSCAWNNWANGHYTEGVELNDSVLDIVHNDADNCECMQSFHVCQSLGGGTGSGMXTMLSSTIKEYYPDRMML

SEQ ID NO: 224614 - protein, 35 aa, Glycine max
  Clone ID: PAT_MRT3847_44857C.1.pep
VLSKCSTLNPWSFYVPITDFRVGVLCFVLPTTRNR

SEQ ID NO: 224615 - protein, 50 aa, Glycine max
  Clone ID: PAT_MRT3847_44858C.1.pep
IGHASVIAFLQKLYIEGFNAAMGRCPLKGSNAYNTHYMATFINFFFEETH

SEQ ID NO: 224616 - protein, 146 aa, Glycine max
  unsure (1)..(146): unsure at all Xaa locations
  Clone ID: PAT_MRT3847_44859C.1.pep
LDGIPENTGISLACAKKSPTRGRARSDIYTTRSQDCELWKPARTKAMTMTYNPNPRTDAWRTETSKRTGFHRENKCVTGRTATPMQEDQVTIDXDTPPHERIPRTYRVIKPQNPLXIKRRKGKPNFPQGTTRRVKRTPLIIGGGAG

SEQ ID NO: 224617 - protein, 30 aa, Glycine max
  Clone ID: PAT_MRT3847_4485C.1.pep
AGRNLSWRNNIYRRFSSVVVNVMSSLLLIL

SEQ ID NO: 224618 - protein, 132 aa, Glycine max
  Clone ID: PAT_MRT3847_44860C.1.pep
MELQDTAASRVSIGFPLGLALLFVCLIFMCGFFCCCLHWTKLQSFLRSHGIINTQSLEQTQLQAELASPYQKPAFPVVMMKQNYAKALPVLMPGDDIPKFIATACPCEPPRDERITILVQKEEATDLCSSGN

SEQ ID NO: 224619 - protein, 75 aa, Glycine max
  Clone ID: PAT_MRT3847_44861C.1.pep
KHQTPSSCMTFFYKKQKKFMHNINIQINLFYFVNSRYLLMEIERDSKFVCDMYDNKFYIFLSTNFCKKCKTLIHD

SEQ ID NO: 224620 - protein, 356 aa, Glycine max
  unsure (1)..(356): unsure at all Xaa locations
  Clone ID: PAT_MRT3847_44862C.1.pep
MVKAAIIMLTTRNLPLHTSVWVKSRRSWCCYASLSQPDRKEIRLGLPSKGRMSADTLQLLQNCQLSVKQVNPRQYVAEIPQLSNLDVWFQRPKDIVRKLLSGDLDLGIVGLDTFSEHGQGNDDLIIVHEALEYGDCRLSLAIPQYGIFENVNSLDELAKMPQWTEEKPLRVATGFTYLGPKFMKELGLHHVTFSTADGALEAVXLISPLTYIFDEETPRWRQLLSKLGXAIYDQSMESFVDVSCKSLVHQNGGRXTKIALLDCNFCSKPVSSSFRSLHNIXIARKVTVFLVLSGGIVISVXADYDAIVICVPQKALYKSIQQLRAIGGSGVLISPLTYIFDEETPRWRQLLSKLGL

SEQ ID NO: 224621 - protein, 330 aa, Glycine max
  unsure (1)..(330): unsure at all Xaa locations
  Clone ID: PAT_MRT3847_44863C.1.pep
MLTTMNIPLHTSVWVNSRRKSWCCYASLSQPDRKEIRLGLPSKGRMSADTLELLKNCQLSVKQVNPRQYVAEIPQLSNLEVWFQRPKDITRKLLSGDLDLGIVGLDTFSEHGQGSEDLIIVHEALEYGDCRLSLAIPQYGIFENVNSVDELAKMPQWTEEKPLRVATGFTYLGPKFMKENGLKHVTFSTADGALEAAPAAEKTKWDTPDIRHNKLKSVNYPIXDMFTDILTYLPCQPLLITISNSYIIIPEQPSLMGLQLPTLTPVFCKRDGKVTADYYAIVICXPQKALYKSIQQLRDIGGSGVLISPLLYIFDEETPRWRQLLSKLGL

SEQ ID NO: 224622 - protein, 57 aa, Glycine max
  Clone ID: PAT_MRT3847_44864C.1.pep
PRVRGSPVGEKIPRLVEYGNNQLLPLILVWGSVGGGMQKKSFSLIQKGKKFFALYDF

SEQ ID NO: 224623 - protein, 68 aa, Glycine max
  Clone ID: PAT_MRT3847_44865C.1.pep
TVCFSYPYSTIISLFSYFPSFTLSGCPHSSFPYTLSRTLLTYHGLFPPPPPPPKEGGRHTVMTGNLPG

SEQ ID NO: 224624 - protein, 55 aa, Glycine max
  unsure (1)..(55): unsure at all Xaa locations
  Clone ID: PAT_MRT3847_44866C.1.pep
YLIXEHIGSDQQTXIXXSTKHHXEXLNXXXGEEGIEPYXXXXDMDXMLAKSXYQG

SEQ ID NO: 224625 - protein, 93 aa, Glycine max
  Clone ID: PAT_MRT3847_44867C.1.pep
PTKGKSCRGGFPPNKKYPRPLVFLKISQKKGPTLFNYFLFAAVGEGLGNPDIPDNCPTCWDPVQQGHNPYFFFLGGDSHYFHPQNPGPRGPFP

SEQ ID NO: 224626 - protein, 56 aa, Glycine max
  Clone ID: PAT_MRT3847_44868C.1.pep
TDRSVSEQHQRHLDASHVPFSSHAFVTPPFLPININLILPLKISPHSNTKLNHYES

SEQ ID NO: 224627 - protein, 59 aa, Glycine max
  Clone ID: PAT_MRT3847_44869C.1.pep
LTYRINLFISLKLSRNIDHYLSSYKHSSKLKNYFKYFTTPIRTYATKIALNNLQWSTSL

SEQ ID NO: 224628 - protein, 85 aa, Glycine max
  Clone ID: PAT_MRT3847_4486C.1.pep
YRLTPAGLLNNLARYVVKWWQRSELAYSLLTTAERIRPCIAAPRIAGHSTFDCPSYKGQALRVLASNYLGNEDHSLLGDSDRILE

SEQ ID NO: 224629 - protein, 47 aa, Glycine max
  Clone ID: PAT_MRT3847_44870C.1.pep
GKPASIPTLHRHQGQKIELKSAHNNESITPRSNPFAAILTPVLTLES

SEQ ID NO: 224630 - protein, 108 aa, Glycine max
  unsure (1)..(108): unsure at all Xaa locations
  Clone ID: PAT_MRT3847_44871C.1.pep
IRIGAPRHFGIWFMXQASPNQAREXFLPQIXKNXXRIKDGRMTVRLLLKYXVSKLRLESEXEIEITCRGQQLLPFLTLQHVRDNIWSPRDTTTPADRVMVLHYGRTTN

SEQ ID NO: 224631 - protein, 46 aa, Glycine max
  Clone ID: PAT_MRT3847_44872C.1.pep
SSDTVDNVQAFVQAEQGIPPARKRLIYAGKRLKNVRTLCDYIIQPE

SEQ ID NO: 224632 - protein, 67 aa, Glycine max
  Clone ID: PAT_MRT3847_44873C.1.pep
VYGPNYIGECLTLRKPSCYLEGVFQGQTSQPRIDSLQLTHARKNLLGFFTCLSELCHTYNLLCGIVL

SEQ ID NO: 224633 - protein, 65 aa, Glycine max
  Clone ID: PAT_MRT3847_44874C.1.pep
MIRTIHELSSHSLFIYMHSMQVKFYHVLVWDCQFQVCLFYLLMESNAKLVTCFCARVVLCLCDYE

SEQ ID NO: 224634 - protein, 63 aa, Glycine max
  Clone ID: PAT_MRT3847_44875C.1.pep
LQLTDFRENIQTPGRFYKEQPTYIYYKSINNMNSLPSEEGQTRHQFINMRLILSPALINALTQ

SEQ ID NO: 224635 - protein, 57 aa, Glycine max
  Clone ID: PAT_MRT3847_44876C.1.pep
SCGIAMSLFVSPAKFWGFLVLSNHVEPGALLNLVVLYESKLPFRIRLMTPWGASLNM

SEQ ID NO: 224636 - protein, 67 aa, Glycine max
  Clone ID: PAT_MRT3847_44877C.1.pep
ISWPSTSASYWWALSISGILSHSALSVPGSVIFVMHHLSLCGVWDSNGFVSGLVHSSTITVLKSTAV

SEQ ID NO: 224637 - protein, 177 aa, Glycine max
  unsure (1)..(177): unsure at all Xaa locations
  Clone ID: PAT_MRT3847_44878C.1.pep
ELKIEHIFSCNTYEEAXKLKLAAVEFSDYALVWWNKVQRERARNEEPLVETWVEMKRIMRKWYVLASYTRDLKFKLQKLSQGSKGVEEYYKEMEVLMIQANIEEDKEVIMARFLSGLNSDIHDVVELQEFVEMEDLLHKTIRVEQQLKRKGGPKGVPLIMVLLVGRTRVKGLPPDAW

SEQ ID NO: 224638 - protein, 46 aa, Glycine max
  Clone ID: PAT_MRT3847_44879C.1.pep
ERKLQSSARYRNYCPFRALTRILSCNKQSIIAISVIKSDSELNGEY

SEQ ID NO: 224639 - protein, 124 aa, Glycine max
  Clone ID: PAT_MRT3847_4487C.1.pep
MAYNSSRNSQPALPMHLCFFLLTLFMFLSFSLYSSYEPIMESFMDQVKLVLMVSPLLLLLVVHFLCNYGSAGGVMSTLIPLPERESLHRAGGTPWGVGLVLVLLLFMVSYQSSFQERWFPILTR

SEQ ID NO: 224640 - protein, 217 aa, Glycine max
  Clone ID: PAT_MRT3847_44880C.1.pep
HTLCNMGPQRRKRRRFIEGGHELLRKIPVRRAPNVSEEVRRMQQRIRSGGVILPKKIREDSLLSAAIWSSLLDQSINKGNCCTRELGVLFPGTSDVSQILKSKRVLHRIKKMLFDCVKDIAITLPTQDDRKKGSRKFMGPLQIGKVLPQRTKKWGQQVGYGENLTYLLTLDYLNSIMEWRRFEPHVKGISVEITDAILDSIHNEIVLEMIGTFTRNR

SEQ ID NO: 224641 - protein, 112 aa, Glycine max
  Clone ID: PAT_MRT3847_44881C.1.pep
RKKSRKKKQRKNLSRRKKRCCQTLPGKLNQVAANISSEIMQATSKGEMVRLSFLVVDDSTKESGMQILNNVFGCSRMLVLVGKRYFSFGSCNVSEDDAISGIFVTNTKNGFL

SEQ ID NO: 224642 - protein, 64 aa, Glycine max
  Clone ID: PAT_MRT3847_44882C.1.pep
CFYFIQQLFEPEYHTSLSIGKEVKIIIGQIGDQFFSTVTSNQLRDHFTGWALPWTLFTIPGGFG

SEQ ID NO: 224643 - protein, 280 aa, Glycine max
  Clone ID: PAT_MRT3847_44883C.1.pep
MAEFTSTTTNTNSNSGLRLKAKVAIVTGGASGIGEATARVFAEQGARMVVLADIQDELGNQVAASIGTQRCTYIHCDVADEEQVQNLVQSTVDAYGQVDIMFSNAGILSPSQQTVPELDMSQLDRLFAVNVRGMAACVKHAARAMLEGRVRGSIVCTASVGGSHGGPNATDYIMSKHAVLGLMRSASVQLAEHGIRVNCVSPNGLATPLTCKQRGMSEEEGQEVYRKYARLQGVVLTPKHVADAVLFLVSDDSAFVTALDLRVDGGFTLPSISISNSILL

SEQ ID NO: 224644 - protein, 46 aa, Glycine max
  Clone ID: PAT_MRT3847_44884C.1.pep
QGLLLRLMSWISLPCLRVWRFENKNCCRLSSGWRASAIQDRSLRAR

SEQ ID NO: 224645 - protein, 167 aa, Glycine max
  unsure (1)..(167): unsure at all Xaa locations
  Clone ID: PAT_MRT3847_44885C.1.pep
MACSATSASLFSANPTPLFSPKSSLSLPNNSLHLNPLPTRPSLSLTRPSHTRRSFVVKASSSELPLVGNTAPDFEAEAVFDQEFINVKLSDYIGKKYVVLFFYPLDFTFVCPTVXHLAWVQTDRKSGGLGDLNYPLISDVTKCISKSYGVXLIPDQGNCIGEGWSFI

SEQ ID NO: 224646 - protein, 109 aa, Glycine max
  unsure (1)..(109): unsure at all Xaa locations
  Clone ID: PAT_MRT3847_44886C.1.pep
TSFKTNTLFSVKKATPTKKAVPAATANVELAKCYDPDIKIFLANGISHRSQISQYLTNITPLDTMAYNPFNLSKNPXHFCKYHSLKLIHPTIPLHRSTEFIIHKACNKY

SEQ ID NO: 224647 - protein, 40 aa, Glycine max
  Clone ID: PAT_MRT3847_44888C.1.pep
NNTLNSDDCSKSHALVYYFAFVATMYVAARMKLYCGNFKL

SEQ ID NO: 224648 - protein, 45 aa, Glycine max
  Clone ID: PAT_MRT3847_44889C.1.pep
TNTTLLERILIAFHFVLNPSIRDEYTDCLYQQTHENETSHFSTWI

SEQ ID NO: 224649 - protein, 60 aa, Glycine max
  Clone ID: PAT_MRT3847_4488C.1.pep
DRQVPLMDEIDTKVDRASSDLKNTSVRLRDTVNQLRSSRNFCIDIVLLIIILGIAAYLYK

SEQ ID NO: 224650 - protein, 83 aa, Glycine max
  Clone ID: PAT_MRT3847_44890C.1.pep
IYGMQLHAARLNGALPAAGIARHAAYAGLTQRCVLAWCRSQFPFWVCLLAGALPQPSQPPPAHTLYLYCDRTLDSSNEIARTC

SEQ ID NO: 224651 - protein, 42 aa, Glycine max
  Clone ID: PAT_MRT3847_44891C.1.pep
IYWYGKKSEKKLITCKEVMIPHNVCRVFSQKYAVKLVRSRDA

SEQ ID NO: 224652 - protein, 64 aa, Glycine max
  Clone ID: PAT_MRT3847_44892C.1.pep
IIKPQKLKIPDSSLNKTRFLAFYQCPMLSDLSLWPWFKLNLPFFFWRLATSQRIFNWPFKHWVI

SEQ ID NO: 224653 - protein, 103 aa, Glycine max
  unsure (1)..(103): unsure at all Xaa locations
  Clone ID: PAT_MRT3847_44893C.1.pep
VFPLATSEGFPHVLSRKNGEKGKRRFVSGDGEEMTLISGTSVEEGYXRLLVELEKGVPTWVGLDCPKVEKLPRRKIFDKLKTLCFTILPXEVNFLGFRKKFLN

SEQ ID NO: 224654 - protein, 137 aa, Glycine max
  Clone ID: PAT_MRT3847_44894C.1.pep
RKTRRPSVRKLEGLELLKTAIAKAGYTGKVVIGMDVAASEFYDNKDKTYDLNFKEENNDGSQKISGDSLKNVYKSYVTDYPIVSIEDPFDQDDWEHYAKLTAEVGQQVQIVGDDLLVTNPKRVEKAIKEKACNALLL

SEQ ID NO: 224655 - protein, 58 aa, Glycine max
  unsure (1)..(58): unsure at all Xaa locations
  Clone ID: PAT_MRT3847_44895C.1.pep
XXLTFTKXFSRLXAXKXIRILMDGLDAAGKTTILYKLKLGEXVTTIPTIGFNVETVEY

SEQ ID NO: 224656 - protein, 77 aa, Glycine max
  Clone ID: PAT_MRT3847_44896C.1.pep
GTPFFPLYFYSFFFFCDFVWNYILTKDYFLSIIYPCFISTLYCMNLFASGFGQEFLGLSRGPPGVWPKIPPKNPPKN

SEQ ID NO: 224657 - protein, 48 aa, Glycine max
  Clone ID: PAT_MRT3847_44897C.1.pep
CKSGTLIKLSKSRFKCVLFFKCLERNICDCLQLQGFLTLPTPLSKKRK

SEQ ID NO: 224658 - protein, 46 aa, Glycine max
  Clone ID: PAT_MRT3847_44898C.1.pep
TSSKCYSSSSILYTRIARHVCMAKIIGNSIRVRQQLFGDSNGPDTY

SEQ ID NO: 224659 - protein, 64 aa, Glycine max
  unsure (1)..(64): unsure at all Xaa locations
  Clone ID: PAT_MRT3847_44899C.1.pep
VDKNTSTFSTGAGWLHINNFKQDRLDLLYWLRAVLSFLTHPQLSLLVQTHILHALFRPTRSLRX

SEQ ID NO: 224660 - protein, 84 aa, Glycine max
  Clone ID: PAT_MRT3847_4489C.1.pep
AFDGSKVMNVAIFQVWLVLRQWHSRLCSALRFIGRAIFHQHFFNRVAVQGVLYSLYIGTLFVEPMVLVVCCFFPCKVSTLGPHS

SEQ ID NO: 224661 - protein, 118 aa, Glycine max
  unsure (1)..(118): unsure at all Xaa locations
  Clone ID: PAT_MRT3847_448C.1.pep
SYPIGSPNCNSLTGVLQGQPWXNPWVTNLNGLAENPFLEMCSITEKARSDKQXQNWTTLNGKRKPPCIGPLTPWGLVVSPIGMSTFDSPLLSLFCFLFPSFLAAFAVLPSQAVNRGIL

SEQ ID NO: 224662 - protein, 99 aa, Glycine max
  Clone ID: PAT_MRT3847_44900C.1.pep
HVLLVMLHPRILLCGNSLNRCSGLILALALVLTSSISARSRSAKSIFGSICTATLCSHKLLGMCEIRICNWEAAMISAREEDADRGNCGVKWHLAITRI

SEQ ID NO: 224663 - protein, 143 aa, Glycine max
  Clone ID: PAT_MRT3847_44901C.1.pep
IVKFLFMDQRKVLHEKGTMKPSIISKATFKLKKELGSSCLTLDFGSMPTNTSFPFILYAIAFFNNNSISSFATFVSSIFPTFSSFSMMIVSFFITSNSSSFIAATSTVASALATTRTSSFTTTTPNVTSATSLITTTTSRTRG

SEQ ID NO: 224664 - protein, 164 aa, Glycine max
  Clone ID: PAT_MRT3847_44902C.1.pep
SDNDDDIDEEEQIISAAQNVTTHTACDISENDLLNELKELELEAQDDNPKINAQEKEGAKTKDITEEEINDQVVDTKDKLDTHLYPPGRIMHIIPSPSSENNSNSSNHNSSEEKEVYLYETPRQLYGKLRLSRGMIIDHLTRNYLKVLQQLINQLEKEKSHYGG

SEQ ID NO: 224665 - protein, 143 aa, Glycine max
  unsure (1)..(143): unsure at all Xaa locations
  Clone ID: PAT_MRT3847_44903C.1.pep
CVSLLPNSSKVISLSGIPTSVGPVSIPGCIAHCFGVITEHLFKEVDNLLLGASQGLVLSDPFRCCGSPKLKNVPVPSISVVPPLPLLISHVVGGDGAIILYEGEIXRDVXYCLANAGTCPIEQAHIFLAEENQDSVISYFSET

SEQ ID NO: 224666 - protein, 80 aa, Glycine max
  Clone ID: PAT_MRT3847_44904C.1.pep
NLSPLHLKKKKKMYSCIPHHLFLHLHFASSPNPKALNSPLRNLRIRPVSTKENHIPAASIFLPEGPWTRFQVELLLPRDS

SEQ ID NO: 224667 - protein, 111 aa, Glycine max
  Clone ID: PAT_MRT3847_44905C.1.pep
MAGNSSSEGLVDDFFEQILAVPEAAAFRGAAGLMPLGLNLEQAGFLRHQHQINVDDVVHVNVDDATIHHHHLTLHNNTTSSSPSSTAPITDRDSMHMRGLFSAFGQLHTPT

SEQ ID NO: 224668 - protein, 109 aa, Glycine max
  Clone ID: PAT_MRT3847_44906C.1.pep
INPEENPFFPENLPPSVVPRYPFSQFLHPAAALININNAIWKLYFDELLPMFVASGDDGNYAQTAATDLSLLQAISRRIHYGKFVGEAKFRESPQGYEPLIRAKIHPNF

SEQ ID NO: 224669 - protein, 63 aa, Glycine max
  unsure (1)..(63): unsure at all Xaa locations
  Clone ID: PAT_MRT3847_44907C.1.pep
VAFICLKVQTCVKLSXREENRLLSRPSLLLWRIIILFPGCVILMSNDFFFNQLRMKILPSLYW

SEQ ID NO: 224670 - protein, 725 aa, Glycine max
  Clone ID: PAT_MRT3847_44908C.1.pep
TRKHLVRVRAIAKTAISSSFPKPKNKISCHSIPLTFAISSSPMAATDESLRKSLAEKHAAVEAQGNAVRALKAAKAAKPEIDAAIEALNALKLEKSSIEHSLLGGSDSREAFRQSVVNTLERRLFYIPSFKIYRGVAGLFDYGPPGCSVKSNVLSFWRQHFVLEENMLEVDCPCVTPEIVLKASGHVDKFTDLMVKDEKTGTCYRADHLLKDFCNDKLQRDLALSSDKVAELKHVLAMLDDFSAEELGAKIKDYGIVSPETKNSLSDPYPFNLMFQTSIGPSGFSPGFMRPETAQGIFVNFKDLYYYNGNKLPFAAAQIGQAFRNEISPRQGLLRVREFTLAEIEHFVDPLDKSHPKYPEVADLEFLMFPREEQMSGQSAKRIPLRDAVSKGIVNNETLGYFIGRVYLFLTRLGIDKDRLRFRQHLANEMAHYAADCWDAEIECSYGWIECVGIADRSAYDLRAHSDKSGVPLVAHEKFAEPKEVEKLVITPVKKELGLAFKGNQRMVVEALEAMAEKEALDMKAALESKGEVEFQVCTLGKNVTIKKSMLTIQKEIKKEHQRVFTPSVIEPSFGIGRIIYCLFEHTFYTRPSKAGDEQLNVFRFPSLVAPIKCTVFPLVQNQKYEEVAKLISKSLTAVGISHKIDTTGTSIGKRYARTDELGVPFAITVDSTSSVTIRERDSKDQVRVDVDKAASVVREVTEGQRTWEDVWSTFPHHSSTSADE

SEQ ID NO: 224671 - protein, 358 aa, Glycine max
  Clone ID: PAT_MRT3847_44909C.1.pep
SLSPQAPSLPSFISQPALSFLRALFGSPSVSASVRPSLQIDRPPDGAPGATAIPCCTVDAKSAVDGTWKTLRPGVLVSRESGDKGVILQRTQTCIYNDWKGLLGWTSDLRAICARSWRQQESTSLRKVPFLLTDVGRRPNAEYVVVNMDGSRHPLPLTTVYHKLQPITASPYTFLQALFGHEYPVGLLDEEKILPLGKDITAVGLCSLKNGIAEIKSCKYLPYFLSDLSKDQMIVDLSIKTKILFWGGIALGSMSVGVLGYAVLRNWIKWKRWKVQRQLQQQRQAVSDAEPQVDDEIEDVPDGQLCVICLMRRRRSVFIPCGHLVCCQGCAISVEREVAPKCPVCRQEIRDSVRTYES

SEQ ID NO: 224672 - protein, 39 aa, Glycine max
  unsure (1)..(39): unsure at all Xaa locations
  Clone ID: PAT_MRT3847_4490C.1.pep
KKKKKKKKKKIKKKKKKNKKKKKXKKNEIKKQKYYIILQ

SEQ ID NO: 224673 - protein, 81 aa, Glycine max
  Clone ID: PAT_MRT3847_44910C.1.pep
LVLPQKLKHPSICVALPFTNLRTTKHFIISTVTDKAKMERSLKIKAAKKSRSNDMAYAISATQREREREKEREREMNRPCR

SEQ ID NO: 224674 - protein, 55 aa, Glycine max
  Clone ID: PAT_MRT3847_44911C.1.pep
SLLLYVELHQTGSEIFNIDEDIIYIISLLHWDYPLLLITINPFSSSLEYPMTSRG

SEQ ID NO: 224675 - protein, 98 aa, Glycine max
  unsure (1)..(98): unsure at all Xaa locations
  Clone ID: PAT_MRT3847_44912C.1.pep
DNVKAKIXDXEGIPPDXQRLIFAGKQLEDXRTRXDXNIQKESTLHLVXRLRGGXQXFVXTXXGKTIXLEVEXSXXXXNLKAKXXEXXGSPPXQXRLIF

SEQ ID NO: 224676 - protein, 161 aa, Glycine max
  Clone ID: PAT_MRT3847_44913C.1.pep
MASMSIFTTISLAADARNPAIYFPRRRQPNTVIFAAASSPESPPEIELEFIGPKPGSDGSYPVERVKAISGEKLLRNIMLDNKIELYATYGKLMNCAGGGSCGTCIVEIIEGKDLLNERTNTELRYLSKKPESWRLACQTIVGNKENSGKVAVQRIPQWKK

SEQ ID NO: 224677 - protein, 89 aa, Glycine max
  Clone ID: PAT_MRT3847_44914C.1.pep
SILFLAYTLEPWIGIAASASNALLVTSGQKLRTGVKSLLLCSVIRGKGGGLTVTSRGNNTCPLFVVQENLEYVDGAPSTLSPYNAKSGV

SEQ ID NO: 224678 - protein, 460 aa, Glycine max
  Clone ID: PAT_MRT3847_44915C.1.pep
MANLKTHLVLNMKDVVIVKPSKPTPSELLSLSTIDSDPVLNILCQTIYVYKANLDSPNDQLDPVNVIKEALSKALVYYYPLAGKIVTFDDGKLGINCNADGVPFLEATADCELSSLHYLEGIDVPTAQKLVFDNPNSQDEASDHPLVFKVTKFLCGGCTLGMGLSHSVCDGFGASQFFRALAELACGKSEPSVKPVWERERLMGTLLKEPLQFPIDEASRAVSPFWPTKEISHECFNLNGKSIQRLKMELMKESDDVKESFTTVEALGAYVWRSRARALELSSDGKTMLCLAVGVRHLLDPPLPEGYYGNAFVGSNVVLTVKELDENPLSEVVKLIKESKKLPSSNEYIRNTINMLETMRQRNIRVEGTCASVVLTDWRQLSLMEEVDFGWKASVNIVPVPWNILGYVDLCLFLPPSNLDPSMKGGVRVFVSLPKASMPKFREEMEALKLMRGDEGSTQQ

SEQ ID NO: 224679 - protein, 54 aa, Glycine max
  unsure (1)..(54): unsure at all Xaa locations
  Clone ID: PAT_MRT3847_44916C.1.pep
SFNRGRYNDQGVGGGWSSEXQXWVHLAAPADVPALAGESAATDTTASKALSGER

SEQ ID NO: 224680 - protein, 64 aa, Glycine max
  Clone ID: PAT_MRT3847_44917C.1.pep
KIQLSPNSHTMSDSLMTPLPLYIHHHPLHSLTKYTNQGLPINIQIIFVSLGGKLEPIRSNRPNS

SEQ ID NO: 224681 - protein, 51 aa, Glycine max
  Clone ID: PAT_MRT3847_44918C.1.pep
PFPVDLVREFGRQLLESVAYMHELRLIHTDLKPENILLVSSEYVKLPSYKV

SEQ ID NO: 224682 - protein, 49 aa, Glycine max
  Clone ID: PAT_MRT3847_44919C.1.pep
LIYTDGSVYAFIKNTSYKRGIKSSKNNGIFRHAPASPGETSNLYLHLLF

SEQ ID NO: 224683 - protein, 336 aa, Glycine max
  unsure (1)..(336): unsure at all Xaa locations
  Clone ID: PAT_MRT3847_4491C.1.pep
MESMQWALENVVNAAFDGSNDFTKTNAEVQFALCRTFEGLLQQFISLKWTEPALVEVLVHYLDAMGPFLKYFPDAVGSVINKLFELLTSLPLSSRFGSRHNARHARLQTCTSFIRIAKTADKSILPHMKGIADTMGCLQREGRLLQGEHNLLGEAFLVMASSAGIQQQQDVLRWLLEPLSIQWTQSEWQDKYLSGPHGLVQLCSDAPVMWSIFHTLTFFERALKRSGLKKANWNSENSSTPNSTPLNPMASHISWMVTPLLKLLRCIHSLWSPSVSQALPGEVRAAMVMGDXRRFSLLGEGNSKLPKGVTDGSKVDMNKEXYAEPXESDIRXWFKA

SEQ ID NO: 224684 - protein, 38 aa, Glycine max
  Clone ID: PAT_MRT3847_44920C.1.pep
SSHPVTSKSQGRMMMNIEDYLPPPPVEKKNCSKSSHYL

SEQ ID NO: 224685 - protein, 77 aa, Glycine max
  Clone ID: PAT_MRT3847_44921C.1.pep
LLPSGLVFWDFHSFSRSSTHGSSLQVSFRFNWLRRRNMCFLVSFLDFSSLASVLILEFGLLQGILDFLFFFLSLYEP

SEQ ID NO: 224686 - protein, 58 aa, Glycine max
  unsure (1)..(58): unsure at all Xaa locations
  Clone ID: PAT_MRT3847_44922C.1.pep
RRRTICIQLKACLLLLQNLQDALNNHAISWIQIVLRRYSSISLLXFLGDLEYLSRELL

SEQ ID NO: 224687 - protein, 80 aa, Glycine max
  Clone ID: PAT_MRT3847_44923C.1.pep
LAMPLALNFALPIITITHVWPMLGTPHPFLSNPTSYRHCLSLRPLPSAICFITSPPPTPPPPPKEGGRHTVMTGNLPWNG

SEQ ID NO: 224688 - protein, 71 aa, Glycine max
  Clone ID: PAT_MRT3847_44924C.1.pep
SKAGFWPRSSFTVGRSEEQMQPQPSCGRARFPSVRHHLPLFVYLSGLIKYRVGFSSMLDSEPKLRAACNIH

SEQ ID NO: 224689 - protein, 248 aa, Glycine max
  unsure (1)..(248): unsure at all Xaa locations
  Clone ID: PAT_MRT3847_44925C.1.pep
GSSKLDAVDSSMVERDATIQAIRKKLLKAQERMKRYADKKRREVTFNCGEWALVKFRPHRQTSAKGAQRTPGKLSKRFYGPFQILERIGPVAYRLQLPEGMHIHPVFHISSLKQFKGPPDNVEAIELPDNFDGYQPLISPMAILNPRRKDSTSNAPWEVLVXWSGLSPDETSWEDWSQLCQEFHLEDKVTLQGPRDDTEAGVEKEEETAIENQEANMEAGVSIAGTIADQPKGTKRKITKPNYLGDYV

SEQ ID NO: 224690 - protein, 52 aa, Glycine max
  Clone ID: PAT_MRT3847_44926C.1.pep
HHLLVCSLAEGLSHDSGMRGCWPRASVIKNTKDRAKVQYQDIQDAVDEPKKL

SEQ ID NO: 224691 - protein, 287 aa, Glycine max
  Clone ID: PAT_MRT3847_44927C.1.pep
MFKKLPSFISSFFNSMSDFGSSLIKTRMIVDDKTPIRSGYEGTESMPFTLSNISLSIDNIKAIKSKLGVTINDVITGLIFYGIRLYMQEIDRMARKANSTCVVMLNTRNVRGYQSVKEMQKSKVKGLWGNKISFLQVPIPKLGQSKISNPLEFIWNARKQIKKKRRSFSVYLIGLLLDLEMKIRGPEAVAKIIYKTLRNSSVVISNLFGPMEQMTLANHPISGLYFTMTGGPENVDITIMSYVKVIRITLRTLKGFVDEQKFKFCIEKAYDVMFKAAMEISETPNKN

SEQ ID NO: 224692 - protein, 491 aa, Glycine max
  unsure (1)..(491): unsure at all Xaa locations
  Clone ID: PAT_MRT3847_44928C.1.pep
MGNSFGCSASGERLVSAARDGDLVEAKMLLNCNPCLAKXVALLLENGADVNSRNYCGQTALMQACRYGHWEVAQTLLLFRCNVIRADYLSGRTTFHFAAVHGHVSSIRLVVADFVPSALYQAIHAGTDVDRGGGSNAKGKHEQSALSKFINKTADGGITALHMAALNGYFDCVQLLLDLNANVNAVTYHYGTSMDLIGAGSTPLHYGACGGNLKCCQILVAHGASRLALNCNGWLPLDIARMWGRHWLEQLLAPSSDATMPTFSHSNYLSLPLMSVLNIAREYGLQSSTASSDEIDFCAVCLERPCSVAAEGCGHELCVRCALYLCSTNNVSSEMVGPPGSIPCPLCRHGVVSFVKLPGSQAKENKLHVSLGLCTPCMLHPRDLDKPSLSHTPEVGRNRVASVPSEILCPVTCSPFPSMAIPLCTCNDGPCPSFEPREVETQDGLPHHSQASTVDQDKIEGPRLDKTTCSSMFWGRRSCSREHQCNSEINA

SEQ ID NO: 224693 - protein, 512 aa, Glycine max
  Clone ID: PAT_MRT3847_44929C.1.pep
MGNSFGCSASGERLVSAARDGDLVEAQMLLNCNPCLAKYSTFGGLNSPLHFAAAKGHNEIVALLLENGADVNSRNYCGQTALMQACRYGHWEVVQTLLLFRCNVMRADYLSGRTALHFAAVHGHVRCIRLVVADFVPSALYQAIHAGTDVDRGGGSNAKGKHEQSALSKFINKTADGGITALHMAALNGYFDCVQLLLDLNANVNAVTYHYGTSMDLIGAGSTPLHYGACGGNLKCCQILVARGASRLALNCNGWLPLDIARMWGRHWLEQLLAPSSDASIPTFSHSNYLSLPLMSVLNIAREYGLQSSPTSSDEIDFCAVCLERPCSVAAEGCGHELCVRCALYLCSTNNVSSEMLGPPGSIPCPLCRHGVVSFVKLPGSQAKENKLHVSLGLCTPCILHPRDLDQPSLSHTPEIGRNRVASVPSEIRCPVTCSPFPSMAIPLCTCNDGPCPSFEPGEVETQDGSPHHSQASTVDQDKIEGPRLDKTTCSSMFWGRRSCSREHQCNSEINA

SEQ ID NO: 224694 - protein, 72 aa, Glycine max
  Clone ID: PAT_MRT3847_4492C.1.pep
SSNRILHDLNDLQKDPTTFLQTLFLDLTDLFPSQATIMGPRDRPNAGGVFLVPTHLFADNTYHTPHDSFTTK

SEQ ID NO: 224695 - protein, 172 aa, Glycine max
  unsure (1)..(172): unsure at all Xaa locations
  Clone ID: PAT_MRT3847_44930C.1.pep
MGNSFGCSASGERLVSAARDGDLVEAKMLLNCNPCLAKYSTFGGLNSPLHFAAAKGHNEIVALLLENGADVNSRNYCGQTALMQACRYGHWEVAQTLLLFRCNVIRADYLSGRTALHFAAVHGHVRCIRLVVADFVPSAPYQAIHXAQLLTGGGGSNVKGKHEHSALSKFVN

SEQ ID NO: 224696 - protein, 203 aa, Glycine max
  unsure (1)..(203): unsure at all Xaa locations
  Clone ID: PAT_MRT3847_44931C.1.pep
MGNSFGCSASGERLVSAARDGDLVEAQMLLNCNPCLAKYSTFGGLNSPLHFAAAKGHNEIVALLLENGADVNSRNYCGQTALMQACRYGHWEVVQTLLLFRCNVMRADYLSGRTALHFAAVHGHVRCIRLVVADFVPSXFIKLYMLAQMLTXVGGSNAKGKHEQSALSKFIXXTADGGITALSYAALNGYFDCVQLLLDLMQM

SEQ ID NO: 224697 - protein, 465 aa, Glycine max
  Clone ID: PAT_MRT3847_44932C.1.pep
MTLLQNNKLCLIFTMQACVFVRLKQRITTSQKDVNRDFLRLQIIRCHSELKLDKAFSNFTNDSWKKAWHFYCEFGTKGVMFDYRRHGGNCLRGSSLLDTVSFRWNDLLRADSLTLEKEVSQQVNVVTSITPPVQAPYLLKCVPDRVTDDSGAMISDVILKMNSYRPQEGRWLSRTVLDHAGRVCFVIRIRVGGGFWRRGGEAPSAVKWEDRIIEIREGSWSYVAGYIGRAPEKVVSTATPKEPTEQCKAAWCFSTGDELTIQWESSQSVSGLTFSLLNQTSLESSVQLLRGRQMQYQVKKTKSKRKGEDMKIELEEKEIEGEEDEESFITVVRFTEDNPDGKATALLNWRLLVVEVLPEEDAVLMLLLCLSILKSVSEMKKQDVGGLLVRRRLKEARLGSRDWGSVILHPSSWSSSIDSTYLQPWHWNAVVVMKSDAVDQLKRYPTLSPSPVEGSDKLYKQGILS

SEQ ID NO: 224698 - protein, 163 aa, Glycine max
  Clone ID: PAT_MRT3847_44933C.1.pep
ERNSARDLSGKDISGFMEEPTTLRFSFREFYMGPDVSTVSDNAYASTKIIADKEFSEFGSEKKPLAQAQTEDSVQEEVSAPSTHIPLHFESEMFGGSDSSDEDYFLYNENSVTSDSESESASSSGLNWGNSNKMDDSIVYQFLGGKNGGEGFQPEILKLMMRE

SEQ ID NO: 224699 - protein, 506 aa, Glycine max
  unsure (1)..(506): unsure at all Xaa locations
  Clone ID: PAT_MRT3847_44934C.1.pep
MGNSFGCSASGERLVSAARDGDLVEAKMLLNCNPCLAKYSTFGGLNSPLHFAAAKGHNEIVALLLENGADVNSRNYCGQTALMQACRYGHWEVAQTLLLFRCNVIRADYLSGRSALHFAAVHGHVRCIRLVVADFVPSAPYQAIHAGTAVDRGGGSNCSALSKFVNKTADGGITALHMAALNGYFDCVQLLLDLNANVNAVTYNYGTSMDLIGAGSTPLHYAACGGNLKCCQILVAHGASRLALNCNGWLPLDIARMWGRHWLEQLLAPSSDATMPTFSHSNYLSLPLMSVLNIAREYGLQSSTASSDEIDFCAVCLERPCSVAAEGCXHELCVRCALYLCSTNNVSSEMVGPPGSIPCPLCRHGVVSFVKLPGSQAKENKLHVSLGLCTPCMLHPRDLDKPSLSHTPEVGRNRVASVPSEILCPVTCSPFPSMAIPLCTCNDGPCPSFEPREVETQDGLPHHSQASTVDQDKIEGPRLDKTTCSSMFWGRRSCSREHQCNSEINA

SEQ ID NO: 224700 - protein, 94 aa, Glycine max
  unsure (1)..(94): unsure at all Xaa locations
  Clone ID: PAT_MRT3847_44935C.1.pep
VQPNLLRIKSKGSMRGNCMRSEGVREKVKKXSFNFFLGIGAWXYLXYIXEXCYLSLSVLFYSPPVXXXXLFLLXLNFFISFFIFLSEIFFFILY

SEQ ID NO: 224701 - protein, 31 aa, Glycine max
  Clone ID: PAT_MRT3847_44936C.1.pep
AAFNEKDTAYSGSATFTYEAFMLTVLPFLIA

SEQ ID NO: 224702 - protein, 50 aa, Glycine max
  Clone ID: PAT_MRT3847_44937C.1.pep
FKGLLYPLTQPYIFIDVFSLVFVFECTSILFCDMRSVKPFHSELGWSLIM

SEQ ID NO: 224703 - protein, 50 aa, Glycine max
  Clone ID: PAT_MRT3847_44938C.1.pep
ANPTRAKDKLLSHQQMLNQVGSTVIQPSNGSLGPNSSFSSSIYEDLQANQ

SEQ ID NO: 224704 - protein, 256 aa, Glycine max
  Clone ID: PAT_MRT3847_44939C.1.pep
MADESEHTAAPASGESLLDKIAEKIHGHHDSSSSSDSDSEKKETSSIKEKVFRLFGREKPVHSVLGGGKPADVLLWRNKKISASVLGVATAVWIFFELLEYHLLTLVCHISILVLAVLFLWSNAHTFIHKAPPRIPTVHLPEEPIRQFASALTIEINRGFAALHAIGSGRDLKTFLIIIVGTWIISIVGSWCNFLTLFYIVFVLLHTVPVIYDKYEDKIDPLAEKALIEFKKQYAVFDEKVLNKIPKGPLKGKKLA

SEQ ID NO: 224705 - protein, 69 aa, Glycine max
  Clone ID: PAT_MRT3847_4493C.1.pep
KMVAGLFNIPEGNEDTSKKPINYRHLIFFYNTLHYRGGLLESLYANQFEPELIFSISKDQSVVILGIKY

SEQ ID NO: 224706 - protein, 82 aa, Glycine max
  Clone ID: PAT_MRT3847_44940C.1.pep
SKRECGALPKLGNAHALFNKVWDSLKLLLWAGKFYGVLSTSSFGKREIKLSSIMPCLIGIVFLRPDPSFQVSFVQYSGFSEF

SEQ ID NO: 224707 - protein, 78 aa, Glycine max
  Clone ID: PAT_MRT3847_44941C.1.pep
SSRLHAIGSGRDLKTFLIIIVGTWIISIVGSWCNFLTLFYIVFVLLHTVPVIYDKYEDKIDPLAEKALIEFKKQYAVF

SEQ ID NO: 224708 - protein, 156 aa, Glycine max
  Clone ID: PAT_MRT3847_44942C.1.pep
QESSVQAHCPYGEKTTEGNLNAIISGKAGFSSNTPSSINPNISCESKTPQVEDIQDGSSVLHLACIISDSAMVELLLQYGADINAIDSRGRTPLHYSTMRGKNATARVLITRGANPLAVDKEGNTPFKPATEPDTAGKETLALNQQIACPQNLIEK

SEQ ID NO: 224709 - protein, 46 aa, Glycine max
  Clone ID: PAT_MRT3847_44943C.1.pep
HALYPYRRASYAVASLRQRFILYRSLHNTCFIGSASSLFVYSFMMG

SEQ ID NO: 224710 - protein, 300 aa, Glycine max
  Clone ID: PAT_MRT3847_44944C.1.pep
SLKCLFKRIKISSSCPSVKERKKPFDFLRVLYDGCIAGGAAGVVVETALYPIDTIKTRLQVARDGGKIVLKGLYSGLAGNIVGVLPASAIFIGVYEPTKQQLLKSLPENLSAVAHFAAGAIGGIASSVVRVPTEVVKQRMQIGQFKSAPDAVRLIVANEGFKGLFAGYGSFLLRDLPFDAIELCIYEQLRIGYKLAAKRDPNDPENAMLGAVAGAVTGAVTTPLDVVKTRLMVQGSQNHYKGISDCVRTIVKEEGSHALFKGIGPRVLWIGIGGSIFFCVLEKTKKILAQKRHSKAETQN

SEQ ID NO: 224711 - protein, 46 aa, Glycine max
  Clone ID: PAT_MRT3847_44945C.1.pep
LKRKKKNKGTHLYVTILITDEYLTILISFFYTMYPLFYILPELIFL

SEQ ID NO: 224712 - protein, 72 aa, Glycine max
  Clone ID: PAT_MRT3847_44946C.1.pep
ARDATFASFTFKRELRLKGDGGHWTTLRIPRIVYYLHPRLKGSIKYVFDYANTGKHFFISSTETMLTLFMPP

SEQ ID NO: 224713 - protein, 95 aa, Glycine max
  unsure (1)..(95): unsure at all Xaa locations
  Clone ID: PAT_MRT3847_44947C.1.pep
ACXRYXXXXSRXEFXATXPTXXXIXXPXAXPXAGVXKDKLXXXXXVXAXIXXKTSRXKXSXKFXXSXXXXXXLLRIRVNQXXXXRXXATXXKDGF

SEQ ID NO: 224714 - protein, 113 aa, Glycine max
  unsure (1)..(113): unsure at all Xaa locations
  Clone ID: PAT_MRT3847_44948C.1.pep
MVLIVHLHWNAIIAALNLPPIGLMLHNSIIDHLLSDFADNIATTDLGYFLAGTTLQNTGDGLVTQHTDDVLFPVVFNAITFNVFXGDILHGVVHKGLTHEIVMICDPIKNDYL

SEQ ID NO: 224715 - protein, 47 aa, Glycine max
  Clone ID: PAT_MRT3847_44949C.1.pep
TLSKSNFDVLACLNYVLCRLTNSITLLSGNAVFSSFLNSASLKRSLS

SEQ ID NO: 224716 - protein, 77 aa, Glycine max
  Clone ID: PAT_MRT3847_4494C.1.pep
LILTRLLARLVALLELTHVVKHLKRPLIGPKCRTNCLTLILHLTHHQPGVKPSFRPTAAPTEPSKERIRDRTLYTTT

SEQ ID NO: 224717 - protein, 82 aa, Glycine max
  Clone ID: PAT_MRT3847_44950C.1.pep
GGKEHWPFGIIIITRAHDIRNRPLNIKSQAPLSQRKIFFGGRKTGGKTFYRDLRKLVFPPKKTLNFSGVFIPQAIEILGFWG

SEQ ID NO: 224718 - protein, 65 aa, Glycine max
  unsure (1)..(65): unsure at all Xaa locations
  Clone ID: PAT_MRT3847_44951C.1.pep
NFLEECQKDKKRDVHIKYQIGGARLKECINFNHGQCGRVIGDILXGKLLKFYMKKLQKIKGQGRV

SEQ ID NO: 224719 - protein, 169 aa, Glycine max
  unsure (1)..(169): unsure at all Xaa locations
  Clone ID: PAT_MRT3847_44952C.1.pep
KKCHEVAKQDQQHSNKLLFQQLQSHFNQQQQLHVYTLLSRQQVIDLREVTGGDEXRLNYLCEKLGVKLXVGRKGLGMNADSIIDSIKAERGNRKPVSTSLALKPGVSSKLKAAGIMKRKLVRRAKVVRKSNGSINVRSAIKVSEEVKITNQVLPDVPVSGSNQNDLTNS

SEQ ID NO: 224720 - protein, 99 aa, Glycine max
  Clone ID: PAT_MRT3847_44953C.1.pep
KKPPPPGPRGGRAIWGLRGNPPWGGGKKISPVYKKFGGPVGPPQPGALFGSNAPLWPIGLSPTRLKSRAPQKREGTGVRPPPPFFFCLKGGGAPGSRNF

SEQ ID NO: 224721 - protein, 39 aa, Glycine max
  Clone ID: PAT_MRT3847_44954C.1.pep
GGVEIYLLDSKKMCQLHPGLGWHRLNVFRQPGPVGGPVG

SEQ ID NO: 224722 - protein, 295 aa, Glycine max
  Clone ID: PAT_MRT3847_44955C.1.pep
IKNTRASVTYFGSDNSDSEDELTKQNSPSLARPISGISRRTSASSKAATGLSSRDAPLSKASVTSAATLGWKSSRTSYESNNQNASTIMKSSENGTGSKPGSAKNKASEPISKSSSRASFTYFNSDNSDSEEELTKQNSPSLARPVSGISRRTSASSKAATGLSSRDAPLSKASVTPATTLGWKSSRTSYESNNQNASTIMKSSENGTGSKPGSAKNKASEPISEPNRSLDGEISKSSARVQPSSSLKTVIQDNEEGQEDDADTSSKQKVGHVHPKLPDYDSFAAHFLSLKKGRQ

SEQ ID NO: 224723 - protein, 241 aa, Glycine max
  Clone ID: PAT_MRT3847_44956C.1.pep
MSEVNATPEIPQSNTIYINNLNEKIKIDELKKSLNAVFTQFGKILEVLAFKTLKHKGQAWVVFEDASSASNALRQMQGFPFYDKPMRIQYAKTKSDIIAKADGTFVPREKRKRHDDKAKKRKDQHDANLAGMGLNPAYAGAYGAAPAIAYPGGAKSMVPEAPAPPNNILFIQNLPNDSTPMMLQMLFLQYPGFKEVRMVETKPGIAFVEYGDEMQSTVAMQTLQGFKITPQNPMLITYAKK

SEQ ID NO: 224724 - protein, 267 aa, Glycine max
  unsure (1)..(267): unsure at all Xaa locations
  Clone ID: PAT_MRT3847_44957C.1.pep
VNATPEIPQSNTIYINNLNEKIKIDGTLFVSCFRDFNFRWIIRFLSCRMLLDAELKKSLNAVFTQFGKILEVLAFKTLKHKGQAWVVFEDASSASNALRQMQGFPFYDKPMRIQYAKTKSDIIAKADGTFVPREKRKRHDDKAKKRKDQHDANLAGMGLNPAYAGAYGAAPAIAYPGGAKSMVPEAPAPXPNNILFIQNLPNDSTPMMLQMLFLQYPGFKEVRMVETKPGIAFVEYGDEMQSPVAMQTLQGFKITPQNPMLITYAKK

SEQ ID NO: 224725 - protein, 45 aa, Glycine max
  Clone ID: PAT_MRT3847_44958C.1.pep
LNLRMDGLKMFSNVIPELLTTYEHICSVPKCNQQSGIVFRYIVIP

SEQ ID NO: 224726 - protein, 83 aa, Glycine max
  Clone ID: PAT_MRT3847_44959C.1.pep
AAAEESVSFTAYSVLPPPCLQCHGETSPIAKPNSPSGILLNPIRVSQSLQHEKKYKLFNIFLRRRQKIIQQRKSLPITPVEKR

SEQ ID NO: 224727 - protein, 53 aa, Glycine max
  Clone ID: PAT_MRT3847_4495C.1.pep
MTMIRSNPRRVFHLSLLLLFLYSSSTESLRFLIQSNHTKCIFQDIYSNYMTVI

SEQ ID NO: 224728 - protein, 105 aa, Glycine max
  unsure (1)..(105): unsure at all Xaa locations
  Clone ID: PAT_MRT3847_44960C.1.pep
AAGANGERRSLPNATIMIHQPSXGGYSGHAKDIAFHTKHIVRVWDTVNELYTKHTAQTAEAIHTYMGRYNFMTPHEAKELGLIDEDIDHRPMALVYDAVCNQGKH

SEQ ID NO: 224729 - protein, 227 aa, Glycine max
  Clone ID: PAT_MRT3847_44961C.1.pep
MATFFGSPPIFSLPLTRTHHISSSSQTPPPTPPPQSQPPTSSPQQLRTTNLNDESMQVCTEAKQQKPIKPSTKVESTDWIATSLTRRFGIGAGLAWVGFLAFGVISEQIKTRLEVSQQEANTRNVEKVEEWCYKGKIESSEVFVVTFEGDKKPLALVMGSRPYSKGVCEGIEYALKTMKAGGKRKVIVPPKLGFGENGADLSTGVQIPPLATLEYILEVEKVSIAPA

SEQ ID NO: 224730 - protein, 37 aa, Glycine max
  Clone ID: PAT_MRT3847_44962C.1.pep
LFPASVELITYYTYGVFLLGSIDSMPLGNKFSLSLYF

SEQ ID NO: 224731 - protein, 293 aa, Glycine max
  Clone ID: PAT_MRT3847_44963C.1.pep
NSPHFFIITNSTTNSSSTISASNFVSTAAKNNKSAFFGSPPIFSLHPTNTQKHLNSGSTQTSPTTPSPQSQPPTSSPQQLRTTNLNEESVQVSTEAKQQKPIKPVTSSTKVGSTDWIATSLTRRFGIGAGLAWVGFLAFGVISEQIKTRLELSQQEANTRNVEKVEEVVLPNGIRYYELKLGGGASPRPGDLVVIDIMGKIESSEVFVDTFEGDKKPLALVMGSRPYSKGVCEGIEYALKTMKAGGKRKVIVPPKLGFGENGADFDSGTGVQIPPLATLEYILEVEKVSIAPA

SEQ ID NO: 224732 - protein, 81 aa, Glycine max
  Clone ID: PAT_MRT3847_44964C.1.pep
LVFKVFLLPFPAIFPFFFGALVVFFPQIKAPPAPAANGYEPIYTPVRLYQFFFLWKNLTFPIKVFFGSWRKEKIGCLDSWV

SEQ ID NO: 224733 - protein, 95 aa, Glycine max
  Clone ID: PAT_MRT3847_44965C.1.pep
EENAVHSTEPVVQENGDEAGEGREAKDCDPGSPRRCYIIIISGRKEKCEAAKEALEALVPVTIEVEVPFDLHRYVIGQKGSGIRKMMDEFEVNIH

SEQ ID NO: 224734 - protein, 71 aa, Glycine max
  Clone ID: PAT_MRT3847_44966C.1.pep
VLNPLKGRRGWSELKWERGKQKRGGRRIKFVKKRGVLSSYYFVCFYVFCGASVNSGCFLEAYFGSNLLFPF

SEQ ID NO: 224735 - protein, 64 aa, Glycine max
  Clone ID: PAT_MRT3847_44967C.1.pep
GLESIVLSDYYQSSTRVLQHIRSLGGRDHLDHDHHHIHIIITMTLARKCKSIIAVKNKKKPNEW

SEQ ID NO: 224736 - protein, 42 aa, Glycine max
  unsure (1)..(42): unsure at all Xaa locations
  Clone ID: PAT_MRT3847_44968C.1.pep
CFSEQVQLSQRXSXRFIHSCLVCLXVLLXXXHXRXXXNRXXX

SEQ ID NO: 224737 - protein, 151 aa, Glycine max
  Clone ID: PAT_MRT3847_44969C.1.pep
MMDTHAEDSARSEENFPDVTHHNEDGSNGNLILENGLSDGNQGPADTHDQLLQMVMDLRFQNDFLKSQFEGFKNVDSVHSDSNIQKGVGGLEDGESDIVKELKDKIQLLNKEFLEKKQTRIASEEALKHLQTAYSEEKAKAQELSEKLAEA

SEQ ID NO: 224738 - protein, 56 aa, Glycine max
  Clone ID: PAT_MRT3847_4496C.1.pep
MASTESLKPVHDRNVGKRNASGKPGRSSASKKDKKAKKDAIKPIRPSIAFYVHLDE

SEQ ID NO: 224739 - protein, 101 aa, Glycine max
  Clone ID: PAT_MRT3847_44970C.1.pep
PSYFYLNPNFYNPVNSRYQSFADHYFALKLVYVGVLPDYLHHITLPTHFPLCCPSVQLLITQIMTYLWSFSQSRKRKLSNAVSLITFNRIFYQLFNTKHLD

SEQ ID NO: 224740 - protein, 53 aa, Glycine max
  Clone ID: PAT_MRT3847_44971C.1.pep
AVINKKNHDIQRSFESELTLSSISCITRSKLRMKNNLLYNYQLIFLVEWCYHF

SEQ ID NO: 224741 - protein, 104 aa, Glycine max
  Clone ID: PAT_MRT3847_44972C.1.pep
KRPRERWVRTRPRAPRVTLPLTRRMRARRLNPTGTVSPPGSQQRSEAHSCPPLKYSATTYALRRRILRAARSGSWGNEYVPCRGLLFDSSFREGLVWFVCVTKY

SEQ ID NO: 224742 - protein, 68 aa, Glycine max
  Clone ID: PAT_MRT3847_44973C.1.pep
LIYNSVCIYDRCRYTTRITSKYHISLITADVQTPNLLGSSHIIYNPRRMQIIFLVHPKATEESWALMT

SEQ ID NO: 224743 - protein, 70 aa, Glycine max
  unsure (1)..(70): unsure at all Xaa locations
  Clone ID: PAT_MRT3847_44974C.1.pep
PFRQPVRQPFRQRVRQRVRQRVRQRVRQRVRKKKKKKKKKKKKKKKKKKKKKXKKKKKEKKKNKKEGRLN

SEQ ID NO: 224744 - protein, 39 aa, Glycine max
  Clone ID: PAT_MRT3847_44975C.1.pep
SSPIPFRFLAQPTITNRHSMTRNKQSTNPDTGTRLLSLL

SEQ ID NO: 224745 - protein, 400 aa, Glycine max
  Clone ID: PAT_MRT3847_44976C.1.pep
HLADQLKNMQINNHPKSGGGGGNHNNKGQNQNQPKGGGGGGGGNSQAKGGGGGGQQQGPTPQQQLQLQLQQQQRLQQQLQQLQQMKGLQDLNLPQFKDLKLPPHNPNPNAKAVKFDIPEEDDDYTDDELDDFDDDDDDFDDEFDDDEMDDLPPSKMKPPPMMMDAPPKAANNGGGGGNNGRKGGGPVPVQVHGIPGNGGGKKGGGGGGGNNQNQRRGNKNNVGKSGGGAPEGKHGGGGNKNGNGNNNNNNGGKKVNPMGGVGVQPMNGGFQNMGGGPHVMSGPNVGPMSMPMPNIPAVQGLPAGPVNGGGFFQGAGPDAMPGNPFQQQQQQQQQQQLQQQYMAAAMMNQQRAMGNDRFQPMMYARPPPAVNYMYPPYPYPPPDPYTHFFSDENTSSCNVM

SEQ ID NO: 224746 - protein, 38 aa, Glycine max
  Clone ID: PAT_MRT3847_44977C.1.pep
PRLTHACQKTTRRLQIESMNSHIWGTHEKLPGVLTYNH

SEQ ID NO: 224747 - protein, 159 aa, Glycine max
  Clone ID: PAT_MRT3847_44978C.1.pep
LIRGKRSKFTACMAHENQSIPLIETSMDANLIKKESGSLESKEKDIESLASKNLLENDTMCPTSVAHFKQSVPLIEPSTDSRALEKKTGLLGSKEKAIESLNSEALLENGSRLKFEPKPLPEIDTRSPTSEVEGKPSMSSSESFKYAPMEKYKDPLELK

SEQ ID NO: 224748 - protein, 60 aa, Glycine max
  unsure (1)..(60): unsure at all Xaa locations
  Clone ID: PAT_MRT3847_44979C.1.pep
XSVTXXPKSQPAXTTYXXXWXHXIRXXTYXXIXGXHXXXNILRXDXQPRAEXRXTYXAAT

SEQ ID NO: 224749 - protein, 73 aa, Glycine max
  Clone ID: PAT_MRT3847_4497C.1.pep
TYHTTYPTKSTSRLRSWGKPWGNLSYHKSLDTCAAALTLHLMSLNPSRNPGRKARAEALAHSLDHSSCYESCI

SEQ ID NO: 224750 - protein, 50 aa, Glycine max
  Clone ID: PAT_MRT3847_44980C.1.pep
QSRMLSAQDKFVLYRMAHLPKTSFSDRYHFRLNSLVLRRVVPLQKTTANV

SEQ ID NO: 224751 - protein, 140 aa, Glycine max
  unsure (1)..(140): unsure at all Xaa locations
  Clone ID: PAT_MRT3847_44981C.1.pep
RQKRPXASAPQSGRRKERQDPNEANENPKDKARQNTRKQAKDGDXSRKPTKKKTSTFFFXMKEAKRKGSHFRHGKRNGTRESRPSNTKLRMTKTRVLRRLHLKSAESKNTDQHMRHDMYMKVKSPVFKNNKTLKQRIHQS

SEQ ID NO: 224752 - protein, 207 aa, Glycine max
  Clone ID: PAT_MRT3847_44982C.1.pep
MAGKNNPRSNSRMTIFLFLLAFSLLLFLFSLSPLRTPSPTQHFHVSDAETSFLASLDHFLLAHAQTSLKDDDTAPRDEPQNDDMTKKLDDAVFHSEMDRLLSDPYYPVSLPLRVYVYDMPPKFTHDLLWLFKNTYRDTSNLTSNGSPVHRLIEQHSIDYWLWADLIAPQSERLLTSVVRVHRQEEADLFYIPFFTTISFFLMGKQQC

SEQ ID NO: 224753 - protein, 42 aa, Glycine max
  Clone ID: PAT_MRT3847_44983C.1.pep
RPCRIVHLGELPIEGTALRATTAVFIRFTVHNPMFRVRRINH

SEQ ID NO: 224754 - protein, 500 aa, Glycine max
  unsure (1)..(500): unsure at all Xaa locations
  Clone ID: PAT_MRT3847_44984C.1.pep
MAGKNNQRSNSRIFLFFFLLAFSLLLFLFSLSPLRTPSSPSPTHFHVPIAETSFVASLDHFLAHAQTSLKDHTARDVTKLDDAVFRSETDRLYSDPYYPVSLPLRVYVYDMPPKFTHDLLWLFKNTYRDTSNLTSNGSPVHRLIEQHSIDYWLWADLIAPQSERLLTSVVRVHRQEEADLFYIPFFTTISFFLMEKQQCKALYRXEALKWITDQPAWKRSGGRDHILPVHHPWSFKSVRRYVKNAIWLLPDMDSTGNWYKPGQVYLEKDLILPYVPNVDLCDAKCLSETNPKRSTLLFFRGRLKRNAGGKIRSKLGAELSGADGVVIEEGTAGEGGKEAAQRGMRKSLFCLSPAGDTPSSARLFDAIVSGCIPVIISDELELPFEGILDYRKIAVFISSNDAVKPGWLLKYLKGIRPAHIKEMQQNLAKYSRHFLYSSPALPLGPEDLVWKMLLLFPMAGKVVNIKLHPKRSQRVEEGSKSQCTCECRFGNITNTASIIS

SEQ ID NO: 224755 - protein, 61 aa, Glycine max
  Clone ID: PAT_MRT3847_44985C.1.pep
PGFWPSWFVVPSPVLAFCGHVLPFSKFCYFGLVMGVLTSGWLHFFFLMFGNWSLLYNVRRI

SEQ ID NO: 224756 - protein, 107 aa, Glycine max
  Clone ID: PAT_MRT3847_44986C.1.pep
NGLPLFFGNFLNPLNPTLGKPPSNFPTFFPRPFFLNVKFAPLGPFYRWLDGFLTQTAPCPKFPFFGHFPPCPVFGFYFPPWGFSCVPVPPLGFSWKSIHNLFYYPVF

SEQ ID NO: 224757 - protein, 115 aa, Glycine max
  unsure (1)..(115): unsure at all Xaa locations
  Clone ID: PAT_MRT3847_44987C.1.pep
GRFHVGFTLASEWDVAFDEVRAHNAAVVYRDDNAPPVDTDNDCCDNEXPVLNRNDHRLMSQAEHDTFIVSITPTLEAGTDKLFQDNQEADLYEGAVSLTMNIDMRDGSDEHKIDD

SEQ ID NO: 224758 - protein, 117 aa, Glycine max
  unsure (1)..(117): unsure at all Xaa locations
  Clone ID: PAT_MRT3847_44988C.1.pep
LGYPPRPVXXIAGDESLVSXXGGPPVPQXFALNSXSXXLRARXXWPXRFTQRXXDWGXXPXXRXXQXLXXAXXQHNXXPXSPXXGVIXXKRAPGTRDRPFFPXQXXRSPLNGANGDP

SEQ ID NO: 224759 - protein, 92 aa, Glycine max
  Clone ID: PAT_MRT3847_44989C.1.pep
RTKAMPGPGPHLMYAMGSGLCLTSISNGRFGPHHTLFYTINAFFGPDVGSFTEWLGSLFGGSAHALGSSLEDLIHHPFFYILLLRLPLSFLY

SEQ ID NO: 224760 - protein, 69 aa, Glycine max
  Clone ID: PAT_MRT3847_4498C.1.pep
FSLYLPFSLTLSLSSAHPAPSHILIDLPNLYRLRSSARRRHTLFVRRDEGPQTVYCCSAGTCSILGCSG

SEQ ID NO: 224761 - protein, 211 aa, Glycine max
  Clone ID: PAT_MRT3847_44990C.1.pep
RLRRAREDCYNILEQEEIKLISDLSNIAENQESREGQAESAATPERSPARVDDDALEAGEINSPELSSDDKNDEGDLVEEAADGSDKLIDVNEPEYQLRAINVAEPVASETVPSTSTVAESSSSKVNLPIPTQGTPSAPAETEETKQASPVGSTSTTINLSERARERAQMRQAGLVSSTLRGRGRGGAPRGRVGRGRGVVRRPPPPPGSDQ

SEQ ID NO: 224762 - protein, 576 aa, Glycine max
  Clone ID: PAT_MRT3847_44991C.1.pep
KEKEESRLERSRRLKTEKAIKDSYNSVEQEKIKLIIEIERYKESLKRLSDEVEKLKIVIGNLPEGSNVVQLLSGSNVDDFAAPYISAVESFEKEAHSASGELGGRGNLGDAATVTDGSAAATGSLVHPQPQGITFSAAPGASGLPPKASGESEKRLALPKASVETRRAGRRLVRPKLLRPEELQGGDTEMSDAEGPGGKPGPSSDTETSSVVQSSQQLARKRVAPTSTSELREESVAPGEKSSDVLKKSKGSESPEENTEEQPAATLEFTGSHPVTEELLDSSDMPQGQNEEVGDAQNEDGEIAVGNDEESKDPQNLDVTGQEELQGDKTGTLEENPDQPVDAKMLSDEMQRDQTDPDNQQSTLAPSGEREEGELLPDIGDLEGASDLSNIAENQESREGLSESAATPERSPATVDDDALEAGEINSPELSSDDKNDEGDSVEDAADASDKLMDVNEQISAESDQVAEPTPVASEGATLTSSVVESSSSKVNLPVPRQGTPNAPAETEETKQASPIGSTSTTIILSERARERAHVRQAGLVSSTLRGRGRGGAPRGRVGRVRGVVRRPPPPPGSDQ

SEQ ID NO: 224763 - protein, 60 aa, Glycine max
  Clone ID: PAT_MRT3847_44992C.1.pep
IAKTHKPSTLLTHNAPKAIKPMSHLPACHTSNSQRKHVTIFLLSEYADLPQSPPSNFVEI

SEQ ID NO: 224764 - protein, 121 aa, Glycine max
  unsure (1)..(121): unsure at all Xaa locations
  Clone ID: PAT_MRT3847_44993C.1.pep
SGESESFLQRAIQEQGRGQIMDTISEIQERHDAGHDAVKEIEINLIELPCVFLDMAALVESQACGPSNIVSEVGRASSLXDAREYQKSKMKWTCYAILRGIVLVIVLLFPLLTSLLPHLLI

SEQ ID NO: 224765 - protein, 146 aa, Glycine max
  Clone ID: PAT_MRT3847_44994C.1.pep
ARRTAQPPCAKMAGQDPKWQKDAADQNFDYMFKLLIIGNSSVGKTSFLFRYADDSFTSAFVSTVGIDFKVKTVFRHDKRVKLQIWDTAGQERYRTITTAYYRGAMGFILMYDITNEESFNSVQDWVTQIKTYSWDNAQVVLVGNKC

SEQ ID NO: 224766 - protein, 44 aa, Glycine max
  Clone ID: PAT_MRT3847_44995C.1.pep
SVLSKVLSYNVGIITVCGMNISISSPRIVQKAIKKRSTPQSSRQ

SEQ ID NO: 224767 - protein, 162 aa, Glycine max
  Clone ID: PAT_MRT3847_44996C.1.pep
VHAEPRKASEEDAKKHGIPPGYSLKNWDPTEEPILLLGSVFDSNSLGKWIYDWTVYSHGSSRPFSEMAGDLWLLLIQLAGKTKRAAKAVPAVRKSDNREVLEDFIGAGERLTDKLRDLLVACEQPMLEASKKGRKSSKLGKGAGVEFVETMFGRDRMLSNTE

SEQ ID NO: 224768 - protein, 151 aa, Glycine max
  Clone ID: PAT_MRT3847_44997C.1.pep
STMDHGRENSKVPFGEQEQYTFPYFSYPSFSLFTPNNHTLLSTFCPMFSTMEFNDLNNSNCFTPNEDSSGYCDVLGEHSSAKSDTDSSNEGVGDASDEEVMMSLDELLFDGKTKEKMELLAAMVGVDTTDPAIVLNEVVRVLKVLKRINQY

SEQ ID NO: 224769 - protein, 357 aa, Glycine max
  unsure (1)..(357): unsure at all Xaa locations
  Clone ID: PAT_MRT3847_44998C.1.pep
MASDLELKAKEAFEDDNYDLAYDLLTQAIGLSPNNADLYADRAQVNIKVNNLTEAVSDANKAIELNPSHSKAYLRKGTACIKLEEYQTAKAALEMGASLAPGDSKFTDLIKDCDELIAEESGVIPIQEESTTQGAATKAVEAENDLPEPPTVTVVKPKYRHEFYQKPDEMVITIFAKGIPRDSITVDFGEQILSVTINIPCKDAYVFQPRLFGKIIPSKCRYEVLSTKIEICLAKADHIQWTSLEFNKGSTVAQRFSVLPVARGEKPTYPSSKPKKXDWDKLEAQVKKEEKEEKLDGDAALNKFFRDIYQDADEDTRRAMSKSFVESNGTVLSTNWKEVGSMKVQESPPDGMELKKW

SEQ ID NO: 224770 - protein, 39 aa, Glycine max
  unsure (1)..(39): unsure at all Xaa locations
  Clone ID: PAT_MRT3847_44999C.1.pep
KKSXVESNGTVLSTNWKEVGSKKVEGSAPDGMELKKWEY

SEQ ID NO: 224771 - protein, 92 aa, Glycine max
  unsure (1)..(92): unsure at all Xaa locations
  Clone ID: PAT_MRT3847_4499C.1.pep
SRSHLLSLFDSPNMITPHSNSYMSVXLKIFVVYEQLEFPQEFLSHFLWLQDRPNKKTNNSNPYMNIFASLFLENVTIAIPRRIPISFPLASR

SEQ ID NO: 224772 - protein, 111 aa, Glycine max
  Clone ID: PAT_MRT3847_449C.1.pep
MSKREGFALCRFLIIILLWGFVAGDAPGREVWCVAKNNAEDAALQSAVEWACGAGGADCGAIHGGGPCFDPSNMQNTASYAFNDYFRKHAISEENCNFGNNAAITSFNPIC

SEQ ID NO: 224773 - protein, 62 aa, Glycine max
  unsure (1)..(62): unsure at all Xaa locations
  Clone ID: PAT_MRT3847_44C.1.pep
FKMHXFVXXLXGXTXTLDVESXDTXENXXXKXQDXVGIPPDXQRLXFAGKQLEXGRTLXDYX

SEQ ID NO: 224774 - protein, 43 aa, Glycine max
  Clone ID: PAT_MRT3847_45000C.1.pep
RESTFQIPSQHLHKEKPSPTCFRLFFGGRGLRVAITCGWIQSH

SEQ ID NO: 224775 - protein, 168 aa, Glycine max
  unsure (1)..(168): unsure at all Xaa locations
  Clone ID: PAT_MRT3847_45001C.1.pep
LSVTINIPCKDAYVFQPRLFGKIIPSKCRYEVLSTKIEICLAKTDHIQWTSLDFNKASTDILHRGLMLLQLLEVXRPSYPSSKQTRDWDKIEAQVKKEEKDEKLDGDAALNKFFREIYQDADEDTRRAMKKSFVESNGTVLSTNWKEVGSKKVEGSAPDGMELKKWEY

SEQ ID NO: 224776 - protein, 58 aa, Glycine max
  Clone ID: PAT_MRT3847_45002C.1.pep
LLRYVNKFVLIICKGLSSCISEVYNLFYFTIYCRLKNCLPSKLHLIVANLGFILNLIF

SEQ ID NO: 224777 - protein, 490 aa, Glycine max
  Clone ID: PAT_MRT3847_45003C.1.pep
MMGYLYLSCRAESAVSTSNSVSSSKEKSSSIKIQEFLYSDLEAATNGFSDRKLLGKGSHGYVYKAVVRGRPVAVKRPSRPQHHHNNVDNEIDILSKIQSPRLVNLVGFTNNDSRDRLLVVEFMSNGTLYDVLHTSPRPPNWGRMIRLALQTAKAIDTLHSSTPPVIHRDIKSANVLIDRSYNARLGDFGLALRGHVDDYRLRSTPPAGTMGYLDPCYVTPDNLSTKTDVFSFGILLLEIISGRKAIDITYSPPSIVDWAIPLIKKGKLLAVYDPRIAPPKDPIVRKQLAVIAAKCVRSCRERRPSMKELVTWLCGLCKLVPLHSWNGFNNPCMMAEIAGRPVEAAAAAARNYGQFSSRLEGVEEGKFDALDGRLSKSAMRYSRRVYSDLGFSSNLMDLMATTEEPEFLRDADGVEHSSKSAEQVSGSSSRFGSGRYSIRGRNLYRPCWSDKDALGLSKGQILGQSETTSKQDGVSGSNSKNLNSVAAEVI

SEQ ID NO: 224778 - protein, 442 aa, Glycine max
  Clone ID: PAT_MRT3847_45004C.1.pep
FFHEGFDQTETERENAKPDDSRKSVVSSENSDGNDNDGSIDEKTSKSTLDSVHEEQGFTAEHFLNSDVIDTNAVASKVQDNFSNEGFDQTETERENAKPDDSRESIVSSENSDGNDKDGSVDETTLKSTLDSVHEEQGFIAEHVQMLDVEIDAAASKVEDKFSNDGFDKAEAQREDAKLESSSKSIISCKNSNGNDEYGSGYEITSNSMLDSVGEEKRLSAEYFQKSDAIDINAETTEVEDKLSKEGFDRAETQEKDDKPEDSNNSLSSEDSNSNDKDGSIDEERSSPIAHAVKVEHDTDTGNRLKENKNPEAFTEGSRMDGLACESNETRPGKDEGQADTHTISCSMHKEVDNAVMADKTPNGVPSRTHISRGGDNTCHQRADALESLLELCAQLLQQGQLEELAAVLRPFGEDAVSVSSRETAIWLTKSLMASQKLHPET

SEQ ID NO: 224779 - protein, 86 aa, Glycine max
  Clone ID: PAT_MRT3847_45005C.1.pep
MADKPPNGVSLRTRISRGGDNTCHQRADALESLLELCAQLLQQGKLEELAAVLRPFGEDAVSVSSRETAIWLTKSLVASQNLNPEI

SEQ ID NO: 224780 - protein, 58 aa, Glycine max
  Clone ID: PAT_MRT3847_45006C.1.pep
WGYLIYYCLACLRVRQFDINRFWCLIFSGLHELKADTNVPSFRHFLYLLRSDKVGEQY

SEQ ID NO: 224781 - protein, 273 aa, Glycine max
  Clone ID: PAT_MRT3847_45007C.1.pep
FGTRNHEKDLTGKVSMKTIFSKKKLKKDGSEGKTSIIAPVEELQREERIPWICYSALDASSTLKLYESLKSHLSDMPWKFDGLPVYGKTMYDFYNEYWRPFGELLVMMESDGPLVDRAYLESIEKVAKAEQEVAVNRFRKWATRYCPDAQYMNVGSDSQLRQLLFGGIVNRKDSNQTLPTERIFKIPNVNNVIEEGKKAPKRFCDIKLTSLGYNLETEMYTATGWPSVSGDALKALAGSISADYDFFDEDCNLDDLDDEDENPSHSQVASVKI

SEQ ID NO: 224782 - protein, 225 aa, Glycine max
  unsure (1)..(225): unsure at all Xaa locations
  Clone ID: PAT_MRT3847_45008C.1.pep
MENWETEEVEGESPLPVLEAVDYRGGASVRSKSGSWRSAGFIIGVEVAERIAYYGIQGNLITYLTGPLHQTTATAAENVNIWSGTASLLPLFGAFLADSLLGRYRTIILASFIYILGLGLLTLSAMLPSPTGSECQVGNEFKSCSPQSQIVVFFISLYLVAIGQGGHKPCVQAFGADQFDEKHPKEYKXRSSFFNWWYFTMCAGCMATLSILNYIQDNLSWVLGL

SEQ ID NO: 224783 - protein, 62 aa, Glycine max
  Clone ID: PAT_MRT3847_45009C.1.pep
PYLYKMKGLAVRNNQHAELISNGNWDMNLKSWLITNYKFRTAAFFNPNQRATHYGFRIMRPN

SEQ ID NO: 224784 - protein, 143 aa, Glycine max
  Clone ID: PAT_MRT3847_4500C.1.pep
MLKPLVTILVFLMVASAQDSLSDNTIFEGKQTVRVYNGMNDGILVYLHCRSKDNDLGQHVLAFGEFQKWSFNDNLFGTTLFWCTMNASNVHASFEVYRAKTEENKCDTQCNRILKKDGGYFFNQFVGHWEKRLSWHIPKTPSF

SEQ ID NO: 224785 - protein, 55 aa, Glycine max
  Clone ID: PAT_MRT3847_45010C.1.pep
YWYIKPELKHFAQKWVDATKIAGFALATSALGVSGASAKRVSKRLTFYEFHIKTY

SEQ ID NO: 224786 - protein, 115 aa, Glycine max
  Clone ID: PAT_MRT3847_45011C.1.pep
IQVKTICPFEKGKHYTSLIYIYIYIYIYIYFFPLPGRMQAEAEMSHLFHSEFSGIPGIPLKEHEKVTLRKASHSLVPLPYLLLSFSKMSVSNSLWIYLPNAHNRRGSTIRSTPPT

SEQ ID NO: 224787 - protein, 134 aa, Glycine max
  Clone ID: PAT_MRT3847_45012C.1.pep
LKLCRNPFSDEAIAAFVETTGGSLKELSLNNINKVGYHTTLSLANHAKNLHSLDLSWCRNLTDNALGLIVDSCLALRSLKLFGCSQVTDAFLNGHSNLQIQIIGLKMSPVLEHVKVPDPHQGALNYSSVSVDLV

SEQ ID NO: 224788 - protein, 74 aa, Glycine max
  Clone ID: PAT_MRT3847_45013C.1.pep
KHVHKTFYPNQRISKCDQSRGRKSLLKTLFPNYLIIFSSFSPFIRFFSFPLRKPGPYPWFFIPFQGICSYNSFF

SEQ ID NO: 224789 - protein, 284 aa, Glycine max
  Clone ID: PAT_MRT3847_45014C.1.pep
MERSNPVRKPHTSTADLLTWPETPISDSPAPPSSAVRSHQPSDGIRKVVFGGQVTDEEVESLNKRKPCSDYKMKEITGSGIFVANGEDDALEDGSANPNKTGVRMYQQAISGISHISFGEEENVSPKKPTSLPEVAKQRELSGTLESEDSILKKQLSDAKCKELSGHDIFAPPPEIKPRPITPRILELKGSIDIGERHADGDQGDTNSAGKTAKKIYDKKFAELSGNDIFKGDAPPSSADKSLSGAKLREMSGSNIFADGKVEARDYLGGVRKPPGGESSIALV

SEQ ID NO: 224790 - protein, 136 aa, Glycine max
  Clone ID: PAT_MRT3847_45015C.1.pep
NDISHTFQSLLKIVAVPGGAARFAAGFTGSVMALSALCLFYAAANFFYSAVPLHSEMTQRIVDAVSDWSTVRQVLDLGCCGRGILLNAVAARLKKEGSSGRVIGLSGPNKAKLSATLRAAKVEGVEEYVTCRTGDA

SEQ ID NO: 224791 - protein, 126 aa, Glycine max
  unsure (1)..(126): unsure at all Xaa locations
  Clone ID: PAT_MRT3847_45017C.1.pep
FAGIVSLWSQLHYVSCHNLQLQEAYLVNLINVLREFYLHRSEVALQLIRKALSRIEWLQKADVPTIAQNGEFHLMQTMMNAPDSNDNIDLLLMMDTLVXQRALKAFPNKIASNDXLVLANTQEFFD

SEQ ID NO: 224792 - protein, 46 aa, Glycine max
  Clone ID: PAT_MRT3847_45018C.1.pep
GGKTKKKVLLVTDLPANAWMGEKGWSHLVALTHITCGIEAEAIEPL

SEQ ID NO: 224793 - protein, 97 aa, Glycine max
  Clone ID: PAT_MRT3847_45019C.1.pep
QDTTIIGRASGLACMTVMFITTFLMTLVAIFVWQKSVLIAVAFLLFFWVIEGVYLSAAFIKVPQGGWVPLVLSFIFMIVMYVWHYGTRRKYSYDLHN

SEQ ID NO: 224794 - protein, 50 aa, Glycine max
  Clone ID: PAT_MRT3847_4501C.1.pep
SHSALNIMINPTIKTRQKYLSILIFRLLLFLFYCCMYYSYLSKQSETSLF

SEQ ID NO: 224795 - protein, 59 aa, Glycine max
  Clone ID: PAT_MRT3847_45020C.1.pep
ISDGQILRNHILPLGQDKILHQPSILVEEIRQPNLNEMMGLRCQIILSDSVCIKEIMFI

SEQ ID NO: 224796 - protein, 81 aa, Glycine max
  Clone ID: PAT_MRT3847_45021C.1.pep
GVLFWDRLCFDHYPNHHYVRHNLLVLVYIECQSDCSQWSAHLIYILVLILQLSLACSRQYCGASQRRYQCRHWCVEAGAKS

SEQ ID NO: 224797 - protein, 64 aa, Glycine max
  Clone ID: PAT_MRT3847_45022C.1.pep
PNSIGILLDGLFCLARCQQNSVDQRLMRSIYVYILNLNVPLNISCMLTSILYQSNELIKNEPQR

SEQ ID NO: 224798 - protein, 63 aa, Glycine max
  Clone ID: PAT_MRT3847_45023C.1.pep
MVNLVRSLCFLLFGGWLALSEQAYHSEWHIVLLNALKPANRIQSACGCIETWVPYSTLFHSFG

SEQ ID NO: 224799 - protein, 50 aa, Glycine max
  Clone ID: PAT_MRT3847_45024C.1.pep
SGFWRPLTLFKPLKRLKWRFIRPIGNGVSLGFRFTIAELIRQYKFLRMEF

SEQ ID NO: 224800 - protein, 39 aa, Glycine max
  Clone ID: PAT_MRT3847_45025C.1.pep
SVQFVYEMDLIKFLLVIYYILGLISALYAYFSGNLQFFV

SEQ ID NO: 224801 - protein, 54 aa, Glycine max
  Clone ID: PAT_MRT3847_45026C.1.pep
FMWSLLAATFILGSYWKVSFVNDLAMHICLGLVLGVYVYKEAVTSCLPISGILV

SEQ ID NO: 224802 - protein, 58 aa, Glycine max
  Clone ID: PAT_MRT3847_45027C.1.pep
PGNISIVKSGSILLAAFSIITYMVPGLWMRKNQNKGERHKELYLIQLISWTTNYVICA

SEQ ID NO: 224803 - protein, 153 aa, Glycine max
  unsure (1)..(153): unsure at all Xaa locations
  Clone ID: PAT_MRT3847_45028C.1.pep
LLPVASDPNVAPCAXESGFNLIPPTGLPNDDQLKIMCGSAACKGVIDAVKXXSPSDCDLTVGKVTLNVFSLVNNFPNDCQRVAGTPAPAPGPAPTTAPAPGPAPTTAPAPGPAPTTTPGPAPTTAPAPGPAPTTTPSPVGQQLLSTLSLRFRR

SEQ ID NO: 224804 - protein, 223 aa, Glycine max
  Clone ID: PAT_MRT3847_45029C.1.pep
KSCRLRWINYLRPDLKRGGFTEMEEDQIIQLHSCLGNRWSKIASHFPGRTDNEIKNHWNTKIKKRLKLLGLDPLTLKPSEQKEKSVDDKKNIELQPNTSKGSEQGVENKSLDMHSTREVPKTEGKIEENKVTWDDTTGFFNNYEMLCSQLDLGSWMSQETKTSTSSYCSSSFSLDDSSNLSVGESSYLQENSLQQWVDGLDSILSWDSFNPLEKDFLFLDNRQ

SEQ ID NO: 224805 - protein, 59 aa, Glycine max
  Clone ID: PAT_MRT3847_4502C.1.pep
LGLAFTHTFYNGHRRPHLATGAAAYMGHHWLLSPQNLGDGALGLVNLNNYYEPSLRRAR

SEQ ID NO: 224806 - protein, 129 aa, Glycine max
  unsure (1)..(129): unsure at all Xaa locations
  Clone ID: PAT_MRT3847_45030C.1.pep
RCPVSDQGREGLANGVPNLAKVKAKKRKGVTPEGGDWLRRTRGXVAVNLNTVEAYLQEASAIDGGAHDNRXQFSQMPAQIGATAASASSITTRSSSIKLRLGLLSGRSLVSNTFKRWAGGNTSARHGYG

SEQ ID NO: 224807 - protein, 63 aa, Glycine max
  unsure (1)..(63): unsure at all Xaa locations
  Clone ID: PAT_MRT3847_45031C.1.pep
MARIKVYELRQKTKADLMNQLKDLKAXLALLRVAKVTGGCPNKLSKIKVVSTHIAQVLTVITQ

SEQ ID NO: 224808 - protein, 241 aa, Glycine max
  Clone ID: PAT_MRT3847_45032C.1.pep
RNTNTRQSSHASAVVEFEPQQLRLFIPNFLSLDECKELEFIHKSSSTVGYRPNVFSTTLSHLIATNSSHFIIPFIPIRERLKDKLEEFFKCEYELFIEFTGLISWSRGASIGWHSDDNRPYLKQRHFSAVCYLNTYGKDFSGGLFHFQDGEPKSIVPKAGDVVMYTADDRNIHSVDEITEGERLTLALWFSRDGSHDEDMKLISLLSQHLLHENVADSYLPLPASSNMYWFSKDQASNYQF

SEQ ID NO: 224809 - protein, 92 aa, Glycine max
  unsure (1)..(92): unsure at all Xaa locations
  Clone ID: PAT_MRT3847_45033C.1.pep
MREWCSGSSPGLVPTDILAGGIDDQQVSLVITYYLPTRPGKDLLHIGQTGSFERKRVSINCEALDDLRGRFYIRKFSNVGVEXCPSNVDDLM

SEQ ID NO: 224810 - protein, 59 aa, Glycine max
  Clone ID: PAT_MRT3847_45034C.1.pep
ITALLLHKMVNQSRKWHANSTVLLNEIGTLSVTPDIPFWQSRWVEPRLRIQRTILLKRK

SEQ ID NO: 224811 - protein, 109 aa, Glycine max
  unsure (1)..(109): unsure at all Xaa locations
  Clone ID: PAT_MRT3847_45035C.1.pep
MVGGFNGEGVVREKEEEEENNKWPSWLQPLLKTRFFVQCKVHADSHKSECNMYCLDCVNGALCSACLSFHKEHRIIQVXQTYIINSAKIVFLNERPQPRPGKGVTNTCQ

SEQ ID NO: 224812 - protein, 333 aa, Glycine max
  Clone ID: PAT_MRT3847_45036C.1.pep
MSSLITDLLRQTGGTAVIDGGLATELERHGADLNDPLWSAKCLFSFPHLIRQVHLDYLENGADIIITASYQATIQGFKAKGYSDEESEALLRSSVEIAREAREVYYKNCAGCRSGDGDDDGRILKQRPILVAASVGSYGAYLADGSEYSGDYGDAITVETLKDFHRRRVQILADSGADLLAFETVPNKLEAEAYAQLLEEEDIKIPAWFSFNSKDGVNVVSGDSLMECGSIAESCNKVVAVGINCTPPRFIHGLIVLLKKVTTKPIVIYPNSGETYDADLKEWVQNTGVTDEDFISYVNKWCELGASLVGGCCRTTPDTIRKIYRTLSSSQSI

SEQ ID NO: 224813 - protein, 214 aa, Glycine max
  Clone ID: PAT_MRT3847_45037C.1.pep
QSNGNGNDLGGTDTSSATNIWTLCLLLNNPHTLEKVKEEIDTHIGKERIVTEEDISKLVYLQAVLKESLRLYPATPLSGPREFREDCKVGEYHVKKGTRLITNLWKIQTDPSIWPEPLEFKPERFLTTHKDIDVKGRHFELIPFGSGRRICPGISFGLRTSLLTLANFLHCFEVSKTSSEPIDMTAAVEITNVKVTPLEVLIKPRLSPSLYESM

SEQ ID NO: 224814 - protein, 223 aa, Glycine max
  Clone ID: PAT_MRT3847_45038C.1.pep
MGGFNGEEGVVREKEEENKWPSWLQPLLKTRFFVQCKVHADSHKSECNMYCLDCVNGALCSACLASHKEHRIIQIRRSSYHDVIRVSEIQKFLDITGVQTYIINSAKIVFLNERPQPRPGKGVTNTCQVCERSLLDSFNFCSLGCKIVGTSKKFRKKKMLSEADGSDGEESVNGIISNASARNKIHSFTPSTPPPTVVNYRTAKRRKGIPHRAPMGGGLIIEY

SEQ ID NO: 224815 - protein, 107 aa, Glycine max
  unsure (1)..(107): unsure at all Xaa locations
  Clone ID: PAT_MRT3847_45039C.1.pep
EKKEEEEENNKWPSWLQPLLKTRFFVQCKVHADSHKSECNMYCLDCVNGALCSACLSSHKEHRIIQLRRSSYHDEIWLYEIQKFLDITGVXTYIINMPKILFSKDRH

SEQ ID NO: 224816 - protein, 454 aa, Glycine max
  Clone ID: PAT_MRT3847_4503C.1.pep
MEPRVGNKFRLGRKIGSGSFGEIYLGTNIQTNEEVAIKLENVKTKHPQLLYESKLYRILQGGTGIPNVRWFGVEGDYNVLVMDLLGPSLEDLFNFCSRKLSLKTVLMLADQMINRVEFIHSKSFLHRDIKPDNFLMGLGRRANQVYAIDFGLAKKYRDSSTHQHIPYRENKNLTGTARYASMNTHLGIEQSRRDDLESLGYVLMYFLRGSLPWQGLKAGTKKQKYEKISEKKVSTSIEALCRGYPTEFASYFHYCRSLRFDDKPDYAYLKRIFRDLFIREGFQFDYVFDWTILKYQQSQLATPPTRAIGPSAGTSSGMPPAVTNADRHTGGEEGRPPALVSVDSSRRRMSGPILNTLSSANALGQSSGSSRRVAVSSSRDAFVGAESDIRTRTAEASPGAAHRALSGQRSSPIGSSDPKRVVSSGRNASHVKNYDTALRGMEGLQLENDERTHY

SEQ ID NO: 224817 - protein, 40 aa, Glycine max
  Clone ID: PAT_MRT3847_45040C.1.pep
FLCRNYFSATSSICSILIIKLSESKISYIFFTEKRLKDKK

SEQ ID NO: 224818 - protein, 110 aa, Glycine max
  unsure (1)..(110): unsure at all Xaa locations
  Clone ID: PAT_MRT3847_45041C.1.pep
KEXHKISQDPXQEGFPXFFQKGXWXVSPCWEQEKAGPLRSYLPXQXSXNPWRRFPRRRNYPKNWLGLVLGDLXNXXKXQIAHGSFDLPTQKLHISKPLLGPHTSXGXIXP

SEQ ID NO: 224819 - protein, 120 aa, Glycine max
  Clone ID: PAT_MRT3847_45042C.1.pep
TAARRRQKGFLNERPQPRPGKGVTNTCQVCERSLLDSFNFCSLGCKIVGTSKKFRNKKMLGEADGEESVNGIRNNASARKKIHSFTPSTPPPTVVNYRTAKRRKGIPHRAPMGGGLIIEY

SEQ ID NO: 224820 - protein, 45 aa, Glycine max
  unsure (1)..(45): unsure at all Xaa locations
  Clone ID: PAT_MRT3847_45043C.1.pep
VGFDAASRRCRQLXSTLDFSQRMTNAAVVSMSNNCSDLVVFRLSR

SEQ ID NO: 224821 - protein, 42 aa, Glycine max
  Clone ID: PAT_MRT3847_45044C.1.pep
STVTFMQLSSSSQYMIFKIPSGMCIHQSIHSLMVVGSDQMSR

SEQ ID NO: 224822 - protein, 56 aa, Glycine max
  Clone ID: PAT_MRT3847_45045C.1.pep
VFLLVSHKHNSLSLFLAIDIGLQFPSAGKKIKVVPPIENQENVPSERPWKYITIKL

SEQ ID NO: 224823 - protein, 93 aa, Glycine max
  unsure (1)..(93): unsure at all Xaa locations
  Clone ID: PAT_MRT3847_45046C.1.pep
SGLSQXCLIVYFADAAHSXACKNGLRLQDECRNTTHLLKHQLTRAQDSLLQTEMQANSCNQTVMDLRDSLKKKVSQTQEQQARIKELRIRSRG

SEQ ID NO: 224824 - protein, 77 aa, Glycine max
  Clone ID: PAT_MRT3847_45047C.1.pep
QIQIYHHAIPTLTSAQPKYISPSQIDPRTRHIVPHRRLTFADANIRTLKTLMTAALHATNLSNPSSQNMMREASNTH

SEQ ID NO: 224825 - protein, 86 aa, Glycine max
  unsure (1)..(86): unsure at all Xaa locations
  Clone ID: PAT_MRT3847_45048C.1.pep
SNLNLSPPPPQLPSPTVPRWTPNXQCPSADNIPSHENPPPSPQDPEXSLRTPPPPNPKPKPPNPPKPGAATPPRLLRREPLRWSLV

SEQ ID NO: 224826 - protein, 62 aa, Glycine max
  Clone ID: PAT_MRT3847_45049C.1.pep
KQLIVWRMSRSEIQRSYHLWLQSVSQRAIFSDPKVSPLEYVWNIRLFVLGCLPTIMKILFSF

SEQ ID NO: 224827 - protein, 115 aa, Glycine max
  unsure (1)..(115): unsure at all Xaa locations
  Clone ID: PAT_MRT3847_4504C.1.pep
MVMVLRRHRCSAGWVYLLPWLLFPSLIPRLVPPILDVAKDNRTSFPSGYASGTASVAYXLXGAERAGGNGPRIGDTFTXHKYAEKIKDHAYAHATVHEKHRYKEDIVIMKYIKLD

SEQ ID NO: 224828 - protein, 84 aa, Glycine max
  Clone ID: PAT_MRT3847_45050C.1.pep
ALNKGLCFVFLARQHTPYNNCPEYAGSTREMGITESTRVKGGRSCINSIFMMLTIEEAPSWNQINSVDLRAAHKNIKRDASVDE

SEQ ID NO: 224829 - protein, 48 aa, Glycine max
  Clone ID: PAT_MRT3847_45051C.1.pep
SQPASADNWLPLWCTNPTFGIRSVGLHYPTSRPTIHPISLYGLVYHSV

SEQ ID NO: 224830 - protein, 116 aa, Glycine max
  unsure (1)..(116): unsure at all Xaa locations
  Clone ID: PAT_MRT3847_45052C.1.pep
FVSDQRGCNYFLHKMAEVFLFPSQERMLDIRLKPNKVARELQYSQSGVTLQTENGXVCDTNYVILSDSIGVFQSDVMSLQSPLTRVCSILCPTLTSRKYTSAVVFFHTKNTRLFFQ

SEQ ID NO: 224831 - protein, 44 aa, Glycine max
  Clone ID: PAT_MRT3847_45053C.1.pep
KYPPKSSQASPQHSVLGSSSSRYSLSMFYVATRVVLASECSFVS

SEQ ID NO: 224832 - protein, 60 aa, Glycine max
  Clone ID: PAT_MRT3847_45054C.1.pep
MANHGVEGGSFTAKDYHDPPPSPLIDAEELTHWSFYKAFIADYIATMLFLFITLLTVIGY

SEQ ID NO: 224833 - protein, 45 aa, Glycine max
  Clone ID: PAT_MRT3847_45055C.1.pep
IMFDLEVNLVDHNLNVYGLSMNYKMIKVWVLLLCHIVLTLVSFAA

SEQ ID NO: 224834 - protein, 141 aa, Glycine max
  Clone ID: PAT_MRT3847_45056C.1.pep
GNQFFLKKGKPKKILPQPPKKKSQPVKSGGGVIGRVHRIQRLKKSPGLYGQSFTKTRGGAFPNRRFLDPPIQKKGFLFISFFLKKHSPLPKNLRVKKNFLPKKKKKGWGSILKKFSVLFSLSPKKKKKKKKKKKKKKKNKT

SEQ ID NO: 224835 - protein, 108 aa, Glycine max
  unsure (1)..(108): unsure at all Xaa locations
  Clone ID: PAT_MRT3847_45057C.1.pep
TCPPPLPRLGVRVEDNALEYTSAKFNQFCEEAGIEHQLTAPYTPEXNGVXSERRNRTVMEMARCMLHEMELPKTFWAEAANTAVFMQNWLPTKALNNKTPFFEARYWV

SEQ ID NO: 224836 - protein, 69 aa, Glycine max
  Clone ID: PAT_MRT3847_45058C.1.pep
LLCMAFVDNNAPSNIADVQPTAKAVQSPRTLVDLEIYGHVQFIASVQASRDLYIPISSLFKSSANFSSM

SEQ ID NO: 224837 - protein, 134 aa, Glycine max
  Clone ID: PAT_MRT3847_45059C.1.pep
HLKAKVDAGFKLRGLINTHHHHDHAGGNKEISKAFGLPVVGGRDCALVSETPSHQSNFKIGSINVTALHTPCHTQDSICFFFEDGQDRAVFTGDTMFIGGCGRFFEGTPKEMHKALNETLASLPDDTKVYPSHE

SEQ ID NO: 224838 - protein, 129 aa, Glycine max
  Clone ID: PAT_MRT3847_4505C.1.pep
MGEWIPKEGRPPALVSVDSSRRRMSGPILNTLSSANVLGQSSGSSRRAAVSSSRDAFVGAESDIRTRTAEASPGAAHRGLSGQRSSPIGSCDPKRVVSSGRNASHVKNYDTALRGMEGLQLENDERAHY

SEQ ID NO: 224839 - protein, 292 aa, Glycine max
  Clone ID: PAT_MRT3847_45060C.1.pep
MSMAATLTAVRIPTFHQRHLKQHFTAPSSSSLRLLNLAKMEGSEISEQVVGEDLGAKKKVFVAGATGSTGKRIVEQLLAKGFAVKAGVRDIDKAKTTLSSANPSLQIVKADVTEGSDKLAEAIGDDSEAVVCATGFRPGWDLLAPWKVDNFGTVNLVEACRKRNVNRFILISSILVNGAAMGQLLNPAYIFLNVFGLTLVAKLQAEKYIRKSGINYTIIRPGGLRNDPPTGNVVMEPEDTLYEGSISRDLVAEVAVEALAYPEAFYKVVEIVSRPDAPKRPYHDLFGSIRQQ

SEQ ID NO: 224840 - protein, 97 aa, Glycine max
  Clone ID: PAT_MRT3847_45061C.1.pep
FYLYFFLFRCFCFFFYLLISFFPQGEKLFLFSEGPLGPVERKKPAVGKIPPKKGGGKANLGKPPKFFTLPEKNTCSFLEGEGPPLTRRLPPRRGGGP

SEQ ID NO: 224841 - protein, 236 aa, Glycine max
  Clone ID: PAT_MRT3847_45062C.1.pep
MTRSLVMASSSMSCPKLGNCAVSHTKFQAFHLSSMFSPLDRGLFSPWSGLKHLGISAKPKPLLHIDRKGGCKGKVVYASLFGVGAPEALVIGVVALLVFGPKGLAEVARNLGKTLRAFQPTIRELQDVSREFKSTLEREIGLDDNLSPTQNTYNSNVRNTTPTSSSPLGPVASLDPAKAYSSEEYLKITEEQLKASAAQQQGQTPPKEGENGPQIQPPAEETATTVPPPLKPESET

SEQ ID NO: 224842 - protein, 525 aa, Glycine max
  Clone ID: PAT_MRT3847_45063C.1.pep
MILKTQMEEKQLDFNQPLLSVRRISSTAASENDNKRKADKSVRKRPPLPFYKSELKSGPVTNPGTVPFVWEKTPGRPKNESKLQTRAVERPSVAPKLPPGRVLKVEQQCSDKVPKGASVTQSRTGSSVSDSPRTASLDNKGLEHESPQEVIEEKESSGSDDEDENYLDALDTLSRTESFFMSCSVSGLSEWDDQEVQLSGNFSTDQQARDFMIGRFLPAAKAMASETPQIQHNSRKPLVTQEQPKQAWKVVSGANSRPLNPKWQKVLPHYAQDIGREESEDESDDNDGYENNAPKVCGLFPRFCLLNPVPGLRMEGRIRSSTFHGVQSKSITSHRRTAKEHGRTATNGKKSVNSQSGYTEERDFLSTAEKSKHDIDPHRRACSKSSASESTEFESSCDSPVVEKTLYVDSVHKVKSSDTNIRGDDFDTLRKDTDLDKSLSIDSSIEDSKPLGIVDEKEVSEPKSSASLDSSLPVCSDNSNDNMQMEMKNHSNKICPEKQELTKPDYQGSNLDRDLVAISVIWLHA

SEQ ID NO: 224843 - protein, 98 aa, Glycine max
  Clone ID: PAT_MRT3847_45064C.1.pep
GILVLVGPMFLGPLGARGKTLFWSPRSLEGGPLKRGFCPEIRWGLFPPPGGGFLLKGGGGGLWLGFLKLILGQGASHFCDTAWGGGEFFDRVLILVGF

SEQ ID NO: 224844 - protein, 105 aa, Glycine max
  Clone ID: PAT_MRT3847_45065C.1.pep
IHPNAASGSFCYIRGPTYFKERVLFYPNLHYLGRRAGTNYRAACMIVISKTSDPHLYTRTLLMFIQILHSPSKNPHILCGHQTLKSPTLSYNRTKHLPVRTSSGC

SEQ ID NO: 224845 - protein, 143 aa, Glycine max
  unsure (1)..(143): unsure at all Xaa locations
  Clone ID: PAT_MRT3847_45066C.1.pep
DHFPQDRSLRTSIDAHLAAMSTTAAPVTGNPSQASSDGLSGKRHIRPFAGSSRPMSPPASHTLFHPKTRCFVYGLQPRAVQGMLDFDFICKRKQPSVAGIIYTFGGQFVSKMYWGTSETLLPVYQTTEKAIXKHSDVDTVVNF

SEQ ID NO: 224846 - protein, 71 aa, Glycine max
  unsure (1)..(71): unsure at all Xaa locations
  Clone ID: PAT_MRT3847_45067C.1.pep
LLFIQPLSFLFLFXILSFNTPYFLFNXFKGFTMLFXLSIVXVDSSCFLLDCFVKTMNLLMIPRLMLFKEIC

SEQ ID NO: 224847 - protein, 286 aa, Glycine max
  unsure (1)..(286): unsure at all Xaa locations
  Clone ID: PAT_MRT3847_45068C.1.pep
MYPSSSSSSSSSSQSMTQAGLTRYGSAPGSLLTSTVDSLIGGSRPSPYFSGESSESPCKEQRSFHNHPPFFASSLLRQKSSPAGFLSHLSNHHGVXSPSPPGGLSNSNSNSNCSLLKSQLSFTHESLSNTVNVDPSSTTFGMDPWDNNSIAFSATSTKRSKTNTNDPDILHSLNSALESQFNLPHTSLEMSTVDKLLHIPEDSVPCKIRAKRGCATHPRSIAERERRTRISGKLKKLQDLVPNMDKQTSYADMLDLAVQHIKGLQTQVQKLHKEMENCTCGCKQSK

SEQ ID NO: 224848 - protein, 97 aa, Glycine max
  Clone ID: PAT_MRT3847_45069C.1.pep
FYITELTCIKKPLPKKGEKSYKIWGGLRVKYMEHLLWEKPRYKKPLPFGGGKHPACFGGEILIESACFGFYAGQVRGAGAFFPPGWWEKTEKFWTFE

SEQ ID NO: 224849 - protein, 73 aa, Glycine max
  Clone ID: PAT_MRT3847_4506C.1.pep
MGPKGLVVLGVLCISARSLSRCLEEDDGLVMNFYKESCAQAVDVLVEQVKHRYKRNENTAFSWLIHICHDRAG

SEQ ID NO: 224850 - protein, 69 aa, Glycine max
  unsure (1)..(69): unsure at all Xaa locations
  Clone ID: PAT_MRT3847_45070C.1.pep
PLQTTTPLIAAVFEFPYILKETTRCSLGYFSFHFPLFFKSQRIFVSNIQPSRSWMLRXSFSGYLGMLLV

SEQ ID NO: 224851 - protein, 270 aa, Glycine max
  unsure (1)..(270): unsure at all Xaa locations
  Clone ID: PAT_MRT3847_45071C.1.pep
PRVRLPADKMAVIAMHKLMGLLMTGTEHATVGTARVVQAACGIGDAIEXRIHKFLEKTKKKKGDRSKKNKASESVADIKEEQKLRKKVIDLMKKQKLVAVRGLVKGKDDTKPWGAAIKTKVGSRLIELLMQTAYIQPPPDQLLDAAPDIRPAFVHSFRTVAKVSAKASKRYGIVQCDPLILKGLERTAKNMVIPYMPMLVPPVNWSGYDKGGHLFLPSYVMRTHGARQQREAVKRAPRKQLEPVFEALDTLGHTKWEVNKEVLSVVDRIW

SEQ ID NO: 224852 - protein, 56 aa, Glycine max
  Clone ID: PAT_MRT3847_45072C.1.pep
HKPLPYETSNAHNKLNASVFKQLSLGGTGNMKHDLTQHFYYYSHPDSSQKKTLAEW

SEQ ID NO: 224853 - protein, 70 aa, Glycine max
  Clone ID: PAT_MRT3847_45073C.1.pep
AWIRRSRCQSSTRPPEIRLYTLICVRTKSYLCSRILCAVDKGTLIASSPYSIQFILLQQCNKNMECGSVV

SEQ ID NO: 224854 - protein, 63 aa, Glycine max
  Clone ID: PAT_MRT3847_45074C.1.pep
NQPFKQSLFSLKQFTTRFNLLTLTTLWPIKTSPWTTYLTFPTTNSKFENTSMLTMNKNTMNKT

SEQ ID NO: 224855 - protein, 112 aa, Glycine max
  unsure (1)..(112): unsure at all Xaa locations
  Clone ID: PAT_MRT3847_45075C.1.pep
HCGQXGYNMTMCDGIDKTSATLLFIKLADRDFLKRNFKQMSNVLWVAPEDKASLWPQLHYDSCNNLXMQDAYLRNIGNVLQELYSHTPEEALQLRKKALSRIEWLQNADEPT

SEQ ID NO: 224856 - protein, 39 aa, Glycine max
  Clone ID: PAT_MRT3847_45076C.1.pep
GHVLSRVRCIEVRISVCHSFCPLTLAMVKAPWTQRPVFN

SEQ ID NO: 224857 - protein, 44 aa, Glycine max
  Clone ID: PAT_MRT3847_45077C.1.pep
GSPDKQIKRPKRLINYILVGQFPFPKKQSPQRGLIWGGYKGMQY

SEQ ID NO: 224858 - protein, 74 aa, Glycine max
  Clone ID: PAT_MRT3847_45078C.1.pep
RLSSSFSDCALQRASQTFYIWRTVPSKARINVFCINRPFRFALLLCGYRRGTNHHKIASTRRFSSTLHTWGTGW

SEQ ID NO: 224859 - protein, 33 aa, Glycine max
  Clone ID: PAT_MRT3847_45079C.1.pep
SYQLQKTLSMPATPTTPMTSTTSTTPGSARKAD

SEQ ID NO: 224860 - protein, 194 aa, Glycine max
  Clone ID: PAT_MRT3847_4507C.1.pep
MEPRIGNKFRLGRKIGSGSFGEIYLGTNNQTNEEVAIKLENVKTKHPQVLYESKLYRVLQGGTGIPDVRWFGVEGDYNVLVMDLLGPSLEDLFNFCSRKLSLKTVLMLADQMINRVEFIHSKSFLHRDIKPDNFLMGLGRRANQVYAIEFGLAKKYRDSSTHQHIPYRENKNLTGTARYASMNTHLGIEQSMKG

SEQ ID NO: 224861 - protein, 250 aa, Glycine max
  Clone ID: PAT_MRT3847_45080C.1.pep
MEISSRLQERENHNHIHNHNHPSPMNSPTSNVSNCMSSSNSNGIQIPTPPLTPKTIPRSDSNPYPTTFVQADTSTFKQVVQMLTGSSDTTKQASQDPQPPQPPSSSSSRNFNIPPIKAPPKKQQGGFKLYERRNSLKNSLMLNTLMPNFAYNHNNNSPSFSPRNNMPEILSPSLLDFPSLALSPVTPLNDDPFDKSSPSLGNSSEEDKAIAEKGFYLHPSPMTTPRDSEPQLLPLFPVTSPRVSSQSPRS

SEQ ID NO: 224862 - protein, 243 aa, Glycine max
  Clone ID: PAT_MRT3847_45081C.1.pep
MASYQKHYDDQGRKVDEYGNVERQTDEYGNPVHATSVTYVATKSVGGYNDDANKQHDITGVYPEKDTGRHHFGRGYDGDTNKQQHDAIGVYPGIDIGRDHETTGVYGLNTDRHHGTTGVNPGIDTHNQQHGTTGGYAGDTGRQHGNTGGLYYGTDTADTGTGPRSGNTGGTGYGGTGGTDYGTAGGTGYGSGTGYGINTGGAHTEAGYGKEHRQHEQSHGGQHEKKGILDKIKEKLPGGHSDK

SEQ ID NO: 224863 - protein, 45 aa, Glycine max
  Clone ID: PAT_MRT3847_45082C.1.pep
ARAHRAGLNLPVYTTIRSGPCHGPNFSCTVEIAGMHFTGDPSRTK

SEQ ID NO: 224864 - protein, 97 aa, Glycine max
  Clone ID: PAT_MRT3847_45083C.1.pep
YSPTFFLEKEHSVRYARTTFVSEGATHLLPKRRSLEKRRGEWHIKWSILKRLILLRTKNDLFKCTQMVFTISITLHTLANSSLPRHWIHHSYLIPLL

SEQ ID NO: 224865 - protein, 66 aa, Glycine max
  unsure (1)..(66): unsure at all Xaa locations
  Clone ID: PAT_MRT3847_45084C.1.pep
TDNYSVAQAVITPWAHLALTETRHSVVIVMDTLEVDADLSVITVTQLALLLITRLHLGVVLXDCLD

SEQ ID NO: 224866 - protein, 115 aa, Glycine max
  Clone ID: PAT_MRT3847_45085C.1.pep
QISTFLHPFDLFFLLFDLCTCQHSPHEFQNDDEWSTENIVGFLSAPASKPSWGKSISRSRIFGLYFPFCHTVGVVICTMATTLKGIYKSIKYITQIFVLKEREMEIGYRQMLSMW

SEQ ID NO: 224867 - protein, 68 aa, Glycine max
  Clone ID: PAT_MRT3847_45086C.1.pep
TRKTNKDRTDREGHGRREQRTQARERVRQKKYETPAYPPDHEDAHRAKEGENRAERDGRPDRKARQST

SEQ ID NO: 224868 - protein, 51 aa, Glycine max
  Clone ID: PAT_MRT3847_45087C.1.pep
TAARRRQKGTLVVEIIKRTDSRGHMKFLLLHYKLCRKLIVSAHVNKIILTK

SEQ ID NO: 224869 - protein, 48 aa, Glycine max
  Clone ID: PAT_MRT3847_45088C.1.pep
LPFSLDLRNDGNLLTQQRHPEPIYLDSRKHNETWSAAMPFICYFRSPA

SEQ ID NO: 224870 - protein, 127 aa, Glycine max
  Clone ID: PAT_MRT3847_45089C.1.pep
MWHYCLNSAYLLFLITLNTISGSVLTRQRRQNAKITAYNEQYAKTMAALSAGAYAPSPNECIRRWMPNSSLWRVFTLSNQACDLLEQTCASYTLVSEQYRQLIIVFRGTNSSEQLFLEGWQSLKPCT

SEQ ID NO: 224871 - protein, 50 aa, Glycine max
  Clone ID: PAT_MRT3847_4508C.1.pep
TITIVTEHFPRALGQMSFLHKCASAKPQGFFFFSFSTIITVCGFHSRIPT

SEQ ID NO: 224872 - protein, 66 aa, Glycine max
  Clone ID: PAT_MRT3847_45090C.1.pep
TRPLRFYNLYVKPYPECEKIYGRLKGCGGEGKRKHPVGLWKLFKPEKFPESGEDVKNMRSFMESLV

SEQ ID NO: 224873 - protein, 342 aa, Glycine max
  Clone ID: PAT_MRT3847_45091C.1.pep
MGNRFICMTKKESKDVGSRSKRMGRSQRKLVSEEELHLQALSMALQQHQLSQRFEGSMSRRIGSSRRHAVSESFSANKQVPVNLENIKIKKFVLIHGEGFGAWCWYKTVALLEEAGLLPVALDLTGSGIDLTDTNNVTTLADYSKPLTVYLQNLPEDEQVILVGHSIGGACISYALEHYPQKISKATFLCATMVSDGQKPFDVFAEELGSAERFMQESKFLIHGNGKEKPPTGFMFEKEQMKGLYFNQSPAKDVALAMVSMRHSPLGPIMEKLSLSADKYGTGRRFYIQTLDDRALSPDVQEKLVRENPPEGVFKIKGSDHCPFFSKPQSLHKILVEIAQIP

SEQ ID NO: 224874 - protein, 73 aa, Glycine max
  Clone ID: PAT_MRT3847_45092C.1.pep
LNTRDNDAWKWIGCFLYDPLSSVYKQERRERDKKRKKEYHHLKTISKLHKMLKTNSNVQVNYQLSQFTFSDHR

SEQ ID NO: 224875 - protein, 135 aa, Glycine max
  Clone ID: PAT_MRT3847_45093C.1.pep
MIDNTQMPFGEVSTVSKKFESFRAQHFRLLMENLCVLEETFVDSEALRLEKAIILQLGKLGALELFNVCLSRSLGTSLVSNYADKVDDYKDKVVVQSSKKKENKTRRKREFVSTAVSSQSLTLKANQEDLLGFSA

SEQ ID NO: 224876 - protein, 50 aa, Glycine max
  Clone ID: PAT_MRT3847_45094C.1.pep
ILLKVRIHLLFIYLNSALNLHVTCGRVHKILTFGSFRYIFVCFSTLINYM

SEQ ID NO: 224877 - protein, 349 aa, Glycine max
  Clone ID: PAT_MRT3847_45095C.1.pep
RRLRSLVTASVASASALVLVLLALLLLPLFPRLWPPWSWAFTPGSGGLAPGSVVRFPLTFQSVLLAAARCRAGRWSGPRGSAAPVTAVASPGFPLPARRRALPRSRGLPHVPPVVVSLGCLHPPNLVTLIGYHACETEMFLIYNFLSGGNLEKFIQERSTRDVEWKILHKIALDIARALAYLHDTCVPRVLHRDVKPSNILLDDDFNAYLSDFGLARLLGTSETHATTGVAGTFGYVAPEYAMTCRVSDKADVYSYGVVLLELLSDKKALDPSFSSYGNGFNIVAWACMLLKQGRAKEFFTAGLWEAGPGDDLVEVLHLAVVCTVDSLSTRPTMKQVVRRLKQLQPPSC

SEQ ID NO: 224878 - protein, 122 aa, Glycine max
  Clone ID: PAT_MRT3847_45096C.1.pep
LNSSRVLPIPKEPYHPFSHFPSSMPKFASLRIPSSSVSCSLTRDSSSVVPLEEHDKMGNGSVLLQRPDSFGRFGKFGGKYVPETLMHALSQLEAAFYSLAADEEFQTELAGILKDYVGRESP

SEQ ID NO: 224879 - protein, 53 aa, Glycine max
  Clone ID: PAT_MRT3847_45097C.1.pep
LMSHSNSHNMKTLLDDVVPHHANRRVVGKSISQNKIPQSRSPPVCTFCTTRSP

SEQ ID NO: 224880 - protein, 78 aa, Glycine max
  Clone ID: PAT_MRT3847_45098C.1.pep
CNNISGFYLRIQHQYSGLRFQIFYFDHWPILPWSHQMGPLHLIITLRTNLEKCLFLNRQEHFYFKGHFLFPIKGALIK

SEQ ID NO: 224881 - protein, 45 aa, Glycine max
  Clone ID: PAT_MRT3847_45099C.1.pep
NLLTPKPLKDLPPWSSCYTRAFNIFFNLHKVENFHLKGLEFLFLV

SEQ ID NO: 224882 - protein, 281 aa, Glycine max
  Clone ID: PAT_MRT3847_4509C.1.pep
MPLILAKSDSIQIREVWNDNLEEEFALIREIVDNYPYIAMDTEFPGIVLRPVGNFKNSYDYHYQTLKDNVDMLKLIQLGLTFSDEHGNLPMCGGDDEESDTCCCIWQFNFREFNVNEDVFANDSIELLRQSGIDFKRNNENGIDAHRFGELLMSSGIVLNDNIHWVTFHSGYDFGYLLKLLTCQDLPDTQVGFFNLINMYFPTVYDIKHLMKFCNSLHGGLNKLAELLEVERVGISHQAGSDSLLTSCTFRKLKDNFFSGSLEKYAGVLYGLGVENGQGSH

SEQ ID NO: 224883 - protein, 45 aa, Glycine max
  Clone ID: PAT_MRT3847_450C.1.pep
SKDNIQLKRYTIKQTKRNRAHNGHVHGALSWYNSKRCFADQVAEN

SEQ ID NO: 224884 - protein, 44 aa, Glycine max
  Clone ID: PAT_MRT3847_45100C.1.pep
KKKNLKNFKKKKKKKKKKKKKKMKKKKKKKKKKKKNKKKKGGAV

SEQ ID NO: 224885 - protein, 136 aa, Glycine max
  Clone ID: PAT_MRT3847_45101C.1.pep
MRPALASRPLGSLKNFNDPVSGGGWCKDQQINSAKPLAENNILKPCIPFSTMESSIKCIDHAEKENNPDMADKALLPKRPGRASTICMMTPRVPSAIASRRNSLIPLPSIPSLTQFQSPLLPKLTNQADQKDVNGE

SEQ ID NO: 224886 - protein, 89 aa, Glycine max
  Clone ID: PAT_MRT3847_45102C.1.pep
MEDEMAMGTSPSYFDPHNLSSRQQFRRYGKRHSSSGASIQYDNSASKLSETGLLYDGQSIHSPTNAALVLENIKQEVEKFDADYLEEKT

SEQ ID NO: 224887 - protein, 119 aa, Glycine max
  unsure (1)..(119): unsure at all Xaa locations
  Clone ID: PAT_MRT3847_45103C.1.pep
NSEEAIVSHLPLKERFFLQQLFPLGAAPGAKDSARETVGVKNIVXKKRLGQRFRMMGVPGKGSWVVILTQVMAGKPKDXKKSPEALSGELFQDITNRVLAAKINTGPEAQKLYAVHGVF

SEQ ID NO: 224888 - protein, 175 aa, Glycine max
  Clone ID: PAT_MRT3847_45104C.1.pep
MSFRWENENPNPNSPLKKRWSLNQMVMAMKLQSLSCSPGITDKSNPILSPFPLPITDRTLLLSDELLLKIIALVSDSSTQRNSNSLVCKRWLNLQGRLVRSLRISDWNFLLSGRLIHRFPNLNHVDLLSDALISPKYSDVLLTNRVISMHLSSDSFPYWCFCEDNMLPFQVIDNG

SEQ ID NO: 224889 - protein, 111 aa, Glycine max
  Clone ID: PAT_MRT3847_45105C.1.pep
GATRPLFFMGVCVTHKTPVRANPITHITHVFCATHKVYLIIPNKGLSVLESCSQHTSFKCTGFAGAFCHIFADIVLRGHTFLSPLKLRQNGRLSYHQGLGGGRHSGSKVGA

SEQ ID NO: 224890 - protein, 140 aa, Glycine max
  unsure (1)..(140): unsure at all Xaa locations
  Clone ID: PAT_MRT3847_45106C.1.pep
MARASSGLQYPERFYAAASYVGFDGSTKSLTSKFSNSTALLLYSLYQQASIGPCNVPEPSSWKLVEHSKWASWNQLGNMSSTEAMRLFVKILEEEDPGWYSRASNSVLDPVGDVQMNHNSKVEPVIENAXAYPEIKTIST

SEQ ID NO: 224891 - protein, 102 aa, Glycine max
  unsure (1)..(102): unsure at all Xaa locations
  Clone ID: PAT_MRT3847_45107C.1.pep
KRKTWKNPTVTPLKHLPLNPPVAIPNRPEEVRPNSTCQNXMTKNAQPETPNKTPLXLGGTRSYTQTVPNTLKPPIASSLPSFPFLFAHFPRQTLKSCNPEAP

SEQ ID NO: 224892 - protein, 55 aa, Glycine max
  unsure (1)..(55): unsure at all Xaa locations
  Clone ID: PAT_MRT3847_45108C.1.pep
TRVSRRSEYRVLVTGLPSSASXQDLKDHMRKARDVCFSQVFHDGRGTYLNKVSGS

SEQ ID NO: 224893 - protein, 90 aa, Glycine max
  Clone ID: PAT_MRT3847_45109C.1.pep
KKVSLPHRNCQEFFLTLTNKSKIKGFKIKETPPKIFGGLVFFSVQRYLFYIRGSPKLVSLFVGEAGYKKNFSFIKNGQRFFFGKGNGKKK

SEQ ID NO: 224894 - protein, 79 aa, Glycine max
  Clone ID: PAT_MRT3847_4510C.1.pep
AEPNTLNITLIMITNKILLILLVIIVQNNSMIITTLLMKLLTTIHASFFVSYSSSFNVQHVPLTTAFSFFYPFTTFSLI

SEQ ID NO: 224895 - protein, 56 aa, Glycine max
  Clone ID: PAT_MRT3847_45110C.1.pep
IVRTLPRYRRIPVPPLLRRRLSLIRVVPGPLLRSVTRLRSLSIFRTYCRGRLYRET

SEQ ID NO: 224896 - protein, 32 aa, Glycine max
  Clone ID: PAT_MRT3847_45111C.1.pep
IPRFTQLLLLGEALNVSWMVKLVRTNKLLVLR

SEQ ID NO: 224897 - protein, 99 aa, Glycine max
  unsure (1)..(99): unsure at all Xaa locations
  Clone ID: PAT_MRT3847_45112C.1.pep
VPNSYNTYCMSKDCRKHTLHNDTHYKMAQDSIAVQGKLCYDRKQSFYGGRTRPDLHKKAEATMKIVSECACQGCXHVSQHAIXRCKHFGKLCDNKGAGS

SEQ ID NO: 224898 - protein, 212 aa, Glycine max
  Clone ID: PAT_MRT3847_45113C.1.pep
GIPGSTHASGGGVECLKNYWDSGTQIQSLEVAVVMLRHLAESGPIGEVLVGEGFVQRLVGVLNREVLAVRIAAARAVYALGLNSGRARKEMGELGCVLGLIKMLDGKGVEEKEASAMALSVLLMHPANRRVFRKDERGVVSAVHLLNPSLQGLDKKYPVSLLALLVHSKSCRKQMVAAGACVYTQKLVEMDVPGSKKFLESLGRGKIWGCFC

SEQ ID NO: 224899 - protein, 624 aa, Glycine max
  Clone ID: PAT_MRT3847_45114C.1.pep
MEHSSSLVFWLLGLLLLLLMEISSAALSPSGINYEVVALMAIKNDLIDPHNVLENWDINSVDPCSWRMITCSPDGSVSALGLPSQNLSGTLSPGIGNLTNLQSVLLQNNAISGRIPAAIGSLEKLQTLDLSNNTFSGEIPSSLGGLKNLNYLRLNNNSLTGSCPQSLSNIEGLTLVDLSYNNLSGSLPRISARTLKIVGNSLICGPKANNCSTILPEPLSFPPDALRGQSDSGKKSHHVALAFGASFGAAFVLVIIVGFLVWWRYRRNQQIFFDVNEHYDPEVRLGHLKRFSFKELRAATDHFNSKNILGRGGFGIVFKACLNDGSVVAVKRLKDYNAAGGEIQFQTEVETISLAVHRNLLRLSGFCSTQHERLLVYPYMSNGSVASRLKDHIHGRPALDWTRRKRIALGTARGLVYLHEQCDPKIIHRDVKAANILLDEDFEAVVGDFGLAKLLDHRDSHVTTAVRGTVGHIAPEYLSTGQSSEKTDVFGFGILLLELITGHKALDFGRAANQKGVMLDWVKKLHQDGRLSQMVDKDLKGNFDLIELEEMVQVALLCTQFNPSHRPKMSEVLKMLEGDGLAERWEASQRIETPRFRSCEPQRYSDLIEESSLVVEAMELSGPR

SEQ ID NO: 224900 - protein, 88 aa, Glycine max
  Clone ID: PAT_MRT3847_45115C.1.pep
FGQAPPCLAERKVIFVFGIGGVDALQVRKAHVALAHSAPPGGEMLVGGRTLLPSNDMGGFLFPPSSCIWVVRLLGGVGDRNSFASGPQ

SEQ ID NO: 224901 - protein, 201 aa, Glycine max
  Clone ID: PAT_MRT3847_45116C.1.pep
MSSIGAKNLALSSAFLLLLVGFATSDINQDKAECTDKLLGLAGCLPYVGGEAKVPAMDCCSGIREVIDKSKRCLCILIKDRDDPNLGLKINVTLALSLPDACQTPTNITQCVDLLHLAPNSTEAKVFEGFKNALTNKTSPSSVPSANNATANGTSTSANNNSSSGWGKGKEVVSGRGGVCDFTDCFYFPFFLVPSLNRDQE

SEQ ID NO: 224902 - protein, 76 aa, Glycine max
  Clone ID: PAT_MRT3847_45117C.1.pep
FGGWGGGGGGGRGGGRGGRTQIYKNGRCLETGRPLPEDLNNFVGREGGPGGQGKGEIPEQDQAAPPYKNEGMGPSD

SEQ ID NO: 224903 - protein, 97 aa, Glycine max
  unsure (1)..(97): unsure at all Xaa locations
  Clone ID: PAT_MRT3847_45118C.1.pep
MSISIFTSASLPQAKMAQETLIFTCESTNEGHPDQLCDQISDSVLDACLEHDPDKQXVCETCTNTNMATEFREITIEAKVYYEKNVRDTCVHIGLAS

SEQ ID NO: 224904 - protein, 124 aa, Glycine max
  Clone ID: PAT_MRT3847_45119C.1.pep
KLNFFKGKYPSGKTKAKGVQTTESPHLKGPKITTNNPPYISRQKIKKTRGKKKKRPRPKYKGPNPLKKNMGDPTGGKNENPGTGAGADKGIVRTVASPIYFIMCPLGGGPTLLRGESSQKLFRN

SEQ ID NO: 224905 - protein, 153 aa, Glycine max
  Clone ID: PAT_MRT3847_4511C.1.pep
MPLVLAKSDSIQIREVWNDNLEEEFALIREIVDDYPYIAMDTEFPGIVLRPVGNFKNSYDYHYQTLKDNVDMLKLIQLGLTFSDEHGNLPTCGDESGTCCIWQFNFREFNVNEDVFANDSIELLRQSGIDFKRNNENGIDAHRFGELLMSSGI

SEQ ID NO: 224906 - protein, 101 aa, Glycine max
  unsure (1)..(101): unsure at all Xaa locations
  Clone ID: PAT_MRT3847_45120C.1.pep
LLAAGGYKGMKADDCWVQLKLYHHGKIGSKALTFATXIKALAHYVHGKGLKTLIYSHAXNSTLMKRMPGSLGHEEQDAKTFAFWGVYYLEXDNCENIGLFA

SEQ ID NO: 224907 - protein, 67 aa, Glycine max
  Clone ID: PAT_MRT3847_45121C.1.pep
IKIATWSLLSYIHLTDIKLTSQSLQHGIPFRDTNDTIGTHGYRPFFYRRGDSLSFNDSLTTGGKKTS

SEQ ID NO: 224908 - protein, 60 aa, Glycine max
  unsure (1)..(60): unsure at all Xaa locations
  Clone ID: PAT_MRT3847_45122C.1.pep
TESHRIXVXVMCIRSFRIXSHNVHHTLVMSLNIQLAEXLSGXVNTLWPLLRTDLLAKDHP

SEQ ID NO: 224909 - protein, 56 aa, Glycine max
  Clone ID: PAT_MRT3847_45123C.1.pep
SLITGTTVMPRSKQDGSHRELHACYSTVDTINGRRQCAAADEGAMIPLSHVPCSLL

SEQ ID NO: 224910 - protein, 44 aa, Glycine max
  unsure (1)..(44): unsure at all Xaa locations
  Clone ID: PAT_MRT3847_45124C.1.pep
IIMLYALTQEQITEKAIHFPQFHLIQKNKLLWVKGXKNTXLLSS

SEQ ID NO: 224911 - protein, 69 aa, Glycine max
  unsure (1)..(69): unsure at all Xaa locations
  Clone ID: PAT_MRT3847_45125C.1.pep
SQVNVISLTPSQVQDLAHPGSAQAVHTLLKNHRXSSYANVQRNKKEXGNKGKKGLLSTILRAFSRISMY

SEQ ID NO: 224912 - protein, 130 aa, Glycine max
  Clone ID: PAT_MRT3847_45126C.1.pep
MNSFHPLTHQFPKLQALVSSIRKSLVSPQNPDLGLELPGKVLDQYPDIKTLKNVHSKVFNLSFHENPSLGIKLMRAYAARGEPGLARNVFEVTPERNGIFYNGMIRSYMNNHLDEDALLGFKGPWLAGGF

SEQ ID NO: 224913 - protein, 241 aa, Glycine max
  unsure (1)..(241): unsure at all Xaa locations
  Clone ID: PAT_MRT3847_45127C.1.pep
LVSKEDPWSERVDFLIEVMLSYFEKEQSQKEAINALPLYPNEQIMWDESVVPSINYSGEGCLALPKLNLQFLTLHDYLLRNFNLFRLESTYEIREDIQEAVPHLLAYINNDGGTAFRGWSRMGVPIKEFKITEVKQPNIGEVKPSSVTAEVTYSVSSYRAHIRSEWDALKEHDVLFLLSIRPLFEPLSAEEEDKASVPQKLGLQFVRGCEVIEIRDEEGNLMNDFSXKIKRDEWKPPKGEL

SEQ ID NO: 224914 - protein, 129 aa, Glycine max
  Clone ID: PAT_MRT3847_45128C.1.pep
MTLPPKRYARRVSLYYRNNAAKPLKEKQRENDEDSKSCAICLEDFDPNEEVMLTPCNHMFHEDCIVPWLTSKGQCPVCRFVICEIGRGNHSSFNNNDIANLEPSNLINGELLSILRAMEKAFQLGSMTY

SEQ ID NO: 224915 - protein, 128 aa, Glycine max
  Clone ID: PAT_MRT3847_45129C.1.pep
MGANLSNMENAHKSSKSSSDHILTFHSTAKWKTHFDASKETNKLMVIDFTATWCGPCKSMDPIIQEYAAKYTNVEFIKIDVDELMGVSQEFQVHAMPTFILIKKGKVVDKVVGAKKEELQKLIEKHLN

SEQ ID NO: 224916 - protein, 38 aa, Glycine max
  Clone ID: PAT_MRT3847_4512C.1.pep
QYGITFRVFAMGEQYIKVFNFFRYGLGFNVLGFIYSRV

SEQ ID NO: 224917 - protein, 293 aa, Glycine max
  Clone ID: PAT_MRT3847_45130C.1.pep
MLLSEWYVVKEFNFQTGIDLIKEVFNYKGNPIIMLISPEGKVENSDAKQIISKWGIDGFPFRTSDHTRLTQQWNWFWNEMITLSPIIRELIKRDSYIFIYGGTNTKWIQDFTTAVEKLKKNETLTLEEETTIESYPLGRDSPKIVPRFWITIDNLLASRKLTKKGSEQVQDSTTREIQKLMFLKQDPLGWAILTKGSHVKLLGHGDAMLRTVTDFESWKGTMHNEVSFDVAFKNYYDKCKVKSVPPKCEHREFANYPTDILAHIPCPNKCGHEMEVSSVKYMCCHGREASDIA

SEQ ID NO: 224918 - protein, 221 aa, Glycine max
  Clone ID: PAT_MRT3847_45131C.1.pep
MTATADQCMHEFYQQPLMDGMAMDPSIEGLMDASMSSSSEGMIMLSPSNSHNNTTIGHHNLTPKGCAFKQIRRRSRASKSTPITLLKANTSNFRALVQQFTGCPTTTAMSLAIHKGPVTLNFQQGGSKQHIHHHHHTKITTRGAMPPFIGTISSNQNQVSVPLPKQHLMQEQQSGHFLPTSSGNSYRPINCMDDGLIFDNDFSLHELTVNAISNDIDDLFM

SEQ ID NO: 224919 - protein, 41 aa, Glycine max
  Clone ID: PAT_MRT3847_45132C.1.pep
TSPLLQERIHNRAHATPNSITYAATSSTLNRYPTAVLCYQH

SEQ ID NO: 224920 - protein, 70 aa, Glycine max
  Clone ID: PAT_MRT3847_45133C.1.pep
IIRALMPDGIRNHRLSQKFLIPDGVAIMTRHPTSVGWSFKGGLFRCRFDIGIMNGFHSLAAELLPCHDII

SEQ ID NO: 224921 - protein, 53 aa, Glycine max
  Clone ID: PAT_MRT3847_45134C.1.pep
SHQASTAHSRCYCRASHAVRESQRRIQPYQTRPESLPICKRVRVGPMWCKYDR

SEQ ID NO: 224922 - protein, 41 aa, Glycine max
  unsure (1)..(41): unsure at all Xaa locations
  Clone ID: PAT_MRT3847_45135C.1.pep
XXDSXRXYXSSXXXSXYSXLXXFHIPVFHHXLNXXLHXHQX

SEQ ID NO: 224923 - protein, 60 aa, Glycine max
  Clone ID: PAT_MRT3847_45136C.1.pep
PESHLMKTMLCKSYRPKNVAADEQNVELVVGNISKDTLVNEERSEVKGSSSGAVANRKDG

SEQ ID NO: 224924 - protein, 206 aa, Glycine max
  unsure (1)..(206): unsure at all Xaa locations
  Clone ID: PAT_MRT3847_45137C.1.pep
HWPGLHCQDLRETIPRLLAIQLLEPIWAGLTDWQAXRSKRWLILKQHDYILTYLTKFNSPATXTPLQSLFFLARDVSLTPLVFALRKLTSQGXGYGLVSEDLLPSSEGVVAYILLLANAYVAVNDSCYPLLVCLWLNSHAVVEPFAIPPIRHLSVLHPIYKLLFPLSRDSFNFYSLASSSLVYAYCILDKTFLWGWYSVAMSAAFY

SEQ ID NO: 224925 - protein, 352 aa, Glycine max
  unsure (1)..(352): unsure at all Xaa locations
  Clone ID: PAT_MRT3847_45138C.1.pep
MSNLPTTQGKAIPDASDYKGRPAERSKTGGWTASAMILGGEVMERLTTLGIAVNLVTYLTGTMHLGNAASANVVTNFLGTSFMLCLLIGFFVXSFLHRYRTIAIFAAVQATGVTILTISTIIPSLHPPKCNGDTVPPCVRANEKQLTVLYLALYVTALGTGGLKSSVSGFGSDQFDDSDDDEKKQMIKFFNWFYFFVSIGSLAATTVLVYVQDNIGRGWGYGICAGAIVVALLVFLSGTRKYRFKKLVGSPLTQFAEVFVAALRKRNMELPSDSSLLFNDYDPKKQTLPHSKQFRFLDKAAIMDSSECGGGMKRKWYLCTLTDVEEVKMILRMLPIWATTIMFWTIHAQMTT

SEQ ID NO: 224926 - protein, 365 aa, Glycine max
  Clone ID: PAT_MRT3847_45139C.1.pep
MDVRETPRPPPPTMMVGPTSYGSTNLGPNFSSSSAAAMLAPATARFPFGAVPPPQQHQPPPSSEPFPASAAYDGSSSPMKPCSLAKKKRGRPRKYSPDGSIALGLAPTHTSPPASAAAGGGSAGDSAGTASADAPAKKHRGRPPGSGKKQLDALGAGGVGFTPHVIMVESGEDITAKIMAFSQQGPRTVCILSAIGAIGNVTLRQPAMSGGIATYEGRFEIISLSGSLQQSENNGDRSRTCTLNVTLAGSDGRVLGGGVAGTLTAASTVQVIVGSFIAFAKKSSSSALKSGSSSAPPPQMLTFGAPMTPNSPTSQGPSTESSEEQDHSPFCRGPGPGHGLYNNASQPVHNMPMYHHPLWAGQSHQ

SEQ ID NO: 224927 - protein, 277 aa, Glycine max
  unsure (1)..(277): unsure at all Xaa locations
  Clone ID: PAT_MRT3847_4513C.1.pep
MPLVLAKSDSIQIREVWNDNLEEEFALIREIVDDYPYIAMDTEFPGIVLRPVGNFKNSYDYHYQTPKDNVDMLKLIQLGLTFSDEHGNLPTCGDESGTCCIWQFNFREFNVNEDVFANDSIELLRQSGIDFKRNNENGIDAHRFGELLMSSGIVLNDNVHWVTFHSGYDFGYLLKLLTCQDLPDTQVGFFNLINMYFPTVYDIKHLMKFGSSSMEAVAKLHEVFYVXTVGICHQAGSDSLLTSCTFRKLKDNFFSGSLEKYAGVLYGLGVENGQGSH

SEQ ID NO: 224928 - protein, 52 aa, Glycine max
  unsure (1)..(52): unsure at all Xaa locations
  Clone ID: PAT_MRT3847_45140C.1.pep
VSSHSALSWSIYCVWFIERIRFVLSIQTLPPICPWLCTQKKKKKKKXRATAV

SEQ ID NO: 224929 - protein, 73 aa, Glycine max
  unsure (1)..(73): unsure at all Xaa locations
  Clone ID: PAT_MRT3847_45141C.1.pep
SPSLESLETPVTSSPLIAWYLSNLPAYRTAVSPLLRGIEVGLAHGYLLAXXFVKAGALRNTEIAGQASSLAAG

SEQ ID NO: 224930 - protein, 40 aa, Glycine max
  Clone ID: PAT_MRT3847_45142C.1.pep
GKSSTALTLNQFSCHGNNYLHKPLSLLKNVTYPPKKSNHN

SEQ ID NO: 224931 - protein, 71 aa, Glycine max
  Clone ID: PAT_MRT3847_45143C.1.pep
RQFCFRCRPLVPTPSLRSSFSKIGGCTVAPPRRRVVSGGERESGVWIGSSVTDTPVRCVCVCGERTLGFGQ

SEQ ID NO: 224932 - protein, 90 aa, Glycine max
  Clone ID: PAT_MRT3847_45144C.1.pep
PLGCFFFLFFSFFFFFFFLSSLHPWVVILFLLLFPVRVIFSLWWGKKFFQWCSGSRGGGGKKKPAQRIPPGGGKGPLKGGQGWNHSRPVN

SEQ ID NO: 224933 - protein, 84 aa, Glycine max
  Clone ID: PAT_MRT3847_45145C.1.pep
QTRYAPCRHYSSVVNVNEQAGRAQLSWLVDTPTSLEPRPRSLGERINGGTGCDSIDYGAADDMRPVRCYYDGNALHCNPDAKNN

SEQ ID NO: 224934 - protein, 122 aa, Glycine max
  Clone ID: PAT_MRT3847_45146C.1.pep
MAKNIIRQVNEESQSGGVFSVVDKRIESYLSECADKFLTLALKCCKDEPDERPKMIDVARELESICSMLTETDAMEAEYVTSDSGRVFNPHSSSSTTRTPFVSADVSGSDLVSGKIPTIRPR

SEQ ID NO: 224935 - protein, 136 aa, Glycine max
  unsure (1)..(136): unsure at all Xaa locations
  Clone ID: PAT_MRT3847_45147C.1.pep
ILLDVGFEGAIEGSVDDFSEVLSERICKIXTNLRVLADSYKKQCSAIELLKMLLKTVGFSNFAPLLDVAKDDSKNNVQQSQQKVHGMQPQLQQQQXSSLRLPQQQLLIFGSLRTLHYGRCILCFLKTELPLPQVEL

SEQ ID NO: 224936 - protein, 151 aa, Glycine max
  unsure (1)..(151): unsure at all Xaa locations
  Clone ID: PAT_MRT3847_45148C.1.pep
RCFCQFSIDLLGGGILEDKTGDWITLIQISPISNLMXVAGWKKGXLMVNIVMCGNASDKKRDWASVVQGCLTNRSSPEHSDACXVTKWAPHYWELISPIEVCGXNNGFEKWSSEGGDETAWHQSFLSDNPKQSTVVDILXTIFEDFETAGN

SEQ ID NO: 224937 - protein, 202 aa, Glycine max
  unsure (1)..(202): unsure at all Xaa locations
  Clone ID: PAT_MRT3847_45149C.1.pep
CXXXXQWGTXXXRXCSLPAEXXRRVVALXXXVLAWVAXXXAVNVNNTXSSLHKPNPLPSXSQDSGLQGPTHAAKGVALNIQTSTKEENDSKASHKTIAKGISPRPADTKPENPAKKHKLGNYCSLKGDVMEILRRMPSVTTTGDGPNGKRIEGFLYKYRSGQVCIVCVCHGNFLTPAEFVMHAGGKEVANPMKHITVLSNSF

SEQ ID NO: 224938 - protein, 32 aa, Glycine max
  Clone ID: PAT_MRT3847_4514C.1.pep
LATMVLGLLLFSMPNKMMPSFHLKKMTVFTFC

SEQ ID NO: 224939 - protein, 39 aa, Glycine max
  Clone ID: PAT_MRT3847_45150C.1.pep
KILIRSRRADVMTLASFWERVVFCNQLPRSWFLSFILLS

SEQ ID NO: 224940 - protein, 70 aa, Glycine max
  Clone ID: PAT_MRT3847_45151C.1.pep
PINKKPQACFYSPSLSRYLRNSDARAHQRCWKRWAVHAHEWGLAHSGYVTHRPVQRWLPCVSEGDYMCNC

SEQ ID NO: 224941 - protein, 35 aa, Glycine max
  unsure (1)..(35): unsure at all Xaa locations
  Clone ID: PAT_MRT3847_45152C.1.pep
QRFLRVDRWELRYXASRTANPPHECQQLRVHXESR

SEQ ID NO: 224942 - protein, 38 aa, Glycine max
  Clone ID: PAT_MRT3847_45153C.1.pep
QKKRIPTLFLTEGKDHDGSVGSNKFLHRQPIGTAAQNP

SEQ ID NO: 224943 - protein, 368 aa, Glycine max
  unsure (1)..(368): unsure at all Xaa locations
  Clone ID: PAT_MRT3847_45154C.1.pep
ICRVEDSSCKLALTEREALIHNSQGKNCDLLTTDGXITASELGCTEGIGKGNFLNGACGXGAGHGGKXEGSGYFNGRESIGGXEIENAILPCEXXSGTEGPNESYGIVVGGGMIVMGSIQWPLLRLDLYGSLRADGESFSKSIKSGDGSLVGGLGGGSGGTVLLFLQELRLLENSSLSVVGGNGGPVGGGGGGGGRIHFHWSKIGMEEEYVPVASITGTVNNSGGAGDNDGHHGQEGTITGKACPKGLYGIFCEECPIGTYKDVDGSDEHLCIPCPLDLLPNRANFIYKRGGVTRRTCPYKCISDKYRMPNCYTPLEELIYTFGGPWPFSVLVSFILLLVALLLSTLRNKLTGSGSYRSSRSIEHHNH

SEQ ID NO: 224944 - protein, 89 aa, Glycine max
  Clone ID: PAT_MRT3847_45155C.1.pep
LTLLTMHLRERLPKLSLPFLFGQVYLLTYSSHYAPSWWAFWTSLSLHLLFSLCTFASVAGFQNTWRGPESYQVITFNLERRARVKLGIR

SEQ ID NO: 224945 - protein, 49 aa, Glycine max
  Clone ID: PAT_MRT3847_45156C.1.pep
ADVFPWTNWHVENLTRRIKSSQPTEFSASGRMRAKPSSQKFKILKYKKN

SEQ ID NO: 224946 - protein, 105 aa, Glycine max
  Clone ID: PAT_MRT3847_45157C.1.pep
EDYQDLLTRDDLLYDSLHYKEFENEMLWEGEGKWVVKGASAVDIGANPAAEGGGKDEGADDASVKVVDIGDTFRLQEQPAFGKKQFVTFTKRFIRNWTPKRVAKQ

SEQ ID NO: 224947 - protein, 170 aa, Glycine max
  Clone ID: PAT_MRT3847_45158C.1.pep
MNSIIATQNNATAKRFPTEETVVDGEDIISKLHESILGHILSFLPTMESVHTSVLSKRWVDAWKSITGLQFNDTLLCFGKKMQKEQFVCFVNMVFLHLANSSIHNFSLCLTRYQYDSTLISAWISFIFKRGVHNLHIQYADNVHFPSHSLFSCNSLVQLVLQMKCTRELQ

SEQ ID NO: 224948 - protein, 31 aa, Glycine max
  Clone ID: PAT_MRT3847_45159C.1.pep
PTKPPSPITLIKTILFNYFSTILPKISTPIK

SEQ ID NO: 224949 - protein, 65 aa, Glycine max
  Clone ID: PAT_MRT3847_4515C.1.pep
QKIWPYILISTNQFNKKVLDTLASFLLSINGLRIEKLNGEPLIYIYLHFCPICCLPYVENVQFQG

SEQ ID NO: 224950 - protein, 332 aa, Glycine max
  unsure (1)..(332): unsure at all Xaa locations
  Clone ID: PAT_MRT3847_45160C.1.pep
MEMKAKNNNKKVGSELGCGLMGRILHLKSHKMRKASVHSLPFKNAQSDDDVKSEESKVSRKRSTGTEPPHKPSGVEQKPARKSASIHQQPCTNRNNQHQRHSDVAARSSTSSSSSTSISTKVVQQNKDKSHERKPQGQPTGNSLVLARISTSNENNENNKSQLKLTGNLLVNNTPRRKSVEYMPKSAELNSVPSSYTNASKGLMGNILNRNSDGNKVAQFLSPRMKKVDPEVSKSMGNDAYKQGRFEEALALYDRAIALDSNKAIYHCNKSAALIGLXRLQEAIVECEESIKLDPSYVRAHNRLATIYFMLGEAEKALNCNQITPYVDSILT

SEQ ID NO: 224951 - protein, 115 aa, Glycine max
  Clone ID: PAT_MRT3847_45161C.1.pep
HRSPFRELNSTFAEQDPVLKNLSQEIIELLKKLVGLESFSLAFASVQKQASEKRALRKKRKALEFVTNPDIAAKKKLKKHKNKSEAKKRKIEFLRPGYKAKRQKSPSLRDLAMVE

SEQ ID NO: 224952 - protein, 64 aa, Glycine max
  Clone ID: PAT_MRT3847_45162C.1.pep
RWNDMVFPGTKLSIGGQIFDFMCLYTREYTFLYICLTIFFFFFFFFFFFFFFFFSKHTRNNNLH

SEQ ID NO: 224953 - protein, 317 aa, Glycine max
  Clone ID: PAT_MRT3847_45163C.1.pep
MPREDRATWKSNYFLKIIQLLDDYPKCFIVGADNVGSKQMQQIRMSLRGKAVVLMGKNTMMRKAIRGHLENNPALEKLLPHIRGNVGFVFTKEDLTEIRDMLLANKVPAAARAGAIAPCEVTVPAQNTGLGPEKTSFFQALGITTKISRGTIEILSDVQLIKTGDKVGASEATLLNMLNISPFSFGLIIQQVFDNGSIYNPEVLDITEQALHSRFLEGVRNVASVCLQIGYPTVASVPHSIINGYKRVLALSVETEYTFPLAEKVKAFLADPSAFAAAAPAAAATTAAPAAAAAPAKAEAKEESEESDEDMGFGLFD

SEQ ID NO: 224954 - protein, 111 aa, Glycine max
  unsure (1)..(111): unsure at all Xaa locations
  Clone ID: PAT_MRT3847_45164C.1.pep
SSSSLFWXVCACFCRXXFPLLALCFGAASGSXLSLCGFXSPLLPXCSAFARXLGFAPXLSLXLXLXPFFWCXXXAPPPXXXXXXFSLXXLXLXSSWSXSSXLFFFLWFLGF

SEQ ID NO: 224955 - protein, 110 aa, Glycine max
  Clone ID: PAT_MRT3847_45165C.1.pep
RSNVSYAFILLYSYLIAIPWSNLLNVVIEKTVWENHLVTQLNILVSHAGLVSWRPSQKALTNSCSQQMGNVNGHWDAHCTRALSSVRAAGTLNLTATFGRVLSLASFAFL

SEQ ID NO: 224956 - protein, 122 aa, Glycine max
  Clone ID: PAT_MRT3847_45166C.1.pep
MEATNGHQNGSFCLSSTKGSDPLNWGAAAEAMKGSHLDEVKRMVSEYRKPVVRLGGETLTIAQVAAVAGHDHGVTVELSESAREGVKASSEWVMNSMNNGTDSYGVTTGFGATSHRRTKQGG

SEQ ID NO: 224957 - protein, 240 aa, Glycine max
  unsure (1)..(240): unsure at all Xaa locations
  Clone ID: PAT_MRT3847_45167C.1.pep
MEATNGHQNGSFCLSTAKGSSDPLNWGAAAEAMKGSHLDEVKRMVAEYRKPVVRLGGETLTIAQVAAVAGHDHGVAVELSESAREGVKASSEWVMNSMNNGTDSYGVTTGFGATSHRRTKQGGALQKELIRFLNAGIFGNGTESSHTLPHTATRAAMLVRINTLLQGYSGIRIEILEAITKLLNNNVTPMLALRGTITASGDLVPLSYIAGLLTGRPNSKAVGPSGEVLXAKEAYELASI

SEQ ID NO: 224958 - protein, 135 aa, Glycine max
  Clone ID: PAT_MRT3847_45168C.1.pep
MHKLSRVCLVVPVDALAARIAPVRTKYMHKGVSVWLDVPVEALAQRIAAVGTNSRPLLHYEAGDPYTRAFMRLSALFEERGEAYANANARVSLKNIAIKLGKRDVSELSPTDIAIEALEQIDNFLKGEGGRYAEC

SEQ ID NO: 224959 - protein, 61 aa, Glycine max
  Clone ID: PAT_MRT3847_45169C.1.pep
SRSSKSAGSSLLHDRLLQEEVQKANIGMCSYLQYIAITVGVQREKQLGQPSRDHPIRDLPQ

SEQ ID NO: 224960 - protein, 100 aa, Glycine max
  unsure (1)..(100): unsure at all Xaa locations
  Clone ID: PAT_MRT3847_4516C.1.pep
XSHARVRKLGIRLEXXCXXGXIYXIXRSDXDLXXXLXSFPILXHTXSRXSXEXQDXEXXEGQXSRXXXPSXXXLXXLSXXCXAXFSCRMKIGCRYIXVXN

SEQ ID NO: 224961 - protein, 126 aa, Glycine max
  unsure (1)..(126): unsure at all Xaa locations
  Clone ID: PAT_MRT3847_45170C.1.pep
GDNRFTEKINEGTLLLLAGCSRMSICNKDIWXVGRRIRSVLPLTVICNSMSKDTLIERSXYEDILSQAIAPSLLIESFKNMVTLCAHGDETLMTVHDEGKPYCTGTMLLRXLAEENMTITDGIDIT

SEQ ID NO: 224962 - protein, 72 aa, Glycine max
  Clone ID: PAT_MRT3847_45171C.1.pep
FLIQVIPLASPNLIKSSILSCKKRLPPTLGTPPPFSIAFYIWPLYGVQSTVSLGVSYVEVPNIPFHGYKETK

SEQ ID NO: 224963 - protein, 68 aa, Glycine max
  unsure (1)..(68): unsure at all Xaa locations
  Clone ID: PAT_MRT3847_45172C.1.pep
ALXFIFLFTVXGLTGIVLSNSSLDIVLHDTYYVVAHFHYVLSIGAVFAAIAGFVHXFPLFSGYTLNDT

SEQ ID NO: 224964 - protein, 58 aa, Glycine max
  unsure (1)..(58): unsure at all Xaa locations
  Clone ID: PAT_MRT3847_45173C.1.pep
VIIIALIIVKIAFFNVCIEINGSLSLXPLSVFFSIEMSIXSERXQRFSFTWTWLQILN

SEQ ID NO: 224965 - protein, 85 aa, Glycine max
  Clone ID: PAT_MRT3847_45174C.1.pep
MTYQNPKKIFFKGVGLKTEQGKNKTLFKMFLRDRFPLPEKLGVETIMGNKFLINGTYLILAEKIFPNKFLKRNLLLQNYFHIFPT

SEQ ID NO: 224966 - protein, 203 aa, Glycine max
  Clone ID: PAT_MRT3847_45175C.1.pep
MATLVDIGVSAAINILSAFAFLLAFALLRIQPINDRIYFPKWYLSGGRSSPKRSGENFVGKFVNLNFRTYLTFLNWMPQALRMSESEIISHAGLDSAVFLRIYILGFKVFAPITLVALFILIPVNVSSGTLSFLKKELVVSDIDKLSISNVPPKSIRFFVHIALEYLFTIWICILLYKEYDKIATMRLHFLASQGRRVDQFTV

SEQ ID NO: 224967 - protein, 55 aa, Glycine max
  Clone ID: PAT_MRT3847_45176C.1.pep
CDYEYWSGSLAQSIQTMYHVRFRLLTIFLPFCGMEKLLIWLLAPFKKTSLLINLF

SEQ ID NO: 224968 - protein, 87 aa, Glycine max
  Clone ID: PAT_MRT3847_45177C.1.pep
PRVRGRVGSGSIFPNFVQHTQNLSRLLAPVIVLLREIWVLNSEQFGDLGFVDPLPSFKFSIFIIFSFLSGFWGVLNYCFSGFVSLSV

SEQ ID NO: 224969 - protein, 106 aa, Glycine max
  unsure (1)..(106): unsure at all Xaa locations
  Clone ID: PAT_MRT3847_45178C.1.pep
SXXXXKRVLHXMLLWXIPXNXIXLSXXSXXYSXLXXXXNVXLXXXIXXPXHXLTSXXXESRQIXXXSSTXIXXHLQHSDXKGFQXLXXXXXSXLEPNSELTYACMR

SEQ ID NO: 224970 - protein, 81 aa, Glycine max
  Clone ID: PAT_MRT3847_45179C.1.pep
PLYWGPYRDEDFVPTGYGYKLTLAVAPEPLMARLFYCHSQRFPVRLENPDFAHKTPFGSNEDYPQKHQNQRNPIHCRKKYT

SEQ ID NO: 224971 - protein, 83 aa, Glycine max
  Clone ID: PAT_MRT3847_4517C.1.pep
RGAFVSVRSDSPHVRLVASVVVSVRVQHLPFLITHSCGACSPCVDQVSVDPNSRSKDWAALCSLSFTNYDSGGSKAKNRCVIS

SEQ ID NO: 224972 - protein, 55 aa, Glycine max
  unsure (1)..(55): unsure at all Xaa locations
  Clone ID: PAT_MRT3847_45180C.1.pep
RRLGFXLKIXKPRFXLNSXLRFHHXPKLLDSXXISLXXFQQXXXXXSXGFRFQKG

SEQ ID NO: 224973 - protein, 119 aa, Glycine max
  Clone ID: PAT_MRT3847_45181C.1.pep
TCINTLSIPYNKNENLMNASKRKIFDTYPQKQIYSTPHSDDKQLYILITSLFGRFSSICILFFSMNKLQAPGAVCRNMPAIPWTEREEFRRRITSELQASGTFCKHCNSNSLVGDCIVQ

SEQ ID NO: 224974 - protein, 154 aa, Glycine max
  Clone ID: PAT_MRT3847_45182C.1.pep
PPVGAKINFVSWSPDGCHLSFSIRVNEEDNDSSKLTVWIADVKTGIARKLFQSPNVHLNAVFDNYVWVNNSSLLVCTIPSSRGAPPKKPLVPSCPKIQSNEERSIIQVRTFQDLLKDEYDEDLFDYYATSQLVLASLDGTTKEIGPPAVYTCMD

SEQ ID NO: 224975 - protein, 147 aa, Glycine max
  Clone ID: PAT_MRT3847_45183C.1.pep
RGPNQTYIYIINKLFSSNNITYKSIISPPIQLPTNYINHFYSPLIVCIHITPTILYNNKKNYLIFTHLIFFNPISCIIFLLNIFSFLPITHFIYLAHDTKNILKKYNNPTFIPLPYPKNFPSSPPLFIKYNFSSPPLPFPLKKKTNT

SEQ ID NO: 224976 - protein, 34 aa, Glycine max
  Clone ID: PAT_MRT3847_45184C.1.pep
HPRHGSLAFLPKKRAALTREKVKPFPKDNPSKAP

SEQ ID NO: 224977 - protein, 290 aa, Glycine max
  Clone ID: PAT_MRT3847_45185C.1.pep
MDDSLYDEFGNYIGPEIESDRDSDRDSDADDNPDDQSDAVGAAHSDGEDPSNGWMTTISDELENQVVLAEDKKYYPTAEEVYGEDVETLVMDEDEQPLEQPIIKPVRNIKFEVGVKDSSTYVSSQFLLGLMSNPTLVRNVALVGHLQHGKTVFMDMLVEQTHHMSTFDSQSEKHMRYTDTRIDEQERRISIKAVPMSLVLEDSNSKSYLCNIMDTPGHVNFSDEMTAALRLADGAVLIVDAAEGVMVNTERAIRHAIQERLPIVVVINKVDRLITELKLPPKDAYHKLRH

SEQ ID NO: 224978 - protein, 97 aa, Glycine max
  unsure (1)..(97): unsure at all Xaa locations
  Clone ID: PAT_MRT3847_45186C.1.pep
QTNPENADRRVIDEPFIGRWPIRVAALAKPIAQIEPDMKXRAQPLSATANGDDVHGKDXAVVKVEVARAMDAXASSDTATPLMGTGMQRDRGASDAF

SEQ ID NO: 224979 - protein, 1058 aa, Glycine max
  Clone ID: PAT_MRT3847_45187C.1.pep
KIKVGCALVLIYSNIGVSAFAALLGSSIVFVFTLFRTKRTNSFQFMIMKSRDLRMKATNELLNNMRVIKFQAWEEYFGNKIGKFREAEHGWIGKFLYYFAVNMGVLSSAPLLVTVLTFGSATLLGVPLNAGTVFTITSVIKILQEPVRTFPQALIVISQAMISLGRLDEFLMSKEMDEGAVERVEGCNGSDTAVEIKDGEFSWDDVDGNAALRVEEMEIKKGDHAAVVGAVASGKSSLLASVLGEMFKISGKVRVCGSIAYVAQTSWIQNATIQDNILFGLPMNREKYREAIRVCCLEKDLEMMEHRDQTEIGERGINLSGGQKQRVQLARAVYQDSDIYLLDDVFSAVDAQTGSFIFKECIMGALKNKTIILVTHQVDFLHNVDCIMVMREGKIVQSGKYDELLKAGLDFGALVAAHESSMEIAESSDRVGEDSAESPKLARIPSKEKENVGEKQPQEESKSDKASAKLIEDEERETGRVDLKVYKHYFTEAFGWWGVALMLAMSLAWILSFLAGDYWLAIGTAEDSAFPPSTFIIVYACIAGLVCTVVMIRSVLFTYWGLKTSQSFFSGMLESILHAPMSFFDTTPSGRILSRVSTDILWVDISIPMLVNFVMVAYFSVTSILIVTCQNAWETVFLLIPLFWLNNWYRKYYLASSRELTRLDSITKAPVIHHFSETIAGVMTIRGFRKQNAFCQENIDKVNASLRMDFHNNGANEWLGFRLDYMGVIFLCFATIFMIFLPSAIIKPEYVGLSLSYGLALSSLLAFTISMTCSVENKMVSVERIKQFSSLPSEAPWKIADKTPPQNWPSQGIIELTNLQVRYRPNTPLVLKGISLTIEAGEKIGVVGRTGSGKSTLIQVLFRLIEPSAGKITVDGINICTLGLHDVRSRFGIIPQEPVLFQGTVRSNIDPLGLYSEEEIWKSLERCQLKDVVAAKPEKLEAPVVDGGDNWSVGQRQLLCLGRIMLKSSKILFMDEATASVDSQTDAVIQKIIREDFADRTIISIAHRIPTVMDCDRVLVIDAGYAKEYDKPSRLLERHSLFGALVKEYSNRSAELEA

SEQ ID NO: 224980 - protein, 61 aa, Glycine max
  Clone ID: PAT_MRT3847_45188C.1.pep
CKVCCYAFLCVLNINKANYVESNYRNIACIESRKKNRMMVHISNRLVIQICLYFLSKIAFL

SEQ ID NO: 224981 - protein, 98 aa, Glycine max
  Clone ID: PAT_MRT3847_45189C.1.pep
LAHIRRSGWASMGETLPASPIGSTSSSPRHGSEKSLGGIKKARQGQGSERLIVPQKTESFLQSMEVKDSSPVSVHDPIPWSSGHSSPSSNSLLGNVIP

SEQ ID NO: 224982 - protein, 306 aa, Glycine max
  Clone ID: PAT_MRT3847_4518C.1.pep
MELLSSLRKEDILELFSHGFCSHCEDILHTRITNLRKRKLDETSSPDEEGFESSGDHVVDKPVNIGNVSNSESLTKNHEKQWDSPRNSSQRRDSTTPMKDDIKNIFYSSPKCLVGCKQSDFKLLLNDGICGDSSFENGGLSEEEKEQIRYSQVHCKKDFTFVERVNRRYVNVLRGLELHTGVFNAVEQRKIVEWIYRLQWRGQQGKLKDRTYSEPRKWMRGKGRVTIQFGCCYNYAVDKNGSPPGIMRDEEVDPLPPVFKQMIKRMVRWNIIPSTCIPDSCIVNIYEEGDCIPPHIDHHDFVRPFY

SEQ ID NO: 224983 - protein, 156 aa, Glycine max
  Clone ID: PAT_MRT3847_45190C.1.pep
MNKGAAGGLGGGAGSGPTAAAAAAAAQKQKTLLQRVEGDIANIVDNFNHLVNVARVNDPPVRNSQEAFMMEMRAARMVQAADSLLKLVSELKQTAIFSGFASLNDHVEERRIEFNQLAEKTDRTLSRVGEEAAASLKGLESHYSSSVQKIIQNPQP

SEQ ID NO: 224984 - protein, 63 aa, Glycine max
  Clone ID: PAT_MRT3847_45191C.1.pep
STLIDTEPQTNYHDLIRYLVDQTYKMRRIIQRARNISGLPIHGKIQSRAKKIGAVTSKHTLKS

SEQ ID NO: 224985 - protein, 63 aa, Glycine max
  Clone ID: PAT_MRT3847_45192C.1.pep
IRLYRPALTPSNTKAKSHVWLGRDVQGLVSCKTSSNPTNYMNWISKLNYLYISKLVWFWSNQF

SEQ ID NO: 224986 - protein, 51 aa, Glycine max
  Clone ID: PAT_MRT3847_45193C.1.pep
ALSANVKKLYYSEDKSLTVNLSRQGSKYMSSCLASQFRSHLQCYTRPRFLP

SEQ ID NO: 224987 - protein, 160 aa, Glycine max
  Clone ID: PAT_MRT3847_45194C.1.pep
HAGPTVLIIKDKEGYIYGGYASQPWERHADFYGDLKCFLFQLNPVASIFRPTGANNNLQWCAINFSSEDIPNGIGFGGRVNHLGLFISANFDQGHTFSCTTFGSPCLSKTNRILPEVIECWGVTQDATQDKNDAVKGTILERFKEDRNMLKMVGLANSSE

SEQ ID NO: 224988 - protein, 100 aa, Glycine max
  Clone ID: PAT_MRT3847_45195C.1.pep
PRVREIIASLNCFRVLYAPQGPHRYESRGEEQETLEIRRKWLRKKLERAMKVLSEILVWPKKSFSLRRLRTCISEAKEMKRKMQFQYDPRVMRLILMMDQ

SEQ ID NO: 224989 - protein, 150 aa, Glycine max
  Clone ID: PAT_MRT3847_45196C.1.pep
RNSPGRPTRPASQPWERHADFYGDLKCFLFQLNPVASIFRPTGANNNLQWCAINFSSEDIPNGIGFGGRVNHLGLFISANFDQGHTFSCTTFGSPCLSKTNRILPEVIECWGVTQDATQDKNDAVKGTILERFKEDRNMLKMVGLANSSE

SEQ ID NO: 224990 - protein, 45 aa, Glycine max
  unsure (1)..(45): unsure at all Xaa locations
  Clone ID: PAT_MRT3847_45197C.1.pep
XXXXTTIXLLHQXYVXXPATSXASIXLPISXSQXXXSTLASQQFS

SEQ ID NO: 224991 - protein, 174 aa, Glycine max
  Clone ID: PAT_MRT3847_45198C.1.pep
MLSSARPLERKLPKSLRASKVSKTKSKASDSTGRKKTTAGIRKEKQIKAINKSKVKGKGVSLKVTCEVEDCLHPEENAGNHKLDAVGKIIADDNRVSVNLSNLDMLSGVGYGEQLLSPRNAWVRCDDCHKWRRIPAVLADRIDETNCTWTCKDSSDKAFADCAIPQEKSNAENN

SEQ ID NO: 224992 - protein, 84 aa, Glycine max
  unsure (1)..(84): unsure at all Xaa locations
  Clone ID: PAT_MRT3847_45199C.1.pep
SSAFAGTREKCXGXQXTTVYPTERVTVNNTMXHKSCFKCCHGGCTISPSNYIAHXGKLYCKHHHIQLIKEKGNFSQLENDHGRH

SEQ ID NO: 224993 - protein, 83 aa, Glycine max
  unsure (1)..(83): unsure at all Xaa locations
  Clone ID: PAT_MRT3847_4519C.1.pep
GWRPNKGFEMCRPERANQTPWHTEXLIDNSNQSTAPDILLGICLHLANAGITPMPDCCGTHATARSHENAGSSGRSRMRGLFT

SEQ ID NO: 224994 - protein, 117 aa, Glycine max
  Clone ID: PAT_MRT3847_451C.1.pep
MGGTVSTPPTHKFPLPTMETCDYVRPSKLLLNVTIENSLGAIQVLLSPEDTVADLVNAALLIYEKEKRRPLLKDTDPECYDLHYSPYTLQSLKPNEKLKNLGSRNFFLRSKPLASFS

SEQ ID NO: 224995 - protein, 78 aa, Glycine max
  Clone ID: PAT_MRT3847_45200C.1.pep
HYYCVLYPLYSEIRIQLCAVSLPPFFSLISQFAINHIIICHNSSPFSTRPIKSSYSSSFFRVVLSRIILFKMGREMQP

SEQ ID NO: 224996 - protein, 44 aa, Glycine max
  Clone ID: PAT_MRT3847_45201C.1.pep
LLGPILQNCLMITFMIKNFIFYGTIVTSVYHQSNSWTLWRNSHY

SEQ ID NO: 224997 - protein, 49 aa, Glycine max
  Clone ID: PAT_MRT3847_45202C.1.pep
NCIKVHNTIAMTLHAALQDSEPKTPPLLNLSKNYYTKVDNPEIKLKKRL

SEQ ID NO: 224998 - protein, 154 aa, Glycine max
  unsure (1)..(154): unsure at all Xaa locations
  Clone ID: PAT_MRT3847_45203C.1.pep
NFWVFYIMSDKGLAFIFRKLGFNVQTPTGSFTAGLVGDSSPFSVLPQIKPSVTFIMVLLALSPCLFKAWKNPQPQMISRWIAYAYTCGFLFGWHVHEKASLHFVIPLAIVAAQTLEDARHYFLLSIVSCYSIFPLLFEAREXRSKYCCCFCTPF

SEQ ID NO: 224999 - protein, 109 aa, Glycine max
  unsure (1)..(109): unsure at all Xaa locations
  Clone ID: PAT_MRT3847_45204C.1.pep
MGEWFELMTTISCDLVVVWVANFRGGLAWDPYNMSFIFNIYFSLIVIGLLVYGGEALIMFKAFPLINDDSXIYYTLNFHAIFFILGIIDTYSAFKFHNESFFSNFYILY

SEQ ID NO: 225000 - protein, 245 aa, Glycine max
  Clone ID: PAT_MRT3847_45205C.1.pep
CAALSVSRSRFSPPNGCEKTTEGGFALPLKEEHKLFLVRILIPLHKPKCLAMYHQQLSYCITQFVEKDCKLADTIIRGLLKYWPITNSPKEVMFLGELEEVLEATQPPEFQRCMVPLFRRIARCLNSPHFQVAERALFLWNNDHIMSLIKQNRKVIMPIIFPALERNARSHWNQAVHGLTLNVRKIFNDVDADLSKECLQKFEEEESKKSEVMAGREATWKRLEELAANGEAVLIGKAPPRNSAG

SEQ ID NO: 225001 - protein, 521 aa, Glycine max
  Clone ID: PAT_MRT3847_45206C.1.pep
MFKQIFSKLPRKSSKGSEHGGSGRTHHGVTTSSKSSDSVSVTPGGTKPGNSSSAGPNHGNRVPLPLAVNENNIHNNPNNGNFGSYEALPAFRDVPSSEKPTLFIKKLRMCCVVFDFTDPAKHIKEKEIKRQTLVELLDYVTSANAKFVENMMQEVVKMVSANIFRTLSPQPRENKIVDGVDVEDEEPSMDPAWPHLQIVYELFLRFVASPELDAKLAKRYIDQSFILKLLDLFDSEDPREREYLKMTLHRIYGKFMAHRPFIRKAINNVFFNFIFETEKHNGIAEFLEILGSIINGFALPLKEEHKLFLVRILIPLHKPKCLAMYHQQLSYCITQFVEKDCKLADTIIRGLLKYWPITNSPKEVMFLSELEEVLEATQPPEFQRCMVPLFRRIARCLNSPHFQVAERALFLWNNDHIMSLIKQNRKVILPIIFPALERNARSHWNQAVHGLTLNVRKVFNDVDPDLSKECLQKFEEDESKKSEVIAGREATWKRLEELAAKKAASGEAVLIGKAPTRNSAG

SEQ ID NO: 225002 - protein, 92 aa, Glycine max
  unsure (1)..(92): unsure at all Xaa locations
  Clone ID: PAT_MRT3847_45207C.1.pep
IMFKQIFSKLPRKSSKGSEHGGSGRTHHGVTTSSKSSESVSVTPGGTKPGNSSSAGPNHGNRVPLPLAVNENNIHNNPNNGNFGSYEALXAF

SEQ ID NO: 225003 - protein, 206 aa, Glycine max
  Clone ID: PAT_MRT3847_45208C.1.pep
SHHSSCCNLLGENAPSKKQVSPDKLYRAALLRSRFADTILKAQEKTLEKGDKWDPEKLRMERKELERRQKEEKARLQAEAKAAEEVRRKAEAEAATEAKRKRELEREAARQALQKMEKTIGISESSQFLEDLEMLSGLLDEHLPNFTEERSPDHLENGLGSFKLQGSCNPLEQLGLYMKADEEEEEEEMPQSTTRETNDVEEGEIN

SEQ ID NO: 225004 - protein, 39 aa, Glycine max
  Clone ID: PAT_MRT3847_45209C.1.pep
TNHSKFPGSFLDQNLPILHCNKHRSLTNSIRKENQKPSS

SEQ ID NO: 225005 - protein, 60 aa, Glycine max
  unsure (1)..(60): unsure at all Xaa locations
  Clone ID: PAT_MRT3847_4520C.1.pep
IQNPIAGSSTCKSKGILDYTPNDLVFTDFVDHCXSTISDANSIITLNLTFTKLDSWYDNQ

SEQ ID NO: 225006 - protein, 102 aa, Glycine max
  Clone ID: PAT_MRT3847_45210C.1.pep
MGLSGKAWDNMLDNKTAFTTKKDYGRGEREAEWAVAQRTLRGLQVGESNKAKQHEQSEIAEQAKRRAEAARLRELHTLKGHVESVVKLKGIDIDTIQQHYTL

SEQ ID NO: 225007 - protein, 91 aa, Glycine max
  unsure (1)..(91): unsure at all Xaa locations
  Clone ID: PAT_MRT3847_45211C.1.pep
FEKKGQNHGGTHQIVEKHAWVQEGIWEPPGGFPFSPSFLKIPRKNSLRVPFFVLGTPNQFSIYSSKIKTQLLLFFPQKKKXKXKKKRIHTT

SEQ ID NO: 225008 - protein, 75 aa, Glycine max
  Clone ID: PAT_MRT3847_45212C.1.pep
KKEHGSKTPGPRREEKGGLLRNRAQGTEGVTKQRLLSQAWMRTTARKTPTPGKKREKGVRGLNPGTPKCHPYPKV

SEQ ID NO: 225009 - protein, 48 aa, Glycine max
  unsure (1)..(48): unsure at all Xaa locations
  Clone ID: PAT_MRT3847_45213C.1.pep
GTRGDSRCPISFIWXQTETGGCMKTPLPGXGPQKPRTATLPFLGAQSL

SEQ ID NO: 225010 - protein, 72 aa, Glycine max
  unsure (1)..(72): unsure at all Xaa locations
  Clone ID: PAT_MRT3847_45214C.1.pep
QTTTDRTFPLSNRTNELSSDGQSDLSGYWDSELRLWDTRFFLAGCXEKPEHQPHYSARRLNKATQTSRQPKL

SEQ ID NO: 225011 - protein, 85 aa, Glycine max
  Clone ID: PAT_MRT3847_45215C.1.pep
TRLLLPILPHFGNFANNAPIALCFILCSNILFCVAFSSSVMCASVPFVPKNLSWTFTNLWIYCVGPLIRCFLPVFYLPCFLYLLL

SEQ ID NO: 225012 - protein, 105 aa, Glycine max
  Clone ID: PAT_MRT3847_45216C.1.pep
MEIALSPHKSQTSLLGSSFPGNLSSLGCCFASKMRFLCNPFSRICCSSSMDQKLKPKPKKVEYMERNVPVLEDTQIRKTSPSGLCSQIEKLVVCNRHREAMELFE

SEQ ID NO: 225013 - protein, 56 aa, Glycine max
  unsure (1)..(56): unsure at all Xaa locations
  Clone ID: PAT_MRT3847_45217C.1.pep
IMVNDICKKHANINNDDYSWRKYGKKTVKGYIXNRGYKKRRSMRGCTARKHGSGRV

SEQ ID NO: 225014 - protein, 48 aa, Glycine max
  unsure (1)..(48): unsure at all Xaa locations
  Clone ID: PAT_MRT3847_45218C.1.pep
GLEEEGHFPSVVSSPAEFRCVRVSCVEDSDDRYAYXTAVSIGGHVFKG

SEQ ID NO: 225015 - protein, 100 aa, Glycine max
  Clone ID: PAT_MRT3847_45219C.1.pep
MSYPHYHMGSGSTTARRSLEFGKTHVVRPKGKHQATIVWLHGLGDNGLSSYQLLESLTLTNIKWICPTAPTRPVTILGGFSCTAWFDMGELSEDGPDDWE

SEQ ID NO: 225016 - protein, 119 aa, Glycine max
  Clone ID: PAT_MRT3847_4521C.1.pep
MQFLSHLSKKYGKWCGWFICFATDICAANHLGRSSCSWHLFCWRKVIDKVKRKADTLAYELEEAMKKDLTEAIENLDTFVKVLSKPYQDEAQNRLNRLVEIQEALSNVEKKLRTLQIDI

SEQ ID NO: 225017 - protein, 53 aa, Glycine max
  Clone ID: PAT_MRT3847_45220C.1.pep
VRLADALRCVPNEHEAKLQVVEVEKISLYASSSSITELQKLVLDPTLVAQIGS

SEQ ID NO: 225018 - protein, 81 aa, Glycine max
  Clone ID: PAT_MRT3847_45221C.1.pep
KICEGTQKKDRPSITRYCVLHFFLLGLVGITMKEGFYLLGLEKTSPTFAAAMQNSVPALTFLMAALLRYESVHFNRIDGLA

SEQ ID NO: 225019 - protein, 91 aa, Glycine max
  Clone ID: PAT_MRT3847_45222C.1.pep
PGCLQVQFITPQYNVHVTNLIYFGGSNTKCSERSETFQATYAGKILNKLEVEKLHSVVTKYGGMVAYNLVKMLGEDRMQKEDIASSSVNMI

SEQ ID NO: 225020 - protein, 87 aa, Glycine max
  unsure (1)..(87): unsure at all Xaa locations
  Clone ID: PAT_MRT3847_45223C.1.pep
MVLAFTNLFTRLLNQNEMPILMVGLDAAGQTTMLYKLKLEEIVTXTIPTIACNVETVEYKNIHFTVXDVGGHDKXRYSWMHYYQNTH

SEQ ID NO: 225021 - protein, 73 aa, Glycine max
  Clone ID: PAT_MRT3847_45224C.1.pep
SSPNFFQVLIDLAPPLFLLFIVWVGCGGRKPLAADTIYVIIYTFSFFDLVVYKLTPPRLLAKWDKIIVIVIYK

SEQ ID NO: 225022 - protein, 255 aa, Glycine max
  Clone ID: PAT_MRT3847_45225C.1.pep
MKRGALLSVLACAFAAVIWAANGNDNLVPPRREVYGNGRIFDISHRYQPEMPEWESNDGIGQFLWLPKSMKNGSLANNSEMKLPTHTGTHVDAPGHVFDHYFDAGFDVDTLDLDILNGPALLVDVPRDSNITAQVMKSLNIPRGVVRVLFRTLNTDRRLMFQKEWDTSYVGFTVDGAKWLVDNTDIKLVGIDYLSVASYDYLIPSHLVFLKDREIILVEGLKLDDVPAGLYSVHCLPLRLAGAEGSPIRCILIKN

SEQ ID NO: 225023 - protein, 127 aa, Glycine max
  unsure (1)..(127): unsure at all Xaa locations
  Clone ID: PAT_MRT3847_45226C.1.pep
SNITAQVMKSLNIPXGVIRVLSRTLNTDRRLMFQKEWDSSYVRLREDDRRGLVENTDIKLVGIDYLSVASYDYLIPSHLVFLKDREIILVEGLKLDDVPAGLYSVHCLPLRLAGAEGSPIRCILIKN

SEQ ID NO: 225024 - protein, 109 aa, Glycine max
  unsure (1)..(109): unsure at all Xaa locations
  Clone ID: PAT_MRT3847_45227C.1.pep
YTEGGQLTEAVLRLPYTVVXFDEMDKARPVVFNMMLQILEEGRLTHTLGTTVDYKTTLRIPTSIAESRVIERGGLTIGFDLVSDANANMYDRLPSLPTDELYQYSLPES

SEQ ID NO: 225025 - protein, 72 aa, Glycine max
  Clone ID: PAT_MRT3847_45228C.1.pep
TAITGCRTLKPGTKAIRTTISRISQFLRYFYVYDFLRERKSLCELDTDLGYQHTFHIYVICRTLFYVIYDSM

SEQ ID NO: 225026 - protein, 53 aa, Glycine max
  Clone ID: PAT_MRT3847_45229C.1.pep
TSRYCCSSWKRLVPPLCLRYRLNIVAWEIYIIMRIIECTRSAYLASICILEPR

SEQ ID NO: 225027 - protein, 108 aa, Glycine max
  Clone ID: PAT_MRT3847_4522C.1.pep
FKDLQNLTPLSINYANYSKVLQFPNRGFPTLKQILLADLFGLKSIVIEDGALPSLEKLRLVSIANLTEVPRGIDKLPKLKVFHCFDMSYKFKENFNLNRGQRRQWIIE

SEQ ID NO: 225028 - protein, 70 aa, Glycine max
  unsure (1)..(70): unsure at all Xaa locations
  Clone ID: PAT_MRT3847_45230C.1.pep
TQKVVLYFSSDQLIPDGSFCPSILFSLGRAGNXFKSCLAPPRAFXGVLKDGKVFFVPARPPMLTCIPLFF

SEQ ID NO: 225029 - protein, 135 aa, Glycine max
  Clone ID: PAT_MRT3847_45231C.1.pep
MRKAKEKKAQVEATLPKNDSKTIEKQVTASTSVKGQSQLKSGVQLSKEDQIRMAQAAEREKRAAAAEKRIAALKIQANSATTAPTMSEPKSGLAGDIYCSCCNSSLAGKVPFHLYNYKYCSTSCMHVHREILEDQ

SEQ ID NO: 225030 - protein, 74 aa, Glycine max
  unsure (1)..(74): unsure at all Xaa locations
  Clone ID: PAT_MRT3847_45232C.1.pep
SYCLANKKDPFTGGFEPDRTXFPKERPPMGGGDGHPIVITSEKEEGQEGTPPPHCWERGGDKQALWGQKHLVGG

SEQ ID NO: 225031 - protein, 157 aa, Glycine max
  unsure (1)..(157): unsure at all Xaa locations
  Clone ID: PAT_MRT3847_45233C.1.pep
PKATPKIYGLDYGCPIVRHSSTGYCVSIEGNFISWKSKKQNNVARSSAEAEYRAITSITCKLVWIKQLIXSEVQPMXLYCDNXAALHIASNPVFHERTKHIEIDCHFVREKLLTKEISTEFVNANDQLTDIXTKSLRRPWIQFICSKLGAYNLYAPA

SEQ ID NO: 225032 - protein, 183 aa, Glycine max
  Clone ID: PAT_MRT3847_45234C.1.pep
MAVSVSASSAIASLNSELSTRLPPSLASASSSAKQSFLQFPSCARLLRISTPRAPAPSRPRFLPLVQAKKQTYNSFDDLLANSEKPVLVDFYATWCGPCQFMVPILNEVSTRLKDKIQVVKIDTEKYPSIADKYRIEALPTFIMFKDGEPYDRFEGALTADQLIERIEAGLRVTYPPYESKSC

SEQ ID NO: 225033 - protein, 179 aa, Glycine max
  unsure (1)..(179): unsure at all Xaa locations
  Clone ID: PAT_MRT3847_45235C.1.pep
MAVSVSASSAIASLNSELSTRLPPSLASASSSAKQSFLQFPSCTRLLRISTPRAPAPSRPRFLPLVQAKKQTYNSFDDLLANSEKPVLVDFYATXLVYRCGPCQFMVPILNEVSTRLKDKIQVVKIDTEKYPSIADKYRIEALPTFIMFKDGEPYDRFEGALTADQLIERIEAGLKVKQ

SEQ ID NO: 225034 - protein, 76 aa, Glycine max
  Clone ID: PAT_MRT3847_45236C.1.pep
CTAGDHTYDAAAVGAGGAGLRAAIGLSEHGFNTACFTKLFPTRSHTGAAQGGINAALGNLTEDDWRRHTSDTGKGK

SEQ ID NO: 225035 - protein, 140 aa, Glycine max
  Clone ID: PAT_MRT3847_45237C.1.pep
LNRETYHQDAESEPCTTVQPATRKYKRSMDNGSESKEIPKEENIAAPVVPVVSTDSLRNIDLNAITNENDDKKASAEADASASVPEPDASLPEPPTESKHEEIPGWSLSDVDKMAIDSLQLAQLGRPLEEEEEDYDEEEG

SEQ ID NO: 225036 - protein, 48 aa, Glycine max
  unsure (1)..(48): unsure at all Xaa locations
  Clone ID: PAT_MRT3847_45238C.1.pep
PGQKLHFPSVWCCLSPRPWHLSQEDDVYGXIKKXAVLCYDRKSNINFP

SEQ ID NO: 225037 - protein, 83 aa, Glycine max
  Clone ID: PAT_MRT3847_45239C.1.pep
DCRLLNHQPPSYCYMLPLVCSISPLMVRSVFCIASSSALLSSALGSLVVRLALVFDSTHPPSRSFSCRTNKSHRSYAPSILIP

SEQ ID NO: 225038 - protein, 107 aa, Glycine max
  unsure (1)..(107): unsure at all Xaa locations
  Clone ID: PAT_MRT3847_4523C.1.pep
MASSMISSPAVITVDRACAGMVAPFTGLKSMAGFPTRKTSNDITSIAINRGKVHCMHVLPPIGNKMFETLSYLPYLDDAQLAKEVEYLLMKXWIPCLEFELEHRFAY

SEQ ID NO: 225039 - protein, 100 aa, Glycine max
  Clone ID: PAT_MRT3847_45240C.1.pep
TPPERGGFLKKNPRPPPHFGKGPPEGKTNNFLGKAKGLIGGRLYKPQKNFWKKGNRENSTRGLIKKKTNWAPGPEKNLYSPLKRDIPLQNKSPNSGGPGG

SEQ ID NO: 225040 - protein, 479 aa, Glycine max
  Clone ID: PAT_MRT3847_45241C.1.pep
EEFFPLRLEYYERRKKHILNNLEQLLLILDNKVRFILGVVNGEIVVSNRKKAELLIELQQKGFTPMPRKGKSAEPQVAGANDEEEQEDDNNTREQETGSVEGVKRGDYEYLLSMSIGTLTLEAVQKLLAEKAEKEKEFEILKATPSKSLWLKDLDELENRLDDIDSIEAEEERKRSSQANRKTSNRGVTKAAKKPPQPRKYTKKAKNVEPENDNSSMEIENVAEVAKPKGRAGSKNTQNTQPVAEDEIVSLQERLAAYNFGASSDISAGMETEEPPAPAEKKEAPKRRGAAKKKSSAIVLDDSDSDNEIHDVEDDDDNFEIMQPVALEAGKKKGGRKPAAQNAKKAPAAASTKKRNVGGKQSQLLGQKLITDMLESTGISPEKKVRKMRASPFNKKSSSVLGRVAAADKDDSVSEDLSGDSAGSSPRITEEVVEIAPPPARARPQRANRRQTTYVLSESESDNDSDVDEDYSDFEEDED

SEQ ID NO: 225041 - protein, 40 aa, Glycine max
  Clone ID: PAT_MRT3847_45242C.1.pep
AQRHPHSPLQFLKFYCGTHSDEVFLGNEIAATTALFMPAL

SEQ ID NO: 225042 - protein, 51 aa, Glycine max
  Clone ID: PAT_MRT3847_45243C.1.pep
LYTPITLLREWDVFSDTLKSLHKQMLCYKIKRLYSNRSCVIYIVKLISQEL

SEQ ID NO: 225043 - protein, 35 aa, Glycine max
  unsure (1)..(35): unsure at all Xaa locations
  Clone ID: PAT_MRT3847_45244C.1.pep
XXXXXXXXXXXXXXXXTFSSGYFIIGTEKHFNRPF

SEQ ID NO: 225044 - protein, 69 aa, Glycine max
  Clone ID: PAT_MRT3847_45245C.1.pep
HLVLSLRALTDKFLSYLTLMAESTHSKTNLERMEEVIAELASNQLHITTKLNELIQRITVLETNQQQSA

SEQ ID NO: 225045 - protein, 89 aa, Glycine max
  Clone ID: PAT_MRT3847_45246C.1.pep
KGLSLFFSKPLFFGQSFYFFFLKRGFFIFSLFFFRPFLGGPFGPPLGGCQLVPFFFRKKLVFEPSLVCWGDRKLNTGGEGVFIPLFFFP

SEQ ID NO: 225046 - protein, 40 aa, Glycine max
  Clone ID: PAT_MRT3847_45247C.1.pep
QLIMNVIFGLNLMIDYLNILLFVVSTTSLSYSPVSLCKFF

SEQ ID NO: 225047 - protein, 34 aa, Glycine max
  Clone ID: PAT_MRT3847_45248C.1.pep
ILSISNMLNILTLKYPFNCNTKIYNKIKSSLLIP

SEQ ID NO: 225048 - protein, 58 aa, Glycine max
  Clone ID: PAT_MRT3847_45249C.1.pep
PGSTQAAVRTPPPERRDCGDSKILPRELSHWVKAFGPQSFEMCLGRGIFKQLPCYLKK

SEQ ID NO: 225049 - protein, 381 aa, Glycine max
  unsure (1)..(381): unsure at all Xaa locations
  Clone ID: PAT_MRT3847_4524C.1.pep
VRQQRLTEEFVPRADLLLFVISADRPLTGSEIAFLRYSQQWKKKAVFVLNKADIYQNNHELEEAMSFIKDNIQRLLNTEDVMLYPVSARSALEAKLMATSNAGRLNEELSTSYSHYGASSFSELENFLYSFLDGSTIPGMDRMRLKLETPVAIADRLISACETLVTQDYRYAKQDLAAVEDIVNNVNDFALNMVTESLSWRRQTLSLIETTKSRVIELVEANLQLSNFDIIASYAFKGEKNVMPTTSRIQNDIIGPDVSTVQKILXEYGNWLYSKYTQQGRLYKESFEKRWPSLSHESSQINFETDQLLKKVDQAGSQVIDNFSSNAVSKSFEQEVREMILGTFGQLGVAGLSASLLTSVLQTTFEDLLALGICSDYTRNP

SEQ ID NO: 225050 - protein, 101 aa, Glycine max
  Clone ID: PAT_MRT3847_45250C.1.pep
FTILLNPFEFNHDSTCHFAAFKWLWMLKIPKKIRIMFWLILHNSLSKNSTRFHRNLVNSSAFPHCSNPREDSLHCLRDFPHAKEIWLGFGFAPHLSSLPLM

SEQ ID NO: 225051 - protein, 53 aa, Glycine max
  Clone ID: PAT_MRT3847_45251C.1.pep
MAVANNVLCIFFIISLTCMVQARIPGVYSAGAWQSAHATFYGGSDASGTMGLN

SEQ ID NO: 225052 - protein, 38 aa, Glycine max
  Clone ID: PAT_MRT3847_45252C.1.pep
KHGSGSWRYLPQYARLTTCGMSCGLRWLNYPQPDIKRG

SEQ ID NO: 225053 - protein, 114 aa, Glycine max
  unsure (1)..(114): unsure at all Xaa locations
  Clone ID: PAT_MRT3847_45253C.1.pep
TYHLVVALRRHPFQVDSKSWTRIKGPLVNQXMWNFGFRIWSRPHLWLQFYVRILDARENPANEFDLPPHVLLCGKCFLASPFEHIPLSASLLSEFFVVRRACLPQKFLLLFPRN

SEQ ID NO: 225054 - protein, 40 aa, Glycine max
  Clone ID: PAT_MRT3847_45254C.1.pep
CMEGSFQDGIAQGSYVDNQALFPFGQKKYHFPQGGLPGTG

SEQ ID NO: 225055 - protein, 128 aa, Glycine max
  unsure (1)..(128): unsure at all Xaa locations
  Clone ID: PAT_MRT3847_45255C.1.pep
KNPPGPQYPSPPFPPVGRFFNTPGPPGFPSLKGPVGPPPLLGVPPPFRPPGLSPLGFPLVFFWAFLSATLFPPDPXCPGFPHAFIPPPLGKPCSPPGPGPXIPGSPPPSAGPGVFYFPEFYFFPWPFR

SEQ ID NO: 225056 - protein, 356 aa, Glycine max
  unsure (1)..(356): unsure at all Xaa locations
  Clone ID: PAT_MRT3847_45256C.1.pep
MSKTSEIITCKAAICWGIGKPVTVEEIQVDPPKATEVRVKMLCASICSTDISSTKGFPHTNFPIALGHEGVGIIESVGDQVTNLKEGDVVIPTYIGECQECENCVSEKTNLCMTYPIRXTVLMPATWSEYMVSDANYVLKVDPTIDRAHASFISCGFSTGFGAAWKEAKVESGSTVAVFGLGAVGLGAVIGSKMQGASRIIGIDTNENKRAKGEAFGITDFINPGDSNKSASELVKELSGGMGADYSFECTGVSTLLSESLEATKIGTGKAIVIGVGIEITLPLGLFAILLGRTLKGSVFGGLRAISDLSILADKGHKKEFPLQELFTHEVTLADINKAFELLKQPNCVKVVINMP

SEQ ID NO: 225057 - protein, 62 aa, Glycine max
  Clone ID: PAT_MRT3847_45257C.1.pep
FVDFTFKLHIMLSVPRFATTKLCLASQGSKVIFLSKLSQSRPFFVAKLCAYYIALLSSSRSR

SEQ ID NO: 225058 - protein, 51 aa, Glycine max
  Clone ID: PAT_MRT3847_45258C.1.pep
VGWFLRAPLPDEKEIERRVLEKKKKDLLSRYASEGLVEEQTEAKDMLNIQR

SEQ ID NO: 225059 - protein, 85 aa, Glycine max
  Clone ID: PAT_MRT3847_45259C.1.pep
MGADYSFECTGVSTLLSESLEATKIGTGKAIVIGVGIEITLPLGLFAILLGRTLKGSVFGGLRAISDLSILADKGHKKVMYPLDI

SEQ ID NO: 225060 - protein, 103 aa, Glycine max
  unsure (1)..(103): unsure at all Xaa locations
  Clone ID: PAT_MRT3847_4525C.1.pep
LIRSRLSSLGLRPDRQPIDVXRPPGQDNLGAWARTLRXSEEGLEALIDPSLGHDVRXDRATNVASLASMCVRPEVQDRYFMADAVLTIKLVCNECNGGTRRML

SEQ ID NO: 225061 - protein, 46 aa, Glycine max
  Clone ID: PAT_MRT3847_45260C.1.pep
IMGKTFQSYIHSIRLGLLTHYTPTNSMQREAQTHRHICNLFVHKSV

SEQ ID NO: 225062 - protein, 239 aa, Glycine max
  unsure (1)..(239): unsure at all Xaa locations
  Clone ID: PAT_MRT3847_45261C.1.pep
MSKTSEIITCKAAICWGIGKPVTVEEIQVDPPKATEVRVKMLCASICSTDISSTKGFPHTNFPIALGHEGVGIIESVGDQVTNLKEGDVVIPTYIGECQECENCVSEKTNLCMTYPVRWTGLMPDNTSRMSIRGERIYHIFSCATWSEYMVSDANYVLKVDPTIDRAHASFISCGFSTGFGAAWKEAKVESGSTVAVFGLGAVGLGAVIGSKMQGASRIIGIDTNENQEXQGEAFGITD

SEQ ID NO: 225063 - protein, 38 aa, Glycine max
  Clone ID: PAT_MRT3847_45262C.1.pep
MQRRHNLISHSHCSIIVIEYQESARVDQWQLDRLNLDG

SEQ ID NO: 225064 - protein, 42 aa, Glycine max
  Clone ID: PAT_MRT3847_45263C.1.pep
LWYQCKPSSSPAYIYMSTPQGRRLKPQLVLRPPYRGLTGTHA

SEQ ID NO: 225065 - protein, 184 aa, Glycine max
  Clone ID: PAT_MRT3847_45264C.1.pep
SARASISTTVNATRVSDLESPTSTLSENNAPPINITSVIEFVGSSERGTVKEEGEQEWNKLGYHESFTHLGEYKDGKENSMPFTSSLHELTMTMATTWGSSTSGAHAHAHVAEEGCFTNLLLNANSGARSLSPQDGGESNNCHDNARNSGSGSSNADLYEENKNYWNNILNLMNYSSPSDSPMF

SEQ ID NO: 225066 - protein, 324 aa, Glycine max
  unsure (1)..(324): unsure at all Xaa locations
  Clone ID: PAT_MRT3847_45265C.1.pep
VCVNVFCSRVRRFCSRLNRAPTFLRGKIKHNACARSSRFGSIFAVGVGLMCIGVKNIYGGNGSEEPYPLKGQYSQFTLLTMTYDARLWNLKMYVKHYSRCSSVREIVVVWNKGVPPKLSDLDSAVPVRIREEKKNSLNNRFTADPXIKTRAVLELDDDIMMPCDDIERGFNVWRQHPDRIVGFYPRLIDGSLPLKYRGEKYARSHKGYNMILTGAAFIDSQVAFKRYGSKEAEKGRELVDKIFNCEDVLLNYLYANASSSSRTVDYVKPAWAIDTSKFSGAAISRNTKVHYQLRSHCLMKFSEMYGSLAGRKWGFDSRNDGWDV

SEQ ID NO: 225067 - protein, 138 aa, Glycine max
  unsure (1)..(138): unsure at all Xaa locations
  Clone ID: PAT_MRT3847_45266C.1.pep
HASDLVVRQKFLNFLWLIMNKRDKLSCQVGINPYSMDWTGLANRLLSTGYDVLCCYYASFDGLITKHVMSKMVEMINSLCGGDEKLMRERTHLLLAXXSRMATCKNDVWTVECGIPFXFPLTEICNYNYNERLITNSL

SEQ ID NO: 225068 - protein, 48 aa, Glycine max
  Clone ID: PAT_MRT3847_45267C.1.pep
QEWNIHSFSGNLAIYIKFWAVSILEQMSFRSIVRDVRDGFGSLSRRSF

SEQ ID NO: 225069 - protein, 90 aa, Glycine max
  unsure (1)..(90): unsure at all Xaa locations
  Clone ID: PAT_MRT3847_45268C.1.pep
TLGSINFTTIFLLRKTLDKHGTPKTHSDKAGYRTWEKXILNDPQDPYALDAVSYKTAGRDKLITQGYNIAWIIAHQWSDLLGRPRRETLT

SEQ ID NO: 225070 - protein, 150 aa, Glycine max
  Clone ID: PAT_MRT3847_45269C.1.pep
LGFDLDLFIGNALIPAFANSGFVESARQVFDESPFQDTVAWTALINGYVKNDCPGEALKCFMKMRLRDRSVDAVTVASILRAAALVGDADFGRWVHGFYVEAGRVQLDGYVFTALMDMYFKCGHCEYACKVFNELPHTDVVCWTVLVACY

SEQ ID NO: 225071 - protein, 97 aa, Glycine max
  unsure (1)..(97): unsure at all Xaa locations
  Clone ID: PAT_MRT3847_4526C.1.pep
MPTEIVMNNRMYEVFMSFIGEDTLACLTXHLCAGLHNGGIIVFKDDEXLLMGEHISRSLLIVNEHAHIWIVDRLTNHADSRRRLQEQEIIMSCICTI

SEQ ID NO: 225072 - protein, 189 aa, Glycine max
  unsure (1)..(189): unsure at all Xaa locations
  Clone ID: PAT_MRT3847_45270C.1.pep
CGIALQETTPLSIHSTPHQPTLQIILIPTPNVPHPHPPALPQSXPSHTLALPKPWPRSSHAPTPLPRRELHATKRKKKKKPPPTPPPPPPPPHTPTPLKNPRNTPGQPPPTPPPPPPPPAPPPPPNQPPPPPXSAPPQPPPLPPPPTAAPPAPPLHPPPPASRPPLPAAMNGPPPLCQSHFESQGRKFP

SEQ ID NO: 225073 - protein, 38 aa, Glycine max
  Clone ID: PAT_MRT3847_45271C.1.pep
ARAGRSSSFLVRTSTVTLEPYLFIGRACTHALRSYLLY

SEQ ID NO: 225074 - protein, 45 aa, Glycine max
  Clone ID: PAT_MRT3847_45272C.1.pep
LILTYKRNSIHFNLIQAELGIKYWPLLKRILFDSRFYFMHNLVYI

SEQ ID NO: 225075 - protein, 97 aa, Glycine max
  Clone ID: PAT_MRT3847_45273C.1.pep
KKKFEFPPLGLLEKRLNWPLIRPIFLEPFREAKTYPGPAVMPPHMAIPPPPSKPIERERFFQKNKKDGGTLAGPLKGLSLHSPNGSSFPSGSFDFRD

SEQ ID NO: 225076 - protein, 61 aa, Glycine max
  unsure (1)..(61): unsure at all Xaa locations
  Clone ID: PAT_MRT3847_45274C.1.pep
KKGRLLLAXKTGSRSGLKVALPKEEGDSWGEVLPLKETSGKEFSNPPVIQESDGGKHIPYT

SEQ ID NO: 225077 - protein, 41 aa, Glycine max
  Clone ID: PAT_MRT3847_45275C.1.pep
PPFCELILKGLLLEWVFLIFEFWTISFFSLTTMVQCYKTES

SEQ ID NO: 225078 - protein, 107 aa, Glycine max
  Clone ID: PAT_MRT3847_45276C.1.pep
PRPRRAEEDLGNDLRCLMICPVNINRTLRTLLFAGFLCRTHWPFLITPGAGHRGDPGNLDRYQLRLNTGVLISDGRGSTGDKVITLSLVWDPGGMLDGEIFGPSCCY

SEQ ID NO: 225079 - protein, 67 aa, Glycine max
  Clone ID: PAT_MRT3847_45277C.1.pep
SLSISQVILNGSINDCSSKKEIGANPYFINCPYTSIVYQSGVPMNQYKRFPLCVAFVLCGMYQFGRK

SEQ ID NO: 225080 - protein, 58 aa, Glycine max
  Clone ID: PAT_MRT3847_45278C.1.pep
RQQSCNCLLDIDKPTCYELIASYISYAILLIHMHLDLSMRESGYTIEYEPWELSYEPN

SEQ ID NO: 225081 - protein, 60 aa, Glycine max
  unsure (1)..(60): unsure at all Xaa locations
  Clone ID: PAT_MRT3847_45279C.1.pep
LQHWIDEYYLCTCLAHTGEVGLLKVIRSAHTRXSEGYRFIEFTSRACAERDLXTYNGTIM

SEQ ID NO: 225082 - protein, 111 aa, Glycine max
  Clone ID: PAT_MRT3847_4527C.1.pep
KRGGRGPKTLPLVHFTGGNLKRGGGKPGPFFSPKNGKFGRWALPKGPKFLNFAIPKKGFKGKPGGGVKKKPRKSLRNFLTLSKGPFKTANLGKPLPWGGILLGLQHTPETG

SEQ ID NO: 225083 - protein, 76 aa, Glycine max
  Clone ID: PAT_MRT3847_45280C.1.pep
SHSTFFSPRFDFHLWQVHPQSVGVGQSNKGDLRTDEQLNSKHSCIMWSAAHLVSGRSCKTPLPTHILEMSLHEVEH

SEQ ID NO: 225084 - protein, 251 aa, Glycine max
  Clone ID: PAT_MRT3847_45281C.1.pep
MDHEQEASEENKLSQDCKELILSLPREKGWITPYLYLFQGFWYSSTEIQAINTFQNQFQAKDNDVVIASVPKSGTTWLKALTFAILHRQYFPSLENHPLLIFNPHELVPPFEFVIYDEINGQTHDLSKMPEPRIFGTHVPFTSLAKSIKETDCKIIYICRNLFDTFVSTWVFVNKIMPKFLPTLPLEEAFERYCEGIIGFGPSWNHILDYWKESIARPKKVLFLKYEDLKENVHFNVKKIAEFLGCPFTKR

SEQ ID NO: 225085 - protein, 64 aa, Glycine max
  Clone ID: PAT_MRT3847_45282C.1.pep
FSKHSFFLFTGEYWSGGLYQQKLDSPEFKPVFIASKNKKSKVFPLKLMAPVTTFFTAHHMGDQG

SEQ ID NO: 225086 - protein, 185 aa, Glycine max
  unsure (1)..(185): unsure at all Xaa locations
  Clone ID: PAT_MRT3847_45283C.1.pep
AFFSLSSLLCDEVGEAGFFEDPDENPGIFYSLDNPCFVLEDEELYIEYLFKQETGFGSQNHHLFASDDHSNSRHWLRSARVDAIDWIFDTQAKFGFKVETAYLSVTYFDRFLSERSIDESKPWAIRLLSVACLSLAAKMEEQNXAPLSEYPIEDYRXENKVIKNMELMILSTLDWKMDQQLLVPM

SEQ ID NO: 225087 - protein, 425 aa, Glycine max
  Clone ID: PAT_MRT3847_45284C.1.pep
MATIPITYNHAWTFSHPHHALSRFLSPCNFSRITFSRRKYGVGGPAPSSPLSHFRVFCQSKTEILEIRKCSPFLESSLLLGNGGVASDEWKAVPDIWRSSAEKYGNNVALVDPYHDPPTTMTYTQLEQAILDFAEGLRVIGVRPDEKLALFADNSCRWLVADQGMMASGAINVVRGSRSSIEELLQIYNHSESVALVVDNPEMFNRVAKTFYSRTSMRFIILLWGEKAELVGQENKHVPVFTFMEVIHLGRQSRRALSNAHDAGTYIYEAINTDSIATLVYTSGTTGNPKGVMLTHQNLLHQIKNLGDIVPAEVGDRFLSMLPSWHAYERACEYFIFSCGIEQVYTTVRNLKEDLGHYQPHYLISVPLVYETLYSGIQKQISTSSLVRKLGALTFIRVSLRYMECKRIYEGKCLTKDQKPPYYLH

SEQ ID NO: 225088 - protein, 323 aa, Glycine max
  unsure (1)..(323): unsure at all Xaa locations
  Clone ID: PAT_MRT3847_45285C.1.pep
MAKAVGVRFHPTGVELVVYFLKRKVMAKKICDGFIAELDIYKYAPWGLPDKSCLRTGELEWDIFXHLERNMNYGFSXFCALKFGNSSSASDCVYVFLFFNXVSRIKTLIFHTGKSPRGERTDWVMHEHRLEDKDLADKGIAQDSYVVCKVFQKEGLGPGKGTHYARPFNEEEWDDEEIGIPCAALTAQVPTLPITSDGSVANDNHLPASGCIGSASTSCLSGSVPSLGTVNPTGPNDQAVNDDILPMLHIFNDDKWFEEIYNPGQENIVEGAPPSDDFFAGLEDYFAGFSSGQNTGDVGNSDDLDFLELNDLDTPLFYPTTQP

SEQ ID NO: 225089 - protein, 91 aa, Glycine max
  unsure (1)..(91): unsure at all Xaa locations
  Clone ID: PAT_MRT3847_45286C.1.pep
FYKGPAPRPYAHPCPPPPPYVYKCAARTRYVYACPPPPPRYVDKXPPPAPYVYPSPPPPTXVYKTPPPPPYVYAYPPTPPLYVDKTAPTVA

SEQ ID NO: 225090 - protein, 228 aa, Glycine max
  Clone ID: PAT_MRT3847_45287C.1.pep
SFVKKDEIKDISSNYMVSQTYSNTKDGLDLEKNTEHKDQVHVNLHSSFYDTDPNVFDVHVINDNIKLREEQNEKLSISSLSTVTNELTNRYLEFGGQTVQSSDVLSNRRRTDKPENGNGVDGPTSHLSMFSNSRCRTLSLDSGSDSSSAVENEKLKIGNEIEILGERLRMVKHEKEKLSFFSENGESEKGQLPCPLPHLSLKWFTMLLPYETNDKDLLTIDTALQIQF

SEQ ID NO: 225091 - protein, 94 aa, Glycine max
  Clone ID: PAT_MRT3847_45288C.1.pep
VVASLVVPDDAPPNSASADPGTKPQQCLTYHLNVSRGDVLKVTTRMELHHAPSPGMGSYNCWRCRRFQSKWTLQQVRVLLSQHAPGGYSAPFDS

SEQ ID NO: 225092 - protein, 70 aa, Glycine max
  Clone ID: PAT_MRT3847_45289C.1.pep
KNSGCYGFGCSNAISKSSYVYFTSTRTTPYPCTNCDRQCHTIRDESIAQGTRHRYLDSHIQVLKRTLTYL

SEQ ID NO: 225093 - protein, 63 aa, Glycine max
  Clone ID: PAT_MRT3847_4528C.1.pep
MTYNLGLKAATMTCDACVRLKHYCLSPCENRPGGSECLMKGPTYVRCPIGLFWNSMEIRSVGW

SEQ ID NO: 225094 - protein, 58 aa, Glycine max
  Clone ID: PAT_MRT3847_45290C.1.pep
SNISTSIFCKYHESQYMLINTRTQHSHFNTQHLHYLPFPHLTYNSINELKNSILQLTT

SEQ ID NO: 225095 - protein, 240 aa, Glycine max
  Clone ID: PAT_MRT3847_45291C.1.pep
MDLKDDAVKGIVPWDGTLSSFDFSLSAHTFSDKWKRFNPSFPAWQWITCPKQHHLVASHKVEGYLSLENMCHIKSSQEQESDRSLTWKEESNISQREEPFDKATLVCPEHEVNHYDFHIVYSASYRVPVLYFRSYRSDGQLLPFNEIEKDLPGHSAKLRSESKWTFITHEEHPYLNRPWYKLHPCGTSDWMKLLFHSDSSLNKNGFVIEQYLISWFSVIGQVVGLKIPLEMLDTVVSNDS

SEQ ID NO: 225096 - protein, 238 aa, Glycine max
  Clone ID: PAT_MRT3847_45292C.1.pep
MDLQGAVKDIIAWDGTLSSSDFSLSAHTFSEKWKRFNPSFPPWQWIPCLKHHLVASHKVEGYLSLENMCHIKSSEEEESDRSLTWKEESNISQREEPFDNAALVCPEHEVNQYDFHIVYSATYRVPVLYFRSYHGDGQLLPFDEIEKDLPGHSAKLRSESRWTFISHEEHPYLNRPWYKLHPCGTSDWMKLLFNGDSSLNKKDFVIEQYLVSWFSAIGLVVRLKMPLEMLETVVSNNS

SEQ ID NO: 225097 - protein, 153 aa, Glycine max
  Clone ID: PAT_MRT3847_45293C.1.pep
VVLDHTKAFQVTINQILAKETFLEIANLNKTVFLNKDSGLETLQCADLTKLRTVLAFQSLKNVFLYLGYTVEINGHRNGDYIAEDVKKFHICHKSMCSEKQPDYCLIQCGAVLDKTTGAKASNICPDDYYRNKTASFEKLAEGRGNSVKNNHQ

SEQ ID NO: 225098 - protein, 374 aa, Glycine max
  unsure (1)..(374): unsure at all Xaa locations
  Clone ID: PAT_MRT3847_45294C.1.pep
TGAFEENLNLSSKAQESGLECPKTNDGRAAHGNGWNTEIPSICRRVTASGPGCKXAVRCLKSYPSFSSSDQNXALGKSGKAVYFNNPMWPGEAHSIKVEKILYKEKSEYQEDLDLSSSMYGRGFGLDGIFQFPQMGECVYXVMIAHLLLWTIHLPKNVLLVGGGDGGVLIEIAKYDFVENMDIYEIDMISIVVSRKFVLPIVCVVEASRVHLHVGNAVDFLKSACEGKYDAIIVDSSDPVGPAQELVEKPFFDTIARALRPGGVLCNMAESMWLHTHLIQDMISICRETFKGSVCYAWASVPTYPSGVIGFLLCATEGPPVDFVNPINPIEKLEGANEHKRELQFYNSEMHSAAFALPAFLKREVSLLRDLSLQ

SEQ ID NO: 225099 - protein, 76 aa, Glycine max
  unsure (1)..(76): unsure at all Xaa locations
  Clone ID: PAT_MRT3847_45295C.1.pep
EDSSXIPTINLNIXXXXLXLQDYMQENMELQGGEMSKALVALNPQXASXXMPKLKNVGRLRXXXCVYVEQLCGGAF

SEQ ID NO: 225100 - protein, 65 aa, Glycine max
  Clone ID: PAT_MRT3847_45296C.1.pep
VILTVTFCLVEGQDKLVYYYFFFIASAGENTMSSLGRLVMLIWLFVVLILTSSYTASLTSILTVQ

SEQ ID NO: 225101 - protein, 90 aa, Glycine max
  unsure (1)..(90): unsure at all Xaa locations
  Clone ID: PAT_MRT3847_45297C.1.pep
ICRETFKGSVCXAWASVPTYPSGVIGFLLCATEGPPVDFVNPINPIEKLEGANEHKRELRFYNSEMHSAAFALPAFLKREVSVLRDLSLQ

SEQ ID NO: 225102 - protein, 99 aa, Glycine max
  unsure (1)..(99): unsure at all Xaa locations
  Clone ID: PAT_MRT3847_45298C.1.pep
RKQKERIPGEEKDGGEGAXCVXXKXQXSXEXSXLGXXRXAKXTDKXYQEPAPGRRWLTRXSLRXWXFYRARXTRXCGXFLFLXXNXFNXXGXXRXYXXX

SEQ ID NO: 225103 - protein, 106 aa, Glycine max
  Clone ID: PAT_MRT3847_45299C.1.pep
PFFLPPMGHHGTLLPPLKVPYTYPTFNITGRAYSFISHFSSFRLSCKFYYLVLCCLLDLSFNLSYLSRLTSLLVPTFLPAFISPPPPPPPPPPPPPPKEGGRHTVM

SEQ ID NO: 225104 - protein, 57 aa, Glycine max
  Clone ID: PAT_MRT3847_4529C.1.pep
VALKIKFLSLRFMWFKCKVKDYILLDEDYLNRCIRSCFYFNFQENLFVIIGDNFHYK

SEQ ID NO: 225105 - protein, 74 aa, Glycine max
  unsure (1)..(74): unsure at all Xaa locations
  Clone ID: PAT_MRT3847_452C.1.pep
NVLQIRFRVINPLKNHKGHFLCHRSSGVMCSFLTQCGTQFPMYQVVGRLYIIENTLQRILSHSRRSNAXXAEFS

SEQ ID NO: 225106 - protein, 61 aa, Glycine max
  Clone ID: PAT_MRT3847_45300C.1.pep
LKSANQFCRITTFDFWWRHLILVSIYEKETIYFSIQYKRGFKNLNIQCEVYHYLKFKQGEG

SEQ ID NO: 225107 - protein, 321 aa, Glycine max
  Clone ID: PAT_MRT3847_45301C.1.pep
MGSQGGAVQEPKTTTPLARQGSLYNLTLDEVHNQLGNLGKPLGSMNLDELLKSVWSAEAGGGGEASGWDFGVGDATNMPHGKAAASGSSLNPQGSLTLSRDLSRKTVDEVWKDMQLKKVTNRDKKIQERQATLGEMTLEDFLVKAGVVAEALPTKGGAMSGVDSNGAFSQHGHWLQYQPLPAATQLPNVRGGDGAAPAIQQPFQVGVNLVLDAAYSPLVRTIMGTLSDTQTPGRKRGASGVVVEKTVERRQKRMIKNRESAARSRARRQAYTQELEIKVSRLEEENERLRRLNEMERALPSVPPPEPKPKQQLRRTSSAIF

SEQ ID NO: 225108 - protein, 101 aa, Glycine max
  unsure (1)..(101): unsure at all Xaa locations
  Clone ID: PAT_MRT3847_45302C.1.pep
KTWMGASXECXWTLMVRPWIVVAXSXXGEXQSWGLGXXGWSQDKXXSXEXXGXGXVXPXXXGVVXAVGGXRRRGFGXWVCGVLGSVQCESASASGSSVMIA

SEQ ID NO: 225109 - protein, 70 aa, Glycine max
  Clone ID: PAT_MRT3847_45303C.1.pep
LRDPHHYQTKLNHPQILFLVPNETPFETHYINFKPYIGHEQSKYSSGQSPIHKEESNKNGDHKPNTTVHQ

SEQ ID NO: 225110 - protein, 61 aa, Glycine max
  Clone ID: PAT_MRT3847_45304C.1.pep
REDADYKRRRDDGDYRHERGKSVDTTGDDYWCHYILMLSTEPLNGYLVCPFCFNFSGGARY

SEQ ID NO: 225111 - protein, 54 aa, Glycine max
  Clone ID: PAT_MRT3847_45305C.1.pep
SSGLSKRSKLNYTCMQRSCSSIMATKINSLDAELHRRNWLNIDVTQHNRLAAYI

SEQ ID NO: 225112 - protein, 35 aa, Glycine max
  Clone ID: PAT_MRT3847_45306C.1.pep
VGLKGCDPDQRVKWSGLLKLYGETAAAHLRAMPKT

SEQ ID NO: 225113 - protein, 75 aa, Glycine max
  Clone ID: PAT_MRT3847_45307C.1.pep
IALFCRMTNGGGGGEKKEHTIMVLFVIYDSSLPTSFQLSPNCFPTAPHSLELRRVKTKTKCHDESKMNVVFSTSR

SEQ ID NO: 225114 - protein, 151 aa, Glycine max
  Clone ID: PAT_MRT3847_45308C.1.pep
NKTPWPFLTVGGGKNPISFIPIHTLLKRPNLPRFFSPPGYSDQTGPGQLKSDPAPKTTPVHFFGELLKSPPSIPGGPPLPPPPKALPFPKRAMGWAPPIFGGGAPRCRPRNLGSNTPGQGPEIKQGPPGKKAPPVGGDGFNPPFALGAGIG

SEQ ID NO: 225115 - protein, 41 aa, Glycine max
  Clone ID: PAT_MRT3847_45309C.1.pep
LLFFSSPLLAVSLLLTSISLYIFLAYVLASHSILSAAVDDH

SEQ ID NO: 225116 - protein, 105 aa, Glycine max
  unsure (1)..(105): unsure at all Xaa locations
  Clone ID: PAT_MRT3847_4530C.1.pep
EESTGQHKQAMLVTMELDNMIKVPVXLNAYRLLNVSVTLLQGGSNAHLSVYKILLRILPGADWAVADNLHAALRMLASYSVFREHLSXLXRYYLLTEVGRTLVTD

SEQ ID NO: 225117 - protein, 156 aa, Glycine max
  unsure (1)..(156): unsure at all Xaa locations
  Clone ID: PAT_MRT3847_45310C.1.pep
MKAALDEPQANPQRQKNKSAKKIEVPSFFSKLGERMKIGMVNMKENDVSNWSTHGERTSVYFERVSQFLNWTDLFPEWIDEEEENDVPSCPEIPMPEYAEYGSMDVIVAKLPCRYPEEGWKRDVFRLQVHLIVANLAVKKXKKDWRGKTRVVFWSK

SEQ ID NO: 225118 - protein, 77 aa, Glycine max
  unsure (1)..(77): unsure at all Xaa locations
  Clone ID: PAT_MRT3847_45311C.1.pep
SSCGGNCGCVSACNYNNGYKDCNMYPDLSYTNSTTTXTLVITLTPFKAQFDNSEINIPGENNNYKYKANYTYDPYAC

SEQ ID NO: 225119 - protein, 49 aa, Glycine max
  Clone ID: PAT_MRT3847_45312C.1.pep
GYKQEAILLGLTKHYQETLDDPYGAQGVTDGCHGGTSLDQSLCWTWARS

SEQ ID NO: 225120 - protein, 116 aa, Glycine max
  Clone ID: PAT_MRT3847_45313C.1.pep
KGFWEQKPLDPQKFRGWALKFQGFFPFFLKGRFYFEAFFKGPEGPGPPVSVFFFLKKKPPPLFVFQKNPKGPPRFGGLNPHFGPFGFFKKGTPFLGFCPPPPLFRHPVSPTFLCFF

SEQ ID NO: 225121 - protein, 156 aa, Glycine max
  unsure (1)..(156): unsure at all Xaa locations
  Clone ID: PAT_MRT3847_45314C.1.pep
MGHFSSAFNRLAKSFATKKGRSSDECNGREAAVAMAKEAKRNHFMLHSSGTVNVDGSNNFASVFSKKGQKGVNQDCCIVWEEFGCQEDMIFCGIFDGHGPWGHFVAKRVRKSMPPSLLCNWQETLSQTPLHSDVDFDXRDREKQHRVNLWKHSYLK

SEQ ID NO: 225122 - protein, 624 aa, Glycine max
  Clone ID: PAT_MRT3847_45315C.1.pep
MLLQQTELKQVPSMSRLQKSTGQQQMFHSLHQILSPYMSSVVVSVLLWHVIAVLLVSNLAFASSLEETNGHPKHKGEVIYAHNGAVATDDRRCSRIGKDVLREGGHAVDAAVASSLCLGVVSPASSGLGGGAFLLLRLNNGVAKAFDMRETAPALASKDMYAGNTTLKAKGGLSVAVPGELAGLHEAWKQHGKLPWKRLVKPAEILARRGFKVSPYLHKQMEETESDILEDKGLRSIFAPNGKLLKIGGICYNKKLAKTLRTISESGPKAFYEGLIGLNLVKDVQNAGGILSMKDLKSYTVKQKEPISNDVLGLKLLGMPPPSGGHPMMLLLNILDQYKLPSGLSGALGFHREIEALKHVFAVRMNLGDPDFVNITGVLSDMLSHRFANVLKNDINDNKTFGPSHYGSRWNQIHDHGTSHLSIIDPERNAISMTSTVNAYFGSKILSPSTGIVLNNEMDDFSMPRNVTKDVPPPAPANFIMPGKRPLSSMSPTIALKDGKLKAVVGASGGAFIIGGTAEVLLNHFVKGMDPFSSVTAPRVYHQLLPNVVNYENWTTLGEHFELPADIREALKSKGHVLKGLAGGTICQFIVLDNSVPSRQNKGIGNGKLVAVSDPRKGGFPAGF

SEQ ID NO: 225123 - protein, 73 aa, Glycine max
  Clone ID: PAT_MRT3847_45316C.1.pep
SLEPPSYFIRGGPVVTKKVPIPLQGFPLCTILGGEFFLSLVLRTFVGRPFSKPSIPNVKSGKDDVLDEKKTMK

SEQ ID NO: 225124 - protein, 51 aa, Glycine max
  unsure (1)..(51): unsure at all Xaa locations
  Clone ID: PAT_MRT3847_45317C.1.pep
ALSGTLPLNSXSLDSSLAQSQITHNSVDESLGRERERALDGDVNNNVRNEK

SEQ ID NO: 225125 - protein, 138 aa, Glycine max
  Clone ID: PAT_MRT3847_45318C.1.pep
LFLLLVAFSLVFAAVSASSDGGNEEPLIMQVVDGGDVRLGAEHHFLEFKRRFGKAYDSEDEHDYRYKVFKANMRRARRHQSLDPSAAHGVTRFSDLTPSEFRNKVLGLRGVRLPLDANKAPILPTDNLPSDFDWRDHG

SEQ ID NO: 225126 - protein, 369 aa, Glycine max
  unsure (1)..(369): unsure at all Xaa locations
  Clone ID: PAT_MRT3847_45319C.1.pep
PRVRQTSYKEEHNMSGPFSFHTDSTTWVADVKQATSVPVVIFDKPLLNITFADLLAATSNFDRGTLLAEGKFGPVYRGFLPGGIQVAVKVLVVGSTLTDKEAARELEYLGRIKHPNLVPLTGYCVAGDQRIAIYDYMENGNLQNLLYDLPLGVLQRPDDWSTDTWEEEDDSNGIRNAGSERVLTTWRFRHKIALXRPAVFNISVNDXGEHLRCRNVKASSVYLDYNLEPRLSDFGLAKIFGSGLDEEIALCSPGYAPPEFSQPEFDASVPKSDVYCFGVVLFELLTGKKPVGDDYPDEKEASLVSWVRGLVRKNKASRAIDPKIRDTGAEVQMEEALKIGYLCTADLPSKRPSMQQIVGLLKDIKPSAN

SEQ ID NO: 225127 - protein, 82 aa, Glycine max
  unsure (1)..(82): unsure at all Xaa locations
  Clone ID: PAT_MRT3847_4531C.1.pep
IRVLAKTYQTXAHSITLHFNGMDLKLPLXNRLIHSITDXISCLAIAVAPFNVKLMFNSISNFQKQNLRILFDTVHNNVGISR

SEQ ID NO: 225128 - protein, 79 aa, Glycine max
  Clone ID: PAT_MRT3847_45320C.1.pep
ISTQIKFEVKLPLHTLDKGGPLRVTNTPIKLPSFAYTKNHSYKKSRAFNLLTHPYITHQVLLSCKLMKLNLVQNPNFSP

SEQ ID NO: 225129 - protein, 166 aa, Glycine max
  Clone ID: PAT_MRT3847_45321C.1.pep
FGSSGDQRIAIYDYMENGNLQNLLYDLPLGVLQRPDDWSTDTWEEEDDSNGIRNAGSERVLTTWRFRHKIALGTARALAFLHHGCSPPIIHRDVKASSVYLDYNLEPRLSDFGLAKIFGSGLDEEIALCSPGYAPPEFSQPEFDASVPKSDVYCFGVVLFELPNRK

SEQ ID NO: 225130 - protein, 47 aa, Glycine max
  Clone ID: PAT_MRT3847_45322C.1.pep
RNEEYYLLCFSGQAGALNISYPPVTNRLVTRSILMKILSKGGAHTIC

SEQ ID NO: 225131 - protein, 58 aa, Glycine max
  Clone ID: PAT_MRT3847_45323C.1.pep
IVGTAPTSQSTVFVNGPSRDSLPSYAAIEKRISFPTFTAYVPPPFPLVANGAGWLAPC

SEQ ID NO: 225132 - protein, 119 aa, Glycine max
  Clone ID: PAT_MRT3847_45324C.1.pep
MDRRTNTTRPVALSSPSITATTTITILNSELSSSSSQQEQQQPEVLFLPLNRKKKKVSWKEGTVDNEFMQKKSSKKCCIFHKQKPFDEDDSDEDEHHSDEHPHDSGFCCKNHDEAGPSS

SEQ ID NO: 225133 - protein, 43 aa, Glycine max
  unsure (1)..(43): unsure at all Xaa locations
  Clone ID: PAT_MRT3847_45325C.1.pep
FSNHPVFPNCTSASTHXXXMXLLYXQNFHYFMFLKHRLINILF

SEQ ID NO: 225134 - protein, 62 aa, Glycine max
  Clone ID: PAT_MRT3847_45326C.1.pep
PSTHASGIMEDRKGQENFQLIVITHDERFAQLIGQRQHAERYYRVAKDDHQHSIIESQEIFD

SEQ ID NO: 225135 - protein, 121 aa, Glycine max
  Clone ID: PAT_MRT3847_45327C.1.pep
MDRRTNTSRPVALSSPSITATTTTTITILNSEPSSSSSQQEQQQPEVLFLPLNRKKKKVSWKEGTVDNEFMQKKSSKKCCIFHKQKPFDEDDSDEDEHHSDEHPHDSGFCCKNYDEAGPSS

SEQ ID NO: 225136 - protein, 188 aa, Glycine max
  unsure (1)..(188): unsure at all Xaa locations
  Clone ID: PAT_MRT3847_45328C.1.pep
AKLVFTDKRMDELFQLKMWVCISDDVDISQIIIKIINSASSSALTIAFTHQENVNNLDIEXLQSRLRHMLSRQKFXDDIWNDDRAKWIELKDLIKVGAVGSKILEXTRSNSIASMMGNAPSYVLEGLSXEKCLSLFVKXKKKGGEGKKYPSLVEIGKEIVKKCQGVPLAVRTLGSSLFLNFDLERGEF

SEQ ID NO: 225137 - protein, 59 aa, Glycine max
  Clone ID: PAT_MRT3847_45329C.1.pep
IVNACAIVRHPHYWTESHRLHPDMFIDGSIDYKGIDIEFIACGAGRMICARSTFAERAC

SEQ ID NO: 225138 - protein, 78 aa, Glycine max
  unsure (1)..(78): unsure at all Xaa locations
  Clone ID: PAT_MRT3847_4532C.1.pep
NLNFRAQKRKTKKKKIRGKRYFLDSQFQGTILSESKKKFDPRFYLPGLFLSEXSQVAELLHSRQLLAVCLHMINISGH

SEQ ID NO: 225139 - protein, 61 aa, Glycine max
  unsure (1)..(61): unsure at all Xaa locations
  Clone ID: PAT_MRT3847_45330C.1.pep
WEMFDSWQRSLESSMLPVACLPYPSHPFPHNKKHSISFSSLHLSSNPNTAXNPPCLNEVAS

SEQ ID NO: 225140 - protein, 50 aa, Glycine max
  Clone ID: PAT_MRT3847_45331C.1.pep
RSGPESHNSLIKCIDEIRVIVFHMLSGNSPIRVKFVGIRERMGMVRPLHA

SEQ ID NO: 225141 - protein, 80 aa, Glycine max
  Clone ID: PAT_MRT3847_45332C.1.pep
KPLKYFVFLKKKPLAQGYKKGVNGDHKNSQIKKRPNPFIKVLKKGETKKKKKKSAQKVFPYSFLTGVFYSKKKAFLKVGP

SEQ ID NO: 225142 - protein, 106 aa, Glycine max
  Clone ID: PAT_MRT3847_45333C.1.pep
PGQKGSETTLHVKKEIGPCPNCGNLNSPSRTECNQGRCGAPRPPLTPPVPIISPFRNRHPFYYGGVGTPPPSYGMPCQLGFSIPHPGIQYDYGLYARARASYQFIA

SEQ ID NO: 225143 - protein, 147 aa, Glycine max
  Clone ID: PAT_MRT3847_45334C.1.pep
MASTTITLIRPPLTFLSCRSNNNNSSSSVSAASRIFHFRSISAMSTPQGSSDSASTKTERVVIKGRVQGVFYRNWTIENATQLGLKGWVRNRRDGSVEALFSGSVDAVQEMEQRCRRGPPDAVVTGLQVFPSDDDPATTGFHRKPTL

SEQ ID NO: 225144 - protein, 163 aa, Glycine max
  unsure (1)..(163): unsure at all Xaa locations
  Clone ID: PAT_MRT3847_45335C.1.pep
PNVNGFGGQSSSHPQQNTNPFGFGSGSGSQQQQKGNPFGFGKHNSSQLNGGPHSENKPNQYKPFENKWNRQPSKPQQNGVKSENNPKQSEHHICTDPENCKRQITVVFDQEKPLWILTCYSHCKGAPCDIVGDISYEELRASAYXQSIVERERNILKSKWVEF

SEQ ID NO: 225145 - protein, 161 aa, Glycine max
  Clone ID: PAT_MRT3847_45336C.1.pep
MGDFTVALNPPKTFRSDNLLSTTNRISPAARGFQTSLAFKPRVFRGIRASVMPREGQPQQQQQQASSLGDALVNSPRRNDVVEAIGRTASLSNCLSETNLHATVPGLESKTRGKVRDIYDAGDYLVLVTTDRQSAFDRILASIPFKGQVLNQTSLRWFERT

SEQ ID NO: 225146 - protein, 55 aa, Glycine max
  Clone ID: PAT_MRT3847_45337C.1.pep
CDLSSYLLHTPRNLHFMLYAIKLCIEHVISLVISFRNHALVNFIYGLIIQLVIRT

SEQ ID NO: 225147 - protein, 88 aa, Glycine max
  Clone ID: PAT_MRT3847_45338C.1.pep
DESSTVTDDSDEPEEASPKSTDPRKISQQHVATAESISGSKDLLVSRRGCYTSKVSSNCATWSYVLAVSATVLVSAILLVNIWAYVRS

SEQ ID NO: 225148 - protein, 108 aa, Glycine max
  Clone ID: PAT_MRT3847_45339C.1.pep
MVIGKLTGPVQGSVFQSLSISTISELLSNQHWSELKPHFRTTKPAIFLDQLFNAGVDSELVLRFFQWSQKEFRISYGLETTGKVLHLLANSKKYSKVRSLLDKLVKNE

SEQ ID NO: 225149 - protein, 58 aa, Glycine max
  Clone ID: PAT_MRT3847_4533C.1.pep
FSVFANRKRRPLKHDVCELFNNKKGVSNSLIYFPAYNSLFSVHLLLFVLEYLLDFVCT

SEQ ID NO: 225150 - protein, 80 aa, Glycine max
  Clone ID: PAT_MRT3847_45340C.1.pep
IFLALPLPPTLSFLITSYWLAKLIFTPFLWEQHLFHNTSQNLIVYCHFNLPLFLCKFLEIMLLISNLYLSYRDLIILVPF

SEQ ID NO: 225151 - protein, 87 aa, Glycine max
  unsure (1)..(87): unsure at all Xaa locations
  Clone ID: PAT_MRT3847_45341C.1.pep
RTSMAESXGGHRRREPPPVSPEEEGANASWRLNVEEFCLSNQTHDHRQHHRFYTFRSALRKLSKQLKVAEYSXQXTNXXXXMNXMXT

SEQ ID NO: 225152 - protein, 219 aa, Glycine max
  Clone ID: PAT_MRT3847_45342C.1.pep
MNLSHGKGSTSSSPLKAGDTVSDQFPAGLRVLVVDDDPTCLMILERMLRACLYEVTKCKRAEVALSLLRENKNGFDIVLSDVHMPDMDGFKLLEHIGLEMDLPVIMMSADDGKQVVMKGVTHGACDYLIKPVRIEALKNIWQHVVRMRKNGLRDVEQSGSMEEGDRPPKGSDDGNYSSSVNEAQSSKKRRDEDQEGDEKDDYSTLKKPELLVCWLINSY

SEQ ID NO: 225153 - protein, 63 aa, Glycine max
  Clone ID: PAT_MRT3847_45343C.1.pep
ERSTLMPLLFKYKMAFFFFISKSYRATLFPLIKCEGVSILLIFFPRIANISGVGANTIKLCSF

SEQ ID NO: 225154 - protein, 86 aa, Glycine max
  unsure (1)..(86): unsure at all Xaa locations
  Clone ID: PAT_MRT3847_45344C.1.pep
TSTLGGGQETTAYTTVTFFTHQGMTFVPLGYRCPLIFNLDEVHGGSPWGAGTLAGGDGSRQPTKLELDVAKVHGXSFAQVAKKLAA

SEQ ID NO: 225155 - protein, 69 aa, Glycine max
  Clone ID: PAT_MRT3847_45345C.1.pep
STNAVPIGECWCWVKLTQPMELTDFAVYQLSSRKSQCQTSHELSKIPRGKNKSRIILNNFVDFPNLVPN

SEQ ID NO: 225156 - protein, 58 aa, Glycine max
  Clone ID: PAT_MRT3847_45346C.1.pep
RYLFVPLYRVKDLAETRGCVFFLLLALMVYLFSKEKGAFGPSLYSVESNYKSPVRVPF

SEQ ID NO: 225157 - protein, 337 aa, Glycine max
  Clone ID: PAT_MRT3847_45347C.1.pep
SGNAGGLLLLPKYNSLTEARGLIYLIAKDQHGCRFLQRIFDEGTPKDVQVIFNEIIDHVAELMMNPFGNYLMQKLLDVCDEKQRMQIILMVTEEPGQLVRISLNIHGTRVVQKLIETLKTRQQISLVVAALEPGFLALIKDLNGNHVVQHCLQCLSNEDNKFIFVAAAKYCVDIATHQHGCCVLQRCIGHSRGEHREKLVEEISANALLLAQDQFGNYVVQFILDLRIPSATATLSLQFERKYVHLSMQKFGSHVVEKCLAVFNDENQSRVIHELLSAPHFEQLLQDPHANYVIQSALRHSEGHVHNLLVEAIESHKAISRNSPYSKKIFSQKLLKK

SEQ ID NO: 225158 - protein, 97 aa, Glycine max
  unsure (1)..(97): unsure at all Xaa locations
  Clone ID: PAT_MRT3847_45348C.1.pep
EVGPPXXXXRIRXXXPXGXXGXICXXXXSPXXFXGXYXPGFGGKXXNXXXXEFXHNKXXXQRVXXXXFXXXXIFXXXXXXXXGRALXPNSRAYVRVX

SEQ ID NO: 225159 - protein, 104 aa, Glycine max
  unsure (1)..(104): unsure at all Xaa locations
  Clone ID: PAT_MRT3847_45349C.1.pep
VIVGPVPVDFRVYAVPALEGAAFXFPERARARIPKAGGECSPFDALALGAPLGPNAVLLGGPPNAREAVCPFGPAPGVPRSHARPYVRAKGRKFERARGRRFFL

SEQ ID NO: 225160 - protein, 56 aa, Glycine max
  Clone ID: PAT_MRT3847_4534C.1.pep
SLDKISLAYRGSFMVGRSIFFLITAGVFYYTMNEQVLIDKVAISLIYYTYWHQRIY

SEQ ID NO: 225161 - protein, 74 aa, Glycine max
  Clone ID: PAT_MRT3847_45350C.1.pep
NYIPCHCVFILPKIRFLISIENEILLFPVFGLFEKIFSLKMKTEIQPSTFPSSFFIFSENENRKQPNPTSPLLT

SEQ ID NO: 225162 - protein, 45 aa, Glycine max
  Clone ID: PAT_MRT3847_45351C.1.pep
TKITQHTSPKHFVSCLGRLIKQQTGIHPDALTGRFLKWRPIVTFW

SEQ ID NO: 225163 - protein, 38 aa, Glycine max
  unsure (1)..(38): unsure at all Xaa locations
  Clone ID: PAT_MRT3847_45352C.1.pep
VKNSVGAFTWRINMSIVYEMSLYIHILFPLXVAQEEIT

SEQ ID NO: 225164 - protein, 492 aa, Glycine max
  unsure (1)..(492): unsure at all Xaa locations
  Clone ID: PAT_MRT3847_45353C.1.pep
MLEMEKDFDSKLKIQGNSSSSNGAGNVQRSKSFAFRAPQENYTIQDFELGKIYGVGSYSKVVRAKKKDTGTVYALKIMDKKFITKENKTAYVKLXKRIVLDQLDHPGIVRLYFTFQDSFSLYMALESCEGGELFDQITRKGRLSEDEARFYAAEVVDALEYIHNLGVIHRDIKPENLLLTAEGHIKIADFGSVKPMQDSQITVLPNAASDDKACTFVGTAAYVPPEVLNSSPATFGNDLWALGCTLYQMLSGTSPFKDASEWLIFQRIIARELRLSDYFTDDARDLILRQXSELPYXRTVDGRDSYAVLKSPQVFKGVDWDNLRAQIPPKLAPEPGTQSPASDDVHDSSWSPSHIGDGSAASVRQPDGATSSEGTGHITRLASIDSFDSKWQQFLEPGESVLMISMVKKLQKLTSKKVQLILTNKPKLIYVDPSKLIVKGNIIWSDNPNDLSIQVASPSNFKICTPKKVMSFEDAKQRAWQWKKAIEGLQNR

SEQ ID NO: 225165 - protein, 118 aa, Glycine max
  Clone ID: PAT_MRT3847_45354C.1.pep
MLEMEKDFDSKLKIQGNSSSSNGAGNVQRSKSFAFRAPQENYTIQDFELGKIYGVGSYSKGVRAKKKDTGIVYALKIMDKKFITKENKTAYVKLERIVLDQLDHPGIVRLYFTFQDSF

SEQ ID NO: 225166 - protein, 47 aa, Glycine max
  Clone ID: PAT_MRT3847_45355C.1.pep
VVLPTCDLPSIFSVNLIILPLSFIHSYIYIYIYDTFTKLTLSLLINL

SEQ ID NO: 225167 - protein, 73 aa, Glycine max
  unsure (1)..(73): unsure at all Xaa locations
  Clone ID: PAT_MRT3847_45356C.1.pep
VRXXRFGSTFLEEXLXXLXVXLASGAELXYRDLRYRXAIXGVEEGLDEGFDGLDFGGVFXXGHGRGILXLRFW

SEQ ID NO: 225168 - protein, 123 aa, Glycine max
  Clone ID: PAT_MRT3847_45357C.1.pep
MAPQNLCGFISQSQHIMKAHLLHFYTLSLLFLFPISSSFILSPTLFHLHQQITTNTNPSSLILFLLLYSLFISLFSTCGVISITNSVFHFFINDQPAMMNLRSAIKSIPASFFPFLTTTFISQ

SEQ ID NO: 225169 - protein, 123 aa, Glycine max
  unsure (1)..(123): unsure at all Xaa locations
  Clone ID: PAT_MRT3847_45358C.1.pep
MAATHARISDVAHSATHPRATDSWSGSASSALKSLSRLERASSNLAQWASGITLNYDMLAAASHLLEQFPVQDDQKLPNPICALLSHIIYPXYHEVQAAMETNKFXLTIDDVASPKSSMWDLK

SEQ ID NO: 225170 - protein, 57 aa, Glycine max
  Clone ID: PAT_MRT3847_45359C.1.pep
LYVDEINSSIFNMTLSLAKLDDQHSCFHPCFLYCIHSYVKHQWELITSGSPLMKPHG

SEQ ID NO: 225171 - protein, 224 aa, Glycine max
  Clone ID: PAT_MRT3847_4535C.1.pep
MVRGKTQMKRIENATSRQVTFSKRRNGLLKKAFELSVLCDAEVALIIFSPRGKLYEFASSSIQESIERYRRHTKHVNPTTFRSVEQNMQHLKQEAENMMKKIDLLEAAKRKFLGEGLGACSIEELQRIEQQLERSLSNVRARKVFKEQIEQLKEKEKALLDENAKLTENARLSEKHDIHLQPATKNQNVNQPQCNAESSSSSDVETELFIGLPDTRARHISHHV

SEQ ID NO: 225172 - protein, 48 aa, Glycine max
  Clone ID: PAT_MRT3847_45360C.1.pep
FSADSWTDTWVVTVRRNFLIVRRTIPISIAIITGIHLRSSRQITTSRA

SEQ ID NO: 225173 - protein, 76 aa, Glycine max
  Clone ID: PAT_MRT3847_45361C.1.pep
KFKVPDFDKYKDTTCPKNHLKMYNRKMGAYSKNEKLLMHFFQESLIGAVVTWYTNLEPSRVHSWKDLMIAFIRRYQ

SEQ ID NO: 225174 - protein, 266 aa, Glycine max
  Clone ID: PAT_MRT3847_45362C.1.pep
MMEEEEDQQKLPDLVKELVHRLLSQNLPPNSPPLNPNSPEFRNSLRYALRILSSRLTPSVAPDAAAIADSIKRRLATHGHSSEALSFADLFSKFSSKAQSVNNKFAVIYLLKIVSEDRHTTTATTTPLLPNLSFSEPTSNKKPWNDNGALLISKDPENRRDVAFREFVDLVKEENEVSEEVLVQDVLYACQGVDGKFVKFDGESKRYVIPDSIRVPRATRSMVYNLCELGVLFRNVSGYISLSMDRFPNEDVGTVGQAFCSALQDE

SEQ ID NO: 225175 - protein, 97 aa, Glycine max
  unsure (1)..(97): unsure at all Xaa locations
  Clone ID: PAT_MRT3847_45363C.1.pep
PKHSFKFNLDNISTSSNHKDNLITHGIMYLPNISIVSFAKNPAIHFTTFDIPTLYIHLQKFNHPIFYFIISFCTYXPLIPNDQHIILFSIHLFNILF

SEQ ID NO: 225176 - protein, 83 aa, Glycine max
  Clone ID: PAT_MRT3847_45364C.1.pep
LFLDACDTATNMSVPGLTIMLYSMVSRNSLSPCLMYIAIYKTMTVHDMLKFKCNSAPCEITDNVDIRAGGLMITSPSESHRIE

SEQ ID NO: 225177 - protein, 52 aa, Glycine max
  Clone ID: PAT_MRT3847_45365C.1.pep
FALIYSLCILPVFLNVGDDEIIDDDDYQSCAEGTNLENSGWSSRTRFVCAKL

SEQ ID NO: 225178 - protein, 93 aa, Glycine max
  Clone ID: PAT_MRT3847_45366C.1.pep
RFPAKGRLKFFHQRIIRTPMNRCQDNRGSHSNHTIPLHYDMTRSGDIRGHLLYLLRSNRWLCREDDRPALGTLFLRRIARELTVMIQGMGYTS

SEQ ID NO: 225179 - protein, 100 aa, Glycine max
  Clone ID: PAT_MRT3847_45367C.1.pep
WIDDSHSINIGKAVPVHPQKPEEPRKPSKKRARPGESTRPRPKDRQQIQDCIKELRRIIPNDGKCSIDSLLDRTIRYMLFLQSVLKYSDKLQEPNEPKVN

SEQ ID NO: 225180 - protein, 81 aa, Glycine max
  unsure (1)..(81): unsure at all Xaa locations
  Clone ID: PAT_MRT3847_45368C.1.pep
SYGFNTALRMERVIPILKYIDVLKIERWDPSNQMYLMIMKTAIPKSIPGSITKSKSDKKWSNXXLRMKGQRXTTFWQNSSH

SEQ ID NO: 225181 - protein, 49 aa, Glycine max
  Clone ID: PAT_MRT3847_45369C.1.pep
NGIIDFYRFSITLNAHFLTKDPSKFIIIIVIVNHFSSISHFTSFSQFNL

SEQ ID NO: 225182 - protein, 105 aa, Glycine max
  unsure (1)..(105): unsure at all Xaa locations
  Clone ID: PAT_MRT3847_4536C.1.pep
LEEKGRKGVSLESKEEDVRGGATYVSDRQPIVTAAXGDKDFKEPPPTPLFEPGELKLCTFYRAGIGEXGATLLVLYITILTVMGVNRSPTIVGSVGFKGIDWSFV

SEQ ID NO: 225183 - protein, 26 aa, Glycine max
  Clone ID: PAT_MRT3847_45370C.1.pep
NKDLNYHHISNKAKGFPLRIAWLFKN

SEQ ID NO: 225184 - protein, 86 aa, Glycine max
  Clone ID: PAT_MRT3847_45371C.1.pep
HWVLAIWEIINCANCMARISLGDYKLTVLPLKDSDYYQRCQLVMIQFACFILINHYGKEHLGRGFVGIIYLEKKSTQLYSILFHLR

SEQ ID NO: 225185 - protein, 55 aa, Glycine max
  Clone ID: PAT_MRT3847_45372C.1.pep
SQLMSNATLLSLKILNDKIPTGDMLFHTRHSFEAHVINLTQSAKNEPKRETKRMG

SEQ ID NO: 225186 - protein, 83 aa, Glycine max
  Clone ID: PAT_MRT3847_45373C.1.pep
MVVGGTAYFFYKEAQRLGYVARSHFKLLQIQNQHKIIIPGSFILDLGCAPGGWLQVVCQSLGPFRGGGSSLLLSPQKGQWSPF

SEQ ID NO: 225187 - protein, 149 aa, Glycine max
  Clone ID: PAT_MRT3847_45374C.1.pep
MQLHFSPSMRSITISSNSNNNNNGFIDLMKIKVAARHISYRTLFHTILILAFLLPFVFILTALVTLEGVNNCSSFDCLGRRLGPRLLGRVDDSRRLVRDFYKILNETKSGEIPPDLKLSDSFDQLGSDMKNNQYDAKTFAFMLKGMNGK

SEQ ID NO: 225188 - protein, 133 aa, Glycine max
  Clone ID: PAT_MRT3847_45375C.1.pep
YGCNNLIRPVSCPSTISSNGWAFRFLARPKRLLGYQHRDVESRLVYVCLCSISKHFHHLSHGSPLQNASCAGILVFYIGVNARACKGFLGSRQSSVFECDMPGIRQHRPGSRQGPLLCSRLQGKSGCQRHGMV

SEQ ID NO: 225189 - protein, 50 aa, Glycine max
  Clone ID: PAT_MRT3847_45376C.1.pep
HACFPFRYSSFVFQSVIKINVHIKKKKKKKKKKKKKKKKKKKKKKKKKKK

SEQ ID NO: 225190 - protein, 51 aa, Glycine max
  Clone ID: PAT_MRT3847_45377C.1.pep
EDVGKKKCFAQQVLGLKFHRMGPHPQPLTINRFWIFILSSPPRVRLAPHRN

SEQ ID NO: 225191 - protein, 62 aa, Glycine max
  unsure (1)..(62): unsure at all Xaa locations
  Clone ID: PAT_MRT3847_45378C.1.pep
ISGLELRCESSPDFELYIYYAVTFKSQSMRAAVPPQGKEATNTPLAPPCCSSXSSLLIVYAV

SEQ ID NO: 225192 - protein, 399 aa, Glycine max
  Clone ID: PAT_MRT3847_45379C.1.pep
DTSHRLTAFDMPNSARVGINNYGMPCFFGCTLLRDETVRSFSWALKAFLGFMNGKAPQTILTDQNICLKEALSTEMPTTKHAFCIWMIVAKFPSWFNAVLGERYNDWKAEFYRLYNLESVEDFELGWREMACSFGLHSNRHMVNLYSSRSLWALPFLRSHFLAGMTTTGQSKSINAFIQRFLSAQTRLAHFVEQVAVAVDFKDQTGEQQTMQQNLQNVCLKTGAPMESHAATILTPFAFSKLQEQLVLAAHYASFSIEDGFLVRHHTKAEGGRKVYWAPQEGIISCSCHQFEFTGILCRHSLRVLSTGNCFQIPDRYLPIRWRRINMPSSKLLQSAPNDHAERVKLLQNMVSSLMTESAKSKERLDIATEQVTLLLSRIREQPISLQVGRDISSINRNL

SEQ ID NO: 225193 - protein, 67 aa, Glycine max
  unsure (1)..(67): unsure at all Xaa locations
  Clone ID: PAT_MRT3847_4537C.1.pep
DXPXAXIXPXQFLLFXXLXXSIEXGIGKRPXVVXXPHLHCSAIAVXXEXAXXYXCGCXYLEQRHLHS

SEQ ID NO: 225194 - protein, 94 aa, Glycine max
  Clone ID: PAT_MRT3847_45380C.1.pep
IYHLFFFILFAWEFISYMYLHPMCFCPFFMYLFEIHLIPFFAFFRFFVLYIYICIFHSLFVIAIFLGLGWKILWNKFWHRRDFGIGVCVRGILS

SEQ ID NO: 225195 - protein, 58 aa, Glycine max
  Clone ID: PAT_MRT3847_45381C.1.pep
PFVELLLTRLSLEITILIYRQNIKNFIKKLALVKYKTKDTFYRKMKLKLLVIHQLLRL

SEQ ID NO: 225196 - protein, 62 aa, Glycine max
  Clone ID: PAT_MRT3847_45382C.1.pep
RSLNHCQCHASLPPKDSRQYSFSPLELYQAPTASVRCQAPGYVHHTMQFPADTHRSYMLPRV

SEQ ID NO: 225197 - protein, 136 aa, Glycine max
  Clone ID: PAT_MRT3847_45383C.1.pep
MASSTIRKAIGVVKDQTGVSIAKVAGNLAPDLEVLIVKATSHEQVPADEKYVREILTLTSLSRSYINASLVTISKRLNKTRDWIVAIKALLLVHRLLVDAHPAFEEEIVHFTRLGTLRIFNMCDFRDDAHSNSWDQ

SEQ ID NO: 225198 - protein, 66 aa, Glycine max
  unsure (1)..(66): unsure at all Xaa locations
  Clone ID: PAT_MRT3847_45384C.1.pep
HIIVXSXCPSTXSXLXRRSYXTTQXIXXCXPNXSTRTYSXTPGLXXXXSRHKXRQNYCXXLPIXAL

SEQ ID NO: 225199 - protein, 48 aa, Glycine max
  unsure (1)..(48): unsure at all Xaa locations
  Clone ID: PAT_MRT3847_45385C.1.pep
KPPPLXHLGNLRSTATFMPAXMTGCWILSRSVSLVRICCGDEHVGCVE

SEQ ID NO: 225200 - protein, 441 aa, Glycine max
  unsure (1)..(441): unsure at all Xaa locations
  Clone ID: PAT_MRT3847_45386C.1.pep
MGQTLSCVQQHEDHGVLFPALASGELEVVEAMVEEDPTVLEHTIGCDRLSPLHVAAANGRIEVLSMLLDRSFNVDVLNRHKQTPLMLAVMHGKTGCVEKLIHAGANILMFDSIRRRTCLHYAAYYGHIDCLKAILSAAHSTPVADSWGFARFVNIRDGNGATPLHLAARHRRSECLHALLDNGALVCASTGGYGYPGSTPLHMAARGGSLDCVRMLLAWGADRLQLDSSGKIPFSVALKHKHCACAXVWPSPLKFISELNQEAKALLEKALQEANREREKTILKETDMPPSPLNSESEDDNIASEASDMELCCICFDQACTIEVRPCGHQMCAHCTLALCCHKKLDPATTGLSGPXLATCVDPFFSLCILRLTQFQDTVAKINKISDTEVESGPMKPRRSRKSNFSEGSSSFKSLSAMGSFGRIAGRNSGKITDEKQWEVS

SEQ ID NO: 225201 - protein, 60 aa, Glycine max
  unsure (1)..(60): unsure at all Xaa locations
  Clone ID: PAT_MRT3847_45387C.1.pep
MSNEKDTFNVADLTSALNXDNRTDLVNALTSRIQHLAXQHSDILESLSHNVRNRVEVLTE

SEQ ID NO: 225202 - protein, 95 aa, Glycine max
  Clone ID: PAT_MRT3847_45388C.1.pep
MTETVVSDNSKGLILAMGSNAFIGSRFILKKKGLKRAAARRTSARVGGYTHLLEPLWLALMATMIIGEIAYYDAYIYATAVMGTALGALTIISTA

SEQ ID NO: 225203 - protein, 273 aa, Glycine max
  unsure (1)..(273): unsure at all Xaa locations
  Clone ID: PAT_MRT3847_45389C.1.pep
HXAARYIWPECLHALLDNGALVCASTGGYGYPGSTPLHMAARGGSLDCVRMLLAWGADRLQLDSSGKIPFSVALKHKHKACAALLDPSSAAPLVWPSPLKFISELNQEAKALLEKALQEANREREKTILKETDMPPSPLNSESEDDNIASEASDMELCCICFDQACTIEVRPCGHQMCAHCTLALCCHKKLDPATTGLSGPVCPFCRGSILQLLVAKINKISDTEVESSPMKPRRSRKSNFSEGSSSFKSLSAMGSFGRIAGRNSGKITDEKQ

SEQ ID NO: 225204 - protein, 55 aa, Glycine max
  unsure (1)..(55): unsure at all Xaa locations
  Clone ID: PAT_MRT3847_4538C.1.pep
CSSSLTDFSFARFDFISFGLQKIPVNKIFMLLFNFCCFHCXGQXAGLVFLSFHFI

SEQ ID NO: 225205 - protein, 89 aa, Glycine max
  Clone ID: PAT_MRT3847_45390C.1.pep
KISLLTNLKSMNFIKSRILYNLLFAFTPITTSIASLINYPLQNFYYSTIQATPLVINIQPHIHKFNHILSTYTTMPVLKLSLITTTNHH

SEQ ID NO: 225206 - protein, 46 aa, Glycine max
  Clone ID: PAT_MRT3847_45391C.1.pep
ESLPCLSPSSSSPSLTMFCHPHAASFHSSMSWITTLRRGSIHSSSR

SEQ ID NO: 225207 - protein, 50 aa, Glycine max
  Clone ID: PAT_MRT3847_45392C.1.pep
NNKKQLALFKKKNKNWLSIITLSFTRGHANYYFKKNSSFFGKKFPSLKKT

SEQ ID NO: 225208 - protein, 169 aa, Glycine max
  unsure (1)..(169): unsure at all Xaa locations
  Clone ID: PAT_MRT3847_45393C.1.pep
MFHAFVSLIARGWKLFGHGDDVGNVAAATGRECKEDLLWFRDIGKFAAGDFSMAVVQANQVFEDQSXIESGGFSTFIGIYDGHGGPDCSCYVCDNLFRNLQELYKMVCEPDETDLNIRIPAVMLPLDAGTRLEKMLATTSSVSVQLYSPLRPAVDVAEVFLWMMAVLTI

SEQ ID NO: 225209 - protein, 59 aa, Glycine max
  Clone ID: PAT_MRT3847_45394C.1.pep
WKLDVGTGCSEPSIKTLGVCLPLPHSLFFAVHFNFCFNFWLKFSSTPYSLKNIVKKSNF

SEQ ID NO: 225210 - protein, 134 aa, Glycine max
  unsure (1)..(134): unsure at all Xaa locations
  Clone ID: PAT_MRT3847_45395C.1.pep
MAAIFHKAYAHASDELNRPASDNGATMPKVPEETLKDSLSHHPDDTCSISYAEADELTYVHPDQSCCSDNRXFCGIDDIYCLFLRSLNNMFLLNTQDGLSESTDDAMFASGAYNTVHDGGTYPADQVGKERDGS

SEQ ID NO: 225211 - protein, 44 aa, Glycine max
  Clone ID: PAT_MRT3847_45396C.1.pep
KFCAGFSYYQNISYLRPRLVCNLIWWGGAVLVVLGFLSGAMVGL

SEQ ID NO: 225212 - protein, 53 aa, Glycine max
  Clone ID: PAT_MRT3847_45397C.1.pep
YYANVNKPSLDDPVFGNTSGSYRDFLMALFGKGSEVELFIYRQAPLMVLLACL

SEQ ID NO: 225213 - protein, 103 aa, Glycine max
  unsure (1)..(103): unsure at all Xaa locations
  Clone ID: PAT_MRT3847_45398C.1.pep
LQNLXAYVKTKLDEIQSSLLERAIAFRDSNIVDVNTYDXLKAAISQGKWARGPWSASDEDELKVKEETGATIRCFPFEQPQGVKTCLMTGNPAEEVAIFSKSY

SEQ ID NO: 225214 - protein, 67 aa, Glycine max
  Clone ID: PAT_MRT3847_45399C.1.pep
ILQPLDVDVKNHHQEGHEVMSLIYICKEEACLEIGVIGLVTLQGDSNEAVSVAPCASDEVSITGQAA

SEQ ID NO: 225215 - protein, 103 aa, Glycine max
  Clone ID: PAT_MRT3847_4539C.1.pep
NHSPFLFFKKNLNPPGGGRPPPRGFQSFSPPLIFGVFPTQEGSNPPNFPYPFFLGVGPKRFGLKNPRGGQTPLALKGLGLTWGQTVFPQFVMPTPGGVPDPSL

SEQ ID NO: 225216 - protein, 86 aa, Glycine max
  Clone ID: PAT_MRT3847_453C.1.pep
ATTPANEYHPTMKSLADQRDRNMKVIQEKMNLDKKEMKRFNPVDAFPGDIVIFGRVLNLLRGLSSTMNVRIVYMDIMRPFAESVLS

SEQ ID NO: 225217 - protein, 450 aa, Glycine max
  Clone ID: PAT_MRT3847_45400C.1.pep
RDIKGSNLLVNNEGILKVADFGLANFSNSGNKQPLTSRVVTLWYRPPELLLGSTAYGPSVDLWSVGCVFAELLIGKPILQGRTEVEQLHKIFKLCGSPPEEYWKKTRLPHATLFKPQQPYDSSLRETFKDFHASTVNLLQTLLSVEPSKRGTASSALSLEYFKIKPYACEPSSLPIYPPSKEIDAKHEEESRRKKIGGRACKPESRKPSRKPLALSKLAPAEDLTSQTQTSHKMNDRSVHIIKQEDTNTCEEAPKQSSGKPEDASSYMKNASQVDIPFPGPLQVSKSSGFAWAKRRRDDTSVRSHSRSISRGFIFNSLETSTLNSRDNSESRNHENKEFFGARTNSRGNHLLEISKLAMQNQWSKFDRPDSFDTCDEYHSQELSLAIYNRQDSLSKRSNLSYQDQEEKVEFSGPLLSQMHTVDELLERHERHIRHTVRRSWFQRGKKQGK

SEQ ID NO: 225218 - protein, 54 aa, Glycine max
  Clone ID: PAT_MRT3847_45401C.1.pep
SRGLFSNKKREECSLLTCSSIVQNKVSDCAVKKHYRLCTRLENNHRKRYDTKYT

SEQ ID NO: 225219 - protein, 82 aa, Glycine max
  Clone ID: PAT_MRT3847_45402C.1.pep
SILFEAVRIPLLAINFNLFIADSVLGVRGPCIGEVIYAEGRVRRGNSVDLAVIKNACGIYAPTLNRLHCAACMVILSMHARA

SEQ ID NO: 225220 - protein, 322 aa, Glycine max
  Clone ID: PAT_MRT3847_45403C.1.pep
MASTPSIPSHIKAWAYSEYGNTEEILKFESNIPIPDIKEDQVLIKVVAAALNPIDYKRAHGFLKNTDSPFPTVPGYDVAGVVVKVGSQVSKFKVGDGVYGDINEDPVNNPKAIGSLAEYTAVEEKVLAHKPSNLSFVEAASLPLAIITAYQGFEKVEFSAGKSILVLGGAGGVGSLVIQLAKHVFGASKVAATASTAKLDLLRNLGADLAIDYTKENFEELEEKFDVVYDTVGESETEKALKAVKESGKVVTIVRFGHPEAIFFIRISDGTVLEKLKPYLESGKVKPILDPKSPYPFSQTVEAFAHLKTNRAIGKVVIHPIP

SEQ ID NO: 225221 - protein, 94 aa, Glycine max
  Clone ID: PAT_MRT3847_45404C.1.pep
GRGSTGFINNRSANWRRSPTNRPAGPKSIHRHVKGLAGSLTLYWFAVSSDAKRYTRLPLRLFAHRMLRLSRARAHIRGITPRTSPFAAEHTFSG

SEQ ID NO: 225222 - protein, 150 aa, Glycine max
  unsure (1)..(150): unsure at all Xaa locations
  Clone ID: PAT_MRT3847_45405C.1.pep
PLPLKRWWRLSWWSFKPGFQPEVWPLFIPFGTTIIIPLPGPNPANFPHTGFLITRVPFPGTRKKSKGKGVPLDSPSLGRGRTEARLTGHRPEWTPILLPRKKVGWYRTRKPFSIPXPRERWAEEEPNKVLEALKLPGRTWQRIEEPIGTK

SEQ ID NO: 225223 - protein, 160 aa, Glycine max
  unsure (1)..(160): unsure at all Xaa locations
  Clone ID: PAT_MRT3847_45406C.1.pep
LLSSEYLSLGNSKRVLHAAADNASQARLPSPPPTTFPSSLGQLAASLSDSDFALTAYEIFLAACRTSSGKPLSFAANHSSTIASKVKKAFGLKSPGLASRKKXGSASGQGKPKRPLIVGELMRNQMKVSEAMDSHVRRVLLRISAGQGIPSVSKTLEDSD

SEQ ID NO: 225224 - protein, 368 aa, Glycine max
  Clone ID: PAT_MRT3847_45407C.1.pep
LRPGKGSYGTKCVVKANHFFAELPNKDLHQYDVTITPEVTSRGVNRAVMEQLVRLYRESHLGKRLPAYDGRKSLYTAGPLPFMSKEFRIVLADDDEGAGGQRRDREFKVVIKLAARADLHHLGLFLQGRQTDAPQEALQVLDIVLRELPTTRYCPVGRSFYSPDLGRRQPLGEGLESWRGFYQSIRPTQMGLSLNIDMSSTAFIEPLPVIDFVTQLLNRDVSARPLSDADRVKIKKALRGIKVEVTHRGNMRRKYRISGLTSQATRELTFPVDERGTMKSVVEYFYETYGFVIQHTQWPCLQVGNAQRPNYLPMEVCKIVEGQRYSKRLNERQITNLLRVTCQRPGERERDIMQVRKMLSGHFFYGFI

SEQ ID NO: 225225 - protein, 106 aa, Glycine max
  Clone ID: PAT_MRT3847_45408C.1.pep
VFVRGAGPLGRFKPPFWGGGGSPGSFFLARGKGCHSPLCPFFEDFSRGPRQSRFIGQAWGGLCFFNPEKPPVWGGFFFPILPIWGSFGVFFFRGSWGPFLVPLFCF

SEQ ID NO: 225226 - protein, 102 aa, Glycine max
  Clone ID: PAT_MRT3847_45409C.1.pep
PVSPLGWGTLISPFSGVVVSFRFRTRSALCAYDELGRFRSGPSSPFDVCLSESHFLVPQSCGCSLLAVAVFGVVWVSVRMFHCMCGLRSGFGCPTVWPGHAR

SEQ ID NO: 225227 - protein, 127 aa, Glycine max
  Clone ID: PAT_MRT3847_4540C.1.pep
MASKGTVASTYVALFLCLNMLSYTMVSSTYIPVIPDPSVPSQKGTCPIDALKLGVCANVLNLVNVKLGSPPTLPCCNLIKGLADLEVAACLCTALKANVLGINLNVPISLSVILNNCGRNNAGFQCP

SEQ ID NO: 225228 - protein, 222 aa, Glycine max
  Clone ID: PAT_MRT3847_45410C.1.pep
MVLYCSTSKKTEAHGYEEPTILSSETPFTVSEVEALHELYKKLSNSIVEDGLIHKEEFQLALFRNKNKKNLLAADRTSLFADKIFDLFDLKRNGVIEFGEFVRSLGVFHPNAALEDKITFAFRLYDLRQTGFIEREELKEMVLALLHESDLELSDDMIETIVDKTFSDADINGDGRIDQDEWKAFVSKHPSLIKNMTLPYLKDITLAFPSFVTGTDIEESEM

SEQ ID NO: 225229 - protein, 39 aa, Glycine max
  Clone ID: PAT_MRT3847_45411C.1.pep
IVSNWNIRDKACANDFTILIFLFYTYYIHFISAMDETRE

SEQ ID NO: 225230 - protein, 182 aa, Glycine max
  unsure (1)..(182): unsure at all Xaa locations
  Clone ID: PAT_MRT3847_45412C.1.pep
MYAVKIEKFSLESSFCLFKLMLNLCDCKDFIVMAFSNPLFSLVKEFHSFSFFSFFLLHDIIGLWTKTMGRQWSLFSAMDTLLLCILLSSEVVLTSYQNVGKVYPGIEGSQMNWIDRYGILLESYNGEFGFGXVTTANDSTLFLLAIVHMHTPKLXWVANRELPVSNSDNFVFDEKGNVILHK

SEQ ID NO: 225231 - protein, 67 aa, Glycine max
  Clone ID: PAT_MRT3847_45413C.1.pep
LSCVPSYQQTFSDADINGDGRIDQDEWKAFVSKHPSLIKNMTLPYLKDITLAFPSFVTGTDIEESEM

SEQ ID NO: 225232 - protein, 55 aa, Glycine max
  Clone ID: PAT_MRT3847_45414C.1.pep
CFTEKRRYDGTMGVYLILIISAIIIVLRLNCNSLKTGITIMSHSFLTKADAWADD

SEQ ID NO: 225233 - protein, 87 aa, Glycine max
  unsure (1)..(87): unsure at all Xaa locations
  Clone ID: PAT_MRT3847_45415C.1.pep
LCLCFLSHLKISCYNCNYCCRSSCKFGNCYLSCKTYPHLSYTESTTTYTLVMXVPPANAQYDCSXIGVPSKNDGCXLKPNCIYNPCT

SEQ ID NO: 225234 - protein, 57 aa, Glycine max
  unsure (1)..(57): unsure at all Xaa locations
  Clone ID: PAT_MRT3847_45416C.1.pep
RADSSTFFSSRIKCPLLGVLXSITTITTNGWRAIICSCGAGSNLLKLPIKVFARLNY

SEQ ID NO: 225235 - protein, 102 aa, Glycine max
  unsure (1)..(102): unsure at all Xaa locations
  Clone ID: PAT_MRT3847_45417C.1.pep
IFTVNEERYCSRGSCTSYVSTLKMGLVRSIMEKLXELVELSPFAFEENGVELSVRNMAKVPEEMRPYCGASCVGTLELVGIDDPIFNVRITDPAACVLTVRV

SEQ ID NO: 225236 - protein, 55 aa, Glycine max
  Clone ID: PAT_MRT3847_45418C.1.pep
LTIPYPTCDIRIYLQLHLLLQDWLNFSTSSSLFYNTMFFEIIKRYSILIVCESIT

SEQ ID NO: 225237 - protein, 52 aa, Glycine max
  Clone ID: PAT_MRT3847_45419C.1.pep
FSSCIMLAQSGAMLCACTFYVGTITALDKSSEAPVLSKPRLQPKLIGLYYSS

SEQ ID NO: 225238 - protein, 41 aa, Glycine max
  Clone ID: PAT_MRT3847_4541C.1.pep
HASVVDSVLTVFFSSDSAIFWFLSLMLYLDIICYSFPSSNC

SEQ ID NO: 225239 - protein, 35 aa, Glycine max
  Clone ID: PAT_MRT3847_45420C.1.pep
RREASGHRSEICYLASVTTDDSEKWDILLKDELEH

SEQ ID NO: 225240 - protein, 65 aa, Glycine max
  Clone ID: PAT_MRT3847_45421C.1.pep
LIQFYGISKLNLIYCTALSFEEDTVMGYPLVETVGLGTKQTVPSESNRLTSCLQFGTCHFIYIGM

SEQ ID NO: 225241 - protein, 76 aa, Glycine max
  Clone ID: PAT_MRT3847_45422C.1.pep
FYTIGMDTGTVTLTLLMTLVVILGGFSGGSDHAADDSKKENNVDKLADMPKNMAYNLGYDVPKGKPMNMGMYMKKW

SEQ ID NO: 225242 - protein, 162 aa, Glycine max
  Clone ID: PAT_MRT3847_45423C.1.pep
MGTQILRPQDCLVERIRAPPADFSRRRSSGNYCNYYYYNNNNNHVATSRSCRKPVSRPDQRKRAAPGSAQPVVAEAAAAVLKRPSRDDSRVARSQSLEMTTILRRGQSLDSAVKSEVYAGSAFAVSPSPEALPLPSFSTKKQDSVAVDDSATRDLRRLLRLE

SEQ ID NO: 225243 - protein, 68 aa, Glycine max
  unsure (1)..(68): unsure at all Xaa locations
  Clone ID: PAT_MRT3847_45424C.1.pep
XXAXTXSSXIRLEHQLCHISNLXLXXXXXXYXXXTWXXEFSXGVXVQXAVNSRVSVCTQQMXXXXEQC

SEQ ID NO: 225244 - protein, 112 aa, Glycine max
  Clone ID: PAT_MRT3847_45425C.1.pep
LLFYVGASRLIRPLKSEVYAGSAFAVSPSPHRTIYDAEHGQDLPGTKVREEGSAPGSDATVNRAYAGLGATFELDLKAYGRYYIDGNGLPLDATVHFSKGYDNRYRYAEPGF

SEQ ID NO: 225245 - protein, 82 aa, Glycine max
  Clone ID: PAT_MRT3847_45426C.1.pep
FYGLTAPETGGKDPLIFFKTPLGYWMQNGAPVINQGFGAPFKPLNGPFECEGAPPSPVRARVNYSPDPCNQFGVPPGDNFPC

SEQ ID NO: 225246 - protein, 107 aa, Glycine max
  Clone ID: PAT_MRT3847_45427C.1.pep
GKKSAISFIHTPQWFTNAFIYTSSLITEFVILCKGNILEIINNSAICIPFSQFRFAPFHVTILHTCTNLEAGLLFAPHFLLVEHGTRVFATPVLPSTYQKMTCNCYI

SEQ ID NO: 225247 - protein, 99 aa, Glycine max
  unsure (1)..(99): unsure at all Xaa locations
  Clone ID: PAT_MRT3847_45428C.1.pep
ISHITEHILYLTKEAGAASGMVLSSPCLADQVRKLGPSGAPLGRASMRKTVTKHVSXRSPRYGPHLVKNWGPIFGXPSYYLTGEWPGDYGXDTAGLYAD

SEQ ID NO: 225248 - protein, 40 aa, Glycine max
  Clone ID: PAT_MRT3847_45429C.1.pep
PRSHSNFHHTLSFLLIILYNHLQLFLIFLFFYLKFLSKPY

SEQ ID NO: 225249 - protein, 127 aa, Glycine max
  unsure (1)..(127): unsure at all Xaa locations
  Clone ID: PAT_MRT3847_4542C.1.pep
DAGGKIKKGAGGRKGGGPKKKPVSRSVKAGLQFPVGRIGRYLKKGRYAQRVCTGAPGYLGADIEYLSARVLXFAWNAARDNNKNKIIPKHVLLAVRYHDELRKXLAGVTIAPCGVLRNINPVVCLKR

SEQ ID NO: 225250 - protein, 87 aa, Glycine max
  unsure (1)..(87): unsure at all Xaa locations
  Clone ID: PAT_MRT3847_45430C.1.pep
RAGHSARRHAHLRAPAAAARPATALHPPSSFTRHRTLCXXSLCRPRPIPHNLYPRLPRWEHHHASHPWPTSVGHAQRPRPXSAHSPR

SEQ ID NO: 225251 - protein, 55 aa, Glycine max
  Clone ID: PAT_MRT3847_45431C.1.pep
KPIVQTEAGVLSFPGEGPQLVWSILHFASGFSSSTNGGHLPPPSDLWAIIDESFP

SEQ ID NO: 225252 - protein, 176 aa, Glycine max
  Clone ID: PAT_MRT3847_45432C.1.pep
KGKSLALLFIGKKEGGGTGGKQMLLLTSIPPKGFHGDSTMGRGRNPSEKRAHPLPNGFVYFYPKAPKKKGEKFAPPPGFGFPLGGLSNPIKKNKRNLKSRAISTLGQNCKLFFFSKAPKIKKTPLQGEPTKPTQKKKNPFMFSNKVFSFFKKPPFFNPNGQQKTYFFFNKPIPLRE

SEQ ID NO: 225253 - protein, 46 aa, Glycine max
  Clone ID: PAT_MRT3847_45433C.1.pep
RCVNIKSSLQLCGSGLICSLSSVVSGSRVTSFYQAFSASILKAVYT

SEQ ID NO: 225254 - protein, 77 aa, Glycine max
  unsure (1)..(77): unsure at all Xaa locations
  Clone ID: PAT_MRT3847_45434C.1.pep
GSISSRFGSRGSVEHCLRDAKLDNRPVHDVVLDRGSMRIPAVRLLLRDLSTGTXLCHSIYPAVAVAYERAVQAAIQR

SEQ ID NO: 225255 - protein, 40 aa, Glycine max
  Clone ID: PAT_MRT3847_45435C.1.pep
AYNTSSWIVVRCSVIIRGVLMLSGLMIIGDQKISRFLTWI

SEQ ID NO: 225256 - protein, 63 aa, Glycine max
  Clone ID: PAT_MRT3847_45436C.1.pep
TKGNILPYLGIKKYFGLIQELFFFAGDTQPFNFNSGLNPKIFPVSYLDFCSCSKERLKTIIWF

SEQ ID NO: 225257 - protein, 63 aa, Glycine max
  Clone ID: PAT_MRT3847_45437C.1.pep
ILTPLIKQGCCYNCLQSSEPDNSKLPSCILMDHKKAAPGAAPEQVNSSKDEVNRLKSIYLPIV

SEQ ID NO: 225258 - protein, 104 aa, Glycine max
  Clone ID: PAT_MRT3847_45438C.1.pep
GKFGPGMLSPGILYQVSFIVMLKDSVKGWELPINVRLVLPGGKKQQHKENLMEKSRESWIEILVGEFVASEKDVGEMEISMYEHEGGMWKTGLVIEGVAIKPKN

SEQ ID NO: 225259 - protein, 293 aa, Glycine max
  unsure (1)..(293): unsure at all Xaa locations
  Clone ID: PAT_MRT3847_45439C.1.pep
MASGEQKFPPQQQQTQPGKEHAMTPVPQFTSPDYKPSNKLQGKIALVTGGDSGIGRAVCNLFALEGATVXIALVTGGDSGIGRAVCXMIKRAKTSDAKDPMAIASDLGYDENCKRVVDEVVSAYGSIDILVNNAAEQYECGTVEDIDEPRLERVFRTNIFSYFFMARHALKHMKEGSSIINTTSVNAYKGHAKLLDYTSTKGAIVAYTRGLALQLVSKGIRVNGVAPGPIWTPLIPASFKEEETAQFGAQVPMKRAGQPIEVAPSYVFLASNQCSSYITGQVLHPNGGTVVNG

SEQ ID NO: 225260 - protein, 111 aa, Glycine max
  Clone ID: PAT_MRT3847_4543C.1.pep
FIKSPLFYQVYRYLVSGNPSSNLMPDCLEESPIPLCSVYASTRGEPPFTNYTPDFTGTLDYILFSPSDHIKPISFLELPDSDAADIVGGLPNFIYPSDHLPIGAEFEIIEE

SEQ ID NO: 225261 - protein, 68 aa, Glycine max
  Clone ID: PAT_MRT3847_45440C.1.pep
NRDQTQSLLDSRNLSITFYFHGVPTSYGNENDSPEVDTDFENHCSFPFLVHSLNTLLFDVGHWSHDLN

SEQ ID NO: 225262 - protein, 210 aa, Glycine max
  unsure (1)..(210): unsure at all Xaa locations
  Clone ID: PAT_MRT3847_45441C.1.pep
MASGEKKFPPQQQQTQPGKEHAMNPVPQFTSPDYKPSNKLQGKIALVTGGDSGIGRAVCNLFALEGATVGFTYVKGHEDKDARDTLEMIKRAKTSDAKDPMAVPADLGYDENCKRVVDEVVNAYGCIDILVNNAAEXYECGTVEDIDEPRLERVFRTNIFSYFFMTRHALKHMKEGSSIINTTSGECIQGEMXKLLGLXTSTKGSNCGPI

SEQ ID NO: 225263 - protein, 82 aa, Glycine max
  Clone ID: PAT_MRT3847_45442C.1.pep
KISFLGPSKAFHSCLTRGKFFFPAQALCCFLPVKNYRGKTHSLPRLNILALGGNIPKNPLLSGNPYHFPYLRGGGAINPPEG

SEQ ID NO: 225264 - protein, 50 aa, Glycine max
  Clone ID: PAT_MRT3847_45443C.1.pep
TVQGPVTTIRHRLKGARRQPTLSTPPLRAYRCTSKQSPLDANPCSGALYK

SEQ ID NO: 225265 - protein, 47 aa, Glycine max
  Clone ID: PAT_MRT3847_45444C.1.pep
TLGVKRFFLTHTKGHLTHSFFGGPAWGKGPELVSVCLEHGGYSGDQR

SEQ ID NO: 225266 - protein, 86 aa, Glycine max
  Clone ID: PAT_MRT3847_45445C.1.pep
IHFNSLLSFRVKMKHYPTVIPLFNHYSQQGISPDIFLVNAYGHPSQINAVFFWAVFSTGVITITITTLMKGFFLPGNVKEAFMIVY

SEQ ID NO: 225267 - protein, 99 aa, Glycine max
  unsure (1)..(99): unsure at all Xaa locations
  Clone ID: PAT_MRT3847_45446C.1.pep
RRMPGPKMRMYYVPMNKKGMDNFPFYALLASRKKYNSVIDALDAEDILXSRTWCIPSNXDAIHLRVRAHAFHMLQINMMLSCAKADRIHTSMKIAFVLA

SEQ ID NO: 225268 - protein, 82 aa, Glycine max
  Clone ID: PAT_MRT3847_45447C.1.pep
TRPGKSMLEQVSDTWGLSSGLKFLCSHNPSLYAIILGLKHAMKLVIFLANVFLIIMWLVSTLSLCVWGCVCFCVKGNFIREL

SEQ ID NO: 225269 - protein, 73 aa, Glycine max
  Clone ID: PAT_MRT3847_45448C.1.pep
ILQQLSRKYVWLPTHRLVLPAQCDHLSFHPQNPYLPQLDPLSSFVVINAYPYPFSTRSFLMPCHTIPFYLDGS

SEQ ID NO: 225270 - protein, 57 aa, Glycine max
  Clone ID: PAT_MRT3847_45449C.1.pep
CPYVSGIAALLKARQSHWSPVAIWYSFMTTASVHDNTIKPFRCALNSRALTPYEHGT

SEQ ID NO: 225271 - protein, 102 aa, Glycine max
  Clone ID: PAT_MRT3847_4544C.1.pep
METPSACWDKWVGEALATLHSLKVLRSVRPICLRNSQPLQFGVDDGAFQVFDEMQQWDRSSVEVEIAETTFSRWMHDTPSSGDEIVCSAAVGGDEAGACYGE

SEQ ID NO: 225272 - protein, 73 aa, Glycine max
  unsure (1)..(73): unsure at all Xaa locations
  Clone ID: PAT_MRT3847_45450C.1.pep
RYPSQHSXXFNKWCHARHQAGHTLTHHEQHRNERWTKPMAEFLKCNIDIAIFKVINNNGLNYVIRRSSRVTQS

SEQ ID NO: 225273 - protein, 38 aa, Glycine max
  unsure (1)..(38): unsure at all Xaa locations
  Clone ID: PAT_MRT3847_45451C.1.pep
LNTNLXPISNSLIHXGFXAQXSKXDRNLFAKPXVHQXX

SEQ ID NO: 225274 - protein, 42 aa, Glycine max
  Clone ID: PAT_MRT3847_45452C.1.pep
GASSTSFASMLVSTFGSSVVVTWEAGCSGIVTSILVTSFLNH

SEQ ID NO: 225275 - protein, 57 aa, Glycine max
  Clone ID: PAT_MRT3847_45453C.1.pep
MADDSTATCIDILLAIILPPLGVFLKYGCKVEFWICLVLTLFGYIPGIIYAVYAITK

SEQ ID NO: 225276 - protein, 185 aa, Glycine max
  unsure (1)..(185): unsure at all Xaa locations
  Clone ID: PAT_MRT3847_45454C.1.pep
CIQLRDGTQEQGLVTDHLIICGMNSHFPFILKQLNKCQELAALXGTDTARRQRILFMTDLPGKQIDRVPDNIAEDSHHIDGLTKRCSLSMTKSFERASHNRARAINILPTXGDRLTVCXHEDDTDAFLCALALQPITNMDSVPTIVDASRPKTCELLTSISSLKREPDENEXPKLFDQCSREKGL

SEQ ID NO: 225277 - protein, 190 aa, Glycine max
  Clone ID: PAT_MRT3847_45455C.1.pep
PKKKDKKPRITAKPNKPAVVLVHGFAAEGIMTWQFQVGALTKKYAVYVPDLLFFGGSATNKPNRSPRFQAECLVAGLRKLGVEKCVVVGFSYGGMVAFKMAEMYPELVLGLVISGSILAMSESLSTTLLQELGVSSFSELLLPTSVKGLKALFSIAAHKKLRFPNRLLKDYLEVCLTRTLAWDSYSFINI

SEQ ID NO: 225278 - protein, 42 aa, Glycine max
  Clone ID: PAT_MRT3847_45456C.1.pep
ELWRLVTKKKNVGWHVSSYNVGYYGRHIIFVVLNPLACRLKM

SEQ ID NO: 225279 - protein, 34 aa, Glycine max
  unsure (1)..(34): unsure at all Xaa locations
  Clone ID: PAT_MRT3847_45457C.1.pep
FKYHRFGWGXXNRTDSWPSFSSYPRGFYGLINPF

SEQ ID NO: 225280 - protein, 48 aa, Glycine max
  Clone ID: PAT_MRT3847_45458C.1.pep
QNYHQPPPEKGLKMRKKKYVYLGKLTEERREENVSEEKRTRRRKRRGT

SEQ ID NO: 225281 - protein, 51 aa, Glycine max
  Clone ID: PAT_MRT3847_45459C.1.pep
GSSSKATQNEASDTQQRPPHQTGRGIIQNHAPADAGTTHPTRLNNSYEGTP

SEQ ID NO: 225282 - protein, 82 aa, Glycine max
  Clone ID: PAT_MRT3847_4545C.1.pep
LLGPATDHRLAKLLPHQLANQTRVPPRADSSFCSSAYGVLAAVSRCCSRPKGRFLCVIHLTAIGYTTSRSTCMCKACRHRTS

SEQ ID NO: 225283 - protein, 81 aa, Glycine max
  unsure (1)..(81): unsure at all Xaa locations
  Clone ID: PAT_MRT3847_45460C.1.pep
NLSHNKFXSFTALGPLRLLKSLKVLNNSYNELGSHSIDTTRYLSSSPVAHTEEFAKDRFEILTGSFSATKFWGVARCTQHS

SEQ ID NO: 225284 - protein, 119 aa, Glycine max
  unsure (1)..(119): unsure at all Xaa locations
  Clone ID: PAT_MRT3847_45461C.1.pep
ARAILVLVYCTVGISRGHIHPAGTFGIILARKVSMIQAIMYMEAQCLGAICRVGLAHAFSNFXFNMKRRGANSLAARYSTMYSYETADTIGTFAEIYSAVCGSCHTRNARXSHVPVLAP

SEQ ID NO: 225285 - protein, 49 aa, Glycine max
  Clone ID: PAT_MRT3847_45462C.1.pep
VNNTDNQSKFKPVNNDHVIMSIPGDYSRKPPIAGILVCLMWCIQFTNKK

SEQ ID NO: 225286 - protein, 69 aa, Glycine max
  Clone ID: PAT_MRT3847_45463C.1.pep
ITYTTFFFTNRQFLMSINSNIGKVNNYNLPFSFLVINLTISHYFQNFYPSLFIFLLSHHVLNTLIFNLL

SEQ ID NO: 225287 - protein, 59 aa, Glycine max
  Clone ID: PAT_MRT3847_45464C.1.pep
YLLQIHLYGTSLGGFLAQLFAQHRPRRVRSLVLSNTFLETRSFSAAMPWAPMYFSQILL

SEQ ID NO: 225288 - protein, 169 aa, Glycine max
  Clone ID: PAT_MRT3847_45465C.1.pep
MGKEKVHISIVVIGHVDSGKSTTTGHLIYKLGGIDKRVIERFEKEAAEMNKRSFKYAWVLDKLKAERERGITIDIALWKFETTEYYCTVIDAPGHKDFIKNMITGTSQADWAGLIIGSTTGGFETWIFKGGPNSEQALVLFTLGGKQNNWWLTKRVVLPPNFSKASFVK

SEQ ID NO: 225289 - protein, 447 aa, Glycine max
  unsure (1)..(447): unsure at all Xaa locations
  Clone ID: PAT_MRT3847_45466C.1.pep
MGKEKVHISIVVIGHVDSGKSTTTGHLIYKLGGIDKRVIERFEKEAAEMNKRSFKYAWVLDKLKAERERGITIDIALWKFETTKYYCTVIDAPGHRDFIKNMITGTSXADCAVLIIDSTTGGFEAGISKDGQTREHALLSFTLGVKQMICCCNKMDATTPKYSKARYDEIVKEVSSYLKKVGYNPDKIPFVPISGFEGDNMIERSTNLDWYKGPTLLDALDQISEPKRPSDKPLRLPLQDVYKIGGIGTVPVGRVETGVLKPGMVVTFAPTGLTTEVKSVEMHHEALTEALPGDNVGFNVKNVAVKDLKRGYVASNSKDDPAKEAANFTAQVIIMNHPGQIGNGYAPVLDCHTSHIAVKFAELMTKIDRRSGKELEKEPKFLKNGDAGFVKMIPTKPMVVETFSEYPPLGRFAVRDMRQTVAVGVIKNVEKKDPTGAKVTKAAQKKK

SEQ ID NO: 225290 - protein, 447 aa, Glycine max
  Clone ID: PAT_MRT3847_45467C.1.pep
MGKEKVHISIVVIGHVDSGKSTTTGHLIYKLGGIDKRVIERFEKEAAEMNKRSFKYAWVLDKLKAERERGITIDIALWKFETTKYYCTVIDAPGHRDFIKNMITGTSQADCAVLIIDSTTGGFEAGISKDGQTREHALLSFTLGVKQMICCCNKMDATTPKYSKARYDEIVKEVSSYLKKVGYNPDKIPFVPISGFEGDNMIERSTNLDWYKGPTLLDALDQISEPKRPSDKPLRLPLQDVYKIGGIGTVPVGRVETGVLKPGMVVTFAPTGLTTEVKSVEMHHESLTEAHPGDNVGFNVKNVAVKDLKRGYVASNSKDDPAKEAANFTAQVIIMNHPGQIGNGYAPVLDCHTSHIAVKFAELMTKIDRRSGKELEKEPKFLKNGDAGFVKMIPTKPMVVETFSEYPPLGRFAVRDMRQTVAVGVIKNVEKKDPTGAKVTKAAQKKK

SEQ ID NO: 225291 - protein, 66 aa, Glycine max
  Clone ID: PAT_MRT3847_45468C.1.pep
MTEPFEACQWTKLEPHFWELISPIEECGPNNGFEMWSSEWANQTSWHLSFLIDNSKQSTVFDILLG

SEQ ID NO: 225292 - protein, 91 aa, Glycine max
  Clone ID: PAT_MRT3847_45469C.1.pep
IRGPGGLVSPKGWWKTKKVVFSGPPLGMGKGFPGGILNFPLSGSLFFFRSKTKCPPPPNFFGLWGPLKKEGVGSLKKRNLYPLIRGGPIFF

SEQ ID NO: 225293 - protein, 203 aa, Glycine max
  Clone ID: PAT_MRT3847_4546C.1.pep
MATPSVLEVRPPALTSISEPLPFFDGTTRLYICYLCPFAQRAWITRNCKGLQDKIELVPIDLKNRPAWYKEKVYPTNKVPSLEHNSKVLGESLDLIRYIDANFEGAPLFPTDPAKREFGEQLISHVDTFTSGIYPTFKGDPIQQTSAAFDYLENALGKFDDGPFFLGQFTLADIAYVSFLERFQLVFSQIFNLVRFFFSNQCT

SEQ ID NO: 225294 - protein, 64 aa, Glycine max
  Clone ID: PAT_MRT3847_45470C.1.pep
ILYGDILSHGGRFQTLPGIIPTRLMMQRNREKANIALNSEDPLKKKIYVRRKKDKYLYSRERSA

SEQ ID NO: 225295 - protein, 117 aa, Glycine max
  unsure (1)..(117): unsure at all Xaa locations
  Clone ID: PAT_MRT3847_45471C.1.pep
PSRPPTRPEKVELKFSQEEXLTAWATEARPATTLSADGSAYXGALVHDRPGLSIPGETGIGVQWATINNMGAYGLNPGIAGPRVLGTTRQSIXQQTVWNQTATVRAPGTIDSSMHSI

SEQ ID NO: 225296 - protein, 275 aa, Glycine max
  unsure (1)..(275): unsure at all Xaa locations
  Clone ID: PAT_MRT3847_45472C.1.pep
RKYSVANSKASETRDSNSELCLTDKSHKSKRKGDIEFEMQLEMALSATTVECKDSKTEASANPDSSSFSCPSKRLKRVIGEDSSTSPQVISTAIGSMKVGSPLYWAEVYCSEENLTGKWVHVDALNLIIDGEDKVESMVAACKTSLRYVVAFAGQGAKDVTXRYCMKWYKIASHRVNSTWWDSVLKPLRDLESGATGGVAHLGTNQIISTESNMNDSVVPTRSSIEDIELETRALTEPLPTNQQAYKSHPLYAIEKWLTKYQVLHPKGPVLGFCS

SEQ ID NO: 225297 - protein, 42 aa, Glycine max
  unsure (1)..(42): unsure at all Xaa locations
  Clone ID: PAT_MRT3847_45473C.1.pep
VNIILEQFPVKAYLSRXPDXNWGXGHXNRPSTQAXXXVYKXR

SEQ ID NO: 225298 - protein, 52 aa, Glycine max
  Clone ID: PAT_MRT3847_45474C.1.pep
FSFIMYVLPAIVYDLNILTNVLGRRNIFHFFFLSFSPASTCGEAYPAIIVVK

SEQ ID NO: 225299 - protein, 99 aa, Glycine max
  unsure (1)..(99): unsure at all Xaa locations
  Clone ID: PAT_MRT3847_45475C.1.pep
IMDVVNAEHARIVEEDGVCAVMVLERVPANICDHGRMRSMSYPAVHKDIKRGRTMPVMGKVKTGHKVEDDTLEGIGINYVNXSQDLTLIDDANHMNKHN

SEQ ID NO: 225300 - protein, 47 aa, Glycine max
  Clone ID: PAT_MRT3847_45476C.1.pep
YATMGLRRITSGCSQESLCITTSNDVALCCIDDDISDCIYVYVGIHR

SEQ ID NO: 225301 - protein, 215 aa, Glycine max
  Clone ID: PAT_MRT3847_45477C.1.pep
IHLLQKDIQWPLGWPVGGFPGPQGPYYCGVGADKAFGRDIVDAHYKACIYAGINISGINGEVMPGQWEFQVGPSVGISAGDEIWAARYILERITEIAGVVVSFDPKPIKGDWNGAGAHTNYSTKSMREDGGYEVIKAAIDKLGKKHKEHIAAYGPIRGYFHDCRHNHSVEAMSKTCMFSPFGWKGTVMLFLVGFGLSLFLPFDWYYGWCLVGWCN

SEQ ID NO: 225302 - protein, 37 aa, Glycine max
  unsure (1)..(37): unsure at all Xaa locations
  Clone ID: PAT_MRT3847_45478C.1.pep
ARSQVSAPRVGRRGXPXSSYALNGNREXLVXRLSXXP

SEQ ID NO: 225303 - protein, 137 aa, Glycine max
  unsure (1)..(137): unsure at all Xaa locations
  Clone ID: PAT_MRT3847_45479C.1.pep
AXNEVXXARYXXXRIXXXXGVVVSFDPKPIQGDWNGAGAHTXXSTKSMRNDGGYEVIKTAIEKLGKRHKEHIAAYGEGNERRLTGRHETADINTFLWGVANRGASVRVGRDTEKAGKGYFENKEQGTRNKEQLCFSK

SEQ ID NO: 225304 - protein, 470 aa, Glycine max
  unsure (1)..(470): unsure at all Xaa locations
  Clone ID: PAT_MRT3847_4547C.1.pep
METPSACWDNWVGEALETLYSLKVLRSLRPICLRSSQPREFGADDDAFQVFDEMQHWDRSSVEVEIAETTFSRWMHDTPSSGDEIVCSATGGDGEAGASYEKFKKLILFSGNDYLGLSSHPTIGKAVAKAAQEHGMGPRGSALICGYTNYHRLLESSLADLKKKXGFAANMALMTAIGSIGTLLAGNSIPSEDEKIAVFSDALNHASIIDGIRLTERQKSVKVYVYRHCDMSHLNMLLSNCRMRKKVVVTDSLFSMDGDYAPMVELADLRKRHGFLLVIDDAHGTFVCGKNGGGVAEEFNCEKDVDICIGTLSKAAGCHGGFIACSKKWKLLIQSRGRSFIFSTAALVPVAAAGHAAIKVAKLEKWRREAIWNRVKDFHLLTGIPVTSHIISLVVGSEDKALQASRHLLQSGFHVTAIRPPTVPPNSCRLRVALSAVHTREDLENLAAALSRCINFQDTRIYDSNAYARL

SEQ ID NO: 225305 - protein, 356 aa, Glycine max
  Clone ID: PAT_MRT3847_45480C.1.pep
MSLLSDLINLNLSDTTEKVIAEYIWIGGSGMDLRSKARTLPGPVSDPSKLPKWNYDGSSTGQAPGEDSEVIIYPQAIFRDPFRRGNNILVICDTYTPAGEPIPTNKRHDAAKVFSHPDVVAEETWYGIEQEYTLLQKDIQWPLGWPVGGFPGPQGPYYCGVGADKAFGRDIVDAHYKACLYAGINISGINGEVMPGQWEFQVGPSVGISAGDEVWAARYILERITEIAGVVVSFDPKPIQGDWNGAGAHTNYSTKSMRNDGGYEVIKTAIEKLGKRHKEHIAAYGEGNERRLTGRHETADINTFLWGVANRGASVRVGRDTEKAGKGYFEDRRPASNMDPYVVTSMIADTTILWKP

SEQ ID NO: 225306 - protein, 81 aa, Glycine max
  Clone ID: PAT_MRT3847_45481C.1.pep
RPGGQKNYYKTQTLKKIGTKKDYGTLNFPYKKRPHIFFKKKIPINPKTGGAGGVFETPWNYLKTGKTPKKPSFHCHTRTKP

SEQ ID NO: 225307 - protein, 85 aa, Glycine max
  Clone ID: PAT_MRT3847_45482C.1.pep
PKGVTFLAVLICVSALSLSPSVAWEGQNNGLVRNFYKESCPQAEDIITAQVTLLYKRHKNTAFSWLRNIFHDCAVPSCDAEQLLD

SEQ ID NO: 225308 - protein, 49 aa, Glycine max
  Clone ID: PAT_MRT3847_45483C.1.pep
FFPQPWRALSRVNNKFKFNLSPQPLSFYLRYPNFQQEFPLFPHHVKMLQ

SEQ ID NO: 225309 - protein, 58 aa, Glycine max
  unsure (1)..(58): unsure at all Xaa locations
  Clone ID: PAT_MRT3847_45484C.1.pep
LACTRPGNGISYSALPYIRTPASXLKISSPDVEDNICNFANKGLTPSQIDDIIRDSHG

SEQ ID NO: 225310 - protein, 54 aa, Glycine max
  Clone ID: PAT_MRT3847_45485C.1.pep
ESPIIQTLCDACESAQAIVICASDKAALCLACDEKINLFELTGSHVQQAISYVC

SEQ ID NO: 225311 - protein, 83 aa, Glycine max
  unsure (1)..(83): unsure at all Xaa locations
  Clone ID: PAT_MRT3847_45486C.1.pep
SSLAFPLLXSSRFPCALAGXGFFFSAFLRALAFSGLCVCLAARLLLLSRPAPSLPGLPCLPSRSLPPLPSLSALPXAPVPPLP

SEQ ID NO: 225312 - protein, 190 aa, Glycine max
  unsure (1)..(190): unsure at all Xaa locations
  Clone ID: PAT_MRT3847_45487C.1.pep
MKKQLKGKGKNGDGEEKKEKKEKEKKKEKKDKDXETDTLKEKGKNDEGEDDEENKKNKKKDKKEKEKDHKKEKKEDGKEEGEKEKSKVEVSVRDIDIEETTKEGEKEDKEKDDGKEVKEKKKKEDKDKKEKKKVTGKDKTKDLSALKQKLEKINGKIQPLLEKKADIERQIKEAEAEGHVVNGKDKDEVQ

SEQ ID NO: 225313 - protein, 76 aa, Glycine max
  unsure (1)..(76): unsure at all Xaa locations
  Clone ID: PAT_MRT3847_45488C.1.pep
INNNKGSXGCPLFGLTNFLDCPPIHVLIEPFHPNNADVMAKPPCARSFLFLEIHTTGXSFWDVEAIKHPPKITIFY

SEQ ID NO: 225314 - protein, 274 aa, Glycine max
  Clone ID: PAT_MRT3847_45489C.1.pep
VRIGQLFRSKNDGSITSRRFVCSKEGFQHPSRVGCGAYLRIKRQPSGKWIVDRLRKDHNHDLDSEKVGRAKSLPASNILAEEVDTGLLNGDLFRIDNYPVPRGGRQNHIRSEWYGILLEYFQSRQAEDTGFFYAMEVDNGNCMNIFWADGRSRYSCSHFGDVLVLDTSYRKTVYLVPFATFVGVNHHKQPVLLGCALIADESEESFTWLFQTWLRAMSGRLPLTVIADQDIAIQRAIAKVFPVTHHRFSLWQIKAKEQENMGLMGNGFTKDYEK

SEQ ID NO: 225315 - protein, 77 aa, Glycine max
  unsure (1)..(77): unsure at all Xaa locations
  Clone ID: PAT_MRT3847_4548C.1.pep
MDRYWLSTQPPLQLAPSKIWDVPVVQTGRRILKCELIKCDVQHGDNIXDFPPLRQVQSDKATTEITSSYKGLIANIL

SEQ ID NO: 225316 - protein, 87 aa, Glycine max
  Clone ID: PAT_MRT3847_45490C.1.pep
MVCAVGFILKHPFNPPPFLVPPFKVLFSRGFFFSFPCKTNGLASCFFALFKIFGLKKGLLIQSFFFPPIFFSLPLCFKKKNVLCSLH

SEQ ID NO: 225317 - protein, 541 aa, Glycine max
  Clone ID: PAT_MRT3847_45491C.1.pep
MKSLCLGPFLAASAPVGRRAYGGHLSRKCFQKQLHFHSRCVAFSSFICSATISVMPELEEKQVFDGEKANLLVKDLRKSFDSGMTKSYGWRVSQLEAIAKMLEEKEKEITEALYKDLGKPRLEAFITEISQAKSSCSEALKELKEWMKPEKVNTSITTYPSSAEIVPEPLGVVLVISTWNFPFWLSMDPVIGAISAGNAVVLKPSEISPATSSLLANLIEQYLDNSTIRVVEGAIPETSALLDQKWDKILYTGSARVGRIVMAAAAKHLTPVILELGGKCPAVVESDVNLQVTARRIIAGKWACNSGQACISVDYIITRKEFAPKLVDALKEELEQFFGKDPMESKDMSRIVSPNQFARLVNLLDEDKVSDKIVLGGQRDEKKLKIAPTIILGVPEDAMIMQEEIFGPIMPIVTVDNIEDCYSIIKSKPKPLAAYLFTNNEQLKKDYVDKISSGGMLINDAVIHVATRGLPFGGVEESGMGCYHGKFSFDSFSHRKSVLYRSFDADSTIRYPPYTPQKEKLLKALISGNIVQIILSLLGWS

SEQ ID NO: 225318 - protein, 81 aa, Glycine max
  Clone ID: PAT_MRT3847_45492C.1.pep
RRRMRMKPPDVLGLSMEMRVFAERFIGMESLKMEMIKETDRCRLEMEKKGIQMILESQRRIVDSIGKAFGSSKRVKITHQN

SEQ ID NO: 225319 - protein, 153 aa, Glycine max
  unsure (1)..(153): unsure at all Xaa locations
  Clone ID: PAT_MRT3847_45493C.1.pep
PARTARPDLAAVLLTGQQDKPRRFXARLDKNTPPNKEGKDEKQTKAPRRTAEEXETPKGAKQDHKREQAKRALPKNTXGGTTLREERGTNSXTHRLKGMMXDLHRTHFIKGMIXMVATAGITENTGIALACAMNSFFRGRASSDIYTICSQDC

SEQ ID NO: 225320 - protein, 66 aa, Glycine max
  Clone ID: PAT_MRT3847_45494C.1.pep
CSLETMFKIQCITCTTYLRGDYHNIGLLLLQSGHHSVHMLCHMQDISSADSIDCFECMDWQTDDST

SEQ ID NO: 225321 - protein, 78 aa, Glycine max
  Clone ID: PAT_MRT3847_45495C.1.pep
KKTLQWHECKNPKSFQKSVKCRWSICLGPPHIPLLPLLPGKQKNPFPKGKWKEKGLCLMVKHGGLAMGFLELPLQQFP

SEQ ID NO: 225322 - protein, 60 aa, Glycine max
  Clone ID: PAT_MRT3847_45496C.1.pep
PIWSMLPIFFVKILVFIGCHLSRDQKYSRYEHNYHKPNLGTHFSKQTVNHKPFGRWVPPG

SEQ ID NO: 225323 - protein, 77 aa, Glycine max
  unsure (1)..(77): unsure at all Xaa locations
  Clone ID: PAT_MRT3847_45497C.1.pep
IGFHFXXAYDLXPXIXFPXIHXQXPFQXYAIXXXILXXLAXXSXXXPXXVIXXXCCXEXNTKXLEPNSEXFVRVXAX

SEQ ID NO: 225324 - protein, 78 aa, Glycine max
  Clone ID: PAT_MRT3847_45498C.1.pep
KGKICMLTKKGLCYSNFFTHLTPFIGFFFITFDTSITFLNVSYLQTSSICRLTIQVMTRKAGCIYTLSVELENLRLLN

SEQ ID NO: 225325 - protein, 165 aa, Glycine max
  Clone ID: PAT_MRT3847_45499C.1.pep
KVKTLSHRNLKSHFFFFGCHSFSPNLLSTCKSQGKLQGEKGSPRKLNQFVEFHKMKPYNTLYDNTDSHKQCRWRERVTQHNTLLQWTQMRRDEQWLKAPKMKLVQMCLSQWKERQRDKRKLKRVIFFFLRGYHEKLRMCNINLVRAGTEVLVYHYYYYILFLADC

SEQ ID NO: 225326 - protein, 100 aa, Glycine max
  Clone ID: PAT_MRT3847_4549C.1.pep
FLRKEINKKGPFNKKFFFKKTNLNKVCLNNNLFNNLYLLGTKIFLKKKFLVPPRGLNCIPLKEMPLNFFSPKKFFYLQKGRSPPKCPIPTPPNIYLKPFP

SEQ ID NO: 225327 - protein, 185 aa, Glycine max
  Clone ID: PAT_MRT3847_454C.1.pep
MKVSQYMLLVVLVWHSSLCANAQWNNPINYSPFDETNKGGNYSKVTWSVSLSCVFVSILLVAATEAIEKCPIFEYSTAKELKVGNGAEECSVCLVEFEDSDTIKMLPKCQHVFHQNCIDTWLPSRMTCPICRQKLTSQDTVIDIDDDDVVPMEQLEHDIGTEITESEVAVTDETDTGTVVEQVLV

SEQ ID NO: 225328 - protein, 136 aa, Glycine max
  Clone ID: PAT_MRT3847_45500C.1.pep
LIPCRLQLGRSAAIDVSRRVDEGINEVWTLLYTIKESWWNFFYKYSTNCMLSLTKYVDSDGNLCMVKLSLDETDVYSNWGDFSFTIQRTGTSSFLQMHPNMVWADFQSIMSMKTNNSVDACGVSTQTVLYLYRRGK

SEQ ID NO: 225329 - protein, 521 aa, Glycine max
  Clone ID: PAT_MRT3847_45501C.1.pep
MSVRDHTQKIDLVETMKELWAQMGSLMATIVFMYTIFERFFPPHLREKLQAYTQKLTNHFNPYIQISFPEFSGERLKKSEAYTAIQTYLSANSSQRAKRLKAEVVNDSQTPLVLSMDDNEEITDEFHGIKLWWSANKVSNNPQRYNPFSYYGSSDEKRFYKLTFHKRHRDIVTMSYIKHVLDEGKDIEMRNRQLKLYTNNPSSGWYGYKQSKWSHIVFEHPATFETLAMDRRKKEDILKDLVKFKKGKDYYAKIGKAWKRGYLLYGPPGTGKSTMIAAIANFMNYDVYDLELTAVKDNTELRKLLIETPSKSITVIEDIDCSLDLTGQRKKKKEENEDEEQKDPMRRNEEESSKSSKVTLSGLLNFIDGIWSACGGERIIVFTTNYVEKLDPALIRRGRMDKHIEMSYCCYDAFKVLAKNYLDVESHHLFGAIGGLLEETDMSPADVAENLMPKSVDEDVEICLHKLIKALEEAKEEKARKKAEEEEEARLKEEKVKEESTQMEEKHKGKTGEDVKENGFH

SEQ ID NO: 225330 - protein, 150 aa, Glycine max
  Clone ID: PAT_MRT3847_45502C.1.pep
MADILSEEQIVDFKEAFGLFDKDGDGCITVEELATVIRSLDQNPTEEELQDMISEVDADGNGTIEFDEFLSLMAKKVKDTDAEEELKEAFKVFDKDQNGYISASELRHVMINLGEKLTDEEVEQMIKEADLDGDGQVNYEEFVKMMMTVR

SEQ ID NO: 225331 - protein, 49 aa, Glycine max
  Clone ID: PAT_MRT3847_45503C.1.pep
MALFGDIWISEVSFLIILSKSWGKFPPFCMSPLKNWSLVESDWVSKWFS

SEQ ID NO: 225332 - protein, 53 aa, Glycine max
  Clone ID: PAT_MRT3847_45504C.1.pep
KKKYRKKYASICMPRISKENNSEITISNIHKIIISLAFQNTSNRIRKTGKKML

SEQ ID NO: 225333 - protein, 88 aa, Glycine max
  unsure (1)..(88): unsure at all Xaa locations
  Clone ID: PAT_MRT3847_45505C.1.pep
AHAYDHVPIILTDNDLSTLYPAIIRDDLMHKFYXPPTIYDHIXIYHEILHPDNFPKDYIVNLADTLPDQSIYNFDTLMTCTYDDEQLY

SEQ ID NO: 225334 - protein, 75 aa, Glycine max
  Clone ID: PAT_MRT3847_45506C.1.pep
IFLRHTNCPIHIHPNSRDKGYTQMPIVNFNHPRCEFVHIWIGQMRLNGMGLNSFVWIYKKRMEQEGMGWNRYHCS

SEQ ID NO: 225335 - protein, 32 aa, Glycine max
  Clone ID: PAT_MRT3847_45507C.1.pep
IKWTASTSRHSVHQALSIHIRNTSGTHISGNS

SEQ ID NO: 225336 - protein, 81 aa, Glycine max
  Clone ID: PAT_MRT3847_45508C.1.pep
PMKLNIIWNLFYGPGTFFNLSFRTCGACIKCISSFSTREPNTKNFSGIIIRDVSMYFSKNTFKRKKKVLPQVKMNFLLDNL

SEQ ID NO: 225337 - protein, 45 aa, Glycine max
  Clone ID: PAT_MRT3847_45509C.1.pep
FDLLYVFSFTINSDKDSEVLPSLGALEEKNNELTCIILFLKISYF

SEQ ID NO: 225338 - protein, 80 aa, Glycine max
  unsure (1)..(80): unsure at all Xaa locations
  Clone ID: PAT_MRT3847_4550C.1.pep
DPRVRTTPEYKPRLVMIHASVYPEKFEGDKASKLMQLARXLSPDDMKVISDVQXLAGSSRRKSXFAGGFSLKFSDQKTRQ

SEQ ID NO: 225339 - protein, 62 aa, Glycine max
  Clone ID: PAT_MRT3847_45511C.1.pep
APDQTPPAQCLIKGLVFFGPPVGWVFKNKRPSPLSNPLFGGLSWIFPSCWVKDLCQGCGTLL

SEQ ID NO: 225340 - protein, 96 aa, Glycine max
  Clone ID: PAT_MRT3847_45512C.1.pep
NKKPGGSCSLSNTIKLGKQIETEAGNWFMEFIEKALETGLKKTKDASDGDVRKVPQSLILKVMNWVEVEQCQSNKRPGHPKAAQVARKLRIKMKNP

SEQ ID NO: 225341 - protein, 83 aa, Glycine max
  Clone ID: PAT_MRT3847_45513C.1.pep
GGCSLSERRCYSMGSYRYVVRDLNLQVVLSHSQSQDDDDDVLENGNVEGKRIGDSTKGESFSVSKICFWSKKTRFHGSNAPFP

SEQ ID NO: 225342 - protein, 84 aa, Glycine max
  Clone ID: PAT_MRT3847_45514C.1.pep
KKKGAPHKAPPAKSQKTPTQKIWAQLHSKNKITPNKTRVQDLTQSPKEPSKKKMGAPTKTKNKKKSPMTPQRENGHPPTNCYSI

SEQ ID NO: 225343 - protein, 132 aa, Glycine max
  Clone ID: PAT_MRT3847_45515C.1.pep
MGFSEKAQVEGAFDSDTSNNNNNRKWVIAGIALRAPLKPIYTTMIPMEKEQKEEVEIETTEDCSSCSSSTTTPTSVESKIPTPLTCPPAPRKRKPALKKCYNYCGGGGGVVREFFTPPDLETVFIRHVEKAI

SEQ ID NO: 225344 - protein, 100 aa, Glycine max
  Clone ID: PAT_MRT3847_45516C.1.pep
TLGIQVSRRPRMSFTKFTHALLKHSQTGQRPSMECAKREKRELSDNLFENFYLFRKDFSFVVNFVKSRKSKTQNDFYKMYSHAIKAPPSKSETHHGVYET

SEQ ID NO: 225345 - protein, 78 aa, Glycine max
  unsure (1)..(78): unsure at all Xaa locations
  Clone ID: PAT_MRT3847_45517C.1.pep
GRGSPGLVFVIHPLGCFGPIPRRPLPGLGCLALAVEPGGSGGALEGSLGWCIGKSWGVLXDKMXXXXCXVLCXLXXXR

SEQ ID NO: 225346 - protein, 79 aa, Glycine max
  Clone ID: PAT_MRT3847_45518C.1.pep
NEEDSWVWKSNESGGYNVRDAYMLILHDGLVDEHANILKQVWKASIPSNVAAFSWSLLQDRIQTKENLSKRRIELTDND

SEQ ID NO: 225347 - protein, 55 aa, Glycine max
  Clone ID: PAT_MRT3847_45519C.1.pep
MNVQEAVNVSLGNLLTYPFVRDGLVNKTLSLKGGYYDFVKGSFELWGLQFGLASS

SEQ ID NO: 225348 - protein, 122 aa, Glycine max
  Clone ID: PAT_MRT3847_4551C.1.pep
ALRLRIFQAKLSSDQIELDEINLNSKSTCPSYNQLRCHSILKSYANMSVRVSIHSHNHNGRTYINLPNEYFFPLKIIRKYLHENDVHSMYQSIRPYFDWPTTVCISTFKCVCIYLSYRTFQS

SEQ ID NO: 225349 - protein, 55 aa, Glycine max
  Clone ID: PAT_MRT3847_45520C.1.pep
ALDGWLIPFECSRRQGSVHLLGASSRGFVYRGQVSPVLVINFSFCDVNGVVGYLI

SEQ ID NO: 225350 - protein, 85 aa, Glycine max
  unsure (1)..(85): unsure at all Xaa locations
  Clone ID: PAT_MRT3847_45521C.1.pep
LMELSLLLIKQGIKITFVNTKDNHERIMSALPSGNDLSSQISLVWISDGLESSEERKKPGKSSETVLKVMPXKVEDLIESIDGSE

SEQ ID NO: 225351 - protein, 349 aa, Glycine max
  Clone ID: PAT_MRT3847_45522C.1.pep
GVGSGGVGGGGGGDWAMRLRGYKLVQVSLFQKPIVKLKLGDLMAATSNFSEENVLFTTRTGATYKADLPDGSALAVKRLSVCRIGEKQFGMEMNRLGQVRHPNLAPLLGYCVVEEEKLLVYKHMSNGTLYSLLHRNGGDALDWLMRFRIGLGAARGLAWLHHGCHPPIIQQNICSSVILVDEEFDARLMDFGLARLMASDSNGSFVNGDLGELGYIAPEYPSTLVASLKGDVYGFGILLLELVTGRKPLDVSNGEVEFKGSLVDWVNMHSSSGRIKDCIDKAISGRGHDEEILQFLKTAMNCVVSRPKDRWSMYQVYHSIKSISKEQSFFEHDDEFPLIFGKPENEVVT

SEQ ID NO: 225352 - protein, 312 aa, Glycine max
  Clone ID: PAT_MRT3847_45523C.1.pep
MGTGWRRAFCTRDPASTISDKHPGSPSPSPRTCTRLGFLSGGSNPSTPRLRCTTKAETASQTVTLSDSPRVQSKNTPRATKSPSVSNPTSPRSPLKLSLFKNSFKFRSSCGICLNSVKTGQGTAIYTAECGHAFHFPCIAAHVRKHGSLVCPVCKATWKDVPLLAAHKNLAPESAAKDDVVAVQRNNNASPVFKTYNNHVEQPSKHSDSTRSYNDDEPLLSPTSGGRIIPIPEADENAEDDEDEDPGEFQGFFVNPKNSSSSKSYSDSLQTSDGDSRTVQVKLMPECAVISASRTHETYALVLKVKAPPPPP

SEQ ID NO: 225353 - protein, 121 aa, Glycine max
  unsure (1)..(121): unsure at all Xaa locations
  Clone ID: PAT_MRT3847_45524C.1.pep
GRVDTSYINRIKALIARDQTRQTDGTGPNRNKSEKNREDRYANGTCRNSGSAIPVVKAVTTGAEPLILRITVAINEFNSVNRLNWLGGMVAXGKVGNHGVVGLKLTPCHFKVHWIDLASSS

SEQ ID NO: 225354 - protein, 265 aa, Glycine max
  unsure (1)..(265): unsure at all Xaa locations
  Clone ID: PAT_MRT3847_45525C.1.pep
MSFQDIQGGPNPPSRRNQSPSQAVAAGIFQINTAVATFRRLVDGVGTVKDTPEHRQKLHNTRQRILLLVKDSSAKLKSLTESDRDANANASKKIEDAKLARDFQTTLQEFQKVQQLASERESAYTPAAPSSLPTSSGSGEESVGIDVESQPFIREHKRQEILLLDNEISFNEAMIEEREQGIREVEEQXGQANEIFKDLAVLVHDQGVVIDDIHSNIDASAGATTQARVQLAKASKSVKSKTSWCWWLLAIFVVVLVILLVVLIF

SEQ ID NO: 225355 - protein, 109 aa, Glycine max
  unsure (1)..(109): unsure at all Xaa locations
  Clone ID: PAT_MRT3847_45526C.1.pep
FEIIKKINQGTYGVVYQGWDXKTGELIALKKGKMNLERDGFPMSSLKKINLLLAFNHSSLGNGKEVVGDDFDGTFMGMEPIEFYLKGLMEGKKPSFYLNEIKSLVPPLL

SEQ ID NO: 225356 - protein, 60 aa, Glycine max
  Clone ID: PAT_MRT3847_45527C.1.pep
MHLLLRLKWLQMDPINSRYSLILPHNPSLQAMATTNHVIHIYSLPHELHCLSWDINCPYL

SEQ ID NO: 225357 - protein, 70 aa, Glycine max
  Clone ID: PAT_MRT3847_45528C.1.pep
TGSGLAPLNHAIQRRVPIFNVEEVGGTVATDLDGKRVENMAPPVYDPVAAERMILLVADWLTKRFEYLIG

SEQ ID NO: 225358 - protein, 197 aa, Glycine max
  unsure (1)..(197): unsure at all Xaa locations
  Clone ID: PAT_MRT3847_45529C.1.pep
NKCSNAPDVGFLXCSRACSSSLKTLKLLDCYTIGDETILSLAEFCGNLETLIIGGCRDVSADAIRSLAAACGSSLKNLRMDWCLNISDSSLSCVLSQCRNLEALDIGCCEELTDAAFQLLSNEEPGLSLKILKISNCPKITVAGIGIIVGKCTSLQYLDVRSCPHITKAGLDEAGFHFPECCKINFNGSVNEPVVLL

SEQ ID NO: 225359 - protein, 42 aa, Glycine max
  Clone ID: PAT_MRT3847_4552C.1.pep
CLYQFRISMHLPEYQVVYLHQPPYSNKCSMRAIFGQSSPDAW

SEQ ID NO: 225360 - protein, 189 aa, Glycine max
  Clone ID: PAT_MRT3847_45530C.1.pep
MAPATLSLSLLLLFSLSIAVTVRSSDYDYDCVYTAYVRTGSVLKGGTDSKIGLKLYDKYGYYIYIKNLEAWGGLMGKGYDYFERGNLDIFSGRGPCLDGPVCAVNVTSDGSGSHHGWYLNYVQVTSTGPHLSCAQDQYEVEQWLALDTSPYQLWAVRNHCRYSLDRAQPVSERPGSGSGSAFSILNARA

SEQ ID NO: 225361 - protein, 46 aa, Glycine max
  Clone ID: PAT_MRT3847_45531C.1.pep
SVPPSSYRLCVKAANLHQLFPIHVTEALKHSLGTFDRRSKIICNDA

SEQ ID NO: 225362 - protein, 133 aa, Glycine max
  Clone ID: PAT_MRT3847_45532C.1.pep
MVTRAAAAASSWLRHRRIRYFFLVLCSPLLLLVVCAALPFLCAAELCLRRRGSLWGKLLRRGDAADRLRRCEEGCCEEEREEEKGLLHRYLEDQLLLVGSMYECGEEEEEEDSRKVEDIERIGSTSSRIPLLR

SEQ ID NO: 225363 - protein, 60 aa, Glycine max
  Clone ID: PAT_MRT3847_45533C.1.pep
KEAPKNEAKIKVVGLFPQQLLLQVLVYSKRGFCFQMLRNSLMGFSNSWLTAKKMLLPRIN

SEQ ID NO: 225364 - protein, 41 aa, Glycine max
  Clone ID: PAT_MRT3847_45534C.1.pep
THSLHTLTAIPLSTSLAKLSSYSLFIPSYIDFHFYLIFYDF

SEQ ID NO: 225365 - protein, 160 aa, Glycine max
  unsure (1)..(160): unsure at all Xaa locations
  Clone ID: PAT_MRT3847_45535C.1.pep
SLGGNLCTGPVGGGFFLPPPKKTPGATPLTRPKKKKRRPPKKPPPPRGNXEKNPLIYPLPGRGEKKTPPPPKPKGXGPPPEEPKGGPPRGGFLAPEQTKKNPPGQGVPPPRGQGAPWEGGGPFFSKTKNTLEGALAAEGKQNRGFPVFFGSQTPPPPPPG

SEQ ID NO: 225366 - protein, 35 aa, Glycine max
  unsure (1)..(35): unsure at all Xaa locations
  Clone ID: PAT_MRT3847_45536C.1.pep
ITYYILFSKCKRTLINQNCKSLTYLVDDXPXPFVN

SEQ ID NO: 225367 - protein, 69 aa, Glycine max
  Clone ID: PAT_MRT3847_45537C.1.pep
VVNCVMVSVYCQFEVVEFVAAGRMARASMRCLPVDGCGGCYVGGGFFTSVVHVASIHRFRAQCHLRLLD

SEQ ID NO: 225368 - protein, 175 aa, Glycine max
  Clone ID: PAT_MRT3847_45538C.1.pep
QDLSVTGSHLEKPEMSYLKTEYVGAVKESKGQDDDTPNGSDSSNQGKGPTSPNIIDKNSDMELEYGIVDALEVARLVAQEVERECVSPIKQGHGQVSYKVNSTTNGSDSFKWGNGPKSPNVIDKSSDIELEYGIVDALEVARQVAQEVEREVCSSSSEKISEGGIRQAASPDFVG

SEQ ID NO: 225369 - protein, 134 aa, Glycine max
  Clone ID: PAT_MRT3847_45539C.1.pep
QFQHPKKHLRASTSKGGTGRYNNNTTTSKYVGVRQRASGKWVAEIKDTTQKIRMWLGTYETAEEAARAYDEAACLLRGSNTRTNFITRVSLDSPLASRIQNLVNNRKGTKTKQEQYVVETCDTRIKSNRHESIA

SEQ ID NO: 225370 - protein, 122 aa, Glycine max
  unsure (1)..(122): unsure at all Xaa locations
  Clone ID: PAT_MRT3847_4553C.1.pep
TPRWEILSPVGRLQAEHQKQVRAFXEKVLERPQKPKETPAREAMGAQGFFSKFPVGPKVPDSPPSQTSNFAPGPAPFVRSPEAFETNSDPAKKGGPPSSPREEGPPPGDWAPPVGWFFLNFP

SEQ ID NO: 225371 - protein, 30 aa, Glycine max
  Clone ID: PAT_MRT3847_45540C.1.pep
NSFLSDQVTNYILLFATRNGTISKNSFKLY

SEQ ID NO: 225372 - protein, 95 aa, Glycine max
  unsure (1)..(95): unsure at all Xaa locations
  Clone ID: PAT_MRT3847_45541C.1.pep
QSASLLCLFLSLAILLASGSAASATARSXXPSHHVSTFNRSLFPSTFLFGIGSSSYQAEGAASVDCRGPSICYTYTRQHTEKIWDHSTGDIGAYF

SEQ ID NO: 225373 - protein, 70 aa, Glycine max
  Clone ID: PAT_MRT3847_45542C.1.pep
CCFISVVSNNIWCLDVHVDSLRATICVGVTRLSLVCNSWQRYIEQMFIRSTGNTLRMSYSMRTVSNYPKA

SEQ ID NO: 225374 - protein, 59 aa, Glycine max
  Clone ID: PAT_MRT3847_45543C.1.pep
KCSFLRVLIFSFSLLVYYFFFGPIYPLYAHPDLGLVFFQKNKKKKKKIIVRSTPPSLCL

SEQ ID NO: 225375 - protein, 103 aa, Glycine max
  Clone ID: PAT_MRT3847_45544C.1.pep
FCFSFSLCVCLFQVQTSNPSRSLFNLSCSFSVSHFAYVTVFGVFQFSFTPRFLGFWGYFRFGVIIIKEIQGNQLIWWRTMTEEKSGGCPLRFFTSVQSSVARL

SEQ ID NO: 225376 - protein, 67 aa, Glycine max
  Clone ID: PAT_MRT3847_45545C.1.pep
NKIKAQSCLALLQLIHVEILSFAYNCCKFFCQHGYIFKEIIITKLQSTGYCQHSLPVIFGHPNILNL

SEQ ID NO: 225377 - protein, 419 aa, Glycine max
  Clone ID: PAT_MRT3847_45546C.1.pep
MKPKSIRIRNLPTHLLLIAVCLFTSSSASKIGENCGSDNKCDAGLSCQTCPANGNTRPRCSRTQPLSPTSKVKGLAFNRYSWLTTHNSYALAGARSATGSVIVAPMNQEDKVDEQLKNGVRGFMLDMYDFQNDIWLCHSFQSKCFNFTAFQPAINVLKDMRTFLDGNPSEIITIFIEDYVTAPQGLTKVLRDSGLSKYMFPVSRMPKNGEDWPTVDDMVQKNQRLVVFTSKSAKEASEGIAYQWTYVVENQYGDDGMKAGSCPSRAESPAMNTKSRSLVLVNYFHSAPNRSQACADNSAPLLDMMKTCHEAAGNRWANFIAVDYYQRSDGGGAPLAVDEANGHLTCGCDNIAYCKENAKSGTCDVPPISPPPPATETPSTGNQQTQNNNHTNNAYIGRTAKLMQSVVGILATTTFLAWL

SEQ ID NO: 225378 - protein, 93 aa, Glycine max
  unsure (1)..(93): unsure at all Xaa locations
  Clone ID: PAT_MRT3847_45547C.1.pep
RSDGGGAPXAVDEANGHLTCGCDNIAYCKENAKFGTCDVPPISPPPPATETLSTGNQQTQNDNHTNNAYIGRTAKLMQSVVGILATTTFLAWL

SEQ ID NO: 225379 - protein, 105 aa, Glycine max
  Clone ID: PAT_MRT3847_45548C.1.pep
PPRQTGEFHGPGGQAFFQGSRSLLFKKGSSTCHWRVACKFHPPLGGCPKKNTPPQGRFVTSAPVLNLNPRFQLQIKNKSFFAPGFKLKISFFFPCMLKALVVCGQ

SEQ ID NO: 225380 - protein, 286 aa, Glycine max
  Clone ID: PAT_MRT3847_45549C.1.pep
MGFAVWEPPHGHYKMLKYPWKNYVKLSGALRHCAFMVMAMHGCILSEIQAPAEKRQVFRSELQRVGSEGAKVLRELGNKVKKMEKLGRGDLLYEVHEAAEELQQKIDKKSYLLVNSESWEIGNRPREDQETALQQQGLFNMDEERKILEYKSLSEAVLDLRTVQVPNTWEGNVTLGNNPGVPATDASENMFRKKIYWPSHIYYNKSKSEAEEGQESKTYESASALSLTTFTSLLIEFVARLQNLVDSFEELSEVANFVDPLEQQAPVAIASHGFWTRLFNCCKFKD

SEQ ID NO: 225381 - protein, 164 aa, Glycine max
  Clone ID: PAT_MRT3847_4554C.1.pep
MTQIADVWSCGVTLYVMLVGAYPFEDPEEPKNFRKTIHRILNVQYSIPDYVHISSECRHLISRIFVADPAKRISIPEIRNHEWFLKNLQSDLMDGNTNNNQFEEPDQPMQSIEEIMQIIKEATIPAAGSQSLNHDLTGSLDIDDDMDSDPDLDLDSSGEIVYAM

SEQ ID NO: 225382 - protein, 179 aa, Glycine max
  Clone ID: PAT_MRT3847_45550C.1.pep
MFHFLQSIRILLLIAICLFTSSSASKIGETCGSDNKCDAGLSCQTCPANGNTRTRCSRIQPLSPTSRVKGLPFNRYSWLTTHNSYALAGARSATGSVLVAPINQEDTVAEQLKNGVRGFMLDMYDFQKDIWLCHSFQSKCFNFTAFQPAINVLKDMRTFLDGNPSEIITIFIEDYVTAP

SEQ ID NO: 225383 - protein, 467 aa, Glycine max
  Clone ID: PAT_MRT3847_45551C.1.pep
MAETPTLRIHEVCPISPPQETPSTTIPFTFFDVLWLRLPPVERLFFYSFPNPTTTSSFFDTTILPNLKHSLSLTLHHFPPLAGTITWPLHTPLPLITYTPGNSIPFRIAESNADFNTLSSNLSEVNNHRRNLIPHLPTSHEEASVLALQLTHFPNQGYSIGITSHHAALDGKSSTLFMKSWAHICSYLNTSPEEPLLFSLPKHLTPSFDRSVIRDPLGIGEIYAKSWTSFGGATNDRSLNVWDTLGGNQTDLVKGLFELTPLDIKKLKKLAESKFVVGDNKKKVRVTSFTVTCAYLLSCAVKAEQPNCERVPFVFNVDCRARLDPPIPETYFGNSVVSLLASAKREELLGEEAFFKSVIGISEELNGLEGDVLNGADKWIPKIQSVVSETPRLFSVAGSPRFEVYGIDFGWGRPEKVDVTSVDKTGAFSLSESRDHSGGIQIGLALTKNQMEAFSRVFAQGLESLES

SEQ ID NO: 225384 - protein, 79 aa, Glycine max
  Clone ID: PAT_MRT3847_45552C.1.pep
PPEQAPEGPAPVWDWLKKNVSAEVSFKTRIFYGGAVNAGPSVGLPKQKKIYGFFGGGGSIKGPGFAPLIHSGPPQKGGG

SEQ ID NO: 225385 - protein, 65 aa, Glycine max
  Clone ID: PAT_MRT3847_45553C.1.pep
VENGIPTSTPSSDGDPNVNGENVQAASTGNPAPAPAPPEAPLSPAGVSETTAPSPPTVPMSDPFI

SEQ ID NO: 225386 - protein, 41 aa, Glycine max
  Clone ID: PAT_MRT3847_45554C.1.pep
LFSDCPKALWFCSSLGKFCQYKLLSTNLCNVKIIFYSLICE

SEQ ID NO: 225387 - protein, 917 aa, Glycine max
  unsure (1)..(917): unsure at all Xaa locations
  Clone ID: PAT_MRT3847_45555C.1.pep
MPPALSDPLSASAASSDAVLQRSAPPENRRFGDLRGLQWRINLGVLPSSSSTSIDDLRRVTANCRRRYASLRGRLLVDPHMPKDGSSSPNLVMDNPLSQNPDSTWSRFFRNAEMERMVDQDLSRLYPEHGNYFQTPGCQGILRRILLLWCLRHPECGYRQGMHELLAPVLYVLQFDVGCLSEVRKLYEDHFTDRFDDLFCQENDLSYSFDFRKSSDLMEDEINSNGNATKIKSLDELDPKIQNIVLLSDAYGAEGELGVVLSDKFIEHDAYCMFDALMNGARGSIAMADFFSYSPXTGSHTGLPXVIEASAQTVMGSMRNIGQSVLDHIQVIECAFQQDRGPVASLVNMSKMLVAGNAQLNAMSAPEELRKICIICCLSVDSSLQASSDVDLGVEPQYFALRWLRVLFGREFSLSNLLIIWDEIFSSDNSKLEKHAEDNADSGFRIFNSSRGAFISAMAVAMMLHIRSSLLAAENPTTCLQRLLNFPENINVEKLIEKAKSLLALALSTEISSSMPLLVEYHNQGKSAIARSRTLSSESISPKTPLNLVPDSYWEEKWRVVHKAEELKQDGVEKQVPTRKKGWTEKVKLSLKRTESDPSSSRTKSGKKESKLPVRRCLLVDLSKELGFEEDTEKLCCHDNLSATVEEEQREDGSEGSNNYSPEDRCLSQNTSSEENSPVISCPASPPNEANDHKDDSQKSSVGSNLSLDIINETSLSSSPIDSPLPISDHPENGPQTPGRNNINNSAGNSTTNSERKLNKFQWLWKFGRNNGEFMSEKGGDTSEAAKPANNCNNQSNTTPSSTANNCNNHSNTIPSSTAKNCNNQSNIIPSSTANGHRRSVSCQGESTDQNVMGTIRNIGQSMLEHIRVIECAFQQDRGQGASLDNMSKNAVVGKGQVNAVSALKELRKISNLLSEM

SEQ ID NO: 225388 - protein, 154 aa, Glycine max
  Clone ID: PAT_MRT3847_45556C.1.pep
GSKEAIILYHKKFSYVQTYFYATASLQKYQIHIWKQFPGLKFLYTTCQNKNNKKNTTNHIKYNLREIPNLEVADNQHGISSVRPSAFLHHREVEQLCQIRYIFFKPQNKHTQSLRDRTTKRQKSKLRLGRHQIISGVFNLHCINSVCRIRNFNI

SEQ ID NO: 225389 - protein, 173 aa, Glycine max
  Clone ID: PAT_MRT3847_45557C.1.pep
MSEKGGDAYEAVKPANNCSNQSNTTPSSTANNCNSQSNTVPPAAAHNCNNQSNTIPSSTANCCNNQSNIIPSSTANNCNNQRNIIPSSTANGHCSSVSCKGESTDQTVMGSMRNIGQSMLEHIQVIECAFQQDRGQEASLDNMSKIVVVGKAQVNAMSALKELRKISNLLSEM

SEQ ID NO: 225390 - protein, 106 aa, Glycine max
  Clone ID: PAT_MRT3847_45558C.1.pep
IRRTNNPRPVPLLRKPDRRLKPVLRTPQHGLGAELCASVIEESFGFITPPFYRTVVARILKLSSTDHKRAAVSQVEDIGCAAKRACYRPLPRHTHARMNWKIYMIW

SEQ ID NO: 225391 - protein, 88 aa, Glycine max
  Clone ID: PAT_MRT3847_45559C.1.pep
IGSLGHYFFARSLILSLAQGLFRLCRIFFIILNPCYPPILSISFFFAFLFLSRSFIMAFVGFGPFCSSVLSFFFPFSLFLFCPLYIYK

SEQ ID NO: 225392 - protein, 158 aa, Glycine max
  unsure (1)..(158): unsure at all Xaa locations
  Clone ID: PAT_MRT3847_4555C.1.pep
ASVLLYFWVFSPPVVSLGFGGHLYICINGVPFPFDEPFLFFXKANSKSFPRFPPNSEGVFEVYPLAVDKVPKEWKLAPFWDGEPNPPPGLGLFRRFPPKWGAALAPQGPVCPVKIFAPFVFGRPNKKDCVFFAPKGPVQRFVALVWFFPFGPFFRKPF

SEQ ID NO: 225393 - protein, 65 aa, Glycine max
  Clone ID: PAT_MRT3847_45560C.1.pep
GRPHALRVVEGIALRKTPAVAMLKVRFSFKAAQAISFKKRKSKQDKKDKALKAAKKESRAALIEL

SEQ ID NO: 225394 - protein, 136 aa, Glycine max
  Clone ID: PAT_MRT3847_45561C.1.pep
MMKFQQGSGDENNDGGSMVDYMPQTTTTLPPHGFYGTATSAATTSYDKLSFADVMQFADFGPKLALNQAKSCEESAIDPVYFLKFPVLNDKMEEDHQQNMMVNNDDPDGDEAENHHHLDERFNLVSVEGKDQGMMM

SEQ ID NO: 225395 - protein, 217 aa, Glycine max
  unsure (1)..(217): unsure at all Xaa locations
  Clone ID: PAT_MRT3847_45562C.1.pep
MQSTVFSLSPSLSLPKQPLKRSVSVSTSKLNVILTPSSFPCQPCSLAYSPSFKLAPSHFHPFHARATSVPESSAGNTLLNTLELGALFGLWILFNIYFNIYNKQVLKVYHFPLTVSTLQFAVGSLFVAFMWSFNLYKRPKVSGAQLAAILPLALVHTLGNLFTNMSLGQVAVSFTHTIKAMEPFFSVLLSAVFLGRXPTGWXVVGSLGPIGGGGGGS

SEQ ID NO: 225396 - protein, 98 aa, Glycine max
  unsure (1)..(98): unsure at all Xaa locations
  Clone ID: PAT_MRT3847_45563C.1.pep
PFSRGGGVGKGGIFSTRGAXGGGGRRLGMATDSTYLQKLAPNKVYSSKVLGFFRVFCLRCLYLLVFVRVYPSLXLFFSLFLFYLFGRFLSCKFRSTLL

SEQ ID NO: 225397 - protein, 158 aa, Glycine max
  unsure (1)..(158): unsure at all Xaa locations
  Clone ID: PAT_MRT3847_45564C.1.pep
EGMEKDLAEFVHKCLVCQQIKAKHQNPPGLFQXIDIPEWKWERITMDFVTRLRKTSKGYDSVWVIVDRLTKLAHFFPVKTTYSTTQYAKIYLERIVSLHGVPLSIIXDRGPQFMTIQFWRSFQQALGTILDLSTAFHPETDGPLERMIQILKVMLCAC

SEQ ID NO: 225398 - protein, 77 aa, Glycine max
  Clone ID: PAT_MRT3847_45565C.1.pep
SCIFAGFFPLVESILPTFSNFDPLVTVHYAPCLFKFLSSLCLNIAMNASFFWSLPSFLLLSKQIFSSCFVQDLNLPS

SEQ ID NO: 225399 - protein, 67 aa, Glycine max
  Clone ID: PAT_MRT3847_45566C.1.pep
QYIITLYAMFVSTSVWIRHRSLLCFLFGLVILIRLEIYLVRCPAAIQQSVRQKSRLICLSLCYCSIV

SEQ ID NO: 225400 - protein, 55 aa, Glycine max
  Clone ID: PAT_MRT3847_45567C.1.pep
SLEGPFGGDGSETGILKRYGPFRFLKGHNAGYMGSMDQAKGALKMVKKWINGTPG

SEQ ID NO: 225401 - protein, 150 aa, Glycine max
  unsure (1)..(150): unsure at all Xaa locations
  Clone ID: PAT_MRT3847_45568C.1.pep
HVSDGDRTSYILSLFLTWILGLYVLRXSTGMDGTIVDLTHYGVTYDCCHXKKGTPFAEDQGTYNRXLTWREQVDNGKQLTRHRKFVTVATSVLHLIASHTTKYQNPMLSFNTDAVIELDVAKLPHMHKVRIFRINCCKRNAAVAMTLGYH

SEQ ID NO: 225402 - protein, 204 aa, Glycine max
  unsure (1)..(204): unsure at all Xaa locations
  Clone ID: PAT_MRT3847_45569C.1.pep
MEREIEHCDKVMSQSSMDACPKSGPGYASPLAAIXGPRETLLYVTAIYSGTGRDKPDFLATVDVDPSSPTYSKVIHRLPVPYLGDELHHFGWNSCSSCYGDPTAVRRYLILPSLVSGRIYVVDTKANPRSPSVHKVVEPEDIISKTGLAYAHTSHCLASGDVLISFLGDEDGNAEGSRCLLLDHVLNLXXMWQKPAHSASCGYD

SEQ ID NO: 225403 - protein, 46 aa, Glycine max
  unsure (1)..(46): unsure at all Xaa locations
  Clone ID: PAT_MRT3847_4556C.1.pep
AFLNHRYIETIKEAKLWECPXELICADILGLSAIYGIVSLRRPHIP

SEQ ID NO: 225404 - protein, 486 aa, Glycine max
  unsure (1)..(486): unsure at all Xaa locations
  Clone ID: PAT_MRT3847_45571C.1.pep
MERCDKVMNQRNMHDCPKTGPGYPSPLAAMSGPKETLLYVTAIYSGTGRDKPDFLATVDVDPSSPTYSKVIHRLPVPYLGDELHHFGWNSCSSCYGDPSAVRRYLILPSLVSGRIYVVDTRSNPRSPSLHKVVEPEDIISKTGLAYAHTSHCLASGDVMISFLGDKDGNAAGSGFLLLDHEFNLKGRWEKPGHSPSFGYDFWYQPQHKTMISSSWGAPAAFTKGFNLQHVSDGLYGRHXTCIQLAWGXELRQTLDLGESGVLPLEVRFLHDPSKDTGFVGCALSSNMVRFFKTEDESWSHEVAISVKPLKVQNWILPEMPGLITDFLISLDDRFLYFVNWLHGDIRQYNIEDPKNPVLTGQVWVGGLLQKGSPIVAITEDGNTWQSDVPDIQGNKLRAGPQMIQLSLDGKRVYVTNSLFSAWDKQFYPELVEKGSHMLQIDVDTENGGLKINPNFFVDFGAEPGGPXALAHEMRYPGGDCTSDIWI

SEQ ID NO: 225405 - protein, 67 aa, Glycine max
  Clone ID: PAT_MRT3847_45572C.1.pep
QSDALVHSAISPQLKNRITLFMLYHINKKSKKWSLKKKDFFLSYFLSYLFFFYLISIHYYILYSSIF

SEQ ID NO: 225406 - protein, 58 aa, Glycine max
  Clone ID: PAT_MRT3847_45573C.1.pep
RLSSCLSWPRGRCWCLLGSLVCFVALCFPVPLVSCCVGRSLSPFGGLRRACGRVGRPG

SEQ ID NO: 225407 - protein, 54 aa, Glycine max
  Clone ID: PAT_MRT3847_45574C.1.pep
IKKNQTNKENKEVQPKISNYQREKRELDPRVQNLDHGIANRRFRPLSHLSPIEK

SEQ ID NO: 225408 - protein, 144 aa, Glycine max
  Clone ID: PAT_MRT3847_45575C.1.pep
MDSCDVEELPSKKLKIDKKLAKLTSDKLRKESSMISPNVEHKLDFRPMEVTRRPNDEDRSKWFKEIPWEEKMKTAYEQGRLVLLQNLDPSLSSSEVQNIIWTGFKESCTARMIQKTAYSSPHSGQAFVIFKKSEAAESVVRKLD

SEQ ID NO: 225409 - protein, 178 aa, Glycine max
  unsure (1)..(178): unsure at all Xaa locations
  Clone ID: PAT_MRT3847_45576C.1.pep
MANHGTQQHQRPRQHCRSKARHGAARPAQARVPLRLLLRVASAVGGIQFGWALQLSLLMPYVQQLGIPHXCGPLSGLLVQPLVGHLSDRCTSRFGRRRPFIMGGALPIVVAVLIIGHSADIXGGWFGDTHEHRPWAVXXFLFFGVLEFWKFLDVANXNVTSGPPCRALLWVNLTGQGS

SEQ ID NO: 225410 - protein, 185 aa, Glycine max
  Clone ID: PAT_MRT3847_45577C.1.pep
MATQTQDPPSNPNPNPNATSATPSSSFFFRAGGANGASVAPVSVSGESHSHHRRAQSEVSFRLPEDMMDLSPSDPFNGGSSTASFEEIGSEDDLFSTYIDVEKLSGGANGAGRGGNGSDQSGYGNGAGTSGHNDGEKSSSAAAARPRHRHSSSVDGSTSTCMFGEIMDAKKAMPPDKLAELWNID

SEQ ID NO: 225411 - protein, 221 aa, Glycine max
  Clone ID: PAT_MRT3847_45578C.1.pep
MATQTQDPRSNPNPNPNAMSATPSSSFFIRAAGGNGPSAAPVAGSGESHSHHRRAHSEVSFRLPDDMIDLSPSDPFNGGSSTASFEEIGSEDDLFSTYIDVEKLGAGRGGNGSDQSGYGNGAGSSCYNDGEKSPSTAAARPRHRHSSSVDGSTSTSMFGEIMDAKKAMPPDKLAELWNIDPKRAKRILANRQSAARSKERKARYIQELERKVQTLQTEATT

SEQ ID NO: 225412 - protein, 31 aa, Glycine max
  unsure (1)..(31): unsure at all Xaa locations
  Clone ID: PAT_MRT3847_45579C.1.pep
QCPIKFKDPILSNIIGHCYLKKQYSTTNIXX

SEQ ID NO: 225413 - protein, 74 aa, Glycine max
  Clone ID: PAT_MRT3847_4557C.1.pep
GFMAQPNSNMKVWFFCFLLLSMTAINHGKLDDKNIQKEMHGPSERKLSDQNNDKPVAANPYNRGCSIIHRCRND

SEQ ID NO: 225414 - protein, 72 aa, Glycine max
  Clone ID: PAT_MRT3847_45580C.1.pep
CRTVTSLTHSHVSTEVEGTLGYLDPEYYRRRKLTEKSNVYSIGIIMFKVFCRRPVVDPLAVKEESEKVGLAM

SEQ ID NO: 225415 - protein, 67 aa, Glycine max
  unsure (1)..(67): unsure at all Xaa locations
  Clone ID: PAT_MRT3847_45581C.1.pep
YSELSVTCKGCSHTXQQHQYILQSSMCQSLKLSPSLQFAHPYLSLPPHHSFPASYFSWQRLSTLWYS

SEQ ID NO: 225416 - protein, 52 aa, Glycine max
  Clone ID: PAT_MRT3847_45582C.1.pep
LTLIVLYFCFSFVLKGKMGKMKPFRIGSCVVYGVLSVVLMILLEYWEILVIW

SEQ ID NO: 225417 - protein, 191 aa, Glycine max
  Clone ID: PAT_MRT3847_45583C.1.pep
MAYPFSDFKYSDGLTVVGISFCTAIVCEAISWVLIYRTNSYKNLRSSIDKASKKLETMKTDSNKINIKKSKTKKIDRVETSLKESSRDLSLFKFKSGGVVALVLFVVFGLLNSLFEGKVVAKLPFKPFGLIMKMSHRGLQGNDPTDCSMAFLYFLCSISIRTNLQKFLGFAPPRGAGAGAGLFPMPDPKTS

SEQ ID NO: 225418 - protein, 88 aa, Glycine max
  Clone ID: PAT_MRT3847_45584C.1.pep
EDDRRGNGTISVYSFRGAVLSSRCELLRRGPARRMTSRRVRITSRKGESVKLRPGYFLKLPLNLPRRRKSMDILESPSTPTIIGSAKL

SEQ ID NO: 225419 - protein, 40 aa, Glycine max
  Clone ID: PAT_MRT3847_45585C.1.pep
KGFSPQAKSLMGPSLIKFKPHHRGTLITYITKFGAFELKP

SEQ ID NO: 225420 - protein, 55 aa, Glycine max
  unsure (1)..(55): unsure at all Xaa locations
  Clone ID: PAT_MRT3847_45586C.1.pep
KLFGEALERGTGFFKLISYYQTQSGPSYCGLHXLSFVVLNALAIEHGRNLKGMFL

SEQ ID NO: 225421 - protein, 86 aa, Glycine max
  Clone ID: PAT_MRT3847_45587C.1.pep
EDTAPPQVSPQNKKKNYHSRSSFKKQRSEPSPPVGKKYDQWDLAGPHPGPKGGKRPKSPKKGTPLWGWNSHGGDLRPKIKNHSHPP

SEQ ID NO: 225422 - protein, 65 aa, Glycine max
  unsure (1)..(65): unsure at all Xaa locations
  Clone ID: PAT_MRT3847_45588C.1.pep
LQXXXXQRHXXGXXNXXQXTKTAXQXTRSXQQGTRXXXKXQNXXDRRPXXATEXXXKAPPXEETT

SEQ ID NO: 225423 - protein, 63 aa, Glycine max
  Clone ID: PAT_MRT3847_45589C.1.pep
MQIFVKTLTGKTITLEVESSDTIDNVKGKIQDKEGIPPDQQRLIFAGKQLEDGRTLADYNFKR

SEQ ID NO: 225424 - protein, 104 aa, Glycine max
  Clone ID: PAT_MRT3847_4558C.1.pep
ISLLRLLDILYWVHLPPHMPPFASISAGCCRPYRRCFRFLIFSILLANNPFRLPTLLVLSCLIQTIIKVPTCRHIMLLHQLCKFFFVLFVPHQVCKSYVLPLIL

SEQ ID NO: 225425 - protein, 80 aa, Glycine max
  Clone ID: PAT_MRT3847_45590C.1.pep
SEAALPDFLQLELNIHHRTQKDSQKVYLSLEVLYQIAECTANKLRVEKKMIHEVVWPEQRVIFFPLRHRPHRSKKTLKDS

SEQ ID NO: 225426 - protein, 263 aa, Glycine max
  Clone ID: PAT_MRT3847_45591C.1.pep
MPLLRRKPFSLAEPPEDLKPDEPVYQIRFTKEIFQDYHDYLKRLNLYRQRVWMCKVTGKTGLTYEEALVSEQLATEKVQQFPKELMTIALRIIQYSMLPLKDLADSIGEKLQEQLFVGAELHWKKDDGVHPCKILKVIQKGVDTVSYEVAWLDKNKNIREQAEVSAEDLVHKKPLFSRNILKSFIRESTYRNAPWVLHDELAKNHGISTDIPEELRGRVFYKDGLLVCSKKRKHEESREDPDTCKKKLDGAQVDDSVPKKKKV

SEQ ID NO: 225427 - protein, 64 aa, Glycine max
  unsure (1)..(64): unsure at all Xaa locations
  Clone ID: PAT_MRT3847_45592C.1.pep
HTPPYNVIQTIDGNPFILNLEPPLTSSPLIAXDLSNLPAYITALSPLLTEIEVSLGHGYLLVGP

SEQ ID NO: 225428 - protein, 47 aa, Glycine max
  Clone ID: PAT_MRT3847_45593C.1.pep
APFFFFFHGNIVLHTLGMNDLKALMRHLTSNTTGYLKREDKTHAKAL

SEQ ID NO: 225429 - protein, 107 aa, Glycine max
  Clone ID: PAT_MRT3847_45594C.1.pep
LGAVFQGKSFLWRAPSSVIFFCPKVSSLGFLEGVFLGIHWCYVISSGLVYQFCLGLFLGRLHFQLGFTRAQQNQWWAAQGHLFNLEGWVVIWSARVGTFTRGGGFFP

SEQ ID NO: 225430 - protein, 58 aa, Glycine max
  unsure (1)..(58): unsure at all Xaa locations
  Clone ID: PAT_MRT3847_45595C.1.pep
LKFVWLNAKGTYRLIFFIIEEKQNRFIVXKLGXPADDYHDFSASISDDECKAAVHDSE

SEQ ID NO: 225431 - protein, 69 aa, Glycine max
  unsure (1)..(69): unsure at all Xaa locations
  Clone ID: PAT_MRT3847_45596C.1.pep
LCYHIYNSLLNPYLEQDPDIKVACNTYTQTNMFKIFREITNKPNLDYXKIVPHTYREILFIYNNVCLYA

SEQ ID NO: 225432 - protein, 53 aa, Glycine max
  Clone ID: PAT_MRT3847_45597C.1.pep
YVVCIQERSYLAEEYWNTPRREANARPREKLRICALASTRAITATTLRGSTSA

SEQ ID NO: 225433 - protein, 98 aa, Glycine max
  Clone ID: PAT_MRT3847_45598C.1.pep
HASQALHWILSSYASNHLSFPLKRILLYPKSLYSYVSISNTLIMPHRMSLNFGFIHILVILYSGTLLCIHPMLQSRSRVPTSENYTFPSELFSTISRA

SEQ ID NO: 225434 - protein, 239 aa, Glycine max
  Clone ID: PAT_MRT3847_45599C.1.pep
HVTPNSLKPTFVFLLLFLLSFILLLMDMDVCRNISVSSSECQQELPTLDDLFCHQNTEVDFGMEWLSVFVEDCFSSRPSCLLPPSGGGVQTTSTSTKPSSGTIMQRPQQSHHCPLQNFAVPGKARSKRKRLSAPRTNKDPLSIWSHHLNPQNESLCSDPPLLKQAYWLADSELIMPKPKDEEQEEVVTKEDEKVINEVSKEIALGTLSLMRVAMVNNNQCQEGAHIAWLRGPHSGGQDH

SEQ ID NO: 225435 - protein, 52 aa, Glycine max
  unsure (1)..(52): unsure at all Xaa locations
  Clone ID: PAT_MRT3847_4559C.1.pep
FFNSSSVVDSDRFFTITLLYFALSAXLSLSCLEXRVRVSCFRSLRPFGFSWL

SEQ ID NO: 225436 - protein, 211 aa, Glycine max
  Clone ID: PAT_MRT3847_455C.1.pep
MKVSQYMLLVVLVWHSSLCANAQWNNPINYSPFDETNKGGNYSKVTWSVSLSCVFVSILVFILFKLRACCCCCYSSSSSQRHNTKLVAATEAIEKCPIFEYSTAKELKVGNGAEECSVCLVEFEDSDTIKMLPKCQHVFHQNCIDTWLPSRMTCPICRQKLTSQDTVIDIDDDDVVPMEQLEHDIGTEITESEVAVTDETDTGTVVEQVLV

SEQ ID NO: 225437 - protein, 117 aa, Glycine max
  unsure (1)..(117): unsure at all Xaa locations
  Clone ID: PAT_MRT3847_45600C.1.pep
SSPRASSPGLARGPWLRPPSSSSAFPGGFLPLGWFRCVARXVXLLLLGPACVASCPPRXXAFSFLPLRXGXSPPLTSRRIKLLPVAAGIINRSPKECGPRPPVGSVFFFLRFRFWXC

SEQ ID NO: 225438 - protein, 350 aa, Glycine max
  Clone ID: PAT_MRT3847_45601C.1.pep
MEPEETAAAADGSFDEGLLGLDDGGGGGRDRVKGPWSPEEDAILSRLVGKFGARNWSLIARGISGRSGKSCRLRWCNQLDPAVKRKPFTDEEDRMIVAAHAIHGNKWAAIARLLPGRTDNAIKNHWNSTLRRRGVGHDTIKLESVSFMEDVSLEKAKASSEDTLSCGDVSLKSSEGRDVSSMEIMDDKSDDKAQTEGQIHHEVKDLPTLFRPVARVSAFNVYHSFDGTQPSTSIKRPVPMQGAVLQSSKPDMEFCRMLEGICGDQSVPHQCGHGCCAAPDGRKSESSLLGPEFVEFSEPPSFPNFELAAIATDISNLAWLKSGLESSSAKMMGNTSGRVVSNGSQVHIGH

SEQ ID NO: 225439 - protein, 523 aa, Glycine max
  Clone ID: PAT_MRT3847_45602C.1.pep
MALALTPTVVFGSIAFAVFWVLAVFPCVPFLPIGRTAGSLLGAMFMVIFKVLNPDQAFAAIDLPILGLLFGTMAVTTFLERANMFKYLGKLLSWKSKGPKDLLCRICLISAISSAFFTNDTSCIVLTEFVLKIARQHNLPPYPFLLALATSANIGSSATPIGNPQNLVIAIQGKISFGRFLMGILPAMLVGVVVNVVFLIAMYWKVLSCPKDEEDPISEIVVEEEVVSHQFSPARMSHFTSFNSQECNGSVDQSTPSESEVQMIHRSTKDSTKNSNASKEGTNDTKEEINNPSKNVAIVVDKPIEAHVILSSEEKDYMNNKWKRVLWKSCVYAITLVMLIAMLIGLNMAWTAIAAAITLVVLDFKDAGPSLEKVSYALLVFFCGMFITVDGFKSTGIPSAMWDLMEPYSRIDHASGTAILAVVILVLSNLASNVPTVLLLGARVAASAAAISKGDEEKAWLILAWVSTIAGNLSLLGSAANLIVCEQARRAPNLGYTLTFWTHLKIGLPSTLIVTAIGLTLIK

SEQ ID NO: 225440 - protein, 546 aa, Glycine max
  unsure (1)..(546): unsure at all Xaa locations
  Clone ID: PAT_MRT3847_45603C.1.pep
MALAPTSKVVLGSIAFAIFWVLAVFPAVPFLPIGRTAGSLLGAMLMVIFKVLSPDQAYAAIDLPILGLLFGTMAVTIFLERANMFKYLGKLLSWKSRGQDLLWLGPAXIRESLISAISSAFFTNDTSCIVLTEFVLKIARKXNLLESPEXLAFLPLVTSANIGXSATPIGNPQNLVIAIQGKIXIWEVLIGILPAMLVGVVVNVVFLIAMYWKVLSCPKDEEDPVSEVVVDEEVVSHQFSPARMSHFTSFNSQECNGSVELANSIQNSSQVHVMRNQSTPSESEVQMVHSGTKDFTTNSNASKEGTNDTKEETNPSKNVAIVVDKPIEALVILSSGEKDYMNKKWKRVLWKSCVYAITLVMLIAMLIGLNMAWTAIAAAITLVVLDFKDAGPSLDKVSYSLLVFFCGMFITVDGFKSTGIPSAMWDLMEPYSRIDHASGTAILAIVILVLSNLASNVPTVLLLGARVAASAAAISKGDEERAWLILAWVSTIAGNFSLLGSAANLIVCEQARRAPNLGYTLTFWTHLKVGLPSTLIVTAIGLTLIK

SEQ ID NO: 225441 - protein, 60 aa, Glycine max
  Clone ID: PAT_MRT3847_45604C.1.pep
FTVSTKSMIGLSFITLGGIPLQHNKNIFSLPSFYLVFLFEILKLKLLNMSYLISRVPILS

SEQ ID NO: 225442 - protein, 60 aa, Glycine max
  Clone ID: PAT_MRT3847_45605C.1.pep
GNSHHNSDSLFLNFFSPKLNLGNYLPGKVGRFHTDLIDLYIFTDLGFLFRSPNLKFYHFW

SEQ ID NO: 225443 - protein, 54 aa, Glycine max
  Clone ID: PAT_MRT3847_45606C.1.pep
FRFQAFCINLICLLKVGSLPHLFFDLMGICLIIILLVLLVVDSCCCSYVSLSCE

SEQ ID NO: 225444 - protein, 203 aa, Glycine max
  unsure (1)..(203): unsure at all Xaa locations
  Clone ID: PAT_MRT3847_45607C.1.pep
FDESDKGEKKQMLKFFNWFVFFISLGTLTAVTVLVYIQDHIGRYWGYGISVCAMLVALLVLLSGTRRYRYKRLVGSPLAQIAMVFVAAWRKRHLEFPSDSSLLFNLDDVADETLRKNKQMLPHSKQFRFLDKAAIKDPKTDGEXITMERKWYLSTLTDVEDVKMVQIMLPVWATTIMFWTVYAQMTTFSVQQATTMDXRIIGN

SEQ ID NO: 225445 - protein, 253 aa, Glycine max
  unsure (1)..(253): unsure at all Xaa locations
  Clone ID: PAT_MRT3847_45608C.1.pep
HAFALKEQNAPPKTIYVRNLSYRVEQADMENLFKECGKIVDVRLHRNHNGRLNGFGQVEFATAEAAKKALELHNTELLRRPIGVDLAEEKGEYTYSRSNWSNSFQKCERAQSPTVFVTGFDSSLPAEKLKASLEEHFGSCGEIQRISIPTFPDSGXCKGFAHLGFKDVVSVRKALHLDQNELGGFHLRVEKAKPRRENQGIGGGRGGGGGHQFGGRDGSGYTSRMGWGRSGGGGWHSLHFSDEGTGRKTHSYS

SEQ ID NO: 225446 - protein, 104 aa, Glycine max
  unsure (1)..(104): unsure at all Xaa locations
  Clone ID: PAT_MRT3847_45609C.1.pep
WEGGLHHSLGVLHKAEGLEHFSLETNSQRLAEKYKKXAAHIILRWGMQRNTAGIPKSSKLERLKDNFQRPHYERSKKDMELIGSIHRKYRTNQPPVSRGIDLYA

SEQ ID NO: 225447 - protein, 48 aa, Glycine max
  Clone ID: PAT_MRT3847_4560C.1.pep
RKTKTIYKRFHTLHRTKNAGIYNPTKPMTSFHLQLIKNLLIYNREKKK

SEQ ID NO: 225448 - protein, 106 aa, Glycine max
  unsure (1)..(106): unsure at all Xaa locations
  Clone ID: PAT_MRT3847_45610C.1.pep
PDIIFFEKNSWVFLKDGFFNVGPLGWEQNRHIXKIPPMILFSAHTGNDEFYKAKAAGFSDTVFIKPLKASMGAACFYQVLGTGKKRPPGKNMNPNGSPFVKSLFFG

SEQ ID NO: 225449 - protein, 84 aa, Glycine max
  Clone ID: PAT_MRT3847_45611C.1.pep
GLTTIVLDPVLPQGGVLYGTFVAVAEHNELATNIKEKMYHTHDLEAHMTLLNSPTECQDESFSYLMHNWWGNWHDSSSLAQRVY

SEQ ID NO: 225450 - protein, 423 aa, Glycine max
  Clone ID: PAT_MRT3847_45612C.1.pep
MDPLEALVAQIQGLSSTPGDLTRLHSVLKQADDSLRSESTRLAPILTQLDPSIHSLGFLYILEASMTDPVTKTQAETVVPIVTRFIGACSPEQIRLAPDKFLSVCKRLKDQVMLLEAPIRGVAPLFTALRKLQVSTEHLTPLHSEFLLLCLLAKCYKTGLSILDDDVFEVDQPRDLFLYCYYGGMICIGQKHFQKALDLLHNVVTAPMSTINAIAVEAYKKYILVSLIRHGQFSTSLPKYSSSTAQRNLKNFCQPYVELANSYGTGQIEELEAYARANAEKFESDNNLGLVNQVVSSMYKRNIQRLTQTYLTLSLHDIASTVQLNSPKEAEMHVLQMIQDGEIYATINQKDGMVRFLEDPEQYKTCEMIEHIDSSIQRIMALSRKLTATDEQISCDQLYLSKAGRERQRYDFDDFDVPQKFNI

SEQ ID NO: 225451 - protein, 93 aa, Glycine max
  unsure (1)..(93): unsure at all Xaa locations
  Clone ID: PAT_MRT3847_45613C.1.pep
NAVPQRLVPRGSLASHSFVLGPATTKATSINLPSXPLAVKHPYLSTWVPENQLGDIATARPQFWAGQNLSWPVVARIDGSAYALFGVPNPINL

SEQ ID NO: 225452 - protein, 50 aa, Glycine max
  Clone ID: PAT_MRT3847_45614C.1.pep
YYQMEITGCCHAVYPKFLVVRVTLFATLITQLDTIQPATDSYHMMNSKWL

SEQ ID NO: 225453 - protein, 63 aa, Glycine max
  unsure (1)..(63): unsure at all Xaa locations
  Clone ID: PAT_MRT3847_45615C.1.pep
SCRRRDGHRSGHLVWEIFKKNNSFLVKRFARGTHSSQFXRKSNNPYNLNSLKDSGLANKKTAT

SEQ ID NO: 225454 - protein, 177 aa, Glycine max
  Clone ID: PAT_MRT3847_45616C.1.pep
PRVRNFCQPYVELANSYGTGKIAELEAYVKANAEKFESDNNLGLVKQVVSSMYKRNIQRLTQTYLTLSLQDIANTVQLNSPKEAEMHVLQMIQDGEIYATINQKDGMVRFLEDPEQYKTCEMIEHIDSSIQRIMALSRKLTATDEQISCDQLYLSKAGRERQRYDFDDFDVPQKFNV

SEQ ID NO: 225455 - protein, 168 aa, Glycine max
  unsure (1)..(168): unsure at all Xaa locations
  Clone ID: PAT_MRT3847_45617C.1.pep
MDPLEALVAQIQGLSSSPGDLTRLHTVLKQADDSLRSESTRLAPILTQLDPSIHSLGFLYILEASMTGPVTKTQAEVVVPIVTRFIGACSTEQIRLAPDKFLSVCKRLKDQVMLLEAPIRGVAPLFNALRKLQASAEHLTPLHSEFLLLCLLAXCYKTGLSILDDDVF

SEQ ID NO: 225456 - protein, 148 aa, Glycine max
  unsure (1)..(148): unsure at all Xaa locations
  Clone ID: PAT_MRT3847_45618C.1.pep
MGTRTPRARANANASSNPYAAMNYLPLGYSGPITIPPVAITQGASHRVLACYGHALWPHCHYPGATILDRNGLLATTFPDWRLIITPAVEGPLTEQRXYYAGWSLTYATXSCSLTHMLPPLTSVMAPLPPMAKRLIEQVASLAQIVCT

SEQ ID NO: 225457 - protein, 58 aa, Glycine max
  Clone ID: PAT_MRT3847_45619C.1.pep
IAHTIKKEFDKAYGPVWHCIVGSNFGSFVTHSTGCFLYFSMENLYILLFKTKVKKALD

SEQ ID NO: 225458 - protein, 160 aa, Glycine max
  unsure (1)..(160): unsure at all Xaa locations
  Clone ID: PAT_MRT3847_4561C.1.pep
TXXHDQXXXTDAXXFXXXNSMQARGXIEVSNSXKNSFXXGKLDSTKKRDFSKYMNPLSPCNKPSSPTALGLLLKSSVFRELMQINLNSSSEEAEEVELKYPHEGNDGVGGIYDNENTNNSYFCSSNISRLPNLESSEESPLPMYHGTVQSLWNSAFNMSN

SEQ ID NO: 225459 - protein, 176 aa, Glycine max
  Clone ID: PAT_MRT3847_45620C.1.pep
TAEAEMKLIVMTLARLIEQLLKQGNSGNEIQNCFTSLLEVSVQLKEAHDGKEDEQGSDNDENEDDEAEDEASANDDYDEDSGSDEYEETEEEFFNRYAKAAEALENGSAIEKGDDEDQELELELGQLVDVNEQNVLLSLIDKYPHVLIRGLVLPSELVMNFLNAFPGYGSYFLQYK

SEQ ID NO: 225460 - protein, 74 aa, Glycine max
  Clone ID: PAT_MRT3847_45621C.1.pep
PAIAYPLLFPKADEPHRETLTQTWKTWMEEYIIRSEQVPPGTESGNATWVMQPPTQKPDLRLTPDHHMLLTVPL

SEQ ID NO: 225461 - protein, 71 aa, Glycine max
  unsure (1)..(71): unsure at all Xaa locations
  Clone ID: PAT_MRT3847_45622C.1.pep
VGACASLSLGAWSLSSSWTAEPRMSVLIRLGLSLLPPYDLTAHLPCVLLFVLNKKTSPLAPPSVVFSQPYX

SEQ ID NO: 225462 - protein, 63 aa, Glycine max
  Clone ID: PAT_MRT3847_45623C.1.pep
SHGGCPPSPSFYSEPEGFLYFKQHFSQLFKEKGGYIHLAESASVKRAAAASAAATSVASVSKS

SEQ ID NO: 225463 - protein, 36 aa, Glycine max
  Clone ID: PAT_MRT3847_45624C.1.pep
HKRKQKPFSCLSTVLSIGWLLLGDGCCLWPLLAAET

SEQ ID NO: 225464 - protein, 178 aa, Glycine max
  Clone ID: PAT_MRT3847_45625C.1.pep
MPHQQSRDEIFKPRRGAGNYAFADVKYKGDWMRRPISNDEIAWLAKILIRLSDWLNESLGLNQAESNQVSSTVSYVEVSADVAAHIWGPYKALKVFLCTIGSWFLFLGAASLGCMRKHGLRVNLRLLASKKFVMVFVLYSVFKILKKPHSIIQWHAGKNIDLICKLYRDVEITKRILF

SEQ ID NO: 225465 - protein, 236 aa, Glycine max
  Clone ID: PAT_MRT3847_45626C.1.pep
MEWTTEGVYLICCNLRNNAGIFGTPFKLSEDNIELQFATNHMGHFLLTNLLLDTIKRTTHESKKEGRIVNISSSGHQWLNYRGGILFDKINDESSYQKFCAHGQSKLANILHANELARRLKEEGVNITANSLHPGAIATNIHRYNRILTGIPGVVKRLLNLVIKNVQQGAATTCYVALHPEVRGISGEYFADNKIAKANSLGRDIDLAKKLWDFSMNLIKVEYLVPIVDADGILRE

SEQ ID NO: 225466 - protein, 260 aa, Glycine max
  Clone ID: PAT_MRT3847_45627C.1.pep
PRPVRVFFIPFSKSKPQFMYDVFINFRGEDTRKKFVCHIYKALSNAGINTFIDEENIQKGMTLDELMTAIEGSQIAIVVFSKTYTESTWCLRELQKIIECHENYGQRVVPVFYHIDPSHIRHQEGDFGSALNAVAERRHSGEDLKSALSNWKRVLKKATDFSGWNERDFRNDAELVKEIVNDVLTKLEYEVLPITRFPVGLESQVQEVIRFIETTTYSCIIGIWGMGGSGKTTTAKAIYNQIHRSFMDKSFIEDIREACK

SEQ ID NO: 225467 - protein, 57 aa, Glycine max
  Clone ID: PAT_MRT3847_45628C.1.pep
LVEDCDVLFPASLGGVINTENAHEINAKFIVEAPHHPTDPHADEILKNKGEEILPDL

SEQ ID NO: 225468 - protein, 67 aa, Glycine max
  Clone ID: PAT_MRT3847_45629C.1.pep
RDTQRVMCIVNCQVKHLKRGVHSRLGRLGFNSRHFLCLFVVSPHLHTVPPVLCGTARTFTVNIFLAS

SEQ ID NO: 225469 - protein, 67 aa, Glycine max
  Clone ID: PAT_MRT3847_4562C.1.pep
PKKKGGPPGWGKKVVPLNAPPPQRDQGSYIWAKPKVVYVCIKKAPVFNPLYDFNFQKVKRFEVCLFF

SEQ ID NO: 225470 - protein, 41 aa, Glycine max
  Clone ID: PAT_MRT3847_45630C.1.pep
KMTTYCESHTLFNTHIHILFPSKETISPSILYSNSSIFISL

SEQ ID NO: 225471 - protein, 70 aa, Glycine max
  Clone ID: PAT_MRT3847_45631C.1.pep
RCRDVNLELQEQIPEAARVNRRIFSGHHLHFCFSQISLLRLSPSILFHFFSFSTNSKLYNYLLRIISIQL

SEQ ID NO: 225472 - protein, 57 aa, Glycine max
  unsure (1)..(57): unsure at all Xaa locations
  Clone ID: PAT_MRT3847_45632C.1.pep
GEALFPTHXNLKHLAIIEKVLGPIPQQMLKKIFPQSKKYVPKGKFDWPKGSTPPKNI

SEQ ID NO: 225473 - protein, 73 aa, Glycine max
  Clone ID: PAT_MRT3847_45633C.1.pep
PLFFFLNGSGLLLLLLRRLCAESSCVRKWSVTDYVSCIWLSGVATTAATAVTATGKYAACRLRASMVAEHFVG

SEQ ID NO: 225474 - protein, 73 aa, Glycine max
  Clone ID: PAT_MRT3847_45634C.1.pep
QVMQVQDLFCIIGDIIDQNVWNISKTNFPFTVMIMFKAWFHHIEIKLTILNFCYRIYVNHVSGFRTLPLNVMT

SEQ ID NO: 225475 - protein, 56 aa, Glycine max
  Clone ID: PAT_MRT3847_45635C.1.pep
FFPTAQEAEMVNAIITCSHFTRNLIITQTPTVGIFHSISWRFIWSSNTRAILGISS

SEQ ID NO: 225476 - protein, 208 aa, Glycine max
  Clone ID: PAT_MRT3847_45636C.1.pep
MGGGGGAIGVRGLDEDDDDDVGKNEEENKWPPWLGPLLQTSFFVQCKVHADSHKSECNMYCLDCMNGALCSTCLASHREHRAIQIRRSSYHDVIRVSEIQKFLDITGVQTYIINSAKIVFLNERPQPRPGKGVTNTCQVCERSLLDSFSFCSLGCKIVGTSKKFRKKKMLAETDGSDGEESINGISNESGRNKIHSFTPSTPPPTGKA

SEQ ID NO: 225477 - protein, 49 aa, Glycine max
  unsure (1)..(49): unsure at all Xaa locations
  Clone ID: PAT_MRT3847_45637C.1.pep
CPNSRVYGSGTPYICIFFRKTXDFLVALEGDTIHLISSVGLSKMKVAND

SEQ ID NO: 225478 - protein, 231 aa, Glycine max
  Clone ID: PAT_MRT3847_45638C.1.pep
MGGGGGAIGVRGLNEDDDDIGKIEEENKWPPWLRPLLQTSFFVQCKVHADSHKSECNMYCLDCMNGALCSACLASHREHRAIQIRRSSYHDVIRVSEIQKFLDIAGVQTYIINSAKIVFLNERPQPRPGKGVTNTCQVCERNLLDSFSFCSLGCKIVGTSKKFRKKKMLAETEGSNGEESINGISNESGRNKIQSFTPSTPPPTVVNYRTAKRRKGVPHRAPMGGALIIEY

SEQ ID NO: 225479 - protein, 59 aa, Glycine max
  Clone ID: PAT_MRT3847_45639C.1.pep
PRVRCSRDMMRSPSSLNFFFFFPFLLFIYSAYGSLKAKDDLYHVMCPTYGRFFLDSGQD

SEQ ID NO: 225480 - protein, 91 aa, Glycine max
  Clone ID: PAT_MRT3847_4563C.1.pep
LVSLDSVGVWNLRTENLDSWYLGQETYVRVVNPEVNNKTELPIPDNALFCGALSKLQKPQKVSSDAPSISRNKLKLFFTWLIVFAWIHIFQ

SEQ ID NO: 225481 - protein, 47 aa, Glycine max
  Clone ID: PAT_MRT3847_45640C.1.pep
GPFPYFVQAPLPVHVGFKNKRLAKRNPTIYFRLNVKKLGGNEPNCFP

SEQ ID NO: 225482 - protein, 39 aa, Glycine max
  Clone ID: PAT_MRT3847_45641C.1.pep
DSIPECLHDQFLVIAYNLEYSYNKRVGASNFYNPYSFFY

SEQ ID NO: 225483 - protein, 66 aa, Glycine max
  Clone ID: PAT_MRT3847_45642C.1.pep
MKIYGKSVITEFTVPVSHANQATTTYKYTQNQNNNCSCTYKAGVNNSILPLFPLDILSGSGSSRSR

SEQ ID NO: 225484 - protein, 67 aa, Glycine max
  Clone ID: PAT_MRT3847_45643C.1.pep
LIHHNLIHIPIQISLSLSTKKFLNRLMIKSRLDKRSIKISADPHGQGSQYMRHSLVLLTWQIACDTA

SEQ ID NO: 225485 - protein, 68 aa, Glycine max
  unsure (1)..(68): unsure at all Xaa locations
  Clone ID: PAT_MRT3847_45644C.1.pep
MSKMVIANGHGATXPYVDGGIAYDENPIHPKEDSSRVIQMGHDANHLTCDVVEDRILNNPEAFFCTPQ

SEQ ID NO: 225486 - protein, 117 aa, Glycine max
  Clone ID: PAT_MRT3847_45645C.1.pep
PGNGFNQSAAAAQAALNPAMAQALTALLASQGTLGLTNLLGSIGTSAAVNPGVPFSGASVQGGFSAPPNISPGVVGGNGNQVGFQVGYPNQNQNPPIGQGGSGKGQNGGGFAPHMGP

SEQ ID NO: 225487 - protein, 66 aa, Glycine max
  Clone ID: PAT_MRT3847_45646C.1.pep
MVRFFRVVSILILVSVTALMVVLPLMLPSLPPPPLVLLFFPVGIMAVLMLLAFVPSEAPMTTNIIV

SEQ ID NO: 225488 - protein, 246 aa, Glycine max
  Clone ID: PAT_MRT3847_45647C.1.pep
MWYRSSVGGAVVEPPSFLNGRRYPVPTSQEKQKQVVSRIAFGSCSNQSAPQPIWDAVVDFHPQVFIWLGDNIYGDFKRPFKIFGQERTVGPWKNVPRFVPSSEQEMKAGYEKAKSNPGYARLQQNAKVIGTWDDHDYGLNDAGKEFHGKITNQKLLLDFLDEPQDSPRRKQAGVYASYTYGPVGRDIKIVLLDTRYHRDPVGSDGTILGNSQWLWLETELKGPPTALTIIGSSIQVISNLSATIHP

SEQ ID NO: 225489 - protein, 92 aa, Glycine max
  Clone ID: PAT_MRT3847_45648C.1.pep
VESCTAHTALTKRCSTGHGWDRPMMGLKVMLRGNYPHQLFEDGLYSKSQEWKLSTSGLPAGAKFPGTGFGTVWPDGYGTNSPAGPYMIKFGI

SEQ ID NO: 225490 - protein, 62 aa, Glycine max
  Clone ID: PAT_MRT3847_45649C.1.pep
CWFLALASSFLGSLFFGHSLESPPSSCNFWSQNWGLDRRRPDFLYHSGFNGVCLREPLITFC

SEQ ID NO: 225491 - protein, 137 aa, Glycine max
  unsure (1)..(137): unsure at all Xaa locations
  Clone ID: PAT_MRT3847_4564C.1.pep
MSGYAFFVVGMDXGDLVLRNSRGTYNKWDGIARTTAQVYPGAWTAILVSLDNVGVWNLRTENLDSWYLGQETYVRVVNPEVNNKTELPIPDNALFCGALSKLQKPQKVSSDAPSISRNKLKLFFTWLIVFAWIHIFQ

SEQ ID NO: 225492 - protein, 225 aa, Glycine max
  unsure (1)..(225): unsure at all Xaa locations
  Clone ID: PAT_MRT3847_45650C.1.pep
NIATFRFLLLWMLFLCFACTARAAQRGPFAMRISCGARQNVQTKPTTTLWYKDFGYTGGIPTNAKTFFIAPPLKTLRYFPLSEGPSNCYNINRVPKGHYSIRIFFGLVAQARATDEPLFDISIQGTQIYSLKSGWTTQDDQAFTEAQVFLMXGSVSICFHGTGHGDPAILSIEILQIDNKAYXFGSQWSQGIILRTVKRLKLGGLGSQSMVWIMWADPRGRRQIL

SEQ ID NO: 225493 - protein, 53 aa, Glycine max
  unsure (1)..(53): unsure at all Xaa locations
  Clone ID: PAT_MRT3847_45651C.1.pep
PMXAVXIIDVLRXSGADVNVASSSANSRQVSXVXXAXLXSSAHAXLCSELRYN

SEQ ID NO: 225494 - protein, 44 aa, Glycine max
  unsure (1)..(44): unsure at all Xaa locations
  Clone ID: PAT_MRT3847_45652C.1.pep
XTXXLSXPEXPKXVPAVVXAXLTXXYXQNLXSSRXPSFRXXXCD

SEQ ID NO: 225495 - protein, 44 aa, Glycine max
  Clone ID: PAT_MRT3847_45653C.1.pep
AKLAGELSITNKTLKSYKIMSVFHKNDGKSFPPNLNFPTWKTLE

SEQ ID NO: 225496 - protein, 118 aa, Glycine max
  Clone ID: PAT_MRT3847_45654C.1.pep
FNMNPVSFGSLLVMQVVHPASYKTPPRLHSSYVPLYIFTSSCLFLANYLVTLTAHSLVISLVYWSYPLCLTSLIFPQVCASRTTVVIAHLKHLSLLARDLFSPPPPQRRRTSYSDDGK

SEQ ID NO: 225497 - protein, 93 aa, Glycine max
  unsure (1)..(93): unsure at all Xaa locations
  Clone ID: PAT_MRT3847_45655C.1.pep
AGYVPDXDSIHDVEEDVKKQLLSSHSERLAIAFGLLNTSPGTTLHIRKNLRVCGDCHDTTKYISLVTGREIIVRDLRRFHHFKNGSCSCGDYW

SEQ ID NO: 225498 - protein, 73 aa, Glycine max
  Clone ID: PAT_MRT3847_45656C.1.pep
KRGVAGTVHYISMIEPQTVTPQTSLYIWHELHIIHYSAREEPKIHVHTRATCSYKGMIIWNRVVCRMRTSLIL

SEQ ID NO: 225499 - protein, 154 aa, Glycine max
  Clone ID: PAT_MRT3847_45657C.1.pep
RKPKQGRAKWWSLGTCKRGQWLSWSTQSSSLVSLPSFLLLLAKCLETGEPVAIKKVLLDKRYKNRELQLMHLMDHPNVISLKHRFFSTTSADELFLNLIFRGLAYIHTVPGGCHKDLKPQNILVDPLTHQVKICDFGSAKVLVKGEANISHICS

SEQ ID NO: 225500 - protein, 212 aa, Glycine max
  Clone ID: PAT_MRT3847_45658C.1.pep
EKVPESMYRVSKFYSNTNQSMPLIYVKLYMHQIFRGLAYIHTVPGGCHKDLKPQNILVDPLTHQVKICDFGSAKVLVKGEANISHICSLFYRAPELMFGATEYTTSIDIWSAGCVLAELLLGQVTQMKQEHDKRQASLIAEHNEQLKRTQLQAENELREKTMFMRNDHEAQIKALRCELEDECRKLEEELHLQKIQRRQAKGFVAVAVESDE

SEQ ID NO: 225501 - protein, 41 aa, Glycine max
  Clone ID: PAT_MRT3847_45659C.1.pep
RRGFMPQSIACLTNCLVHVILRPPLNHTKPRIACHSYIFRA

SEQ ID NO: 225502 - protein, 127 aa, Glycine max
  Clone ID: PAT_MRT3847_4565C.1.pep
MTSKFVGLFMLLLINVVVAEYDHDLDPTYPSEHDKDSLMYPLEHKNDSSTYPPKHDDHNPTYPPEHDDDSPTYPLKHDDDNPSCKALTKVCIPCLHAIFSSYAFEEVDVDPQIASYFAYPPEISPIP

SEQ ID NO: 225503 - protein, 168 aa, Glycine max
  unsure (1)..(168): unsure at all Xaa locations
  Clone ID: PAT_MRT3847_45660C.1.pep
LTHHVKICDFGSAKVLVKGEANISHICSLFYRAPELMFGATEYTTSIDIWSAGCVLAELLLXPLLPGENALDQLVEIIKVTQMKQEHDKRQASLIAEHNEQLKRTQLQAENELREKTMFMRNDHEAQIKALRCELEDECRKLEEELHLQKIQRRQAKGFVAVAVESDE

SEQ ID NO: 225504 - protein, 76 aa, Glycine max
  Clone ID: PAT_MRT3847_45661C.1.pep
PRRLSQFFTRSHSVQECAFCLPQTANPVACRSQVQLGYWPWLSRALHRKMRPLRMTAPDEPMRFALSLTTLINFTD

SEQ ID NO: 225505 - protein, 69 aa, Glycine max
  Clone ID: PAT_MRT3847_45662C.1.pep
MADWGPVVIAVVLFVLLSPGLVFQLPGKSRVVEFGNMQTSAVSILVHTIIFFGLITIFLVAIGVHIYTG

SEQ ID NO: 225506 - protein, 375 aa, Glycine max
  unsure (1)..(375): unsure at all Xaa locations
  Clone ID: PAT_MRT3847_45663C.1.pep
MSDHNHEISTSADDGNDSLNGHIISTTVGGKNGKPKQTKSYIAERIVGTGSFGIVFLAKCLETGEPVAIKKVLQDKRYKNRELQLMRLMDHPNVISLKHRFFSTTSADELFLNLVMEYVPESMYRVSKFYSNTNQSMPLIYVKLYMHQIFSGLAYIHTVPGVCHRDLKPQNILVDPLTHQVKICDFGSAKVLVKGKANISHICSLFYRAPELMFGATEYTTSIDIWSAGCVLAELLLGQXDQLVEIIKVLGTPAQEEVSCTNPNYNDFKFPQIFHEKMPPEAIDLASRLLQYSPSLRCTALEACAHPFFDELREPNAHLPDGRPFPPLFNLKQELSGASPELIDKLIPDHVKRQIGLQHAHLAGFLEHDVKLGKL

SEQ ID NO: 225507 - protein, 85 aa, Glycine max
  Clone ID: PAT_MRT3847_45664C.1.pep
RGPRSEFKTGHEVVTYESPRPMMGIHRLVFVLFRQLGRETVYAPGWRQNFNTREFAELYNLGLPVAAVYFNIQRESGSGGRRLYH

SEQ ID NO: 225508 - protein, 117 aa, Glycine max
  unsure (1)..(117): unsure at all Xaa locations
  Clone ID: PAT_MRT3847_45665C.1.pep
SRIEKKSRIAIGKLGLKPATGVSRATIKRTNNIIYFISKPDDFKSPSSETYVIFGEANIEDLSSELQTQVAKQFRMPDMGSATAKQEDAVAADXQPEEEEEVDETGVEPHDNDVAMT

SEQ ID NO: 225509 - protein, 58 aa, Glycine max
  Clone ID: PAT_MRT3847_45666C.1.pep
IQRFVVPYSFPNTPNPLPRFHPLHHKDPSCAWGCDTPNHMYLSNPTQMITTPTTLSVL

SEQ ID NO: 225510 - protein, 55 aa, Glycine max
  Clone ID: PAT_MRT3847_45667C.1.pep
PRPTSFRSRAAALFFFFQDNCLKKRGRMLDFVNVKYYSDSVNLLQVFFQHQHNFW

SEQ ID NO: 225511 - protein, 77 aa, Glycine max
  unsure (1)..(77): unsure at all Xaa locations
  Clone ID: PAT_MRT3847_45668C.1.pep
QYGKPDDTTVYYSFIQLWKWDHFISQMCANMLMLVPSSVLRXERCPAVGEHHIQXYAQNVCMLLNRIIQILNIHDVG

SEQ ID NO: 225512 - protein, 95 aa, Glycine max
  Clone ID: PAT_MRT3847_45669C.1.pep
YPWGFSILEKSIQRMITKWYILCYYQACLIVARPLKMKLFFFKNKKSVGGGGGGNHFFPESKSLFLHGPNSLEPWLLGKELLVMIRQTCDLQIHP

SEQ ID NO: 225513 - protein, 598 aa, Glycine max
  unsure (1)..(598): unsure at all Xaa locations
  Clone ID: PAT_MRT3847_4566C.1.pep
MSSSSSSRAFFFFFFFLINVSLLLTLSSAADPFVSYEFEVSYITASPLGVPQQXVIAINNKFPGPTINFTTNNNVAVNVRNKLDESLLIHWSGIQQRRTSWQDGVLGTNCPIPAKWNWTYQFQVKDQIGSFFYFPSLHLQRAAGGFGGFIINNRPIIPXPFDTPHGDIVVFIGDWYTRNHTDLRKALDDGKDLGMPDGVLINGKGPYRYNDTLVPDGIDYETIEVHPGKTYRLRVHNVGVSTSLNFRIQSHNLLLAETEGSYTVQQNYTSLDIHVGQSYSFLLSTDQNASTDYYIVASARFVNESRWQRVTGVAILRYTNSKGKARGPLPPGPDDQFDKTYSMNQARSIRWNVSASGARPNPQGSFRYGSINVTDIYVLKNKPLEKINGKRRATLYEXSFVNPSTPIRLADQYKLKGVYKLDFPTKPLTGSPRTETSIINGTYRGFMEVILQNNDTKMHTYHMSGYAFFVVGMDFGDWSENSRGTYNKWDGIARTTAQVYPGAWTAILVSLDNVGVWNLRTENLDSWYLGQETYVRVVNPEVNNKTELPIPDNALFCGALSKLQKPQKVSSDAPSITGNKLKLLFTWLVVWAWIHIFQ

SEQ ID NO: 225514 - protein, 34 aa, Glycine max
  Clone ID: PAT_MRT3847_45670C.1.pep
KFYKYILLDLVCKSIWPKNSILHEYPILKTLFFV

SEQ ID NO: 225515 - protein, 106 aa, Glycine max
  Clone ID: PAT_MRT3847_45671C.1.pep
YTASVDHSRLVSVETIGLGVREHIFTGSVSSLVWFMSGQETSFVTLGQRVLANPLKVQMHYGHPDVFDRFWFITRGGGISKASRVISISEDIFAGFNCTLRGGNVT

SEQ ID NO: 225516 - protein, 236 aa, Glycine max
  unsure (1)..(236): unsure at all Xaa locations
  Clone ID: PAT_MRT3847_45672C.1.pep
SRKAMRTSQILLVLLWFFCIYAPSSFGANVTYDHRALVIDGKRRVLVSGSIHYPRSTPEMWPDLIQKSKDGGLDVIETYVFWNLHEPVRGQYNFEGRGDLVKFVKVVAAAGLYVHLRIGPYACAEWNYGGFPLWLHFIPGIQFRTDNKPFEFTAKIVDLMKQENLYASQGGPIILSQIENEYGNIEADYGPAAKSYIKWAASMATSLGTGVPWVMCQQQNAPDPIXNACNGFYCDQ

SEQ ID NO: 225517 - protein, 45 aa, Glycine max
  Clone ID: PAT_MRT3847_45673C.1.pep
GTARLTPNPGLTEEFHMHMNPMSMTINRAGASTPARKRKDGALIS

SEQ ID NO: 225518 - protein, 53 aa, Glycine max
  unsure (1)..(53): unsure at all Xaa locations
  Clone ID: PAT_MRT3847_45674C.1.pep
LXASSRXRXDAXXXFLFPXXIXMALXKSXAVFAXLTLVXXRXWDXFXCLISKX

SEQ ID NO: 225519 - protein, 46 aa, Glycine max
  Clone ID: PAT_MRT3847_45675C.1.pep
PLLAFDINMNVLGPSISSPLGGCYPCYLPSSISCVHYTIYLTPPFR

SEQ ID NO: 225520 - protein, 256 aa, Glycine max
  Clone ID: PAT_MRT3847_45676C.1.pep
GFVGGRVGVNKDTTNSKAPPMPLATLPLLLVDDNNACIDLSMGEEKVVKLSPLSPKILVYIDWSQKLLEKYDTHTLETLPEVLKYGPVTKKARTEPLSLYTCLEAFLREEPLVPEDMWYCPKCKERRQASKKLDLWRLPEVLVIHLKRFSYSRSMKHKLETFVNFPIHDFDLTNYIANKNNSRRQLYELYALTNHYGSMGSGHYTAHIKLLDENRWYNFDDSHISLISEDEVNTAAAYVLFYRRVKTDDAAVSNGA

SEQ ID NO: 225521 - protein, 36 aa, Glycine max
  Clone ID: PAT_MRT3847_45677C.1.pep
LLYILVIELIFNTSLNVVMLGAVCDYESLAFAVSLN

SEQ ID NO: 225522 - protein, 129 aa, Glycine max
  unsure (1)..(129): unsure at all Xaa locations
  Clone ID: PAT_MRT3847_45678C.1.pep
SDLKTGEGITLRQKASISNRXRDAAGKKGCXMRKNEMSGKAAVKRRDRAXLVQESLTNSNRTEHFDACKWTKTEPQSWEKNIPIEERGPNKGLEKWRTERANQTTXGLEXLIDNAKKATDVDSLLGNYQ

SEQ ID NO: 225523 - protein, 245 aa, Glycine max
  Clone ID: PAT_MRT3847_45679C.1.pep
ILTVQPCPTSNLFFAEVSKVQVELTHAAFSQDPFLSSLFLPLHKNFDQYWRESCLILAIAVAMDPRHKMKLVEFTFAKIFGENAEEWIKIVEDGLRELFIEYSMQMFLTTTNGDEGDDIMIKKTFLEGSIDCSLFVDGDEFSDYEFYISDFTGNPQFKSELDEYLDEPLLTRVEEFDILSWWRVNGLKYPTLSRIASDILSLPVSTLSADSIFDMQIRKMDSYRSSLSSLTLEALICAKDWFQSE

SEQ ID NO: 225524 - protein, 73 aa, Glycine max
  Clone ID: PAT_MRT3847_4567C.1.pep
NLLPPVLFNIPAAIACVYLRPIIAPLPVNPLLILKAFILFPSRLVKLPNPPPPPPPPTPPPPPPPPPPPPSRR

SEQ ID NO: 225525 - protein, 69 aa, Glycine max
  Clone ID: PAT_MRT3847_45680C.1.pep
RLECRLLAKWFYFIITAMSLFLPGILKVSYTLRCLHLATTKRLVWPNILCFSLLKRTPRSNKRDWKFCP

SEQ ID NO: 225526 - protein, 128 aa, Glycine max
  Clone ID: PAT_MRT3847_45681C.1.pep
MYLNSWLNIGGPNNRSMKVWDLGGANAVTNEAIRGSFELTPSNIQKLKQHAKSKLKENNAHVSTYSVTCAYVLQCLVKTEQPKANGVAFLFSVDCRARLEPPIPSTYFGNCIIGRRVMDETMKLLRDD

SEQ ID NO: 225527 - protein, 52 aa, Glycine max
  Clone ID: PAT_MRT3847_45682C.1.pep
LTVWQGPLYLGVGKLEIIILVLLWTKIQRSIDRISDPLYNFCIGIRNFPDVF

SEQ ID NO: 225528 - protein, 62 aa, Glycine max
  Clone ID: PAT_MRT3847_45683C.1.pep
THNAVEELNFRRTGKSMGRPGRRRAEDPDSYLYGNPETQVRPPLISVIYVPEFPRFCLWGSE

SEQ ID NO: 225529 - protein, 108 aa, Glycine max
  Clone ID: PAT_MRT3847_45684C.1.pep
HSLCSRISSSTKPLTCGPSSSRASLPLTSTSFSTSSCSSPPTPSSTPYHPPQSRSSLRKPPTFLPLYKRTTTPPPLRNTSTKRNRLSATTPLLKVTALLATFTTRTRR

SEQ ID NO: 225530 - protein, 334 aa, Glycine max
  Clone ID: PAT_MRT3847_45685C.1.pep
MGYVSMKVVLISTGVLSMAMGLKLTLPLLSHFLLNQAPHVWTFLLTCFTPPYLYILLNFIILTIVASSKLNNHHHSPPDTTVLLPSDPVIYALPPAAVQILAPETVNISAAVQTDYNAVASEKYLYETKPTLSYDTVTEGNGSVGYVYDENTPVKATVNNNDDDDDEAVGVVSPSLQRKDSSDFAFANENLKPPVSARFSHRKSVRASPEGGKVVALGVAKAKKQETLESTWRTITEGRAMPLTRHLKKAETWERETPLRDLNGGGKLMKKSETFAGREKNASARLLRKEPSLSQDELNRRVEAFINKFNADMRLQRQESLRQYKEMMMNRGAH

SEQ ID NO: 225531 - protein, 90 aa, Glycine max
  unsure (1)..(90): unsure at all Xaa locations
  Clone ID: PAT_MRT3847_45686C.1.pep
XSQLXLFXLLXNLNQIINHPFXXHHXVGEENHAEXFGRRGFRGXXGGXAGSXQXXXAHDRGRLXRXAASLXPNVXSMILAKVIXYARSTS

SEQ ID NO: 225532 - protein, 79 aa, Glycine max
  unsure (1)..(79): unsure at all Xaa locations
  Clone ID: PAT_MRT3847_45687C.1.pep
TTLPQGXRLXXLILSSXGLXHSXXMPDXGATHRFIHRXXPNKLYGXMGTLCRSXXGXXKHXXGXXLXGXXWFAXDSXYP

SEQ ID NO: 225533 - protein, 151 aa, Glycine max
  Clone ID: PAT_MRT3847_45688C.1.pep
PFVRPRVRNYGATSPTKSVQEVKPVALSWHGLTAVHAKSGRKILDDASGMADAGQLVALTGDGGVDKTALLNTLLDHNLKTLSVEGQVLINAHSLGRFITYVIGYVQQDDLFMGTPTVKEHLMAPAQLWMVGHTQRTMRRRVNELEEPFRR

SEQ ID NO: 225534 - protein, 31 aa, Glycine max
  Clone ID: PAT_MRT3847_45689C.1.pep
MDETYFLVSHVSFKLLFTLVDILIYPVLFIF

SEQ ID NO: 225535 - protein, 133 aa, Glycine max
  Clone ID: PAT_MRT3847_4568C.1.pep
MEGSNEQDKAKKGLEGTAIDLPTNRRVNLKSATSDDDFTNILAHIKSSKTPAVIKYGAPWCPVCIQILPAFCRLSNNFPKLTFVYTDIDECPETTQHIRYTPTFQFYRNGEKVDEMYGAGGEERLHDRLWLHS

SEQ ID NO: 225536 - protein, 80 aa, Glycine max
  Clone ID: PAT_MRT3847_45690C.1.pep
ENLSADAGMALLVCMALPKIEGNSVPLLLSSTVRYDTPSCGYCTLACLSVLPGCHLVQSQRHHLLVTVFGVCLHLLLLYW

SEQ ID NO: 225537 - protein, 93 aa, Glycine max
  unsure (1)..(93): unsure at all Xaa locations
  Clone ID: PAT_MRT3847_45691C.1.pep
RNMNRAEGSERGQTPVQKGTGTRMPTAPKTEPGQKVMQPLENKAQAKTPRTQQKPRGMQAAQTKXVKVREGSLDGQRQGQAKLITKLEGDRKR

SEQ ID NO: 225538 - protein, 39 aa, Glycine max
  Clone ID: PAT_MRT3847_45692C.1.pep
NTYVWVFDNRSCPTLTMMFISGIVNSERLRLVFIITIHC

SEQ ID NO: 225539 - protein, 49 aa, Glycine max
  unsure (1)..(49): unsure at all Xaa locations
  Clone ID: PAT_MRT3847_45693C.1.pep
MFLGPFFFLKKKKKKKKKKKKKKKKKKKKKKKNKKKXKKKKTQRXXAVF

SEQ ID NO: 225540 - protein, 314 aa, Glycine max
  Clone ID: PAT_MRT3847_45694C.1.pep
MMGRVMEKPSQDLLQQQQQALKCPRCESSNTKFCYYNNYSLSQPRHFCKACKRYWTRGGTLRNVPVGGGCRKNKRVKRPTNHGDSSSSAANSPSSSNSNPPSQPHLDNIIASSSTTNHINNISPFFYGGDVMSSVPFPRFNLHSQLNALGLGFSTGVSENGFSTSNNNSFFSAYNSMFGSSSSSTCAPSTPVMASLLSSTLLQQNLMGGGGGGVKGRDHDQGDNTFHGLAPLQGLRVEGDSNNNIGSKEVKGEGQNRFEWSNNNNNNNNNGGGGQNQMEHVGLSDPNSLYWNTATGLGAWSDQPNIGPSVTSLI

SEQ ID NO: 225541 - protein, 537 aa, Glycine max
  Clone ID: PAT_MRT3847_45695C.1.pep
MGGVRWGRPESSSSMKLFLLMVPLVLVAGLVSVLGPNPSSWLFSANAPVLYLEGSVTSSSSTSSGAVTVTNPSEVKQREGLVVVAVENRGGEKVISDDTDFNHSSTPPFSVQAIQTPQQPNKDEQNVSQLWPNVTRVNESYVPPERPKLQRKFSILDRTEAGLRQARAAIREARNGNQTQDIDYVPVGPMYNNANAFHRSYLEMEKQFKVFVYEEGEPPVFHNGPCKSIYSMEGNFIHAIEMNDQFRTRDPEKAHVFFLPFSVAMLVQFVYVRDSHDFGPIKKTVTDYVNVIGGRYPYWNRSLGADHFYLACHDWGPETSRSIPNLNENSIRVLCNANTSEGFKPSKDVSFPEINLQTGSINGFIGGPSASGRPLLAFFAGGLHGPIRPVLLEHWENRDEDIQVHKYLPKGVSYYEMLRKSRFCLCPSGYEVASPRVVEAIYTGCVPVLISDHYVPPFNDVLNWKSFSVEVSVKDIPRLKEILLSISPRHYIRMQRRVGLVRRHFEVHSPPKRYDVFHMILHSVWLRRLNFRVHHDQ

SEQ ID NO: 225542 - protein, 77 aa, Glycine max
  unsure (1)..(77): unsure at all Xaa locations
  Clone ID: PAT_MRT3847_45696C.1.pep
NYKLLIKDHATSVDRAATLKRKGCYPDPKGASPYLDLECSGTGLSLGKSVFSXKIGDQVCALVAGCRCADKVAFPEG

SEQ ID NO: 225543 - protein, 210 aa, Glycine max
  unsure (1)..(210): unsure at all Xaa locations
  Clone ID: PAT_MRT3847_45697C.1.pep
TRPQLLEDLELSKQSFKEEMQQIMEENRTLHELNFSSTRSLKNQQMEISELKKIKEKLEREFAVKVEESNVLQWESHQIKDEILGLNNRYQAILEELGSVGLNPKSFAASVKDLQKENTMIKEACKMERDEKEALHEKSKDMDKLLSENAYMGSSLSNLKDELHGLRDTVKKFQESWGVLRREKCILGCEKTSLLXQVQIMTEKVQNLLG

SEQ ID NO: 225544 - protein, 164 aa, Glycine max
  Clone ID: PAT_MRT3847_45698C.1.pep
PLLAFFAGGLHGPIRPVLLEHWENKDEDIQVHKYLPKGVSYYEMLRKSKFCLCPSGYEVASPRVVEAIYTGCVPVLISDHYVPPFNDVLNWKSFSVEVSVKDIPRLKEILLSISPRQYIRMQRRVGQVRRHFEVHSPPKKYDVFHMILHSVWLRRLNFRVHDDQ

SEQ ID NO: 225545 - protein, 75 aa, Glycine max
  Clone ID: PAT_MRT3847_45699C.1.pep
KVHSAGPSQHLARLTPKRFFDLHQVGNKEATEKERAGLADEMTRGYLVDMAEFKKHAGKMAAANKLKIPVMRATK

SEQ ID NO: 225546 - protein, 94 aa, Glycine max
  unsure (1)..(94): unsure at all Xaa locations
  Clone ID: PAT_MRT3847_4569C.1.pep
EERGNRVRVRVRVRLTXXPNPXXXPTNTNTGPTEAHDKNRELVFSVDRHYYSRALRMLGNGRCEAMRYHXTKMLCHIRCESHKWLWIATGNVLL

SEQ ID NO: 225547 - protein, 174 aa, Glycine max
  Clone ID: PAT_MRT3847_456C.1.pep
PRVRVCEGEAAKNIQRPWHAVWKSKRLMNIVTEISGRLDWDFDAVHVVRGEKAQNKELWPHLDYDTSPDVLVEKLKWMVQPWRHLYIATNEPYYNYFDKLRSNYKVHLLDDYKELWGNTSEWYNETTLLNNGKPVEFDGYMRVAVDTEVFYRGKTRVETFYNLTKDCKDGVNTC

SEQ ID NO: 225548 - protein, 33 aa, Glycine max
  Clone ID: PAT_MRT3847_45700C.1.pep
VSMGIVVKPVKKEKILEHTRFKIQAIVIFEPLF

SEQ ID NO: 225549 - protein, 104 aa, Glycine max
  unsure (1)..(104): unsure at all Xaa locations
  Clone ID: PAT_MRT3847_45701C.1.pep
PLVFARLVVPLLLLSCXLXVPVGXAWGAWFLLFVLLRLSPRGLLSLGFSXXPAVFFXGXSXFSFAXFLLXVXXXPXXXLFCVPXLSXXXXXXAFLFPLPCXFGL

SEQ ID NO: 225550 - protein, 82 aa, Glycine max
  unsure (1)..(82): unsure at all Xaa locations
  Clone ID: PAT_MRT3847_45702C.1.pep
RLRVRAGSHSLERMDLKSTTNRSHFCIEREVKTKGGNIGSSRXRQQMGKTFDAFKTYATHXVELLVDCVRNPAFLEREDNEQ

SEQ ID NO: 225551 - protein, 41 aa, Glycine max
  Clone ID: PAT_MRT3847_45703C.1.pep
KWGLKMIRTYFFGENIIRACRLPSPQTVKKQKSLFFIKSLF

SEQ ID NO: 225552 - protein, 57 aa, Glycine max
  Clone ID: PAT_MRT3847_45704C.1.pep
KKSPPFIKEVSGSVPIYKSHLLFKNVWFSSTQTGRKKPSTGFLQRLLSCFLKKKACL

SEQ ID NO: 225553 - protein, 60 aa, Glycine max
  Clone ID: PAT_MRT3847_45705C.1.pep
PGWTHSSVRTSQHPFFLPQTYSSLMPLDLLFITLDFISPLPFTFTHMNQSSSIHLSLPNN

SEQ ID NO: 225554 - protein, 86 aa, Glycine max
  Clone ID: PAT_MRT3847_45706C.1.pep
MAMKRAVQSLLASSSTLTRNLHASGEKKKIVGVFYKGNEYASNPNFVGCVERALGIREWLESQGHQYIVTDDKEGPDSGYIYILLT

SEQ ID NO: 225555 - protein, 58 aa, Glycine max
  unsure (1)..(58): unsure at all Xaa locations
  Clone ID: PAT_MRT3847_45707C.1.pep
GXXLFVHYFXXIXXPXGHRXHCRXXYXMIXXSPLLQXCXXIHXLGSLXXKVWGHXSLL

SEQ ID NO: 225556 - protein, 46 aa, Glycine max
  Clone ID: PAT_MRT3847_45708C.1.pep
EKLPRRKIFDKPKSLCFTILPMEFILVVRQKFLNFREVHYSLKGHL

SEQ ID NO: 225557 - protein, 77 aa, Glycine max
  unsure (1)..(77): unsure at all Xaa locations
  Clone ID: PAT_MRT3847_45709C.1.pep
SNGQAAXILGTYNATTSLLVAAMVHPSKKTCFILSATRNLKSNLTQWVSACFSDITEVNEGSFETNEEILGDNATKL

SEQ ID NO: 225558 - protein, 86 aa, Glycine max
  Clone ID: PAT_MRT3847_4570C.1.pep
SLVYRRIPDLTTMDLLLDTLVIGQEKEHLMAQSLDRPHKEFDMAYKDFYLNLKAATEDDDWAKSFHLLEHARSIAKKLIGRSMQYV

SEQ ID NO: 225559 - protein, 73 aa, Glycine max
  Clone ID: PAT_MRT3847_45710C.1.pep
PASGSKSGRDEIKLIFGTTNPRFWRLRPLAFKKNPPLFEAPQNFGGPPGFFFKAKNGPPRPNSIILKRAYSKK

SEQ ID NO: 225560 - protein, 93 aa, Glycine max
  unsure (1)..(93): unsure at all Xaa locations
  Clone ID: PAT_MRT3847_45711C.1.pep
GYGGAGRLCVCSDGGAAVGGYGGGGGGATNRSIGAGGVDRGGYGGGAGKGGVLXFCGCGTNGGGYAGGGAQPFGRGVCCCASVCAKQCSATNE

SEQ ID NO: 225561 - protein, 84 aa, Glycine max
  unsure (1)..(84): unsure at all Xaa locations
  Clone ID: PAT_MRT3847_45712C.1.pep
HHFQWLQQQFLFLSHXMLSSIGFSFQLCSSSFFIVVHLSMFVRVAHLSSSLLFLTHLHFLLSSSCLFFLHTLSVVNTEILQTPC

SEQ ID NO: 225562 - protein, 87 aa, Glycine max
  Clone ID: PAT_MRT3847_45713C.1.pep
WHEMLLPPAQQFSELRHLRPIDRQGVLRNFLAPPGPGLDYLDVPHHHHYPQPLISNFTSHPVISAFPSTTPHAYRVRDSGTFASDRS

SEQ ID NO: 225563 - protein, 72 aa, Glycine max
  Clone ID: PAT_MRT3847_45714C.1.pep
TGVLIVTHNKQTARGEYIIRAKAHVATVLHLLPSSVIYAIYEIRLLLTVNLYFATTSTYNYDYILTLVYVYR

SEQ ID NO: 225564 - protein, 118 aa, Glycine max
  Clone ID: PAT_MRT3847_45715C.1.pep
MEDHQKVEMQNKARVEVLYKALLGQGTMDNVAKLLASDLEWWFHGPPHCHHMMKVLTGETDHTKGFRFEPRRVTAVGDCTIAEGWEGKAYWVHVWTLKNGLITQFKEYFNTWLVVRDL

SEQ ID NO: 225565 - protein, 182 aa, Glycine max
  Clone ID: PAT_MRT3847_45716C.1.pep
MGCCLSKKGSEPEEHIGYRHVAGAGGAGVYNNHKSHEPFATQTKPPPHQPYQLPEKHAPPQAPWRPPPSPKHVHNHDTITGKPFEDVKQHYTLGKELGRGQFGVTYLCTENSTGLQYACKSISRRKLVSRADKEDMKREIQIMQHLSGQSNIVEFKGAFEDKQSVHVVMELCAGGELFDRII

SEQ ID NO: 225566 - protein, 42 aa, Glycine max
  Clone ID: PAT_MRT3847_45717C.1.pep
LTRTLTRGQTRWMTRTFRDWFVLSTQLLFSPFSWQPNTLINQ

SEQ ID NO: 225567 - protein, 186 aa, Glycine max
  unsure (1)..(186): unsure at all Xaa locations
  Clone ID: PAT_MRT3847_45718C.1.pep
MGCCMSKKGSEPEEHIVYRHVAGAGGAGVYNNHKSHEPPSHQPYPLPEKHAPWRPPPSPKHVHKHDTITGKPFEDVKQHYTLGKELGRGQFGVTYLCTENSTGFQYACKSISKRKLVSRDDKEDMKREIQIMQXFEWTIQHXWSSKGAFEDKQSVHVVMEAVCLVVKLFDXDIAKGHYSERAAASY

SEQ ID NO: 225568 - protein, 62 aa, Glycine max
  unsure (1)..(62): unsure at all Xaa locations
  Clone ID: PAT_MRT3847_45719C.1.pep
DLSVIQDLDLFLWNITTELVSYCEEGFNVSRLACTRCEFYPDYKLIYKMYEXLPYIIFDMAM

SEQ ID NO: 225569 - protein, 231 aa, Glycine max
  unsure (1)..(231): unsure at all Xaa locations
  Clone ID: PAT_MRT3847_4571C.1.pep
MEAQASVALIVGVTGLTGLSLAETLKKPNCLGGPWKVYGAARRPPPSWFSPSMVDHFITFDAEDSSDTRAKLSPIAHEVTHLFWVTFQIHADEEYNATVNKTMLLNLLTALKSSTTSRLAHVTVQTGTKHYMGPVFDPVHSTQLIGHQPPFDENMPRLPYPNFYYALEDLVASYAPSLTYSVHRSSIIIGASSRSVYNALLTLATYAVICRHVXLAFXYPGTRYTWEHFCD

SEQ ID NO: 225570 - protein, 85 aa, Glycine max
  Clone ID: PAT_MRT3847_45720C.1.pep
VVYVLRRGHRYTLRPISCTLTNSYPHTIYLTMYLRETSLVSNHVKTPFMTYIYSYFSARTICEFALFPLVDATTNLLTYIMITMT

SEQ ID NO: 225571 - protein, 32 aa, Glycine max
  Clone ID: PAT_MRT3847_45721C.1.pep
KSGNNSLHIEHFGCSMTIYVSDTDIAINAYSD

SEQ ID NO: 225572 - protein, 100 aa, Glycine max
  Clone ID: PAT_MRT3847_45722C.1.pep
EAFGHKAQDVKYVPKHFRYPFVNDTVKRSARYYSPAWRTWAAVAIQLAWRRYQHRLTLTSLSFIRPRRPLSRSTSMEEDRLRLYTAMLTSPKPNQDDFDF

SEQ ID NO: 225573 - protein, 89 aa, Glycine max
  unsure (1)..(89): unsure at all Xaa locations
  Clone ID: PAT_MRT3847_45723C.1.pep
GVIISVHARVTDVNGLRGQLXVRDFLHLNLDFQLTSDEFGERPLKIDAMFGSLKSSATIRTALSQVANLITGVTRGXAHKMTFVYANFP

SEQ ID NO: 225574 - protein, 79 aa, Glycine max
  Clone ID: PAT_MRT3847_45724C.1.pep
ITESYKNNIKVAKKKLAKVGQKFQQSFPLLLHNSNKSSLTITMGRAGMRSIQKLYPVVKVMIKKQKTWSLSSKMHQKVA

SEQ ID NO: 225575 - protein, 67 aa, Glycine max
  Clone ID: PAT_MRT3847_45725C.1.pep
YQEVVRIFLLLCVRALKGKKITLCAGDRLSESFCLPLLGYVLNTLLFDIGLRVRCKLHLLLSQLCVQ

SEQ ID NO: 225576 - protein, 70 aa, Glycine max
  Clone ID: PAT_MRT3847_45726C.1.pep
GDISKLQKTLKLAITQRPTFTPNCASTHVYTREADNCRWNGSHAEGNYTTKTMGVHIFDKRVPNTAIEYD

SEQ ID NO: 225577 - protein, 87 aa, Glycine max
  Clone ID: PAT_MRT3847_45727C.1.pep
GWFFFFFLFLLLFVGGQKRGLRPRGCKKKTFFGGTLKTNNGRGFKNGGTGKTGGSPKLRGWKKNPLSPGGIKKKRPRKMALTKPGPD

SEQ ID NO: 225578 - protein, 70 aa, Glycine max
  Clone ID: PAT_MRT3847_45728C.1.pep
SVAGQPAWAGLAHFDSSSRDLYIWKEFENFLIVFYYKNTYVWHQNLTFVCIERLKLIIFITRLNTLNCVR

SEQ ID NO: 225579 - protein, 105 aa, Glycine max
  Clone ID: PAT_MRT3847_45729C.1.pep
PNATLPRSGWCIIHDNSRAGRVPDCKKASRPIPTKKSSTSHLGATGMYLVPPRIEPCVASDPGSFCHRQQAGPSSRRAEISLSIGAPALPSGPGQQLNAGWSRSL

SEQ ID NO: 225580 - protein, 176 aa, Glycine max
  unsure (1)..(176): unsure at all Xaa locations
  Clone ID: PAT_MRT3847_4572C.1.pep
WYSAGAKGVTMSFNLYPRSDAWSWEFLMRTGFHCDLICVTGWTATPFQDVQVTIVGGISSQECVPRTYGVLNPQSPSAFYRWMGKWTIPQGTSRSVXIMPFFIRGGAGANNALLMIMPNAALSLCTYLAGNLVFDGSKMTSSYIKCTALFVKTLCKLXADDTINCEAFSPQAGAAC

SEQ ID NO: 225581 - protein, 94 aa, Glycine max
  Clone ID: PAT_MRT3847_45730C.1.pep
HRLRNYRFGTTGHSFYDDNAFADGKIYTGGLEFYGGDGPGGNTREGTRFFAHTRVKLKLQKIAFRTQRTHGDRDRKPHSRGGNQPGFIKKYIYI

SEQ ID NO: 225582 - protein, 147 aa, Glycine max
  unsure (1)..(147): unsure at all Xaa locations
  Clone ID: PAT_MRT3847_45731C.1.pep
RAARAEESEGKDPSILTNESQRDARVLEWRPNGGKMLAVGCKGGICMWAASYPGNAASVRSGAASFLGGLSRSSGNRYILVDFLRSPYDEHVSALSWSPDGRYLASASYESSSFTVWDXAQGVGTPIRRGLGGISMLKWSPTGDYFF

SEQ ID NO: 225583 - protein, 201 aa, Glycine max
  Clone ID: PAT_MRT3847_45732C.1.pep
MQAIIISFLLIITSLLFSSFFLLLFPFLHCWQFGSHKKLPPGSMGWPYLGETLKLYTQNPNSFFSNRQKRYGDIFKTNILGCPCVMISSPEAARIVLVTQAHLFKPTYPPSKEKLIGPEAVFFQQGAYHSMLKRLVQASFLPSTIKHSVSEVERIVIKMVPTWTYKTINTLQEMKKYAFEVAAISAFGEIKELEMEEIREL

SEQ ID NO: 225584 - protein, 63 aa, Glycine max
  Clone ID: PAT_MRT3847_45733C.1.pep
RLDTCSIFLWNCLFASLKCVGGLQCIALLSQTRSKRENCQSSSTADLTHPGCALPRVSSNLLA

SEQ ID NO: 225585 - protein, 121 aa, Glycine max
  Clone ID: PAT_MRT3847_45734C.1.pep
VCGNNGCVVPLVVLGRPRVSLLFSRGLWPWRSGRGILCVFFVVGVVRCVCWSSAGFSWWARVSCLRWVRPCLLCAPPVASAGCMVRCVVRFAAACAVRCPRRCEGSSVRFLLEGGGVVSWF

SEQ ID NO: 225586 - protein, 51 aa, Glycine max
  Clone ID: PAT_MRT3847_45735C.1.pep
ERDVNVLQITCVHGTHWLVLYIRARLSVQVVATILFIGVSYTIGFYSEQRL

SEQ ID NO: 225587 - protein, 139 aa, Glycine max
  Clone ID: PAT_MRT3847_45736C.1.pep
MELSSSFTHSHNLFSFSSSLTPTLRRQTLRVSAVTIDPPQELPKNSPQRLLKELAERKRPSPRTPRAPPRRFILTRPLDDKRVADRFLNSPQLALNTFPLLSSCLPFSPLDHLDKSWMENHLMEAKQALGYPLEPSLTL

SEQ ID NO: 225588 - protein, 49 aa, Glycine max
  unsure (1)..(49): unsure at all Xaa locations
  Clone ID: PAT_MRT3847_45737C.1.pep
WIVRAGGFFXFFFFFWSTKNTIYRSGRRLIYDLPKNKRPFVLILELPRT

SEQ ID NO: 225589 - protein, 50 aa, Glycine max
  Clone ID: PAT_MRT3847_45738C.1.pep
LNYTLNYIFAFNFHSCLNCFSYYWLSYNKITFSKGGSFIIFNHYFLISVI

SEQ ID NO: 225590 - protein, 204 aa, Glycine max
  unsure (1)..(204): unsure at all Xaa locations
  Clone ID: PAT_MRT3847_45739C.1.pep
MDAREPLRPPPPTIMAGPTSYGSANIGPNSSATVSAMLAPATAQFPFAAVPQQHQPPPSSEPFPASAYDGSSSPMKACSLAKKKRGRPRKYSPDGNIALRLAPTHASPPAAASGGGGGGDSAGMASADAPAKKHRGRPPGSGKKQLDALGAGGXLGFTPHVILVESGEDITAKIMAFSQQGPRTVCILSAIGALGMSPFTVCMD

SEQ ID NO: 225591 - protein, 93 aa, Glycine max
  Clone ID: PAT_MRT3847_4573C.1.pep
FLVDEIMSYLSFVLFCFCVIHFITCMYFSAAGNQSLFVLLYSLSLSHVSFTKFSVLPGCRGKVRVCNYICFWSWTVIFIPILISFRLVNSSML

SEQ ID NO: 225592 - protein, 66 aa, Glycine max
  Clone ID: PAT_MRT3847_45740C.1.pep
FFFKTNVQSVTRSWRDALCGIFLLGLNKFQNVKSNCIKYKLFWLAVCLCIVATLYLVIHEIVIYLL

SEQ ID NO: 225593 - protein, 582 aa, Glycine max
  Clone ID: PAT_MRT3847_45741C.1.pep
KCVRSKCRCKYKANGGSSSISSNIPVSEVFWTLVDKADKKFSKIKDLPLYQRSRHDTYFYKVFKVYTQLWKFQQENRQKLIEAGLRRWEIGEIASRIGQLYFGQYMRTSDANYLSESYIFYEAILTREYFKGGLFQDVNIANKQLRFLARFIMVCLVLNRREMVQQLVNQLKVLVDECKRTFQESDFKEWKLVVQEIVRFLKAETAFMNIRPLRYSLVLDSHPDTLPHVAAAITKRHLKLRDAVLSSFHPNEVKYSELTIDTFRMLQCLEWEPSGSFFQSSGSKLSQNGATGTSRISYIQDIADPTLPANPRKAVLYRPSLTHFIAVLATICEELPSDGILLVYLSASGYCGSAQNESGCIHFGPRGDRGSNCIYPSDFLPFTRRPLLLVIDNDNSKAFKDIAEAEKGESVAMLLSPSCSPALSDCSHNSNGSLFTMFLTAPLQAFCMLLGLSGTDIDLDPFNKAEMLLSSSLNNWGLALATSDTLNPVWGQIFGDPFIRRLLLRFIFCQAVLTLYAPVYNDNKFLPTCVPSLPTPVLPPSYSYQSVILNLASMFGATKNFIFSEDVLPENIQTNIMNQLTL

SEQ ID NO: 225594 - protein, 72 aa, Glycine max
  Clone ID: PAT_MRT3847_45742C.1.pep
KQRITFAHDATHAPPYNHYFTSFHTKFKDFKFLKEEKGLTGHLYEMEPKPTNIGLIFGGVVVPNLIKHEPFD

SEQ ID NO: 225595 - protein, 242 aa, Glycine max
  unsure (1)..(242): unsure at all Xaa locations
  Clone ID: PAT_MRT3847_45743C.1.pep
MSSQQMQMQIQIQNSGGGSGNNNSSNIPVSEVFWTLVDKADKKLSKIRDLPFYQRSRHDTYFYKVFKVYTQLWKFQQENRQKLIEAGLKRWEIGEIASRIGQLYFGQYMRTSDANYLSESYIFYEAILTREYFKEGLFQDVNIANKQLRFLARFIMVCLVLNRREMVQQLVNQLKVLVDECKRTFQESDFKEWKLVVQEILRFLKAETAFMNIRPLRYSLVLDSHXDTLPHVAAAITKRHLK

SEQ ID NO: 225596 - protein, 121 aa, Glycine max
  Clone ID: PAT_MRT3847_45744C.1.pep
PTPKKKQGSNCIYPSDFLPFTRRPLLLVIDNDNSKAFKVIAEAEKGESVAMLLSPSCSPALSDCSHNSNGSLFTMFLTAPLQAFCMLLGLSGTDIDLVCYKHPFLFLSKFLKKKKEIIFIF

SEQ ID NO: 225597 - protein, 72 aa, Glycine max
  Clone ID: PAT_MRT3847_45745C.1.pep
VELGDVKYVRGIYTDHVKGRDRDYHVFSMGTYLGLIGKRISTPSDVIYAGLGTHYVPSGKLGLFMDALYVRM

SEQ ID NO: 225598 - protein, 37 aa, Glycine max
  Clone ID: PAT_MRT3847_45746C.1.pep
VHQKKNKGAVIAPLARFKKGCIIVRDISHYQCLLIAL

SEQ ID NO: 225599 - protein, 782 aa, Glycine max
  Clone ID: PAT_MRT3847_45747C.1.pep
MYPSNLGGSGRGNRLNHATVSKLEAIFRECPYPNENRRRQISEELELSLNQVKFWFQNRKTKLKVVYYFLYDASFLRTIIYTLVLCNFQAISERIDNNALRRENENIQSENLLMRESLQNAFCLSCGGLPVGSVERKLQLQSLKAKNIQLAKEARGRLLNPIVGLPSPYQHSHVLSTPGFNQDIPAPAPALDCYIPDPPSDDVALDYCIPTPASVLAVDHSIPALASDPWLGQDIPHLPTLATLDQDIPPLGQDTSTLPQDHMPKDLDQELDALRGILNNDLIFQSIINQRIDLDNAMMSQIANNAIEELIKLLDMNQPFWSIHDWKLVLKRDNYQSILGRRHCLPGPHARIESSKDSRIVDMNAEQLVQMFMNLEKWVDLFPTIVTKAQTIQVLENGLVGNRSGALLLINAEMHILSHLVPTRQFYFLRYCKQIKEGVWVIGDVSIDSLEYKTIVPRIWRRPSGCLIQEMNHGLCKVSWVEHVEVDDKMQTHQLFTDVICCNNAYGAERWLSTLKRMCERFACASAETIPSCDESGEAILSLEGKKSVMHLAHRMVKTFCRTLDVSDCENFPYLTRMMNNGEVTIIVRKNNSEQDVPQGLILSAATSFLLPHSPENVFDFLIDNKKRAKWEPFWYGKPGHEIQRISTGNNPGNFISITKALGPSDNNMIVLQESYADGLGSMMVYSAFDTETMNFAMRGEDTSQLLVLPSGFTISGDGHSNAFEGQSRQVVSKGSLVTLMLQVLASSTPSMDMIDMEFVGSVTTLVSSTVEKIKAALNCSN

SEQ ID NO: 225600 - protein, 67 aa, Glycine max
  unsure (1)..(67): unsure at all Xaa locations
  Clone ID: PAT_MRT3847_45748C.1.pep
ASRGKKEGGTREXRGASNKQETRPGTQGEREAGIFHLSLCYHRTRGLGSXGGPPPPKPLSLTENTPN

SEQ ID NO: 225601 - protein, 72 aa, Glycine max
  Clone ID: PAT_MRT3847_45749C.1.pep
IKLKHYYNYNLIKQINKINFLFLSPKIYFKDSSNIFPYKNSINCINHTNLNNTQTRYNLFITTQIIIITKSP

SEQ ID NO: 225602 - protein, 296 aa, Glycine max
  Clone ID: PAT_MRT3847_4574C.1.pep
SNKFASRLWGDYYFHPDTRAFKKKPPASGGERSFVEFVLEPLYKIYSQVIGEHKKSVETTLAELGVSLSNAAYRLNVRPLLRLACSSVFGPASGFTDMLVQHIPSPRDAAIKKVDHIYAGPKDSSIYKAMAQCDSYGPLMVNVTKLYPKSDCSVFDAFGRVYSGKIQTGQAVRVLGEGYSPDDEEDMTVKEVTKLWVYQARDRMPVAEAPPGSWVLIEGVDASIMKTSTLCNVDYDEDVYIFRPLQFNTLSVVKTATEPLNPSELPKMVEGLRKISKSYPLAVTKVDESREHTILG

SEQ ID NO: 225603 - protein, 100 aa, Glycine max
  Clone ID: PAT_MRT3847_45750C.1.pep
GVRGEMTGEENNPKEKKDTLKGRTPQGKGQRGPPGRKETLIYRGSTIWKTKTGGSKKRCKTQAKGNPEEEETGHSNPERSRELLSTRAIRRKRKTTQLGG

SEQ ID NO: 225604 - protein, 48 aa, Glycine max
  Clone ID: PAT_MRT3847_45751C.1.pep
KSFIQFISFSLPISVFNEKFIQTKLVSFTDICGPLLFCYDLELVVYVF

SEQ ID NO: 225605 - protein, 94 aa, Glycine max
  Clone ID: PAT_MRT3847_45752C.1.pep
VRLRLKSTDRLLPSPSLSEAAHSVSFLLSGEFFLRTCMLICMSPSWTKNPSLNFFYFIRFTRITKEEFAELYVPCGLLYLQLLLDCTGRVGRAG

SEQ ID NO: 225606 - protein, 84 aa, Glycine max
  unsure (1)..(84): unsure at all Xaa locations
  Clone ID: PAT_MRT3847_45753C.1.pep
MASQVCKSAYRATRFLLYSPFHSQGRALGAAAAVSLRSKVPLFLXKNGSGNGSASSSSLLSWISGALALTDAAYMFQDQDVQAA

SEQ ID NO: 225607 - protein, 66 aa, Glycine max
  Clone ID: PAT_MRT3847_45754C.1.pep
IKKKPRFFFFPPVFKKKQKGKTPSFFLKIKLNPPCPRGDKNPQPQGGGALGGALRVMGGPNPAWVF

SEQ ID NO: 225608 - protein, 77 aa, Glycine max
  Clone ID: PAT_MRT3847_45755C.1.pep
GSPCLLLFSVMNATLQNFFSFTVSPPQKPMSLSDNLAAAYSKKSTTFDKLDLTSYLSQSKTSELNKTKDHITYPAFK

SEQ ID NO: 225609 - protein, 365 aa, Glycine max
  Clone ID: PAT_MRT3847_45756C.1.pep
FLLQWFDNVSESLHYEDQKQSETVMEDDFFEECEYPIPTNESENLHSCKSSSKPAVTAAVVDNKKEFGSSVNKVVKEQITTTTTTSSVDEMKRILKSLNHYDALGFSRHKKIDAAVLKKEYRKKAMLVHPDKNMGSSLASESFKKLQCAYEVLSDSVKKRDYDEQLRKEESMAKSVCQRSHSSSHQDNADYRSEESRRIQCTKCGNSHIWVCTNRSKAKARWCQDCCQFHQAKDGDGWVEYKGSLVFDRPQKVEIPRAFVCAESKIFDVSEWAICQGMACRPNTHRPSFHVNMVGLEKSQRCNSSRFPWDFDAEMMDEDEEAFDLWLEQALASGLFCETSKRRKSWSPFKLHQKKGKKQWRRTSC

SEQ ID NO: 225610 - protein, 142 aa, Glycine max
  unsure (1)..(142): unsure at all Xaa locations
  Clone ID: PAT_MRT3847_45757C.1.pep
KDTIAFSIDGTERSIFPYYKTHGYGVEKFNSTLYDEWVNKGYAPTLPYTLKNYNKLGSHGFKIIFLSXRTLDKHAVTXAYLKKDGYHTWEKFIFKDSQYPYTPNAVSFITAAREKLIRQGFNIVGIIVDRWSELLGGHVRES

SEQ ID NO: 225611 - protein, 84 aa, Glycine max
  unsure (1)..(84): unsure at all Xaa locations
  Clone ID: PAT_MRT3847_45758C.1.pep
GFQTYAGGSNGGYNNDVTXPKLNVAINRFGRIGMNLLRCWHSRKDFRLDVIAINDXTSGVKQASHLIKYDSIPYKLMLLMSCLM

SEQ ID NO: 225612 - protein, 36 aa, Glycine max
  Clone ID: PAT_MRT3847_45759C.1.pep
IKMECLHHILTSLCFVLAWVAVPPLNIDAQLDLSQY

SEQ ID NO: 225613 - protein, 72 aa, Glycine max
  Clone ID: PAT_MRT3847_4575C.1.pep
KKKARCSLRFSLMEVDFTEHLVIQLRLWHLMRLVLLEGQECQCIGSKYGYKGMVGEVTKDELKLMTMCQEAR

SEQ ID NO: 225614 - protein, 41 aa, Glycine max
  Clone ID: PAT_MRT3847_45760C.1.pep
GPEKIKRCLFFTLGLFLILQIKLHNYSRTLHINWAFSNLKA

SEQ ID NO: 225615 - protein, 221 aa, Glycine max
  Clone ID: PAT_MRT3847_45761C.1.pep
MFRFWGSQEQQSQDGSSQSQSWYPPSVVSSPTSSRPVTPTASSSSLSQRPSSHVPPSEAAAVIAVLKDKSVDELRKLLSDKDAYQQFLHSLDQVKIQNNLKDELCKENLQLAEENLQKEPRIMELRNQCRIIRTTELAAAKEKLNELEKQKEDMLKLNSAASLLQRIQESVNKTDEESENLHQHLLDREIDLGAFLQKYKKLRTTYHRKTLVHLAAKTSTV

SEQ ID NO: 225616 - protein, 41 aa, Glycine max
  Clone ID: PAT_MRT3847_45762C.1.pep
SQMSSRPSDLETPAGHEKVLWEFPLPPPHLQDHRVNLTNGS

SEQ ID NO: 225617 - protein, 79 aa, Glycine max
  Clone ID: PAT_MRT3847_45763C.1.pep
ISVHHFNSRMSLCHVFRQSVIRFPIGKVWPPPRNGPEFIFGLSRFTIFVCAPFFFFFFFFFFFFFFFFFFFFIITQLIC

SEQ ID NO: 225618 - protein, 104 aa, Glycine max
  Clone ID: PAT_MRT3847_45764C.1.pep
PEALCPRPLGKRPIGPLRQLCENWVPGWPPLTLRGPNDLFLDVSRCRSRGPPFWCKKVLFSFFFPFFFFVFGFFFNNLWGIFSTLFFGLFSFYGYLEIWVLEGF

SEQ ID NO: 225619 - protein, 178 aa, Glycine max
  unsure (1)..(178): unsure at all Xaa locations
  Clone ID: PAT_MRT3847_45765C.1.pep
MKVKSTVFLSPKFELGPGSATIRHYYDIEFPRGHVALKSFSGEVVDEAGNPVPLHETYLHHWIVVRYTXQQRKDVTHTRYDDGLGHXNHSDYILVRNSGTCQRDILPQYYGLGSETRRTDTDVPDPFGIVVGNXHELHKGYVEKWMIKVHAIDTRGIXDKMGCTEXECDLYDGAKDEN

SEQ ID NO: 225620 - protein, 45 aa, Glycine max
  Clone ID: PAT_MRT3847_45766C.1.pep
SQCPEYETLKLRAPKVESGRQRCYSMLDIIVMKIVTIINTIITIL

SEQ ID NO: 225621 - protein, 57 aa, Glycine max
  unsure (1)..(57): unsure at all Xaa locations
  Clone ID: PAT_MRT3847_45767C.1.pep
NGDGREGEAEGSEDEVEIMNMLVIPTXFYFTKGKPGPGADVSGLRTVTKRQPCHDMN

SEQ ID NO: 225622 - protein, 232 aa, Glycine max
  Clone ID: PAT_MRT3847_45768C.1.pep
RSQEGKKTFKFYEAGGDGIAYSVGANFTPHILTVNDGEDVTMEIMSFSQQGYRAICILSANGTISNVTLRQPTSSGGTLTYEGRFEILSLSGSYITTENGLTKSRSGGMSVSLAGPDGRVMGGGLAGLLVAAGPVQVVVASFLPGHQLEHKTKKQRVEHVSTAAPMHVNPTSAAEEIRIGLGGVKPIMTPAAFQVDHIFGNGQSSGNSASDDSASFPENESNPSHADAGVAC

SEQ ID NO: 225623 - protein, 101 aa, Glycine max
  Clone ID: PAT_MRT3847_45769C.1.pep
LNVSVPLWMLSSTLLLACTPRYRLSPASFTTSLSTVTRLNTTWSPTQRVLLAVFHTPGAGLTLYYGNGSHYRVLWLLNLLNNLVGVLTIKFTYALFIVPST

SEQ ID NO: 225624 - protein, 46 aa, Glycine max
  unsure (1)..(46): unsure at all Xaa locations
  Clone ID: PAT_MRT3847_4576C.1.pep
ILNMQCMPRNGGPEYDAXAKDPKKEXEETINATKNTLINLTIMENL

SEQ ID NO: 225625 - protein, 62 aa, Glycine max
  Clone ID: PAT_MRT3847_45770C.1.pep
TPPGSPTHARAPTTFPHAGAGLTLYYGNGTHYMVLWLLNLLNNLVGVLTINVTYALFIVPST

SEQ ID NO: 225626 - protein, 62 aa, Glycine max
  Clone ID: PAT_MRT3847_45771C.1.pep
NYFFFFFFFFFGTNTLILIRPGTIKLHFQISYISFTHTFNSTQIEPIAPIYTSILLQNTWFY

SEQ ID NO: 225627 - protein, 59 aa, Glycine max
  Clone ID: PAT_MRT3847_45772C.1.pep
CILPRYLQVFGGPCYVHRPPQYTSSYTFFSSPPPPPPPPPPPPPPPPPRRRTSTHATRQ

SEQ ID NO: 225628 - protein, 63 aa, Glycine max
  Clone ID: PAT_MRT3847_45773C.1.pep
KRRSRPLLFRYLLTTSPCLISSAVAGLVQFVQEVMMPPDSSPIASEVFYAAGLVDHAATCSSL

SEQ ID NO: 225629 - protein, 83 aa, Glycine max
  unsure (1)..(83): unsure at all Xaa locations
  Clone ID: PAT_MRT3847_45774C.1.pep
LEKNKVYALDLVASTGNSKPKLLYEKHPSIYKRPVNKSXPRKKKAPRVXXRQXSPTPPSTPNPQRTKEEKRAXKGKEESENQE

SEQ ID NO: 225630 - protein, 109 aa, Glycine max
  Clone ID: PAT_MRT3847_45775C.1.pep
EEQMEEVIGPRLYCCSNCRNHVALHDDVISKAFQGKSGRAFLFTRAMNVTIGPKEDRELMTGLHTVADVYCSDCHEVLGWKYQRAYEESQKYKEGKYVLEKAKFVRENF

SEQ ID NO: 225631 - protein, 359 aa, Glycine max
  unsure (1)..(359): unsure at all Xaa locations
  Clone ID: PAT_MRT3847_45776C.1.pep
RAWLLNCLGFCGSMNITHTSSSQRKYLTVIVELQHQFSLADLRKSNNNXDKNRVLGRGLFSEVYKDSVQQKGPSDYTVGVXRFNKRGLXAFKKEIELRCXIFHPNSVTIIGFXNHIKVNNIFHEYMSNDSLADYLQSGDEAALEWEKRLEIXIGLARELHYLNTGAHRCVFNDQKSRIIVYVYKCFRPQHQRFRVHVLSSRFMTKKKKVKPHRITDTLAGTARNYTHHGTVTDQSDVYSFGMAILEVVCGRQYLIHPRETEFLEKPVEEKIDANIKGEIAPECWQVFIDIAHRCVKHEPDERPIIGEVEVELEHALLLQEQADITNTNGEYSLLSKTVIDLKLVREYFEQALFHQEDIT

SEQ ID NO: 225632 - protein, 48 aa, Glycine max
  Clone ID: PAT_MRT3847_45777C.1.pep
FPARPHASERIANHKIITSSFLLHSLYNPCMAIFSILSGSTRLYKHHD

SEQ ID NO: 225633 - protein, 46 aa, Glycine max
  unsure (1)..(46): unsure at all Xaa locations
  Clone ID: PAT_MRT3847_45778C.1.pep
RCGTALDHGXAVGYGTAKGHDYWIVRNSWGSSWGEDGYIRLVFKVL

SEQ ID NO: 225634 - protein, 140 aa, Glycine max
  Clone ID: PAT_MRT3847_45779C.1.pep
PFFFVVSLKGFYLPWALLALDLIFGNPIKPDIVGMIAGHLYYFLTVLHPLAGGKFKFKTPLWVHKIVAYWGEGTQINAPVQSNPSAGIVFKGRSHRLGGTQATTKSTAEQNEGNASASSPQPQSQSKGIAFQGKSYRLNG

SEQ ID NO: 225635 - protein, 62 aa, Glycine max
  Clone ID: PAT_MRT3847_4577C.1.pep
SLNGFPLEQWLPFFFCVGNKSGRENEVRGSKLVKLILFNAYIHQQFPFPILSSLVMFNKRRI

SEQ ID NO: 225636 - protein, 184 aa, Glycine max
  Clone ID: PAT_MRT3847_45780C.1.pep
FEGVFTGRCGTALDHGVVAVGYGTANGHDYWIVRNSWGPSWGEDGYIRLERNLANSRSGKCGIAIEPSYPLKNGPNPPNPGPSPPSPVKPPNVCDNYYSCADSATCCCIFEFGNACFEWGCCPLEGATCCDDHYSCCPNDYPICNTYAGTCLKSKNNPFGVKALRRTPAKPHWTFGRKNKVSSA

SEQ ID NO: 225637 - protein, 92 aa, Glycine max
  Clone ID: PAT_MRT3847_45781C.1.pep
YRIVSICIIIKWHREIYVKVKGKCISWCFNSSSFIYFIIGSFLHVHISFICLSTADLVLTPKGPMGFSRSTPQCLHSEWVVLALSYTENSDK

SEQ ID NO: 225638 - protein, 468 aa, Glycine max
  unsure (1)..(468): unsure at all Xaa locations
  Clone ID: PAT_MRT3847_45782C.1.pep
MTMAMATILLLFTVFAVSSALDMSIISYDNAHAATSRSDEELMSMYEQWLVKHGKVYNALGEKEKRFQIFKDNLRFIDDHNSQESELXEDRTYKLGLNRFADLTNEEYRAKYLGTKIDPNRRLGKTPSNRYAPRVGDKLPESVDWRKEGAVPPVKDQGGCGSCWAFSAIGAVEGINKIVTGELISLSEQXLVDCDTGYNEGCNGGLMDYAFEFIINNGGIDSEEDYPYRGVDGRCDTYRKNAKVVSIDDYEDVPAYDELALKKAVANQPVSVAIEGGGREFQLYVSGVFTGRCGTALDHGVVAVGYGTANGHDYWIVRNSWGPSWGEDGYIRLERNLANSRSGKCGIAIEPSYPLKNGPNPPNPGPSPPSPVKPPNVCDNYYSCADSATCCCIFEFGNACFEWGCCPLEGATCCDDHYSCCPNDYPICNTYAGTCLKSKNNPFGVKALRRTPAKPHWTFGRKNKVSSA

SEQ ID NO: 225639 - protein, 76 aa, Glycine max
  Clone ID: PAT_MRT3847_45783C.1.pep
SLIGDSFSNLHEASYFAHEGERFGKSLSLESERDGVFANGYTLGVWSGDIRWPVATGAAHNFVEREGPTENGGSGW

SEQ ID NO: 225640 - protein, 62 aa, Glycine max
  Clone ID: PAT_MRT3847_45784C.1.pep
SSSVPGDPLESTCRTGYLMELMPATSLQLSQVSFNLQFQYPSYIYMHQFRTTSVTKSFVFMK

SEQ ID NO: 225641 - protein, 59 aa, Glycine max
  Clone ID: PAT_MRT3847_45785C.1.pep
EYIKLSLRYTHMKSIREAEPDEFAHDEFIKDKCGTKKFVLTGYKRVRGTIEHGRGYKLA

SEQ ID NO: 225642 - protein, 304 aa, Glycine max
  Clone ID: PAT_MRT3847_45786C.1.pep
AVGYGTANGHDYWIVRNSWGPSWGEDGYIRLERNLANSRSGKCGIAIEFIINNGGIDSEEDYPYRGVDGRCDTYRKNAKVVSIDDYEDVPAYDELALKKAVANQPVSVAIEGGGREFQLYVSGVFTGRCGTALDHGVVAVGYGTAKGHDYWIVRNSWGSSWGEDGYIRLERNLANSRSGKCGIAIEPSYPLKNGPNPPNPGPSPPSPVKPPNVCDNYYSCADSATCCCIFEFGNACFEWGCCPLEGASCCDDHYSCCPADYPICNTYAGTCLRSKNNPFGVKALRRTPAKPHWTFGRKNKVSSA

SEQ ID NO: 225643 - protein, 162 aa, Glycine max
  unsure (1)..(162): unsure at all Xaa locations
  Clone ID: PAT_MRT3847_45787C.1.pep
MAAARLSGHELSDLCLGKPPLRSLSVRDTVADALAALKRIDDTYVSVWNCNHSFIRKQQPQIKSQEQLQCCCTCIGKVCMVDIICFLSKPQNLSSPSAAFLSPISALLHDNSAXLVRHLPPTXSLLEAIDVMHDGVQNLVIPIXIQFGSFDLNVHHNDNTTY

SEQ ID NO: 225644 - protein, 84 aa, Glycine max
  Clone ID: PAT_MRT3847_45788C.1.pep
VPLLFNERFTKHSTVAFGHLVGLLIKGPLEYLHMTLLMLKALLLHTPMDATHSPHIYANESQLVENTLGWEALSVLQAIVHRHN

SEQ ID NO: 225645 - protein, 63 aa, Glycine max
  unsure (1)..(63): unsure at all Xaa locations
  Clone ID: PAT_MRT3847_45789C.1.pep
XTXXXTSIPXXSXLXXLYXLDXYLXLKXTSQSPXHFXSXSXKXGXKXILEXNSRXLXXXXLXR

SEQ ID NO: 225646 - protein, 120 aa, Glycine max
  Clone ID: PAT_MRT3847_4578C.1.pep
TNLLLFATRRVISTRLLVKQTMSSSQKKLFTNRTNNLTKPVPNPVNRINSRPITITITGLNLVPKRMRWAKMCETTDVLAPLPDLTSNGPGPGHRLTRQIQPGNLNPCETSAVHRHLGTV

SEQ ID NO: 225647 - protein, 69 aa, Glycine max
  Clone ID: PAT_MRT3847_45790C.1.pep
SVVGSWVVSFWARPDPACFYYVSPLLTLLFLIRRVKFGSYFLYGIIPIFVLYKNIGRICKYVPKRHTPP

SEQ ID NO: 225648 - protein, 49 aa, Glycine max
  Clone ID: PAT_MRT3847_45791C.1.pep
HNLPKRTIPQTQRPLVAVNEVTFCKFFDVLLSYFGVQVYLHFLACVISM

SEQ ID NO: 225649 - protein, 134 aa, Glycine max
  Clone ID: PAT_MRT3847_45792C.1.pep
MMLGWVLFFGSLTVGVGAMSESPKWLVMRGRLGKAKKGLYKTLNRKEEAQIWLVEIKQAAGIPESCNHNRFPGTHTNTCYSVWKELFLYTTPPNCHIVIAVLGIHFFQQAFGVHSRFLFRPMIFKKAGIKDHTH

SEQ ID NO: 225650 - protein, 45 aa, Glycine max
  Clone ID: PAT_MRT3847_45793C.1.pep
TASNNDIYLIYGTLTCSQRCEIQWWVQGNREPFKALLSENSRRKR

SEQ ID NO: 225651 - protein, 149 aa, Glycine max
  unsure (1)..(149): unsure at all Xaa locations
  Clone ID: PAT_MRT3847_45794C.1.pep
MNKGAAGGLGGGAGAGSGPTAAAAAAAAQKRKTLVQRVEGDIANIVDNFSHLVNVARVNDPLVRNSQXRMVQAADSLLKLVSELKQTAIFSGFASLNDHVEQRRIEFNQLAEKTDHTLSRVGEEAAASLKELESHYSSFALKTMQNLQP

SEQ ID NO: 225652 - protein, 35 aa, Glycine max
  Clone ID: PAT_MRT3847_45796C.1.pep
FWHKIFIFISGYVFIKGTAKYNNIVYTTNKQFLRC

SEQ ID NO: 225653 - protein, 94 aa, Glycine max
  Clone ID: PAT_MRT3847_45797C.1.pep
RRRHVTVLEVQMPASRSVVSLDLKADEGAQLAGNARTHSQAKPLREQVECRASSLQQGPSKIHQHLRGLASAGQFKGSVWQHVDSEFAARAKSS

SEQ ID NO: 225654 - protein, 330 aa, Glycine max
  Clone ID: PAT_MRT3847_45798C.1.pep
MDNFWYKAGFEQMKSVQGDMPEASDIYETVRSEVRRAISEIQIDLESAIQRSNVTSIAVTNVSDVPPDLVNPGAVELVLEIRREYARKLEESQERARNLRADLAVEEHRGRELDRILKEVLPYPKTPIIQKPRPARKSSIERRRMSKRLAEDAKAYFDECVSLSTFDSSDFSSPEDPPLNFVGPPTPSGSPVCLTEESGTRGQSMNIHYDISQPPANIDTVGDFHGQVSSITDSTETGSKPCFSFAQKPSETSALQQDIQQYIKKFEKNVLKSSTMRSNYCDPREYSFQSSAESLLIDRVLLKSRIESGSLLLCGGGGNNLLSKFSGIGI

SEQ ID NO: 225655 - protein, 69 aa, Glycine max
  Clone ID: PAT_MRT3847_45799C.1.pep
PDVVTYNTLIEVHSKAGRLKDAYKFLKMMLDAGCSPNHVTDTTLDYLGREIDKLRYQRASILSEKDDPS

SEQ ID NO: 225656 - protein, 50 aa, Glycine max
  Clone ID: PAT_MRT3847_4579C.1.pep
KRETIQEWFLHPKEAFPPYFKPFPMILWPFFFPFFFGLSAIREEEKFKKG

SEQ ID NO: 225657 - protein, 109 aa, Glycine max
  Clone ID: PAT_MRT3847_457C.1.pep
IFGLGTIGKRGEGIKKNLGPPLPVGGPPPQGPTLWPHQRGKKRETPTPPKKSITVPFPPKGKNMRVLLMASTKGGGLQSWKKPPWGPCGKRAFWPKKNPPLLFLGLPQP

SEQ ID NO: 225658 - protein, 42 aa, Glycine max
  unsure (1)..(42): unsure at all Xaa locations
  Clone ID: PAT_MRT3847_45800C.1.pep
THAXXXFQISSSVCTRGASSNAQFDCAAEDPEAQVLKLIQWV

SEQ ID NO: 225659 - protein, 136 aa, Glycine max
  unsure (1)..(136): unsure at all Xaa locations
  Clone ID: PAT_MRT3847_45801C.1.pep
LHLYYVSCLDLEMQEAYXLSILLNVLQELLLHSPYDARLLLNESSLSXIEWLLKADVPTIPQIEEFHLMHRMMNAPHSNDHIDLLLSLDLLGLQGAGAAFTNKIAFDEKLVLANTQEFFDGKFXLDSWLPIFVKWV

SEQ ID NO: 225660 - protein, 105 aa, Glycine max
  unsure (1)..(105): unsure at all Xaa locations
  Clone ID: PAT_MRT3847_45802C.1.pep
XIRHXNXVTXXXEXXXXXXLXRXXXPXSXXXXXXHAXXSXXXXRXSXQHRXLXRXHHTYDXXGXXXXEQQLXDXYTPAXAKXXXSTIXXXXXSXXQXDLXXSXYY

SEQ ID NO: 225661 - protein, 175 aa, Glycine max
  Clone ID: PAT_MRT3847_45803C.1.pep
MQLFIFSARWPNFLCVCSVFSSGSVQLHWSQWPPTQNGTTPKWFCTSKGLLGCGPSGIMAGDAIITDSGAMHVAGVPIVNPSTIVVWEVAPGPGNGFQVTPKTSTTCGVPPLSPPNWDGFAALAAYLFTWQDYLLSEAKQGRKQTDQNLVDAVPLYCSPVSNFSAYVSPEAAGRL

SEQ ID NO: 225662 - protein, 51 aa, Glycine max
  Clone ID: PAT_MRT3847_45804C.1.pep
NFILFLFFSFKFQTCTCTCRSSTYTERETNRPRRNHSHSLVPMGNRSQFTH

SEQ ID NO: 225663 - protein, 45 aa, Glycine max
  Clone ID: PAT_MRT3847_45805C.1.pep
RLYYDYIWLHTLVVHMSHIRSGLANCTDFARATSTYFAPTPNTYL

SEQ ID NO: 225664 - protein, 52 aa, Glycine max
  unsure (1)..(52): unsure at all Xaa locations
  Clone ID: PAT_MRT3847_45806C.1.pep
GLTIFFSGGVIHNPLLKEDTKLARALQGRIYKLLVVXKRTRNPCLKKRPPTP

SEQ ID NO: 225665 - protein, 636 aa, Glycine max
  Clone ID: PAT_MRT3847_45807C.1.pep
MDTESRSSAKVGIDYSTMYGFRTVAQLLKYGRKGKPKFCPFRLSHDESSLIWITSSGERNLKLSSVSRIIPGQRTAVFQRYLRPEKDYLSFSLIYSNGKRSLDLICRDKVEAEVWIAGLKALIASGQGGRSKIDGWSDGGLILNDSRDLTSNNPSVSLASTSRGICSPDISVTLPNTSPKSFRSDNTISERSHAPPDPTNMQVKGSASDVFRVSVSSAPSTSSHGSAPDDCDALGDVYIWGEVTCENVKVGADKNVNYVSPRADVLLPRPLESSVVLDVHHIACGVRHASLVTRQGEVFTWGEESGGCLGHGVGKNVVQPRLVEALTSTTVDFVACGEFHICPLHIVVELYTWGDGTHNAGLLGHGSDVSHWIPKRIAGPLEGLQIAFVACGPWHTALVTSTGQLFTFGDGTFGVLGHGDRQNVSYPREVESLLGLRTIAVACGVWHTAAVVEVIATHSSTSISSGKLFTWGDGDKNRLGHGDKEARLKPTCVAALIDSNFHKIACGHSLTAGLTKSGRVFTMGSTVYGQLGNPQSDGKVPCLVGDKIARESIEEIACGAYHVAVLTSKNEVYTWGKGANGRLGHGDIEDRKTPALVEALKDRHVKYIACGSNYSAAICLHKWVSGAEQSQDRHVN

SEQ ID NO: 225666 - protein, 108 aa, Glycine max
  Clone ID: PAT_MRT3847_45808C.1.pep
INGLRRCFQNDVFIWCSFGNTFTTHVLYYAGNCSQTTRAKITTTRLWRASSRLWPSRSSSRPPNRSLSPARSISRLWPSRSSSRPPNTLWTTMKPIPSIQRGDNGVIS

SEQ ID NO: 225667 - protein, 60 aa, Glycine max
  Clone ID: PAT_MRT3847_45809C.1.pep
DEAPVNLTANGDAHIYYWVRECMTSGQGAMDEGAHEDCTVNYISLRGTKPSMVHGYAITI

SEQ ID NO: 225668 - protein, 26 aa, Glycine max
  Clone ID: PAT_MRT3847_4580C.1.pep
NVVVVVNVLLYLTHFNGYAILDLVSG

SEQ ID NO: 225669 - protein, 66 aa, Glycine max
  Clone ID: PAT_MRT3847_45810C.1.pep
DWGLTFGRFCFESPALTLAIRGAAFSFYKNRSQKKARGMFPARFFSPPGFKFGVFIPRRFGNGPFF

SEQ ID NO: 225670 - protein, 97 aa, Glycine max
  Clone ID: PAT_MRT3847_45811C.1.pep
FKKKKKKKGEKKIKKIKKKKNYKKKRTSKNFLVSLSLFFFPARFLHADHLFPFVGSPFSLGFLAPLFLSLGYFIPLIFSLLAFSRCFWCNACPVFFW

SEQ ID NO: 225671 - protein, 111 aa, Glycine max
  Clone ID: PAT_MRT3847_45812C.1.pep
MAEVQVLVLDGRGHLLGRLAAIVAKQVLLGRKVVVVRCEGINISGNFYRNKLKYLAFLRKRMNTNPSRGPYHFRAPSRIFWRTVRGMLPHKTKRGQAALDRLKVFDGIPPP

SEQ ID NO: 225672 - protein, 65 aa, Glycine max
  Clone ID: PAT_MRT3847_45813C.1.pep
PTRPPTRPKFDQCIIRFFKKEKRKKKKKKKKKKKKKKKKKKKKKKKKRKTKLKEPRLTSSMHTKL

SEQ ID NO: 225673 - protein, 49 aa, Glycine max
  Clone ID: PAT_MRT3847_45814C.1.pep
KGGFEILDLKTYLFVAPLVSTLWVGALEGLLIEINLFFSQALILPFFSF

SEQ ID NO: 225674 - protein, 72 aa, Glycine max
  Clone ID: PAT_MRT3847_45815C.1.pep
CKYLCNRFMYQFINRHSTTKICINGLKALLFRISARNYLKESRIIHLKREIIKEQIEDNSLSIQVFPFCRLL

SEQ ID NO: 225675 - protein, 132 aa, Glycine max
  unsure (1)..(132): unsure at all Xaa locations
  Clone ID: PAT_MRT3847_45816C.1.pep
HTVTALLNPKPWLAAWEVAKMEEARVLKNFPVKPKLKSKARTPKQTPESKYWSSFKTQQIPNLISVPSITFSPTPPHSFAAAHSASLTLFSSQTLCPPATISXLGDADACASFRCDARLLAGCDLFXLVQVF

SEQ ID NO: 225676 - protein, 40 aa, Glycine max
  Clone ID: PAT_MRT3847_45817C.1.pep
TDSFPTGLRSKSEPCPKVFSTFRWPFGGRWHFLHYVPGGF

SEQ ID NO: 225677 - protein, 44 aa, Glycine max
  Clone ID: PAT_MRT3847_45818C.1.pep
ILSQIFVSIYLSFVKFKISLLFFINYTLTYILIFNYFTHVFIVK

SEQ ID NO: 225678 - protein, 53 aa, Glycine max
  unsure (1)..(53): unsure at all Xaa locations
  Clone ID: PAT_MRT3847_45819C.1.pep
LFDNFSFVXKSCQRLVNSIYESSNSSKLMKSMRFPISKIAGKRNKCLHTYNFI

SEQ ID NO: 225679 - protein, 49 aa, Glycine max
  Clone ID: PAT_MRT3847_4581C.1.pep
MDQYLRSLRPQTEQALVCATDCMRYGIIRTWLCTHKDGVLDMIPDTSSM

SEQ ID NO: 225680 - protein, 41 aa, Glycine max
  Clone ID: PAT_MRT3847_45820C.1.pep
RTDDTPFMGFPFKKAPFPWIPVKSYIQQSQILISILSNRGK

SEQ ID NO: 225681 - protein, 101 aa, Glycine max
  Clone ID: PAT_MRT3847_45821C.1.pep
PIPPGPTHPLTHKLTNKLSYIQRPSLTRHLTNPESNHNIHEPYESNHNIPHPKYKTNPTTSKTTILNHPKASQSALQSKDFLYHTNSVKHSSSTTTSNNSS

SEQ ID NO: 225682 - protein, 34 aa, Glycine max
  Clone ID: PAT_MRT3847_45822C.1.pep
TLLCFASCSLISFWAFWTSWTLSCFSNVLPQSLL

SEQ ID NO: 225683 - protein, 76 aa, Glycine max
  Clone ID: PAT_MRT3847_45823C.1.pep
RINEVYSLKVMIFIKRHDLLVQTYYDGRSDFLTEVQDMPTYQAWNLHEKRDVHLMQALNALTVSRPQTKNREESTG

SEQ ID NO: 225684 - protein, 81 aa, Glycine max
  unsure (1)..(81): unsure at all Xaa locations
  Clone ID: PAT_MRT3847_45824C.1.pep
AEEGKPVEQLFQLLSTLLHQVESLSNQEEVVRRAEIEXLGLLVPPVPWGGAQPLLALGVAGELAYPSGGWAPPAGGVSFSM

SEQ ID NO: 225685 - protein, 114 aa, Glycine max
  Clone ID: PAT_MRT3847_45825C.1.pep
MANSNLPRRIIKETQRLLSEPAPGISASPSEENMRYFNVMILGPTRSPYEGGVFKLELFLPEEYPMAAPKVRFLTKIYHPNIDNLFFICPDILKDKWSPALQIRTALISIQALL

SEQ ID NO: 225686 - protein, 163 aa, Glycine max
  unsure (1)..(163): unsure at all Xaa locations
  Clone ID: PAT_MRT3847_45826C.1.pep
MANSNLPRRIIKETQRLLSEPVSDIMMICXAAPGISASPSEENMRYFNVMILGPTQSPYEGGVFKLELFLPEEYPMAAPKVRFLTKIYHPNIDKLGRICLDILKDKWSPALQIRTVLLSIQALLSAPNPDDPLSENIAKHWKSNEAEAVETAKEWTRLYASGV

SEQ ID NO: 225687 - protein, 179 aa, Glycine max
  unsure (1)..(179): unsure at all Xaa locations
  Clone ID: PAT_MRT3847_45827C.1.pep
TGPNARSTHASGLLLDLYPGGVGGKNPTSRVSKLQSDALREAISGVMGDSKGKNRKFVGTIELQIGXKNXGGQKDKRFSGSVKVPHIPRPKRKICVLGDAXHVXEAXXIGVGYMGGEGXXXLNRGKKWVKKLAKKYHAFLASEAVIKQIPRVLGPGLNKGGKFPTLGTHQESLESKGNE

SEQ ID NO: 225688 - protein, 102 aa, Glycine max
  Clone ID: PAT_MRT3847_45828C.1.pep
KAFFLSPFFFNFDQREKSPQLFFRKVQSPPVPFLNFKKTFPQFPVCKCLIWPQFFWGAKNCGGGLKGERRGELLFGFNKTFQFLPRLRGLGGNKFLWKGIGL

SEQ ID NO: 225689 - protein, 359 aa, Glycine max
  Clone ID: PAT_MRT3847_45829C.1.pep
MSTTISSLPFSLPLRQNSRVTLFNPPSSPNPSQSSVTFPKKKWRLLWFRHGNTSSKTDGSELNEDKLSEDLVKLEGVQSKDLKKDWLATILTHSLNYWLRGTSNLLRRRRHREEEVITVIRGVEPWTVPWTAKTIVQVMLLWIASFWFVGSWIVPFLAYTAGFRKESLTYRGQALCSLLTDVAEGVVGIAILRHCLAKFQPLSSDWFKFEVKGKWQFDVGLGCLMFPLINQLSQMNLNLLPVLQYTPVTISSVEQSIVARDPVAMALYAVVVSVCAPIWEEIVFRGFLLPSLTKYMPVWSAILVSSIAFALAHFNIQRMLPLVFLGMVMGTVFVRSRNLFPSMLLHSLWNAFVFLDLMK

SEQ ID NO: 225690 - protein, 68 aa, Glycine max
  Clone ID: PAT_MRT3847_4582C.1.pep
SAAPGISHHESSVSSFITPLMELCALCGSVHMSCSETSYSVYRIMSKCAHAMGMCISIDTPNKLICYK

SEQ ID NO: 225691 - protein, 41 aa, Glycine max
  Clone ID: PAT_MRT3847_45830C.1.pep
SWVMSSLVGGRKLPYDVMFLFTSNHSLIMEQVFMTLKRRSL

SEQ ID NO: 225692 - protein, 75 aa, Glycine max
  Clone ID: PAT_MRT3847_45831C.1.pep
CKSQDYAENEYMSSRHRSTKRIVWFLSGIYKFNDVSLFILLAVFIIKHDSYTKLDRWNSLIILEIYNIFSKFGIY

SEQ ID NO: 225693 - protein, 368 aa, Glycine max
  Clone ID: PAT_MRT3847_45832C.1.pep
PQYKAGASVFQMKKNKISTDESGDSVQRQGRSGRNLSLVRPGLPCGREKSENVPTMKPVQDMKPNDKSRTKYGRPPSKKQKERKILSRVGKQLNISSPDFGGEPDDDHEELYKAANAAHNASNLACSGPFWKKMESIFASISLDDASYLKQQLNISEEFDKSLSNMFGIDHDLLSVVINNKPTQGSEERKRSHCDEESTKFDALDVKKDMERLDKVTPVFQRLLCALIEEDENEESYHQSDAKNISRQCASDDSHCGSCNQIDFEPKDRDRMDSEVESEVDLQIQKNCMLDRLSCDKSTTSNTFRYPNTSSSLQSTGVWQGDEEFSLSDITHTGEICSNDLDQLQPAELSVPSFPSPDGQYQQMSLDD

SEQ ID NO: 225694 - protein, 52 aa, Glycine max
  Clone ID: PAT_MRT3847_45833C.1.pep
MFLAVKNFYLYQNVIRKISIKIILIHIFYSKIKILIYTIIYKIIPTYILKKY

SEQ ID NO: 225695 - protein, 174 aa, Glycine max
  unsure (1)..(174): unsure at all Xaa locations
  Clone ID: PAT_MRT3847_45834C.1.pep
NAQARTFQLYYCFQCNRTVRAAPDNNNPTQITCPRCFGQFICEINMPRPRLVVDFTTPDPSPEARLLEALSLMMDPPIRRFPGLIQPQPEELPVYHRHRRPRRRHPEPEPEPQHRPRTWIVFQPMDPSNPFEPINIPNRRXPGPIHGPGPIPRGLDARDYXFGARLNELIEQIT

SEQ ID NO: 225696 - protein, 73 aa, Glycine max
  Clone ID: PAT_MRT3847_45835C.1.pep
MFYLNFKSLTLCIFLESPICRTVSDAVHVLDVIVGFDPRDHEATKSAAKLIPPNGYKQFLKIDGLKGKKLGNF

SEQ ID NO: 225697 - protein, 81 aa, Glycine max
  Clone ID: PAT_MRT3847_45836C.1.pep
MAWFRAGTSIAKHAIRRTLSKGGSTYLVSRARFLPSIPSSSSSPYSRSFHSTVFKEQAAPVPRAVPLSKLTDSFLDGTSSV

SEQ ID NO: 225698 - protein, 104 aa, Glycine max
  Clone ID: PAT_MRT3847_45837C.1.pep
GELEEFKIKGLLGRPNQNFFFFFFKKKEEGVPPPPLKKARLEKTNGQICWQISPLFFKLCFFKKGKGPEGGHFFFFVLKPWLPLFLKPFKVFPCVGARLVIKKN

SEQ ID NO: 225699 - protein, 66 aa, Glycine max
  unsure (1)..(66): unsure at all Xaa locations
  Clone ID: PAT_MRT3847_45838C.1.pep
VLMQASPNRATRTFMDFESITQAMGVTTMAXLVSTCSYDHSSHAYVPHDRQWIKQRTFQHLKKLAR

SEQ ID NO: 225700 - protein, 42 aa, Glycine max
  Clone ID: PAT_MRT3847_45839C.1.pep
RLSKLQSRTSFVNTINNGDIGKTSATLLLAMTEEDYMVVIIN

SEQ ID NO: 225701 - protein, 226 aa, Glycine max
  Clone ID: PAT_MRT3847_4583C.1.pep
FGFRIEAAIHVWRLKDHKKHLSSAKSRRSWGGKVKGLVADGEKNKNNFLAQRAETLLESLKHRFPGLPQTALDMAKIQYNKDVGQSILESYSRVMESLAFNIMARIDDVLYVDDSIKRCAAADSLSLFSRGGFGGMPIQKRFSPSPFSIQHTPYASPFATPTFCSSTPVTGSPCSPARIHDVKRNAPKEGADSKTEKLATSEFERVWSYAGNLSARRASGDAPERD

SEQ ID NO: 225702 - protein, 99 aa, Glycine max
  Clone ID: PAT_MRT3847_45840C.1.pep
IPNNPKLVQKEVIMGSKFPMTQLYISPSYVIYPHSAYNYKYSNEIFSEQKFPFKFVEQALGDKWKLNDISTSSIQERSNVLMSRTQNFWNEVDLSTQQT

SEQ ID NO: 225703 - protein, 54 aa, Glycine max
  Clone ID: PAT_MRT3847_45841C.1.pep
VVVDVVSEFDVEKWKFMRIMSCNGREVFSELGVVRDINRTVRYEVIYKRFLNNY

SEQ ID NO: 225704 - protein, 59 aa, Glycine max
  Clone ID: PAT_MRT3847_45842C.1.pep
ISSLVLEDYQMFCLCLSLTIDLMYILCSYVVQPTLTNTTLPLNQRYFRLNIVYQHAPFV

SEQ ID NO: 225705 - protein, 53 aa, Glycine max
  Clone ID: PAT_MRT3847_45843C.1.pep
GQKSLIYAFVSRGTLILAEYTQFSVNFNSIAFQCLETLHATNNKFTYNCDAHT

SEQ ID NO: 225706 - protein, 98 aa, Glycine max
  unsure (1)..(98): unsure at all Xaa locations
  Clone ID: PAT_MRT3847_45844C.1.pep
ITHSLTLFFHSISTFTTYXSCPNXTFLLFTIITNIISFYILSLIQKLLYSSNIYTSILIIPYLSHFFNSLYYFQYISFFLHFIXLTYQINLYLYLLPP

SEQ ID NO: 225707 - protein, 338 aa, Glycine max
  unsure (1)..(338): unsure at all Xaa locations
  Clone ID: PAT_MRT3847_45845C.1.pep
MDEPNEAQDNRELYALLNLSPEASDEEIRRAYRQWAQAYHPDKYQAPHMKDIATENFQRICEAYEILSDPNKRQIYDIYGMEGLTSGLELGPKLNGAEEIKAELERLKRMKEREKMAAHFQPSGTIVANMSLPRYLDGNGMLRGMAMTSEIQSQLSKRNAVTIGGNLAVNGEEGGGAATAVFRHHLSEVSSVEVVASAGLRALIGVQTTRNLSSHSAATMGIALSLKDGSLNLSNLWTRQLSETASGHIELALEPHSSVTVGWQKKDQRTSASGEVKFGTGSFETSVHYTHRFSPKSLGCIVRRVGSSYLEVEVGGGKKLSKFSYVRWLYIIGIXGIS

SEQ ID NO: 225708 - protein, 45 aa, Glycine max
  Clone ID: PAT_MRT3847_45846C.1.pep
ICGNNSVRETALDRFKGRSLHTIETGARGRSRMQLWVQSTSNTIH

SEQ ID NO: 225709 - protein, 33 aa, Glycine max
  Clone ID: PAT_MRT3847_45847C.1.pep
LSTSSQLTRTLLHLPIQNRHSQPTKRIYEVIHN

SEQ ID NO: 225710 - protein, 401 aa, Glycine max
  Clone ID: PAT_MRT3847_45848C.1.pep
KNKVRSDFVRDRRRVKREYDEFKVRINGLPDSIRRRSDAYNAREEMNAMKKWRENGNEEPMESLKIPKATWMADKEPSCWPGTWTTAAPEHSRGDHASIIQVMLQPPSDEPLTGKTSDSNALDFSEVDIRLPMLVYVSREKRPGYDHNKKAGAMNALVRASAIMSNGPFILNLDRVHYIYNSQALREGMCFMMDRGGDRLCYVQFPQRFEGIDPNDRYANHNTVFFDVNMRALDGIQGPVYVGTGCLFRRTALYGFDPPRIKEESGWFGRKNKKSSTVASVSEASAEEQSLRNGRIEDEEMTSALVPKKFGNSSLLADSVRVAEFQGLPLADHSSIKYGRPPGALTLPGDPLDAATDAEAINVISCRSEDKTEWGLRAGWIYGSVTEDVATGHGMHNIGWK

SEQ ID NO: 225711 - protein, 51 aa, Glycine max
  Clone ID: PAT_MRT3847_45849C.1.pep
YLGYMGNAILRTTTCCNYKSESDQLIFYFSLPLTASWLKFNTRMMENSIMR

SEQ ID NO: 225712 - protein, 132 aa, Glycine max
  Clone ID: PAT_MRT3847_4584C.1.pep
KKSTGVIPTDVRRRHPRPHGGAPGFPIKNRPGLFRGQCFLLGGLLIKKGNQGAPSFPPEKLFAAPLPHKYSTRNPKFNTGGAVLHPPHPKNPGAPQPPFLAEKPRCPIFLKKEHAPAEGPSQHWPPRGVFFS

SEQ ID NO: 225713 - protein, 59 aa, Glycine max
  Clone ID: PAT_MRT3847_45850C.1.pep
LDKKKTSHAFLNWEKATKLHVARGDLWAGKFRPGPLFEANTKPKWGSPNPVEPITIIKG

SEQ ID NO: 225714 - protein, 108 aa, Glycine max
  unsure (1)..(108): unsure at all Xaa locations
  Clone ID: PAT_MRT3847_45851C.1.pep
MEESSTGKWGWMKMREELKKVGTIAAPMAVSSVLQYLLPVVSLVMVGHLNQLSLSSVAIATSLTNVSGFSVLSGMTGGMETLCGQAFGAXQYENFALYSSPALISLLF

SEQ ID NO: 225715 - protein, 65 aa, Glycine max
  Clone ID: PAT_MRT3847_45852C.1.pep
VLIGVSFSRNTSFTHYISRKKNHQINMEDFHKEFQEKNSDVKSRFDIGNASGKKWISMINEVMEY

SEQ ID NO: 225716 - protein, 86 aa, Glycine max
  Clone ID: PAT_MRT3847_45853C.1.pep
PPSPPLPPSSLNMFNGGPYSTDGNNRRTIKPIGVDILKRQQKVGLSRGIISTIAVSLSLAVVLCAAAAWVMFKFRDHVSQSASTPR

SEQ ID NO: 225717 - protein, 707 aa, Glycine max
  Clone ID: PAT_MRT3847_45854C.1.pep
MGSKWRKVKLAIGINMCVQVPKTVEHSSSSISSATPFSDRLSPSGDASGHCSVSSITSSASGLRLSRSKSNCSKGTCAICLNSMKAGQGHAIFTAECSHSFHFQCITSNVKHGNRICPVCRAKWKEVPFQSRSSKVSHGINRVNSPRNDSWTTLLGRVPTQQASTAPQLASPNNVAEPAIYDDDDEVLDQQTSVTEDMDEAVHNLVNTMEIRTYPEVSAIAKSASHDNFAVLIHLKAPPHSGRLSNNTESSAQNSRAPIDLVTVLDVSGSMSGTKIALLKRAMGFVIQNLSSSDRLSVITFSCTARRIFPLRRMTDAGKQEALQAVNSLVPNGVTNIVEGLRKGAKVFVDRKWKNPVGSIILLSDGQDSSINSSRINVVNDYRSLVPCSIHRNNGMGLHIPVHAFGFGVDHDATAMHSISEISGGTFSFIEDEDVIQDAFAQCIGGLLSVVVQQLHVEVQCVHRCLQLGSVKAGSYQTSLIDSGKMASIKVGDLYAEEEKDFLVTVNVPVDKSSDEMSLMIVRGIYRDPITKEMVGLGVNSEVKIQRPNVARDVVMSIEVDKQRNRLRATEAMAEARVKAERGDLSAAVSVLERCQQALSETISAKAGDELCISLAAEMKEMQDRMVNQRVYEQSGRAYVLSGLCAHSWQRATARGDSTDSTSFVNAYRTPSMVDMVSRSQTMLLRPPQSANAVKPARSYSDRQRRK

SEQ ID NO: 225718 - protein, 58 aa, Glycine max
  Clone ID: PAT_MRT3847_45855C.1.pep
LCPSLPSHRHIYCFFWCYSYHVALQICVVLSLNSRFLIIFVFVYSTYTLVICLFFNMH

SEQ ID NO: 225719 - protein, 382 aa, Glycine max
  unsure (1)..(382): unsure at all Xaa locations
  Clone ID: PAT_MRT3847_45856C.1.pep
MGNACAKGKPVAHVSSSNFSGGKKHASKPKQYSNSSEQLSAPTTSELNVPKSISSNLKSFSLNDLKEATKNFRREKGNGVAQVASSNFXWIDENTYGPTKHSTSSEQLSKNITSESYVPHNVSSNLKSFSLNDLKENLKNFRQENLEGKNRLLVYEFMQKGSLENHLFRKGVQPMAWVTRVNIAIGVARGLTFLHSLDQNVIFRDLKASNILLDSDFNAKLSDFGLARDGPTGDNTHVSTRVIGTQGYAAPEYVATGHLTPRSDVYSYGVVLLELLTGRRAVEDDRPGFSEETLVDWAKPFLSDNRRVLRIMDTKLGGQYSKKGAQAAAALALQCLNIDPKFRPPMVEVLAALEALNSSNSFTRTPKHESHATKQSGGPSQK

SEQ ID NO: 225720 - protein, 54 aa, Glycine max
  Clone ID: PAT_MRT3847_45857C.1.pep
HLRTMQGNGWLWFKTKPLMKPVDSLIWFLLTFLVSSVEWHGNKRALNFVNCDYP

SEQ ID NO: 225721 - protein, 51 aa, Glycine max
  Clone ID: PAT_MRT3847_45858C.1.pep
KATAEIGQGGILNRGSSNTYLNLQSYKTFDDLKRLKLERGSLFNIESPCLS

SEQ ID NO: 225722 - protein, 66 aa, Glycine max
  Clone ID: PAT_MRT3847_45859C.1.pep
CLRDSVLGLLFTTGGCSCQGAESTSKEGIHYAENAQPGSVKNQREHPGRELIYIRGRAMLLVYRIS

SEQ ID NO: 225723 - protein, 116 aa, Glycine max
  unsure (1)..(116): unsure at all Xaa locations
  Clone ID: PAT_MRT3847_4585C.1.pep
GPHVCTIQWWWAPPVEGGHILGTDRXPTWACIEYKSYLWTWMVIVPXGGHCARRFYNYLIVNDXRRQWLLRDPEVMTYYRELXQQAKKAINLSRHLSGLLGNQNHMRMYNQTQGIL

SEQ ID NO: 225724 - protein, 67 aa, Glycine max
  Clone ID: PAT_MRT3847_45860C.1.pep
KHYDGDRSQRNMIERLNQVEDRMLKLEEELVAKKKEEGEKMNSPKKGFKQLVKQSMKPRGKHSNKEA

SEQ ID NO: 225725 - protein, 101 aa, Glycine max
  unsure (1)..(101): unsure at all Xaa locations
  Clone ID: PAT_MRT3847_45861C.1.pep
MATTEEKILSTIDRLDNVLRHLEEIRGCNPSPXSSGASTPTSGSDXTWSSTAFSPKRLRKHCRPIENIMMETEAEGTMIERLNQVEDRMLKVSPRGNLLTV

SEQ ID NO: 225726 - protein, 96 aa, Glycine max
  unsure (1)..(96): unsure at all Xaa locations
  Clone ID: PAT_MRT3847_45862C.1.pep
STRLTRTATRTDKARGTDDVEADASPAFELLTSVKSLVRPDFHVXALNWGAREGGAYTAEAIAEMLGNSGTPCVMRGHSELMQLLNVSNEPVGDKH

SEQ ID NO: 225727 - protein, 116 aa, Glycine max
  unsure (1)..(116): unsure at all Xaa locations
  Clone ID: PAT_MRT3847_45863C.1.pep
KPGGTISNRREKPGNRQHRSRSRPTQKRTRPNNRRKQGPTGAKATQRRRPXRKTNRTPATERRENNRTEKPARRGRKKNRRTARQRPKEEQEDTRPKHGTGRRKQRNTGKNQTEPN

SEQ ID NO: 225728 - protein, 43 aa, Glycine max
  Clone ID: PAT_MRT3847_45864C.1.pep
VSGRCLDKVYNFVRLAELYYAGSHGMDIKGPTNKRVGRALVRS

SEQ ID NO: 225729 - protein, 64 aa, Glycine max
  Clone ID: PAT_MRT3847_45865C.1.pep
TSYCLESCHNHIPFLFNLHQIQPHHNTFPPIPFFSTKVRNCSQSGLIEYDSTDPMPLYLFSLTN

SEQ ID NO: 225730 - protein, 256 aa, Glycine max
  unsure (1)..(256): unsure at all Xaa locations
  Clone ID: PAT_MRT3847_45866C.1.pep
NKLYFTGFRVPISENDTAIFAKPSIQSVPSILFSEAQRLISLFFALCTKKPSLLQIVFNVYGQAPKIVKQAFHRHVPVVVRALGQSYSELLHIISDPPQGSENLLTLVLQILTQDTTPSSDLISTVKHLYETKFRDVTILVPLLSSLSKQEVLPIFPRLVDLPLEKFQRALAHILQGSAHTGPALTPVEVLVAIHGIVPEKDGLALKKITDACSACFEQRTVFTQQVLAXALNQMVDQTPLPLLFMRTVIQAXDAF

SEQ ID NO: 225731 - protein, 58 aa, Glycine max
  Clone ID: PAT_MRT3847_45867C.1.pep
PNNAWVECQRCSSSAPRMPLPTRLEPCRFTRLASLSRTPPPPSVVFSHPHGRVAERVG

SEQ ID NO: 225732 - protein, 57 aa, Glycine max
  Clone ID: PAT_MRT3847_45868C.1.pep
LSPYFHSYPTSTTMTPPKEISTVIYHNGHIPDNPVQGSVYTCANLIFIYVSRSITLT

SEQ ID NO: 225733 - protein, 374 aa, Glycine max
  unsure (1)..(374): unsure at all Xaa locations
  Clone ID: PAT_MRT3847_45869C.1.pep
TCFSRHRYRGGISEQGHWSNITGCANKPHNGNVPWWKAILATGLGVGILDIIHLMLLIRLGRGDLGNISQSXAARFYAAEVLLALEYLHMLGVVYRDLKPENVLVRDDGHIMLSDFDLSLRCAVSPTLIRNFDSDPSKRGGGAFCVQPACIEPSSVCIQPSCFMPRLFAQKNKKSRTPKAEPGMLSSTLPELVAEPTTARSMSFVGTHAYLAPERRXPFKTGSAVDWWTFGIFLHELLYGKTPFKGSGNRATLFNVVGQQLSFPESPATSYAXGRDLIRGLLVKEPQHRLGVKRGATEIKQHPFFEGVNWALIRCSTPPEVPRPVEYDVPAKFEPVDTVGVGNINNSNNSSKRMVGNNNTDMKSGGKYLDFEFF

SEQ ID NO: 225734 - protein, 442 aa, Glycine max
  Clone ID: PAT_MRT3847_4586C.1.pep
MFAFLSQIIRVLRSGSTHAQPHASGRGFKARRVSLSLPSFRILNTLLICERKANMLDQVQHPTIMDKVAGQLHLRSGVSGIRSYEGAYCHPTMYQRPSFGNYSNAALQYPVMPTCKATMDLSATATSASPVFVAAPAEKGHFLLDFLMGGVSAAVSKTAAAPIERVKLLIQNQDEMIKTGRLSEPYKGIGDCFKRTMADEGAISLWRGNTANVIRYFPTQALNFAFKDYFKRLFNFKKDRDGYWKWFAGNLASGGAAGASSLLFVYSLDYARTRLANDAKAAKKGGERQFNGLVDVYRKTLASDGVAGLYRGFNISCVGIIVYRGLYFGLYDSVKPVVLTGSLQDSFFASFALGWLITNGAGLASYPIDTVRRRMMMTSGEAVKYKSSLDAFTQILKNEGAKSLFKGAGANILRAVAGAGVLAGYDKLQVLVFGKKYGSGGA

SEQ ID NO: 225735 - protein, 133 aa, Glycine max
  unsure (1)..(133): unsure at all Xaa locations
  Clone ID: PAT_MRT3847_45870C.1.pep
MKDWEDDSTHHNMDVAGNLLETYGRSLYQYTKTTVRMVNMVQILMRGKHVXDLTPRHNTMMENAYYLYTPPDGSARVPEGDASLHHHHRKILASDLEEDTMAHALXHLQKEPSNEREPYLLKCFMNGYRGKCA

SEQ ID NO: 225736 - protein, 72 aa, Glycine max
  Clone ID: PAT_MRT3847_45871C.1.pep
MVMASLIQYDRSALSYVTITTRFRRTHKPRLRCSLDAKVCDMSDNAPKGGFSSDPEHYRGPELKVAIIGAGL

SEQ ID NO: 225737 - protein, 58 aa, Glycine max
  Clone ID: PAT_MRT3847_45872C.1.pep
KTRGVCFLLGAKIKLEAPIPSLKKPLLRSFSDRRKQTVASRGNLNAGTTVLKCLFHLL

SEQ ID NO: 225738 - protein, 77 aa, Glycine max
  Clone ID: PAT_MRT3847_45873C.1.pep
SNNYYQLMPQGSAKLYWSCGCNCNYHNEGTLTGSLRFCCALGVGKPVTAPIGAWGFNFLLFILVFLFFAKHVVWETF

SEQ ID NO: 225739 - protein, 81 aa, Glycine max
  unsure (1)..(81): unsure at all Xaa locations
  Clone ID: PAT_MRT3847_45874C.1.pep
TLIATGSRSFLIIRDTMMCTGYNILFRXLYKVVTGGEVXDMASTGFQADVKVFAQVTSAMALIYQHLHTIQMSYLFMHCKL

SEQ ID NO: 225740 - protein, 71 aa, Glycine max
  unsure (1)..(71): unsure at all Xaa locations
  Clone ID: PAT_MRT3847_45875C.1.pep
PGAGMVVPFTGLKSMVGFPXRKTTIDFTSIVTTGEKFQCMXQVWPPFGKKNFKTFSYLPNLDDPQWAKEVE

SEQ ID NO: 225741 - protein, 59 aa, Glycine max
  Clone ID: PAT_MRT3847_45876C.1.pep
MEWRSYYLDMVLVPLAYMVTVAYHVWLWHKTRTEPFSTTIGINAHARRFWVPAMLKVNN

SEQ ID NO: 225742 - protein, 92 aa, Glycine max
  unsure (1)..(92): unsure at all Xaa locations
  Clone ID: PAT_MRT3847_45877C.1.pep
GXEGDNXRERPTNRDGNKGPTQTEAQDQRREPKRPTDKPRKQPQQEAHKSGGKGTEPAGRAETGERKPGTGATRAKTGLTTDPKRAEKHQAN

SEQ ID NO: 225743 - protein, 36 aa, Glycine max
  unsure (1)..(36): unsure at all Xaa locations
  Clone ID: PAT_MRT3847_45878C.1.pep
LLLLEHNELETTLEILYVGAGHKQTRXNIQSALQTL

SEQ ID NO: 225744 - protein, 122 aa, Glycine max
  unsure (1)..(122): unsure at all Xaa locations
  Clone ID: PAT_MRT3847_45879C.1.pep
MVSWNSFPLEVIYQVLGWLAFLSWSVAGYPQLILNFRRKSVVGLSLDYEILNFTKQWSYLIYNASLFFSPAIQKQYFEKXGYGQMIPVAANDVAFSIHSVILNLIILSQISMFEVSFIKSFS

SEQ ID NO: 225745 - protein, 64 aa, Glycine max
  Clone ID: PAT_MRT3847_4587C.1.pep
FLDELKHIKWRPPHIGTKQGWQDRTNNMRRGRKEVEVIDKVGDVSMASTPFYDENMYILNQCEK

SEQ ID NO: 225746 - protein, 153 aa, Glycine max
  Clone ID: PAT_MRT3847_45880C.1.pep
RASSSSSSSSSSSSSSSSANFDVGNSYQFQLCFHLLLFCCSCSSFLLCSQQLLHQDQSSSTCLLPTSIRESSLLSGNGGVASNEWKAVPDIWRSSAEKYGDKIALVDPYHDPPSTMTYKQLEDAILDFAEGLRVIGVRPNEKLALFADNSCRW

SEQ ID NO: 225747 - protein, 81 aa, Glycine max
  Clone ID: PAT_MRT3847_45881C.1.pep
KVFQKEGLGPRKGAHCARPFNEEEWDDEEIGIPCAALTAPVPILPMTSDGSVPNDNLPASGCTVSASISCLSGSLPSPGGL

SEQ ID NO: 225748 - protein, 102 aa, Glycine max
  Clone ID: PAT_MRT3847_45882C.1.pep
MDLDTSSVPLINSDRHGLQRFDAKTLVLVSVGKLQTYLQAFALQPRPQEACANLAEKTQVMISLSHLVPSPWKFNEANLLAVNEEKAVAVHPSRQCFSTGRG

SEQ ID NO: 225749 - protein, 190 aa, Glycine max
  Clone ID: PAT_MRT3847_45883C.1.pep
MSAIPISSSYASTFSYSAAHALPFFFARNNYSTRINLHPPVFCQLQSETEKPLTRRCSPFLESSLLSGNGGVASNEWKAVPDIWRSSAEKYGDKIALVDPYHDPPSTMTYKQLEDAILDFAEGLRVIGVRPNEKLALFADNSCRWLVADQGMMACGAINVVRGSRSSIEELLQIYNHSESVALAVDNPEM

SEQ ID NO: 225750 - protein, 73 aa, Glycine max
  Clone ID: PAT_MRT3847_45884C.1.pep
RHKRKRYMLLARVLNIEPLKSAPPCSNFSPASVDVAVSANSSFSPAITSSPLAFTKTSSALFGTLYCLVYNSG

SEQ ID NO: 225751 - protein, 82 aa, Glycine max
  Clone ID: PAT_MRT3847_45885C.1.pep
GGQKRFKIVTKQNPVFHTYDGKGFPGKKFVKRIPEAGGKFTPKTFKPILHIFILVWMCFDIPVHYWSSDPEISPEASGPSGL

SEQ ID NO: 225752 - protein, 42 aa, Glycine max
  Clone ID: PAT_MRT3847_45886C.1.pep
DMLFFLCISSAMIFIFSIFQVLHYLETLQPHELLEQMVCAAF

SEQ ID NO: 225753 - protein, 224 aa, Glycine max
  Clone ID: PAT_MRT3847_45887C.1.pep
MRGRSYSPSPPPRHSRRGGGGRSPSPRGRYPPRPRQQDLPTSLLVRNLRHDCRPEDLRRPFGQFGPLKDIYLPKDYYTGEPRGFGFVQFVDPADAADAKYHMDGQVLLGRELTVVFAEENRKKPTEMRTRERRGRFSDRRRSPPRYSRSPRYSRSPRYSRSPPPRHRSRSHSRDYYSPKRREYSRSVSPEGRRYSRERSYSQHNRERSFSRSPPYNGGSRSRSQ

SEQ ID NO: 225754 - protein, 255 aa, Glycine max
  unsure (1)..(255): unsure at all Xaa locations
  Clone ID: PAT_MRT3847_45888C.1.pep
MRGRSYSPSPPPPRYSRRGGGRSPSPRGRYPPRPRQQDLPTSLLVRNLRHDCRPEDLRRPFGQFGPLKDIYLPKDYYTFITLXKIEPRGFGFVQYVDPADAADAKYHMDGQVLLGRELTVVFAEENRKKPTEMRTRERRGRFYDRRRSPPRYSRSPRYSRSPPPRHRSRSRSRDYYSPPAKRREYSRSVSPEDRRYSRERSFSQHSRERSYSRSPPYNGGSRSRSQSPAKGPGQSRSPSPNRDEREPARGRSPSQ

SEQ ID NO: 225755 - protein, 67 aa, Glycine max
  Clone ID: PAT_MRT3847_45889C.1.pep
LELGLNGHDTRCAKCYDSGARMVPLLPELMIVPIELSETVMAENSSCLSGYSCLCHENGLRSIDEPE

SEQ ID NO: 225756 - protein, 65 aa, Glycine max
  Clone ID: PAT_MRT3847_4588C.1.pep
QSITENASFPIRITLLNTRKSRFDELSLLTSVPSESHHDHTVAISSWILEVRVLGVHSTVRHPQL

SEQ ID NO: 225757 - protein, 243 aa, Glycine max
  Clone ID: PAT_MRT3847_45890C.1.pep
MGRGRVQLKRIENKINRQVTFSKRRGGLLKKAHEISVLCDAEVALIIFSHKGKLFEYATDSCMEKILERHERYAYAERQLVANDSETQENWTIEYTRLKAKIDLLQRNHRHYMGEDLASMSLKELQSLEQQLVTGIKNIRTRRNDLMSESISELQKKEKRIQEENNTLAKKIKEKEQAVAQQAAQWEQPNYRVDTSFMPQQQPLPTSLNICGNNYCQEAAPELGRNGLDLTLEPLYSCNLGCF

SEQ ID NO: 225758 - protein, 56 aa, Glycine max
  unsure (1)..(56): unsure at all Xaa locations
  Clone ID: PAT_MRT3847_45891C.1.pep
MSCCRGNCGCGSSCKCRNGCRRCKMYPHLSYNESTIYXTLVMGVAPVNAQFHGDEM

SEQ ID NO: 225759 - protein, 72 aa, Glycine max
  Clone ID: PAT_MRT3847_45892C.1.pep
FRPITFPADLGHSALISLHMVIQISEPLNAELPIMSLRSITYELADVDAGEVRGRYDTACHPMRHDYPQPMT

SEQ ID NO: 225760 - protein, 159 aa, Glycine max
  Clone ID: PAT_MRT3847_45893C.1.pep
MGRGKVQLKRIENKINRQVTFSKRRSGLLKKAHEISVLCDAEVALIVFSHKGKLFEYATDSCMEKILERHERYAYAERQLVANDSETQGNWTIEYTRLKAKIDLLQRNHRHYMGEDLASMSLKELQSLEQQLDTAIKNIRTRRNDLMYASISELQKRRK

SEQ ID NO: 225761 - protein, 147 aa, Glycine max
  Clone ID: PAT_MRT3847_45894C.1.pep
VKQQKEEVVNGNGLSQSHANGDATTVPDIFNSPNVVNLSRTGIENLAKLEDRKEPWLVVLYAPWCPYCQAMEESYVDLADKLAGSTGMKVGKFRADGEQKEFAKSELQLGSFPTILFFPKHSFRPTIKYPSEKRDVDSLMAFVNALR

SEQ ID NO: 225762 - protein, 68 aa, Glycine max
  Clone ID: PAT_MRT3847_45895C.1.pep
KCFKAYVFLQKRAPQAVTLLGLSDTQWLTTFTPIEVDRTHIGVVFYSPIKISPFKALVVLVGATIWTL

SEQ ID NO: 225763 - protein, 437 aa, Glycine max
  Clone ID: PAT_MRT3847_45896C.1.pep
NLKLSIFNFTMVRVKEALVVTPSEPTPNTVLSLSALDSQLFLRFTIEYLFIYRPGPGLDPTSTAARLKAALAKALVPYYPFAGRVRSRPDGPGLEVVCRAQGAVFIEASSERYTAHDFQKAPKTVAQWRKLLSLYVTDVLKGSPILVIQLTWLADGAAAVGVGINHCICDGIGSAEFLNYFSDLASHNNNVSVDPKPKPVWDRQLMNPDGRTRANLAMHAEFVRVPDLCGFMNRVTSGLRPTCIVFDERRINALKGACGMSSYTSFEVLAAHVWRSWARAMGFPKNQTLKLLFSVNVRKRVKPGLPEGYYGNAFVLGCAQTSAWELGERGVRYGSGLVKRAKERVDSEHVRRVVELVSESRASPDSVGVLILSQWSRLGLERVELGMGKPLHVGPICCDRYCLFLPVTGERASVKVMVAVPTTAVDNFHRFLRESNL

SEQ ID NO: 225764 - protein, 70 aa, Glycine max
  unsure (1)..(70): unsure at all Xaa locations
  Clone ID: PAT_MRT3847_45897C.1.pep
VITFGLVYTVYATAXDPKKGNLGNTAPIANGFIVGANILLGGAFXWGGSIKPARSFGPAVGSGDLAANWM

SEQ ID NO: 225765 - protein, 72 aa, Glycine max
  Clone ID: PAT_MRT3847_45898C.1.pep
IILEYESLNVLCFFCCCYVVEKRNEKKRQIRTEEQKSWWKTTTPICLFFHSPQSIKHFLYHFNVQKKMACNY

SEQ ID NO: 225766 - protein, 51 aa, Glycine max
  Clone ID: PAT_MRT3847_45899C.1.pep
SNDQSLASCLIRMHPVHHLQKVKRNPASDYRTINCKNIIDRLLRLNTNREQ

SEQ ID NO: 225767 - protein, 69 aa, Glycine max
  unsure (1)..(69): unsure at all Xaa locations
  Clone ID: PAT_MRT3847_4589C.1.pep
MACGKILEKKILNIVKKNLVVRQGMISIFLNVKRGXRTVFPTTCAYGRFPRQDRVFPSKVVKPLKWEKA

SEQ ID NO: 225768 - protein, 41 aa, Glycine max
  Clone ID: PAT_MRT3847_458C.1.pep
KSCILSSGYVTSTFSLAYIFIDEKESNTILSSNFLIAKFHS

SEQ ID NO: 225769 - protein, 135 aa, Glycine max
  Clone ID: PAT_MRT3847_45900C.1.pep
KYRTALSLQFAKGLAIILSDSFAPFCDYPCTYSSSFSMLLHRSVDIEKPLLLLRRFRCLRIGPRHQQLNPNKQAPPSRNLLKAKQTLKEFSSLAPVTIPLNQPPSHRIPCHLRGGGSPCQLHARRRPRNDEPSGS

SEQ ID NO: 225770 - protein, 235 aa, Glycine max
  Clone ID: PAT_MRT3847_45901C.1.pep
MDSLKFASLTLPPCSRRSGMLGKRLNSPLLIIDSSAQFCYCKTDLAAASSSIPLPNMRFSCRFSPSVAAETWTSNLSSKQWILHSTAQIENIITSNEDQSMWEACKQALSAFNFSDEEKDKILGKAFGLIHSPYWGEERSKEVPKLKTVNGVLDYLRSLNLSDDDLSILLKKFPEVLGCNLEEELKGNVKILEEQWSIKGNSLRKLLLRNPKVLGYNVDCKGDCIAQCTRCWARF

SEQ ID NO: 225771 - protein, 56 aa, Glycine max
  Clone ID: PAT_MRT3847_45902C.1.pep
GMSGNVGKRETLICWKRKGNGLNQGCGDPLWKMRPARITYLASSQNITPLEIFPRA

SEQ ID NO: 225772 - protein, 45 aa, Glycine max
  Clone ID: PAT_MRT3847_45903C.1.pep
VHWKTVQLDHTRSLPMLVLHHIQSPLVGYYAFSLMCVYFECPLIA

SEQ ID NO: 225773 - protein, 70 aa, Glycine max
  Clone ID: PAT_MRT3847_45904C.1.pep
ILQLAGVHLSTLIPSRSDDAISLVTSLCSWDPCKRPTAAEVLQHPFFQSCFYIPPSLRTRAVTRTPPSGL

SEQ ID NO: 225774 - protein, 55 aa, Glycine max
  unsure (1)..(55): unsure at all Xaa locations
  Clone ID: PAT_MRT3847_45905C.1.pep
FQDEQMLNKVMNPNPNSFRKIVQTFLETNGSGYLETSKNNIXKPRPLYLKVENKI

SEQ ID NO: 225775 - protein, 55 aa, Glycine max
  unsure (1)..(55): unsure at all Xaa locations
  Clone ID: PAT_MRT3847_45906C.1.pep
INXERXRXXWWVKAANIXCRASSPYFTTXATNXPQQFLMXAFVIXQRGNHXLLXE

SEQ ID NO: 225776 - protein, 70 aa, Glycine max
  unsure (1)..(70): unsure at all Xaa locations
  Clone ID: PAT_MRT3847_45907C.1.pep
MQLHGTSPPLELTIKCXFSAPGDYVHFKFQVPLYKIPIGTNQWRDYYFGPNAAPPVICLPGTRGSRDVFY

SEQ ID NO: 225777 - protein, 169 aa, Glycine max
  unsure (1)..(169): unsure at all Xaa locations
  Clone ID: PAT_MRT3847_45908C.1.pep
MAPFGSLVILPFLLIATVTCSTSEKENSKTFIVQVHHQTKPSIFPTHKHWYDSSLSSISTTASVIHTYDTVFHGFSAKLSPSEAQKLQSLGHVITLIPEQLRSLHTTRSPEFLGLTTADRTGLLHETDFGSDLVIGVIDTGIWPERQSFNDRDLCPVPAKWXGKCVAGQ

SEQ ID NO: 225778 - protein, 297 aa, Glycine max
  unsure (1)..(297): unsure at all Xaa locations
  Clone ID: PAT_MRT3847_45909C.1.pep
WQHSANLACYEHQDAHEFFISMLDAIHEKESKTRNGSKGNGDCQCIAHKVFYGLLRSDVTCMACGFTSTTYDPCVDISLNLDTNVSSTEKGKKLTKQNEDGSMSTLFGCLDLFTRPEKLGSDQKLYCRNCRERQDSLKQMSIRKLPLVLSLHVKRFEHSFVKKSSRKIDRYLHFPFSLDMSPYLSSSILRARYGNRIFNFGGXSRSDMFSEFEIFAVVTHSGTLESGHYVSFVRVRNQWYRCNDAWITVVDEATVRASQCYMIFYVQKTLHNKANEDLSHVPNSPGRDLFLPIAGCC

SEQ ID NO: 225779 - protein, 136 aa, Glycine max
  unsure (1)..(136): unsure at all Xaa locations
  Clone ID: PAT_MRT3847_4590C.1.pep
QVKGIILYANSGRIGVLPNHAPIAAAVNIGLFTIRLLKAQWITMATMLGSATINSHQIAVLVNDGEKGSAIDPQEAQLTLAIAXVNSSKEGGXAQSIEANLAFSRARSQVVAINVVLFKDDACGILVYLKQWKMEQ

SEQ ID NO: 225780 - protein, 51 aa, Glycine max
  Clone ID: PAT_MRT3847_45910C.1.pep
NSLPNDPPVGSLNNFSIFSIRYGDVYDCNATAIMATSVAFVRNFQQYQGMR

SEQ ID NO: 225781 - protein, 166 aa, Glycine max
  Clone ID: PAT_MRT3847_45911C.1.pep
IAFAQQLLLFHLHSADHHGPEGQYHLLLQLLILISLSTTLLGIPFPKSFLVSFVRSLSIFFQGLWLVLMGYMLWTPGLIPKGCFINEEEGHQVVRCSDHDSLHRAISLVNILFSWFIIGVTVFGVACYLGLVKFYGEKVDYVALRDEEISDDVESQKRSILGNPTS

SEQ ID NO: 225782 - protein, 93 aa, Glycine max
  Clone ID: PAT_MRT3847_45912C.1.pep
PRAGEWIMTTYTTMRLDLDPLLPFLLNPYPPELCEGASPELSSELSSPPFSEDSSPTGRGCTVPRVCRGNDVRLDEVEEIATHDFQAFSLSSW

SEQ ID NO: 225783 - protein, 76 aa, Glycine max
  Clone ID: PAT_MRT3847_45913C.1.pep
LAWALLPDANRHNGAFSRVSFAPIKGLWIIKGDYECERNRLLGARIVVLQHETVEKSGCLILSVIWQSETKVQLEN

SEQ ID NO: 225784 - protein, 45 aa, Glycine max
  Clone ID: PAT_MRT3847_45914C.1.pep
IYLDPPSHYCVIWFFLNPPPLYNPERNTTYSHFITFTLTTLLNQK

SEQ ID NO: 225785 - protein, 355 aa, Glycine max
  unsure (1)..(355): unsure at all Xaa locations
  Clone ID: PAT_MRT3847_45915C.1.pep
VIVEMDKVSAPSSRERAQRLYEKNLELENKRRRSAQARVPSDPNAWQQIRENYEAIILEDHAFSEQHNIEYALWQLHYKRIEELRAYFNAALSSVSSKSSQGGKGPVRPDRISKIRLQFKTFLSEATGFYHDLITKIRAKYGLPLGYFDDSENRIVMEKDGKKSAAMKKGLVSCHRCLIYLGDLARYKGMYGEGDSINREFTAASSYYLQAASLWPSSGNPHHQLALLASYSGDELVAIYRYFRSLAVDSPFTTARENLIVAFEKNRQSFSQLSGDVKALAVKESSVRSTGKGRGKGEAKLATRGTXVDASPRTGASSIQETYKYFCTRFVRXNGILXTRTSIETFAEVLGCCKH

SEQ ID NO: 225786 - protein, 171 aa, Glycine max
  unsure (1)..(171): unsure at all Xaa locations
  Clone ID: PAT_MRT3847_45916C.1.pep
MMIVEMDKMSAPSSRERAQRLYEKNLELESKRRRSAQVRVPSDPNAWQQMRENYEAIILEDQAFSEQHNIEYALWQLHYKQIEEFRAYFSAALSSTNANSSQGVKGPARPDRISKIRLQFKTFLSEATGFYHDLITKIRAKYGLPLGYFDDSEKPDCXEKDGKKSAAMKKG

SEQ ID NO: 225787 - protein, 51 aa, Glycine max
  Clone ID: PAT_MRT3847_45917C.1.pep
YFGDFFLLGRFLFPIFWCFTFIFVFDVMFNLSLVFNFSIFSYASLLFAYGF

SEQ ID NO: 225788 - protein, 52 aa, Glycine max
  Clone ID: PAT_MRT3847_45918C.1.pep
FYLTHKFVYSTIFLAINGLVLGSPNKKCITSSIYKKFSDFNAENQCVLYLFK

SEQ ID NO: 225789 - protein, 321 aa, Glycine max
  unsure (1)..(321): unsure at all Xaa locations
  Clone ID: PAT_MRT3847_45919C.1.pep
TRVGLQYLTGDIAGGNARCIAMLQAFQEAIKDYKVPHEKTLVKLSTANMRRYLPFRMKCLPLSISMGNAIRFXKSRIAKLPLTLSESEAKASLESDIECFISEKIILANKVIVKHAVTKIRDGDVLLTFGSSSAVEMILLHAHELGRQFRVVVVDSRPKLRGQLLLRRLVENGLSCTYTHINAVSYIMNEVTRVFLGASSVLSNGTVYSGVGTACVAMVAHAFHVPVLVCCEAYKFHERVQHDSICSNELGDPDVISTVLSREDVKHLDGWANIENLQLLNLVYDATPSDYVSMIVTDYGMVPPTSVPVIVREYGREQVWI

SEQ ID NO: 225790 - protein, 318 aa, Glycine max
  unsure (1)..(318): unsure at all Xaa locations
  Clone ID: PAT_MRT3847_4591C.1.pep
EMFSLIGTVRVAGTEEEEHGRYKWWLEKLADISLRQSAAYGVWNFSFNILYHSTQVIAVLFEGMYILAGHITAEKLTKFILFSEWLIYSTWWVGDNIFNLMQSDWACEKVFDLMDLXPSSQFLERGXKIAEVILIDDIPLKDLDIMWWRERIGFVGQEPKLFRMDISSNIRYGCTQDVKQKDIEWAAKQAYAHNFISALPNGYETLVDDDLSSGGQKQRIAIAREVLKWPKILTYAQATSALDAESEHNLEGDVRSVXVILQRVGVIVIAHRLSTIQAADRIVVMDGGEIVEMGSHRELLLKDGLYARLTRKQADAMA

SEQ ID NO: 225791 - protein, 97 aa, Glycine max
  unsure (1)..(97): unsure at all Xaa locations
  Clone ID: PAT_MRT3847_45920C.1.pep
MDLAVLLCVSTRSLRGSVAGQWNYNRLVMNFHRASCTHVEDIIIKVVILHXIRHMTTAFSCLTNIFHDCAVHTCDASLLLDSTIRSLSDKRTNSNLW

SEQ ID NO: 225792 - protein, 98 aa, Glycine max
  Clone ID: PAT_MRT3847_45921C.1.pep
MSSFSLPRKKTPFPKHRKEGEPKKKRPKVEPAPLFAEFVKSFQGDTPLGSKTFVWGGPFFPHDKFKNVFEGEKFKNGVFGPKKGSRFVPFFIPPPMAP

SEQ ID NO: 225793 - protein, 145 aa, Glycine max
  Clone ID: PAT_MRT3847_45922C.1.pep
TYTHINAVSYIMHEVTRVFLGASAVLSNGTVYSRVGTACVAMVAHAFRVPVIVCCEAYKFHERVQLDSICSNELGNPDVISNVLGREDVKHLDGWANIENLQLLNLVYDATPSDYVSMIVTDYGMVPPTSVPVIVREYGREQVWI

SEQ ID NO: 225794 - protein, 76 aa, Glycine max
  Clone ID: PAT_MRT3847_45923C.1.pep
IIKAERYILKRVEMAKIETGDSCVLMDETAKLGGRSGSRALGRDIFCLLQIALFLPQSGPHHLLYSLGLILIGFLT

SEQ ID NO: 225795 - protein, 83 aa, Glycine max
  unsure (1)..(83): unsure at all Xaa locations
  Clone ID: PAT_MRT3847_45924C.1.pep
SLGFQISNGIVFRXHNRSPGFFDGVSWPMCKLHMFGCHEAYQVVKELLEAKAVYPNGFSRIIGLHNVRRVQSISFIANKPPGF

SEQ ID NO: 225796 - protein, 73 aa, Glycine max
  Clone ID: PAT_MRT3847_45925C.1.pep
MCLPEVLSEDMKKLKARMHQAIERFYDKMQNAESGRGQVMSSLAELEDDFKEGYLETVAAYYEEQHPELTPLL

SEQ ID NO: 225797 - protein, 61 aa, Glycine max
  Clone ID: PAT_MRT3847_45926C.1.pep
NSKVSRFPLTKNIFFLRFCIGTIKDDILGVINDPQQFKPLLTVMNSSSDFRPQIVSDIKIA

SEQ ID NO: 225798 - protein, 69 aa, Glycine max
  Clone ID: PAT_MRT3847_45927C.1.pep
AHRRCIWASGGITFDDLKIIFLTEPRLNTAPYKKYGKNLNKKMQIARFPFKLKGSPTPTIQWDTTLAPG

SEQ ID NO: 225799 - protein, 87 aa, Glycine max
  Clone ID: PAT_MRT3847_45928C.1.pep
CRFNRSKVIRAWLSPFKISHIIGFQLISEVQNCVPEHASFSLPIDKCCSHCHARQLGLWKSHKQQSTASAIGFSTTKRNSSIILFAQ

SEQ ID NO: 225800 - protein, 42 aa, Glycine max
  Clone ID: PAT_MRT3847_45929C.1.pep
FNFVRSTSCLAVLLSILSLRMTTIPSAYSITMAPSSPDHFLC

SEQ ID NO: 225801 - protein, 62 aa, Glycine max
  Clone ID: PAT_MRT3847_4592C.1.pep
CDQSFYFYIFPRNFNSKIICRSLHQLSKEFSKSTKKKKKKKKKKKKKKKKKKKKKKKKKKKK

SEQ ID NO: 225802 - protein, 81 aa, Glycine max
  Clone ID: PAT_MRT3847_45930C.1.pep
QSSTVCKSKSGIGMSNLGLSMGSLISCFVWGRSAQDLNGILAGFFGIRLGQCLGFGRTRCFVMYFCSDERGESTESSVPND

SEQ ID NO: 225803 - protein, 88 aa, Glycine max
  Clone ID: PAT_MRT3847_45931C.1.pep
FQPYTTKMASFRVHLLSFFFIALSLLSISNVQASRKLLAPTMPNMGNYPPRVIYPPFPPVTDWPEYRLPAPLIRTLPPFSPPPNPTNP

SEQ ID NO: 225804 - protein, 51 aa, Glycine max
  Clone ID: PAT_MRT3847_45932C.1.pep
VRPMQFSGRLFSVPGGMRGVPYLAFSMKEKLKSSPPYFAIGGVTSRFSVQK

SEQ ID NO: 225805 - protein, 80 aa, Glycine max
  Clone ID: PAT_MRT3847_45933C.1.pep
FLSPFHGLSLLFVWLHHHLSICTPFENFNLLLSYATLPFLASVFFFFGSLFMACCLSARIKSERPPRNGLSSDDGNMEED

SEQ ID NO: 225806 - protein, 54 aa, Glycine max
  Clone ID: PAT_MRT3847_45934C.1.pep
FFKHNVPQQRHTTITKSKQVGNVTSTDQRTIITHNFFSFMKMTPKLPPGGQFSH

SEQ ID NO: 225807 - protein, 55 aa, Glycine max
  Clone ID: PAT_MRT3847_45935C.1.pep
AGMSPFFFFLNMRWWCYHLLTWWWYTNPPFLDHEVVVLPSLGLVVPYYPFGRPGG

SEQ ID NO: 225808 - protein, 35 aa, Glycine max
  Clone ID: PAT_MRT3847_45936C.1.pep
GSSSQEACAFDRLAPDLAAARYHVNHDPTRPAHCL

SEQ ID NO: 225809 - protein, 105 aa, Glycine max
  unsure (1)..(105): unsure at all Xaa locations
  Clone ID: PAT_MRT3847_45937C.1.pep
SVHSSAGSKGRRVYASLGRYVEPVVQAQRAEVYFDFFPGEGDRQEGVAHIGELKSGVYVPLSTKTNLGGTPKGWELGLPWGKIPRGXASTDVRLVGSEHYGDGCF

SEQ ID NO: 225810 - protein, 51 aa, Glycine max
  Clone ID: PAT_MRT3847_45938C.1.pep
STLVTLCLGVPAFPIPCWSDQRTIARLFAFVWKIGFLSPVDYFFFVRRFSF

SEQ ID NO: 225811 - protein, 41 aa, Glycine max
  Clone ID: PAT_MRT3847_45939C.1.pep
SHPNKRSLFFVLLSSANMLKSMGNNPPLTTTVVQLQHFSVC

SEQ ID NO: 225812 - protein, 94 aa, Glycine max
  Clone ID: PAT_MRT3847_4593C.1.pep
GIHKNYTKSTQIPVDRNISSDEIYQTMHKQPLIGTLNMFSSGHILPFLLNKKEILSLLSPLPPQKKKEKKNQCRKRKQMGSIVLKAKSTITIMA

SEQ ID NO: 225813 - protein, 62 aa, Glycine max
  Clone ID: PAT_MRT3847_45940C.1.pep
WQRRVFLLTVTNSAPHKCSKFVFTYLFPACGQSIYYGFYCTTKLDVELGWKKKHFCILSMVI

SEQ ID NO: 225814 - protein, 90 aa, Glycine max
  unsure (1)..(90): unsure at all Xaa locations
  Clone ID: PAT_MRT3847_45941C.1.pep
XXSPSVTMXXEQAAACSCLHGLLVXQLSIFLXRFXYXXSVXSISPFWHVXGXETXTXXQGQWIXPQFMTKRNTSXXDPVSXXLXPAXAXR

SEQ ID NO: 225815 - protein, 116 aa, Glycine max
  Clone ID: PAT_MRT3847_45942C.1.pep
RLPRQQIMHMVLDTSSSEFLQKIEKIWEQDADLHALMSHLTWKGGNLGHYTWDGQLLRKKGKLVVGNDAELRQQLLESVRIPGSTHASEHHQHLFSHFLNDICVELVVDPMPIHNC

SEQ ID NO: 225816 - protein, 61 aa, Glycine max
  Clone ID: PAT_MRT3847_45943C.1.pep
SSGRFSLPELLLPHLTEISLRSWITQLADELDKVPRVIFLAMHRPLPQNRQLTIPKSNLNR

SEQ ID NO: 225817 - protein, 92 aa, Glycine max
  Clone ID: PAT_MRT3847_45944C.1.pep
ASCSLDIFFSHFVFANSNLSNEKTKSSINKEVIGRTASGETHLLAELKGTMWSMMNSDWMLQIKKTSAEDHKRVFELTGTRKVTLLFLSLDS

SEQ ID NO: 225818 - protein, 60 aa, Glycine max
  Clone ID: PAT_MRT3847_45945C.1.pep
KSFFWRSCTWSYRGGSGDLAFRFARAKKFLITTEVNDTIPLLVEKTPQKAVCGFVKKFVL

SEQ ID NO: 225819 - protein, 105 aa, Glycine max
  unsure (1)..(105): unsure at all Xaa locations
  Clone ID: PAT_MRT3847_45946C.1.pep
MKSTIFYALFLFCAFITSYLPSAIDDIVLDNXCNPLDNGGTYYILSDISSFGGIFSFSTGNERCPLTVVQSRNELDIFMXTIILFLYRILFIAEGHPLSLKFDSF

SEQ ID NO: 225820 - protein, 258 aa, Glycine max
  unsure (1)..(258): unsure at all Xaa locations
  Clone ID: PAT_MRT3847_45947C.1.pep
MNDYKGREGESSVVVVRKRFKEKQQPCPSTRPIINQQHRRSASLPNTQYEESETDVEVSDVSVSEGDDTSWISWFCNLRGNEFFCEVDDDFVQDDFNLCGLSSQVPYYDYALDLILDVESSHGDTFTEDQNELIESAAEMLYGLIHARYILTSKGMAAMLHKYKNYNFGRCPRVFCSGQPCLPXVGQSDVPRSSTVKIYCPRCEDMYHPKSKYQXNIDGAYFGATFPHLFLMTYGNLKPQKQSQNYVPRVFGFKVHKS

SEQ ID NO: 225821 - protein, 151 aa, Glycine max
  Clone ID: PAT_MRT3847_45948C.1.pep
MNDYKGREGESSVVVRKRFKEKQQQQQQQPFPSTRAIINQQHRRCASLPNNTQYEESETDVEVSDVSVSEGDDTSWISWFCNLRGNEFFCEVDDDFVQDDFNLCGLSSQVPYYDYALDLILDVESSHGDTFTEDQNELIESAAEMLYGLIH

SEQ ID NO: 225822 - protein, 63 aa, Glycine max
  Clone ID: PAT_MRT3847_45949C.1.pep
GAQGKAIILVSSPHLKDWPLILKEGFIFWGGKKFINYHWNCLLKNVGFLMVWNNSSWFKLGGF

SEQ ID NO: 225823 - protein, 57 aa, Glycine max
  unsure (1)..(57): unsure at all Xaa locations
  Clone ID: PAT_MRT3847_4594C.1.pep
TIXTGRGRRICWVCSHRAAVVLGACPCQGSRYQRFPMKMKTGYGERILHNISHIVDA

SEQ ID NO: 225824 - protein, 324 aa, Glycine max
  unsure (1)..(324): unsure at all Xaa locations
  Clone ID: PAT_MRT3847_45950C.1.pep
PPPPLGAKGANVGADPRGRGRGYARPAGGGAMAPRRSSLKPLHWSKVTRALQGSLWEELQRHGEPQIAPEFDVSELEKLFSANVPKPTDSGKSGGRRKSVGAKTDRITLVDLRRANNTEIMLTKVKMPLPDMMAAVLALDESVLDVDQVENLIKFCPTKEEMDLLKGYTGDKEILGKCEQFFLELMKVPRVESKLRVFAFKIQFGSQVTEFKKSLNTVNSACEEVRNSVKLKEIMKKILYLGNTLNQGTARGSAVGFKLDSLLKLTDTRASNSKMTLMHYLCKVLADKSPRLLDFHLXPCSLEAFTKIQLKSLAEEMQAIIKGL

SEQ ID NO: 225825 - protein, 52 aa, Glycine max
  Clone ID: PAT_MRT3847_45951C.1.pep
PQRNGAGPKPFSASNLGYCYLLIVICTWVHFSHIPKLSLEKLYNIIIFLLCN

SEQ ID NO: 225826 - protein, 96 aa, Glycine max
  unsure (1)..(96): unsure at all Xaa locations
  Clone ID: PAT_MRT3847_45952C.1.pep
HFDACKWTKPQPHSWELILPIEVCGPNKGFETWSSDWAKQTSWHLSILIDNPKXDTEFDILXGISQDLEIAGHTLMPAFSVPQATARYSDNAETYA

SEQ ID NO: 225827 - protein, 127 aa, Glycine max
  unsure (1)..(127): unsure at all Xaa locations
  Clone ID: PAT_MRT3847_45953C.1.pep
HASGGTTHVISLSLSLSPSVLPQRCLAAIPSTEKKREAPRRRDDEDTGAHVAPIGKLEEGGVTTREEDEXSILNLKSKLYRVAQDGNPWKERGAGTRKILKHKASGKGRVLMRASQTLKNCGNQFIL

SEQ ID NO: 225828 - protein, 142 aa, Glycine max
  Clone ID: PAT_MRT3847_45954C.1.pep
KSSFSESQCLKIYICRGASLCLGGLHPDMIVDQEQHLKTERREYHSHIHNYHNDMIGFLSKLKKSWQSCKDPEKEIAQKIWRSKHVEKRMPSKVIESRVYDHDGNVTGTSDSCSWDAEEKACSSDNQISSLRKDNILQRRVL

SEQ ID NO: 225829 - protein, 81 aa, Glycine max
  unsure (1)..(81): unsure at all Xaa locations
  Clone ID: PAT_MRT3847_45955C.1.pep
GFDDXGYGQVPPPXPNAYGGAGGNYPPAYGSYGGNSNYETDVVPPPASYTGGPASXPPSYGSNAVTSGNNVADARYGGRSG

SEQ ID NO: 225830 - protein, 107 aa, Glycine max
  Clone ID: PAT_MRT3847_45956C.1.pep
VPGEGEPSNPSGPLAIGPGPGGGGGPLFLALPPAVAPRLGGGNPFRGKAQKGFWPSLGSPRPRFFLAPWGRAKLPLSFFKGQGFKKGPALVGVPPPPLGNFFPNFFF

SEQ ID NO: 225831 - protein, 35 aa, Glycine max
  unsure (1)..(35): unsure at all Xaa locations
  Clone ID: PAT_MRT3847_45957C.1.pep
PYVGEALDIVNETSXHPTRYKESARALPSANPSDE

SEQ ID NO: 225832 - protein, 42 aa, Glycine max
  Clone ID: PAT_MRT3847_45958C.1.pep
RGKGKPSIPRIMQSSTEPAATARGSTSESRVHATSNVFAGVT

SEQ ID NO: 225833 - protein, 65 aa, Glycine max
  unsure (1)..(65): unsure at all Xaa locations
  Clone ID: PAT_MRT3847_45959C.1.pep
IDAGWVQRIDPEYNDVQALLXTNSVKLSLDDVETANGSMLDLKIFQSKIALHKNTDGGTILRSDL

SEQ ID NO: 225834 - protein, 57 aa, Glycine max
  Clone ID: PAT_MRT3847_4595C.1.pep
ELECRQYMIISHRVASLLTSGHHKRQNRQSQSYPPAHVCVRVRVDHHLDACVPERVE

SEQ ID NO: 225835 - protein, 174 aa, Glycine max
  Clone ID: PAT_MRT3847_45960C.1.pep
MAGMHFSILSLLLLLVAFSYTEASADVPKTTDKKIEVVVEATVYCQSCDHFGTWSLIGAKPIPSAKVSVTCKSHNGHVSYYKVFETDKNGYLYAPLEGFKMQHYILDHPLHSCYVKPVWSPLESCSLLSNVNYGLNGAPLRYENKKLHGSKYEAVIYAAGPLAFRPSECSQTHH

SEQ ID NO: 225836 - protein, 33 aa, Glycine max
  Clone ID: PAT_MRT3847_45961C.1.pep
SSCFKLGQHLARTIHELNRSKIKSCLLRKGILC

SEQ ID NO: 225837 - protein, 35 aa, Glycine max
  Clone ID: PAT_MRT3847_45962C.1.pep
HYHFHSILYFTTLSIIYESCYNIPYNLPNNIHPTH

SEQ ID NO: 225838 - protein, 96 aa, Glycine max
  unsure (1)..(96): unsure at all Xaa locations
  Clone ID: PAT_MRT3847_45963C.1.pep
LGVRLVVGXVRVVAXAAAASFLLVPLXXAXXGXPVLLGGGGGGVCGSVALGGLVRWLGLCGGLPVRAVALAPPWSVXLVASGLSSSSSSVSRAPGA

SEQ ID NO: 225839 - protein, 75 aa, Glycine max
  Clone ID: PAT_MRT3847_45964C.1.pep
TNNSTPTNLHLNSSIPKPLSSNKLHKINFIKFLSSFKTKNFYPILTIKTHSTTTIYKTLNPFHPHKLFNSFPNIY

SEQ ID NO: 225840 - protein, 71 aa, Glycine max
  unsure (1)..(71): unsure at all Xaa locations
  Clone ID: PAT_MRT3847_45965C.1.pep
INXKTXFXRXNLLXNEALNQTXIWXXXELXRTXXKXEIAQGQLKSAIXTYTQLLAXLXRSEXNXXXRXEAV

SEQ ID NO: 225841 - protein, 115 aa, Glycine max
  unsure (1)..(115): unsure at all Xaa locations
  Clone ID: PAT_MRT3847_45966C.1.pep
QKRQKKIKSKLDHGGGGRWNNMATTKEDFMRHQXKTKSQWMEGKEARGKERWPKGMGWRHSIVVLENERIKEEDRAREREEQRGAQEDARAAEREALVTGLLNRLGETRNEKEQD

SEQ ID NO: 225842 - protein, 119 aa, Glycine max
  Clone ID: PAT_MRT3847_45967C.1.pep
PKKGLTNLVLEGGINRLGKNQPLQRKKKKNLFVWVFFPPFGKIFRGNLKPGKFPGGGFVFSPLCSPFAINFFLKKNFSWAPFPGIFSRPQGGGGFYPGAPLGWGEGAKTPFRGPWGVFF

SEQ ID NO: 225843 - protein, 698 aa, Glycine max
  unsure (1)..(698): unsure at all Xaa locations
  Clone ID: PAT_MRT3847_45968C.1.pep
NKLTTSEVLNLLFHRSLKTTNPSLHSFLFKLPILVLFHSFLASNFIERSNFKENNLSTPWFLVKVLVLARLYNVQVRAPFRYFSNVAISKSEESLEFKQEWLQMKDMYHNLSQNLEEVTSKTIPFQLDGEYAVFSNTEQRNHPTIIKVIFENMDGLSDQLPHLIYISREKRPQYPHNYKAGAMNVLTRVSGLMTNAPFMLNVDCDMFVNNPKIVLHAMCILXGFQEWDCLILFIPTILQFHILEKVSLLRNKALDPSILLQFEAGFAGLSNTEPTNHPSISXDGIKDDPFGNQWVAVFEYIMRGMAGLQGLFYXGTNTFHRRKAIYGIYPEKSXCRRNGKLEEKILIQQFGSLEEFVKSAAHAMEGSAYSANDITPSSFIEAAIQVADCGYEDGTWWGKQMGWLYGSLTEDVLTGLSMKRRGWRSECCTPDPIAFTGCAPGGLLSTMLQQKRWFTGHTVIFFGKHSPLMCMLFGKIQFRAGLSYFWVSTLSLRGVFLVCYIALLAYCMITNTNIFPKGLGLWIPITLFVIYNVYTLLEYVKIGLSMRQWWNNQRMCIVRTTTASFLGFLNGMVQLSGLSDIAFDITEKEYPTSSADENSTDAGRFTFNESPVFVIGTTILLVYLTAILIKFWGLQPTHSGNGSGLGEFICSTYVVVCFWPYLKGLFPRGNYGIPLSIMCKSAVFAFVFVHFCRSNGLS

SEQ ID NO: 225844 - protein, 112 aa, Glycine max
  Clone ID: PAT_MRT3847_45969C.1.pep
LQTITQSPFIHRFHIIKASSTINTGTTKALTTILHSTTPHSSHSDLPNTHTLINYIKMQLQLTLSTLYLSLLLTITLTSPTFAAQIKPKDLVQSSSVHARYPRLVLRTLFNY

SEQ ID NO: 225845 - protein, 59 aa, Glycine max
  unsure (1)..(59): unsure at all Xaa locations
  Clone ID: PAT_MRT3847_4596C.1.pep
YKVXKLTPGETLNIPKSPGPLEIQVTHPFWALPFGLXKVWTGKRKGGLXIVRALFHPLT

SEQ ID NO: 225846 - protein, 75 aa, Glycine max
  Clone ID: PAT_MRT3847_45970C.1.pep
ALLTRTHKVTAKISLVSLPISDGAAAHSDSEGAPARNTQRACNKTARNYSCRSRNLCKTSVRQSERWDRSTRATV

SEQ ID NO: 225847 - protein, 129 aa, Glycine max
  Clone ID: PAT_MRT3847_45971C.1.pep
MGRLFVVNLEGKIYSCKHCHTHLALYDDIYSRTFHCRHGKAYLFNKVVNVSIGEMEDRPMMTGLHTVADIFCVGCGSIVGWKYETAYEKNQKYKEGKSVLERYKVSGPDGSNYWISNEAHVGGSDADDA

SEQ ID NO: 225848 - protein, 89 aa, Glycine max
  Clone ID: PAT_MRT3847_45972C.1.pep
PPIKKASQTNLKHFRGPSPRRDKTTGRKPGIASLKKGFGDGAYLKPFKKTPMGFGKRERKVWGGLFSVPGEKPFRGKKKIALGKGPLLS

SEQ ID NO: 225849 - protein, 72 aa, Glycine max
  Clone ID: PAT_MRT3847_45973C.1.pep
RIHVNVFENFHLCCFVQGKYPIPQFLCNPSFHLTQITDIKNKKIIVILMIIVKESKGRWFDYRTSQQMHNDI

SEQ ID NO: 225850 - protein, 80 aa, Glycine max
  Clone ID: PAT_MRT3847_45974C.1.pep
SVEDDLDSSGLPGNLLWEVLRRLPPAGLLTAAMVSRGWREMTRSLWKTAEELKIKGPAWAQGGFGSSILQKCPGIGTLSL

SEQ ID NO: 225851 - protein, 114 aa, Glycine max
  unsure (1)..(114): unsure at all Xaa locations
  Clone ID: PAT_MRT3847_45975C.1.pep
NSFSFFPLSQTRFILLQNRQGRTLLAKSYVXWRLSEAHRVEYEVHRLVVHRDSIHTNFGELRAHKIIYRRYAGIFLSLCGDLTDNEWAYXSALHVFXEILDHFFSNVCELDLFL

SEQ ID NO: 225852 - protein, 69 aa, Glycine max
  unsure (1)..(69): unsure at all Xaa locations
  Clone ID: PAT_MRT3847_45976C.1.pep
FFXEXWEXVGGEVCMXEKXGERKXXXEGKNXXXVKEKGEREYFEXDDXKKVFXGEXCDDFGGIFCEXEY

SEQ ID NO: 225853 - protein, 65 aa, Glycine max
  unsure (1)..(65): unsure at all Xaa locations
  Clone ID: PAT_MRT3847_45977C.1.pep
SSTLKRVDIGCQPVVTIPVNLXDQSTTGNTLKYTDVLFRCPKLHQANANTTVCNFNTNIFIPRSP

SEQ ID NO: 225854 - protein, 62 aa, Glycine max
  Clone ID: PAT_MRT3847_45978C.1.pep
HIYQNRPMNSEEIIMVSGHTYCTSSPTNTILNQLSFPCKPNPWFCVEFVTLRRKLTFIKIDL

SEQ ID NO: 225855 - protein, 49 aa, Glycine max
  unsure (1)..(49): unsure at all Xaa locations
  Clone ID: PAT_MRT3847_45979C.1.pep
XLSAYRPAVLFLFSHTFLFFFFKNPPTEVPGVKRIHFTLTKTLHYRYQT

SEQ ID NO: 225856 - protein, 130 aa, Glycine max
  unsure (1)..(130): unsure at all Xaa locations
  Clone ID: PAT_MRT3847_4597C.1.pep
KEREIVFMSAMYTICLVLCLDPAIIXGVAASNATRGLRLLRDLNPRLWEQLLYLMLFCLRGPIQSAKDFDKVWPIFDFAQSLDFRMDVQGIISELESXGALPRSNSRVSSLATCCGPKLVVFLCDGSCLF

SEQ ID NO: 225857 - protein, 36 aa, Glycine max
  Clone ID: PAT_MRT3847_45980C.1.pep
IISYSLCLALITCNFHNVHILIHLFVSSIYVSSENN

SEQ ID NO: 225858 - protein, 309 aa, Glycine max
  unsure (1)..(309): unsure at all Xaa locations
  Clone ID: PAT_MRT3847_45981C.1.pep
MENVRIGQWLSLLICVLLLLQSEGVPVGITFVENAVAKGAVCLDGSPPAYHFHKGSGAGINNWIVHFEXDTRLGSSKKMDTSLSFSGFFSNSKKFNPDFYDWNRIKVRYCDGSSFTGDVEAVDPKTNLHFRGARVFAVVVEDLLAKGMKNAQNAIISGCSAGGLASILNCDRFKSLLPATTKVKCLADAGFFINVKDVSGAQRIEEFYSQVVQTHGSANHLPTSCXTNTLRQGLCFFPXNVVSQISTPIFFVNAAYDSWQVKLFSFSRNILFLEWCSFGILVLLKTDNMFIFIDQLIGLFIRLINVSYI

SEQ ID NO: 225859 - protein, 315 aa, Glycine max
  unsure (1)..(315): unsure at all Xaa locations
  Clone ID: PAT_MRT3847_45982C.1.pep
MIPRCSVSPPQIRPFQFQNLNGLRQLAETRRFKVWLLDQFGVLHDGKQPYPGAISTLENIAKTGAKMVIISNSSRRSSVTIEKVKGLGFDASLFLGAITSGELTHQYLQRRDDPWFAALGRSCIHFTWNGRGAIPLEGLDLRVVENVEEAEFVLAHGTEXLGNADGSSCSMKLEDMERILELCAAKGIPMVVANPDYVTVEARDLRVMPGTLAAKYEKLGGEVKWMGKPDEIIYKSAMAMAGTDVSDCIAVGDSFHHDIKGANAAGIESVFITGGIHATELGLHGFGEVADSSSVQSLATKYEAYPSYVLRAFTW

SEQ ID NO: 225860 - protein, 47 aa, Glycine max
  unsure (1)..(47): unsure at all Xaa locations
  Clone ID: PAT_MRT3847_45983C.1.pep
MIDDVDYPDFRALLSQSGGSYDERISDEQXPTEQKPSARENKAITTE

SEQ ID NO: 225861 - protein, 75 aa, Glycine max
  Clone ID: PAT_MRT3847_45984C.1.pep
CFFPQNVVSQISTPIFFVNAAYDSWQVRLFSFSRNILFLEWCSFGILVLLKTDNMFIFIDQLIGLFIRLSNVGYI

SEQ ID NO: 225862 - protein, 261 aa, Glycine max
  Clone ID: PAT_MRT3847_45985C.1.pep
MEITRIGQWLSLLICVLLLLQTEGVPVGITFVENAVAKGAVCLDGSPPAYHFHKGSGAGINNWIVHFEGGGWCNNVTTCLSRRDTRLGSSKKMDTSLSFSGFFSNSKKFNPDFYDWNRIKVRYCDGSSFTGDVEAVDPKTNLHFRGARVFAVVVEDLLAKGMKNAQNAIISGCSAGGLASILNCDRFKSLLPATTKVKCLADAGFFINVKDVSGAQRIEEFYSQVVQTHGSAKNLPTSCTSRLRPGLVSLGIYVFYLCGFF

SEQ ID NO: 225863 - protein, 196 aa, Glycine max
  unsure (1)..(196): unsure at all Xaa locations
  Clone ID: PAT_MRT3847_45986C.1.pep
RWAYPRTIVLWIVIIFYVDYTLYPSVPRMDKRERTNXPLCLIPKRSCQKSEAFTHPVDLLKTDGNTLGXYRDRSHGTTEQGVAMVSSTECIPXDSSSREHHLRNLHCPNTRRKTAYTNLDRIVSVKSXDIREILDCIKXIVCFKTIEPKLAYSTRLDDLLVLLYASLDDLHIXSLHGADVDLRGTLYLDDCVHNIA

SEQ ID NO: 225864 - protein, 80 aa, Glycine max
  Clone ID: PAT_MRT3847_45987C.1.pep
MFLAGTPCGSSSARTHYHHPRPLHHNRNVLDRCSVGISVQENHEIGTKLQCSVSFPPIMAAKMVVLVRHRQITLNALGMI

SEQ ID NO: 225865 - protein, 526 aa, Glycine max
  Clone ID: PAT_MRT3847_45988C.1.pep
MEGFYIPKLHLVMCKCGSCGSRKQTLSEWEKHTGCRSKKWKHSVKVKSTMLPLEKWMEENIPLDGIPEQVDQQQVLAFLQEKYEPVNVKWTTERCAVCRWVEDWEDNKIIICNRCQIAVHQECYGAKNVQDFTSWVCRVCETPDVERECCLCPVKGGALKPTDVEMLWVHVTCAWFRPQVVFQNHEAMEPAMGILKIPPNSFVKTCVICKQSHGSCISCCKCSTYFHVMCASRAGYTMELHSMEKNGTQVTRKLIYCAIHRVPNPDSVLVVHTPLGIFSPRTSLQNQKGCFRGSRLILSKNIELNESSTTENDLVEPLSAARCRVYRRSPNKRADVPIIHLLGGPSLHSLGAITQLNIFKDADESKVFTSFKERLHHLWETEKFRVCFGKSGIHGWGLFARRDIQEGEMVVEYRGVHVRRSVADLREEKYRSEGKDCYLFKISEEVVVDATNRGNIARLINHSCMPNCYARIMSLGDQGSRIVLIAKTNVSAGEELTYDYLFDPDERDELKVPCLCKAPNCRRFMN

SEQ ID NO: 225866 - protein, 43 aa, Glycine max
  Clone ID: PAT_MRT3847_45989C.1.pep
LQSSNTAESYEFQSTVSMACSELSLIDIVSSSLVQTVCPCDMF

SEQ ID NO: 225867 - protein, 93 aa, Glycine max
  unsure (1)..(93): unsure at all Xaa locations
  Clone ID: PAT_MRT3847_4598C.1.pep
TIXAKDVXQXTEXGEYSXXDXHDXPXXTLIDXXELTKWSLYRAAIAXFIAXLLXLYITVLSIIXYKRQSAXKIPGNXECARRXXFGHRWAFGG

SEQ ID NO: 225868 - protein, 32 aa, Glycine max
  Clone ID: PAT_MRT3847_45990C.1.pep
MIHHEMDHSTDAQRTDMMNITRFVLNDQSRHP

SEQ ID NO: 225869 - protein, 49 aa, Glycine max
  Clone ID: PAT_MRT3847_45991C.1.pep
PELLRGTVNMYTPEYFQQTYLRMLRSLSIYHGMIGNQDAGRLSLNLYYG

SEQ ID NO: 225870 - protein, 176 aa, Glycine max
  Clone ID: PAT_MRT3847_45992C.1.pep
PASEKLELVVRFAGAVRNEMKRAFRRTAFVLMRELSWRCFGHKIDWRRFFVLVAILTVSAFVFQTRGHAYLALPNRPVHSPHQSNSSLQGGRLQKVHLTLTDSVISPNASNKVIQSFSGQLENAELEAPIQRKNSVSARKKDKNLAGTTKVATSLSPPRHVPKQVEVDETLNLLFF

SEQ ID NO: 225871 - protein, 51 aa, Glycine max
  unsure (1)..(51): unsure at all Xaa locations
  Clone ID: PAT_MRT3847_45993C.1.pep
PWLQSFYSSLLRFDLLLLDLPXCWQRRSTASVGRTMKRISFWSKLCIATGL

SEQ ID NO: 225872 - protein, 83 aa, Glycine max
  Clone ID: PAT_MRT3847_45994C.1.pep
NPLFYPVDVIILHRGQIKTKPYDPTTAHISTITNQLRLPSIPYLSYRHTYKQFNVLRSPTLRIPKLLSSTHLNILLLNFTNST

SEQ ID NO: 225873 - protein, 78 aa, Glycine max
  Clone ID: PAT_MRT3847_45995C.1.pep
TGHADRALDRCSNTQISLSYKIRNPGCYVEQGLWKTSLAIESQKTEARSPRFRVLHTLYYMGRSVLKNGCKCSTALCT

SEQ ID NO: 225874 - protein, 71 aa, Glycine max
  Clone ID: PAT_MRT3847_45996C.1.pep
TSFDFFFYFYTMIDCAEEEKWERKKKIKAKEFCFFKSIIFSFFPLQIFNQIKEKTCFFFFLFFFPCKQDQY

SEQ ID NO: 225875 - protein, 83 aa, Glycine max
  Clone ID: PAT_MRT3847_45997C.1.pep
CFVKKKKNKKIKKKNRNKKKKKTKKKKKKKKNKKKKTLKKKKKKKKKKGAPQGVQPFFPGDATSKPLQRGPQFQFPGRPFKTS

SEQ ID NO: 225876 - protein, 55 aa, Glycine max
  Clone ID: PAT_MRT3847_45998C.1.pep
GQGVGWLKLFDVHVNTCSLLKGEESTKLIGASSQKQQSYVVQHFFNIYKLSVSGR

SEQ ID NO: 225877 - protein, 52 aa, Glycine max
  Clone ID: PAT_MRT3847_45999C.1.pep
MQRQRQRVSLSLSASIHHDSLRVLEWDKLCYLVASFACTSLGRKALKVKTSI

SEQ ID NO: 225878 - protein, 54 aa, Glycine max
  Clone ID: PAT_MRT3847_4599C.1.pep
FTALCTVSLMQNRYLLLIPRAQDRFRRRPLGTDAHGQPSGSSAEIAFAHNSCCD

SEQ ID NO: 225879 - protein, 68 aa, Glycine max
  Clone ID: PAT_MRT3847_459C.1.pep
VGRFPLIFQHILSPNLSFHYSYFTLTQIHLSYYNNTKYHFNKFINQQFILYQYYQHLLSIYLYLIYIS

SEQ ID NO: 225880 - protein, 99 aa, Glycine max
  unsure (1)..(99): unsure at all Xaa locations
  Clone ID: PAT_MRT3847_45C.1.pep
MGASGKWVKALIGLNNKSDLGGKKKKWRLWKSSSAGENRSQGNDYASSVASDSFNFAVATVVRAPPKDFKLLKQEWAATQIQTAFRAFLARRXLRALKG

SEQ ID NO: 225881 - protein, 142 aa, Glycine max
  Clone ID: PAT_MRT3847_46000C.1.pep
RVLHNYASILELLLRLRQCCDHPFLVMSRGDTQEFADLNKLAKRFLRGTYTASEGEVKDTPSRAYVQEVVEELRKGEQGECPICLEVFEDAVLTPCAHRLCRECLLSSWRNATSGLCPVCRKTISRLDLITAPTENRFQVDI

SEQ ID NO: 225882 - protein, 117 aa, Glycine max
  Clone ID: PAT_MRT3847_46001C.1.pep
GFQRGVQIPQGPFFWGKFPTGRPTFRGPASKAHPFFFQTPRDSFSKNKFWPPLYLGETRKNLRSKLREPEKTKNGIHLDSPIGGVGKKKKKKFNPSERTNFQTLDGRTPPGNTLFFS

SEQ ID NO: 225883 - protein, 63 aa, Glycine max
  Clone ID: PAT_MRT3847_46002C.1.pep
HGGYIITTYIRSCGNCIVTTTGSSFHANDQVYLELDFGAVVYSFDHQRRVWRSILSVLTRAHA

SEQ ID NO: 225884 - protein, 101 aa, Glycine max
  Clone ID: PAT_MRT3847_46003C.1.pep
LNLEDNKHWRTLATRREENTLQRGPGTQWVSLPLINFNKKDTGGGKTTLNRNLIWGSNHTIFKDRATPILLETIKGPERKTGTNLLSLYWGGPMPKRGGMC

SEQ ID NO: 225885 - protein, 71 aa, Glycine max
  Clone ID: PAT_MRT3847_46004C.1.pep
AYFIFFLFLGGVGCHVADHQYLNVEGYIANFQKIFKQTMLEGGWLTCTNCTLSSPLAPLTLQGTQAIGTAF

SEQ ID NO: 225886 - protein, 144 aa, Glycine max
  Clone ID: PAT_MRT3847_46005C.1.pep
APWFFWSCLSYWSAVHMVPAWPFVVPFMHCQFNVPLCFTCSPFLNHSYSSVRRSLSPRRVLEFPTPLLLLFGHHTLLCYVSSPLRVSNEGIESALGNVRLRFLSSPGRRLSFAGTRSEIRFVIEHRSFVGLFFPRCPSKNCTLA

SEQ ID NO: 225887 - protein, 110 aa, Glycine max
  unsure (1)..(110): unsure at all Xaa locations
  Clone ID: PAT_MRT3847_46006C.1.pep
PXGXRXXEXRAVWXCDFVXXEPXFGVDKXXXSDIAXSQKAASXXXXHXMXXPXVXGXXXXXXCXXXVXXXXCXVSSXXXXRXXVYXXXXXRYXYVXARAEFRAYVRVXAT

SEQ ID NO: 225888 - protein, 202 aa, Glycine max
  unsure (1)..(202): unsure at all Xaa locations
  Clone ID: PAT_MRT3847_46007C.1.pep
MNKQLTLLCLFILFSFLSVGFAGAGDAAEKNPFTPKAFAIRYWDKEIRSGLAKPQFLLSKASPLNAAEAAAFVKLASGNALSTRLPEFCAAAKLLCFPEVGSSLEKHDKDANFAVYRDKNFTNYGTGRPGGLDSFKNYSEGENIPVNDFRRYSXRDSAGHKDXFLSYGTSGNVVQQSFPHLRRRSTRAVPGEFKRYADETNV

SEQ ID NO: 225889 - protein, 54 aa, Glycine max
  Clone ID: PAT_MRT3847_46008C.1.pep
SATLSLLIITTILAWFWILSANDVLTRRHLTYLEEVDLVKYTYALNVAHCSDQT

SEQ ID NO: 225890 - protein, 280 aa, Glycine max
  Clone ID: PAT_MRT3847_46009C.1.pep
MSHELLETYACMPTTERGRGILISGDAKSNSIVYTNGRSVVMMNLQNPLNVSVYGDHAYPATVARFSPNGEWVASADASGSVRIWGTRNDFVLKKEFRVLSARIDDLQWSPDGLRIVACGEGKGKSFVRAFMWDSGTNVGEFDGHSRRVLSCAYKPTRPFRVVTCGEDFLLNFYEGPPFRFKLSHRDHSNFVNCVRYSPDGSKFISVSSDKKGIIFDGNSAEKIGELSSEGGHTGSIYAVSWSPDGKLVLTVSADKSAKVWDITEDNNGKVKKTLTCPGT

SEQ ID NO: 225891 - protein, 68 aa, Glycine max
  Clone ID: PAT_MRT3847_4600C.1.pep
IREAAQHSREGHGGVCRAVNRAFVIVAFINAPWRRWPRENELKALLTLPRHCFLVCPQLTILQINFTL

SEQ ID NO: 225892 - protein, 611 aa, Glycine max
  Clone ID: PAT_MRT3847_46010C.1.pep
MQVGFAGAGDAAEKNPFTPKAFAIRYWDKEIRSGLAKPQFLLSKASPLSAAEAAAFVKLASGNSLSTRLPEFCAAAKLLCFPEVGSSLEKHDKDANFAVYRDKNFTNYGTGRPGGLDSFKNYSEGENIPVNDFRRYSRDSAGHKDGFLSYGTNGNVVQQSFHTYAAGATGGTGEFKHYADETNVPNLGFTSYSDNANGRTQSFSSYSENGNAGEQTFTSYGKNGNGPTNVFASYGTESNVVGSGFSNYAETANAANDTFKGYGIDMNNPTNTFSNYAAGGNGAVERFSSYRDKANVGADSFTSYAKAANAADIGFSNYGKSFNEGTDTFTTYAKSSDGETKVGFTSYGVNNTFKDYEKKGTTVSFARYTNISTTLSVSASSVSGSLVNKWVEPGKFFREKMMKEGTVMPMPDIKDKMPERSFLPRSILSKLPFSVSKIDELKQVFKASDNGSMEKMMKDSLEECERAPSSGETKRCVGSLEDMIDFATSVLGRNVAVRTTQNVNGSKKSVVVGPVRGINGGKVTQSVSCHQSLFPYLLYYCHAVPKVRVYEADLLDPKTKAKINRGVAICHLDTSDWSPTHGAFLSLGSGPGRIEVCHWIFENDMAWTIAD

SEQ ID NO: 225893 - protein, 68 aa, Glycine max
  Clone ID: PAT_MRT3847_46011C.1.pep
VCKSIADKRHFMANICTTNDFCQFINKKKNTGKKYLLQFGAVIFKWGSENIFDTFYILFDVCILICKV

SEQ ID NO: 225894 - protein, 182 aa, Glycine max
  Clone ID: PAT_MRT3847_46012C.1.pep
MSNAGSPLKSFLFTSECVSEGHPDKMCDQVSDAVLDACLKADPNSKVACETCTKTGMVMVFGEITTSATLDYNQIVRDTVKWIGFDDSAKGFDYNTCNVLVAIDKQSPDIAQGVHVGRADEDIGAGDQGHMFGYASDETPEMMPLTHGLATQLCERLSTVRRSGELKWLRPDAKTQVTVQYK

SEQ ID NO: 225895 - protein, 90 aa, Glycine max
  unsure (1)..(90): unsure at all Xaa locations
  Clone ID: PAT_MRT3847_46013C.1.pep
NHYSFLLHKLTDSEKRPNVLHXDLKSLLHLTVFNGYDYSINTIISSGLNINFLYVNGLTALHSSSSSGIQPTIAVLLYIASHCVSLTDPY

SEQ ID NO: 225896 - protein, 74 aa, Glycine max
  Clone ID: PAT_MRT3847_46014C.1.pep
LNSELGTRNKITVSAQQKICGQSLKNVYRGIMQRPWGNVSLGNYWTHIQASASGSAPSPSPKKPHQRRITRQIA

SEQ ID NO: 225897 - protein, 31 aa, Glycine max
  Clone ID: PAT_MRT3847_46015C.1.pep
YLSSIYLLIVYVGSSSTNLCISMFCIYYIFC

SEQ ID NO: 225898 - protein, 88 aa, Glycine max
  Clone ID: PAT_MRT3847_46016C.1.pep
NAILIWNPIRAVTGRILLVVVVVCGTIMLVGAALGLVSTSSSNLTSPLEFLYLYFNHLNCAPPTGHHPRIHRRHTGIHVSVGHNYCDK

SEQ ID NO: 225899 - protein, 102 aa, Glycine max
  Clone ID: PAT_MRT3847_46017C.1.pep
MFSQNVILPPENPRPNEIAKPLPSILVGRFKALLKQRDDELRVAAGDPVPPASTDEIVQIYELLLSELTCNLEPIITDLTIIARQQREHAKSIGDAICASDF

SEQ ID NO: 225900 - protein, 114 aa, Glycine max
  unsure (1)..(114): unsure at all Xaa locations
  Clone ID: PAT_MRT3847_46018C.1.pep
GLLLKIIPGTIGATILGTTFWKPFYFLRDAGYGGDIVANGAAIFKIHTMLDDHCRMSNSGFCIPCRFTFEPITXLVGLKGQMFLDXQSYMQIMIKCTDRTRTLNTDAQVSMDRR

SEQ ID NO: 225901 - protein, 37 aa, Glycine max
  Clone ID: PAT_MRT3847_46019C.1.pep
PQLPECPMRQSLWPLQDSLSHKASCQLSGCLAQAFLL

SEQ ID NO: 225902 - protein, 63 aa, Glycine max
  Clone ID: PAT_MRT3847_4601C.1.pep
PVSLSPVGPSLGVFFSREAKLFASLGPHIIWCSPFPLCILCHVQTLKKKSKEKKKKKKKKKNK

SEQ ID NO: 225903 - protein, 41 aa, Glycine max
  unsure (1)..(41): unsure at all Xaa locations
  Clone ID: PAT_MRT3847_46020C.1.pep
LIEFTINXXRTXIIPXXXXVMXXQXQVFXXGHSFXSAQXAS

SEQ ID NO: 225904 - protein, 80 aa, Glycine max
  Clone ID: PAT_MRT3847_46021C.1.pep
IQLSTACMSSSLSADTRMFSTQPQQSVEGAPPCISVRIGSDTAMHRRVQEHVRPRAIVGSAHARSMHTIRSHPGNVQVIQ

SEQ ID NO: 225905 - protein, 50 aa, Glycine max
  Clone ID: PAT_MRT3847_46022C.1.pep
KPFFCSTALMFIAPVNILNQVHNAQSMKLRKSYNNKQLDVNSLTSNNPNY

SEQ ID NO: 225906 - protein, 64 aa, Glycine max
  Clone ID: PAT_MRT3847_46023C.1.pep
VCSVMMMHSSGQTSVVYSICPSIEINKNEVFITEGLGVAVNVEAVRSLRTCKGNPIDDIRETVD

SEQ ID NO: 225907 - protein, 246 aa, Glycine max
  Clone ID: PAT_MRT3847_46024C.1.pep
EEAKAVLRLVPIWATCLIFAIVFAQSSTFFTKQGVTMDREILPGLYVPPASLQSIISLSIVLFIPIYDRIIVPVARAFTGKPSGSTMLQRIGTGMLLSAISMVIAAFVEMKRLKVARDCGLIDMPNVTIPMSIWWLVPQYALFGIADVFAMVGLQEFFYDQVPQELRSVGLSLYLSIFGVGSFLSGFLISAIENVTGKDNRHSWFSSNLNRAHLDYFYALLAALSAVELSVFWFFSKSYVYKTRST

SEQ ID NO: 225908 - protein, 60 aa, Glycine max
  Clone ID: PAT_MRT3847_46025C.1.pep
TVATLQCMRNYKLKTKTYLIAIPGGKTKFRHTLVYLQETREKMKHLKCSRELDYLKFRQI

SEQ ID NO: 225909 - protein, 62 aa, Glycine max
  Clone ID: PAT_MRT3847_46026C.1.pep
RITMNMTKGITPRDYSLLLKPCPLSSLGLLHSLQVTFYLFPSLGGKEIDGNVVCFVQYISQT

SEQ ID NO: 225910 - protein, 76 aa, Glycine max
  unsure (1)..(76): unsure at all Xaa locations
  Clone ID: PAT_MRT3847_46027C.1.pep
RAGTGSPSSSRASMTLHPPHHHGAXRARSLCPTHARPRSTSAGGALPTEAGAPVPDRDTPRRTTAIVISNRLGFSR

SEQ ID NO: 225911 - protein, 162 aa, Glycine max
  Clone ID: PAT_MRT3847_46028C.1.pep
LTTAEPAWLHIHGGTCSRQELGVSDVLGYVHPDLLKDFCMNPQTVLLLRVIAAFCFLGILCSLSAFLLDVFGPKHPALKITRRYAFAHILTVLQCATVIGFSYWASELILAQQQQHKKYHGSQVYVTFAVSFYLVAGAGGASILATAANLLRHYPTEEEEQA

SEQ ID NO: 225912 - protein, 47 aa, Glycine max
  Clone ID: PAT_MRT3847_46029C.1.pep
RSKSRGSMCVTRCITMGFPPKRLYDVDQSTELAGRAKSVVVQKLSAV

SEQ ID NO: 225913 - protein, 58 aa, Glycine max
  Clone ID: PAT_MRT3847_4602C.1.pep
SMACKGGKPCISNYLNFLLSLGAFISDIYYLGTRMHFSPNTRRLSLATIPNQNYNLFP

SEQ ID NO: 225914 - protein, 119 aa, Glycine max
  Clone ID: PAT_MRT3847_46030C.1.pep
SKTPFSLEFKRDPQKIKFGGEKSPIRGGNRPKAGGTQKPGGGGKTKTQLVFLAKQTDFSTKLILQKIGGGGVLQFLWTNDPVFFLQKNTRNEKKGGGGLPLLSIWGATPPGGGAPHCPP

SEQ ID NO: 225915 - protein, 65 aa, Glycine max
  Clone ID: PAT_MRT3847_46031C.1.pep
TISGCGILNLSTKHQTKITSFFVLSPIFTNCTILLFNIIVFHFNLHHTPNTLTFNQKPTLLLIAI

SEQ ID NO: 225916 - protein, 95 aa, Glycine max
  Clone ID: PAT_MRT3847_46032C.1.pep
RLREDDRREDRVFEEQWQLKVPTKGAVFAWRLLRDRLPTKANLHRRQIEVANRSCPFCGNMEEEVGHLFFHCSKILPIWWESSSWLNISGAHPIH

SEQ ID NO: 225917 - protein, 114 aa, Glycine max
  Clone ID: PAT_MRT3847_46033C.1.pep
MPYERESQREGGKPKLAASANTMNHCMKERVRCGGIFSGFVMNSSSSTTSSSSWVSSSVDDGRGRSWGWAFASPMRAFTTKGSPPSSSSKRDASDKNNATPNLSAIPTLLTVRG

SEQ ID NO: 225918 - protein, 32 aa, Glycine max
  Clone ID: PAT_MRT3847_46034C.1.pep
HQDQSYIKWGLKCPTRSKRDEFGIEGDGVLSI

SEQ ID NO: 225919 - protein, 670 aa, Glycine max
  Clone ID: PAT_MRT3847_46035C.1.pep
MGKSSGRDRRRRRSHDSESDSPSDSDSDRRHRSNSRRSRRDSDGDRKMKSSKSESESPSDSDSDIRHRSSSRRSWRDSDGDRKKSSRSITEEEITKYMARKAQSKAMKVAKKLKTSTVSGYSNDSNPFGDSNLNEKFVWRKKIERDVSQGVSIDAFSMKAEKKKQRERMAEIEKVKKRREERALEKARHEEEMALLARERARAEFQDWEKKEEEFHFDQSKVRSEIRLREGRARPIDVLTKHLNGSDDLDIEINEPYMVFKGLTVNEMSELRDDIKMHLDLDRATPTHVEYWEALLLVCDWELAEAQRKDALDRARVRGEEPPAELLAEERGLHSSVEPDVKRLLQGKTLAELEALRVHIESEMRTGTAKVVEYWEAILKHLHIYKAKACLKEIHAKLLRKHLQSLERPLEDEDKLENAHVMVPEEEDTEDDIKVRSADESFSPEPIREDQEADDEAGSFSPQLLHSDENEEAIDPEEDRAMLERNRKAVLEEQQRRVQEAMASKPAPSEDNFEMKALKAMGDMEDGDSVFGSGAEVNLDSQVYWWHDKYRPRKPKYFNRVHTGYEWNKYNQTHYDHDNPPPKIVQGYKFNIFYPDLVDKTKAPTYTIEKDGSNGETCIIRFHAGPPYEDIAFRIVNKEWEYSHKKGFKCTFERGILHVYFNFKRHRYRR

SEQ ID NO: 225920 - protein, 64 aa, Glycine max
  Clone ID: PAT_MRT3847_46036C.1.pep
NTQNWQENISNYYNSKNCPKRSICSLQTCGPLIQERKIIHKLPKRSIKFFLKKKHGYIRINYCL

SEQ ID NO: 225921 - protein, 89 aa, Glycine max
  Clone ID: PAT_MRT3847_46037C.1.pep
MKSSKSESESPCDSDSDIRHRSSSRRSWRDSDGDRKKSSRSITEEEITKYMARKAQSKAMKVAKKLKTSTVSGYSNDSNPFGDSNLNEK

SEQ ID NO: 225922 - protein, 37 aa, Glycine max
  Clone ID: PAT_MRT3847_46038C.1.pep
LTCNSHSKPVETPSAIFVLTIMLTSQSSSIAPKYLFT

SEQ ID NO: 225923 - protein, 79 aa, Glycine max
  Clone ID: PAT_MRT3847_46039C.1.pep
IFYPDLVDKTKAPTYTIEKDGSNGETCIIRFHAGPPYEDIAFRIVNKEWEYSHKKGFKCTFERGILHVYFNFKRHRYRR

SEQ ID NO: 225924 - protein, 83 aa, Glycine max
  Clone ID: PAT_MRT3847_4603C.1.pep
PWHYSWQTSCTNFERSTAKRDLTSKTLLLHQKQNQNKERQMFRGTSTLGPHWKGTVRGVKSQSISPGESIGTRNLMYPIRPFQ

SEQ ID NO: 225925 - protein, 29 aa, Glycine max
  Clone ID: PAT_MRT3847_46040C.1.pep
LMVVRNHLCFRFTYEVCIIHSADNVTRNK

SEQ ID NO: 225926 - protein, 158 aa, Glycine max
  unsure (1)..(158): unsure at all Xaa locations
  Clone ID: PAT_MRT3847_46041C.1.pep
TSNPTNLAICNSPDSSMTLFVCHGSVKACIKSVFHSLHGSCEEARTSIHCMNYDWSIFLTQIPDVSDLPNXTELSLQWSERLLAXDESIGCMKKLKILNAAGCMKLTSFPTANLTCLETLELSHCSSLEDSPEIFRWMENIMELSFQWCETLIADDES

SEQ ID NO: 225927 - protein, 278 aa, Glycine max
  Clone ID: PAT_MRT3847_46042C.1.pep
EIHAKMLCKHLQRPEQPLEDEDELEDAQVRNSEDDTEHYAKVQYADESFSPEPIKGEVQEAKDQAGSFSPELFHGDENEEAIDPEEDRALLEQKRMAVKEEQQRQIQEAMASKPAPSEDNFEMKAMKAMGAMEDGDAVFGSGAEVNLDSQVYWWHDKYRPRKPKYFNRVHTGYEWNKYNQTHYDHDNPPPKIVQGYKFNIFYPDLVDKTKAPTYTIEKDGSNGETCIIRFHAGPPYEDIAFRIVNKEWEYSHKKGFKCAFERGILHVYFNFKRHRYRR

SEQ ID NO: 225928 - protein, 72 aa, Glycine max
  Clone ID: PAT_MRT3847_46043C.1.pep
LSIHILKWPLHAAGKNSNRSILTHTFLHKSITSHFSYRKKTQSQTLGMNLPFSQLMLLPGENLPYLTTPFIE

SEQ ID NO: 225929 - protein, 71 aa, Glycine max
  Clone ID: PAT_MRT3847_46044C.1.pep
NSKFGPPKKRCFSLFFDRFSVLKVTKKANPLKISNRFYRIAAVYWGFFSAQLTFRGFTNFFTSFLNFLLET

SEQ ID NO: 225930 - protein, 61 aa, Glycine max
  Clone ID: PAT_MRT3847_46045C.1.pep
ERLARFFLVNPEKARGVEVFFLGAAPLGLFTEKVFGERLFSLLGPLNLPPPRLPKVSILRG

SEQ ID NO: 225931 - protein, 36 aa, Glycine max
  Clone ID: PAT_MRT3847_46046C.1.pep
KLLNYNRQLDERNITFTIYLDSPGPRKTIFRLLIVF

SEQ ID NO: 225932 - protein, 69 aa, Glycine max
  Clone ID: PAT_MRT3847_46047C.1.pep
FKILILKKKKQIYNGVGYLRAEISYLLFFCCNPFCLPIFGAENMHVTLVITICIFQYICRFHMISADLT

SEQ ID NO: 225933 - protein, 69 aa, Glycine max
  unsure (1)..(69): unsure at all Xaa locations
  Clone ID: PAT_MRT3847_46048C.1.pep
NXXXEXXRXXXEXSPQRXXXSXXXXXXQHXXDTXXPXEDTXGEXKRXXQEGKXRXXGXXEASXDTXRRA

SEQ ID NO: 225934 - protein, 136 aa, Glycine max
  Clone ID: PAT_MRT3847_46049C.1.pep
MEDETLSLGLSTASRSYQSRLKSHFELFIDFDEVNGDEELRTAYPCPFCTEDFDLLELCCHIDLDHPVEAKSGICPVCTMWIGTNMVDHIAAQHGNLFKSQLKSKCYKDESYPALSFSKKGEHWQSFSTGSSAMST

SEQ ID NO: 225935 - protein, 61 aa, Glycine max
  Clone ID: PAT_MRT3847_4604C.1.pep
FLTVPPFECAWREDLKFQEAGHGCEPFKSFAIIHVILFLLETVAGSLYNFNLDNHSIYIIL

SEQ ID NO: 225936 - protein, 65 aa, Glycine max
  Clone ID: PAT_MRT3847_46050C.1.pep
GAPFIIVLLSHLFMQGEASWYMIATAIIALAPVFNISRRFCTSAYCIGIGTSLVNEQHSKSYITV

SEQ ID NO: 225937 - protein, 271 aa, Glycine max
  Clone ID: PAT_MRT3847_46051C.1.pep
MEKKTSVQESRKFNQLFFPKQHNKVYPIRLQRSSSTSSLSSLSSSLSQKSDDSSLTDSLNLADESFQFALNLISPRCQRREPEIINDAHQQQIPQTAEAGELKRCNWITKNCDEAYIQFHDECWGVPAYDDKKLFELLTLSGLLIDYNWTEILKRKEILRKVFAGFDPNTVAKMEEKEIMEIASNKEVLLADCRVRCIVDNAKCIMKIVRECGSFSCYIWGYVNHKPVINRYRYPRDVPLRTTKADTISKDLIKRGFQFLGPVIVYSFMQA

SEQ ID NO: 225938 - protein, 83 aa, Glycine max
  Clone ID: PAT_MRT3847_46052C.1.pep
NYSNLSFMLKPSFTSQLSQKLNEKTFKEFDIPRVIFFYLRSLIHLLLFFNLFYRGQLISGSHLNHIPYLLLSSNGSVFFTHLD

SEQ ID NO: 225939 - protein, 72 aa, Glycine max
  unsure (1)..(72): unsure at all Xaa locations
  Clone ID: PAT_MRT3847_46053C.1.pep
AVSFFFSLKYPPLKATLLVTQLKTKCEHFLVEFRALVHYIIRRLTPPIRFNSXXSLSGQLVTLKIKAFRNVM

SEQ ID NO: 225940 - protein, 75 aa, Glycine max
  Clone ID: PAT_MRT3847_46054C.1.pep
EIVEFVAQADMPVSDSLDYASCAELSCVEATESEVCLSVSSAVLELAGSLIECELDASAGTESILLKSSMDCRYI

SEQ ID NO: 225941 - protein, 69 aa, Glycine max
  Clone ID: PAT_MRT3847_46055C.1.pep
QIFQEAKSLKGVTGWTGDLIYASICAKPAKDPYKAHNSILNPNGTITRAIIPPQSLSSPDPTLTTAVNY

SEQ ID NO: 225942 - protein, 82 aa, Glycine max
  Clone ID: PAT_MRT3847_46056C.1.pep
SLSIQSRGLTTLACIYFTPRLPGKTLSIDTALIPRERSFLMLIPRDTIRAIFVWLSGITDGRARITSSLIRPEWPAADIPLD

SEQ ID NO: 225943 - protein, 77 aa, Glycine max
  Clone ID: PAT_MRT3847_46057C.1.pep
TCGTDRLTQRRAPYHPIIPLLPCLLPTEVEALMASQVLRHHALFAPKQSLPSSSRDFTSISTVPSDLLLFALLSSHC

SEQ ID NO: 225944 - protein, 54 aa, Glycine max
  unsure (1)..(54): unsure at all Xaa locations
  Clone ID: PAT_MRT3847_46058C.1.pep
MAGLLIMGNEKTHINIVVIGHVDSGKSTTXTGHLIYKLGGIDKRVIERFEKEAA

SEQ ID NO: 225945 - protein, 58 aa, Glycine max
  Clone ID: PAT_MRT3847_46059C.1.pep
HELTHVSVDRGRIPSLLVQQGRPFILVSQQLKGTYIHPIFNPTPGLFGCEKKKKKKKI

SEQ ID NO: 225946 - protein, 51 aa, Glycine max
  Clone ID: PAT_MRT3847_4605C.1.pep
LPILHPYLGFHSNSSITNLQDKAKSTTEAREGKLRGISKKLFWFFLGIGFI

SEQ ID NO: 225947 - protein, 36 aa, Glycine max
  Clone ID: PAT_MRT3847_46060C.1.pep
FFIFSSTFISNIFIFLSYYFFKINYDFISFLSFCIF

SEQ ID NO: 225948 - protein, 816 aa, Glycine max
  Clone ID: PAT_MRT3847_46061C.1.pep
MRKWTVASALLLLSLLFLFADQGRKFQANAEGDSDELVDPPKVEDKIGAVPHGLSTDSDVVKREAESISKRSLRSNAEKFEFQAEVSRLMDIIINSLYSNKDIFLRELISNASDALDKIRFLSLTDKEVLGEGDNTKLDIQIKLDKEKKILSIRDRGIGMTKEDLIKNLGTIAKSGTSAFVEKMQTSGDLNLIGQFGVGFYSVYLVADYVEVISKNNDDKQYVWESKADGAFAISEDTWNEPLGRGTEIRLHLKEEAGEYLEESKLKELVKRYSEFINFPIYIWASKEVDVEVPADEDDSSDEEDSSESSSKEESEDEDADKSEDEEKKPKTKTVKETTYEWELLNDVKAIWLRNPKEVTEEEYTKFYHSLAKDFSDEKPLAWSHFTAEGDVEFKAVLFVPPKAPQDLYESYYNANKSNLKLYVRRVFISDEFNELLPKYLNFLLGLVDSDTLPLNVSREMLQQHSSLKTIKKKLIRKALDMIRRIADEDPDESTDKEKKEDASSDNDEKKGQYSKFWNEFGKSIKLGIIEDATNRNRLAKLLRFESTKSEGKLTSLDQYISRMKTGQKDIFYITGTSKEQLENSPFLERLKKKNFEVIFFTDSVDEYLMQYLMDYEDKKFQNVSKEGLKLGKDSKDKELKESFKDLTKWWKTALSKDNVDDVKISNRLDNTPCVVVTSKFGWSANMERIMQSQTLSDASKQAYMRGKRVLEINPRHPIIKELRERVVKNPEDEGVKHTAQLMYQTALFESGFLLDDPKDFASRIYDSVKTSLDISPEATVEEEDDTEVEAESDAKEDSKPETDAVNDDNDVKDEL

SEQ ID NO: 225949 - protein, 785 aa, Glycine max
  unsure (1)..(785): unsure at all Xaa locations
  Clone ID: PAT_MRT3847_46062C.1.pep
MRKWTVASALLLLSLLFLFADQGRKFQANAEGDSDELVDPPKVEDKIGAVPHGLSTDSDVVKRESESISKRSLRSNAEKFEFQAEVSRLMDIIINSLYXNKDIFLXRSLISNASDALDKIRFLXSTDKDVLGEGDNTKLDIQIKLDKEKKILSIRDRGXGMTKXDLIKNLGTIAKSGTSAFVEKMQTSXGDLNLIGQFGVGFYSVYLVADYVXVISKNNDDKQYVWEXSKADGAFAISEDTWNEPLGRGTEIRLHLQGRGXKYLQEYKLIELVKRYSXFINFPIYIWASKEVDXEVPADEDDSSDEEDSTESSSKEESEDEDADKSEDEEKKPKTKTVKETTYEWELLNDVKAIWLRNPKEVTEEEYTKFYHSLAKDFSDEKPLAWSHFTAEGDVEFKAVLFVPPKAPQDLYESYYNANKSNLKLYVRRVFISDEFNELLPKYLNFLLGLVDSDTLPLNVSREMLQQHSSLKTIKKKLIRKALDMIRRIADEDPDESTDKEKKEDTSSDNNEKKGQYSKFWNEVXGNPIKLGIIEDATNRNRLAKLLRFESTKSEGKLTSLDQYISRMKAGQKDIFYITGTSKEQLENSPFLERLKKKNFEVIFFTDPVDEYLMQYLMDYEDKKFQNVSKEGLKLGKDSKDKELKESFKDLTKWWKTALSKDNVDDVKISNRLDNTPCVVEISNFGWSANMERIMQSQTLSDASKQAYMRGKRVLEVNPRHPIIKELRERVVKNPEDEGVKHTAQLMYQTALFEARGVSSFFSSCVSCAPPLLTMASSCRSSRRR

SEQ ID NO: 225950 - protein, 97 aa, Glycine max
  unsure (1)..(97): unsure at all Xaa locations
  Clone ID: PAT_MRT3847_46063C.1.pep
XVSQRGIRREWALSSRPEPPASKTSAPSARFSSFLSYSFFPSFLSLFSKKKLNFDYWVPLNLITLSACNHLAVLLTLYCSHWLLGYVMALNQPIWAL

SEQ ID NO: 225951 - protein, 159 aa, Glycine max
  Clone ID: PAT_MRT3847_46064C.1.pep
CIIQDGIFGALSSDFAAELRIPLIHFRTVSSCCFWAYFCVPKLLDCKELPIKGMEYSDSIFIASSHSTYAIFKSVLFILYMFQPLLLRNYRIQNKIFFSRKLYSFLINFPPNYSNYLYIYSIESISEDVINLYGSFNYWSLSHCDFVPWANMVNAILIA

SEQ ID NO: 225952 - protein, 150 aa, Glycine max
  Clone ID: PAT_MRT3847_46065C.1.pep
MNSCQPLVNGRGAKKQRPMTDSALAYLTTVKDAFKDDREKYDKFLELVKNFTAERGIEEVKELLKGYRDLILGFNVFLPKGYEIKLPLEDEQPPEKKLDVFVKAKKLLHKIKARFHGQDNVYKTFLAILKMHKDGTKSPTAAYGEITALL

SEQ ID NO: 225953 - protein, 95 aa, Glycine max
  unsure (1)..(95): unsure at all Xaa locations
  Clone ID: PAT_MRT3847_46066C.1.pep
PCLRAREDIYQDFIRQYIHKNIEWNFGGPSSSHADYDLFDECLAEGWPPVSLAESVQTLVQTXEMEWFHEVDLKDDLSEDPAKYPFSLTCRLPIR

SEQ ID NO: 225954 - protein, 60 aa, Glycine max
  Clone ID: PAT_MRT3847_46067C.1.pep
IQSCNPLVHRFHDICVTYECSCSRRFGSRNQLLSIKVYLLMLKYQPVGGIMLVVSSASLD

SEQ ID NO: 225955 - protein, 28 aa, Glycine max
  Clone ID: PAT_MRT3847_46068C.1.pep
WLYPFYTLSLINQLIGHLPRLIQLCTIF

SEQ ID NO: 225956 - protein, 79 aa, Glycine max
  Clone ID: PAT_MRT3847_46069C.1.pep
KGRISHHLFIANLSIHCVRFTTSSLAVIKPRSLIYLYTEYLDYCAPQSKVVSHLCHISFVRKKLLRCLLLSPSVVFSQR

SEQ ID NO: 225957 - protein, 67 aa, Glycine max
  Clone ID: PAT_MRT3847_4606C.1.pep
VRRSRRPGSKSRMAEWSMAPDSSSGPRERAWVQIPLLTILFSSFLKVWAMLDCGPFRIHSVGPRWYL

SEQ ID NO: 225958 - protein, 94 aa, Glycine max
  Clone ID: PAT_MRT3847_46070C.1.pep
RRVADPHFDSNGQKPRCWIFDRARCQGGAKRGQGGKLPPMGKGPQPCYASWTRSRLHGKLSSLSKKGCSGEARTCKRRGRRKNVLQGLIGGGKG

SEQ ID NO: 225959 - protein, 65 aa, Glycine max
  Clone ID: PAT_MRT3847_46071C.1.pep
MSMMHTPFQAYGFAIVRATNDVEPPVHEKHIRAIFSAISATRPRADVAYCIHALARRLSKTHNWA

SEQ ID NO: 225960 - protein, 46 aa, Glycine max
  unsure (1)..(46): unsure at all Xaa locations
  Clone ID: PAT_MRT3847_46072C.1.pep
ETGIANQTRRRXDIYLLHQRKPHNPRIQEPIAMDFHKXYYLEKTWG

SEQ ID NO: 225961 - protein, 124 aa, Glycine max
  Clone ID: PAT_MRT3847_46073C.1.pep
STLDPVPILSAGSSIRNDKWFAMPAEAQNKPAGINGSLPAGEITYRFSIHLELQLPLATMESEGIPGGGLAFPWLVGPEMVAFYPDPPWFQKVTRLPVLEEFRWANKEGFKGEGGAMTTPLRGK

SEQ ID NO: 225962 - protein, 113 aa, Glycine max
  Clone ID: PAT_MRT3847_46074C.1.pep
MAKWCVLVLVLALALATSARNVPNPKDAGLKDQKNFISYGGVGAYSGIGSNGLPFGGVGAGIGGGFGGGLGGGLGGLGGTTGGIGGFGGTGGGVGGGGVGTGVGGGSGVLPFP

SEQ ID NO: 225963 - protein, 88 aa, Glycine max
  Clone ID: PAT_MRT3847_46075C.1.pep
LHAPRMHPHSLLLIHFIDRASNKLTHSHANTRYPFPSDGGKKERHSTSIIIHPPSWLTYNQLTDIQYTTDTYSMNHAHATYSIHSQAI

SEQ ID NO: 225964 - protein, 251 aa, Glycine max
  Clone ID: PAT_MRT3847_46076C.1.pep
MHACMFIISRERKNTAATTNASSNATTNTATDTATGTAKPSDSTGRTAEATTKSTTKSTTKSTTSAKTTTYSGTSSSKRQSIVPNPGITTNSTIADEVLLVLKTSILGVGNVSGTCGHSQSKNRTPKHTFLVCGRDMAKMCVLVLVLALAVATSARNVPNPKDAGLKDQKNFISYGGVGGYSGIGNNGLPFGGAGAGIGGGFGGGGGLGGGLGGPTGGIGGFGGTGSGVGGGIGGGVGTGVGGGSGVLPFP

SEQ ID NO: 225965 - protein, 32 aa, Glycine max
  Clone ID: PAT_MRT3847_46077C.1.pep
IIASNVEDSQKSLLQILIQIHNEFHYLHKHIH

SEQ ID NO: 225966 - protein, 183 aa, Glycine max
  unsure (1)..(183): unsure at all Xaa locations
  Clone ID: PAT_MRT3847_46078C.1.pep
PRVRGRRLAAERRTLLWGDIVQAAYNCVLKSLWCKKPAVAMLMLARVEALRSIDKALPSQDDMRLPALYHRCLLGLNDHHGYVNYQLLAKMXGQYKPFATGMVNGKPTTQRASHVNFXKIKRAYGYDRALQKLAGLMVLNSYWVNEDSTYENVDGIMMDXADAAIRNDPRLTWLDDPAHKHRA

SEQ ID NO: 225967 - protein, 90 aa, Glycine max
  Clone ID: PAT_MRT3847_46079C.1.pep
NNEIHFFKKNGNTKKLKKKREGAFLRGLQVLQGFFFFQNISMFNNGHPPVIYKLAANPMARFIALKAISIFLGRGEFPLISWGIFEPPDW

SEQ ID NO: 225968 - protein, 147 aa, Glycine max
  unsure (1)..(147): unsure at all Xaa locations
  Clone ID: PAT_MRT3847_4607C.1.pep
TTRFKKNRKKRGHLSPGHGRIGKDRKDPGGRGNPRGMHXHRILVDKDHSGFFGKGGMRDFHXFAIKXYFPIVNVEKLWAFIPQDAKEKALKLKGNGPFIDLTQDGFFKGLGKGGLAQNXPFVGKGKLISKIRQKKIKETGGAGLLTG

SEQ ID NO: 225969 - protein, 32 aa, Glycine max
  Clone ID: PAT_MRT3847_46080C.1.pep
LVREGLNAAHTEATDIDCDITFHLHHLTVLII

SEQ ID NO: 225970 - protein, 299 aa, Glycine max
  Clone ID: PAT_MRT3847_46081C.1.pep
MPRKGMRSIFFTSTPTASLPPPSRQRTFSDSLMDENIETAEKLITKWDDSKVTTTTQLFSGTRQEAKQYLNAVKGLQSAMQYLVAQDSTSSTLVRAQFLMQLAMKTLQKEFYQILSSNREHLDPETVSTRSSVDHRSSVSDYDDEISITEDEFRVSETERVSMLAMEDLKAIAECMISSGYGKECVKVYIVMRKSIVDEALYHLGVEKLNLSQVQKLDWEVLELKIKSWLKAVKVAVGTLFNGERILCDHVFAADSGKRIAESCFAEITKDGAVSLLGFPEMVAKCKKSPEKMFMILDL

SEQ ID NO: 225971 - protein, 98 aa, Glycine max
  Clone ID: PAT_MRT3847_46082C.1.pep
CTPLSYFIRPDTTPKPLPPQPLMVYTTDTVFHASSPYITNHLFCFLCKDRGQFEDDINKSFPSSIRRVFAYDDGMMEMASTDNGKVFQICSITLLQRK

SEQ ID NO: 225972 - protein, 52 aa, Glycine max
  Clone ID: PAT_MRT3847_46083C.1.pep
NLARVKEMSGVWVVTNGVFRLVENPQADASDGRHGNGSSSQRKVWVHCQLVR

SEQ ID NO: 225973 - protein, 49 aa, Glycine max
  unsure (1)..(49): unsure at all Xaa locations
  Clone ID: PAT_MRT3847_46084C.1.pep
GVXXDEENVGLCMLSTPISERDMVIPPPLLSKHSSAVTQTHWAPPSFLP

SEQ ID NO: 225974 - protein, 50 aa, Glycine max
  Clone ID: PAT_MRT3847_46085C.1.pep
GCHLMLYIIYMQGPRREKGNGSLESRKNTPLQAKTLSCTSFNRELKKHKL

SEQ ID NO: 225975 - protein, 135 aa, Glycine max
  Clone ID: PAT_MRT3847_46086C.1.pep
LSLADTGYACVSTIISVFMHELGHAVAATSEGIQVEYIAVFIAILFPGALVAFNYEFLQTLPHLTALREYSAGIWHNAVDWHTTRTIGVGHEVWRIVPAFTTGGPCSIISPKFAHQRLSHPSLDKLRLLVSSLSI

SEQ ID NO: 225976 - protein, 48 aa, Glycine max
  Clone ID: PAT_MRT3847_46087C.1.pep
TSSLIILVVVTLKERIMAWWQDGQTLDEEEEEDLTYLLYRSLTNFISN

SEQ ID NO: 225977 - protein, 116 aa, Glycine max
  Clone ID: PAT_MRT3847_46088C.1.pep
ALIRGPCGRNAYFASATSFGAHKRTFFVSHVLYLPTDRVGSYAHCIYYHDFPALIFVTSLFTWPFCLYLFWTVAYSPPLALLEVRYLSTRLRHFLPNSFLVPPPPPKEGGRHTVMT

SEQ ID NO: 225978 - protein, 81 aa, Glycine max
  Clone ID: PAT_MRT3847_46089C.1.pep
GALEKQTFSKGLIFLSLFYKISQLRAPFKIPPNPRCFQIPESRLFWGLMIYSRVNFSKRPQLERNLSKGGPLEFWENQFKA

SEQ ID NO: 225979 - protein, 490 aa, Glycine max
  unsure (1)..(490): unsure at all Xaa locations
  Clone ID: PAT_MRT3847_4608C.1.pep
YQRLAFIPTFFAGITQATHRVLRLGFLIDFLSHAAIVGFMGGAAITIAPQQLKGFLGIKTAHFTTDTDIVHVMRSVFSEAHHGWNWQTILIGASFLGFLLVAKYIGKKNKKFFWVPAIAPLISVILSTFFVFITRXADKLGVVIVGRTDNLTKFRGXSYCWFSGEVLGLGGGSGLPAAFSAVQEATAIGKTFASMKDYQLDGNREMMALGTMNVVGSMTSCYVATGSFSRSAVNYMAGCQTAVSNIVMSVVVFLTLKFITPLFYYTPNAILSAIIISAVISLVDYEAAILIWKIDKFDFVACMGAFFGVAFASVEIGLLIAVSISFAKILLQVTRPRTAILGKIPRTTVYRNIQQYPEATRVPGVLIIRVDSAIYFSNSNYVKERILRWLMDEEELVKGDYQTRIQFLMVEMSPVTDIDTSGIHALEELFRSLQKKDVEXLGLANPGPIVIDKLHTSNFATLLGEDKIXFLTVAEAVAYCSSKLAEETID

SEQ ID NO: 225980 - protein, 96 aa, Glycine max
  Clone ID: PAT_MRT3847_46090C.1.pep
KGRAPFTGAPPRGNKFLPLALGWPPFPFGGLICTLGEMCDHCHYSHAKFAFRAHNATPFGPLESDVTPLVPFVRPPPLPVGNPLCPLSKLNTPPPR

SEQ ID NO: 225981 - protein, 67 aa, Glycine max
  unsure (1)..(67): unsure at all Xaa locations
  Clone ID: PAT_MRT3847_46091C.1.pep
CFEAPSQIGRNLKCGYILSNKFMRAVRISSHMWSLSNVTHFIHIXYFLKSYFSYGVLKTKKKKKYKN

SEQ ID NO: 225982 - protein, 86 aa, Glycine max
  unsure (1)..(86): unsure at all Xaa locations
  Clone ID: PAT_MRT3847_46092C.1.pep
KSXFLFFFFFFFFFKQKKDLPLFLILIRYPPKKAQGAPNGDTREKLVVFLXGEGRTTKLLFRDKNKFCPGYIKGSKIKKHSTGPVG

SEQ ID NO: 225983 - protein, 66 aa, Glycine max
  Clone ID: PAT_MRT3847_46093C.1.pep
PNPNISNGFSVSNKQRKGPFLKTLQGAYAPELRLPQIDDGRRFPCRARCALPTSQDLVAQSPTETL

SEQ ID NO: 225984 - protein, 84 aa, Glycine max
  Clone ID: PAT_MRT3847_46094C.1.pep
LFRCQIHWNQDSLKKPPYNMSSYMNSSASVSLANVRSVFFEGFRSHFGWLQNSSNNHLISTNSYMIMNPTLSPELEKLAFSQRI

SEQ ID NO: 225985 - protein, 63 aa, Glycine max
  unsure (1)..(63): unsure at all Xaa locations
  Clone ID: PAT_MRT3847_46095C.1.pep
VHAFGGGFSSHCLGSFICGLVISNKGHVCLXILDGSKVYDLSSIILXDISLIGYLIVYDNVKQ

SEQ ID NO: 225986 - protein, 122 aa, Glycine max
  Clone ID: PAT_MRT3847_46096C.1.pep
PSLASPVMANLEGVAKNLTFRVPGKKEFLVRIQGATEGRKGNLPLPVEVFKVAPEVPVVEFPKFAGAPLESLKFCEAQVSPFFKAIVWSCQGAPNSPPYPNGVPSRYVLIFCLFPLSPPVWV

SEQ ID NO: 225987 - protein, 41 aa, Glycine max
  Clone ID: PAT_MRT3847_46097C.1.pep
ERLREDDRRVTIINKFLRHSLISCKSSHFRRILILRVDDEN

SEQ ID NO: 225988 - protein, 78 aa, Glycine max
  Clone ID: PAT_MRT3847_46098C.1.pep
YFCKINLSAVYWSLGVWKLKTPKSNSIHLYIVAKQGSCYFQKILSCTVVRQPPCILVTESVNINVKVRLKCGVWIVCI

SEQ ID NO: 225989 - protein, 88 aa, Glycine max
  Clone ID: PAT_MRT3847_46099C.1.pep
MAMRSWVSRGGSMTRLMDSTNRGALSRFLSDKGRILSEEEQAKENVYIQKWERERLEKQKQLSEKAKALTDKDASAAAHKKPEGAQKD

SEQ ID NO: 225990 - protein, 250 aa, Glycine max
  Clone ID: PAT_MRT3847_4609C.1.pep
QIRELEAQATTLEQELESLQNQKRDMEEQIKSSTTEAGELGELNSGLQNQISELEIKSREREEELSAMMKKLKDNENESSSKMSDLTSQIDKLLADIGTLHAQKNELEEQIISKSDEASTQVKSITNELNALRQEVESLQHQKLDLEFQLVEKVQENSEYVIQMQTLKEEIDRKILEQERLLEDKENLAMKLRTLELEMNTIKNKNSEAEEQIRAKSHEISHMSKGMLELHIAEIEKISTDRESHFFSSG

SEQ ID NO: 225991 - protein, 230 aa, Glycine max
  Clone ID: PAT_MRT3847_460C.1.pep
TIAKAIYNKIGRNFEGRSFLEQIGELWRQDAIRFQEQLLFDIYKTKRKIHNVELGKQALKERLCSKRVFLVLDDVNDVEQLSALCGSREWFGSGSRIIITTRDKHILRGDRVDKMYTMKEMDESESIELFSWHAFKQASPREGFTELSNDVIEYSGGLPLALTVLGCHLFDMKIIEWKTVLDKLKRIPHDQVQKKLKISYDGLSDDTERDIFLDIACFFIGMDRNDAMCI

SEQ ID NO: 225992 - protein, 205 aa, Glycine max
  unsure (1)..(205): unsure at all Xaa locations
  Clone ID: PAT_MRT3847_46100C.1.pep
YFPFSLPNALLRLASKLTLIALVVAALCAVDLTHRASSSSSSPHAPAPSVDCSNLVLTMADCLSFVTNGSTITKPEGTCCSGLKVCSSKPLRRCLCEAFKSXAQFGVVLNVTKATTLPAACKVSAPSATNCGLSETPAAAPAGGLSPQASPSPQQAADASTNGPVNEVSPAPAPAPAQGNTASALFPISAISLFLAILVATFSGF

SEQ ID NO: 225993 - protein, 294 aa, Glycine max
  Clone ID: PAT_MRT3847_46101C.1.pep
RDSSHSSWVCQALSHLRANSLLLEQPLEHQVQVNFLVAAYNLANISPSDFQIMLSLQGSPDDSTIAAAQFLHPLISSLCSLALIGPQNGFSLELTSAILGKDKLNACGIMQPFSEHDDQRSVRAYGIYPYASFLNHDCLPNACRLDYVDANPSDDSHNTDFIIRMIHDVPQGREICLSYFPVNEKYSSRQKRLIEDYGFTCNCDRCNVESNWSDNDSVEDNAEEEEEVMDEDQCETMAASDTDDHPHEDNNDFPHAYFFLKYMCDRTNCWGTLAPLPPQGVLHLMSWNAMSVAN

SEQ ID NO: 225994 - protein, 139 aa, Glycine max
  Clone ID: PAT_MRT3847_46102C.1.pep
MSHQEQAFVSLLSQLALSFDGAVLGLALAYAAVRTLFKFTATSAALRKLHRAPSVSVSDLRSLLAEIPSDADGNSDGGNIVIVRGTVDAKSAVEGGTWKTLRPGVLVSRESGDKSVILQRTQTEAVEGMYEVPSLLDNP

SEQ ID NO: 225995 - protein, 83 aa, Glycine max
  unsure (1)..(83): unsure at all Xaa locations
  Clone ID: PAT_MRT3847_46103C.1.pep
KKFSHPIFLKITRAYFRTLSTPSFTYKSHNLIPSSPXILKIIITNTLTKQSYSQNPFYYPNTFKYLFPFSFXPPYYLTIQFPN

SEQ ID NO: 225996 - protein, 108 aa, Glycine max
  Clone ID: PAT_MRT3847_46104C.1.pep
TPPKRFSPFCPQIKKGPKRVWPGLHRAWKKKKRKFFGLGPNLKSGFGKVFFRLKINFVKKKGLPQGFFWVPPGERKKLSPFILVPPTRSPNLFFHGGPAGLSFFFFVN

SEQ ID NO: 225997 - protein, 256 aa, Glycine max
  Clone ID: PAT_MRT3847_46105C.1.pep
MACSPSTTLVSNSLLLNKTTSQCRLHVHPTLSLNQNLPIYSNNLLKLSTIQYHATTTPFVAASAGVESPVLGEDTTSSLDSVKVFDLNGNGIPISDLWKDRKAVVAFARHFGCVLCRKRADYLSSKKDIMDASGVALVLIGPGSIDQAKSFAEKSKFEGEIYADPTHSSYEALNFVSGVLTTFTPNAGLKIIQLYMEGYRQDWKLSFEKDTVSRGGWKQGGIIVAGPGKNNISYLHRDKEAGDDPEIEDILKACCS

SEQ ID NO: 225998 - protein, 36 aa, Glycine max
  Clone ID: PAT_MRT3847_46106C.1.pep
HPKSLQRPQAHQMSLVVEVKKKKKKLETSSLPRAEF

SEQ ID NO: 225999 - protein, 64 aa, Glycine max
  Clone ID: PAT_MRT3847_46107C.1.pep
MSLVANEDFQHILRVLNTNVDGKQKIMFALTSIKGIGRRFANICCKKADVDMNKRAGELSAIEL

SEQ ID NO: 226000 - protein, 31 aa, Glycine max
  Clone ID: PAT_MRT3847_46108C.1.pep
GLWRLPFCINNFPYRSIRFGTSLCRGGLASV

SEQ ID NO: 226001 - protein, 71 aa, Glycine max
  Clone ID: PAT_MRT3847_46109C.1.pep
LVHHVSLLVIGEKFAQIIGSTSISPCGHSISMLPTRCFTLISSKICWRYIRKAENPPPYRVHVGMYRRVET

SEQ ID NO: 226002 - protein, 93 aa, Glycine max
  Clone ID: PAT_MRT3847_4610C.1.pep
VFICACESGCLIANLTLPPQDSLEKRTAMNKWSLFGFTLKFGTIFFFLFPWLLCNGFKIENFGVDFRFPKGQVWIMVFFPQKKKKKKKKKKKK

SEQ ID NO: 226003 - protein, 183 aa, Glycine max
  Clone ID: PAT_MRT3847_46110C.1.pep
MAELQSKSETAPAPAPVVAEVPSNDAVAKKASETGESKAIVSVSEKTPVPANKQSSRGSIDRDIALAEVEKEKKLSYVKAWEESEKAKAENRAQKHLSAIAAWENSKKAALEAELKKLEEQLEKKKAEYGEKMKNKVALVHKEAGEKRAMIEAKRGEEILQTEEMAAKYRATGTTPKKTIGCF

SEQ ID NO: 226004 - protein, 61 aa, Glycine max
  unsure (1)..(61): unsure at all Xaa locations
  Clone ID: PAT_MRT3847_46111C.1.pep
MSNVFEGYERQYCELSANLAXKCTAAGVLNXEQXXXXVSEVKAGIDEAEAXIRKMDLEAXS

SEQ ID NO: 226005 - protein, 49 aa, Glycine max
  Clone ID: PAT_MRT3847_46112C.1.pep
GLIPVLLCEIESLRILYVTMPNDAYHLVRVASRRPMLTSDFKLEEDPVM

SEQ ID NO: 226006 - protein, 89 aa, Glycine max
  Clone ID: PAT_MRT3847_46113C.1.pep
SDIDLMLRVSEKELTIDNNITIPWLILTQLIDLLLLCALLFFLTLLPLGPNDHHHNNLRIRRYAPCCDYLLQSLLFRRYSNSTNKIPGY

SEQ ID NO: 226007 - protein, 223 aa, Glycine max
  Clone ID: PAT_MRT3847_46114C.1.pep
MATTLTSSVIHSHALPRAPCCFFLRFRFPFTFTFSPSNFPAKSSSRLAVISASSSTAEHNHPNSSSSSQDLAVLLEVQGVLMDSHRVGNRLAFNKAFEKLGLDCANWTEPVYSDLSKRSAGDEEKMVFLYFNRIGWPSSLPTNEQGLFAKRVLQQKEKALEEFVMSKSLPLRPGLEQFIDDAYNEGIPVVILTAYSKSGDNIARSIMEKLGDDRSISIIIGGN

SEQ ID NO: 226008 - protein, 82 aa, Glycine max
  Clone ID: PAT_MRT3847_46115C.1.pep
GRVGGRVDGRAGAILRLVESRLMECSSFSGVHTCLSNLSSMTTDYKALAKIAFNTLNPFPAKLIESRRQNYYLQHKSGKFKI

SEQ ID NO: 226009 - protein, 137 aa, Glycine max
  unsure (1)..(137): unsure at all Xaa locations
  Clone ID: PAT_MRT3847_46116C.1.pep
IRLRLQEIRGVPPNLKQFMAREDIFXAWSSSNMLSNHELHDAXQTEFMFPGSTIPHWFNHQSSGPSSSLWFHNKFPDKDLCILLTRLESIDLDDIPMPNVFINGILCKISSRNYHIRKLYMILHKMNETTVKLHTEV

SEQ ID NO: 226010 - protein, 92 aa, Glycine max
  unsure (1)..(92): unsure at all Xaa locations
  Clone ID: PAT_MRT3847_46117C.1.pep
XWSRLVNWWGSGRQRSVPGRRAXGFGARESGXGSRGRXPGSEGFERAGLXEAXLVDPAPXWICRXXTRSRAXPRFLSXRSERRSRTTVRSVV

SEQ ID NO: 226011 - protein, 340 aa, Glycine max
  Clone ID: PAT_MRT3847_46118C.1.pep
PTRPPTRPPTRPYGCEKTTEGGIESILVFCSVLSMGKEGDLWDDSVLINAFDQAISTYNKMHSSGKHKDAASVQEEAKTLIGENGSNFDTTRGADTNIPATDALDSGETGNLSKLEENHDTESQVDHLDSTSGQDIQNAQNGYAYAQAVDGYNQLVVQYYELEEKRLKILEQLNYGCEKTTEGVAADSNSGVPYSNSQDYSATAYQVSDPNAVCTCCPCYSQCLPAPCTSVPGCSLGGSSVSKPCSNLSVEMDRKMSFPCEDGKIHKMAMGAAEKALSTIRTTISGDFNVNEGKERNNSELEEINGSGTDLAAVLNAWYSAGFFTGKYLAEQSIQNKRQS

SEQ ID NO: 226012 - protein, 74 aa, Glycine max
  Clone ID: PAT_MRT3847_46119C.1.pep
SIVMVGIKQKKESYNSVLLKSIDFSTVQKKACHCLRLEQLTSMGFPSFLFWVEDRERVDSKSFIILGYFWSNIF

SEQ ID NO: 226013 - protein, 81 aa, Glycine max
  Clone ID: PAT_MRT3847_4611C.1.pep
RGLNKVLLGLFWNPNPALGWGEVLPWGWQVAPLGLLNYHHWAQGNLFPLPTQRGALGTYRFNLVFFKFWPWGDQPWGMEII

SEQ ID NO: 226014 - protein, 37 aa, Glycine max
  Clone ID: PAT_MRT3847_46120C.1.pep
STLTLSICPFTSYSVYQLSYLPILWDDFVNDQDMTVP

SEQ ID NO: 226015 - protein, 162 aa, Glycine max
  unsure (1)..(162): unsure at all Xaa locations
  Clone ID: PAT_MRT3847_46121C.1.pep
TTTRVCLGGLMVTAALLGLSTSYFGGIXGVPYLSLPMSWSNLGDFXKKKSGKRRIRVXYMDGCFDLMHYGHANALRQAKALGDELVVGLVSDEEIVANKGPPVLSMEERLALVSGLKWVDXDGTDAYAAAKKAGRYKQIKRTEGVSSTDIVGRILSSLRDQK

SEQ ID NO: 226016 - protein, 90 aa, Glycine max
  Clone ID: PAT_MRT3847_46122C.1.pep
NNSSASCRADEETPGACLVFFLYSFICLVVEPFSSTSSSSTMKSPVSSSSPMFASSSSSPCSSSSAMSSSAAPSSSPNKLRLSFSSAVRT

SEQ ID NO: 226017 - protein, 126 aa, Glycine max
  unsure (1)..(126): unsure at all Xaa locations
  Clone ID: PAT_MRT3847_46123C.1.pep
MDYENNSWIWEGVNYYPCVFGGLMVTAALLGLSTSYFGGIGVPYLSLPCSWSNLGIFHQKKSGKRRIRVYMDGCFDLMHYGHANALRQAKALGDELVVGLVSDEEIVANKGPPGLSXEERLALVSG

SEQ ID NO: 226018 - protein, 88 aa, Glycine max
  unsure (1)..(88): unsure at all Xaa locations
  Clone ID: PAT_MRT3847_46124C.1.pep
REEDSSGDFHYDKSXKVVVLSDLFYSHLSTTMSRPLTAKXQSRDIPYDNERTPLLNRPEDRPLPMGQMYLLCFARMVEPWAFFSIFPF

SEQ ID NO: 226019 - protein, 420 aa, Glycine max
  unsure (1)..(420): unsure at all Xaa locations
  Clone ID: PAT_MRT3847_46125C.1.pep
MDYENNSWIWEGVNYYPRVFGGLMVTAALLGLSTSYFGGIGVPYLSLPCSWSNLGIFHKKKSGKRRIRVYMDGCFDLMHYGHANALRQAKALGDEVGVGLVSDEEIVANKGPPVLSMEERLALVSGLKWVDEVITDAPYAITEQFLNRLFHEYKIDYVIHGDDPCLLPDGTDAYAAAKKAGRYKQIKRTEGVSSTDIVGRILSSLRDQKXCEDHNGTEVKPQEENQSKASHIAQFLPTSRRIVQFSNGKGPGPNARIVYIDGAFDLFHAGHVEILKRARELGDFLLVGIHSDETVSEHRGNHYPIMHLHERSLSVLACRYVDEVIIGSPWEITNDMITTFNISVVVHGTVAEKTLNCELDPYEIPKSMGIFHLLESPKDITTATVAQRIMANHEAYVKRNAKKTRSEQRYYEEKKYVSGD

SEQ ID NO: 226020 - protein, 72 aa, Glycine max
  Clone ID: PAT_MRT3847_46126C.1.pep
VRKIESSKAPAFKVRVMVPELRLWCLCNADRMSCCLLGLVHWNRCWVCTLHEHQPTASHLVLAPLVSQPVVL

SEQ ID NO: 226021 - protein, 62 aa, Glycine max
  unsure (1)..(62): unsure at all Xaa locations
  Clone ID: PAT_MRT3847_46127C.1.pep
TPYLIRVLLLIISAXLASTKSLNTQFTTLRKEEKLKKEMEQSTAFNIPAITDTDNKNCSLSN

SEQ ID NO: 226022 - protein, 35 aa, Glycine max
  Clone ID: PAT_MRT3847_46128C.1.pep
DGNTNVCRNHVLVTYCEDHLQAVRYTTNILPRLKC

SEQ ID NO: 226023 - protein, 170 aa, Glycine max
  Clone ID: PAT_MRT3847_46129C.1.pep
MSFDTDQKLPVKSPADQRREANAIRTLAFVGVCLSTVSTMICVVSVPLAYQHFQQMGTNMLSEIDFCKSRSGNIWNEVTRTQVLSQVYGKGGAFRAVRQADGYGGGGGGASGGGAASSQPPAAGGYGAGGGAAGGTAPQGAAAGGTAPQRAAAGSAAPQGGAAGGTAPQG

SEQ ID NO: 226024 - protein, 583 aa, Glycine max
  Clone ID: PAT_MRT3847_4612C.1.pep
MGELFGVGKRRNISSSNNNNNSSSSSVLGLDVKVQQSPEALFHNRMMMMAHHNHHHRPLSSPFDNNGDGDGPTTYMSFTNHINLVSGASSVLGPAIDAGCGAAPPAPVRTLQPFDISSYTSSPTTTTTTFNFKPPSAGVMAASLGFPFTSAQWRELERQAMIYKYMMASVPVPHDLLIPTSLTSSSRSSCMDGGFNLRLANSTDPEPGRCRRTDGKKWRCSRDVAPNHKYCERHMHRGRPRSRKPVEVNTNSTTTPTSVNNNNHQIKKARHECNNNPFATPDVTAAISNPTSRKNGSSPHFLGSTTTQPYLDSSLSLDNFGLKAASFDSVASVSANKEPRGLEWMLNGDPISLGASDSQWQSLMHNKDGMTSVSSCNTTESQYLNSLALYNSGLEQQNRRHPLFLNPLVVPMENLQPEKPRGFIDAWSNAESNANTNTTNKNSAASIGKLSLSSLDLSMGGAAVNEDVGNVNMGLGLMEPNGKTHTGTKISLSNWQNPAPWVASSLGGPLAEVLRSSTVTATTTTNEATSNTPSPATTTHAESPSGVLQKTLVSLSDSSNNSSPRVASSRANSEMALLRFQSN

SEQ ID NO: 226025 - protein, 244 aa, Glycine max
  Clone ID: PAT_MRT3847_46130C.1.pep
CTPYHNTKDIFRSMPICCPILLPLPHALALRMIFHASAIALRMILQLGVKPSWFNTCSTTIEKRPHLIPGTPSSKGDLRTYMIDIPPLGDSVVPEMLLKVLEPYRKEGCMLDDERAKLYASIVDKGCAARFAFAAIIFGESSEALFWLQLPQALKHLLNKVLRKPPPKESTAAPISDVDDETSLLSRISSKGKPTEETGRDVLSQGQLRLMAFDREELWKSASERISWHEKLEGEEAIQKRIHE

SEQ ID NO: 226026 - protein, 86 aa, Glycine max
  Clone ID: PAT_MRT3847_46131C.1.pep
AGIRSLSTNTHFIRRRSHYFRSCALCMCHQAPGRVFYMHSGHTAFCSSERRQYLIKQYQRKVNRKPESSKERLPCIAHRSPLEGFL

SEQ ID NO: 226027 - protein, 45 aa, Glycine max
  Clone ID: PAT_MRT3847_46132C.1.pep
LYDVHGCLISLIINTFEKKGFYLKGLNLATEDRPYTHNHYTYISA

SEQ ID NO: 226028 - protein, 96 aa, Glycine max
  unsure (1)..(96): unsure at all Xaa locations
  Clone ID: PAT_MRT3847_46133C.1.pep
EERPXQQGGHKDTPHTQAPHPHHIPQCPSPSPSPGTRARGRPPQRGRPEKGGPXTKQTPXRGEAEPPTXSEAQRKRNPQGGTRGAPTDNNRQSRKP

SEQ ID NO: 226029 - protein, 54 aa, Glycine max
  unsure (1)..(54): unsure at all Xaa locations
  Clone ID: PAT_MRT3847_46134C.1.pep
INFYFLKRPPLFFFLFFFLFFNIPLFYFLFILFXIFFFFFFINKIFFFFYFFFF

SEQ ID NO: 226030 - protein, 64 aa, Glycine max
  Clone ID: PAT_MRT3847_46135C.1.pep
FWKGQLFIPNLNFLRFWPLVQGLLLNYKNLSVGNRIIFFLIQPLKIHLWSGVQWFNPILRKIYM

SEQ ID NO: 226031 - protein, 132 aa, Glycine max
  Clone ID: PAT_MRT3847_46136C.1.pep
KDVKVPLDILIFKLMKAYMRSSSLRKAALRALSKMLTVDELFYLREQFALLEPSKNGTISLENIKAVLMVNATDAMKESRIPDFLASLNALQYRRMDFDEFCAAALSVHQLETLDQWEQNARCAYDLFERME

SEQ ID NO: 226032 - protein, 68 aa, Glycine max
  Clone ID: PAT_MRT3847_46137C.1.pep
KRIRLPGVNFMNFVHQYTKYLEVLLPNIRREKVVNVKDKTEGLKKDPSAMVGLFSGRNVGKQVLVVFH

SEQ ID NO: 226033 - protein, 74 aa, Glycine max
  Clone ID: PAT_MRT3847_46138C.1.pep
NMVPSLEGFNFEPIRLGQERLILAYAPGYKTVPSKGKSFGGVFANTRMGPWPAIFFKSSTPRYAVRLNLQLRLT

SEQ ID NO: 226034 - protein, 72 aa, Glycine max
  unsure (1)..(72): unsure at all Xaa locations
  Clone ID: PAT_MRT3847_46139C.1.pep
NSWGNNKKARTEKPFYQRCCINEEGDAPCFSKXNPTIIEDRHTPSSTLLSAVGGGVFTSLTSFFVTFAGSPR

SEQ ID NO: 226035 - protein, 48 aa, Glycine max
  Clone ID: PAT_MRT3847_4613C.1.pep
KKVCRKIIKKKTCFSCTVIFQYSFGFNSSVAILKTRHGMQKLKPCLFS

SEQ ID NO: 226036 - protein, 84 aa, Glycine max
  Clone ID: PAT_MRT3847_46140C.1.pep
LNKIILLHTNVEAARKKSSIASSHRTCIDRQNRHKFKYFEKDENARLNLTFKFHSQEKNINITDFYRLQRNISIQKPARVPGIR

SEQ ID NO: 226037 - protein, 70 aa, Glycine max
  Clone ID: PAT_MRT3847_46141C.1.pep
LRNRGVVFHSLLTNLQPKKRSVLLGHKEIMRHFSSQSGKNCNDGQSSSLDRLRCRPLNLERFTDESQRYW

SEQ ID NO: 226038 - protein, 410 aa, Glycine max
  unsure (1)..(410): unsure at all Xaa locations
  Clone ID: PAT_MRT3847_46142C.1.pep
MISKTREEVEADYKAASLAPDVMEKKQMQTETLSAVFETYFRILKKTMQSIGARPEANAGALSAAVEPLPLLAPCLKGLAKFSHLIDLDFMGDLMNHLRVLASGSSNSCNTSDKCSKCLTVSXRLQCCIVAFKVMTRAGNNLDALNVDLQDFFLHLYNLVLEYRPGRDQGEVLAEALKIMLCDDKQHDMQKTAAFIKRLATLSLSTLSLCVGSADSMAALVTVKHLLQKNVKCRNLLENDIGGGSVSGTIHKYLPYSTDPNLSGALASVLWELNLLSSHYHPAISTLASGISSMSTAHNQILLSKSSPQQAYKEMSLDQELCFTQQSDGIKLNNKKRRANGPAISPSIGSTTVTSSFDDNELQRQLSSHFMVLHDIKENERLRKELDRTALSLQLYEQYKKQKKRSKPSR

SEQ ID NO: 226039 - protein, 113 aa, Glycine max
  unsure (1)..(113): unsure at all Xaa locations
  Clone ID: PAT_MRT3847_46143C.1.pep
FADRAYIYCRVLXTDPDGGKDVGVADKPGITGDXNQLDPSVLDELVVDIGTLSSVYHKPANACXTRTYLTAQKTEYDYYTEGRETGYSESPXIMLDGHASPSPTRPVPDLLGD

SEQ ID NO: 226040 - protein, 71 aa, Glycine max
  Clone ID: PAT_MRT3847_46144C.1.pep
MFFFSSPPLVFLKKNWIFPPSLVKIVCGGLFFFFLIPKKTPFFKKKKKKKKKKKKKKKKKKKKKKKKKKKK

SEQ ID NO: 226041 - protein, 243 aa, Glycine max
  unsure (1)..(243): unsure at all Xaa locations
  Clone ID: PAT_MRT3847_46145C.1.pep
HLTPHTIDNWEQRISDVVEGXVYHMYDAALSHTVSKYPVDIQPFKDMIEGMRVDLRKSRYNNFDELYLYCYYVAGTVGLMSVPVMGIAPEANASSESIYNAALALGIANQLTNILRDVGEDARRGRVYLPQDELAQAGLSDDDIFSGRVTDKWRKFMKGQIKRARMFFDEAERGVADLNSASRWPVWASLLLYRQILDSIEANDYNNFTKRAYVGKVKKLLSLPTAYGFSLLGPQKFAKMVRR

SEQ ID NO: 226042 - protein, 465 aa, Glycine max
  Clone ID: PAT_MRT3847_46146C.1.pep
MKKIRNSILLLFFLLAASAAVSSAEQIPSAAYDRVLFPDRRCQKTASENKTRRGSSAAAAECEVWSESCSEAVLSVARRPETAEWLKKIRRKIHANPELAFEEIETSRLIREELDLMEVSYRYPLAKTGIRAWIGTGGPPFVAIRADMDALPIQEAVEWEYKSKVAGKMHACGHDAHVAMLIGAAKILKTREHLLKGTVILLFQPAEEAGNGAKRMMQDGALEDVEAIFAAHVSHEHPTGIIGSRPGPLLAGCGFFRAVISGKKGLAANPHRSVDPVLAASAAVISLQGIVSREANPLDSQVVSVTSFNGGNNLDMIPDSVVLLGTFRAFSNTSFYQLLERIEQVIVEQASVYRCLAEVDFFEKEYTIYPPTVNDNRMYEHVKKVSIDLLGHKNFRVVPPMMGAEDFSFYSEVVPSGFFYIGVRNETLGSTHTGHSPYFMIDEDVLPIGAAAHASIAERYLIEHG

SEQ ID NO: 226043 - protein, 35 aa, Glycine max
  Clone ID: PAT_MRT3847_46147C.1.pep
QLDQSNVDITEHFGTFDHVLQPACHHLPWCPAYHL

SEQ ID NO: 226044 - protein, 195 aa, Glycine max
  unsure (1)..(195): unsure at all Xaa locations
  Clone ID: PAT_MRT3847_46148C.1.pep
MSGVLLWVSCGPKENPISIVGLAGRGGRSQRRFGLCNGISFASFSPAVADPSRSSEERVYEVVLKQAALVKEKNKGTKRALNLDKPTVEGDLTHGDLLSAAYDRCGEVCAEYAKTFYLGTQLMTQERRKAIWAIYVWCRRTDELVDGPNASHITPKALDRWEQRLYDXFEGRPYDMYDAALSXTVSKYPVDIQPF

SEQ ID NO: 226045 - protein, 170 aa, Glycine max
  Clone ID: PAT_MRT3847_46149C.1.pep
ILGTQLMTAERRKAIWAIYVWCRRTDELVDGPNASHITPGALDRWEQRLSDVFEGRPYDMYDAALSHTVSKYPVDIQPFKDMIEGMRMDLRKSRFDPFDELSLYCYYGVGTVGLMSVPVMGIAPEANASAESIYNAALALGIANQLSYILIDVGQRVSFFEHFNVTLLNR

SEQ ID NO: 226046 - protein, 342 aa, Glycine max
  Clone ID: PAT_MRT3847_4614C.1.pep
MAGIRLQPEDSDVSQQSRAVALSATDLVSDDDRSVAADSWSIKSEYGSTLDDDQRHADAAEALSNANLRPPSDYSSDKDEPDSEAVTSMLGFQSYWDSAYADELTNFREHGHTGEVWFGVDVMEVVASWTKALCVEISQGHIPNGVDEVKAEADKLGDKVLSTWSVLDIGTGNGLLLQELAKQGFSDLTGTDYSERAISLAQSLANRDGFSNVKFLVDDVLETKLEQEFRLVMDKGTLDAIGLHPDGPVKRMMYWDSVSRLVASGGILVITSCNNTKDELVQEVESFNQRKIATAQELGAVKDEEPCREPPFQYVNHVRTYPTFMFGGSVGSRVATVAFLRK

SEQ ID NO: 226047 - protein, 53 aa, Glycine max
  Clone ID: PAT_MRT3847_46150C.1.pep
GFFARNVKKLGLKVESIPVNVNSCSFQKEVGVVNCTTLSMDLRDYYEKLGIPM

SEQ ID NO: 226048 - protein, 201 aa, Glycine max
  Clone ID: PAT_MRT3847_46151C.1.pep
PFKDMIEGMRLDLRKSRYNSFDELYLYCYYVAGTVGLMSVPVMGIAPESKASTESVYNAALALGIANQLTNILRDVGEDARRGRVYLPQDELAQAGLSDDDIFRGRVTDKWRKFMKGQIKRARMFFDEAERGVAELNSASRWPVWASLLLYRQILDSIEANDYNNFTKRAYVGKVKKLLSLPTAYGFSLLGPQKFTKMVRR

SEQ ID NO: 226049 - protein, 105 aa, Glycine max
  Clone ID: PAT_MRT3847_46152C.1.pep
KKVWGAPGGFRKPPNFLKPTAPQFEDDYFSTGHTQPKDFCTQKSPPLPKSSFQRGKCPGENPFKKELWPKFEVAPPWGGPPKVPPVQKSAPKGFFALLEKASCDE

SEQ ID NO: 226050 - protein, 153 aa, Glycine max
  Clone ID: PAT_MRT3847_46153C.1.pep
HASVWPNLAYMRSGLDLLATTGLPIWLTEASVDPQPSQAEYLEEILREAYSHPAVEGIIMFSGPAQAGFNATTLADETFKNTPAGDVVDKLIQEWGTGPNIATADNRGIVDISLHHGDYDVTVTHPLIHSPITLNLCVKKDFSLETIHVKMRA

SEQ ID NO: 226051 - protein, 355 aa, Glycine max
  unsure (1)..(355): unsure at all Xaa locations
  Clone ID: PAT_MRT3847_46154C.1.pep
IPGSTHASAQASGGMNYILTNEDYQSWFVSRFKFTTFTNEMKWYSTEKKQGEENYTIADAMLKFTQENGISVRGHNIFWDDPKHQPDWVKNLSPADLXEAAAERMKSVLSRYKGELIAWDVMNENLHFHFYEDKFGENASAAAYATAYELDQEPKLFLNEFNTIEYSGDEASSPAKYIKKLQEILSFPGVSGMSAAIGLQGHFASGQPNLAYMRSGLDLLATTGLPIWLTEASVDPQPSQAEYLEEVLREAYSHPAVEGIIMFSGPAQAGFNATTLADETFKNTAAGDVVDKLIQEWGTGPNIATADSRGIVDISLHHGDYDVTVTHPLIHSPITLNLSVKKDFSLETIHVKMHA

SEQ ID NO: 226052 - protein, 74 aa, Glycine max
  Clone ID: PAT_MRT3847_46155C.1.pep
HLYCVHFELLGIQLRQKHCDRPTDCVTFSHNILVFIHFSWAHTFSHFSRTNDRTLTSNATSITCQWTSEQDGHD

SEQ ID NO: 226053 - protein, 59 aa, Glycine max
  Clone ID: PAT_MRT3847_46156C.1.pep
KNLTRSYLPTNCLFQALTSLDIGGFRSTRARVFQGLVKLQPCTFGTSINRYRYLDMNTA

SEQ ID NO: 226054 - protein, 64 aa, Glycine max
  Clone ID: PAT_MRT3847_46157C.1.pep
YPAFISRQMIPLIGMGMGIWCIKYAKKDPFMTCAGPSNSQVPKPPIVIHRVVALIMVNGVMLMG

SEQ ID NO: 226055 - protein, 454 aa, Glycine max
  unsure (1)..(454): unsure at all Xaa locations
  Clone ID: PAT_MRT3847_46158C.1.pep
MLLGFSTLALLVCFSCCWLLVLGEGETASCSNIVALGHRTDNISITEFGGVGDGRTLNTKAFREAIYRVQHLPREGGTLLYVPPGVYLTEPFNLTSHMTLYLAAGAVIMATQDSLNWPLIAPLPSYGRGRERPGGRYMSFIHGDGVQDVVITGENGTIDGQGDAWWNKWRQGTLQFTRPNLVEFVNSRDIIISNVIFKNSPFWNIHPYRSIXGHQDFKSNVVVRYVTILAPRDSPNTDGIDPDSSSNVCIEDSYISTGDDLVAVKSGWDEYGIAYGRPSSDITIRRITGSSPFAGIAIGSETSGGVENVLAEHINLYNMGIGIHIKTNTGRGGFIKNITMSHVYMEEARKGIRISGDVGDHPDDKFDANALPLVKGVTIKNVWGMKVLQAGLIQGLRNSPFTDICLYDINLHGVTGPRTPPWKCSDVSGFAHQVSPWPCSELSSNQQGSCANYS

SEQ ID NO: 226056 - protein, 69 aa, Glycine max
  unsure (1)..(69): unsure at all Xaa locations
  Clone ID: PAT_MRT3847_46159C.1.pep
XXFXFEGEEEGFGXLVXGWREEXEAAGGGGEGXXEGGEXTELRXEEXEGAAMEGHEGGKLXKXLILILN

SEQ ID NO: 226057 - protein, 99 aa, Glycine max
  unsure (1)..(99): unsure at all Xaa locations
  Clone ID: PAT_MRT3847_4615C.1.pep
MVPLHFGNIPWNPDLVMGIGNXSMSQMYHTTGICAIKAINSRVLPRHDPKPMPKAPVQILPMFYPAVDVNKPLVNKHVPKLAKLTVSITPGTVLILLAG

SEQ ID NO: 226058 - protein, 138 aa, Glycine max
  Clone ID: PAT_MRT3847_46160C.1.pep
YSISQREKCSKECTRFLGANPDVCHVLKSKTLLHKAKQLLFYWLEEISTPINLSRKDCRQQQCLKQLTRGPEELGKIIWERTRELGGNETNLITKLLSLDSMDEWSELKPQVRHICVEVAEAVLERVTYEIVAEMIQV

SEQ ID NO: 226059 - protein, 55 aa, Glycine max
  Clone ID: PAT_MRT3847_46161C.1.pep
SQLPRISTFRNHWVPSNEFFTQIMIKINIYPNNTTQKIFIPIIQDSIHFKDRFLN

SEQ ID NO: 226060 - protein, 73 aa, Glycine max
  Clone ID: PAT_MRT3847_46162C.1.pep
PGVYITLVALHDGTRDLKRVRFSRRRFGEHQAETWWSENRDRVYERYNVRSTDKSANQAARSSKGAGSPVSQT

SEQ ID NO: 226061 - protein, 100 aa, Glycine max
  Clone ID: PAT_MRT3847_46163C.1.pep
HRKYSTTGDLTHIIGRIDHPVIDRFDNKADDMNNRSFKHPCMLNRLWAARYRGTSTAVALWISDTTNAYLTSIDAPAHMDFIHNMITTTSQSDCDCLIID

SEQ ID NO: 226062 - protein, 124 aa, Glycine max
  unsure (1)..(124): unsure at all Xaa locations
  Clone ID: PAT_MRT3847_46164C.1.pep
LGTSRPQFGVVASSIVQYTYYEGWGATLSHLDAXKADILLRGYPAWNSRRPLQVLHTIFPKXDAQHQPSFVFFSSPPKGRRGGNXSALXPPVPVKEYNHTLPLLPIPMPPLSPNTPPLFPPPPP

SEQ ID NO: 226063 - protein, 57 aa, Glycine max
  unsure (1)..(57): unsure at all Xaa locations
  Clone ID: PAT_MRT3847_46165C.1.pep
LIFICCCFXKKKTKTFDLFMSGTINNMVCNGDPKILVLLPGSGRGFLLQGYGFCFIH

SEQ ID NO: 226064 - protein, 212 aa, Glycine max
  Clone ID: PAT_MRT3847_46166C.1.pep
MSAHQKEKHNAPSSKPTVSHPLHKVDDPMGVTDENETLRVSNQWKRQNLLQLEIPARTSEESSSQDFVGIRMPLTPSPTPSQKRVNFLVTSRSVDAPKPPSSSSRAKPSMRNILPKFGFRNRAPSISLDVEKGVTTAAQEGSFSGHQEKSSIPRSVSLTKMFTPKIKRTSSLPVEELGRANVESVLCGILGASPCVRSVAYSCKVLIFKTTL

SEQ ID NO: 226065 - protein, 61 aa, Glycine max
  Clone ID: PAT_MRT3847_46167C.1.pep
RNSGRDTGSSMCTSIAELACTACADLDGSVRYDNTLDWKLYQLLSLSWIHLTEDRHVYGPR

SEQ ID NO: 226066 - protein, 48 aa, Glycine max
  Clone ID: PAT_MRT3847_46168C.1.pep
IHFELNRILSASSRSRSNDPLTQPANHSASPKTRKIAHHFLGNTQHPK

SEQ ID NO: 226067 - protein, 45 aa, Glycine max
  Clone ID: PAT_MRT3847_46169C.1.pep
PVFKVERENVQGLKLFIGWERFRPISCYSSGIMALTNGPFVLRLY

SEQ ID NO: 226068 - protein, 63 aa, Glycine max
  Clone ID: PAT_MRT3847_4616C.1.pep
QSRYECFRLSLRRHWEKLFVLKSNGCATVSISPNGSLYTSRYKKSHSFIILLIYVSVNSNALW

SEQ ID NO: 226069 - protein, 128 aa, Glycine max
  unsure (1)..(128): unsure at all Xaa locations
  Clone ID: PAT_MRT3847_46170C.1.pep
MKNCAYLSQKQHRFWRVFPHSLGCFVHFLAFHVHPFFVQLCYFEILSMIGYLSLNVSKPTTPDRPNDLDLFYTSVSAXTVSSMEAVETDVLYNAQLILLTLLMLVSGEDITSALEPIFARYKFTQSVQ

SEQ ID NO: 226070 - protein, 61 aa, Glycine max
  Clone ID: PAT_MRT3847_46171C.1.pep
GGLCDHFINETEWVLLPYCFIESITVVATCKVSQLPKGIVFYSLLLESTTWSAIVLVCQSP

SEQ ID NO: 226071 - protein, 43 aa, Glycine max
  Clone ID: PAT_MRT3847_46172C.1.pep
KCKALHYNYQGSLHTFNIGLSLTLSCSLSCLFLSLRLKNIQIN

SEQ ID NO: 226072 - protein, 241 aa, Glycine max
  Clone ID: PAT_MRT3847_46173C.1.pep
MDTLSQLSLLCLCLSFFPLFASPALLFQGFNWESSKKGGWYNSLKNTIPDLANAGITHVWLPPPSQSVSPEGYLPGRLYDLDASKYGTKDQLKSLIAAFHDKGIKCLADIVINHRTAERKDGRGIYCIFEGGTPDARLDWGPSFICKDDNTYSDGTGNLDSGEPYDPAPDIDHLNPQVQRELSEWMNWLKTEIGFDGWRFDYVKGYAPSITKIYMEQTKPEFAIGEKWDSLSIDNYDGHSW

SEQ ID NO: 226073 - protein, 125 aa, Glycine max
  Clone ID: PAT_MRT3847_46174C.1.pep
EKCSILKKKKKKKKKKKKKKKKKKKKKKKKKKKKKKKKKKKKKKKKKKKGGAVLGDPSLLPRACNVILFFWGPQNKIHGPAFKTGGPGKPRAFPNLIALKQIPFSPVGLIPKGPAPIAFPNICPP

SEQ ID NO: 226074 - protein, 138 aa, Glycine max
  Clone ID: PAT_MRT3847_46175C.1.pep
MLSQGFNWESSKKGGWYNSLKNTIPDLANAGITHVWLPPPSQSVSPEGYLPGRLYDLDASKYGTKDQLKSLIAAFHDKGIKCLADIVINHRTAERKDGRGIYCIFEGGTPDARLDWGPSFICKDDNTYSDGTGNLDSG

SEQ ID NO: 226075 - protein, 132 aa, Glycine max
  Clone ID: PAT_MRT3847_46176C.1.pep
RMKLCNGLAASERSGSEISRKKDRVERISGSGEDIAAEKGLEQWERKRNKLDVYDFNEYDGMDVENIRRRHLDGHGGRRFMGSMHAARSGIDRDFRTGSSGRVLDKRKNSYGDKPNCLYPRDNVGHSRFKMN

SEQ ID NO: 226076 - protein, 80 aa, Glycine max
  Clone ID: PAT_MRT3847_46177C.1.pep
EAKLKCLSIKKRGTQQLFLCFTHTLLPQNFKPRKSKAQGGTGLRGPGPFEKHPLNFPLLGLKFKGPFQSGKSISHSFFPG

SEQ ID NO: 226077 - protein, 152 aa, Glycine max
  unsure (1)..(152): unsure at all Xaa locations
  Clone ID: PAT_MRT3847_46178C.1.pep
MFSDAVIRGESQNCHRTCWLFGSSSVNQGDTQGVKKVVGIGFQPGPDQGKIVSAAHTRDIQFLDIRNHSSAYLTIYGHRGSLTALAXVHRHAPIIASGSAKQIIKVFSLEGDLLGTVRYYPTLMPQKIGSASCLNFHPYQALLAAGAAHASV

SEQ ID NO: 226078 - protein, 47 aa, Glycine max
  Clone ID: PAT_MRT3847_46179C.1.pep
LPPFPLLTICCFSPFANFIEWSYRPARRIPFLIETFPGKPSVAQWTS

SEQ ID NO: 226079 - protein, 91 aa, Glycine max
  Clone ID: PAT_MRT3847_4617C.1.pep
PRVRIGKQTTFGVIETLWEHWYSTQTWRVQENRLIMCIRCITTSSGFVRANDAYRLGILRLWITSEDVGSNQSTHSCTLLSVKTNPVMART

SEQ ID NO: 226080 - protein, 176 aa, Glycine max
  Clone ID: PAT_MRT3847_46180C.1.pep
FEVKVRIVIGHVGYLVVSESVKAYTIKVTPRSGSSVNQGDTQGVKKVVGIGFQPGPDQGKIVSAAQTRDIQFLDIRNHSSAYLTIYGHRGSLTALAVHRHAPIIASGSAKQIIKVFSLEGDLLGTVRYYPTLMPQKIGSVSCLNFHPYQALLAAGAADASVIYAGKQFLIIIMSSL

SEQ ID NO: 226081 - protein, 84 aa, Glycine max
  Clone ID: PAT_MRT3847_46181C.1.pep
KLLWLTCPFRFSSRSTLGIYLSHKKLSRKQRKSHRVLQTPQMQQTNAPQKLQCLKYYYVPVRKINNNSPPLLPQPTKHPLTIFP

SEQ ID NO: 226082 - protein, 58 aa, Glycine max
  Clone ID: PAT_MRT3847_46182C.1.pep
AARLAPYPGYKRRVMNKKKFQAHHPDYQFRGDNFVQLQKTRPICETNAYRGLPVRQRP

SEQ ID NO: 226083 - protein, 70 aa, Glycine max
  Clone ID: PAT_MRT3847_46183C.1.pep
MHPISCCTSGIVLPHFPINTAKPIIVVVRSRHCPPPPVLSHVPRPRCGCTSPAPYSTSISINQNHPHTSL

SEQ ID NO: 226084 - protein, 126 aa, Glycine max
  Clone ID: PAT_MRT3847_46184C.1.pep
LYFSFQTASNKLSPRCWISTSTPILPPTRKWRAPAASIPPSSMPPTPTTPAPTATPSPTTSPSSTPPPPPPPTDLPWPPPENPPFAPSSSFRRSNREPRRRGWIFRRRWIRTVLRRSRGSLPGNRR

SEQ ID NO: 226085 - protein, 58 aa, Glycine max
  Clone ID: PAT_MRT3847_46185C.1.pep
YPFIYDTFIRASIGAGTMCTSEMSSCKPCCLNVFWTLHKCWSNVKHGLPHQGAHILGV

SEQ ID NO: 226086 - protein, 98 aa, Glycine max
  Clone ID: PAT_MRT3847_46186C.1.pep
TNLNRLVSQVISSLTAPLRFDGALNVDVNEFQTNLVPNPRIHFMLSSYAPVISAEKAHHEQLSVGEITNSAFEPSSMMAKCDPRHGKYMACCLMYRGN

SEQ ID NO: 226087 - protein, 59 aa, Glycine max
  Clone ID: PAT_MRT3847_46187C.1.pep
IRTCSPRKVFRHVTQLSIKISKISPKQFANGYQNMIFCPVNEISHSASAIKLYLTMKTQ

SEQ ID NO: 226088 - protein, 450 aa, Glycine max
  Clone ID: PAT_MRT3847_46188C.1.pep
MRECISIHIGQAGIQVGNACWELYCLEHGIQPDGQMPSDKTVGGGDDAFNTFFSETGAGKHVPRAIFVDLEPTVIDEVRTGTYRQLFHPEQLISGKEDAANNFARGHYTIGKEIVELCLDRIRKLADNCTGLQGFLVFNAVGGGTGSGLGSLLLERLSVDYGKKSKLGFTVYPSPQVSTSVVEPYNSVLSTHSLLEHTDVAVLLDNEAIYDICRRSLDIERPTYTNLNRLVSQVISSLTASLRFDGALNVDVNEFQTNLVPYPRIHFMLSSYAPVISAEKAHHEQLSVGEITNSAFEPSSMMAKCDPRHGKYMACCLMYRGDVVPKDVNAAVGIIKTKRTIQFVDWCPTGFKCGINYQPPTVVPGGDLAKVQRAVCMISNSTSVVEVFSRIDHKFDLMYAKRAFVHWYVGEGMEEGEFSEAREDLAALEKDYEEVGAEATEDGDEGEDYD

SEQ ID NO: 226089 - protein, 67 aa, Glycine max
  Clone ID: PAT_MRT3847_46189C.1.pep
NSPTPSFFICSLRIICNTILYGRNILSWKKLKLRFLIFQDGVKKDYFIEIFRICLFLPTLERIGIGL

SEQ ID NO: 226090 - protein, 57 aa, Glycine max
  Clone ID: PAT_MRT3847_4618C.1.pep
IQATYDRLLSEAPKYKLITPSILSDRLRVSSIITFFYYYSYVKGLFLLMGAFVLVMF

SEQ ID NO: 226091 - protein, 450 aa, Glycine max
  Clone ID: PAT_MRT3847_46190C.1.pep
MRECISIHIGQAGIQVGNACWELYCLEHGIQPDGQMPSDKTVGGGDDAFNTFFSETGAGKHVPRAIFVDLEPTVIDEVRTGTYRQLFHPEQLISGKEDAANNFARGHYTIGKEIVELCLDRIRKLADNCTGLQGFLVFNAVGGGTGSGLGSLLLERLSVDYGKKSKLGFTVYPSPQVSTSVVEPYNSVLSTHSLLEHTDVAVLLDNEAIYDICRRSLDIERPTYTNLNRLVSQVISSLTASLRFDGALNVDVNEFQTNLVPYPRIHFMLSSYAPVISAEKAHHEQLSVGEITNSAFEPSSMMAKCDPRHGKYMACCLMYRGDVVPKDVNAAVGIIKTKRTIQFVDWCPTGFKCGINYQPPTVVPGGDLAKVQRAVCMISNSTSVVEVFSRIDHKFDLMYAKRAFVHWYVGEGMEEGEFSEAREDLAALEKDYEEVGAEATEEDGDEGEDY

SEQ ID NO: 226092 - protein, 112 aa, Glycine max
  Clone ID: PAT_MRT3847_46191C.1.pep
KKGDINICVLNRINFHSLPKEKMRLSMKSALLSTLPPSSSVLLFSCYSKFKLKSPLGIPILALTSSSLPTTRDHDDLFDPLSLPAPQHLHKATNAIQRIALRLRNLRLAFNN

SEQ ID NO: 226093 - protein, 43 aa, Glycine max
  Clone ID: PAT_MRT3847_46192C.1.pep
NQYTFYTTIILITQLQSFFKSFKNFQYNFKYLYTYLTFFINYT

SEQ ID NO: 226094 - protein, 41 aa, Glycine max
  Clone ID: PAT_MRT3847_46193C.1.pep
NYEHFLFIDRGRPLGDYKTPPGLYWNKISTYLKIKYAIPFP

SEQ ID NO: 226095 - protein, 44 aa, Glycine max
  Clone ID: PAT_MRT3847_46194C.1.pep
RGLPLKPGTLLFFTHLSNNISYIYTETIAHAKPIILPIQNLNYL

SEQ ID NO: 226096 - protein, 427 aa, Glycine max
  unsure (1)..(427): unsure at all Xaa locations
  Clone ID: PAT_MRT3847_46195C.1.pep
MATSLFRSIRRAFFALRFSYSTSFSVSPRSVVGRTQMCVCSPLRHCVPVGEQGYWWGLRNLSYGRVNLVITGGKTKFETHEEEPPKKDKWTTKKRLKMQRKREKEKRRAANRKDPRQLGIKGKKKKQRFACAEERIKYKIEKARIKEALLIERLKRYEVPKAQGPVVKPDDLTGEERFYLKKMAQKRSNYLQIGRRGLFGGXVVLNMHMHWKKHETVKVFCKPCKPGQVHEYAQELARLSGGIPLXIIGDDTIIFYRRKNYEQPEVMSPIDTLSKKKALEKSKFEQSLESVRRFVAIAEKELELYCRHVALYGDPNNRNPLSMMDGPSGNSKEKGNHGISDDFSVSLSETEADSTEMELSEIEDSLEDENMSMNESDFEEDSMLDSNGNQEREVYFTKIQDESVSSTTGSCSSSVSEDSHYYNKQYL

SEQ ID NO: 226097 - protein, 45 aa, Glycine max
  Clone ID: PAT_MRT3847_46196C.1.pep
PPLCILLNRLCNPTQQEQPMTEGNTFAIDHIVIHLHPDLDMLIHL

SEQ ID NO: 226098 - protein, 79 aa, Glycine max
  Clone ID: PAT_MRT3847_46197C.1.pep
RPHPPWVGPLKFPPHLVFTRPRPWEHGAFFIIPKPFLKMPSLILLPVPLFVHSKVNFIILYSPLNSDQLRLGKSITPCS

SEQ ID NO: 226099 - protein, 82 aa, Glycine max
  Clone ID: PAT_MRT3847_46198C.1.pep
FLTSGIQKKKITSALEEKLIQKLKEKVLKKVEDWNSSCSAQDKLIASPRLTASSTLARRRSTKKPKDMLCDTLYHTQIYNNN

SEQ ID NO: 226100 - protein, 83 aa, Glycine max
  Clone ID: PAT_MRT3847_46199C.1.pep
LLVKLINKLCFPRLVVEESRNKFANHEKELASLSKGFPNFSGGGSNIPKIESEIQEEGGSRANPLNTNHHVDGYGREKTWKRT

SEQ ID NO: 226101 - protein, 55 aa, Glycine max
  Clone ID: PAT_MRT3847_4619C.1.pep
DQQNIVYFLCTVPEVVIDDTQIIFINKVILCFFSLFLLGFCTNINFKILFNIDQK

SEQ ID NO: 226102 - protein, 66 aa, Glycine max
  Clone ID: PAT_MRT3847_461C.1.pep
SHPRYALTSSVAQDRKSTYQWSLACSFPNVCISVANKGVKHSQPHLCDSGRHEQIVYNSHRFQCLG

SEQ ID NO: 226103 - protein, 116 aa, Glycine max
  Clone ID: PAT_MRT3847_46200C.1.pep
KWECVKKGLSCKSCENKIDFLLDKWGPWGTCSKWGNELLQTKRKGPMGQAPVGGGKRAFFNQKFALKIKVPLLPKNRFLPSFFSWGFPGTLFGFFFFLKIFHRGIRDLCRGPQWTP

SEQ ID NO: 226104 - protein, 171 aa, Glycine max
  Clone ID: PAT_MRT3847_46201C.1.pep
MGGETMNGSWFSVLWPVSRKSASDNKAVVGVLALEVAGLMLKAVNLWQSLSDAEVLSLREGIVNSVGVKTLVSDDDDYLMELALNEILDNFQSLARSVARLGKKCVDPVYHQFEHFVHNPAQNYFQWSEWEYRWKKMERKVKKMEKFVSAMTQFCQEVEVLAEVEQTFRRM

SEQ ID NO: 226105 - protein, 49 aa, Glycine max
  Clone ID: PAT_MRT3847_46202C.1.pep
HLFNHQQLSSNTFTVLNIKSKLVSSISFILTYACILPHTYSINSPNFNS

SEQ ID NO: 226106 - protein, 51 aa, Glycine max
  Clone ID: PAT_MRT3847_46203C.1.pep
SQLPLQLHEPWPTNDCCATQLIDGDGEFNIVGLDNFIRTLNLTSCGLSSVV

SEQ ID NO: 226107 - protein, 72 aa, Glycine max
  Clone ID: PAT_MRT3847_46204C.1.pep
SQLPLQLHEPWPTNDCCATQLIDGDGEFNIVGLDNFIRTLNLTSCGLSKIIIRATRTQVVLGLCARVLFSVV

SEQ ID NO: 226108 - protein, 57 aa, Glycine max
  Clone ID: PAT_MRT3847_46205C.1.pep
ATGDCNFCQYSNGQAFYAPLDISYSTRGRDLGIFLCYSVFNILVLLLAARYLSYTKR

SEQ ID NO: 226109 - protein, 483 aa, Glycine max
  Clone ID: PAT_MRT3847_46206C.1.pep
MSEGAEIDERVDLDEENYMEEMDDDVEEQIDDDGVDGGEDENAEGSFEEHEYEDSAAEAGGKDQLPEAEKSDIATEFGDDEQKLSFIDEDEKEKHDELLALPPHGSEVFIGGLPRDVCEDDLRELCEPMGDILEVRLMKDRDTGENKGYAFVAFKTKEVAQKAIEEIHSKEFKGKTLRCSLSETKHRLFIGNVPKTWTEDDFRKVVEGVGPGVETIELIKDPQNPSRNRGFAFVLYYNNACADYSRQKMASSSFKLDGNTPTVTWADPKNSPDHSASSQVKALYVKNIPENVTTEQLKELFRRHGEVTKVVMPPGKAGGKRDFGFIHYAERSSALKAVKDTEKYEIDGQMLEVVLAKPQADKKPDGGYAYNPGLHPNHVPHPAYGNFSGNPYGSLGAGYGVAAGYQQPMIYGRGPMPAGMQMVPMMLPDGRIGYVLQQPGVQVPPARPRRNDRSNGPSGQPGRGGGGASGNDEGNRSRRYRPY

SEQ ID NO: 226110 - protein, 91 aa, Glycine max
  Clone ID: PAT_MRT3847_46207C.1.pep
GSLGAGYGVAAGYQQPMIYGRGPMPAGMQMVPMVLPDGRIGYVLQQPGVQVPATRPRRIDRSNGPSGQPGRGGGGGSGNDEGNRSRRYRPY

SEQ ID NO: 226111 - protein, 68 aa, Glycine max
  Clone ID: PAT_MRT3847_46208C.1.pep
IHQSAHRLQISQPKTTTVGGPPQKCTLLAETPHIHRVSRGSPKTPLVFVLFIFVSFSFFFFFFLFFFF

SEQ ID NO: 226112 - protein, 189 aa, Glycine max
  Clone ID: PAT_MRT3847_46209C.1.pep
LLLLHLREGEKQCHQVVPLLMKAIGWQGGSILALETLKRVVVAGNRARDALVAQGLKVGLVEVLLGLLDWRAGGRNGFCSQMKWNESEASIGRVLAIEVLHAFATEGAHCTKVRELLNNSDVWSAYKDQKHDLFLPSNAQSAAAGIAGLIENSSSSRLIYALTAPPQSTTSRTPPSSSPDFNGKQDQPL

SEQ ID NO: 226113 - protein, 169 aa, Glycine max
  Clone ID: PAT_MRT3847_4620C.1.pep
SSPDFGPPFQMCSSAIKESIASVFGDKLDGLTRNFEQSFCSTLSTLQLIYESSKSNEGNKLNNTKMEIMSSKLTLNKEECSGDIVTEVGHSRHAEIQDQSISHDSPEEVRDNFHIDSIGRDSPEEGRDNIHNNSVSLDSPEESRDNFHMGSVSRDLTLYGQSNQMVSFS

SEQ ID NO: 226114 - protein, 520 aa, Glycine max
  unsure (1)..(520): unsure at all Xaa locations
  Clone ID: PAT_MRT3847_46210C.1.pep
GVLSLLTAHAPCLQAMVADGSSLLLLLQMLHSAPSCREGSLHVLYALASTPELAWAAAKHGGVVYILELLLPLKEEIPLQQRAMAASLLGKLVSQQMHGPRVAITLARFLPDGLVSVIRDGPGEAVVVGLEQTTETPELVWTPAMAASLSAQISTMALELYREQMKGRVVDWDLPEQASGQQEMRDEPQVGGIYVRLFLKDPKFPLRNPKRFLEGLLDQYLSSIAATHYEAQVVDPELPLLLSACSSFLXLHLHPALHLREGELGYVPKLVAAVAFEGRRETMSSGEVNNGRRAEQAYDPDNESAENAQTPQERVRLSCLRVLHQLAASTTCAEAMAATSVGTPQVVPLLMKAIGWQGGSILALETLKRVVVAGNRARDALVAQGLKVGLVEVLLGLLDWRAGGRNGFCSQMKWNESEASIGRVLAIEVLHAFATEGAHCTKVRELLNNSDVWSAYKDQRHDLFLPSNAQSAAAGIAGLIENSSSSRLTYALTAPPQSTASRTPPPSSPDFNGKQDQPLQ

SEQ ID NO: 226115 - protein, 51 aa, Glycine max
  Clone ID: PAT_MRT3847_46211C.1.pep
LTIVTPSMCREHQRDHLMLFPNSTLRPRRCLIKKIPEKLAGYWLLNCGLTC

SEQ ID NO: 226116 - protein, 60 aa, Glycine max
  Clone ID: PAT_MRT3847_46212C.1.pep
MNLLPARSVDETVEEIMRLHRSLPARLGIEEVEAARTLVANVEREDQAKLEAVARARERK

SEQ ID NO: 226117 - protein, 52 aa, Glycine max
  Clone ID: PAT_MRT3847_46213C.1.pep
DIFLTFQGAPIMNAAKVSHSTQGIKNEGRGKIWVPFVSIDLLKMWLYDRTIV

SEQ ID NO: 226118 - protein, 72 aa, Glycine max
  Clone ID: PAT_MRT3847_46214C.1.pep
TSPIDRLNTQNTTTPCQLIYMNSFQTSLFTSIISDFSIPLQSYSATTATANTIRLTCSSISHAFTLYYPVSH

SEQ ID NO: 226119 - protein, 134 aa, Glycine max
  Clone ID: PAT_MRT3847_46215C.1.pep
KGFLQHNGVTEDTVAMKRICGNTKKTLKQFKNEIELLCQLRHPNLITLLGFCDHKDEKIVVYEYMANGSLHDRLYCSDVKKELLTWKHRLNISIGAAHGLHYIHTGAKQTIFHRDITPYKILLDRNMVATSGFP

SEQ ID NO: 226120 - protein, 107 aa, Glycine max
  Clone ID: PAT_MRT3847_46216C.1.pep
VKGFAHLGFKDVVSVRKALHLDHNELGGFPLRVEEAKPRRDNWGIGSGTDGRDIWGIGSGRDGGDHQFGGRDESGYTSRVGWGRSGGGGWHSLHFSDEDSGRKNHSY

SEQ ID NO: 226121 - protein, 42 aa, Glycine max
  Clone ID: PAT_MRT3847_46217C.1.pep
ICARWRPQSVQCPQQDQGVAERSSLHLCSDACRAGAILRRCL

SEQ ID NO: 226122 - protein, 138 aa, Glycine max
  unsure (1)..(138): unsure at all Xaa locations
  Clone ID: PAT_MRT3847_46218C.1.pep
MSSACATLKSNTHLPNSEKGSLGERIMRWSSNNSSPCHKRVKHGAGVASAVLTSNNAKESLTLPVPFFLRRRADPKNVISIILGGGPGTHLFPVTRRAATPAVAVGGCSRLIDIPMSNXLNSGINKIFVLTQFNSASL

SEQ ID NO: 226123 - protein, 801 aa, Glycine max
  unsure (1)..(801): unsure at all Xaa locations
  Clone ID: PAT_MRT3847_46219C.1.pep
ARGTNEKPVTMSIESVNDPQTLINNIQVVRSVAPVLNEELKPKLLTLLPCIFKCVQHSHVAVRLAASRCITSMAQSMTVKVMGAVVENAIPMLEDASSVYARQGAGMLISFLVQGLGVELVPYAPLLVVPLLRCMSDCDQSVRQSVTHSFAALVPLLPLARGLPQPIGLGEGVSRNAEDLQFLEQLLDNSHIEDYKLCTELKVTLRRYQQEGINWLAFLKRFKLHGILCDDMGLGKTLQASAIVASDIAEHRTSIGNEDLLPSLIICPSTLVGHWAFEIEKYIDVSVISSLQYVGSAQERMLLRDHFCKHNVIITSYDVVRKDIDFLGQLLWNHCILDEGHIIKNAKSKVTLAVKQLKAQHRLILSGTPIQNNIMDLWSLFDFLMPGFLGTERQFQATYGKPLLAARDPKCSARDAEAGALAMEALHKQVMPFLLRRTKDEVLSDLPEKIIQDRYCDLSPVQFKLYEQFSGSRAKQEMSSVVTTNESAAAEGSSSSTKASSHVFQALQYLLKLCSHPLLVIGEKIPESLSTILSELFPAGSDVISELHKLYHSPKLVALHEILEECGIGVDNSGSEGAVNVGQHRVLIFAQHKAFLDIIERDLFHTHMKSVTYLRLDGSVEPEKRFEIVKAFNSDPIIDVLLLTTHVGGLGLNLTSADTLVFVEHDWKLMRDHQXMDRAHRLGQKKVVNVHRLIMRGTLEEKVMSLQRFKVSVANAVINSENASMKTMNTDQLLDLFASAETSKKGASVVKSPENNSDGDAKLVGSGKGLKSILGGLEELWDQSQYTEEYNLSLFLARLNG

SEQ ID NO: 226124 - protein, 46 aa, Glycine max
  Clone ID: PAT_MRT3847_4621C.1.pep
LGTFVGFSNNPGFCEHKHLILPPTYRMHSHMFLAGGACISHLLTVR

SEQ ID NO: 226125 - protein, 46 aa, Glycine max
  unsure (1)..(46): unsure at all Xaa locations
  Clone ID: PAT_MRT3847_46220C.1.pep
HIYVTIINEDDLTVQXSIYANRLATLLMKELNVPSFNNGINTTDGH

SEQ ID NO: 226126 - protein, 97 aa, Glycine max
  unsure (1)..(97): unsure at all Xaa locations
  Clone ID: PAT_MRT3847_46221C.1.pep
SRIAHYXEXGLTXEXKFXVPXXAGXLEXXNXYXPTGXXXXEGTXEPKPXGLNXRXKXXXXWXXAXDXTPRXRKEESARTEKXRQQFGLGIGGSVRRK

SEQ ID NO: 226127 - protein, 60 aa, Glycine max
  unsure (1)..(60): unsure at all Xaa locations
  Clone ID: PAT_MRT3847_46222C.1.pep
MVSNXRKYVLHWKFLKWGLFKGDLTLLYDEMTPFEDSPANQVVGPLFFSWNPKYSRAIII

SEQ ID NO: 226128 - protein, 203 aa, Glycine max
  Clone ID: PAT_MRT3847_46223C.1.pep
NIVTYLLVLFVCRDILVGYSNQVMKLGTLLFELLSEALGLNSTYLRDIGCNVGQFAFGQARASCPESELTLGTIKHADVDFITVLLQDHIGGLQVLHQDTWIDVTPVPGALVVNIGDFLQLISNDKFKSAQHRVLAKTVGPRVSIACFFSPAFHPSSRTYAPIKELLSEDNPAKYREFSIPEFTAHYRTKCMKGTSPLLHFKI

SEQ ID NO: 226129 - protein, 54 aa, Glycine max
  Clone ID: PAT_MRT3847_46224C.1.pep
SCMQCKVSIIELHKFSLIYESGYVDLSTQTRSQSLSFFFFPRIYDQRKWLRAGQ

SEQ ID NO: 226130 - protein, 83 aa, Glycine max
  Clone ID: PAT_MRT3847_46225C.1.pep
TRRSLAISHAPMLIGPSRKRFLGEICSRPDAAKRDPSTIASVTAGVLGGANIVRVHNVKDNLDAVKVCDAILRQKSSHLKSRH

SEQ ID NO: 226131 - protein, 95 aa, Glycine max
  Clone ID: PAT_MRT3847_46226C.1.pep
MATSAAPKPNQYYFFTLILHFCLLLIISTCTTQQRFKQAPKFYNFPSCPTIRLSPTDTCSDEAVHVAMTLDVTYLRGFMGAILSVLQHCFCPENI

SEQ ID NO: 226132 - protein, 110 aa, Glycine max
  unsure (1)..(110): unsure at all Xaa locations
  Clone ID: PAT_MRT3847_46227C.1.pep
XXTHXXXXXXXXSYXDSXXXXXLXFRXXQXNXGDXPXWXXXXXSXEWHLXXXXXXXXXXXTATPXXMXQXXXXSHFXXQXXAXSYRNXLVXPXLSSSRXLEPXSEXXXXX

SEQ ID NO: 226133 - protein, 78 aa, Glycine max
  Clone ID: PAT_MRT3847_46228C.1.pep
QPSIIGNITGPVDLVPLKVCKHQAKRVIKCHQRHVPSRSQCQLATGFSTIPPISPRPEVAMDPVFGSQAKKKSPAIKH

SEQ ID NO: 226134 - protein, 79 aa, Glycine max
  Clone ID: PAT_MRT3847_46229C.1.pep
GGKQILDETLRGNSITRKVESSDTINYVKGKIQSKKGIPLDQHKVIFAGNQVEEGRTLFDSNIQKESTLHLVPRFREGF

SEQ ID NO: 226135 - protein, 93 aa, Glycine max
  Clone ID: PAT_MRT3847_4622C.1.pep
DGLTTVSTLLPFVLTRAPNTCISPLIGVENCDPLCDNSIMICSFNSCFNIYRLHLFSSLNSFLHSSLRLPMISTNCCWLMDVDELLEARDVLP

SEQ ID NO: 226136 - protein, 94 aa, Glycine max
  Clone ID: PAT_MRT3847_46230C.1.pep
SLTRFFLSPFFQLFFPLGGLFFAKLPPVGCAPFFKTVPLFFIPPWFFLPPIVGFPAQFSVSLLGFFVPYRFVLSPPLETSFFNYLWLLFFALFP

SEQ ID NO: 226137 - protein, 357 aa, Glycine max
  unsure (1)..(357): unsure at all Xaa locations
  Clone ID: PAT_MRT3847_46231C.1.pep
IPATRPRFVWIKEDDKLIQGESVDSLSEXEXREKCRERGMLGLLSVEEMSQQLRDWLDLSLNHSVPSSLLILSRSFTVSGRLKPEEAVQATLSSLPDEVVDTIQVTSLPSEDSVSERRRKLEFLEMQEELIKEEEEREEVVQARMENSSSQDDKALKEMNISTAKEAHQLARDRAFENKEQLCELSRALAVLASASSVSSEREDFLRLVNKEIELYNSMVEEEGPNGKKDAFKAYKAAREEHEHATESGEGDKVSSALIGRVDAMLQNLEKEIDDVDAKIGDRWRLLDRDYDGKVTPEEVASAAMYLKDTLGKEGIQELISSLSKDRDGKILVEDIVKLGSWREDGNAPEDDTRERV

SEQ ID NO: 226138 - protein, 71 aa, Glycine max
  Clone ID: PAT_MRT3847_46232C.1.pep
RLPLVCPVLFGVRVVSHSLHVTPFVVPGISWRLEILLSPYEQAARPVLRLTPSQCGCVLLAKKRALCPTSS

SEQ ID NO: 226139 - protein, 74 aa, Glycine max
  Clone ID: PAT_MRT3847_46233C.1.pep
FLLSLCLYSCPTSAQLSRHHYAKTCPNVENIVREAVKKKFHQTFVTVPATIRLFFHDCFVQVINQLHAFHSFTI

SEQ ID NO: 226140 - protein, 88 aa, Glycine max
  Clone ID: PAT_MRT3847_46234C.1.pep
AHSSDPSLCLILIIIVIRLVLLIIVIIDVGGGSWSFRWSMVSHMRRRMNRPRRRCEVRGSGIFRRRIGSHISPCSSHAAERSRTSPCM

SEQ ID NO: 226141 - protein, 36 aa, Glycine max
  Clone ID: PAT_MRT3847_46235C.1.pep
SSSTPFAKSSLLKSLDCNRIPQCLVLPRDGQIHKVK

SEQ ID NO: 226142 - protein, 56 aa, Glycine max
  unsure (1)..(56): unsure at all Xaa locations
  Clone ID: PAT_MRT3847_46236C.1.pep
ISGGHINPSKTFAMILARKVSLIRPIMYMADHSXCAICRHGLAKAFQKCYFNKNGG

SEQ ID NO: 226143 - protein, 35 aa, Glycine max
  Clone ID: PAT_MRT3847_46237C.1.pep
NPLMNYQVTEMGWKLEMENDGFIGGSRGSQRSGDL

SEQ ID NO: 226144 - protein, 527 aa, Glycine max
  Clone ID: PAT_MRT3847_46238C.1.pep
LVYSLNETEVSTLICESKLLKKLDAIRSRLTSVQNVIYFEDDSNDEDAFSGSLSNWTIASVSEVEKLGKESPVQPSLPSKNDIAVIMYTSGSTGLPKGVMITHGNIVATTAAVMTIIPNLGSKDVYMAYLPLAHVFEMAAESVMLAVGCAIGYSSILTLTDSSSKIKQGTKGDANVLKPTLMAAVPAIVDRIRDGVVKKVEEKGGLVKNLFHFAYKRRLGAVKGSWLGAWGLEKLMWDTIVFKQIRNALGGQLRFMLCGGAPLSGDSQHFINICMGAPIGQGYGLTETFAGAAFSEWDDYSVGRVGPPLPCCYIKLVSWEEGGYLTSDKPMPRGEIVVGGFSVTAGYFKNQEKTKEVFKVDEKGMRWFYTGDIGQFHPDGCLEIIDRKKDIVKLQHGEYISLGKIEAALSSCDHVDNIMVYADPFHNYCVALVVASHQSLEKWAQQAGIDYQDFPDLCNKPETVTEVLQSISKVAKSAKLEKTEIPAKIKLLPDPWTPESGLVTAALKIKREQLKAKFKDELQKLYA

SEQ ID NO: 226145 - protein, 74 aa, Glycine max
  Clone ID: PAT_MRT3847_46239C.1.pep
GSSVPKPGSCGVGRTNGQIPCFPMQPPSQTRRGALFWEPFPPPKPANVVVAQRASRAQFAPEASPVDTPPLAPI

SEQ ID NO: 226146 - protein, 125 aa, Glycine max
  unsure (1)..(125): unsure at all Xaa locations
  Clone ID: PAT_MRT3847_4623C.1.pep
DCVNQKGSMHRGLRCLWTNWGLMHDGMAPGDDHSYLTRKARCKHSTRPDYATNENDETVKKTDESAESETEQAFGNAILEQALSGSNDAKDIHXYTCRNYDGEDCTIPYSDELLVITRGNGSAHG

SEQ ID NO: 226147 - protein, 215 aa, Glycine max
  Clone ID: PAT_MRT3847_46240C.1.pep
FFRVIRVNFENGETYLFVTRSIEKSRELLCTIHVLDSCGGNGRCSIRSLEQIQVELFDNQICGGSNVSIYQYAMVLVFSKYGSEESWLSRSLFVIGGNVLICIEDLKQLYSLSSNASASPYFRIDSCCSIADIAEMVIEVGGSCCVTLGLTCPRAELHPSTQMNLQTVNHENTAPGSLKLKLQWFSKDHLVKFVSLLKTIHEKETGSPLVVRCIS

SEQ ID NO: 226148 - protein, 74 aa, Glycine max
  Clone ID: PAT_MRT3847_46241C.1.pep
SITRGHLNFLSPFLSLVIDYTPLIIDYQRPNSRYHSRSIAGQPPHKPPCFVVFVLLFVDCQELACLGTSQVLTD

SEQ ID NO: 226149 - protein, 124 aa, Glycine max
  unsure (1)..(124): unsure at all Xaa locations
  Clone ID: PAT_MRT3847_46242C.1.pep
IEHHISAPSQYRLRGLSILGSGNVLGIDSHRYNPXIAESYSNVNNKKIIFKGYKYSKNXHPFLCHSCDAFDAYRTCGWCCDSPLWHRWQLDLSCCLSRQAPIKVMYESLGTLHHVHGHYQVVFS

SEQ ID NO: 226150 - protein, 110 aa, Glycine max
  unsure (1)..(110): unsure at all Xaa locations
  Clone ID: PAT_MRT3847_46243C.1.pep
NFTVRGSIPLLNNIPLAPLLLLIVPILIAIAFLMLXTERKILGYIQLRKGPNVVGPYGLLQPFADAIKLFTKEPLXPATSTITLYITAPTLALTIALLLXTPLPIRNPLV

SEQ ID NO: 226151 - protein, 48 aa, Glycine max
  Clone ID: PAT_MRT3847_46244C.1.pep
MQIFEKTLTGKTITLEVEFYDTIYNVQAIVQDTEGIPADQQRVILDGK

SEQ ID NO: 226152 - protein, 82 aa, Glycine max
  Clone ID: PAT_MRT3847_46245C.1.pep
FIFWTLLLPAFIGTDFATYHELFGIHLLPVWRSRDLFLLQFLDVYHHVLDFLCVPCKGNDDCNVSNADAADGYMTVGTWKFL

SEQ ID NO: 226153 - protein, 59 aa, Glycine max
  Clone ID: PAT_MRT3847_46246C.1.pep
RSETKFRSTRISLTLKCGIYRLRMNYLNRNYRMRTHANFRTFFFIFININISSIKMKNT

SEQ ID NO: 226154 - protein, 87 aa, Glycine max
  Clone ID: PAT_MRT3847_46247C.1.pep
LIQLKQLFNFFSNVVSPLFYFRHLNFKPWQGPLPFRGFYGEAKLWFFHQAIFIVLKNLGKNFNFLFKKKRPFSMGVDPPRGMVGFFF

SEQ ID NO: 226155 - protein, 85 aa, Glycine max
  Clone ID: PAT_MRT3847_46248C.1.pep
VLRHARPLLHLAWKKPLPKKMFTIVTDSYILCGVSQISHADLMSPTETSTLSLTTISTASKNLFFLLSTTIDVFISFFGYNGYAL

SEQ ID NO: 226156 - protein, 91 aa, Glycine max
  Clone ID: PAT_MRT3847_46249C.1.pep
CVLHLKQLLNCMLEVVKFLCYKCYRIFHGQNNLVEVFLNFYMQAMPLQKIQLQLAQSSRLCMRFPTCRTVVSNFPDPYSRCHFDSLSSRIP

SEQ ID NO: 226157 - protein, 64 aa, Glycine max
  Clone ID: PAT_MRT3847_4624C.1.pep
NPGLISPSKASALVSFRSSLALTISSHNTLKSVFTEVYHVLVRPVFKYTISIIRINHQYIFSSR

SEQ ID NO: 226158 - protein, 168 aa, Glycine max
  unsure (1)..(168): unsure at all Xaa locations
  Clone ID: PAT_MRT3847_46250C.1.pep
MGRLKRRPSRNITLPRADRRVLPRPSRLAELISSNTYVFVGSGSVMDYNKQTDNGAGTHAGLIYVCIDHACILSVGGCVGANIYGGQVNPAGTYRACLGGKINYLRGMDYVIDQLLGWIDGCLLLACLTDCTDXAIRLSVGWGGSNPLLVEIEMTYRLVGTDYATAID

SEQ ID NO: 226159 - protein, 47 aa, Glycine max
  Clone ID: PAT_MRT3847_46251C.1.pep
WYLSLLSYLLYHHIIVLMFITEYRIHQTLLGTPHICLYKLNLWCSSS

SEQ ID NO: 226160 - protein, 66 aa, Glycine max
  Clone ID: PAT_MRT3847_46252C.1.pep
KKTTEGGIRLYMQEIDYMGRKANSTALVVLNTRNIRGYQSVKECKNQRSKVYGGIKFHSYKYQFQS

SEQ ID NO: 226161 - protein, 63 aa, Glycine max
  Clone ID: PAT_MRT3847_46253C.1.pep
GRVIMFLFPCALPHQIQPMCPNVVCRHGHCPPAQATSSGPSIGIYHISQPPSPSPLLSSSRSR

SEQ ID NO: 226162 - protein, 207 aa, Glycine max
  unsure (1)..(207): unsure at all Xaa locations
  Clone ID: PAT_MRT3847_46254C.1.pep
QVLYPTSCVAHSSLPFTVANEENEHTPPHLADFLTWRAFRFRTFATTKHLETFTEQFEIGSSVITLVPXKIARFANAAVVLAMENTNVLSTVTASKANDAVRDFLPLTVDYQEKQFAQGVIPTSFMRREGAPRERELLCGRIIDRPIRPLFPPGFYHEVQVMASVLSSDGKQDTDVLAANATSAALMLSDIPWGGPIGMARIGRIWG

SEQ ID NO: 226163 - protein, 70 aa, Glycine max
  Clone ID: PAT_MRT3847_46255C.1.pep
TLMSSHRALKWSECMVAGVHWSVRSAEQGSHRSAVPHTSLRLYHLTCPKHALTRHRNVSEKAKSRERKKL

SEQ ID NO: 226164 - protein, 117 aa, Glycine max
  unsure (1)..(117): unsure at all Xaa locations
  Clone ID: PAT_MRT3847_46256C.1.pep
SVRANGGAVSIIDTNSWXNQLDQMPKRCYLAGNQERELLSYQLEHGGHQSQTGKHQRDXDNEGGSILSGWTLEFLEHXAFSVDKQMARNLHXENEGDDYGAIETVKGCLSVINPPTD

SEQ ID NO: 226165 - protein, 70 aa, Glycine max
  Clone ID: PAT_MRT3847_46257C.1.pep
VHYATGIRSRDHALTRRGPPFFFFLFFFLFLFVFFFFFLLLFFFFFFFYLKKKRGALPMGGGKKGPGVAF

SEQ ID NO: 226166 - protein, 47 aa, Glycine max
  Clone ID: PAT_MRT3847_46258C.1.pep
QRNYFKISSLFLMDRDYFIFFYKKGEITMECFIFITLYLKFRYCSKT

SEQ ID NO: 226167 - protein, 72 aa, Glycine max
  Clone ID: PAT_MRT3847_46259C.1.pep
SYKSRGKLKTITPYPSSKAVKKDLNKGEKPNLELQLKDLEKELRLEIKEDSYHPLFWNWNLAGNQMNPDCLT

SEQ ID NO: 226168 - protein, 158 aa, Glycine max
  unsure (1)..(158): unsure at all Xaa locations
  Clone ID: PAT_MRT3847_4625C.1.pep
MEVNTNRGFLADVLAERAHEFEKHVAHESLKDQIPAGDKLYSTKVNRLAKIMNLRQSVDGDLKLITDGKLYEGQHIPVSNIRAGENHVFXIPLMAQEEILACGASDXRTAMVKKNSRPQSTAQHVGAIEIIIDSFASSDXHIRGAMLLVDTYHTQSEN

SEQ ID NO: 226169 - protein, 97 aa, Glycine max
  unsure (1)..(97): unsure at all Xaa locations
  Clone ID: PAT_MRT3847_46260C.1.pep
PTTSIGHYDSLYIGSELLVSKYNPRDYPFIAPEDEVMTYVFHAKISRDALISHEIVQEPWNPALTMFKELECIYXLWTDPYPIHHVVADKCHMFKTD

SEQ ID NO: 226170 - protein, 167 aa, Glycine max
  unsure (1)..(167): unsure at all Xaa locations
  Clone ID: PAT_MRT3847_46261C.1.pep
AVSSEFGSSVFLTIGGTQAIDIILPSLARPGANILLPKPGYPHYELRATRCLLEIRHFDLLPERGWEVDLDSLEALADENTVAIVFISPSSPCGNVFTYEHLKRVXAEIASKLGIFVISDEVYAHVTFGSKPFVPMMEFSSIVPVITIGSFSKRWFIPGWRIRWITL

SEQ ID NO: 226171 - protein, 83 aa, Glycine max
  Clone ID: PAT_MRT3847_46262C.1.pep
VDLDSLEALADENTVAIVFISPSSPCGNVFTYEHLKRVAEIASKLGIFVISDEVYAHVTFGSKPFVPMREFSSIVPVITIGSF

SEQ ID NO: 226172 - protein, 177 aa, Glycine max
  unsure (1)..(177): unsure at all Xaa locations
  Clone ID: PAT_MRT3847_46263C.1.pep
MVNPDXLVVGGWDISNMNLVDAMDSAEVXDIDXYNQLTPYMESMLPLPGLYDPTXLLADQKEQANNEVEGAEHYHVXQHHEKLPGAQQTPHTRDEAXLLLXAANRERCNGVPAGLTDTIANLLRAEHGLDADIAPYSLHAIDQCMQSGSSIKGPPDTTPVPGLRALDIWQNTPIGAD

SEQ ID NO: 226173 - protein, 44 aa, Glycine max
  Clone ID: PAT_MRT3847_46264C.1.pep
KKNIRQALNIYFSLDHSLIKTFSDPIAKTTDTMSGVISNPTLGN

SEQ ID NO: 226174 - protein, 57 aa, Glycine max
  Clone ID: PAT_MRT3847_46265C.1.pep
PIIHTSFIYPFRPSSLPFTNSYLFLIIHHIPNIRRFTTQHNPSMTYIFPIYPQTYFI

SEQ ID NO: 226175 - protein, 93 aa, Glycine max
  Clone ID: PAT_MRT3847_46266C.1.pep
MVQIARRKKGRPSKADLARRSGESPSAASQSDPRRSLRRRSVRYNIIDYDGDYLDDDEEDERRRKKKKLKLMAKLNQDGEEEEEEEEREEEEI

SEQ ID NO: 226176 - protein, 71 aa, Glycine max
  Clone ID: PAT_MRT3847_46267C.1.pep
NSRKFLPRIFMIIPQWICPCIWVLFSQFQFKGPVPWSSSPFNFLRVIIGCWLVATDKTKDKKKNKGRPLAI

SEQ ID NO: 226177 - protein, 36 aa, Glycine max
  Clone ID: PAT_MRT3847_46268C.1.pep
VEGDFVEWKLKFKYRFTLFLHVTKRVIRLDTCYKLP

SEQ ID NO: 226178 - protein, 68 aa, Glycine max
  Clone ID: PAT_MRT3847_46269C.1.pep
DLLDGSRQVEHILISQISFSPRRRLRSVGSRRFITSIVYPNISNTRFICMEYHLLCDAFLGGRKQTQD

SEQ ID NO: 226179 - protein, 128 aa, Glycine max
  Clone ID: PAT_MRT3847_4626C.1.pep
ITPPGRLDQGPCLKALIPPGGGAPSHQMGFGKGGGIRKEAALLRAQEGEEDPGLKWGEVLLRPREQGKGRDTPPLAPTRENTRRLLGEKPAPLKWAASRQFASTVETEQRLTAFQIQARRGLESLDLD

SEQ ID NO: 226180 - protein, 77 aa, Glycine max
  Clone ID: PAT_MRT3847_46270C.1.pep
YFVFQDIANAELPPTHPIRLGLALNFSVFYYEILNSPDRACNLAKQVRFRYSEYLGLCFALFIFVLQHFEQCFGCFP

SEQ ID NO: 226181 - protein, 94 aa, Glycine max
  unsure (1)..(94): unsure at all Xaa locations
  Clone ID: PAT_MRT3847_46271C.1.pep
GFEHAVSGDARSGCLRNLIYDLAKECWANVLXCPDVRATFNDDATVPIIGLIDVQDKRGLMNLYCLGSIDAACCLFGRRXLSHTEIRDIYGTRH

SEQ ID NO: 226182 - protein, 227 aa, Glycine max
  unsure (1)..(227): unsure at all Xaa locations
  Clone ID: PAT_MRT3847_46272C.1.pep
MGALEVEFFTEYGEASRYEIHEVIGKGSYGVVCSAVDTHTGEKVAIKKINDVFEHVSDATRILREIKLLRLLRHPDVVKIKHIMLPPSRREFRDVYVVFELMESDLHQVIRANDDLSPEHYQFFLYQLLRGLKFIHAANVFHRDLKPKNILANADCKLKLCDFGLARVSFNEDPSAIFWTDYVATRXWYRAPELCXXLFFSXYTPAIDIWXSIGCIFAEMLSGKPLF

SEQ ID NO: 226183 - protein, 95 aa, Glycine max
  Clone ID: PAT_MRT3847_46273C.1.pep
AHAFAHAFVPVREDHRRGLENIKMNHHERVAQKGVPIYYPGFKIKPELKKIVCLSSCQPKIKIFFSEINPANFPTPLGNFRPPILSGGGLGSDIG

SEQ ID NO: 226184 - protein, 244 aa, Glycine max
  Clone ID: PAT_MRT3847_46274C.1.pep
RLREDDRRGDFQVGLPGIDGLSTEQRKRLTIAVELVANPSIIFMDEPTSGLDARAAAIVMRAVRNTADTGRTIVCTIHQPSIDIFESFDELLLMKRGGQIIYNGPLGQQSQNLIAHLEAFPEAPRSIEVNNPATWVLEITTPAVESQLRVDFAEFYTKSELYQRNQELIEELSTPLEGTKDLDFPTKYSLSFITQCIACFWKQHLSYWRNPQYNGIRLFMAVIIGVIFGLIFWKKGNQTDTEQD

SEQ ID NO: 226185 - protein, 111 aa, Glycine max
  Clone ID: PAT_MRT3847_46275C.1.pep
ERENNLFPIHNIIGSHITIGASFHNLGNIDGKKKIIGDRFKTKFFIKTGFKLHLRELKNFNPPHLQELNTSQALNYCHWPCQFFKTTRERGLFKQSLQSTFQTRAKKTKGN

SEQ ID NO: 226186 - protein, 133 aa, Glycine max
  unsure (1)..(133): unsure at all Xaa locations
  Clone ID: PAT_MRT3847_46276C.1.pep
GGGGFFFFFFFLFLGPQIFFFWGDKGGCQEKTVFLANLTTTPSSYNKSHKPQIEEEKFSSCXPNXKXFRESTGTDKNSKRHSSWSLAPSSSLPQPAASLAHHHGASTPPSSLHNPPPAGAGITSCGPFRFSNP

SEQ ID NO: 226187 - protein, 48 aa, Glycine max
  Clone ID: PAT_MRT3847_46277C.1.pep
MVLAHLPPHLRKMGHENVHITIVVIWHVYPGKSTTTGHLIYKLGGIDK

SEQ ID NO: 226188 - protein, 38 aa, Glycine max
  Clone ID: PAT_MRT3847_46278C.1.pep
LVFVGTTGVIRALRGPCLFGRVRKKYNYLPSSARWVNK

SEQ ID NO: 226189 - protein, 137 aa, Glycine max
  Clone ID: PAT_MRT3847_46279C.1.pep
ILKCDFEPWENKVNEYLARPVFGHIQLNKNEAHGKEIWCPICNQGGLKASPIFIPCPRCDLQLNKASELPLDFLRDRLAEAPPELLDKGCRLKPKFCMRPKFNLPALYISCEGCDPFEVVIYQFRYYLLYKNLTSGM

SEQ ID NO: 226190 - protein, 53 aa, Glycine max
  unsure (1)..(53): unsure at all Xaa locations
  Clone ID: PAT_MRT3847_4627C.1.pep
XYYKKSRDLGSSCIGKVEXSAHLTPXECRVGFSTSSLXSHGXKXADXIMHWQS

SEQ ID NO: 226191 - protein, 219 aa, Glycine max
  unsure (1)..(219): unsure at all Xaa locations
  Clone ID: PAT_MRT3847_46280C.1.pep
MRRPKSREFRKQQRVSEEEEINLLNSWIQFQPPDSGSNPMSLPPLPKNSPVGRLDDDDTYSRYAGASRFEQFPLSKKTKDALRESKFVVMTDIQRASLPHALCGRDILGAAKTGSGKTLAFIIPVLEKLHRERWGPEDGVGSIIISPTRELAAQLFDVLKVVGKHHNFSAGLLIGGRKDVDMEKERVNELNILICTPGRLLXHMDETPNFXCSQMQVLV

SEQ ID NO: 226192 - protein, 121 aa, Glycine max
  Clone ID: PAT_MRT3847_46281C.1.pep
MARQLVLALISVAIIGMAMANEAPSASPKSSPSPKASSSPKSAESPLSSPPAPTPSDESDISAAPAPASDPIELYAPEPEPFEDPFTTPEETDPADVTSGASALQFSGAVTAAAIAGIFAF

SEQ ID NO: 226193 - protein, 110 aa, Glycine max
  Clone ID: PAT_MRT3847_46282C.1.pep
PLIFFVGTKLQMIITEMALTIHEIGEVVEGAPLINPRDGLFWFNRPRFILFLIHLDLFQVNYMIYFPMIQPTVKLKHSNSCVMKLIMLGSVLHNAFQLAIFAWSTVSIPS

SEQ ID NO: 226194 - protein, 95 aa, Glycine max
  unsure (1)..(95): unsure at all Xaa locations
  Clone ID: PAT_MRT3847_46283C.1.pep
MMMKSAMCAVVVGALLLLAEVGPMAEAVTCTPTELSPCLPAITCGAKPCNAWCTELKKEKPCLCGXLKNASLKRYVSSASARKTGGSCGIPFPTC

SEQ ID NO: 226195 - protein, 38 aa, Glycine max
  Clone ID: PAT_MRT3847_46284C.1.pep
MAGKGEGPVIGIDLGTTYFGVGVWQHDRVEIIANDQGT

SEQ ID NO: 226196 - protein, 69 aa, Glycine max
  Clone ID: PAT_MRT3847_46285C.1.pep
SNRYLKTDTKMGFSSQIGVSKKKKKKTKAHYHYLGFELLEKLIRLINWHITKPRRGTLSLSPPFDLSSI

SEQ ID NO: 226197 - protein, 119 aa, Glycine max
  Clone ID: PAT_MRT3847_46286C.1.pep
DYGTTGGYNDDTNRHHGTTGVYGIDTDRQQHGTTGGYAGDTGRQHGNIGGPYYGTNTADTGTGPRSGTTGGTGYGGTGGTEAGYRKEHRQHDQSHGDQNEKKGIMDKIKEKLPGGHSDK

SEQ ID NO: 226198 - protein, 137 aa, Glycine max
  unsure (1)..(137): unsure at all Xaa locations
  Clone ID: PAT_MRT3847_46287C.1.pep
VDKQTDQYGNPVHAASVTYVATRTAAGGYSDDINMQHDTTNAYGVNTGRQHSNGGYDGDTNKHXGPYYGTNTGNTGTGSRSGTTGCTGYGGTGGTDYGTTGGTGYGSGTGYGVNTGGAHTEAGYTKEHRQHDQSHGD

SEQ ID NO: 226199 - protein, 146 aa, Glycine max
  Clone ID: PAT_MRT3847_46288C.1.pep
MASYQKHYDDQGRKVDEYGNVEKQTDEYGNPVHAASVTYVATRTAAGGYSDDINKQHDTTNAYGVDTGRQHSSGGYDGDTNKHYGTTGGTGYGSGTGYGVNTGGAHTEAGYRKEHRQHDQSHGDQNEKKGIMDKIKEKLPGGHSDK

SEQ ID NO: 226200 - protein, 223 aa, Glycine max
  Clone ID: PAT_MRT3847_46289C.1.pep
FVINLIHNAPWLEEKHHKHHLFHQHKDEDNKPTETETGYDNTSYSKPSDDYDSGFSNPSYETSGGAYETGHNKTSYSSDDQPASGGGYKKTCYSGGIDETSGGGGYGGGGGVYSDTTTDGGYTRTSGGRYGDEVDYKKEEKHHKSLEHLGELGAAAAGAYALHEKHKAEKDPEHAHRHKIEEEVAAAAAVGSGGFAFHEHHEKKEAKEQDEEAHGKKHHHLFG

SEQ ID NO: 226201 - protein, 66 aa, Glycine max
  unsure (1)..(66): unsure at all Xaa locations
  Clone ID: PAT_MRT3847_4628C.1.pep
GXEAHAHALVLENNYNGGASKTGCAYKRRLFPTSHVPKALTSLIFHLNTRLFIPTLITPFGCVLPS

SEQ ID NO: 226202 - protein, 238 aa, Glycine max
  Clone ID: PAT_MRT3847_46290C.1.pep
MAEEKHHKHRLFHHHKDEDNKPVETDTGYDNTSYSKPSDDYDSGFNKPSYESSGGGYEGGYNKTSYSSDEPASGGGYEGGYKKTGYSGGIDETSGGYGAGGGGYSDVTDGGYGKPSGGYGAAGGGGVYPDTTTDGGYSKTSGGGYDDEVDYKKEEKHHKHLEHLGELGAASAAAYALHEKHKAEKDPEHAHRHKIEEEVAAAAAVGSGGFAFHEHHEKKEAKEQDEEAHGKKHHHLFG

SEQ ID NO: 226203 - protein, 95 aa, Glycine max
  unsure (1)..(95): unsure at all Xaa locations
  Clone ID: PAT_MRT3847_46291C.1.pep
NVFPNGHFRMLWQNYVKTWSTQPTRKTRRRWARQKKAENIFPIPTAGPLMHIVHGQTLKYNIKVIGGRGIFXLIELHAAGIPNKLAXTIDIAVDH

SEQ ID NO: 226204 - protein, 32 aa, Glycine max
  Clone ID: PAT_MRT3847_46292C.1.pep
FFFFFFFFFFFFFFFFFLFKKLSTQWQCSASI

SEQ ID NO: 226205 - protein, 129 aa, Glycine max
  Clone ID: PAT_MRT3847_46293C.1.pep
PPPFFPSRANPRVQPNPWPWFRARARPPPREPQCVWNGAPLFPWDRGGVPFPPPRGGFFSKQKQVGRVFCFPPLSRNVEGLIIKGPVFGKKKTPLGLFFFMCGKNFSPPSKGVFVISPLGILPKQNPPP

SEQ ID NO: 226206 - protein, 220 aa, Glycine max
  Clone ID: PAT_MRT3847_46294C.1.pep
MRCSTAFSVLCLGVFLQVPWVASVSMPTSNCYAFDNSSRIVDFSGWTGYLFEYDQKQGSDLSVRFCKDVESRSQTGYVDFGRFDRFNYFVAGSGQSDFVQEFYNGDLMGCEQSYDKMGRTAQVNIICGKCLNGQCKGRPGCICNVTNESNCRVLVDLAIPCDKPGPPVFQGFTVGFHPRSWELVYNGMTQIGFEKPHHDFSFHTGQTQVVLFMTAVASLS

SEQ ID NO: 226207 - protein, 43 aa, Glycine max
  Clone ID: PAT_MRT3847_46295C.1.pep
THHIVLSCIDNSTPSQSIHSRDIVFDNGVNLMLILSVLYPTLY

SEQ ID NO: 226208 - protein, 155 aa, Glycine max
  Clone ID: PAT_MRT3847_46296C.1.pep
LLITFFWSSVEVTMDTSRSEGKRVMRYKEEDDDNDDEEEEEVVSEMGFEEDGRRNKRVIRDLYGKRGSKGGGSITPSCQVDNCDADLSEAKQYHRRHKVCEYHAKAPSVHMAGLQQRFCQQCSRFHVLSEFDDSKRSCRTRLAGHNERRRKYAVD

SEQ ID NO: 226209 - protein, 88 aa, Glycine max
  Clone ID: PAT_MRT3847_46297C.1.pep
TFYAIRSSQADDGAERLAREISMKRDKLVRQIVDECQAKYGRPRSVAGALGPPAKTLSMSTHVKNPLATAGSVLAVCTYPSHWRPTRA

SEQ ID NO: 226210 - protein, 139 aa, Glycine max
  Clone ID: PAT_MRT3847_46298C.1.pep
MCVKDQEKDMMDSTTTNSWPLQHCHLLLKTHMDKKGSFLRTSSDDTTNISVQNSFPLESICEDTVVVDKKQNLMNFVPALRSGEWSDIGERPYMEDTHICIGDLVKKFNYDVLSGEAASFYGVFDGHGGKSAAQFVRDN

SEQ ID NO: 226211 - protein, 309 aa, Glycine max
  Clone ID: PAT_MRT3847_46299C.1.pep
TSCHAYQTCVVHAGLTMEPSLELFQEKFPDRFFDVGMAEQHAVTFASGLACGGLKPFCVIPSSFLQRAYDQVVHDVDQQRIPVRFVITSAGLVGSDGPLQCGAFDINFMSCLPNMIVMAPSDEVELMHMVATATRINSQPICFRYPRGALVGRGYTISDGIPIKIGRGRVLVEGKDVAFLGYGSMVQNCLKAHSLLAKLGIEVTVADARFCKPLDIMLLRQLCKHHSFLVTVEEGSIGGFGSHVAQFIAVNGLLDGRIKWRPIVLPDRYIEHASPNEQLDQAGLSGHHIAATALSLLGRTREALLFMCS

SEQ ID NO: 226212 - protein, 93 aa, Glycine max
  Clone ID: PAT_MRT3847_4629C.1.pep
TTTTTTKITSLPLQKPLSQPHHEIIFTEHKIVLNKQQSNSQTPHLQHNQQNPKMSFSSIHWTIHIPKSLKWLLLLQERERENDKREEKRREER

SEQ ID NO: 226213 - protein, 126 aa, Glycine max
  Clone ID: PAT_MRT3847_462C.1.pep
MKQFAVQNVVAPSHDEISVVCPKPRRLGLFNFPVNDPPVRPFYWHLSCQAEPCDSNSSGSNPLDNLLTKDGDFDVEQSWPVVTSSPPFFCGSPPSRAANPLIQDARFGDENFSPLSPPSWVVVPAA

SEQ ID NO: 226214 - protein, 49 aa, Glycine max
  Clone ID: PAT_MRT3847_46300C.1.pep
MSQPSRAVLKLCTVNGQHFEEIKVDLAKREQLSREVRTVNPLRQVSASV

SEQ ID NO: 226215 - protein, 98 aa, Glycine max
  Clone ID: PAT_MRT3847_46301C.1.pep
KNDSKVLHSSIFTIKSLSQQFTLLDVQKTKLPLVSVVLLNISSIQRKWHSLHLCFVGSPSSYGAIQLPFMVSGNISQEHINRRASRVRPSKLNAVAAM

SEQ ID NO: 226216 - protein, 106 aa, Glycine max
  Clone ID: PAT_MRT3847_46302C.1.pep
IYFPFKDPRHVLPIKQTNLYYIFIQRSPLISFFPSALLSLSLSLCCAHLTNKSIQKNYSFISFTSHHLIYNLSTATQTQKKRIQYNNKQLRNKRTRSEGERRMERG

SEQ ID NO: 226217 - protein, 41 aa, Glycine max
  Clone ID: PAT_MRT3847_46303C.1.pep
TEIEQNSIRVVENNITVGLDVSGSLVILCKSQDQQLWQSPD

SEQ ID NO: 226218 - protein, 118 aa, Glycine max
  Clone ID: PAT_MRT3847_46304C.1.pep
KGPLNPKFKGLFPFQELFFALKKPLPFWEQKPLKKNICFIPPWGRVFPPQQIFLPKFFLKVPAPGVGAFFFFPPFFVLKFGRETLFDWETMPKKMGGPFPFSKGGENFFFQTNPPQVF

SEQ ID NO: 226219 - protein, 68 aa, Glycine max
  unsure (1)..(68): unsure at all Xaa locations
  Clone ID: PAT_MRT3847_46305C.1.pep
DNDIGXXXSAXTVPGRVLXGSEFXADDLEXAVPFFTTLLTIFFFLTIFQVNSLESTLPTLTKLGTSNT

SEQ ID NO: 226220 - protein, 75 aa, Glycine max
  unsure (1)..(75): unsure at all Xaa locations
  Clone ID: PAT_MRT3847_46306C.1.pep
MARTKQTARKSXTGGKAPRKQLXTKAARKXSAPTTXGXXKPXRYRPGTVALRXIRKSQKSXELLIRKLPFQRXVR

SEQ ID NO: 226221 - protein, 76 aa, Glycine max
  Clone ID: PAT_MRT3847_46307C.1.pep
RTAARRRQKGTNSIRILQKTREFACTVLHTMALPQLIGMGVLVLGCLAKGSSDGNIEKGPGEKFRFPGDHLIVRGG

SEQ ID NO: 226222 - protein, 64 aa, Glycine max
  Clone ID: PAT_MRT3847_46308C.1.pep
PLLPFPFFNLKKKPLFQKYCKFLTISRPSNNHHLLHSYLHLTYYPYYYSTLFTPIIKKLSPYPK

SEQ ID NO: 226223 - protein, 443 aa, Glycine max
  unsure (1)..(443): unsure at all Xaa locations
  Clone ID: PAT_MRT3847_46309C.1.pep
IRLEDSVATDVKQAIKDNILNQITNGSQMIKLEKDPHAAFALIIDGKTLTYALEDDMKLLFLGLAVDCASVICCRVSPKQKALVTRLVKQGSGKTTLAIGDGANDVGMIQEADIGVGISGVEGMQAVMASDFAIAQFRFLERLLVVHGHWCYKRIAQMICYFFYKNITFGLTIFYFEAFTGFSGQSVYDDWYMILFNVVLTSLPVISLGVFEQDVPSEVCLQFPALYQQGPKNLFFDWYRILGWMGNGLYASLIIFFLIVTIFYDQAFRADGQVADMAAVGTTMFTCIIWTVNCQIALTMSHFTWIQHLFVWGSIATWYIFLSLYGMLSPEYSKSAYQILVESLGPAPIYWVTTLLVTVTCNLPYFAHISFQRCFNPMDHHIIQEIKYYKKDIEDQHMWTXRERSKARQETKIGFTARVEAKIRQLKGRLQKKQSTLAISAPS

SEQ ID NO: 226224 - protein, 70 aa, Glycine max
  Clone ID: PAT_MRT3847_4630C.1.pep
PLLWALGSIEIFLSRHCPLWPGLSGGRLTWLQPPAHITPTGIPFTPLPLIAYCPLPAICLLTGKFIIPSL

SEQ ID NO: 226225 - protein, 87 aa, Glycine max
  Clone ID: PAT_MRT3847_46310C.1.pep
TSGYQHRSPRTFNVFLIIVDNESITSIHIAHTSYATYSPCTRATPTTTLNTSQIPCSTLASIMNQTPSLPVRSSPWPTSSYSSDNSP

SEQ ID NO: 226226 - protein, 50 aa, Glycine max
  Clone ID: PAT_MRT3847_46311C.1.pep
MFNEGKYYSLPLHACLSFYLPSHALHLDLQKQYGHKCCEVVARYCFYKFS

SEQ ID NO: 226227 - protein, 43 aa, Glycine max
  unsure (1)..(43): unsure at all Xaa locations
  Clone ID: PAT_MRT3847_46312C.1.pep
GFWETXNYRVGXGXLRXHHHLEXXPTXHSLVEDSSFAIIPXXX

SEQ ID NO: 226228 - protein, 59 aa, Glycine max
  unsure (1)..(59): unsure at all Xaa locations
  Clone ID: PAT_MRT3847_46313C.1.pep
GNPKRXTXPXXXNGQXSXXPXLNKFSALXSXLDTXXRVXTLCHFXQDLQYXSSPQSSQF

SEQ ID NO: 226229 - protein, 41 aa, Glycine max
  Clone ID: PAT_MRT3847_46314C.1.pep
VSSILRESIKSYWYKWPCYCILGLSFRLGCSPNEFKRILHS

SEQ ID NO: 226230 - protein, 141 aa, Glycine max
  Clone ID: PAT_MRT3847_46315C.1.pep
KTYFLFSFRQPPTAKKHRTPNWKKDETSPVPRGGGGKKKNQRPNQPSSSKTNRKRKRKTENKTEGARAQNRGNMLHSTRNHRAGGGGFKPADRWELLGLLGAGSRTVDSARNKKHPELGGLGLPGPCKMLPTGTCLVRERG

SEQ ID NO: 226231 - protein, 70 aa, Glycine max
  Clone ID: PAT_MRT3847_46316C.1.pep
YLIVKNVTHREINAIIKTIPNPVYLFQGIVLRRGAQGTRMKSIELALSMCDIIDIYGFTGDPRYTEWTRY

SEQ ID NO: 226232 - protein, 117 aa, Glycine max
  Clone ID: PAT_MRT3847_46317C.1.pep
AWGGGGGGGGGGGGGGGGGGGGGGGGGGGGGEKKPPKKGLVSRKGAPLKRGEKGRRGDSFWEIYGFGPKFWKVAPNLLENLPRNGTPLKKTPGAKFKGGKNLLGAEKPPGAKPPRVR

SEQ ID NO: 226233 - protein, 97 aa, Glycine max
  unsure (1)..(97): unsure at all Xaa locations
  Clone ID: PAT_MRT3847_46318C.1.pep
RXHAYVSSEFGSXLXXXFXVPXNXHXLRHXXLAAVAXIXAXLXDYAKXEXFAAPWXTPXFRQXXXXVPXTGXXXXDTEXXXXAVXXGTXXXLLCXQR

SEQ ID NO: 226234 - protein, 43 aa, Glycine max
  Clone ID: PAT_MRT3847_46319C.1.pep
AAGRRREKGSASRRLHKGSVARKRQKGSAAGTITCCWSDRIHC

SEQ ID NO: 226235 - protein, 60 aa, Glycine max
  Clone ID: PAT_MRT3847_4631C.1.pep
LCGLHTADSNLIIMLLLNQNTLQIASIITLLILHQIHRSAGFPSSTPDDVIRSFHIADED

SEQ ID NO: 226236 - protein, 73 aa, Glycine max
  Clone ID: PAT_MRT3847_46320C.1.pep
SPLSDLCPALPHPLQATLIANPYVFYSRRFYLKLQQNIHRRFSLITVRADSDQSDCHEEECAPNQVLAKDNPE

SEQ ID NO: 226237 - protein, 30 aa, Glycine max
  Clone ID: PAT_MRT3847_46321C.1.pep
PVKSDNKEYSIRFKPSLLIPPPLNQHQNRW

SEQ ID NO: 226238 - protein, 55 aa, Glycine max
  unsure (1)..(55): unsure at all Xaa locations
  Clone ID: PAT_MRT3847_46322C.1.pep
SPTHTVSSAAVVSVLRMPHPENVTLAPLFQPERKHMSKTLSAVLVYLXKQKEVNL

SEQ ID NO: 226239 - protein, 45 aa, Glycine max
  Clone ID: PAT_MRT3847_46323C.1.pep
AAGVMSSVIQDSGTVSSYLPKLFVVERKFLLYYLLRSLLSSSRSR

SEQ ID NO: 226240 - protein, 53 aa, Glycine max
  Clone ID: PAT_MRT3847_46324C.1.pep
GKLTTQHDCSPGSIAVRVCTANVVYDMRFVDHALRCSDYGEDYYTVEVEVEFI

SEQ ID NO: 226241 - protein, 40 aa, Glycine max
  Clone ID: PAT_MRT3847_46325C.1.pep
VIILHIDYYNLMFFKLLYNLFYFRIFLIFNFKFLKCFIRK

SEQ ID NO: 226242 - protein, 75 aa, Glycine max
  Clone ID: PAT_MRT3847_46326C.1.pep
SDEVDNAKCERVSGPTCLTCISVSGKHYPDLCCSRTNTPSCASIHPTTTCILSSYDELTEYDKKAYIHDIFDCEC

SEQ ID NO: 226243 - protein, 150 aa, Glycine max
  Clone ID: PAT_MRT3847_46327C.1.pep
GRVGDEWVVSRVFHKNTDVKKSSTPGLLRINSIGDDLLDYSSLPPLMDPPYGNTNTTNNTNPLSSSTKSQSEGYYLPSFSINNHQQQLLIKPEDHHHHRSYNEIPTINYTSNQANLSNNVNAMGNNTLSQPLNMFSADYYVHQNRIKSSI

SEQ ID NO: 226244 - protein, 85 aa, Glycine max
  Clone ID: PAT_MRT3847_46328C.1.pep
KNPPQKGNCFFLTEKVTGGPLLQRGEKGFYLPTNKKKRGRDKNPKVCVNYNPLTMLHWGHNKRNTPYLVRIQTKNGFNLCFRPLP

SEQ ID NO: 226245 - protein, 599 aa, Glycine max
  unsure (1)..(599): unsure at all Xaa locations
  Clone ID: PAT_MRT3847_46329C.1.pep
FSSRVRSSSGSNAFDELSNENSARAEKTKYSFICECFFMTARVLNLGLLKAFSDFKHLVQDISRCEDALSTLKAMXERTPTPQAELDINRLEKEMELYSQEKLCYEAQILRDNTLIQNALSLYRLMIVWLVGLVGGFKMPLPPTCPMEFATMPEHFVEDAMELLIFASRIPKALDGVVLEEFMNFIIMFMASPEFIKNPYLRAKMVEVLNCWMPRRSGSTATATLFEGHQLSLEYLVRNLLKLYVDIEFTGSHTQFYDKFNIRHNIAELLEYLWQVPSHRNAWRQIAKEEEKGVYLNFLNFLINDSIYLLDESLNKILELKELEAEMSNTVEWERRPVQERQERTRLFHSQENIIRIDMKLANEDVSMLAFTSEQITAPFLLPEMVERVASMLNYFLLQLVGPQRKSLSLKDPEKYEFRPKHLLKQIVHIYVHLARGDTNSIFPAAISKDGRSYNDQLFSAGADVLHRIGEDGRIIQEFIQLGAKAKVAASEAMDAEATLGEIPDEFLDPIQYTLMKDPVILPSSRITVDRPVIQRHLLSDSTDPFNRSHLTADMLIPDDELKARIEEFVRSQEMKKHLSLQSTKATIQTTNGETMLID

SEQ ID NO: 226246 - protein, 66 aa, Glycine max
  Clone ID: PAT_MRT3847_4632C.1.pep
HMKPILNESSMLCTHVRQTIHVLFNPKRIYMTEANLMNFLLNARTDTWIGPRFTDPTLRRTHSTYI

SEQ ID NO: 226247 - protein, 58 aa, Glycine max
  Clone ID: PAT_MRT3847_46330C.1.pep
MMESQVKHALVVKVMGLTGSTRHVTHVTVEFLDDQTCHIMRNVKRHVRQGDILILLDI

SEQ ID NO: 226248 - protein, 63 aa, Glycine max
  Clone ID: PAT_MRT3847_46331C.1.pep
TPYLPDGTCDLAAYDDLVNMQTGHRCRGLIVDGTTGEGPLMIWAERIMHIDHSVNCQSRTCKE

SEQ ID NO: 226249 - protein, 59 aa, Glycine max
  Clone ID: PAT_MRT3847_46332C.1.pep
RLWPVSLSIYIGGEKWNLIKITLVLFLDKSVFHFQVPHVEGYDVIKSEKEKSLFCFGTK

SEQ ID NO: 226250 - protein, 95 aa, Glycine max
  unsure (1)..(95): unsure at all Xaa locations
  Clone ID: PAT_MRT3847_46333C.1.pep
XXXXXXXXXFXSXXXPXXXXXFXCCXXLCAXFXFXLVXAXSLXXPXSXPXLSXXXXXACXXRSXFXSXVVVLXCXXPLXXFXAXXSVLXXACLXX

SEQ ID NO: 226251 - protein, 155 aa, Glycine max
  unsure (1)..(155): unsure at all Xaa locations
  Clone ID: PAT_MRT3847_46334C.1.pep
XXKXXPPXXRXGXXPXTXXXRAXFSVPXDGXXXRXXXXXXDXXAHXXXCLRLRYXXDXXXXXXSXXXXAWXTXXEXXXXXXXXXXXDXXXXXXXXXXXXXXXXXXXXXXXRXXGXXFXXXXGVXXXXXXAXVXXXFRGXXXXLGXXXXFLGVVLF

SEQ ID NO: 226252 - protein, 127 aa, Glycine max
  Clone ID: PAT_MRT3847_46335C.1.pep
MSCFTSEKSTMSSQLQMVPLSKLRYQRLRHEKGWDDERERRSRSWFRFRRVPIRRRFRLKIPSLRRLWRKRARLVSSMRISYAKVMKRFKEGQVHFGDLFAGNYLFMHVNPTSLKCLERDLSLSKIA

SEQ ID NO: 226253 - protein, 91 aa, Glycine max
  Clone ID: PAT_MRT3847_46336C.1.pep
TLKFIPLTLDKLNLRTRLHHQFAGSNQHTKKDENIEMPSAESSYQHTACVVIVKVFSHHSYIAHQLSQPQPFDTQISVMPKMFIFKLCHML

SEQ ID NO: 226254 - protein, 63 aa, Glycine max
  Clone ID: PAT_MRT3847_46337C.1.pep
LSETHRVRYLLSEIVGEREREREREREREREREREGGRGPLKDSTVLLMPLVMRSLRVVKVVV

SEQ ID NO: 226255 - protein, 73 aa, Glycine max
  Clone ID: PAT_MRT3847_46338C.1.pep
RSVFYFRRLFSQVSTIIARWSCLESEWYVLCSFISSQSNLSRSCFGASFSRGPRSSLWACNSLRFATDHPGPT

SEQ ID NO: 226256 - protein, 799 aa, Glycine max
  unsure (1)..(799): unsure at all Xaa locations
  Clone ID: PAT_MRT3847_46339C.1.pep
EKLQKKKQEGKLLTGKQKEEARRLEAMRKQILNNTGGMTLPGGDSGAPAKKPIYQTKKVKPNNRNQNGAAAAQIAESVEAKETATDVASEEPEKIEEVESVQVDDKVELPVAVEEDGEEDDDEDEWDAKSWDDVNLNTKGAFADEEADSEPKPIVKKEIKNAVPAQNAGATKPVAEEIENGKQINPHLYREPRKSVVPPKPSDENLRSPICCIMGHVGTGKTKLLDCIRGTNVQEGEAGGITQQIGATYFPAENIRERTKELKADAKLKVPGLLVIDTPGHESFTNLRSRGSGLCDIAILVVDIMHGLEQQTIESLNLLKMRNTEFIVALNKVDRLYGWKTCRNAPIVKAMKQQTKDVQNEFNMRLTQIITEIQRYKGLXTELYYKNKEMGETFSIVPTSAISGEGIPDLLLLLIQWTQKTMVEKLTYSEEVQCTVLEVKVVEGHGTTIDVVLVNGVLHEGEQIVVCGMQGPIVTTIRALLTPHPMKELRVKGTYLHHKEIKAAMGIKITAQGLEHAIAGTGLYVVKPDDDLEDVKESAMEDMRSVMSRIDRTGEGVCVQASTLGSLEALLEFLKTPEVSIPVSGISIGPVHKKDVMKASVMLEKKREYAAILAFDVKVTPEARELADELGVKIFIADIIYHLFDQFKAYIDNIKEEKKREAADEAVFPCVMSILPNCIFNKKDPIVLGVDILEGILKIGTPICIPSREFIDIGRIASIENNHKPVDYAKKGQKVAIKIVGSNSEEQQKMFGRHFEIDDELVSHISRRSIDILKANYRDELNMEEWRLVVKLKNLFKIQ

SEQ ID NO: 226257 - protein, 120 aa, Glycine max
  Clone ID: PAT_MRT3847_4633C.1.pep
ILFFSLQFSLPSAQTSHSHCLTTKKPRQQNTLFPPVLLCSVLFFPRCSSPFQQKHDPPHFMFPLPTLKFSIKFISFQSILNWVTHNSKGCHIVRSQILQLQWRRAPRIPSTSTPPSARAP

SEQ ID NO: 226258 - protein, 91 aa, Glycine max
  unsure (1)..(91): unsure at all Xaa locations
  Clone ID: PAT_MRT3847_46340C.1.pep
XXTKFHDHYYNNNYLSYKSIKKNDLKKNKLTSSLPSSYIQYSSSKYSKIDFSPCCFKTSTTKHFMPIFLILCGIITPTASVIYLHTKNFFF

SEQ ID NO: 226259 - protein, 41 aa, Glycine max
  Clone ID: PAT_MRT3847_46341C.1.pep
PRIWCPLSEFCHFEDCCLHYAVAYSRIRMCFPPCIVLYCLW

SEQ ID NO: 226260 - protein, 56 aa, Glycine max
  Clone ID: PAT_MRT3847_46342C.1.pep
HASEKMFENWNILFNPIFLGFIILILKFFRIYVLVFEFFIYIFSIRNFISFLFLVT

SEQ ID NO: 226261 - protein, 587 aa, Glycine max
  Clone ID: PAT_MRT3847_46343C.1.pep
MEDLGGTRFDGLSNAVRRKRSQTSRRPRPDSQHASEGQELSPLSSTPSEDTGKASSDENVGYDANSKRKEFNLNHCVSQTSSGTGAEDEKSHKKSKKDGGFHTFYSNEPVRSGLNNKRCSEGVLAPANWKGSSKTKDSLDSELRNADLYGGRNPESMSLAQFGGSQDGLGNENRVKKVKLKVGGVTRTIQANSATNGASGSGTTMKSRSSDASRPRQKQQSNSDDNNSPSDKRSRLQGVPWKDFSRGGFGLGKEESLMGKISGKNTTSKLGDKSEPVRKSKRVPKRRVLDGEFGDDDDEDDEIRYLEKLKTSKVSAVYRDEEELSKKHRKLSSVSNLENAAPRSGKDGKKRSRSDRVYEDTDYEDEDESGSDGELEDKKKKKQRKESVDVLMDSKREMTLTTRQRALQSSKDASASSASVIEFPNGLPPAPPRKQKEKLSEVDQQLKKAEAAQRRRMQVEKAARESEAEAIRKILGQDSSRKKREEKIKKRQEELAQERAANALMLASNTIRYTMGPTGTFVTFSEEMGLPSILNSKPVSYPPPREKCAGPSCTNPYKYRDSKSKLPLCSLQCYKAVQEKVVAETTC

SEQ ID NO: 226262 - protein, 69 aa, Glycine max
  Clone ID: PAT_MRT3847_46344C.1.pep
ISFLSNKFGQTLYGFLVWILWHISSFYLGFYLKRHALINLFTYIMEIFIYNRYSIQCLLCILISINFTR

SEQ ID NO: 226263 - protein, 118 aa, Glycine max
  Clone ID: PAT_MRT3847_46345C.1.pep
LLFLLTALLRPSNWVPPKSSIKSSYYTTAQVPTVALPITPEGKPSKTTIYSAQCWREFYFPSLLLALTLLGIGVWDQRERRCRRRKGFRSVIIVWCVEVGKYVSEVGYLAFAARVWGR

SEQ ID NO: 226264 - protein, 223 aa, Glycine max
  unsure (1)..(223): unsure at all Xaa locations
  Clone ID: PAT_MRT3847_46346C.1.pep
MQENFRGDVIYFWXRLDMDQSAIRNHNAISFWYMCDILNGGNCRIVFQDGFRQMYALPPHAEALPPMPEDGGYWSALHSWVMPTSSFLEFIMFSRMFVDSIDAKHRDSTKYSLCLLGSSEIEKKHCYCRVLELLINVWAYHSARKMVYINPNTGSMEEQHPIEQRKGFMWSKYFNFSLLKSMDEDLAEAADDGDHPREMWLWPMTGEVHWQGTYEREREERYR

SEQ ID NO: 226265 - protein, 59 aa, Glycine max
  Clone ID: PAT_MRT3847_46347C.1.pep
QLFFYYYWIINSAGRNANQNKGYYYILHCNSTEKDMSAIRGLKSNYCKRIMSISWRKGK

SEQ ID NO: 226266 - protein, 163 aa, Glycine max
  unsure (1)..(163): unsure at all Xaa locations
  Clone ID: PAT_MRT3847_46348C.1.pep
ASPARAVCKQTLNPHFIEDQAQGVATLFKAAPADPEAPAGPRGGRRXAQPPTALPPATAGGAILRIDLLANFLTDGNFXARVDSHRTHRIKGTIKMAATVGSPENAGMALACAVNRSVRGRARSDIHTICSQXCEVWNPACARAMTMALNTRPELRCTEAGSS

SEQ ID NO: 226267 - protein, 49 aa, Glycine max
  Clone ID: PAT_MRT3847_46349C.1.pep
IRGGRFHVQPFGLLLTSSKFNFTKPYSFLIIKGNKNHCFLIFYLLLYLI

SEQ ID NO: 226268 - protein, 39 aa, Glycine max
  Clone ID: PAT_MRT3847_4634C.1.pep
PRKISNVDLKHCIGIVFGIIISDLFKIIIMMIFSGFYHN

SEQ ID NO: 226269 - protein, 58 aa, Glycine max
  unsure (1)..(58): unsure at all Xaa locations
  Clone ID: PAT_MRT3847_46350C.1.pep
PLIPHTSTVINESKYHKPKPTFHSREGPWQNSNGGNIYXEEKLHYPRPIRAYRRIKEN

SEQ ID NO: 226270 - protein, 75 aa, Glycine max
  unsure (1)..(75): unsure at all Xaa locations
  Clone ID: PAT_MRT3847_46351C.1.pep
XEKKKRLITNNNAPYKGRGRFFFFFGKKTPQKSIVNCCCKKTPFKGGGVMPFLLSLLLLQNDASEASTIQQLPTG

SEQ ID NO: 226271 - protein, 42 aa, Glycine max
  Clone ID: PAT_MRT3847_46352C.1.pep
RYTHWLLNMSEAKLWSWKTTRAINMWWGHADHGTDGEVLQLI

SEQ ID NO: 226272 - protein, 67 aa, Glycine max
  Clone ID: PAT_MRT3847_46353C.1.pep
LLYELMKLFYVNLNAILCFFNFNEFIYMYFFFRHDIRHFSLCHPSYFYGRFLAFRHEPPSVINNIRF

SEQ ID NO: 226273 - protein, 91 aa, Glycine max
  unsure (1)..(91): unsure at all Xaa locations
  Clone ID: PAT_MRT3847_46354C.1.pep
MGMVQEFVVSCGLFYREENMTLFVFFDAAVFLIAWACHGSCYQRYPSXMKTGYFEHAXEDKCSSLMLALXHTIIPSFKTIPXECVEPTKDY

SEQ ID NO: 226274 - protein, 188 aa, Glycine max
  unsure (1)..(188): unsure at all Xaa locations
  Clone ID: PAT_MRT3847_46355C.1.pep
MATRVSPPVALLLSSLLFLLTLSRARDLPNPFSQPKPHSEPKTVSFTIDTIDPVPLTLLRFRPINRHFQPGRPLPLSLRTGHRRCRHRREIPYGNDAILVGDAAAASRIHPRWVRLHSAAETRFPATVERQDSDHDHDHXAPPPTPRRAPPPPPPPQGELVREEDSEVHEAVLILMLQRRTTMMHIYI

SEQ ID NO: 226275 - protein, 64 aa, Glycine max
  Clone ID: PAT_MRT3847_46356C.1.pep
KLVSSLFARALLISAQFLLLGFPQDGVVGPPPPHLPPPPPPSPSPPQQKRATVIPAHDVETVPW

SEQ ID NO: 226276 - protein, 123 aa, Glycine max
  Clone ID: PAT_MRT3847_46357C.1.pep
GAQHRGGEIKWPNRKNPLSKTLLDYDIETGSRESQDDSEIAETYHEDNEKEEELNKKKPFGDTRSNNNVAAKPVPPGGTNANSVESKGHPDNRAERKKKNSHPGTRHPPWRKRAAWIQPPKMG

SEQ ID NO: 226277 - protein, 52 aa, Glycine max
  Clone ID: PAT_MRT3847_46358C.1.pep
KNYKVLKGIIKITWLAVKGLDMSINTLFSKIQMYYSWPNVTCINGILYAKFL

SEQ ID NO: 226278 - protein, 76 aa, Glycine max
  Clone ID: PAT_MRT3847_46359C.1.pep
TLVPYRGPPLFFFFKPLSYIYVTAHYIVFIYITQRFTAVFLTREYINIYIYLRQARAHRIFHSLENLKLTKCLNDR

SEQ ID NO: 226279 - protein, 98 aa, Glycine max
  unsure (1)..(98): unsure at all Xaa locations
  Clone ID: PAT_MRT3847_4635C.1.pep
XXGSDSXRAXYXVXGXXEXXXXXXKGGVXXXXGXXXEXEWRXXEXXXGGVXEXXLXXXGWXSXEXDXXXXRXXXXGXXXGXXXXXXXXXXXXXXXXXG

SEQ ID NO: 226280 - protein, 155 aa, Glycine max
  Clone ID: PAT_MRT3847_46360C.1.pep
EKNHLSNFKRVHGYQPFNGEAGIHPLHPPNIIALSNANNFPVQQGVSVPLSINDPRNFLAQLLMNVLSNVQVPATTPLSGPVAAQIQVPALMAGSSHEPLSQNLSQIQVSDSLAHFEREILLGKQKIRCHLSHSNLMRLLVQAIMVILKLLMERW

SEQ ID NO: 226281 - protein, 375 aa, Glycine max
  Clone ID: PAT_MRT3847_46361C.1.pep
MFATTNSSTLSPLFSFSRTTATSLPSKPTFWNLVPMKQSSSPGHLALALDNPRRTLHVSCGSTSPHASQRSSIQGGEAFFRGVLESMQSVYLNRNRTAKAILDLVHSAENNSLCYDHLAFRTFGVNGYGIDSMASFFLDYGYTQREELRFPAKKLRALWFSPPADSLASNGSGINGPLPRIFISELLVDQMSPQTQEIIKKYTESSVDGNKYAALASSLGHLTWEKPLYSEFQQLASESEYAAWTLVNGYALNHVTISTHRLKTHLKEIKKLNQFIKDSGFRLNSEGGVLKVSPDGLLQQSSTVADSISFKFSDGITESVPCSYIEFAERLVLPQYKNLPDTEVKEFHRRDGFEVASADKIFESTSKEQLSRVGS

SEQ ID NO: 226282 - protein, 66 aa, Glycine max
  Clone ID: PAT_MRT3847_46362C.1.pep
REPNPPPSVDQGSCSCVSAVFLSIIRGWVEWSFLFFPRGGIVLCSTIFFFTRPEWFPFQGFVPKSP

SEQ ID NO: 226283 - protein, 109 aa, Glycine max
  Clone ID: PAT_MRT3847_46363C.1.pep
NNIRSVYPQKKNVECTYCLCDQYIDNISMHDTKLLNFFLRNVTTQYHLLLMWASTLATKKPILESLTQCKPFRACQGFGKLLFGKPFSLRRSSPNLATFELIVLLLYMK

SEQ ID NO: 226284 - protein, 68 aa, Glycine max
  unsure (1)..(68): unsure at all Xaa locations
  Clone ID: PAT_MRT3847_46364C.1.pep
RLTSWAVIIIDGDGRGRGDLITSRGSNTVFKLLMLVFRVPFYHLLPPMPFYHLLTTMPFYHLXDHAST

SEQ ID NO: 226285 - protein, 79 aa, Glycine max
  Clone ID: PAT_MRT3847_46365C.1.pep
YGCEKTTEAPQRLIILLNHLNKRIHRIIPHLNLSLPCYITDQLLHNLFSFDIFCWRTLHKKAAAHLTEKQVALFMVLKA

SEQ ID NO: 226286 - protein, 76 aa, Glycine max
  Clone ID: PAT_MRT3847_46366C.1.pep
IYYSSLYFFFKFYWRTIFPTPLTVSYVTQNLKKPSKKKNWVPIKVRFEFFGYSPRSQHFWFFPPAFRKKKFSLFGP

SEQ ID NO: 226287 - protein, 55 aa, Glycine max
  unsure (1)..(55): unsure at all Xaa locations
  Clone ID: PAT_MRT3847_46367C.1.pep
FLALPSQVPGGLSESLSRLFDFLCTVSFHLSLSPLCGLLASXGLSGXAGXPVRSC

SEQ ID NO: 226288 - protein, 52 aa, Glycine max
  unsure (1)..(52): unsure at all Xaa locations
  Clone ID: PAT_MRT3847_46368C.1.pep
DCFVSLQSMMFLNRHQPRLFFDRHQIEVFFVKVCWEYLSADISRXYFLTNIG

SEQ ID NO: 226289 - protein, 136 aa, Glycine max
  Clone ID: PAT_MRT3847_46369C.1.pep
PLTRLNTDKYSYLSNFGILIAIFRNPRLDAILIIRNFGHRFEQLNCLGLSRSMWLCLRNQNPTRVGKVKRKRPIKETDGGHGRHRFHIKVVRGCGPYFWMGPVLEVGPASSCLGVVELLPHPNQPKLVASLLSMMF

SEQ ID NO: 226290 - protein, 77 aa, Glycine max
  unsure (1)..(77): unsure at all Xaa locations
  Clone ID: PAT_MRT3847_4636C.1.pep
KDTPAVGLVGPRWQFVRKMFGEXHXGXPXGFPXXVXCXXXFNXXPXXNSXENLXGXGLXPPSXGFDNPSKXSXXCGX

SEQ ID NO: 226291 - protein, 73 aa, Glycine max
  Clone ID: PAT_MRT3847_46370C.1.pep
IIYNPFLFHGLLFNGMKVFFFFCELNSNFHFELYVLFCYSIYQLIYLPIYFIGDGIAYSVGANFTPHILTVND

SEQ ID NO: 226292 - protein, 165 aa, Glycine max
  Clone ID: PAT_MRT3847_46371C.1.pep
QIRAIELSGVKQEHVAVSPKPKSNPRRKSQAQEANKGNGRRARPPQVPHQGGAGMRALFLDGSGSRGGTGVFLPRGGGATTPSESTNKQGKGCSTVLIPARVVQALQLHFDQMAATSGPKAGGFPPLHDVLVSNRDGMYSLQKPESRKAPASIQNDTILPQEWTY

SEQ ID NO: 226293 - protein, 32 aa, Glycine max
  Clone ID: PAT_MRT3847_46372C.1.pep
HLICALGRLCHNNSNLHRISLHGIQTLPVFEA

SEQ ID NO: 226294 - protein, 95 aa, Glycine max
  unsure (1)..(95): unsure at all Xaa locations
  Clone ID: PAT_MRT3847_46373C.1.pep
LPLSPAGFFSXAWVLXXFLGPAAALLWGAFFSVSRXXAFAPPPXEKVCFFSGXVFLLWFCPLVVWVSVPLLFVCGFCCPAVFPFCRLLAAXRPAS

SEQ ID NO: 226295 - protein, 292 aa, Glycine max
  Clone ID: PAT_MRT3847_46374C.1.pep
MPSGAKFDGGGSTSQQGQILYSDQERQTILQQIIDLKMLQQNEDIDYLAKINRLQEKDLSPSVYHTLKKLDDKFNEQAQKSQDLATNVLEKDCPTVELNPETLPSTFSQFDNLYSSSIIDLPLHGELFWTCRTPLQSMQLWSQNIQDLGICKELVCQDDFNIPDVDLTFQNYEELFGGDQDPIRILLDDQDVSCSSLEKDKSVDKSVIDNPSAMEESSAAASITISQSDLDNKDMNPLSQYCPRSMDPAHAIRPFDSTIPFSVLRFNEESSCTNHDDSALSPYSEGRAYSGS

SEQ ID NO: 226296 - protein, 82 aa, Glycine max
  Clone ID: PAT_MRT3847_46375C.1.pep
YGCSLQPSSLIDTAYHCQPGALREGFLFCSLNPLHLYALPFRSTSLVGYAPLCPYPRPIPPPIGLPHASRFRELSLCLSCAV

SEQ ID NO: 226297 - protein, 79 aa, Glycine max
  unsure (1)..(79): unsure at all Xaa locations
  Clone ID: PAT_MRT3847_46376C.1.pep
KKLKTISDRPYLNDAQWAREGESLLMKGWNLCFXSRWIKDXVYRRTQLSPGYYDGRYRTMCKRAMHRRTEACYVSKKFE

SEQ ID NO: 226298 - protein, 52 aa, Glycine max
  Clone ID: PAT_MRT3847_46377C.1.pep
MNGRGRSLVLRSLIQNPFVSLFIYVITLPRSLSLSIERGDGTKTSFPFTFTP

SEQ ID NO: 226299 - protein, 267 aa, Glycine max
  Clone ID: PAT_MRT3847_46378C.1.pep
MSGRFSRTIYVGNLPSDIRESEIEDLFYKYGRIMDIELKVPPRPPCYCFVEFDNARDAEDAIRGRDGYNFDGCRLRVELAHGGRGPSSSDRRGYGGGGGNGGAGGGRFGISRHSEFRVIVRGLPSSASWQDLKDHMRKAGDVCFAEVSRDSEGTFGIVDYTNYDDMKYAIRKLDDTEFRNPWARAYIRVRKYESSRSRSRSRSPSRSPSRSRSPKRVRSRSLERSVSRSRSRSQSASPIKSSRPRSRSRSRSRSGSGSPHQVLSGSG

SEQ ID NO: 226300 - protein, 170 aa, Glycine max
  Clone ID: PAT_MRT3847_46379C.1.pep
MSTPAEYYRSLPPVSKTYGVACLMTTSAYYLQLYDARNIALDYGPVFKSLQVWRLITNFFFLGSFSLPFAVRLIMIAKYGVSLERGPFDKRTADYVWMFIFGAFSLLVIAAVPFFWYPFMGISLVFMIVYVWSREFPNARINIYGVVSLKGFYLPWALLALDLIFGNPIK

SEQ ID NO: 226301 - protein, 59 aa, Glycine max
  Clone ID: PAT_MRT3847_4637C.1.pep
IMTCFYFLASELVKCLLHGFLSFPCILDMGTTVQVYKLYKLVFSNHACLMLPIEILTNL

SEQ ID NO: 226302 - protein, 96 aa, Glycine max
  Clone ID: PAT_MRT3847_46380C.1.pep
PSRSPSRSRSPKRVKSIFLERFVFRSRFRFQSASPINFFRSCQVVVKFLKKLGGFLVILSHSGGQYGNYIGVGLNCFKEKLFMSLGCLVIVLFFLN

SEQ ID NO: 226303 - protein, 262 aa, Glycine max
  Clone ID: PAT_MRT3847_46381C.1.pep
MSGRFSRTIYVGNLPSDIRESEIEDLFYKYGRIMDIELKVPPRPPCYCFVEFDNARDAEDAIRGRDGYNFDGCRLRVELAHGGRGPSSSDRRGYGGGGGGGGGGGSGAGGGRFGISRHSEFRVIVRGLPSSASWQDLKDHMRKAGDVCFAEVSRDSEGTFGIVDYTNYDDMKYAIRKLDDTEFRNPWARAYIRVRKYESSRSRSHSRSPSRSRSPKRVRSRSLERSVSRSRSRSRSVSPIKSSRPRSRSRSGSPRQVLSGSG

SEQ ID NO: 226304 - protein, 40 aa, Glycine max
  Clone ID: PAT_MRT3847_46382C.1.pep
LQKGESNFPLKLYWLLIYKNACTGTSVALGGEYAWSRHVN

SEQ ID NO: 226305 - protein, 69 aa, Glycine max
  Clone ID: PAT_MRT3847_46383C.1.pep
FKLPQISFWVCPNKIVDTCSLHFALTIYSPATSSISTLHILILINPAWPDYNLGLPMEPLRSLFVYCTT

SEQ ID NO: 226306 - protein, 40 aa, Glycine max
  Clone ID: PAT_MRT3847_46384C.1.pep
LHYIYFHLNSIHLFHYLSLTLIKMLTSLNFINFFKSINFI

SEQ ID NO: 226307 - protein, 119 aa, Glycine max
  Clone ID: PAT_MRT3847_46385C.1.pep
ELVIVVSSYLNNVGYNPDKIPFAPISGFDGDNMTDMSRNLDWDKGPTLPHALDQISEPKRPSDKHLTLYHQEVYYIEGIGSVPVRWVETSLLKPPIEVTFASNELRFQVKSVGMHHTPL

SEQ ID NO: 226308 - protein, 315 aa, Glycine max
  Clone ID: PAT_MRT3847_46386C.1.pep
RSAMMLDCTIASRLDMERRIGSQLDVATLDDILIPSFRHAGDTLFDVDTVHRILVNFCQQDDSEEEPEDASVFESDSPISPSQTALVKVSKLMDNYLAEIAPDANLKLSKFMVIAETLPAHARTIHDGLYRAIDIYLKAHQGLTDLDKKKLCKLIDFQKLSQEAGAHAAQNERLPVQSIVQVLYFEQLRLRNSLSCSYGEDDPKPIHQSWRISSGALSAAMSPRDNYASLRRENRELKLELARLRMRLNDLEREHVCMKRDMAKSGSRKFMSSFSKKIGKLSLFGHNSSRGSSSPSRNSQRTDSKVIERTCASTE

SEQ ID NO: 226309 - protein, 93 aa, Glycine max
  unsure (1)..(93): unsure at all Xaa locations
  Clone ID: PAT_MRT3847_46387C.1.pep
APTAHAAITCRQVTSKXCAICIGSLHKGXRRGGGCCNRVKSLTAAAKTAVDRQTACTCLISCDNLICGCNAYNSGLMTVQCXVSIPYKISTST

SEQ ID NO: 226310 - protein, 54 aa, Glycine max
  unsure (1)..(54): unsure at all Xaa locations
  Clone ID: PAT_MRT3847_46388C.1.pep
KKIYFGDQKCTPWFSSEVGRLNNRXGEGNQGRGMSFFKIKKTPWLKKPAPKKLL

SEQ ID NO: 226311 - protein, 35 aa, Glycine max
  Clone ID: PAT_MRT3847_46389C.1.pep
RDVDEMILREAYRFLSSNALLKTKDHHCHRFIRWI

SEQ ID NO: 226312 - protein, 71 aa, Glycine max
  Clone ID: PAT_MRT3847_4638C.1.pep
IFFLRGFTDQSMAGFYLLLLILNQEYMQGKCMLEIGESSKNQAKMPDYFSFCLIVSIRVLQCRSVLTYRRI

SEQ ID NO: 226313 - protein, 289 aa, Glycine max
  Clone ID: PAT_MRT3847_46390C.1.pep
MFPQSFNISGGGAGLEQLLQPHHFPSPMEQQQQRSRWKPSVEVAPNCPRCASTNTKFCYYNNYSLSQPRYFCKGCRRYWTKGGSLRNVPVGGGCRKNRRGKSLQSSSSRQQRASSFVSGDTESSFSDAQQINNGSRDIDMALVFAKFLNPKPTTGEDNNGSSSTSNNFTPESVEIENDAVVQSQNKASSDPVIVESENLSLGEIDELERLLGVCGDEDGLWSDATLSSSVTWEPPLKELEYSMPLNEDDDDAQLLPIITSASTMISDSCWSNWSSFDLSTMEAFSSSPS

SEQ ID NO: 226314 - protein, 79 aa, Glycine max
  unsure (1)..(79): unsure at all Xaa locations
  Clone ID: PAT_MRT3847_46391C.1.pep
XGXTNRHNXLKXXXXTXHXXPTXTXHXXXXHXXRHXXSTXXTHQTRXXXXXHPPXXXXSXSXXXXAXXTXSXGAXPXXX

SEQ ID NO: 226315 - protein, 39 aa, Glycine max
  Clone ID: PAT_MRT3847_46392C.1.pep
KNSWTRERCQITTSLFYQKIIFIFLLKCLCKNKLKVIDS

SEQ ID NO: 226316 - protein, 58 aa, Glycine max
  Clone ID: PAT_MRT3847_46393C.1.pep
GDKVKMLVHFSGGRYYTNYFPEYTSPQSNPRESPLQFALSVTGLFHQPPRGKDLCEQP

SEQ ID NO: 226317 - protein, 63 aa, Glycine max
  Clone ID: PAT_MRT3847_46394C.1.pep
TFLCSRKRQGNGESLCCMCGRWLIQQDTPQLQSWNPVRKKTDGLPCNHSERTTAVAHHRNQPQ

SEQ ID NO: 226318 - protein, 591 aa, Glycine max
  Clone ID: PAT_MRT3847_46395C.1.pep
MASVGAVNCKFFLCLLLWLWNFLPPSQGNKHWHENRYPFIRNASSFSSPSISTTTCNNAYDYIIVGGGTAGCPLAATLSQNFSVLVLERGGVPFTNPNVSFLENFHITLADISPTSASQYFISTDGVYNSRARVLGGGSSINAGFYTRANPRFIKKVGWDAKLVNESYPWVEKQIVHRPKFSPYQRAFRDSLLDSGVSPFNGFTYDHLYGTKVGGTIFDRFGRRHTAAELLASGNHDKLTVLVCATVQKIVFDRKGKRPKAVGVIFQDEHGKQHEAILSNDKHSEVIMSSGAIGTPQLLMLSGIGPKAELQKLSIPVVLDNHFVGKGMVDNPMNTMFIPSNRPVHQSLIETVGITKMGVYIEASSGFSQSNDSIHCHHGIMSAEIGQLSTIPPKERSPEAVQEFIKNKKDIPVELFKGGFILSKVANPWSVGELRLNNTNVNDNPVVTFNYFSHPHDTAICVKGIRLAIKVVQSKHFTNYTLCDKKTAEELLNLTVKANVNFIPKHPNDTASIAQFCKDTVITIWHYHGGCHVGKVVSPDYKVLGVDRLRVVDGSTFDESPGTNPQATVMMMGRYMGLKILRHRLGKLAGI

SEQ ID NO: 226319 - protein, 73 aa, Glycine max
  Clone ID: PAT_MRT3847_46396C.1.pep
GSNGFSVSSSIQYGTNPRLYISLGLSSPCAISRMSVSVSCCTKGFLLEALYYLGVYWQVQAMLYFTAGKSRRV

SEQ ID NO: 226320 - protein, 390 aa, Glycine max
  unsure (1)..(390): unsure at all Xaa locations
  Clone ID: PAT_MRT3847_46397C.1.pep
FPFIYGVHSYIFIDGQKKEVVDNLKDDAPRLDSILMHMGSMYATLSKFEKSLDVYERAVYIMERTYGKDSTFLVTPCLGMAKVIGSIGKATKAIETYQRVITLLESSRGANSKDLVVPLLSLANLLLKERRANDAETHFTRILNIYTELYGQNDGKIGMAMSSLARVKCXKVMKDSNYLSPDDSIMEKMRVDLAELLHTVGRNAESYSRSLWITERYKGKQHPSQXHMINLANSYSRSKNYADAENLLRRSLQIMIKQKGTDDQSISFPMLYLAVSLYHLKKDEDAEKFALEVLRIREKAVGKDSLPVGEGLDCLVSIQTRLGRDENELLELLRRILNIQEXFGHEIEEVLVTLXKIVYYLDKLGKKDEKLTLQRRLSVLSKKYKQTINY

SEQ ID NO: 226321 - protein, 115 aa, Glycine max
  Clone ID: PAT_MRT3847_46398C.1.pep
MEEFQRSRSYANGQMMQIESYYGAPRPYDLSLRTYSASYAQTQIGPPRDLKLKKGKSISAGSSFSKSWSFADPELQRKKRVASYKMYSVEGKIKGSFRKSFRWLKNKYSHVVYGW

SEQ ID NO: 226322 - protein, 60 aa, Glycine max
  unsure (1)..(60): unsure at all Xaa locations
  Clone ID: PAT_MRT3847_46399C.1.pep
PKPEMEHFLGHNRTDALXIDIMYTWGSTLNDSMPTPVYRPMPIFSLCVGEATNRRDSNFG

SEQ ID NO: 226323 - protein, 181 aa, Glycine max
  Clone ID: PAT_MRT3847_4639C.1.pep
SLFYAAGGPIGGGPPGSYGGTPMPWGPPVPPPYAPYAPPPPGSTMYPPMQGQPMPPYGVQYPPPVPTGPPGAPSQPATSSEVQQSYPPGVQSDNSTSTQSIPANVYGNSGPPMPPQPTYPASYGYPPYYNAVPPPPPPSAPMPVSTSDQSHNIANVPWASNSLVPPSASSADNQSQSIGNV

SEQ ID NO: 226324 - protein, 60 aa, Glycine max
  Clone ID: PAT_MRT3847_463C.1.pep
RNNRFYALITKFQDRILLGLKQVLGLFNKNGFLYGFKAVLTDGYWGLNKLRQEPTDFISG

SEQ ID NO: 226325 - protein, 80 aa, Glycine max
  Clone ID: PAT_MRT3847_46400C.1.pep
AIITLMDTYIHSNSLFLCTHSFTSACSFLLHSFFILLALHRPTCTTCITNYITKNLFNFVFVPSCNKFTSTMYGVCINKT

SEQ ID NO: 226326 - protein, 239 aa, Glycine max
  Clone ID: PAT_MRT3847_46401C.1.pep
MGLIKAAIGDGVLTSMWVFIISTLRIVTTEVALFLGLQPLSLAGLIISTILNSFYVLTISFIGRILGGANFNPSTSLSFYTAGLRPDSSLSSMAVRFPVQAYGGAVGVKTLLLVMPSKYNDMLKGPFLKVDLHSGAVAEGVLTFTHNMAIFFVMFKGPRNPFVKVYLLSVTTAVLAILGGGFTGPSMNPANAFGWAFVNNKHNTWEQFYVYWICPFIGASSAALIFRSMFMPPIKQKKA

SEQ ID NO: 226327 - protein, 213 aa, Glycine max
  unsure (1)..(213): unsure at all Xaa locations
  Clone ID: PAT_MRT3847_46402C.1.pep
DCLNLSNVKDFQYHRNYFWGGTEIKVWHGKVEGLSVYFLEPQNAFFHAGCVYGCGNDAQRFGFFCHAALEFLHQNGFHPDVIHCHDWSSAPVAWLSKEQYRHCDLSKAGVVFTIHNLEFGAHFIGKAMEYTDKATTVSPSYSXEVAGNPAIAPHLHKXHGIINGIDPDIWDPFNDEFIPVSYTSEXVVXGKEASKETLQQKLGLRKAESPLMG

SEQ ID NO: 226328 - protein, 66 aa, Glycine max
  unsure (1)..(66): unsure at all Xaa locations
  Clone ID: PAT_MRT3847_46403C.1.pep
VPRVFSVWCWLSCSSSVARAGGCFSFPFGGRAPWGRLXLAGVSVAWAFAVASGRXXRRFVLKLEPG

SEQ ID NO: 226329 - protein, 438 aa, Glycine max
  unsure (1)..(438): unsure at all Xaa locations
  Clone ID: PAT_MRT3847_46404C.1.pep
MKQLHKQTSLNHRREEEMLGSSESSPYSPKSIKHTRTLXPRSINYLLRELVLLVHASSAFINWAPSFCIRSSPLSPRMGPPEPAHTFLPTNRACXSSGTKASHGACVPVGIGGRXMKLVVTGYEGFVGSHLVAKPFAHGXMSSEIEKFIPGXKSNLWDLVIKXRFEHMKMVIDGMLLSKMFYGKMKLECSGLERSSTYSNTRQTYKVFTWWLGLTCLALLREIGIGFSLLVLVDVSRXDPLEHPQKXTYWGNVNPIWXRSCYDEGKRTAETLXAMDYHRGAGVEVXRIARIFNTYGPRMCLDDGRVVSNFVAQAIRKXPLTVYGDGKQTRSFXYVSDLVXGLVALMESEHVGPFNLGNPGEFTMLELAQVVKETIDSSATIEYKPNTADDPHMRKPDISKAKELLNWEPKIPLREGLPLMVNDFRNRILNENEGKGMK

SEQ ID NO: 226330 - protein, 77 aa, Glycine max
  Clone ID: PAT_MRT3847_46405C.1.pep
KKYTRQGSRVLGLAYKSLAGMDSKSIMGVTLFQEPFSTVYSIMQRRTRIVVSSFLPCHVSYVKWVDLNMGNVWLFWL

SEQ ID NO: 226331 - protein, 79 aa, Glycine max
  Clone ID: PAT_MRT3847_46406C.1.pep
IVFFPPQSGGYQEPNQERFPFLNGAAFFFSPGLPTWKPGGGKFSPIVERPKTSQGFLENYPIKRCWNLKIFSNKKKHLL

SEQ ID NO: 226332 - protein, 93 aa, Glycine max
  Clone ID: PAT_MRT3847_46407C.1.pep
MLALRNITCVAAWDGAAGETRWLIYYTSNTFPTDIVPTVTDDLLLMCLLYGSIVNLGLPDTAGHEDHNILRPPSLRGAPAFILASSLIAKASH

SEQ ID NO: 226333 - protein, 129 aa, Glycine max
  unsure (1)..(129): unsure at all Xaa locations
  Clone ID: PAT_MRT3847_46408C.1.pep
IILDNHVETFVAVSTKVXMANGHAADKWDAVFYAEVTGDVYGNIDALGAALGMHLDKPRCYMECMKSGEGFVKLNHQCVEPLCWKXVDNISYVGHASGEMYDIXQALAKFIPINKSVFANLFSTTILSG

SEQ ID NO: 226334 - protein, 125 aa, Glycine max
  Clone ID: PAT_MRT3847_46409C.1.pep
MSTRPENIGIKAIEIYFPNQCVEQSELEKFDGVSTGKYTIGLAQTKMALCDDREDIYSLALTVTHSLLEKYSIDPNSIGRIEVGTETILDKSKSVKSVLMQLFPENKSIEGGDNVNACYCGTNAL

SEQ ID NO: 226335 - protein, 140 aa, Glycine max
  unsure (1)..(140): unsure at all Xaa locations
  Clone ID: PAT_MRT3847_4640C.1.pep
SNTPLEXXLXWLRKPKGXXIEKSXXXXXDXRXXXAGLHFIVVSWYFVWNVLRLGLETINLXXGKPVYEGPPKEGVEPILGVVSFSIPFKIVKEEKGWVIPVGCLSKPMKRFQRELACVFTPPLVHLSPIVPTFGFMVFPW

SEQ ID NO: 226336 - protein, 52 aa, Glycine max
  Clone ID: PAT_MRT3847_46410C.1.pep
YDSDWDEDKLRKSELWDGQLVVLAFFKLQAACPCARSSPCSEPKGHYHYSHF

SEQ ID NO: 226337 - protein, 73 aa, Glycine max
  Clone ID: PAT_MRT3847_46411C.1.pep
FRHWICPSFPFRQRYATFFCCSLFYFFVLYCCSDGCAYFKVVDFLRFHGYPFIIICDCTLQYMFIYIMRGVNV

SEQ ID NO: 226338 - protein, 74 aa, Glycine max
  unsure (1)..(74): unsure at all Xaa locations
  Clone ID: PAT_MRT3847_46412C.1.pep
MSLKNNMVVLKVCLXLRVLVGLTNARMELSFFKSDQSSTYDDHQYSGSCCDPCMSTRSIVPHCYSGDNKLHSCQ

SEQ ID NO: 226339 - protein, 140 aa, Glycine max
  unsure (1)..(140): unsure at all Xaa locations
  Clone ID: PAT_MRT3847_46413C.1.pep
RLRGDDRRAPVQSCSIVSPSSLPREKNSLRSLVSVQKPLHLSRVGFGDFVGSLVRRERGDFVTCDAYEADRSEVGGAPSKAAKKVKIGIYXATXXWVLNVVFNIYNKKVLNAFPYPWLTSTLSLACGSLINVXCWATKDS

SEQ ID NO: 226340 - protein, 57 aa, Glycine max
  Clone ID: PAT_MRT3847_46414C.1.pep
PTFFCILYFAAPPTTTPCQSPLCMVYEIVCSRSQTALRILALLMCTQWMPGKTMNEL

SEQ ID NO: 226341 - protein, 82 aa, Glycine max
  Clone ID: PAT_MRT3847_46415C.1.pep
HNPRLRRFLAFQPSSGLCSPSSVVYHTNVCHYYHLGLLNQGVNGNNHNNFVPIFESLPPTAAPAQPHSSSPSPPKYAALPPL

SEQ ID NO: 226342 - protein, 78 aa, Glycine max
  unsure (1)..(78): unsure at all Xaa locations
  Clone ID: PAT_MRT3847_46416C.1.pep
MHAYVXSEFXXKXXXKRXXXWKXSTXTXXXXXDLXTRVPWXKXLSXXXSXXCMQVPPGFQRPXISXGXSQHCVXLLSP

SEQ ID NO: 226343 - protein, 89 aa, Glycine max
  Clone ID: PAT_MRT3847_46417C.1.pep
SYLDRLQGPVTIIGIIIPSQPCPHRDTTTLLTGLLPNALTVPGLARTALTTFTTDTIPNTQLYMSPCPACYNIAKTTATHTMTNNLQAA

SEQ ID NO: 226344 - protein, 49 aa, Glycine max
  Clone ID: PAT_MRT3847_46418C.1.pep
ASCPWVPQTWPSLMQVLELQAESASDKPINTNFLCMLVKSLTLVNLSSM

SEQ ID NO: 226345 - protein, 59 aa, Glycine max
  Clone ID: PAT_MRT3847_46419C.1.pep
GYHAFSLVALCLKIKPFLVLYSLLVVDGEKRFSDLIMPLFFHNVRYHSFILVKILWQDV

SEQ ID NO: 226346 - protein, 44 aa, Glycine max
  Clone ID: PAT_MRT3847_4641C.1.pep
TYCISVPKLPPSHGIVLIFYAELTPPMYLACDIKHQLLTSVLKL

SEQ ID NO: 226347 - protein, 61 aa, Glycine max
  Clone ID: PAT_MRT3847_46420C.1.pep
RSHSHSTHASISQSNLIKLTPNIFIINQVVLLRNYTIHSKTQTYTSLSIIISTHTRLLCTS

SEQ ID NO: 226348 - protein, 41 aa, Glycine max
  Clone ID: PAT_MRT3847_46421C.1.pep
QVGALSLSPCTYLPTSLSIITMTYTTTSVSTLISELRFRFQ

SEQ ID NO: 226349 - protein, 49 aa, Glycine max
  Clone ID: PAT_MRT3847_46422C.1.pep
LVHKNQNLQVRFFTSMVKLGFYLIIINSTILYYHALVVSVSNKHNHNNH

SEQ ID NO: 226350 - protein, 55 aa, Glycine max
  Clone ID: PAT_MRT3847_46423C.1.pep
RVVNMLIISYSYAYQLQPARKRGRSGTMHLLDRRIEYGPGPGRRPDRDSARRLKA

SEQ ID NO: 226351 - protein, 36 aa, Glycine max
  Clone ID: PAT_MRT3847_46424C.1.pep
LCGNFVQVLHPNVMIQNLCVFLVGIQFLLEPLPRLH

SEQ ID NO: 226352 - protein, 330 aa, Glycine max
  Clone ID: PAT_MRT3847_46425C.1.pep
MKASLKFREEQKKPLLRAKVPLGILGMPFQSGIVAGESKELTLNLSTFFESGPSLKVAYRPNDSKNPFSFIVKTGTGPFGSPLKSSMLMSCEFNLPGTTGTPLFMLHFKPRFGDFTFKKTQSSIFDGKGFGSFNTQNDAVENGNNAETPLMESAKVSILDSGASMFSGMEVAARTTLPVRGRAAVKFRWGVRIPAEFKGNNAFQKIPFLVMDKIGVEHMMECGDSKEKGDAGEKPRVPASADVAEACFAVKRQMEVLQAENGLLRNAVEDLRREIVGVRTSSSVMGKSPNLRKNEKKTTSDYGNFPGKSTEAEASEKLKKALMGAAAGSS

SEQ ID NO: 226353 - protein, 95 aa, Glycine max
  unsure (1)..(95): unsure at all Xaa locations
  Clone ID: PAT_MRT3847_46426C.1.pep
MKASLKFREEQQKPLLRAKVPLGILGMPFQSGISAGESKEPTLNLSTFFXESGPSLKVAYRPXDSKNPFSFIGKTGTGPFGFPLKSLMLMSCEFN

SEQ ID NO: 226354 - protein, 42 aa, Glycine max
  Clone ID: PAT_MRT3847_46427C.1.pep
VCRSEFSCTIGPAFQTGVSVSKWVSSGLLNLEDFIMNSAHLT

SEQ ID NO: 226355 - protein, 54 aa, Glycine max
  Clone ID: PAT_MRT3847_46428C.1.pep
YAVPILCTALNLSSISLMLSLCCSPLLYSTSLMRRAVCSLSSSRLTVVRERITS

SEQ ID NO: 226356 - protein, 93 aa, Glycine max
  Clone ID: PAT_MRT3847_46429C.1.pep
KSETEREHFTEQNAANDYDDGGINNVEFEPAFSFSHSSSFPSFDIPKEDFGSSLHNHSVLDDKSSHHQLKRLPSLDDYSGFSYPNLFTPKKLK

SEQ ID NO: 226357 - protein, 89 aa, Glycine max
  unsure (1)..(89): unsure at all Xaa locations
  Clone ID: PAT_MRT3847_4642C.1.pep
LXSXIEAKINKATSCRXXHQPEYXASGSCPXSLVATQKXLXFXXLXXXNXXXRXXSMQDLWXLATASFKXNWXLIRFXCLXIXLVXPVS

SEQ ID NO: 226358 - protein, 207 aa, Glycine max
  Clone ID: PAT_MRT3847_46430C.1.pep
MLRCFLTCLRTYKRRNRLRSADEAQNHVGEGAVEELIDSIAESKTTNEEQLNKSVETKDDRKEEAPQIDETNKRSHQEESSESLFSLSISSRKKASDAEPEVNSPIRLVCTKEAFGSSPSVEERKPSENTKQPSFNAIKKEEETKELIKNEGEKEKANDPVTQYRYRDCPDDGYDDINLNVNDLDATLKDDDDDPPSEKKGEAGADV

SEQ ID NO: 226359 - protein, 191 aa, Glycine max
  Clone ID: PAT_MRT3847_46431C.1.pep
MRPGEKLYGFHEEPKKVIINGPRPSSLVINKDSHMIRKETKLQRPQRINPIIIYTESPKVIHTKAKDFMALVQRLTGRSSTNDNLSTTASLPQEGSENFGSSLSDGSNYNSNETSSALRRFGENLVESGAIIQHGPSHLDFVDMPLSTPNSSDFFCSSRSSVYKYSDSPYGVLGSLISPSGLEFMKELPEY

SEQ ID NO: 226360 - protein, 115 aa, Glycine max
  unsure (1)..(115): unsure at all Xaa locations
  Clone ID: PAT_MRT3847_46432C.1.pep
RAWPPLLHQSSFAGLSVLKQLNESVRKARRRRXGRTYLRRTVKSAPHSIWYGPDRPKYLGPFSEQIPTYLTGEFLGDYXWDTAGLSSDSETFVRNLXLLVIHSIWAMLGALGCTF

SEQ ID NO: 226361 - protein, 54 aa, Glycine max
  Clone ID: PAT_MRT3847_46433C.1.pep
LLFVPPVSKCTPSTFFGNSFSVTLRKFMNFVTILIFLPQGYESLRIMYLLFFSF

SEQ ID NO: 226362 - protein, 111 aa, Glycine max
  unsure (1)..(111): unsure at all Xaa locations
  Clone ID: PAT_MRT3847_46434C.1.pep
FGIKHNILMRLASYGCKITGVPCTWPAXETLKMKPNGVIFSNGPGDPSAVPYAIETGKNIIGNVPVIRMCMGHQLGGQALGGKTFKMKCGHHGGNHAVRNLRSGHVGMSAQ

SEQ ID NO: 226363 - protein, 48 aa, Glycine max
  unsure (1)..(48): unsure at all Xaa locations
  Clone ID: PAT_MRT3847_46435C.1.pep
AFSFERRALVSSSSSTTAPSXTYVTPTTXEPTTSGRSHLLEQRLGSER

SEQ ID NO: 226364 - protein, 64 aa, Glycine max
  unsure (1)..(64): unsure at all Xaa locations
  Clone ID: PAT_MRT3847_46436C.1.pep
EKHVFANDAAANEEATNDEAHRETEEPHSPXTPQRTKATRXAHGQTGXGKTXTXKPPPXKAPRD

SEQ ID NO: 226365 - protein, 102 aa, Glycine max
  unsure (1)..(102): unsure at all Xaa locations
  Clone ID: PAT_MRT3847_46437C.1.pep
LLAPNPCRATVSFPHEQKDSDQILEKQLVKLFNICHSKMENAVPRNASVRLVAFNLGCLPGGDKEIITRSETTLLALEAAXRILMPGGLISIVVYVGHPGGR

SEQ ID NO: 226366 - protein, 110 aa, Glycine max
  unsure (1)..(110): unsure at all Xaa locations
  Clone ID: PAT_MRT3847_46438C.1.pep
AVTFSHLYTQYGLNSLNQFLSGKSYISGDQLTKDDIKLCAAVXLKAXDSIPIAAEWYHAVSFQLATSFPGHALRVTHMGAAVPYEFAPVKAAATDEEYDHDLDLYGHHTE

SEQ ID NO: 226367 - protein, 187 aa, Glycine max
  Clone ID: PAT_MRT3847_46439C.1.pep
ESMECKGDHISHLSLHSKMHPICKESMPRDVKGIHGRTGFNQDKINSFIEPKAYQEMERMSPNPTINTADMEDMQGTTGFNQDWINATEKVIEPNADQEMKWMSLNATVTEDMEDIQARIGFNQDGINVAIEPKADPEKERMFPNPTTNTADMEYIQGKIGLNQNKIIVVKYSVSLSNLYTKTIIVT

SEQ ID NO: 226368 - protein, 88 aa, Glycine max
  unsure (1)..(88): unsure at all Xaa locations
  Clone ID: PAT_MRT3847_4643C.1.pep
QLLNACRPQLSIQSEHALIATWNNSNKPFPGAAFDLFRCPIGQCDLPXPGYINGPQEMYIQQGKGITGMRYTARSITFDESLHPQERG

SEQ ID NO: 226369 - protein, 72 aa, Glycine max
  Clone ID: PAT_MRT3847_46440C.1.pep
ISHLAQGCAVLYVYVIKRLSSHLIMQSYLFSYHPRPASASCPCLDASECVIDMCITPIVVYVLSPCKRRRIS

SEQ ID NO: 226370 - protein, 33 aa, Glycine max
  Clone ID: PAT_MRT3847_46441C.1.pep
NFPSITSHYLHKLPSFNNKFTYNCYHHTFNFLF

SEQ ID NO: 226371 - protein, 48 aa, Glycine max
  unsure (1)..(48): unsure at all Xaa locations
  Clone ID: PAT_MRT3847_46442C.1.pep
NIYWVTRCLLXCRKFRHSPLSNXECVNFIVHDNXSCRLEFLMFXKHFS

SEQ ID NO: 226372 - protein, 114 aa, Glycine max
  unsure (1)..(114): unsure at all Xaa locations
  Clone ID: PAT_MRT3847_46443C.1.pep
MPLQFITRLLITFPTIGTLCLGNAFLLRQRFILTCXAYLNLSALPSSTILIRHPIARFQRQSTDFNLSRXKVNNVKTELVKLHSQHIDKTPYHIESAIHCTKYFNPSEAIHYRI

SEQ ID NO: 226373 - protein, 263 aa, Glycine max
  Clone ID: PAT_MRT3847_46444C.1.pep
MTEGDRGCMQDTNQESGATLPGYGGCSSLAEKHGEKRVAEDDDDVREDNKKLREWVPSLVPKTGGGGYFLHSNPIEVKESSGEDEISHIDKVTIASDQGRLMSSGSQFTEGDRPFLQCSEEKPSLPSSFRTCDLNLIEASEVHENHVDHSTVPIDIDLTMSHASVSGKFNTHATNGKEIEVIDLENDDSIQEEKSINSMDRKTETMFPGLEGFSNHAQNAADMHDVQDGYGLMISELLGAQFPNCISEPEDRNSVHKGMELWR

SEQ ID NO: 226374 - protein, 78 aa, Glycine max
  Clone ID: PAT_MRT3847_46445C.1.pep
IIGQCRGFISPKLGDYLIPGGPQRSEQDLLRTVIGLFFNQLGHKSLREWQPEFGPANNCFGPQWHSVSSKRGLRGVIM

SEQ ID NO: 226375 - protein, 60 aa, Glycine max
  Clone ID: PAT_MRT3847_46446C.1.pep
FSSCLQFNSLANSYKHFDITLYRNSNSHHLNHDEPNFKIFVSKQRYEVSSRRACPTNPAT

SEQ ID NO: 226376 - protein, 96 aa, Glycine max
  unsure (1)..(96): unsure at all Xaa locations
  Clone ID: PAT_MRT3847_46447C.1.pep
NGDVTFVASNRGRXQCLQVWPPLXKKNLETFSQLXPNLLKLNRHXEIQYLLRKGWIPCLESEXSTEHXYREHSKPTXDYYGRYWTMRKLPMVTCTA

SEQ ID NO: 226377 - protein, 65 aa, Glycine max
  Clone ID: PAT_MRT3847_46448C.1.pep
CSPNLLLVHVIMISISVHHPHLTNTKNSLDLTRIFVYVTNIHITKSEADAFDMSLLLRQMKLQPE

SEQ ID NO: 226378 - protein, 327 aa, Glycine max
  unsure (1)..(327): unsure at all Xaa locations
  Clone ID: PAT_MRT3847_46449C.1.pep
MPDLPFQVGDLAESKCFPGGCRGVWVQCKSQDXIKMDQRPLTNIGKSKGSNKGLMLRPSFPTLSYESEKLDVNTISEVIVIVNNIWKVGDLVDWFADGCYWSGSVTKILGNDKVQIDLLPPPMGEGLSYDALSKDLRPSLDWCPEEGWTVPVPMPMLQGGECRQPCARIMNPANSDGTVKVGQHMARTVSSPLSLNLKDCPERSTARRKQCNNARNDMEIDESGSKVESVCFSSNVSNPHIMDASIENSEKATINGGYNEYPTKKRSDRSLCLNSMSSNTVEAAIIDLEELVNRIKWLRDVLNLRVPPLSYTKQPSWEFSQHHAPCK

SEQ ID NO: 226379 - protein, 82 aa, Glycine max
  Clone ID: PAT_MRT3847_4644C.1.pep
CQMSNTMESRIGVPDDRNEGTVQRLMDVPQHRCEGLGTQQALSCDNDAKSKTSMPCMWRGNQRVDHNRCGSYLLNEKLTNCS

SEQ ID NO: 226380 - protein, 82 aa, Glycine max
  Clone ID: PAT_MRT3847_46450C.1.pep
ASVQHSERPLRGTGVRPLSADSLCVAPDRSTSTSSYMPRQISRVGVSYFLVTARHFNISGLRKSCSYSTSSRFGTAPFPQLC

SEQ ID NO: 226381 - protein, 82 aa, Glycine max
  unsure (1)..(82): unsure at all Xaa locations
  Clone ID: PAT_MRT3847_46451C.1.pep
XHQXXGXREXAXRIXRLRXXFLXAXKASXXGKGTXXTRXXXSDQXXSSRXHXDKXLKXVXRXXXECXXASXXLFXXXXLXHV

SEQ ID NO: 226382 - protein, 53 aa, Glycine max
  unsure (1)..(53): unsure at all Xaa locations
  Clone ID: PAT_MRT3847_46452C.1.pep
VLTTITSYYICFTLLXECXKVPRVHPSLSRLPGLIDIWDPMHDWICDNLLACG

SEQ ID NO: 226383 - protein, 206 aa, Glycine max
  Clone ID: PAT_MRT3847_46453C.1.pep
MVSGSGICAKRVVVDARHHMLGRLASIVAKELLNGQKVVVVRCEEICISGGLVRQKMKYLRFLRKRMNTKPSHGPIHFRAPSKIFWRTVRGMIPHKTKRGEAALARLKVYEGIPPPYDKTKRMVVPDALKVLRLQKGHKYCVLGRLSSEVGWSYYDTIRELEKKRKEKAAVVYERKKQLNKLRVKAEKVAEEKLGSQLDVLAPVKY

SEQ ID NO: 226384 - protein, 85 aa, Glycine max
  unsure (1)..(85): unsure at all Xaa locations
  Clone ID: PAT_MRT3847_46454C.1.pep
MSRSGPLVSPPFVLLLLLGAPEIMGPPMVAKPRPFXFQTPPFKGPCFSAPPCGFFFPPQRFPGGPPRGLPPKCFCPHPCFFLKIN

SEQ ID NO: 226385 - protein, 83 aa, Glycine max
  Clone ID: PAT_MRT3847_46455C.1.pep
SSAFLLLIPSLAAITLDLVGFSVVLYCPPVLPGARLPSWLVSFSVPLPLCSDDTLFSGGLFPCLFVLVLAHLIEFSSEHIYLV

SEQ ID NO: 226386 - protein, 67 aa, Glycine max
  Clone ID: PAT_MRT3847_46456C.1.pep
NSIYMPFHSNQGKFKKRWNQLSVPYNLWIRSKLYYQVFLHVMRNCLCSNMSNRVLVHHILIEGHPLL

SEQ ID NO: 226387 - protein, 75 aa, Glycine max
  Clone ID: PAT_MRT3847_46457C.1.pep
GINQVWALGPMGGVVTWARSVPSGFRFGSVLRRCGGTCSSYLVNLPSAVGEMWFPVRFSRVPSTAPLADVPVTVM

SEQ ID NO: 226388 - protein, 441 aa, Glycine max
  Clone ID: PAT_MRT3847_46458C.1.pep
MSQPKIKRRVGKYEVGRTIGEGTFAKVKFARNSETGDPVALKILDKEKVLKHKMAEQIRREVATMKLIKHPNVVRLCEVMGSKTKIYIVLEFVTGGELFDKIVNHGRMSENEARRYFQQLINAVDYCHSRGVYHRDLKPENLLLDAYGNLKVSDFGLSALSQQVRDDGLLHTTCGTPNYVAPEVLNDRGYDGVTADLWSCGVILFVLVAGYLPFDDPNLMNLYKKISVAEFTCPPWLSFSARKLITRILDPDPTTRITIPEILDDEWFKKDYKPPVFEENGETNLDDVEAVFKDSEEHHVTEKKEEQPTAMNAFELISMSKGLNLENLFDTEQGFKRETRFTSKSPADEIINKIEEAAKPLGFDVQKKNYKMRLANVKAGRKGNLNVATEIFQVAPSLHMVEVRKAKGDTLEFHKFYKKLSTSLDDVVWKTEDDMQMRETK

SEQ ID NO: 226389 - protein, 31 aa, Glycine max
  Clone ID: PAT_MRT3847_46459C.1.pep
KRYHSNRLLNTFLTCIIPRMHIQHMLSWSRT

SEQ ID NO: 226390 - protein, 42 aa, Glycine max
  unsure (1)..(42): unsure at all Xaa locations
  Clone ID: PAT_MRT3847_4645C.1.pep
VSRAKTIRGFKFFLSGKLDEGSEQAFYSVXNIEAATAKAANL

SEQ ID NO: 226391 - protein, 97 aa, Glycine max
  Clone ID: PAT_MRT3847_46460C.1.pep
MATEEPTGAGEPAPEPATAEPPPEEKEETKPEAKAKKTKEPKPKKGARPRNPPTHPNYEETGKEATTSLKEKTGSSQHANAKNTEEKHTQRPPNRKK

SEQ ID NO: 226392 - protein, 47 aa, Glycine max
  Clone ID: PAT_MRT3847_46461C.1.pep
MSQPKIKRRVGKYEVGRTIGEGTFAKVKFARNSETGDPVALKILDKE

SEQ ID NO: 226393 - protein, 204 aa, Glycine max
  Clone ID: PAT_MRT3847_46462C.1.pep
ASSISGIVIRVVGSGSKIRITIPEILDDEWFKKDYKPPVFEENGETNLDDVEAVFKDSEEHHVTEKKEEQPTAMNAFELISMSKGLNLENLFDTEQGFKRETRFTSKSPADEIINKIEEAAKPLGFDVQKKNYKMRLANVKAGRKGNLNVATEIFQVAPSLHMVEVRKAKGDTLEFHKFYKKLSTSLDDVVWKTEDDMQMRETK

SEQ ID NO: 226394 - protein, 441 aa, Glycine max
  Clone ID: PAT_MRT3847_46463C.1.pep
MSQPKIKRRVGKYEVGRTIGEGTFAKVKFARNSETGEPVALKILDKEKVLKHKMAEQIRREVATMKLIKHPNVVRLYEVMGSKTKIYIVLEFVTGGELFDKIVNHGRMSENEARRYFQQLINAVDYCHSRGVYHRDLKPENLLLDTYGNLKVSDFGLSALSQQVRDDGLLHTTCGTPNYVAPEVLNDRGYDGATADLWSCGVILFVLVAGYLPFDDPNLMNLYKKISAAEFTCPPWLSFTARKLITRILDPDPTTRITIPEILDDEWFKKEYKPPIFEENGEINLDDVEAVFKDSEEHHVTEKKEEQPTAMNAFELISMSKGLNLENLFDTEQGFKRETRFTSKSPADEIINKIEEAAKPLGFDVQKKNYKMRLANVKAGRKGNLNVATEIFQVAPSLHMVEVRKAKGDTLEFHKFYKKLSTSLDDVVWKTEDDMQMRETK

SEQ ID NO: 226395 - protein, 68 aa, Glycine max
  Clone ID: PAT_MRT3847_46464C.1.pep
VQTWKNLKGGAQKNKERMSKEKSKYVSISAMKRLNILICQKEKKIQNNGNFLGNGMQLDMSNINYQGF

SEQ ID NO: 226396 - protein, 47 aa, Glycine max
  Clone ID: PAT_MRT3847_46465C.1.pep
CFLFEFGYISYNILYRLVDVIVFILIISWETRCHQKKKKNTSRNKKK

SEQ ID NO: 226397 - protein, 220 aa, Glycine max
  Clone ID: PAT_MRT3847_46466C.1.pep
MAVVDDRFADLNPKTCVVLGGRGFLGRSLVLRLLKLGNWIVRVADSAQSLQLHHSESLLEQALSSSRASYFHVDLLDKRSIVKVLEGSSVVFYMDVAGVDVNNFYTCYKLMVQGAKNVISACRECRVRRLIYNSSADVVVGGLHDIRDGDESLAYPWETNNTLSDLKAQAEALILSANDIDGLLTCSLRPRNVFGPGDTEFVPYFLKLARYGFSKVIIGD

SEQ ID NO: 226398 - protein, 68 aa, Glycine max
  Clone ID: PAT_MRT3847_46467C.1.pep
TNNGIWTLECSAPLPPEFPETIVFELPSPFPVPAPSVCPKLVKKTMSYIIYIYLQYYICVCCYFFVQQ

SEQ ID NO: 226399 - protein, 34 aa, Glycine max
  Clone ID: PAT_MRT3847_46468C.1.pep
YRRAYTSERATVGDTSRLYIVDRHVSNYAAINNM

SEQ ID NO: 226400 - protein, 122 aa, Glycine max
  Clone ID: PAT_MRT3847_46469C.1.pep
TRPAVASNHHQQPLQSQPPYKQSNQTQSNVQRMLQQNCQVQSESSSMSQSDSPKVDQHPANRASQFSTNTAMSPVCMDAASVTVVPPSASSQWKTSESPFDSNVPNPVIQASSLGSTPVGNS

SEQ ID NO: 226401 - protein, 338 aa, Glycine max
  Clone ID: PAT_MRT3847_4646C.1.pep
MITWNLLHARISCTHARIALLLFLHFLLLWVKEVAPGSPEYSACDMGYLNSVLSSSSQVHAAEDSPVSGGGLSQNGKFSYGYASSPGKRSSMEDFYETKIDGVDGEIVGLFGVFDGHGGARAAEYVKQNLFSNLISHPKFISDTKSAIADAYNHTDSEFLKSENNQNRDAGSTASTAILVGDRLLVANVGDSRAVICRGGNAIAVSRDHKPDQTDERRRIEDAGGFVMWAGTWRVGGVLAVSRAFGDRLLKQYVVADPEIQEEKVDSSLEFLILASDGLWDVVSNEEAVAMIKPIEDAEEAAKRLMQEAYQRGSSDNITCVVVRFLSNQGASSHSNSG

SEQ ID NO: 226402 - protein, 52 aa, Glycine max
  Clone ID: PAT_MRT3847_46470C.1.pep
MKCAETIITRRGRFRMRKVMSDDSSKDLILRMDERLRSSGDGGGGGDGCEFE

SEQ ID NO: 226403 - protein, 56 aa, Glycine max
  Clone ID: PAT_MRT3847_46471C.1.pep
LSKSVRKSWRQTPISIYEADGRISRRTSLRHGIVVGRCTQTYFQGPIIIRTFQGAG

SEQ ID NO: 226404 - protein, 60 aa, Glycine max
  Clone ID: PAT_MRT3847_46472C.1.pep
PKIKCGKKISHHDHDVKVINKEGCENVSYQGSSGVEVMIVASHVIGVVISNGLHHTLMKM

SEQ ID NO: 226405 - protein, 80 aa, Glycine max
  unsure (1)..(80): unsure at all Xaa locations
  Clone ID: PAT_MRT3847_46473C.1.pep
VNFKSHLPEWVSVGFSPPPGQQEGSVHPHDAISWSFASPLSPGSKNYXLDLPSFVLNPPLKEETSLFNVPKEKCNIPLTC

SEQ ID NO: 226406 - protein, 107 aa, Glycine max
  Clone ID: PAT_MRT3847_46474C.1.pep
RTHQDSGAVGVPITTRIRFPLRYHRLFLISRLHLFLSSYLLLSALVSWSASFFCLSYLQYYPYYIQFTSHSTGVSSPSLYYILVVSPPPPQRRRTSYSDDGKPSLER

SEQ ID NO: 226407 - protein, 73 aa, Glycine max
  Clone ID: PAT_MRT3847_46475C.1.pep
KKYYIFFFFFFYLYFFFFFFPNNEQLPLITSIFFKRLKEGFALNFGCNMKETFATDKDAFKPNAWTDAWANAW

SEQ ID NO: 226408 - protein, 97 aa, Glycine max
  unsure (1)..(97): unsure at all Xaa locations
  Clone ID: PAT_MRT3847_46476C.1.pep
APLFPRLQDGNNSDRASFKRRKTPHTXRLTPETENEGHPDKLCDQRSDAVLDAWLEQDPDSKVACETCTKTNLVMVPRENNTQAIVDYQTIARDTCR

SEQ ID NO: 226409 - protein, 53 aa, Glycine max
  unsure (1)..(53): unsure at all Xaa locations
  Clone ID: PAT_MRT3847_46477C.1.pep
FSSPAVTTVNRAGAXMVVPLTGLKSMAGFPTRKTNIDFTSMVSTGERVQCMQV

SEQ ID NO: 226410 - protein, 74 aa, Glycine max
  Clone ID: PAT_MRT3847_46478C.1.pep
KRFFSFFFFPYFQKEAILIFAHIIKTILLVLGIPPFPTGIFNLFLLEVHYLAGPSSPYNVLDGVKNSSPRKCAS

SEQ ID NO: 226411 - protein, 65 aa, Glycine max
  Clone ID: PAT_MRT3847_46479C.1.pep
DMLVGFSGQCYPNNTFDLVPSMIYTTYNYKLCCNSHFRKVISKKKDFIEERISVENLQFAKAPTS

SEQ ID NO: 226412 - protein, 338 aa, Glycine max; identical to SEQ ID NO: 226401
  Clone ID: PAT_MRT3847_4647C.1.pep

SEQ ID NO: 226413 - protein, 79 aa, Glycine max
  unsure (1)..(79): unsure at all Xaa locations
  Clone ID: PAT_MRT3847_46480C.1.pep
IKFTFCVSLNLDCSWANVTYITIFRVAPPEPQSLPPLDSSLPSTTSLSILRERGSYSVTSTRIPPAFXLASFGRQKQQA

SEQ ID NO: 226414 - protein, 57 aa, Glycine max
  unsure (1)..(57): unsure at all Xaa locations
  Clone ID: PAT_MRT3847_46481C.1.pep
MAIEVDQIHTHELRFPFWKPFRRTFGPXSTVFAHVNLQRELIVNQLALELTEEKRSS

SEQ ID NO: 226415 - protein, 489 aa, Glycine max
  Clone ID: PAT_MRT3847_46482C.1.pep
MGSCFSAESRSPHPNSPNSSSFRKSKSNSKKRLGSRTSSFEYWRNEPLHRIPGRIFLNGSSQVASLFTQQGKKATNQDAMVVWENFCSRQDTIFCGVFDGHGPYGHMVAKRVRDSLPLKLNVHWEQSASGEEVLKEISVNTAGSMNSEEAAFASADDESRVSVDAEETEKHPEIFQTLKDSFLKAFKVMDRELKMHQSIDCFCSGTTAVTLVKQGRDLIIGNVGDSRAVLGTREKDNSLVAIQLTVDLKPNLPAEEERIRKCKGRVFALQDEPEVARVWLPNNDSPGLAMARAFGDFCLKDFGLISVPEVSYRRLTEKDEFVVMATDGIWDVLSNKEVVDIVAAAPRRALAARALVESAVRSWRYKYPTSKVDDCAVVCLFLDSDSDSHKVCSASNVIKSKEQPSSGIQVHNGDNGDVPAPTGLARSGTCRENNEDNNNNHNHNHKEEEIDTDAEIEWSALEGVSRVNTLLNLPRFEPDNKDKGMRKHK

SEQ ID NO: 226416 - protein, 90 aa, Glycine max
  unsure (1)..(90): unsure at all Xaa locations
  Clone ID: PAT_MRT3847_46483C.1.pep
ISPCWPGWSQTPDLKXSAPLGFPKCWDCRRESLRPAIPCLLSLRISPSSLQVSAVVVPSKLSHTLLRGPFVYLLQLPQSPQTQASIKVPH

SEQ ID NO: 226417 - protein, 70 aa, Glycine max
  unsure (1)..(70): unsure at all Xaa locations
  Clone ID: PAT_MRT3847_46484C.1.pep
DEELGGPDYYGPGEALCGACGEPXGPEEIWICWDICEKWFHGKSVKIPPGRAEPIQPFKGPFFSNKKGRP

SEQ ID NO: 226418 - protein, 164 aa, Glycine max
  Clone ID: PAT_MRT3847_46485C.1.pep
CIDGSRYVGEFKWGVKHGLGQYHFRNGDIYAGEYFADKMHGFGVYQFQNGHRYEGAWHEGRRQGLGMYTFRNGETQCGHWQNGILDDPKRHNSPTGSPCAVDHAKVFNAVQDAHSAAEKAYNMAKVDDGVNKVVAAANKAANTARDAAVKAVQNRMHHNNSNNK

SEQ ID NO: 226419 - protein, 87 aa, Glycine max
  Clone ID: PAT_MRT3847_46486C.1.pep
GSNYPLYFTQSSHNHAHLIRQSRFKTLPTVLLSVYTASHPPIHLTSIPLTTETLKYNLQQNNQSDSLTVYSNYIPNHYEYTTVCKTL

SEQ ID NO: 226420 - protein, 71 aa, Glycine max
  Clone ID: PAT_MRT3847_46487C.1.pep
KTKAFSILASCNPSTMASGRPFITAFLLPVTFSSMSLSLASSRHLLQTTTSPNLPGNPTLGNPSSLSPFAI

SEQ ID NO: 226421 - protein, 263 aa, Glycine max
  unsure (1)..(263): unsure at all Xaa locations
  Clone ID: PAT_MRT3847_46488C.1.pep
MNSMASLSSHVFFKQIVVQLLSLAEERETILLDNVDMDEMDKNGALLFVGEMFSRICRRGSADLLTSELIPEVFRLVNSLLSSHNDSVTNELFESKPDTVFWSRIMETISDPYTVERISELILHKLATQDADDVQAYWVLWLLFHRIFKLQPSVRSMFVDKFLLWKVFPISCLKWILQFAVHECPPGTSLLGHNRPELLNTVQHLLAVWXKKEFVQTAPIEQQAYISAXXGLXXETMYKEELDGMKNAMHFILQGVSCNYHCW

SEQ ID NO: 226422 - protein, 71 aa, Glycine max
  Clone ID: PAT_MRT3847_46489C.1.pep
VQSFIKNIDTIGGWLQSQNTNLQKDDFVDTEYDRWTITEIDNHQIIWVNLNYEFNSGRPSVNEEQEDDERD

SEQ ID NO: 226423 - protein, 123 aa, Glycine max
  unsure (1)..(123): unsure at all Xaa locations
  Clone ID: PAT_MRT3847_4648C.1.pep
PNTXGGGVLNMISRFYPPSTTTNGDFAQGKQLARVKANVACAAAGLTSSYTPTPLSEPGLQKDRGLTAEYLGRRAHVAHNVNPPQEKDQLEGKLPEDMKXSAPRLEKGSLTKAQSVSGKTLKN

SEQ ID NO: 226424 - protein, 77 aa, Glycine max
  Clone ID: PAT_MRT3847_46490C.1.pep
LIQQTTSHHTITKRTQSMCRFKWLWDPNPSLTRSLKTTPYGNKVARLITHKNRITQGSIAHPRYKPNHPKYYIQFKN

SEQ ID NO: 226425 - protein, 81 aa, Glycine max
  Clone ID: PAT_MRT3847_46491C.1.pep
LTDSVLDRRLFSRDSTRLHVGIHSPHYDQPGVPGVAAGSTGHVGDWYRTGGTADRAHGVPHCAHLYCAQLAAERATHRKIT

SEQ ID NO: 226426 - protein, 126 aa, Glycine max
  Clone ID: PAT_MRT3847_46492C.1.pep
MAEVSGEGVAEATVSTPAPPLAVSGSFKEGKSSSRRRAHSMRPSLDADEFMNLLHGSDPVKVELNRLENEVRDKDRELSEAQAEIKALRLSERLREKAVEELTEELSRVEGKLKLTESLLESKNLE

SEQ ID NO: 226427 - protein, 587 aa, Glycine max
  unsure (1)..(587): unsure at all Xaa locations
  Clone ID: PAT_MRT3847_46493C.1.pep
MAEVSGEGGAEATVATPVLPLAVSGSFKEGKSSSRRRAHSMRPSLDADEFMNLLHGSDPVKVELNRLENEVRDKDRELSEAQAEIKALRLSERLREKAVEELTEELSRVEGKLKLTESLLESKNLEIKKINDEKKASMAAQFAAEATLRRVHAAQKDDDMPPIEAILAPLEAELKLARQEIAKLQDDNKALDRLTKSKEAALIEAEKTVQIALAKASMVDDLQNKNQELIKQIEICQEENKILDKMHRLKVAEVEKLTQTVRELEEAVLAGGAAANAVRDYQRKFQEMNEERKTLDRELARAKVTANRVAVVVANEWKDANDKVMPVKQWLEERRFLQGEMQQLRDKLAITERTAKSEAQLKEKYQLRLKVLQESLRETSNSINRGTSEGRCVSNGPSRRQSLGGADNISKLTSNGFLKRSPSTQIRSSVSSSTVLKHAKGTSKSFDGGTRSLERSKILLNGKPPSYSFNQSAEGTKVREENDKWKGNSDDKPNDFPTVDTDDSDAGVLYDLLQEDALALRKDGDEKDQNLKDKXDAIEVVAKHVGKKDESRGKWCNNKKKSVSIAEQQRISETNVKRGGLTSKPSQ

SEQ ID NO: 226428 - protein, 88 aa, Glycine max
  unsure (1)..(88): unsure at all Xaa locations
  Clone ID: PAT_MRT3847_46494C.1.pep
SVLALTNHRXPLLCVFLRXTKFDFXFSLFIFFSSNSDTFYAGHSVSLSFXFXXSXFLSFTYPXSIISQSVSTFXLVCSXHRLLXXVXT

SEQ ID NO: 226429 - protein, 82 aa, Glycine max
  Clone ID: PAT_MRT3847_46495C.1.pep
YKMCVYVCMHSCVYQREIKFKQLLEEIISKTEEVKDLKVKIIDILVFILRLVSLYICFNKFNIYIHASDRHHNLLRRSSIYA

SEQ ID NO: 226430 - protein, 40 aa, Glycine max
  Clone ID: PAT_MRT3847_46496C.1.pep
SDVSHSVFGIVAMTVWIVSIVSTKRILVLPFRVLTEDLQM

SEQ ID NO: 226431 - protein, 165 aa, Glycine max
  unsure (1)..(165): unsure at all Xaa locations
  Clone ID: PAT_MRT3847_46497C.1.pep
SNSLEEFPVNVTDNELINKLSSENEHLKELINSLEKKTIQEFPVNVTDNEVSSQLITENEHLKDQVNSLERKIDEAERKYEESNRVSDERMNQIIXTESKMIEIKTNVHRLEEKLSDMETENQVLRQQALLSSSSKRMSGKLAPATTPTLENGHQASQGSVPAKT

SEQ ID NO: 226432 - protein, 112 aa, Glycine max
  Clone ID: PAT_MRT3847_46498C.1.pep
STLPRFSFTSIEGYKQNGIQGDRSKIYATSLILTLQIQHFKNKFKTHDLSFYAGLSEPDKCVEHKLWTKTEGEKRSTRSPRSRRRERQREKEKKNKGLVKLHPTGVFPLKYE

SEQ ID NO: 226433 - protein, 119 aa, Glycine max
  Clone ID: PAT_MRT3847_46499C.1.pep
EFLVDHSLTPICFLLPNIMDLDFRRASTIHSTNHHFSSLQPSRLHSDDDDDARSLLQCPSCDFEIDFSSAHTHLEEMHCYDPKNLLCPVCDETLGEEAIWVAQNSSAQKRAWKSDKSSI

SEQ ID NO: 226434 - protein, 42 aa, Glycine max
  Clone ID: PAT_MRT3847_4649C.1.pep
HCILFPFQGLNLICWKYARVLDSRWDLSKKFTLKGDGHGNPL

SEQ ID NO: 226435 - protein, 174 aa, Glycine max
  Clone ID: PAT_MRT3847_464C.1.pep
MKQFAVQNVVVPSHDEISVVCPKPRRLGLFNFPVNDPTVRPFRWHLSYHVEPCDSNSSGSNPLDNLLTKDGDFDVEQSWPVVAPSPLFFSGSPPSRAANPLIQDARFGDENFSPLSPPSWVVVPAVSGLPPSPSSSARKGGCVRANFGNNPVVRIEGFDCLDRDRRNCSIPALA

SEQ ID NO: 226436 - protein, 56 aa, Glycine max
  unsure (1)..(56): unsure at all Xaa locations
  Clone ID: PAT_MRT3847_46500C.1.pep
XXXXEHXXXXGSXXQLEXXXXXXXXNNLRIQRLHEVVVFEEENGRGRFFRDNKLFR

SEQ ID NO: 226437 - protein, 86 aa, Glycine max
  Clone ID: PAT_MRT3847_46501C.1.pep
LFLSLILNPVTTSYGLGSFSLYPNRTTIVKKKKQNTFILSLSYFLYCNAFYSLSYNIFLHSRSLTRRRLFQINRRRRPIHSLSVAF

SEQ ID NO: 226438 - protein, 38 aa, Glycine max
  Clone ID: PAT_MRT3847_46502C.1.pep
GITHAPFTCITTITFIYCFNRSNSDLCFRSLLGRGLKQ

SEQ ID NO: 226439 - protein, 71 aa, Glycine max
  unsure (1)..(71): unsure at all Xaa locations
  Clone ID: PAT_MRT3847_46503C.1.pep
RAESARDSQHQHSVTSISSTTDNNFGNPLAMTAVVVVPLGLLFFASGLIVNLIQAICYVVVRXVSKNLYRR

SEQ ID NO: 226440 - protein, 88 aa, Glycine max
  Clone ID: PAT_MRT3847_46504C.1.pep
NPYLFQEVTKDCETGRGLCRGRNLASNALVTLDPFIPHPQIYMINCLLNLFALYTSISVFLQFVLVFYRYAIPFLSSLKIGFFLYSSS

SEQ ID NO: 226441 - protein, 144 aa, Glycine max
  Clone ID: PAT_MRT3847_46505C.1.pep
MSLIPSLLSNRNIMDPFSTNIWAPSDSDSEVSAFVNARVDWKETPESHVFKADLPGLKKEEVKVEVEEGRVLNISGERSVEKEDKNEKWHRVERGRGKFQRKFWLPEDAKVDEVKASMENGVLTVIVPKVPDKKPEVKTIEISG

SEQ ID NO: 226442 - protein, 68 aa, Glycine max
  Clone ID: PAT_MRT3847_46506C.1.pep
SSLFRSDLFLQGTQDLVYVTILNHSRVVMQIVSFRTSSEDKDPAANTSYGEEYPLAPSDILEATVFTI

SEQ ID NO: 226443 - protein, 113 aa, Glycine max
  unsure (1)..(113): unsure at all Xaa locations
  Clone ID: PAT_MRT3847_46507C.1.pep
RDKLSCQVGINPYSMEWTGWANTLLRKGNNILXCDYSSFDGLITMQDMSKMADMINSFCGGDEKLMLERTHLLLACCSRMVFCXKDVRRVXCGISSGFPLTXICNSILNEMSI

SEQ ID NO: 226444 - protein, 52 aa, Glycine max
  Clone ID: PAT_MRT3847_46508C.1.pep
LDRCHHHSTGLETRVHLMFTIPSRSTSLQQQQHACGPRFSFQPIASTIECCS

SEQ ID NO: 226445 - protein, 60 aa, Glycine max
  Clone ID: PAT_MRT3847_46509C.1.pep
GFCLLRTLRCFTGFNQIIYILKCISEYSFSDITWCCRVSASVMSSCFSRLCKSLKLSGSR

SEQ ID NO: 226446 - protein, 63 aa, Glycine max
  Clone ID: PAT_MRT3847_4650C.1.pep
QCRLAVNDSSNFHALCNKDLSHLGLIIFKAYMKSEKRINAYDAGPIAPQRLRGEPTIPAEREP

SEQ ID NO: 226447 - protein, 96 aa, Glycine max
  unsure (1)..(96): unsure at all Xaa locations
  Clone ID: PAT_MRT3847_46510C.1.pep
MASVALKPAPFTVEKSSDRGLPSLSRNSSSFIVVASGGKKIKLTSLSELSGASLRRKXIDASGKNRRERALPVCDKYGAXVDGYRXIYYTKDWSPP

SEQ ID NO: 226448 - protein, 68 aa, Glycine max
  Clone ID: PAT_MRT3847_46511C.1.pep
NSQHNFVVFLPFLSKACVFLLRLHLLLRKIDSFLILPYISSLKLVLILYLHISIFLFNVYFLSHFSLF

SEQ ID NO: 226449 - protein, 53 aa, Glycine max
  Clone ID: PAT_MRT3847_46512C.1.pep
TPFSFRTSCPLTPKCKSGKKVGSSKIVDLPLPPKWELPPSSYYVPFFPIIEIP

SEQ ID NO: 226450 - protein, 113 aa, Glycine max
  unsure (1)..(113): unsure at all Xaa locations
  Clone ID: PAT_MRT3847_46513C.1.pep
RDVPDTGSLSLVVLGASLDLALNLTFPLLFHLYPHGFLPSAVVHIFGYARTQISVDALXDPLRVYLVPHSRASLPLLEDVYTCLQLIAYVCGSLDSVDGFLLLHKEISQREYM

SEQ ID NO: 226451 - protein, 127 aa, Glycine max
  Clone ID: PAT_MRT3847_46514C.1.pep
YLIISFWIPNFLNPKLLKAFRERRDFLVKSFREIDGVKISEPQGAFYLFLDFSFYYGREAEGFGKIEDSESLCRYLLDVGQVALVPGSAFGDDTCIRISYAESLTTLQAAVERVKRALIPLSSAALV

SEQ ID NO: 226452 - protein, 112 aa, Glycine max
  Clone ID: PAT_MRT3847_46515C.1.pep
HPNPSSPSQLEKKKKKKKKKKRRFKRTKLNFPFLPTYKPFNGVTKFNLMGRRLKTSDREKPWGTQIKRLGRKSPFVKLGKYQKGPNEWPFQKLGNPNWQLEHPLNGAINPAG

SEQ ID NO: 226453 - protein, 445 aa, Glycine max
  unsure (1)..(445): unsure at all Xaa locations
  Clone ID: PAT_MRT3847_46516C.1.pep
MANTLYNGATCRIPLRDESLAFSRHVSRSLSFLLKTRAGKQSYAFAVKASSHSDFDVDLSLSPRVNAVKPSKTVAISDHATALFQAGVPVIRLAAGEPDFDTPAPIAEAGINAIREGYTRYTPNAGTMELRQAICRKLKEENGISYTPDQVVVSNGAKQSIAQAVLAVCSPGDEVIIPAPFWVSYPEMARLADATPVILPTLISDNFLLDPKLLESKITERSRLLILCSPSNPTGSVYPKELLEEIARIVAKHPRLLVLSDEIYEHIIYAPATHTSFASLPGMWDRTLTVNGFSKAFAMTGWRLGYIAGPKHFVAACGKIQSQFTSGASSIAQKAAVAALGLGHAGGEAVSTMVKAFRERRDFLVKSFREIDGVKISEPQGAFYLFLDFSFYYGREDDGFGNIVDSLPGPVVXLKEVQVLLLAWSMLGDDTCIPISNPLGSESIY

SEQ ID NO: 226454 - protein, 311 aa, Glycine max
  unsure (1)..(311): unsure at all Xaa locations
  Clone ID: PAT_MRT3847_46517C.1.pep
MNKNGVIPSWMKQQWRGIVKVRLKWVKNRSLDHVIDKETDLKAACLLKDAVNRSSTGFLTAQSVADWQKLLGLTVPVLRFLRRYPTLFHEFPHPRWPSLPCFRLTDTALFLHSQELSLHQTHQNGAVEKLSKLLMMSNSRALPLHSLHALKWDLGLPDTFHKTLVPQFPNHFQFVKSPNGVVSLKLSRWPDELAVSALQKHNEGGTHYREFKRGQSALAFPMRFPRGYGAQTKVRTWMEEFQKLPYVSPYVDSTKIDPNSDLMEKRVVGVLHEILSLTLHKKTKRNYLRGLREEFNLPHKFXRIFTRYPGI

SEQ ID NO: 226455 - protein, 92 aa, Glycine max
  Clone ID: PAT_MRT3847_46518C.1.pep
FPVGFPAPFPSWRFGEVARFAPPSHWGRAPIGGWAPPCGGPLGAGVVAWSRGVTATVARALPPAPVAFVPSFPALFAGSPRDVFSGGLFFGS

SEQ ID NO: 226456 - protein, 86 aa, Glycine max
  Clone ID: PAT_MRT3847_46519C.1.pep
YLFGKKIFNRGLEPGFFVNPFVKDLGICFKEGPKMGNALPGLALAQQLYVSLRAPGEGNLGPPALILGPERPHKGTLPPPPQTWNF

SEQ ID NO: 226457 - protein, 87 aa, Glycine max
  Clone ID: PAT_MRT3847_4651C.1.pep
AKNDTPTKKLTPNRRHGIGVGIGVGRSSAGRRSKEAKALATTQQQTPNGMGHRASGAFQHTGHCPTLPRVRGTSSGPNMLRQQPPFD

SEQ ID NO: 226458 - protein, 108 aa, Glycine max
  unsure (1)..(108): unsure at all Xaa locations
  Clone ID: PAT_MRT3847_46520C.1.pep
TPPGFRFYLTDXELVNHYLRRKCADQPISVPIIKXVDLYKIYSWHLPQIDYYCXKEWYFFSSRDQKYSNGSRPXNRAILSGYWXKLTRADKPXGNTKALGIQXALVFY

SEQ ID NO: 226459 - protein, 438 aa, Glycine max
  unsure (1)..(438): unsure at all Xaa locations
  Clone ID: PAT_MRT3847_46521C.1.pep
TIWLREEYRRADDVWHEIGGSFRIEKQPSKVMVYVQGPASGVDLMVAGLQIFPXRHTRFRYLKIQTDXIRKRDVILKFSGLDSGSYANTLKLXQTHNDFPIGTCISRTNIDNEDFVNFIVKHFNWAVFGNELKWYWTEPQQGNFNYKDADNLLSLCQKHKIQTRGHCIFWEVDETVQQWIKSLNKNDLMTAVQNRLNGLLTRYKGKFSHYDVNNEMLHGSFYQDRLGKDIRANMFKTASQLDPSATLFVNDYHVEDGCDTRSCPDKYIHHILDLQEQGAPVGGIGIQGHIDCPIGPIVSSSLDKLGILGLPIWFTELDVSSVNEYVRADDLEVMLREAMAHPTVEGIMLWGFWELFMSRDNSHLVNAEGDINEAGKRFLSLKQEWLSHSRGHVDEQGQYNFRGFHGTYDVQVVTPSKKISKTFVLDKGDSPLVVSIDL

SEQ ID NO: 226460 - protein, 141 aa, Glycine max
  unsure (1)..(141): unsure at all Xaa locations
  Clone ID: PAT_MRT3847_46522C.1.pep
VSSSLXKLGILGLPIWFTELDVSSVNEYVRADDLEVMLREAMAHPTVEGLMLWGFWELFMSRDHSHLVNAEGDINEAGKRFLALKQEWLSHSRGHVDEQGQYNFRGFHGTYNVQVVTPSKKISKTFVLDKGDSPLVVSIDL

SEQ ID NO: 226461 - protein, 125 aa, Glycine max
  unsure (1)..(125): unsure at all Xaa locations
  Clone ID: PAT_MRT3847_46523C.1.pep
YEANEWFICSQECVPRTYCGXNPHIPLGINRLMGKLTFPQGTSXSVKRMPLSIGGGADAKNANFMNMPNAVLSMWKYNVEDLDFEVSKMTSPYIKCTVSFFIAFGNLSDDTIYFEASPHKLMQFV

SEQ ID NO: 226462 - protein, 47 aa, Glycine max
  Clone ID: PAT_MRT3847_46524C.1.pep
FPHPQFMKFCFYLTGISIALIFVLYQPLKIQRGNLGKLKFPSIGWNT

SEQ ID NO: 226463 - protein, 352 aa, Glycine max
  Clone ID: PAT_MRT3847_46525C.1.pep
MGTVAPRVESLASSGIKCIPKEYVRPQEELKSIGNVFEEEKKEGLQVPTIDLREIDSEDEVVRGKCREKLKKAAEEWGVMHLVNHGIPDELIERVKKAGETFFGLAVEEKEKYANDLESGKIQGYGSKLANNASGQLEWEDYFFHLAFPEDKRDLSFWPKKPADYIEVTSEYAKRLRGLATKILEALSIGLGLEGWRLEKEVGGMEELLLQLKINYYPICPQPELALGVEAHTDVSSLTFLLHNMVPGLQLFYEGQWVTAKCVPDSILMHIGDTIEILSNGKYKSILHRGLVNKEKVRISWAVFCEPPKEKIILQPLPELVTETEPARFPPRTFAQHIHHKLFRKDQEGLPN

SEQ ID NO: 226464 - protein, 52 aa, Glycine max
  Clone ID: PAT_MRT3847_46526C.1.pep
PGFFPVFKVRPSLPYLGEKLEPSRFHEWIREIPVGFRGQIRFQDFISRMGAQ

SEQ ID NO: 226465 - protein, 175 aa, Glycine max
  Clone ID: PAT_MRT3847_46527C.1.pep
YLGRYPGFPSTHASGLEGGRLEKEVGGMEELLLQLKINYYPICPQPELALGVEAHTDVSSLTFLLHNMVPGLQLFYQGQWFTAKCVPNSILMHIGDTIEILSNGKYKSILHRGLVNKEKVRISWAMFCEPPKEKIILQPLPELVTETEPARFPPRTFAQHIHPKLFRKDQEGLPN

SEQ ID NO: 226466 - protein, 92 aa, Glycine max
  Clone ID: PAT_MRT3847_46528C.1.pep
ATFTGLKSMAGLPIRKTNRVISCTASNGGRMQCMQVMSPLGTKKFETLSYMTDLDDAQSAKEVEYLFTKGWINCLEIQLEHRVLYLEHNMSP

SEQ ID NO: 226467 - protein, 99 aa, Glycine max
  unsure (1)..(99): unsure at all Xaa locations
  Clone ID: PAT_MRT3847_46529C.1.pep
GLLDKLWDDPVARPDPDRGLGYLQLLSSLTTIDEGDRSKLPKTLTMPSTPILPMTATTTTTPGSPRTADNLGMSVSHPGNDLDATTIGADMXDKPLTNT

SEQ ID NO: 226468 - protein, 67 aa, Glycine max
  Clone ID: PAT_MRT3847_4652C.1.pep
KFHNLNPPTQEKKSFFPQRGRPKSKIQTFKHLQIQHKIGTPNSTLRNKINSSKISESISKPRTQHES

SEQ ID NO: 226469 - protein, 67 aa, Glycine max
  Clone ID: PAT_MRT3847_46530C.1.pep
RPLCGDRIQPHGLMPCTISGPILHSGYAHVGHFDRSAPFGNYTIVQKVIWLKAINSRSARFFPGTTL

SEQ ID NO: 226470 - protein, 124 aa, Glycine max
  Clone ID: PAT_MRT3847_46531C.1.pep
VPEVSFFQQQQVQKSLERILYTWAIRHPASGYVQGINDLVTPFLVVFLSEYLEGGIDNWSMSDLSSDEISNVEADCYWCLSKLLDSMQDHYTFAQPGIQRLVFKLKELVRRIDGNFFLRPVYLY

SEQ ID NO: 226471 - protein, 103 aa, Glycine max
  unsure (1)..(103): unsure at all Xaa locations
  Clone ID: PAT_MRT3847_46532C.1.pep
PKQPXXXPNHHXLSILFISIHFKLVRDFILSTGPIHTKQIFXSLLIQLLLHFLHLQNIYYTLNLLLLTYYYFILIPLNNYVFNIKTYPYILPLKKILLFSNLS

SEQ ID NO: 226472 - protein, 129 aa, Glycine max
  Clone ID: PAT_MRT3847_46533C.1.pep
YQFISKKKKKKKKKKKKKKKKKKKKKKKKKKKKKKKKKKKKKKKKRGGPFKRTKVNYPGLARKKFFNGAPKIKSRGRGLKTGGREKPGGTQIKSLGKKSPFPKGGKNQKGPPRPLSKKWPTLKGKGNPP

SEQ ID NO: 226473 - protein, 57 aa, Glycine max
  Clone ID: PAT_MRT3847_46534C.1.pep
RTSLKLKDLASIKASQASFHQVPSSGNQSTRASSRCSLNLHCCLFIFYSCISSHILC

SEQ ID NO: 226474 - protein, 40 aa, Glycine max
  Clone ID: PAT_MRT3847_46535C.1.pep
DYNKMYRQANSQTRSSGACRKDLICELAWRYIFLYETITK

SEQ ID NO: 226475 - protein, 114 aa, Glycine max
  Clone ID: PAT_MRT3847_46536C.1.pep
MASSKAFITAFFLLALTMSSMSMNLTARHLMQTSTGPNLPKPTLPPLPSLPIRPQAMVPPLPTIPSLTTTLPPLPISIPTIPTVPQLNHPLLPSMPTTMPYIPFLSPTPSASSP

SEQ ID NO: 226476 - protein, 118 aa, Glycine max
  Clone ID: PAT_MRT3847_46537C.1.pep
MQALSSYVFIAANVILNSSKDVQSSHLNELFPPLVPLLTSHHHSLRGFTQLLAYQILHKLFPLLNYGSSEMLPLEKRCFVDLKTYLARNSDCARLRTSMEGYLDAYDPNSSGTPAGIF

SEQ ID NO: 226477 - protein, 195 aa, Glycine max
  Clone ID: PAT_MRT3847_46538C.1.pep
LDLYERVIKTIISKGNVSGTVIGEALNAYASRRMPGFNKGVIQGDIVRNRLLLETIIRILPLDVGSVSFSFLVKLLRVAIQLEREELERSELIRRIGMCLEEAKVSDLLICAPVGDTVFDVDIVQRLVEEFVACDQHVQTDTLLEDDFQEEIRSPGMVSESSKAKVAKLVDGYLAEIARDPNLPFARSENITEIE

SEQ ID NO: 226478 - protein, 77 aa, Glycine max
  Clone ID: PAT_MRT3847_46539C.1.pep
SVGNSNSSIQVPASLWYRSLCASALVAIKKWSRFQGTMWLCRFTKIVIITIIYIIQHIMIRFFIRLLTYSMQNTPSI

SEQ ID NO: 226479 - protein, 52 aa, Glycine max
  Clone ID: PAT_MRT3847_4653C.1.pep
RFLSMGVNLYTWFGSYNYFVFKLTLKKLLISWFRDLFFSPPFLLSPLSTFSI

SEQ ID NO: 226480 - protein, 85 aa, Glycine max
  Clone ID: PAT_MRT3847_46540C.1.pep
MKEKVDIAIFVASNNFHPLKRSNPSTCFHSIQLDHIHKSQHKISIFASHCLGSPITCNHLPPVVYVDISYFLFRQIQDFVQFPFV

SEQ ID NO: 226481 - protein, 267 aa, Glycine max
  unsure (1)..(267): unsure at all Xaa locations
  Clone ID: PAT_MRT3847_46541C.1.pep
PRVRGFISRKELEKILRGSLQSPIPGMGSKVFENLDTSDLVRMMLKLELCYEQDPSDPNSLLLIPSILEEGRGKPQKWQLSMPDCVYAGRHLECDDSSHMFLTPGFFPRLQVHLHNRIEALKDQHEATYSLEKCIISICINGIYIRVELGGQLGYYIDVLACSTKNLSETLRVINQLIIPAIQSVCHGITLTENVIRPECVRKLTPXRYRKTQFASMQQLXQALLSLXADSMYDYQHTWSPVLDSGRPILQDGFDFARDLLSDDDFR

SEQ ID NO: 226482 - protein, 95 aa, Glycine max
  unsure (1)..(95): unsure at all Xaa locations
  Clone ID: PAT_MRT3847_46542C.1.pep
WRFFFCWDRTXWLEGKYLVFAQVVKGLPVGRKAXKVGSSSGRTSKPVVVAPWGQLCYILLAHGLNLGRVLFLSVSHKQFISHLFFRVWWGRELGC

SEQ ID NO: 226483 - protein, 45 aa, Glycine max
  unsure (1)..(45): unsure at all Xaa locations
  Clone ID: PAT_MRT3847_46543C.1.pep
FLSERELSEVLYTCTVPPVPLSKGFFSFDTTLIXKICTALFHSAS

SEQ ID NO: 226484 - protein, 92 aa, Glycine max
  Clone ID: PAT_MRT3847_46544C.1.pep
RIKKTSVRLQLMFFFFCKALCNIYLNRAQDISLFNTFVSVAFNSAQEQPCYCIEKVVSQSKDHLVVNKIVDVFVRSCANRPCPMGRKFNKCI

SEQ ID NO: 226485 - protein, 174 aa, Glycine max
  Clone ID: PAT_MRT3847_46545C.1.pep
SSRYAILPNRYFLSLPIKQLTHTEGAIVALWVTNREKLRSFVERELFPAWGVSYAATFYWLKVKQNGSWICDLDLFHHRPYECLILGYSPGKVNNTDNQSKFKPVKNDRVIMSIPGDFSRKPPIGDLLLEYVPGLKPSRCIELFAREIMAGWVAWGNEPLYFQDSKYFVKKMDQ

SEQ ID NO: 226486 - protein, 58 aa, Glycine max
  Clone ID: PAT_MRT3847_46546C.1.pep
MQRRSPPKHRHDGTSPLPLGMDWSPAPRKWALKSDRVSKSVAHFYCFCGLWRGSQPFP

SEQ ID NO: 226487 - protein, 57 aa, Glycine max
  Clone ID: PAT_MRT3847_46547C.1.pep
AADNPRDNSLRLITLANWVIFFSSISLFPTYQNNSLTLNWSNNLTHIHHVGTYTSNL

SEQ ID NO: 226488 - protein, 70 aa, Glycine max
  Clone ID: PAT_MRT3847_46548C.1.pep
LPDHSLPPHYGLVLYNLTLLCHWRHSANQILSFFRHPLLWEILPLMTLSLCLSLKQSARINREPLYLYLG

SEQ ID NO: 226489 - protein, 55 aa, Glycine max
  Clone ID: PAT_MRT3847_46549C.1.pep
RAVIPFLLLTSEANMERKQIRVYDSPRLLQEHFKRLYGKELQIQVCTSYRLNCFL

SEQ ID NO: 226490 - protein, 40 aa, Glycine max
  Clone ID: PAT_MRT3847_4654C.1.pep
FQGNKLFFFGMVSPPLKPEKANPSQESFRTVRDLSRGGPP

SEQ ID NO: 226491 - protein, 102 aa, Glycine max
  Clone ID: PAT_MRT3847_46550C.1.pep
YSSSSTQYPDCANVRPCSCYATSSSSFSSFLSRFSGADDGVGFVGRVHNLIEQELGLRRSHSMAIPFLLSRSRFSGGGSRGGDRLSDLDSTRDSPARKRRKP

SEQ ID NO: 226492 - protein, 124 aa, Glycine max
  unsure (1)..(124): unsure at all Xaa locations
  Clone ID: PAT_MRT3847_46551C.1.pep
QRGILNDMQPTIRIKTEGWLIDTWNPNNKPFQCAGVTLYLCTLNHNDISLPCYTNGPHEIYIQHGKGIIGMIYPDCASTFEEPXQPLHRGQMRAPHYRHQKIYISREGDMIAGPTGVAWQMYNN

SEQ ID NO: 226493 - protein, 56 aa, Glycine max
  Clone ID: PAT_MRT3847_46552C.1.pep
TGTYARLDIHRSNNATQRGDRVWDADLGSLDVTRVRLTSQHNRILTNASYGHQNAY

SEQ ID NO: 226494 - protein, 149 aa, Glycine max
  unsure (1)..(149): unsure at all Xaa locations
  Clone ID: PAT_MRT3847_46553C.1.pep
MFMLILFEKLGSCWAFSTVAATEGIHQITTGNLVSLSEQELVSCDTKGEDQGCEGGYMEDGFEFIIKNGGITTEANYPYKGVNGTCNTTIAASTVAQIKGYETVPSYSEEALQKAVAXQPVSVSIDANNGHSMFYAGGIYMENGNYLTR

SEQ ID NO: 226495 - protein, 42 aa, Glycine max
  Clone ID: PAT_MRT3847_46554C.1.pep
LIMTQPFTDRIQTQHRARCFSVDTYQATNFEILYLRVARLAY

SEQ ID NO: 226496 - protein, 59 aa, Glycine max
  Clone ID: PAT_MRT3847_46555C.1.pep
LYFKLSPAGTWRSTESSCMRIGSLTATGSPRPHRRVFSTYFKHEKQHHPSPARPPTRKR

SEQ ID NO: 226497 - protein, 45 aa, Glycine max
  Clone ID: PAT_MRT3847_46556C.1.pep
TVKNVERIMTGSQALNQVKRLLNGGERSSRTFSQRVWSRTSRFFR

SEQ ID NO: 226498 - protein, 347 aa, Glycine max
  unsure (1)..(347): unsure at all Xaa locations
  Clone ID: PAT_MRT3847_46557C.1.pep
GDILDLAWSKRGFLLSSSVDKXRLWHVGIDRCLRVFYHNNYVTCVNFNPVNDNFFISGSIDGKVRIWEVVHCRVSDYIDIREIVTAVCFRPDGKGTIVGTMAGNCRFYDIVDNHLQLDAQLCLRGKKKTSGKKITGFQFSPSDPSKLLVASADSHVCILSGVDVIYKFKGLRSAGQMHASFTTDGKHIISVSEDSNVCIWNYTGQDRNTSKAKKIWSSESFLSHNAAIAVPWCGIESMPGTLLSPSLGEDVNQRCSLPSPDCFFLSRGFLSELIPKVSATWPEETLVDSSCQTQTVVSPTMCKSEYKFLRSACKGMSNSHLWGQVIVTAGWDGYIRVYQNYGLPVRG

SEQ ID NO: 226499 - protein, 77 aa, Glycine max
  Clone ID: PAT_MRT3847_46558C.1.pep
PSKTLSVSFQRGSARGPGAACSLISELCQLVICFFGLDERTGALATRCVDPPLERVLFFACFGMLAPALNHAVIDDH

SEQ ID NO: 226500 - protein, 129 aa, Glycine max
  unsure (1)..(129): unsure at all Xaa locations
  Clone ID: PAT_MRT3847_46559C.1.pep
FGVPGGSSSKATRQRKSKHQFSPIRLEDKRIXXXDLECXFRKXGQNSGPNPNRSLKKGKKXEKGXDKTRDRQEIIGXEKICCGSXRXXRNREGGXPGTSAKGLDQVLILPTVIKLLXGFKRVNTASGRF

SEQ ID NO: 226501 - protein, 120 aa, Glycine max
  Clone ID: PAT_MRT3847_4655C.1.pep
SWKIFLAGVFSHHHNQGVVFEQPKIFGKGVSYQIVLFKQLNPLKNWKGGVCFPPGKSFRIFWVFFKNLSFPFFNWERGCLVSFKKNFPPLFFLKKKFLFFFLGPLKQVLWKVKIAGGGPF

SEQ ID NO: 226502 - protein, 53 aa, Glycine max
  Clone ID: PAT_MRT3847_46560C.1.pep
SIRVVLVLIGFVIRKLLNLAGVMWTQADVDLYIGYGTIYCSARGVTHYSRVCR

SEQ ID NO: 226503 - protein, 68 aa, Glycine max
  Clone ID: PAT_MRT3847_46561C.1.pep
QPTVYYINLELSNGPVRPGQSGQMVKTAWPEYLIGHAFVAQPGPFGRAKLAYLFFLFKFVLILKGTKF

SEQ ID NO: 226504 - protein, 66 aa, Glycine max
  Clone ID: PAT_MRT3847_46562C.1.pep
SLIEPHKTFKQSRFNKSSKNLERRTAKRSSKPRITGRKTELRNHQTEGLKRKKRTKQKNQTCGKHK

SEQ ID NO: 226505 - protein, 200 aa, Glycine max
  Clone ID: PAT_MRT3847_46563C.1.pep
GTELHSVGCYFSGLVSGSGLLVKHRALKDYFGDRKPDIGVGSSSVHDHLFLSLCKEAYVVNNEEGKGNPSSVLPRDKYPKPLIFHDGRLAFLPTPSATLYMFMWFPLGILLAIYRILLGILLPYGWAMALGVWSGINLQVKGNVLEEKSEQNKGVLFVCSHRTLLDPVFLSTCLAKPLTAVTYSLSKVSELIAPIRTVRL

SEQ ID NO: 226506 - protein, 132 aa, Glycine max
  Clone ID: PAT_MRT3847_46564C.1.pep
RGRRRRRRIPWRGMWGRRKRGALVGGVCRKKEGLGRVKAHVGKFAVVGGGGDNVGVAEEGRCYRGLNWGVCWVEKEEGCTRRIKEQRMKKENATNAAKFFGLKNNKASFLVPVSVSWFFKPHSSGAWFLVLA

SEQ ID NO: 226507 - protein, 231 aa, Glycine max
  unsure (1)..(231): unsure at all Xaa locations
  Clone ID: PAT_MRT3847_46565C.1.pep
MKAPNALLGAKRRKFQGIFNALCSMVVLFFFYNREDIISNPILRQSSYFTNHGLPQNAILRDGSSLVHRRMVEISANTSGVAGENDLGVSSSGLCSGLVQHDGYSSPCEFLKVNPQCSSDGYLDYLKFFYCTCQGFSLFGYLVLGVWLAALFYLLGNTAADYFCPSLEHLSRLLKLPPTVAGXVLLSLGNGAPDVFASIAAFVGAESGDVGLNSVFGWCSFCYHYCCWNCF

SEQ ID NO: 226508 - protein, 50 aa, Glycine max
  Clone ID: PAT_MRT3847_46566C.1.pep
FFFFFFWGQRTSLTLRGSSILGIPKDVMWDMGTQLRLSNFILGTKLLIRL

SEQ ID NO: 226509 - protein, 97 aa, Glycine max
  Clone ID: PAT_MRT3847_46567C.1.pep
AAMNTEGKVGWEEIVDSHLQGNFDVKELNKVAALAYKCINRAPSNRPSMRDIVQVLTRILKSRHHGSHHKNSLSATDESFIDTDQLETKISVTDHRR

SEQ ID NO: 226510 - protein, 107 aa, Glycine max
  unsure (1)..(107): unsure at all Xaa locations
  Clone ID: PAT_MRT3847_46568C.1.pep
MTMCFFKQVVVNDEEGHLLGRYGCIEDKQMLNSQKIDVVRAMALNIRNEVVRATLKYHAYLRKMTRNNHTRGGPFHLRAPLKSLYKDLSXMNPQRTARGASVLERIK

SEQ ID NO: 226511 - protein, 59 aa, Glycine max
  Clone ID: PAT_MRT3847_46569C.1.pep
SVSFGHPHPNAPYSAPLTDYLVQADGEIVAETLVLFDRLLALLGFRQDSLLSLVVSWSV

SEQ ID NO: 226512 - protein, 55 aa, Glycine max
  Clone ID: PAT_MRT3847_4656C.1.pep
PRVRPLVRPLVRKKKKKKKRGKKREKKKKKNKKIKKKKKKTKKKKVNEVQTTHIP

SEQ ID NO: 226513 - protein, 97 aa, Glycine max
  unsure (1)..(97): unsure at all Xaa locations
  Clone ID: PAT_MRT3847_46570C.1.pep
KGKAGPRPGPDPQVPPRPTRYDQHTRKSHAAXRSIRKNDGTGQKQQEGGHKPRTPEQRRERKGGHTKKGCKNRQSLTLGDEKRKAGERHIEIPHQKV

SEQ ID NO: 226514 - protein, 122 aa, Glycine max
  unsure (1)..(122): unsure at all Xaa locations
  Clone ID: PAT_MRT3847_46571C.1.pep
TVLGLGGVSRECANMLNNVLDVYLKRLIRSCVDLVGARSGNEPRKLPVSKQQIQGKVINGIWPNNHXRIPSAGGLVEPEPEHTPPHSVSLHDFKVAMELNPQQLGEDWPLQLEKISVQSFEE

SEQ ID NO: 226515 - protein, 68 aa, Glycine max
  Clone ID: PAT_MRT3847_46572C.1.pep
MRAISRCHISIGSNISPRFYNSLLRIHQSSLLCTCSSPYRFRHPVNAAGSALAMSQVPPPPFMHIRMS

SEQ ID NO: 226516 - protein, 65 aa, Glycine max
  Clone ID: PAT_MRT3847_46573C.1.pep
MSLRMLNPNANVPNKSAALQMNINAAKGLLDILKINLCLKRCIKILVGSIGGIKLIQDGNSLLKE

SEQ ID NO: 226517 - protein, 618 aa, Glycine max
  unsure (1)..(618): unsure at all Xaa locations
  Clone ID: PAT_MRT3847_46574C.1.pep
DQVLLTCLQSTLLTPILLRVLGCAHSNEVWERIHDYFQKQTHATAXNCELSYEXTNLGGKSMQEFLLQIKALSDALASVGGPIMLQEHIDSIPEGLSLDYLSIIAIIESKFEPLLAHEAHSPSINYPQAHHKSSVISSDDYSVPNKTDPESFSAFRGGGSFHRGGDGAGHRGGGGGCGSGGSCFASFQCQVCLKFDHTTSVCHYRFDQYYQPNSTLMLTNAQPQSNSTNXIPDSGASFHVTGESQNIQQLEPFEGPDQIFIGNGQGMQIHPSGSSHFTSPYNSCVSLSLNHRLYVPTITKNLISVSKIAKDNAVYFEFHSNYCAVKSQVTNEVLLQGSVGFGGLYSLPHIQFQPSIGVASWCFSLWHDRLGHPNHHVLQLVLXHCNIPTINKNLISFCSACAAGESLRLPSSLSTSVYSSPLELVYSDLWGPSHVTSTNGFLYYITFVDAFSRFTWIYLLKSKAETFTVFKKFKAMAELQFNTKIKNLQTDWGGEFHPLAPFIAECGINHRLVFPHTHHQNGVVERKHRHVVELGLTLLXSFWDVAFPAAVYLINRLPTDSLNSSVPYHVLFNKFPDYNFLKTFGCSCFPLLRPCNNHKLDLIMCFSTNFLTWDRDRM

SEQ ID NO: 226518 - protein, 571 aa, Glycine max
  Clone ID: PAT_MRT3847_46575C.1.pep
TRPQIWNCGEGTNGSVHSRFKPIGDGLVGLSNHGGTAGGISSFMQGNNSQYKTTSSDNHSFFPSELPARSRFEAQSGDSRGRNSKNLRILEGLDDGKVRKISRPERIVREIVSESIPVMALTIQELTDDVIASTKEYLRNLIEKPEKKEELVSLQNRLERRSDLTKESLSKCHKVQLEVLVAVKMGLASFLSNKIQLSEMVEVFLFKRCRNVTCKHLLPVDDCDCKICSGNKGFCSSCMCPVCLNFDCASNTCSWIGCDVCSHWCHATCGIQRNLIKPGPSLKGPSGTSEMQFHCIGCGHASEMFGFVKDVFVCCAKDWGLETLMKELDCVRKIFMGSEDRKGKELHVKTDDMLLKLQTRMISPSDASSYIMQYFSYADSMPDFPASGISSKDLSASQSNLTKDTPSLSKPNSLLPKYGYDMGYSRSHPDAMSCDLLQKDLKASILSELKNEADFHLGALLRKGGLESLESIVRIKEAEARMFQTKADEARREAEGFQRMIRTKTAQMEEEYAEKLSKLCLHETEETQRKKLDELKVLENSYFDYYKMKKRMQDEIDGLLRRMEATKQQWV

SEQ ID NO: 226519 - protein, 66 aa, Glycine max
  Clone ID: PAT_MRT3847_46576C.1.pep
SNKHNKDTDWLIIDLQPFDFPLCSLLVHILQSKYFSFYDFLLYSSFKQILQTQHRNICKHTYACTC

SEQ ID NO: 226520 - protein, 42 aa, Glycine max
  unsure (1)..(42): unsure at all Xaa locations
  Clone ID: PAT_MRT3847_46577C.1.pep
NFSFLRDRTKDILSVALDLLFCVXXGALTAYTMYLVWSVLFT

SEQ ID NO: 226521 - protein, 77 aa, Glycine max
  unsure (1)..(77): unsure at all Xaa locations
  Clone ID: PAT_MRT3847_46578C.1.pep
PVXRXSCSXXXLLVDAXXLSXSEXLASXSVKSPCLLXXTSKLSSXSLHTXXIILHXXXFPHNCKCXSXXXXKXLAXG

SEQ ID NO: 226522 - protein, 74 aa, Glycine max
  Clone ID: PAT_MRT3847_46579C.1.pep
WDALENKSTVLFYGGGALVAVGLSSILVSAINSVPLLPKIMELVGLGYTGWFVYRYLLFKVSKIHHEGTNTLLF

SEQ ID NO: 226523 - protein, 114 aa, Glycine max
  unsure (1)..(114): unsure at all Xaa locations
  Clone ID: PAT_MRT3847_4657C.1.pep
ITLSSHNSAAAANPNPLACERKLSHPLREIKVRKLVLSISAGESGYRDTKAANVLEQFNVHDPGFSKARYXARSLWTKINXNIACYDTDIRDKATQLLHSGRRXTEYELLRTNF

SEQ ID NO: 226524 - protein, 221 aa, Glycine max
  Clone ID: PAT_MRT3847_46580C.1.pep
GDVKVLGFWSSPFVHRVIWALKLKNISYEYIEVDRFNKSELLLQSNPVYKKVPVLIHGGKAIAESLVILEYIEETWPENHPLLPKDNHQRALARFWIKFGEDSIASITDLFLGPSKDEQERASAKKKAEETIMVMEEQGLGDKKFFGGNNIGMVDIAHGCLSHWLEGLEEIVGMKLIEPNKFPRLHAWTQNFKQVPVIKENLPDYEKLLIHLEWRRQGYVT

SEQ ID NO: 226525 - protein, 76 aa, Glycine max
  unsure (1)..(76): unsure at all Xaa locations
  Clone ID: PAT_MRT3847_46581C.1.pep
MNYTIRRIYLAQHSLHTNIEXPEMNDLCLEPKMSLELTPNLLIKCESLMKLDHNQLYKTNTHENNTLIIIITCDIL

SEQ ID NO: 226526 - protein, 90 aa, Glycine max
  Clone ID: PAT_MRT3847_46582C.1.pep
QGSAQGSAQGSAHGSVKSSFLILSMVVGALDKALVCKCIFYGACVLKNFKKLVFCSSRKKNLGWFCFSFIIRQHLDLKFNSSFIELVVLN

SEQ ID NO: 226527 - protein, 245 aa, Glycine max
  Clone ID: PAT_MRT3847_46583C.1.pep
MALRMWASSTANALKVSSTSRPHLLHPFSFSRCLSSVLDGLKYADSHEWVKHEGSVATIGITDHAQDHLGEVVYVELPESGGTVTQKSGFGAVESVKATSDINSPISGEIVEVNKKLTETPGLVNSSPYEDGWMIKVKPSDPSELDSLMGPKEYTKFCEEEDASHKKLNSYWFLQLYVGLTVLYMFMILLSSEQFFNMQYNWFFPFVSFHFSFPCYCLLSPTLQCVYILISLIKIFLLKIKKKKK

SEQ ID NO: 226528 - protein, 65 aa, Glycine max
  Clone ID: PAT_MRT3847_46584C.1.pep
KGRGGFPIGLTQKKGFFGTRILIWVGGHGGLTPLVKRWAKVLPGPNLNPKVHISTVGKGIFFSSP

SEQ ID NO: 226529 - protein, 142 aa, Glycine max
  Clone ID: PAT_MRT3847_46585C.1.pep
VLSYSHAYVIVSKVAQDMVEEWFDCVDEEDSFYEDVLGAILTGVDGLDFVERITLATSEGYLNVLTRKNGEKGTKRFDSVDGEEITLIPGTRAEEAYNKIISELEKCEHTLIGIERSKDDRLPCQKIFDILIRSDDYSPYGV

SEQ ID NO: 226530 - protein, 50 aa, Glycine max
  unsure (1)..(50): unsure at all Xaa locations
  Clone ID: PAT_MRT3847_46586C.1.pep
IDKLRAESDISEKSLDHSVPGDIYKREWRHLXISSSIITFLYFMVQLFIC

SEQ ID NO: 226531 - protein, 77 aa, Glycine max
  Clone ID: PAT_MRT3847_46587C.1.pep
QQSIQASMYLYGSFVRNQMLDVGHYFKHSPAKEWVPGLLLRGMICTFIFGMRLRHVLLSLLKIQKLKSRDFKILYVL

SEQ ID NO: 226532 - protein, 148 aa, Glycine max
  unsure (1)..(148): unsure at all Xaa locations
  Clone ID: PAT_MRT3847_46588C.1.pep
CSNLVLTLSDCLSFDSNGSTGTKPQETCCSSLKTVLNTTPKCRLXEAFNSNAQIGLCIHVTKGDSLPAACELSTPSAANCGLSATPAAAPGPSPTSATATIVTPGGVPSSTPENALSALIPIYSWILYCLPFSRSISHVHFRSMDMTL

SEQ ID NO: 226533 - protein, 45 aa, Glycine max
  unsure (1)..(45): unsure at all Xaa locations
  Clone ID: PAT_MRT3847_46589C.1.pep
XXXSNLTKSQVCPRASRMLSLARNHVETLLPTARYDNFDSXQHTT

SEQ ID NO: 226534 - protein, 231 aa, Glycine max
  unsure (1)..(231): unsure at all Xaa locations
  Clone ID: PAT_MRT3847_4658C.1.pep
GEVGKLMENYIAELATDRNLTVTKFTRLAELIPEQSRPTXDGMYRAIDIFLKAHPALSDMDRKKVCSVMDCQKLSREACAHAVQNDRLPVQTVVQVLYYEHKRRFXNANNCIYVIPCRLYDYDHVVRTIXLKCFEKXLSTSRRENEALKLELVKLKMRLKEIENSTLKSTVNSPAVSASPSADKPPLPRRSFMSSVSKKLGRLSPFVRADGVLPFPKGRTKPNKNRRHSIS

SEQ ID NO: 226535 - protein, 52 aa, Glycine max
  Clone ID: PAT_MRT3847_46590C.1.pep
NRKVAWRIFDSLILLEKENWLMISIVQNHKTNGFCESKDEWTQFVQHQQLMI

SEQ ID NO: 226536 - protein, 65 aa, Glycine max
  Clone ID: PAT_MRT3847_46591C.1.pep
TSFGSFSVLCLITSSSWGKLGISASTLLSGIGTSWGDLSISLLCLTLFLLTDPDCRSKWSYLKNT

SEQ ID NO: 226537 - protein, 110 aa, Glycine max
  unsure (1)..(110): unsure at all Xaa locations
  Clone ID: PAT_MRT3847_46592C.1.pep
XSHARVRKLGIRLEXMXXXXXRXXXXTAXLXSXXGXNXLXSAMPVXCCSSSXKXGWLRVAXXMXPRVYRXQNSSCXGXXGSTSQAXMVXVXDPIXXXIXDLYXXFRFXXT

SEQ ID NO: 226538 - protein, 101 aa, Glycine max
  Clone ID: PAT_MRT3847_46593C.1.pep
PMNLGLPTNLTCSNFINIYGVWRLIETGLECTQVELVFIFLLDTDASNSGGLTMEDENINRGGVLIRPAVHFPPSSLCLLTCQISFSAYFYVKSWIHPNDF

SEQ ID NO: 226539 - protein, 70 aa, Glycine max
  Clone ID: PAT_MRT3847_46594C.1.pep
GRTRGRDHRVAFLKTGNKSHRYLISRIFQFLPTSWGTNSLGKENHSLGWPQTWGITFFSTLRLFGEPPPI

SEQ ID NO: 226540 - protein, 108 aa, Glycine max
  unsure (1)..(108): unsure at all Xaa locations
  Clone ID: PAT_MRT3847_46595C.1.pep
IPPDPKVWSEPLXLEPDRFLPPHKDIDVKGRHFQXAPFGSGRRVYPGISIGLLTDHSALGGFLHSFGILNPSTEPPHISSAFGVTNXKPLPLRFLFNPXLSPRCYKRM

SEQ ID NO: 226541 - protein, 104 aa, Glycine max
  Clone ID: PAT_MRT3847_46596C.1.pep
ARSIQPTSIIKIRFPESTDTHTCTSTTRVWLGQHPQNISTKTLNFIIIIHKIVYSNSDDHTWKRIQFLPETQRTEKFGTFLCPNHKCCCRRSFSRTRGFPNPFA

SEQ ID NO: 226542 - protein, 49 aa, Glycine max
  Clone ID: PAT_MRT3847_46597C.1.pep
IDCFNHQLLDRYPCRQRRRRMQLHRSAVCTSEMENLEPRNMRCYRCLRR

SEQ ID NO: 226543 - protein, 53 aa, Glycine max
  Clone ID: PAT_MRT3847_46598C.1.pep
SWAIINVLPPPPAIYLRRIALSGRLGRQGVAISFEALEEAIRRSHSHKFNKGS

SEQ ID NO: 226544 - protein, 142 aa, Glycine max
  Clone ID: PAT_MRT3847_46599C.1.pep
IKRKNNNVTRIIHIIKMVNVYPFLDELGGRKRTERRRRKIFVQHLLIILSGIYLINDMMIDEYVLKLLEWKVGRRDKIKFWEDLLGREQFLASTQDYFLISFKKDEFIGNMGEWERDEWGWRLEWRTECSVWEREGAEWTKT

SEQ ID NO: 226545 - protein, 58 aa, Glycine max
  unsure (1)..(58): unsure at all Xaa locations
  Clone ID: PAT_MRT3847_4659C.1.pep
XVQXGLGXVFTXXVARXPXXGWFXRLWXXCSYVXVXSRQXXTRQXFELRGXLLXGGWD

SEQ ID NO: 226546 - protein, 110 aa, Glycine max
  unsure (1)..(110): unsure at all Xaa locations
  Clone ID: PAT_MRT3847_465C.1.pep
RPPACRRLQKGNVLDFVVSYKLRYREENMNLLLFFVAAVFLVAWPCHGASYQRFPLPMKTGYCERSSEVKCSSFKLSVESRNIRTFKTFPEXCFKPTKVYINGEQFTSYS

SEQ ID NO: 226547 - protein, 138 aa, Glycine max
  unsure (1)..(138): unsure at all Xaa locations
  Clone ID: PAT_MRT3847_46600C.1.pep
SAGRXSIXLCXPLXNLLQSSSXSGAXXTLAQNXXXMXXHXXXGLXXXLXLYXPSPNXXLXXXPHSXXSXPTSVXTTXSXXLHXPXSRTIXXGTXXLXXLXXGXXXXXXXXLXXXXXXCIXRGXIXARAEFRAYVRVXX

SEQ ID NO: 226548 - protein, 63 aa, Glycine max
  unsure (1)..(63): unsure at all Xaa locations
  Clone ID: PAT_MRT3847_46601C.1.pep
RITLPRNGDTGVRQSXLLLRISDGSITTNFMTSVALILRDEXIVLDGKRVKXQIWDTADHERF

SEQ ID NO: 226549 - protein, 77 aa, Glycine max
  unsure (1)..(77): unsure at all Xaa locations
  Clone ID: PAT_MRT3847_46602C.1.pep
MTGGMCGQKVQEIEVTVVMMPKKVVDFNGVTSVXKXVAMGXATEFVGKCLGALGHAVDALTAXARHSISLQLYQCYA

SEQ ID NO: 226550 - protein, 56 aa, Glycine max
  Clone ID: PAT_MRT3847_46603C.1.pep
SVIRHFLSIHGSSFHIGCVHPYNTQHLLTHNALSLPTYTSSISTKALTRGMPVIAG

SEQ ID NO: 226551 - protein, 156 aa, Glycine max
  unsure (1)..(156): unsure at all Xaa locations
  Clone ID: PAT_MRT3847_46604C.1.pep
SSLSVCVSLLDPKRSAISSPLFHSFRSQHMYEPPIPVNPDTIGAMLPKLSELLMLLNVSSDEKVLPTTYGELRPPLGKHRLKIVEFIAVLLKTGNEVAEKEMVNSGTIQRVIDLFFEYPYNNSLHHHVESIILSCLESKTNAIVEHLLKXCNLIGR

SEQ ID NO: 226552 - protein, 59 aa, Glycine max
  Clone ID: PAT_MRT3847_46605C.1.pep
YLVANHQQIFFETVYRPFEVPLLHNLDRWQTVIDDEEETSKQKIKAQSREIKRLEKEGL

SEQ ID NO: 226553 - protein, 74 aa, Glycine max
  Clone ID: PAT_MRT3847_46606C.1.pep
EIFELQEYRKCETHLGSILFLLYFSPSPLYVNLHVSSSKNSSLMSITKQVAHFPSFFCHRIPQLLLAPIKLMQL

SEQ ID NO: 226554 - protein, 60 aa, Glycine max
  Clone ID: PAT_MRT3847_46607C.1.pep
PRVRFGSTTNLPLNHFSYSATTSFSFFFFVFFFFAHPAQFALSVKRAQVSPFSANSARVS

SEQ ID NO: 226555 - protein, 96 aa, Glycine max
  Clone ID: PAT_MRT3847_46608C.1.pep
DSVYSKKYTSIIRIELLGDCLIQLCTVNLHVSSSKNSSLMSITKQVAHFPSFFCHRIPQLLLAPIKLMQLPFPREVWFALNIKAFSCIMCQLDDEI

SEQ ID NO: 226556 - protein, 86 aa, Glycine max
  Clone ID: PAT_MRT3847_46609C.1.pep
MLKGGWGKSLRTPFFPFFLGGRGEGPPLGVSPFFFFFPLAPKGWGFEIKLGPPFLFPKKKKKKKNKKKKKQKKKKKKKKKKKKKQQ

SEQ ID NO: 226557 - protein, 104 aa, Glycine max
  Clone ID: PAT_MRT3847_4660C.1.pep
VVVALVHMYDHLNDACKSDDRKLAGYIISNTATPKKLMICIIISSRSIPKASIFFQEIKNGFFCSFLSSPVYIYRLCFSVRLHHLLEVRIGRGLCNLASWQHDR

SEQ ID NO: 226558 - protein, 98 aa, Glycine max
  unsure (1)..(98): unsure at all Xaa locations
  Clone ID: PAT_MRT3847_46610C.1.pep
GDGELFLFIPGTGVEQAYNKLIVELEKXVPTLVGIECPTDEKLSCRKASXKPKTRCFTIFPMEVNLVVPXKVLNFXVRVIMNKRDTLTCXVGINPYPM

SEQ ID NO: 226559 - protein, 87 aa, Glycine max
  Clone ID: PAT_MRT3847_46611C.1.pep
GFLLLFFSLPTLFSQNPKRRGKNFFSSQKLKFPTSQGAPLQWGKDFTILKETPGLFSRSPAQINPRNRRNIEPEHFRGLKKQHHPGF

SEQ ID NO: 226560 - protein, 66 aa, Glycine max
  unsure (1)..(66): unsure at all Xaa locations
  Clone ID: PAT_MRT3847_46612C.1.pep
AMXGESVVESPVXXQXHGXXEXXVSVSMDVEGXKDPLSNGLXXVXPGWXSXIXSXSXGDXHSLKVE

SEQ ID NO: 226561 - protein, 105 aa, Glycine max
  unsure (1)..(105): unsure at all Xaa locations
  Clone ID: PAT_MRT3847_46613C.1.pep
FSEDKTEVQFGRPMLVVVSLSNSFLDELPKACSDTEWMLPELYGASLPLSVCVCVCVXNLDISFLNPTKYSVLVLLVILVELGCAAFIFFDKSWKEVSCHWHFMI

SEQ ID NO: 226562 - protein, 76 aa, Glycine max
  Clone ID: PAT_MRT3847_46614C.1.pep
YSLGSLPLRMRNDELVVGDIKRLQDEDIQDNGVTIIGADILGICMTGPTEPLTSIGIKLTFMGMLATTIMTLFTWE

SEQ ID NO: 226563 - protein, 67 aa, Glycine max
  Clone ID: PAT_MRT3847_46615C.1.pep
ANYRYVAMGCIEPKPAPPDLLRGFNYHTLKAGRTFGRLIFQAPNGWRSQCISTSSGGLSFTCQLEGK

SEQ ID NO: 226564 - protein, 190 aa, Glycine max
  Clone ID: PAT_MRT3847_46616C.1.pep
LQGKGVDVSGSLGLDGAAGLQLMDVKDSDDGGDGVDGIMSLSLTLDEWMKLDSGEIDDIDNISEHTSKLLAAHHANSFDFIRGSSKGEKRRGKSRRCGLLGNNFTVALMVQLRDPMRNYEPVGTPMLALIQVEREFMLPKQRIFNSVSEIRKNYYEDDESDIVAKLETKDTEKEEKSSEEDEGIPQFRIT

SEQ ID NO: 226565 - protein, 62 aa, Glycine max
  Clone ID: PAT_MRT3847_46617C.1.pep
PDIRSNLQINIIYRCNALKIGKFIDCTLLYAVDNDMLDAWDFKCSIHLYHQASCCNCGEGLK

SEQ ID NO: 226566 - protein, 90 aa, Glycine max
  Clone ID: PAT_MRT3847_46618C.1.pep
EPREGEKSRNAPRSVKDSVFAQMPRPQNPHPDRNLKTAEAPRASLGTKARRGLALSHNRGEGLTEDTFPGRLGLHVVRGAHNPPASRRPK

SEQ ID NO: 226567 - protein, 116 aa, Glycine max
  unsure (1)..(116): unsure at all Xaa locations
  Clone ID: PAT_MRT3847_46619C.1.pep
FYIIVHVYLIFYGTHALGALNYVAWEAPSSLSVLYIQTRDHRGQTEARFWQKKRKLGTRPPQKKKKKAAKAQEXKKTKVKKXHSPTTRRALFFSSPPPHGKNSPCITVPPSEGGGG

SEQ ID NO: 226568 - protein, 51 aa, Glycine max
  Clone ID: PAT_MRT3847_4661C.1.pep
SYTGIDLMDFGRLVDIKSYYLSEVPVYKFGVLMSTSGYILTATVALPLECT

SEQ ID NO: 226569 - protein, 65 aa, Glycine max
  Clone ID: PAT_MRT3847_46620C.1.pep
FNREEYRQPLVLIATTHMWDSHGSPYKPPRNRNFGHGISNNLFTCSSIESVVACAHMRCKIKNSG

SEQ ID NO: 226570 - protein, 106 aa, Glycine max
  Clone ID: PAT_MRT3847_46621C.1.pep
SRFGPRVRPRVRFSDFYDRSKTAFSFYYCPIYFTVLSMPSRVITIDYSLLLKTTPSTYFLYLFHKLLLLHLFYIKPPNTLTRLTFFVLEFLPFLTLTPINPPTTYL

SEQ ID NO: 226571 - protein, 90 aa, Glycine max
  unsure (1)..(90): unsure at all Xaa locations
  Clone ID: PAT_MRT3847_46622C.1.pep
VNAQLWLLCPILFTLQVFKAYVGLLLLRTAVVGVVYEWQIIFGGVLLVXRAVGNFANTVQSLMAKSFFRAFIKTSASQGCIINKSPFLAF

SEQ ID NO: 226572 - protein, 42 aa, Glycine max
  Clone ID: PAT_MRT3847_46623C.1.pep
KQILTDSFIKNCNKNIRITFITLIVIVFLIFLTNDFPNSNAC

SEQ ID NO: 226573 - protein, 91 aa, Glycine max
  unsure (1)..(91): unsure at all Xaa locations
  Clone ID: PAT_MRT3847_46624C.1.pep
GGECRCGACSFVLNFGSSNEXRKVRYSVAELKTLWNQLLSSASHINNLPLLLTFVSPSSPPHHVLESLLSLHSFALPQRRWWKIDLGGLGM

SEQ ID NO: 226574 - protein, 160 aa, Glycine max
  Clone ID: PAT_MRT3847_46625C.1.pep
TKKPAGGKKNYNQKGPQKGLNLKKKTKFKKPLKEKGPKFFKGHPWEAKLVIRGLTFNKKKKPLPYNQETPPTNAKVVPGGNTFLRGPDLTLNPVKKKSKIFFYLGPFGQATTKTGSFGLTKAFGLFFFPIFFTGKLIPFLPIGMVGSPSQFSPGLSLLFL

SEQ ID NO: 226575 - protein, 68 aa, Glycine max
  Clone ID: PAT_MRT3847_46626C.1.pep
LCTERGAPGVSVHKNITYMSPAKLGEDIVITAHVLKQGKTLAFTSVDLTNKATGKLIAQGRHTKHLGN

SEQ ID NO: 226576 - protein, 65 aa, Glycine max
  Clone ID: PAT_MRT3847_46627C.1.pep
KNSSHHSIHVESVHNKDSHRRTSKKHASIVASDMLFTGCHALSSPKAKNKSKYFYSIKESRHHSP

SEQ ID NO: 226577 - protein, 58 aa, Glycine max
  unsure (1)..(58): unsure at all Xaa locations
  Clone ID: PAT_MRT3847_46628C.1.pep
VICSKCTGKGFKAGASMKWAGCQRTAMKVSIKHLCPXSHIQVMLPSCNVCKGSLETIN

SEQ ID NO: 226578 - protein, 284 aa, Glycine max
  Clone ID: PAT_MRT3847_46629C.1.pep
MEKKRKRKQQVKRDGEPKPKSVRAGSTRTDNVKDPFPSHARPTPQECEAVRDTLLALHGIPPELAKYRKLPPSDDPVQLQPPEPVLDGLVRTVLSQNTTEANSQKAFASLKSSFPSWELVLCAESKDVENAIRCGGLAPTKASCIKNVLRCLRERRGELCLEYLRDLSVDEVKAELSLFKGIGPKTVACVLMFNLQQDDFPVDTHIFEIAKTMGWVPAVANRNKSYLHLNQRVPNELKFDLNCLLYTHGKLCHQCSGKKGNKQGKKCDDNSCPLLNYDKDSVEL

SEQ ID NO: 226579 - protein, 64 aa, Glycine max
  unsure (1)..(64): unsure at all Xaa locations
  Clone ID: PAT_MRT3847_4662C.1.pep
TDIHMPILARSHKYIIVSSVNIFIAFRMSLSEHQLLINNTHPVSHLQSSXXXRMXPATVAQVIX

SEQ ID NO: 226580 - protein, 72 aa, Glycine max
  Clone ID: PAT_MRT3847_46630C.1.pep
FQARMQEMKEKELKYLGNGDANSHVCKVCFESPTAAILLPCRHFCLCKSCSLACSECPICRTNITDRIFAFT

SEQ ID NO: 226581 - protein, 120 aa, Glycine max
  unsure (1)..(120): unsure at all Xaa locations
  Clone ID: PAT_MRT3847_46631C.1.pep
LSSPSPLHNDPRAGRKGRISSRANEISGTGVDDFELRSLDADDLKIELQARKQREAALEVALAEKEFVEKQYRKKTEEAKRREEALDNDLANMWVLVAKLXKKDGGAVPESNIDKKNDGA

SEQ ID NO: 226582 - protein, 79 aa, Glycine max
  unsure (1)..(79): unsure at all Xaa locations
  Clone ID: PAT_MRT3847_46632C.1.pep
MNRALCRTNSIAYTSVSPLIGYGESKDLGYGHSDYKEGDIAGGSTKGEEHTSQPXAQILCNIDHADDTLTYYTGILGEP

SEQ ID NO: 226583 - protein, 132 aa, Glycine max
  unsure (1)..(132): unsure at all Xaa locations
  Clone ID: PAT_MRT3847_46633C.1.pep
KTTGGVEGGFHENVVILTCYNTIIMLLDDRSDSSFIIXNSIVMDGSTSYRSASLAVADDGFLAHYLSIENSAXPEMHQAESLVMHAYLASFYRXAIYGYQDSLYVHSLRPFYXESVIYGTIDYIFMNAASIL

SEQ ID NO: 226584 - protein, 60 aa, Glycine max
  Clone ID: PAT_MRT3847_46634C.1.pep
IILQLTDFTGLLIKIFPGPDTRAGYISYPPKIPQNYHEKFIYTFLLFLRKITHDLKKKCL

SEQ ID NO: 226585 - protein, 63 aa, Glycine max
  Clone ID: PAT_MRT3847_46635C.1.pep
HRALPLLYLSASSVMGSRRLSSSLMRPFLPPSTKEFEAAIPSQPFSVPNIPTGGYSVAITKLF

SEQ ID NO: 226586 - protein, 437 aa, Glycine max
  Clone ID: PAT_MRT3847_46636C.1.pep
MDYEPYDSSGTDDDLPPTHQNRISRGGGGRLAGNGRSAVGSIPYPRMYGEIDMETQIHQLEQEAYSSVLRAFKAQADAITWEKESLITELRKELRLSNEEHRELLGRVNADDVIRRIREWRQAGGHQPGVLSTGQGLHDSIPSPTVSASRKKQKITPSVPPSRSFGGPSPPFHPQTLTAPHQPSSAAKRGSAPGSKGKKHKPGQILPGVSSMKQYPSSGPGGRNQVPNRAAMGEHAEGASFDSLVGRRVRTKWPDDNNFYEAVITNYNPADGRHNLVYDMGSANETWEWVNLSEISPEDIQWVGEDPGINHRGGFGGPGHGMNRSVGRDGVPGAGRGRGAAKGQSRKDFLSSQNGIGKKAPDDIQILHTDTLIKEVEKVFSANHPDPLEVEKAKKVLKDHEQALIDAIARLNDLSDGESDGAGAAHHFSHAQSMDRE

SEQ ID NO: 226587 - protein, 90 aa, Glycine max
  Clone ID: PAT_MRT3847_46637C.1.pep
VAVSLPGGRILIFGGSVAGLHSASQLYILDPTDEKPTWRILNVPGCPPRFAWGHSTCVVGGTRAIVLGGQTGEEWMLSELHELSLASSVI

SEQ ID NO: 226588 - protein, 53 aa, Glycine max
  Clone ID: PAT_MRT3847_46638C.1.pep
VVKKCYSGENRKHEPSFTQPKSKQEFRPQWLVILLLKSALNYSESNTPHMDRI

SEQ ID NO: 226589 - protein, 145 aa, Glycine max
  unsure (1)..(145): unsure at all Xaa locations
  Clone ID: PAT_MRT3847_46639C.1.pep
LLIRRLCGGDEKLMRERTHLLLAXCSRMAICKKECWRGXCGIPXGFPFTVICYSIFXMKMLLDYIFENLLPPAKSPIMFLQTFXNFVFLCVYGDXNLISVHEFVKPFFYWFLIEKAFXAGYNITITDGIXDKPSATLQFRKLALL

SEQ ID NO: 226590 - protein, 95 aa, Glycine max
  unsure (1)..(95): unsure at all Xaa locations
  Clone ID: PAT_MRT3847_4663C.1.pep
SPARPSPSQRPLTVVIIFFFVSKPGKGGNRFXKSMGLGSKTTREAIEGSYIGNHCPFTGNVSIXRGRLLAGTCPGAKSNRTIMGRRSNVALSAGT

SEQ ID NO: 226591 - protein, 111 aa, Glycine max
  unsure (1)..(111): unsure at all Xaa locations
  Clone ID: PAT_MRT3847_46640C.1.pep
GWAPFFSGRLFSGGSWXFCPCLVWPVLVALVVALCSCGPWLGPLVLVCVPFRVLRASPLGCLSSGGCWSSCSGGSXWGLLFRLAAPVFVVPPARFVGXGWPVLVGFLVFGR

SEQ ID NO: 226592 - protein, 46 aa, Glycine max
  Clone ID: PAT_MRT3847_46641C.1.pep
RFQNSPGGLGYGFLTIGLVDPYWGDKPYFYWFLDRVLKPYLTFGLD

SEQ ID NO: 226593 - protein, 188 aa, Glycine max
  unsure (1)..(188): unsure at all Xaa locations
  Clone ID: PAT_MRT3847_46642C.1.pep
VFPYGKPFLDHRFAIGGPCRSKITLRISGTICAPQDPVVWHGLNQRKWLYFHGVNHLTVDGGGRINGMGQEWWARSCKINSTXPCHPAPTAMTFHRXQDLXVRHLMLIDSQRMHLSFTNCMRIGAXHLXVLAPAFSPNTDGIHISVTXGVEVMHSXIRTGDDCIXHSRKSSRVWIRNISCGPGHGISM

SEQ ID NO: 226594 - protein, 159 aa, Glycine max
  Clone ID: PAT_MRT3847_46643C.1.pep
KLRRYGISGILSYGLLNTAYCLTTFLFVWFYIAPAPAKMVYGAAVKRFLKVMAMVWAGSQVTKLVRAGGALALAPFVDRGLSWFTHKFKFQTREGFHGNSGTLSWIGPHCIFGHHTALGMMPLSATFLKGHLNLFVTSKCINNFYYPIMFLLYNTLLNF

SEQ ID NO: 226595 - protein, 73 aa, Glycine max
  Clone ID: PAT_MRT3847_46644C.1.pep
INATSQTQHLFCYHLLRAVPIIATEDLMRGIELIHTRSDLNVSLGGATLGRIFNVLRETIDNLLPVDSLTTYP

SEQ ID NO: 226596 - protein, 107 aa, Glycine max
  unsure (1)..(107): unsure at all Xaa locations
  Clone ID: PAT_MRT3847_46645C.1.pep
IXLHXYVSSEFXSELLXXSYTXXXPXXMXXXQXDQAYXIXXVXXEPXTNTXGXXXYXRXNASXVXVPIAGGNXXAXXALKVSDXDNLXYQXXGXXHAXASXXWAXXP

SEQ ID NO: 226597 - protein, 47 aa, Glycine max
  Clone ID: PAT_MRT3847_46646C.1.pep
IMTRVQKGSEETLKRILEDNASAEYLQNLGLNGRTDPESFKACVTLV

SEQ ID NO: 226598 - protein, 129 aa, Glycine max
  Clone ID: PAT_MRT3847_46647C.1.pep
KRYFWGKWGDKCKPPKKCGTRGRICFLFFFSKRGIMKVIRAREGRHKNIGNLKHSQKFCFISLGYTSEFVHVQKRSPVAKTTLNFWFLEGNNPFIFKKRGLGQFCLRLPAKKKREGKLKKKQPKKKNFI

SEQ ID NO: 226599 - protein, 42 aa, Glycine max
  Clone ID: PAT_MRT3847_46648C.1.pep
GTVKPEIFLLPSCGTHKGQFYDLRELFRIGGNAPVTNFLFMG

SEQ ID NO: 226600 - protein, 71 aa, Glycine max
  Clone ID: PAT_MRT3847_46649C.1.pep
FLDSRGNQGMKEQGCFNGGFSGFIVVLVYYYPSRDFGAPKMEVAFEIQTKLVRVPNGKLCGGELFHPLLID

SEQ ID NO: 226601 - protein, 39 aa, Glycine max
  Clone ID: PAT_MRT3847_4664C.1.pep
NIIMGGKCQHPDFSGVIKYDSDGKKVNPAKTSPPLLTWK

SEQ ID NO: 226602 - protein, 49 aa, Glycine max
  Clone ID: PAT_MRT3847_46650C.1.pep
MRAARYMLNVQLRWTVISCSQYTTFHTRLMPRHQTYGTGSWTSLLIYLH

SEQ ID NO: 226603 - protein, 80 aa, Glycine max
  unsure (1)..(80): unsure at all Xaa locations
  Clone ID: PAT_MRT3847_46651C.1.pep
FYLVLKNXYMQCISGILLLCTLFIHGXCRAFPVTYYINMHPSLICTSKGKXCVSXXKXQGGQXPIXPXLXMAXGFXXKXK

SEQ ID NO: 226604 - protein, 51 aa, Glycine max
  unsure (1)..(51): unsure at all Xaa locations
  Clone ID: PAT_MRT3847_46652C.1.pep
QXAEXXMXXAIDQXLEKTGXXAXDLGIFVVDCSLFNPTPSLSXMIXNXYXL

SEQ ID NO: 226605 - protein, 76 aa, Glycine max
  Clone ID: PAT_MRT3847_46653C.1.pep
RGDTARHSWAFCPQCHKSFGKVPGLIHQSRKPVHEKRTCSLCRLHDHISILGRSIKTDSALRIARMSSVTSAKRHI

SEQ ID NO: 226606 - protein, 55 aa, Glycine max
  Clone ID: PAT_MRT3847_46654C.1.pep
HSSVPSVQLLRKRTWGLRTLLSVFACSVHWQYERRLTDSGCTSVAPLANRASASS

SEQ ID NO: 226607 - protein, 65 aa, Glycine max
  unsure (1)..(65): unsure at all Xaa locations
  Clone ID: PAT_MRT3847_46655C.1.pep
LQAADTFMQPTKGGMVTRKLESTHCIFKAFGLEPVVAKLIGSLKPDLKDFAKKXSTRPKYAGFAL

SEQ ID NO: 226608 - protein, 132 aa, Glycine max
  Clone ID: PAT_MRT3847_46656C.1.pep
RKLPCDVWSVGWILIELCSGEALFQTHENLEHLAMMERVLGPIPEHMICRSNKGAEKYFKRGSRLRWPEGAVSRESISAVKKLGHLKDIVSRNVDSSRSSLTELLHGLLTYDPTKRITARQALDHPFFRNPT

SEQ ID NO: 226609 - protein, 111 aa, Glycine max
  Clone ID: PAT_MRT3847_46657C.1.pep
ALFQTHKNLEHLAMMERVLGSIPELMIRRSNKGAEKYFKRGSRIRWPEGAVSRESISAVKKLGHLKDIVSRNVDSSRSSLIDLLHGLLTYDPTKRLTACQALDHIFFRNPT

SEQ ID NO: 226610 - protein, 369 aa, Glycine max
  unsure (1)..(369): unsure at all Xaa locations
  Clone ID: PAT_MRT3847_46658C.1.pep
AQRALPVPGDEGFERKHVSPPKRDDDREGHYVFNLGENLTPRYKILGKMGEGTFGRVLECWDRQTREYVAIKVVRSIRKYRDAAMLEIDVLQQLAKNDGGSSSRVRFGSXRNHICIVFEKLGPSLFDFLKRNKYCPFPVDLVREFGRQLLESVAYMHELRLIHTDLKPENILLVSSEYVKLPSYKRISSDEMQFRCLPKSSAIKLIDFGSTAYDNQNHSSIVSTRHYRAPEIILGLGWSYPCDLWSVGCILIELCSGEALFQTHENLEHLAMMERVLGPIPEHMICRSNKGAEKYFKRGSRLRWPEGAVSRESISAVKKLGHLKDIVSRNVDSSRSSLTELLHGLLTYDPTKRITARQALDHPFFRNPT

SEQ ID NO: 226611 - protein, 53 aa, Glycine max
  Clone ID: PAT_MRT3847_46659C.1.pep
NVVWKLSIKIDFRCAIFKISFFFFFYICILFYNLSYHNCLKNAFQCIKVFKIY

SEQ ID NO: 226612 - protein, 255 aa, Glycine max
  Clone ID: PAT_MRT3847_4665C.1.pep
MKFLHIPLLRGNNSSKQTMSKVTMPILLAFFIFILTTISCSLLSYHSLLKINDEYKEPSFEFDDLIVPESLPSTPVNKCDIFTGDWVPNPEAPYYTNTTCWEIHEHQNCMKYGRPDTDFMKWRWKPNECELPIFNPFQFLQIMRGKSLAFVGDSIGRNHMQSMICLLSKVEWPIDVSYTDDFSFKRWKYSSYNFTMTTFWSPYLVRAKQVDSNGGLYNVYLDEFDEKWTTQIKEFDYVIINVGQWFLGPMVFYEK

SEQ ID NO: 226613 - protein, 119 aa, Glycine max
  unsure (1)..(119): unsure at all Xaa locations
  Clone ID: PAT_MRT3847_46660C.1.pep
SFSSAHAYERPDHYFLFEIQSGIIHMIEETLHGGGPXKEEHIGEHHGVHKGEHKGEHHGEHMGEHDGEQRRWEHKEGLVDKIQDKIHGDGRDKGVKTMKTDQKKKEHGHEPYGHSRSCD

SEQ ID NO: 226614 - protein, 75 aa, Glycine max
  Clone ID: PAT_MRT3847_46661C.1.pep
KKKNQTPPPHHKQKNNLMAPPSLGSKLTYPCMQHHNFFYNFTQNSPPFPKSHNPSPWKPLSFPQLNPPTSHPPPP

SEQ ID NO: 226615 - protein, 108 aa, Glycine max
  Clone ID: PAT_MRT3847_46663C.1.pep
IYEFSFLSLKLCFKKNPKTKNLKLLDLNNYVVVSNFKVSIFFSYFLSIRDSDSTGLMALESDIDNGRELLFVISFKLVASLLEIPEDKIEKIMILNQSRAESARAPAG

SEQ ID NO: 226616 - protein, 68 aa, Glycine max
  Clone ID: PAT_MRT3847_46664C.1.pep
VLKVIKVPPSQVRDVCCFPLLIHVLGRVRSPPHCPPNLRSSAPLCGASKGEWHKPRLARILPGTESER

SEQ ID NO: 226617 - protein, 72 aa, Glycine max
  unsure (1)..(72): unsure at all Xaa locations
  Clone ID: PAT_MRT3847_46665C.1.pep
GSRLGQRAXEAPPCHISRSFISAGLRCDGQVATICDDDSPRRSDLVRPYPLGFQLGNWRMEERPDVYATSIM

SEQ ID NO: 226618 - protein, 155 aa, Glycine max
  Clone ID: PAT_MRT3847_46666C.1.pep
MADHHHHPTSLSQTQTTPRTTTSSSLLRKLRHHVANSNQLFGVLTLLITGSILLLLTGLTIVGSVLGLILFAPLIIVTSPIWIPLCAVLFLVTAMFLSMCGFGIVVLAVLTWMYRYFKGLHHPPGSNRVSHALNRVKDRAGNMNSKGLDAAAPGA

SEQ ID NO: 226619 - protein, 123 aa, Glycine max
  Clone ID: PAT_MRT3847_46667C.1.pep
DAARQIERAHSGPVSGIEFVGSGVDLLTCGSGDGHLRYIDGGTGSALMHIDAKEKLRCVKTDGASVMCGGDSGVIRTYSLKGLAFTPALAHDTGCGAIGCLALTENASTEKDRYQMKKILHSR

SEQ ID NO: 226620 - protein, 44 aa, Glycine max
  Clone ID: PAT_MRT3847_46668C.1.pep
KKTTEGACIRELKATLKRGSPILVLSHEITHLSEGSITLKRAAK

SEQ ID NO: 226621 - protein, 58 aa, Glycine max
  Clone ID: PAT_MRT3847_46669C.1.pep
VTIKPHNNGCSFLLVSSNTYNLIFAWASFLLIHSGTQQVKGMDATFPHARTSVLQCLL

SEQ ID NO: 226622 - protein, 126 aa, Glycine max
  Clone ID: PAT_MRT3847_4666C.1.pep
SRVLSKSYLDGMGIKCPNARIAMDMISIYGGFAAPSRESIARDMNASTIDSSDTLPIIYELGLSGIYHDWRELFSTYARTYDLLHADHQLSKLKNRCNSAAVLPEADRILRPEGKLIDRDTAEIIE

SEQ ID NO: 226623 - protein, 174 aa, Glycine max
  Clone ID: PAT_MRT3847_46670C.1.pep
MAVRQRAVSALPTLLRTLRKEPLKPRNHAHVNALPSLRRAFSLYDQINLIDQVPEDQLRFQGYNDTGFTVNGVEYEGSLLCVGNLLMSWKPKKFSEITADSLSIFQIVRPIPEILIIGCGKNIQHVDPELRRFIRSTGIKLEAVDSRNAASTYNILNEEGRIVAAALLPHGVSS

SEQ ID NO: 226624 - protein, 96 aa, Glycine max
  Clone ID: PAT_MRT3847_46671C.1.pep
LFEKEEKNNSIPSCIYYVTIMFLFTRVFHLAALRIPFLECSSLEKLLCAYLRYIAHVAATISTLTLIYLQRQIHGKTTGQYHFEPRAVPRAALEDV

SEQ ID NO: 226625 - protein, 122 aa, Glycine max
  Clone ID: PAT_MRT3847_46672C.1.pep
MAVRQRAVSALPTLLRTLRKEPLKPRNHAHVNALPSLRRAFSLYDQINLIDQVPEDQLRFQGYNDTGFTVNGVEYEGSLLCVGNLLMSWKPKKFSEITADRFVCSIPLVSSPYSLLVTFLFK

SEQ ID NO: 226626 - protein, 69 aa, Glycine max
  unsure (1)..(69): unsure at all Xaa locations
  Clone ID: PAT_MRT3847_46673C.1.pep
NKITSTCXSVGGGLHNNNLNQDRLDLFXWARAVLSFLNFLNYLFWSRRYFHAPSALPPPNNKEHHPNIP

SEQ ID NO: 226627 - protein, 137 aa, Glycine max
  unsure (1)..(137): unsure at all Xaa locations
  Clone ID: PAT_MRT3847_46674C.1.pep
MGGTVSSAWAKPGAWALSEGHLLQQNNNNPNDKPKGVNPVXEARPREXVFGEKGXDWKKIEEXLESVRSKEASGXEGVXKRGFGSSNGGGGRATLPERXTERRWRKPQFEEERPKSAEKGEKEPXQKKEVRDEHVKN

SEQ ID NO: 226628 - protein, 45 aa, Glycine max
  unsure (1)..(45): unsure at all Xaa locations
  Clone ID: PAT_MRT3847_46675C.1.pep
RFWYFRTLDQRRKKDCENSNKYSELHGSTDXIKKVVILGDISPRA

SEQ ID NO: 226629 - protein, 74 aa, Glycine max
  Clone ID: PAT_MRT3847_46676C.1.pep
RALTLPSAAMSTLRNLCRCRGLCLSGARYNTCFDNVYTSNACRWPKLLSLLILATTLWLALKDTSIEEQRSHTD

SEQ ID NO: 226630 - protein, 62 aa, Glycine max
  unsure (1)..(62): unsure at all Xaa locations
  Clone ID: PAT_MRT3847_46677C.1.pep
NQLMHPFQTCKYNSEGXXDLVREVRVTINTQXICQQHIYSKATRKGTRGXSTLKHYEGKKMA

SEQ ID NO: 226631 - protein, 83 aa, Glycine max
  Clone ID: PAT_MRT3847_46678C.1.pep
GNYGPPQGNGGPVGYGVGYGGGQFLQAPPQEFWERNLLWGFKLPLGGPGLFKVFIPGGPMIFSPPNGGGQRSLSIPNGAGWGA

SEQ ID NO: 226632 - protein, 290 aa, Glycine max
  Clone ID: PAT_MRT3847_46679C.1.pep
MEQSIGGQSSIQCIFLRKDCFSSKLASLPTSPSEMPFGHNRWFRRLSVFPRLQLCQGLRKGFSKNMACSVSVDNCDTVHPATDAYAGEAVEALKAGKVIAVPTDTLYGFACDACSMEAVNRIYEIKGRRHTSPVAICVGDVSDIARFAVTDHLPHGLLDSLLPGPVTVVLKRGDSSILERSLNPGFDSIGVRVPDCNFIRIIARGSGTALALTSANLSGQPSSLSIKDFENLWEHCAFVYDGGLIPSSRAGSTIVDLTTPHKYRILRPGSAKEETVAILEKHSFVEAETT

SEQ ID NO: 226633 - protein, 43 aa, Glycine max
  Clone ID: PAT_MRT3847_4667C.1.pep
LANYPLSRIPGVRGRSCNIIAFLSCLEIHDHCPAGYAEQKKGT

SEQ ID NO: 226634 - protein, 91 aa, Glycine max
  Clone ID: PAT_MRT3847_46680C.1.pep
HYRVSYPSIVTLSCYNGWHYQSFEWVLEHGGIATDDDYPYRAKEGRCKANKIQDKVTIDGYETLIMSDESTESETLIGCSRMALKNACSVS

SEQ ID NO: 226635 - protein, 93 aa, Glycine max
  Clone ID: PAT_MRT3847_46681C.1.pep
KKAIREPKLAVELFAAQKKRGFYPSQVGPSRALSAIEERLKKKPKVPKSSGPLEKVIRPFPPTKPIVADAQKNKPEPSDDILEAGFGGSPVLY

SEQ ID NO: 226636 - protein, 59 aa, Glycine max
  Clone ID: PAT_MRT3847_46682C.1.pep
LSFVDLHKPSYGFYERSKDGSLNLINNRVGYGGVIHDVIAEWISSFMGMFPLLTSFMLN

SEQ ID NO: 226637 - protein, 76 aa, Glycine max
  Clone ID: PAT_MRT3847_46683C.1.pep
FCRQADLLRFFKGGKRAGVLPREDPIFSKATMPSKGRGSKVIGPILWFWRGKNTLSFFVHTRNQVVLFFLKQFRTS

SEQ ID NO: 226638 - protein, 54 aa, Glycine max
  Clone ID: PAT_MRT3847_46684C.1.pep
EKKMSLPRPSEGKAPSQLKEGLQPAAAEASPSSSGNIRQNTSLPWLYTQQDSQI

SEQ ID NO: 226639 - protein, 50 aa, Glycine max
  Clone ID: PAT_MRT3847_46685C.1.pep
PRVRNDSPTLKNRKGPVEMPYMLLYPNTSDVTGEKGEGLTAMGIPNSISI

SEQ ID NO: 226640 - protein, 75 aa, Glycine max
  unsure (1)..(75): unsure at all Xaa locations
  Clone ID: PAT_MRT3847_46686C.1.pep
MGWGFFLSSPKPERFFEDGENDCLRFGXSSMQGWRAPMEEANAAYTDLDEPTSFFGVYDGNGGKGVAKFCARFFI

SEQ ID NO: 226641 - protein, 37 aa, Glycine max
  Clone ID: PAT_MRT3847_46687C.1.pep
EMGLTCTKLVSRLFAKKEMRILMVGLDTAGKSTILYK

SEQ ID NO: 226642 - protein, 133 aa, Glycine max
  unsure (1)..(133): unsure at all Xaa locations
  Clone ID: PAT_MRT3847_46688C.1.pep
LSLALHYDPGKHQAMQEAHLDDLLDVLRDWSXHSPQEARQARRKAVCLIEGVENAVVPTIAQNEELHTMHGMMNAADSDDQIDLLLSIEQGGXQGAGNAIANKNELDDELALANTQEFFAGNSPVATWVPSLE

SEQ ID NO: 226643 - protein, 51 aa, Glycine max
  unsure (1)..(51): unsure at all Xaa locations
  Clone ID: PAT_MRT3847_46689C.1.pep
RSAFVSRTEYEHAGDAYSXGSVEHIFEKIISGMYLYEIVRRVALKLCEEVD

SEQ ID NO: 226644 - protein, 123 aa, Glycine max
  unsure (1)..(123): unsure at all Xaa locations
  Clone ID: PAT_MRT3847_4668C.1.pep
XXHTXXHXXXPXGXSRXXSPAXLTXINXNXXSXSXQHXXXPSSXXXGXSXRHXNASSNXXXAXXXPVHXXRXXXXXXTYXXXSXXXXHXRXXXXXXXXXSLSTXXXXASSRXTFRAXXXVXXR

SEQ ID NO: 226645 - protein, 101 aa, Glycine max
  unsure (1)..(101): unsure at all Xaa locations
  Clone ID: PAT_MRT3847_46690C.1.pep
LTQMKALSFYMASWLLEIFSVDEKDSDVHTVVAKGNGRAFXAGGHVAFDCRDGMKGYWRVRAYFFQSEFKLYFLMATYTKAPCLQILNVNCYGEVAARCFC

SEQ ID NO: 226646 - protein, 66 aa, Glycine max
  Clone ID: PAT_MRT3847_46691C.1.pep
YQFVLPPTMVKIVVGYVGFCYVKLPKFDFLIFYFLKKRIGWSLKKKKKKKKKIKKKKKKKKGRPPA

SEQ ID NO: 226647 - protein, 86 aa, Glycine max
  Clone ID: PAT_MRT3847_46692C.1.pep
RRVRGGIAVQIYLCIEGSGSERALMMQQFYQRALKGETTKFHYPDIDPSWANLNMDPITEDEWTRYEGYYDKMLERNAKMNEKLDF

SEQ ID NO: 226648 - protein, 48 aa, Glycine max
  Clone ID: PAT_MRT3847_46693C.1.pep
TTLVNFSIKFKGMHHVSQFMKNVNLADTLNKVERGESKLDWLSRHKIS

SEQ ID NO: 226649 - protein, 309 aa, Glycine max
  unsure (1)..(309): unsure at all Xaa locations
  Clone ID: PAT_MRT3847_46695C.1.pep
HASVLIDRMGQKDSVLEDEVRYRYNSVILNYKKSQDNAQRVSPLTFELEATLKLARFLCRRELAKEVVELLTTAADGAKSLIDASDKLILYIEIARLYGSLGYQRKAAFFSRQVAQLYLQQENRLAAISAMQVLAMTTKAYHVQSRSSISDHSLHSKGIVSNNADSGKTYHQSAVSLFESQWSTLQMVVLREILLSAVRAGDPLTAWSAAARLLRSYYPLITPAGQNGLANALSNSAERLPPGTRCADPALPFVRLHSFPRNPTQMDIINAPTHREDWVGGXVLSGPFIYTPIQLRESLIISRKQELIW

SEQ ID NO: 226650 - protein, 70 aa, Glycine max
  Clone ID: PAT_MRT3847_46696C.1.pep
ILVLGMCLQRDFQVDAGHLSQVFNPYILKRTLLELLAFYGVMISKFKYKEMSITLFYLTEGGYYNVCSCV

SEQ ID NO: 226651 - protein, 229 aa, Glycine max
  unsure (1)..(229): unsure at all Xaa locations
  Clone ID: PAT_MRT3847_46697C.1.pep
MAPSFDCVSSLLCVEDNSIFDENDYGGSVEVLEDAWQDPRYRRNLSQSENLDVPNGWFQLQSDECLRLMVEKEWDHLPNGDYRNKLRSGDLDFEARKEAIDWIQKVQEHFGFGPVCAYLSINYLDRFLSAYELPKHRTWTMQLLAVGCLSLAAKMEETDAPMSLDLQVGESKYIFEAKTIQRMELLVLSTLRWRMQAITPXSFIDHFLYKINDDQSPIGASICNPSNLY

SEQ ID NO: 226652 - protein, 30 aa, Glycine max
  Clone ID: PAT_MRT3847_46698C.1.pep
SKFSIRCLTFELLMFSNWHPVIITKIHPVT

SEQ ID NO: 226653 - protein, 120 aa, Glycine max
  unsure (1)..(120): unsure at all Xaa locations
  Clone ID: PAT_MRT3847_46699C.1.pep
GLSFTHPIISGSMIAKNMRILMDCLDAAGDTTIXYTLYLGKIVSTIPTIVFNVPTEHSLNISSTGWDVGDQDMIHALWTHYLHNTHALISRVDGSDRDRVDDARGNLHRMLNEDDREMLL

SEQ ID NO: 226654 - protein, 38 aa, Glycine max
  Clone ID: PAT_MRT3847_4669C.1.pep
TLKKTEKTFFSISFLFHKLLKKNISFSEKKKSLGILPA

SEQ ID NO: 226655 - protein, 33 aa, Glycine max
  unsure (1)..(33): unsure at all Xaa locations
  Clone ID: PAT_MRT3847_466C.1.pep
DEVRLVLGFWTPFSLXTRLLSSHXXVXXYXCYN

SEQ ID NO: 226656 - protein, 40 aa, Glycine max
  Clone ID: PAT_MRT3847_46700C.1.pep
LPCYTFLFLMQFTILALQRDLREKIDKLCSFMRGTKVRTY

SEQ ID NO: 226657 - protein, 46 aa, Glycine max
  Clone ID: PAT_MRT3847_46701C.1.pep
VSAFSPQHIGNVTTRLFMRMVSSFRWWSFDTTFGSLVAILFVVYIP

SEQ ID NO: 226658 - protein, 556 aa, Glycine max
  unsure (1)..(556): unsure at all Xaa locations
  Clone ID: PAT_MRT3847_46702C.1.pep
MRNSHNPRIYVPRPPDAINGKGNAPPASLPSSSNVQQSYQVLCCAYNANGTVFVTGSSDTYARVWSALKPNTDDAEQPIHEMDLLSGHENDVNYVQFSGCSVASKILTSDPWKEENTLKFRNFWYCHDNIVTCSRDGSAIIWVPRSRKSHGKVGRWTRAYHLKVPPPPLPPQPPRGGPRQRFLPTPRGVNMIIWSLDNRFVLAAIMDCRICVWNAVDGSLVHSLTGHTESSYVLDVHPFNPRIAMSAGYDGRTIVWDIWEGIPIRTYEIGHFKLVDGKFSPDGTSIVLSDDVGQIYFLNTGQGESQKDAKYDQFFLGDYRPLIQDTQGYVLDQETQLPPHRRNIQEPLCDSSMLPYPEPYQSQFQQRRLGALGIEWRPSLIKYAVGPDFTVGQDYPVVPLVDLEVMVEPQPEFLDAMFWEPEYDIIVSDDADSEYNANEDSSSAAGQGSVISSSDLEYSDDSSNRDGLRRSRRKKHNVGVEVMTSSGRRVRKRNLDECNGNTSGSNRLRKKSKGSSXASKRKSSIAKTLRPQRIAAHNARSMFSQIDETSTDGEKI

SEQ ID NO: 226659 - protein, 553 aa, Glycine max
  Clone ID: PAT_MRT3847_46703C.1.pep
MATSQSQHRCVFVGNIPYDATEEQLIEICQEVGPVVSFRLVIDRETGKPKGYGFCEYKDEETALSARRNLQGYEINGRQLRVDFAENDKGNDRNREQGRGGPGMTTNVDHQKQVGIPAVLGEAVQHQPIGLHIAITAAAVMTAALGGAQFGIQSNQNSLQSQSALAHDPLTLHLAKMSRSQLTEIISELKGMATQNKELARQLLLSRPQLPKALFQAQIMLGMVTSQVLQMPNLRLVSDQTSQSSMNEGQLGQPSLVQTLSGLPPPGQGKLQPGLTPYAQEGQVNTIPHNPLAPSQLTAHPKPPVQPRIPLQQNPNNLVLPGTLSGQSNLMLPSARSPGLGSLSVRPPIQLATSTALNQQMHASLLQHSVHVGNSTVGHNVQKVRPDANFQPGPSMSTTNSQLLSKGDKSSKVIEDLNWAKRTNTYSKSNIPLGVEKTNMVRDSSESFTRPSKVMKLDEGRSTPLSAGILDMPVTDGSSHILGRSSLPVHAAPKAEGQYSEQQSSQLPPDVESVLLQQVLNLTPEQLSSLPPDQQQQVLQLQQALRRDQIQPS

SEQ ID NO: 226660 - protein, 76 aa, Glycine max
  Clone ID: PAT_MRT3847_46704C.1.pep
VYYVHIVNCDRVCASEEEARLKGLDDIGKYLSLNYAKLALHVNAEITGKVCILRLSITQMSSSLEQKPQEMASCIA

SEQ ID NO: 226661 - protein, 38 aa, Glycine max
  Clone ID: PAT_MRT3847_46705C.1.pep
VLFLCCASPVTRTILQFGLRAKLNPTKLPYVVKIVQAS

SEQ ID NO: 226662 - protein, 123 aa, Glycine max
  Clone ID: PAT_MRT3847_46706C.1.pep
GGGALKNTQWWVFCFLAKTGFLCPLRHGPIFFLPGSLLAPGVGRFFLVRGQREAWVFLSPPFFPRGGWFSGVGPGFSGCLWFLGLFLFTRAICFFSPPRWEKKGGGNLAFGLFFWVIYYFYGF

SEQ ID NO: 226663 - protein, 102 aa, Glycine max
  Clone ID: PAT_MRT3847_46707C.1.pep
NYNINPVSEHIELIKKDGLHRLRLQQSTSTKGDNHPNASQPWCRRSSPSSVSRCAYLDLCLIFRRFLLSRRILCFFHLARIASGQVERALELRAPLIAAAEY

SEQ ID NO: 226664 - protein, 166 aa, Glycine max
  Clone ID: PAT_MRT3847_46708C.1.pep
NLRFSNKMPKFWRKMPRPPRKRIAKKSDDKKSTEDEKKKKKKRRLPKTLKECFECVDVGSIVLCASYLDIPPEPISSSSDEKSNGKRKKQKGQTKKEGPKIVTDVHEFGCIPWRLSLVHQLRKDDNGGYSKHILKLALHSDYRKDVAWRADVSGTLTMKKWVDKMP

SEQ ID NO: 226665 - protein, 67 aa, Glycine max
  Clone ID: PAT_MRT3847_46709C.1.pep
LLYHHQDWGSQCYYTITQQSSQPSHPSLYTVIMETGGDWAQEKSGALPTIKLPQRVEPGKHFANGVL

SEQ ID NO: 226666 - protein, 44 aa, Glycine max
  unsure (1)..(44): unsure at all Xaa locations
  Clone ID: PAT_MRT3847_4670C.1.pep
NKFFGFRFCSLKKXKKPKKKKKKKKKKKKKKKKKKKKKKKKKGK

SEQ ID NO: 226667 - protein, 57 aa, Glycine max
  Clone ID: PAT_MRT3847_46710C.1.pep
PTFSYFPHSETAAFILVYCKKIPGALFLHCKLKFHQHSSPVWNTVLINFIKVYVCVD

SEQ ID NO: 226668 - protein, 395 aa, Glycine max
  Clone ID: PAT_MRT3847_46711C.1.pep
MDSHSHIIAWGSGEDGQLGIGSNEEKEWVCLVKALQPHRIRSVVAGSRNSLAIADDGKLFTWGWNQRATLGHPAETKSENKTENTPSQVKALSSVKIVQAAIGGWHCLAVDDQGRAYAWGGNEYGQCGEEPERKDGTGRPLRRDIEIPQRCAPKLVVRQVAAGGTHSVVLTREGHVWTWGQPWPPGDIKQISVPVRVQGLENVRLIAVGAFHNLALQEDGTLWAWGNNEYGQLGTGDTQPRSQPIRVQGLSDLTLVDIAAGGWHSTALTDEGEVYGWGRGEHGRLGFGDSDKSSKMVPQKVQLLAGEDIVQVSCGGTHSVALTRDGHMFSFGRGDHGRLGYGRKVTTGQPMEVPIDLPPPQDPSGTATEGHWIAKLVACGGRHTLAIVEWKSNES

SEQ ID NO: 226669 - protein, 45 aa, Glycine max
  Clone ID: PAT_MRT3847_46712C.1.pep
MEVPIALPPPQDPSGPATEGHWIAKLVACGGRHTLAIVEWKSNES

SEQ ID NO: 226670 - protein, 51 aa, Glycine max
  Clone ID: PAT_MRT3847_46713C.1.pep
QAYIIFILIVIVISTQQLFTWTKKLFSLLNTSPSQRVNIHFYLIKKMIFSA

SEQ ID NO: 226671 - protein, 128 aa, Glycine max
  Clone ID: PAT_MRT3847_46714C.1.pep
MDSHSHIIARFLLFLSLSHTHTHTITIFSLFFCTDSLKFLLHFIFRGSGEDGQLGIGSNEEKEWVCLVKALQPHRIRSVVAGSRNSLAIADDGKLFTWGWNQRATLGHPAETKSENKTENTPSQVKAL

SEQ ID NO: 226672 - protein, 61 aa, Glycine max
  Clone ID: PAT_MRT3847_46715C.1.pep
VEDKDVIQFQLHCEDRDLNFTTNIEERLTVTPPFQVGATDGIIRYTLSRLEVSVMEDEADS

SEQ ID NO: 226673 - protein, 500 aa, Glycine max
  Clone ID: PAT_MRT3847_46716C.1.pep
MMSVTVAADTTSAAVGSCLSRSRRRCLTVALRSKVSVTPTRILTKLKHECATPLPLLQQVANNMSSDMRAGLAAEAGPGPGLPMIPSYVENLPTGNEKGLFYALDLGGTNFRVLRVQLGGKDERVIATEFDQVSIPHQLMFATSQELFDFIASGLAKFASKEDGRFHISPGKKGEIGFTFSFPVKQASIDSGILIKWTKGFAVSGTAGRDVVACLNEAMERQGIDMRVSALVNDTVATLAGAEYWDNDVVVAVILGTGTNACYVEQISAIPKLQGHVSSSGKMIISTEWGAFSNGLPLTKFDREMDAASINPGEQIFEKTISGMYLGEIVRRVLLEMAEEGGLFGKSVPQTLSTPFILGTPDLCAMQQDSSGDLHAVGSLLYDKAGVESNLSERKTVLEVCETIVKRGGSLAGAGIVGILQKMEEDQRGLVFGNGKRSVVAIDGGLYENYPQYRAYLQDSVTELLGTEKSNNVVIEHTKDGSGIGAALLAASNSMYNQDL

SEQ ID NO: 226674 - protein, 64 aa, Glycine max
  Clone ID: PAT_MRT3847_46717C.1.pep
ELTFFSECLKGIVIISVYIYVVYIYIYIYIYIYTPIDKGDIDCYNYSTIFIFICLFYPQMFLYV

SEQ ID NO: 226675 - protein, 205 aa, Glycine max
  Clone ID: PAT_MRT3847_46718C.1.pep
LKRVYQSENQSLLFIVILGSLTAFGPLAIDMFLPGLPNISHDFDISASTTQLTISFFMIGLALGNFLAGPISDITGRKKPLIFSLIIFTIASLGIIFVTNIWIMIILRFIQGLTGGAGAVISRAIASDMYSGNALTKFLSLLMLVNGIAPIIAPALGGIILNYGPWRIVFVILTMFGIVMLIGTLFKVPESLEKSLRESSNIGTM

SEQ ID NO: 226676 - protein, 67 aa, Glycine max
  Clone ID: PAT_MRT3847_46719C.1.pep
PPVPKGQPVRAQRGYVKPTLCKCPSLDLLDEQDVDRLHVLMGGDPFPYMHVLSLQGQSESPGITLTL

SEQ ID NO: 226677 - protein, 115 aa, Glycine max
  unsure (1)..(115): unsure at all Xaa locations
  Clone ID: PAT_MRT3847_4671C.1.pep
FNNLLSNTYYDECAICTXAISKTKRRNFNHLFHLSCFISFLYQSLTYIYTYPTFRNPLFSVFPKNQTNSYFFTISIYYQLSPQIYSKLYPPNFFYHTIPSKFYPNHTLNTPKSSP

SEQ ID NO: 226678 - protein, 185 aa, Glycine max
  Clone ID: PAT_MRT3847_46720C.1.pep
MKRGLASLIKTPIERGWGNGLRCFNSSSSVLKGVTTPTLLQPRVLLYDAVSHLCHRGVKWVIRADKDRKIKFCCVQSDTAELYLRACGLEREDVLHRILFVEGLNVYSQGSTAALRVLSHLPLPYSAFSALCVIPSPLRDGVYNYVAKRRYEWFGKADDYLVLQEKELLERFIDREELMSRDKDS

SEQ ID NO: 226679 - protein, 64 aa, Glycine max
  unsure (1)..(64): unsure at all Xaa locations
  Clone ID: PAT_MRT3847_46721C.1.pep
STLTGKTKKNNLFHLSTSPSPTNECLPXKFIERPPXXPPTLYLPIHFHPTFPKTLHIYHTYINS

SEQ ID NO: 226680 - protein, 111 aa, Glycine max
  Clone ID: PAT_MRT3847_46722C.1.pep
MEERVSGCSHVLMVPYPSQGHINPMLQFSKRLSTKGVRVTMVTTIFISKSMHLQSSSLLGNVQLDFISDGCDQGGFGQAGSVSTYLSRMQKIGFNNFEELIKKYNSSDHPI

SEQ ID NO: 226681 - protein, 103 aa, Glycine max
  Clone ID: PAT_MRT3847_46723C.1.pep
KKKKKKKKKKRGEEKKKKKKKKKKKKKNKKKKKKGAPGPPFFFLLRGGKWARGGKRGKIFSWGKIFSPQNSQKKKTRKKKGETLGGLRGGPPPFNGGGPIAPF

SEQ ID NO: 226682 - protein, 103 aa, Glycine max
  Clone ID: PAT_MRT3847_46724C.1.pep
GHRQPLRSGHLSNRMEYTLTCLIFFTLQAFDLNKIGRDFQSGCGVRSFRAEHDLRDMVRDTLQGRLSGAIHASPCSGLTGSYGINHPPHKQCRHHPRSLLHQW

SEQ ID NO: 226683 - protein, 73 aa, Glycine max
  Clone ID: PAT_MRT3847_46725C.1.pep
MGAITSAVIAVVGVLLGWITIEIACKPCLQQARQAIDRNLNPDYDPDDDDATAIRAPLNPAPTAASSAAVKAV

SEQ ID NO: 226684 - protein, 517 aa, Glycine max
  Clone ID: PAT_MRT3847_46726C.1.pep
FAESVEGVEQRKSSISGGPVLRPPNQKHGIPPSHPNINISPSATPCSRYSQRLRSPGSSHSRSLSQSPIFSLDSLPPLSPSPAAVTSMFDSISTTDMSVEESNVSSQVPLNGGHALLPPRKGHRRSSSDSPLGISGFMQSSPVPSGGESSGFEKPIQLVLKASFRDSLDGGHANEPVNGRKEEAADDLFREYMNLDNFDNLNFPGMEDKDLDSRTSGSKTVESSDNEVESHVNGKASGAQGASSSCSEERREGVKRSSNGEVAPGSRHRRSFSLDSSIGNFNIEDGLPKLPPSKNQMGQHSPSNSMDGKMSETSTEFGNGEFSAEEVKKIMESDKLAEIASTDPKRAKRILANRQSAARSKERKMRYIAELEHKVQTLQTETTTLSTQFTKLQRDNSDLKSENNECKLRLQAMEQQSLLKDALNETLDAEVRRLRRAVAELGGESLTSCMARQLAINQQMFELQHQQPSQQRHFLLQNHHTQEEIESRSQQIQGNELHPQAQIQSQQIQRNELHPQP

SEQ ID NO: 226685 - protein, 81 aa, Glycine max
  unsure (1)..(81): unsure at all Xaa locations
  Clone ID: PAT_MRT3847_46727C.1.pep
MSPTWVFVLGIIAAMLVAXNGXSSXKPLVKTVXGKKVCXXXWXXKGWXAYXCNXTISDYFQXYQXENLFAXAXSXPXAHAX

SEQ ID NO: 226686 - protein, 60 aa, Glycine max
  Clone ID: PAT_MRT3847_46728C.1.pep
KELHRRPHYSIIPTTTRTGPANTDGGSDRSAGEEMNRVSNGQAESERSFHSLLVGGALYR

SEQ ID NO: 226687 - protein, 161 aa, Glycine max
  Clone ID: PAT_MRT3847_46729C.1.pep
LARLQIGHLEAKHKALDRLYDVMKEDEKNVLAVFGRSNISALVQLLTATSPRIREKTVTVICSLVESGSCEKWLVSEGVLPPLIRLVESGSAVGKEKATLSLQRLSMSAETTRAIVGHGGVRPLIEICQSGDSVSQAAAACTLTNVSAVPEVRQALAEEGI

SEQ ID NO: 226688 - protein, 79 aa, Glycine max
  Clone ID: PAT_MRT3847_4672C.1.pep
FQEGFPSSLYDVLLLWGGGGGQQLDVTKWTGPREGVLRMKRREGIKKMKPWSVCVTQQWQQPENKRGYIEVKRTLHSIP

SEQ ID NO: 226689 - protein, 188 aa, Glycine max
  Clone ID: PAT_MRT3847_46730C.1.pep
ITSYSIYLRIYNKLYMNSAIYMQQRIVIKVQLETDKCRSKALKIAAKSQGVQALSLEEESNNDQVVVIGNDVDPVCLVNQLRKKFRYATLLSVEDLEEGDEGGQDGGGEEEEAETETEEVTQKEPHYDNYHIPNCPIYTNSTYVPPSPICTTYLPTCAMCATATYFPPSAPMYRPRVYDSYPHSCPIL

SEQ ID NO: 226690 - protein, 73 aa, Glycine max
  Clone ID: PAT_MRT3847_46731C.1.pep
FNKMAVEVPKVTDQALASPKDKCIKNQFVFAQPVRPKLPSSIGVSGNFHALVFINDKVHLSSMPSCPQRHSTN

SEQ ID NO: 226691 - protein, 53 aa, Glycine max
  Clone ID: PAT_MRT3847_46732C.1.pep
KKRRALYAGQKIFTYDFKTPSKIYLLGFAGKSTAKNWYPWECITGEVKIPNLH

SEQ ID NO: 226692 - protein, 335 aa, Glycine max
  Clone ID: PAT_MRT3847_46733C.1.pep
NSARVESLDCSYSVGMRFRMRFETEDAADRRFTGLIAGISDVDPVRWPGSKWRCLLVRWDDIEAARHNRVSPWEIEPSGSASNSSNLMAAGLKRNRIEMTSAKLEFPNPNGIQTSDFGESLRFRKVLQGQEILGVNTPPFDGINAQSPWLYELGRCYPGSNCSGIPPTGNNIRVPHPASDFSCNGIGFSESFRFQKVLQGQEILPSQPYGRALSIEEARANGRYGFYDGCQLLNSRNGWSAQMHDNASHLHASVTPAQVSSPSSVLMFQQAVNPVSNCDYNINKCNKEMEGRIHYQGLYTSEMKGRTLASSPFDDLIVSRRAPEGASSIGMFGCS

SEQ ID NO: 226693 - protein, 138 aa, Glycine max
  Clone ID: PAT_MRT3847_46734C.1.pep
STRRSLICLSDLDLFGARITDFGTNYLKKFKKQRSWKICGGGLTDTGVKNIKELSSLVCLNLSQNSNLTDKTLELISGLTGLVSLNVSNSRITNAGLQHLKTLKNLRSLTLESCKVTANDIKKLKSMYLPNLVSFRPG

SEQ ID NO: 226694 - protein, 107 aa, Glycine max
  unsure (1)..(107): unsure at all Xaa locations
  Clone ID: PAT_MRT3847_46735C.1.pep
YXXXXXXXXXXKIXXXSXXMXPXXXXRXXXRQXXXXLRXVXXAXGXXEXXXXXLGXXGXXXXXHXAXXXXXSIRXXLHXXXMYXMSXSGXEXXXXXXXXXXXGXXRX

SEQ ID NO: 226695 - protein, 262 aa, Glycine max
  unsure (1)..(262): unsure at all Xaa locations
  Clone ID: PAT_MRT3847_46736C.1.pep
CFYNRNRCLCMNLRRRALLHXNSLKHRGTAAKFSREGCVIAVRAGKLAQNWRSPVFRREYFPYRARVRFADFDAKVTSLDWSPDSKYLVAGSKDLTARILCLKKLNTGGVKKRPFLLLGHRDSVAGSFFGVNSKTNRVCKAYTVSRDCYLFSWGFTSDDDGEGEEDGGEGSEPPSPGTPERDVEENFELSENDGXEEKKKISENDGVKKRKKIDIEDGDEGYLSRGKWELLRKDGFMQGWAKVTACDYHRGLDMVVVEFSNG

SEQ ID NO: 226696 - protein, 77 aa, Glycine max
  unsure (1)..(77): unsure at all Xaa locations
  Clone ID: PAT_MRT3847_46737C.1.pep
MAIECITNIQSMSXPQMLHQEHNEYEAPLVFDALLFMHQLNLPKQFICPDXEKPCMNVPELGVLLIDLGGFLSVDPV

SEQ ID NO: 226697 - protein, 54 aa, Glycine max
  Clone ID: PAT_MRT3847_46738C.1.pep
DPNGTSVILSAEFSNDTYVVDVMFLGPLLQQAETLMIMNKHQNRETCNCNRIPM

SEQ ID NO: 226698 - protein, 132 aa, Glycine max
  unsure (1)..(132): unsure at all Xaa locations
  Clone ID: PAT_MRT3847_46739C.1.pep
LIEAHVDVKTLDNYTLRMFCIGFTKRRANQVKRTCYAQSSQIRQIRRKMREIMTNQATSCDLKELVRKFIPEIIGKEIEKATSSIYPLQNVFVRKVKILKAPKFDLGXEITQRVDRPADEIVAEEPTEIVGA

SEQ ID NO: 226699 - protein, 98 aa, Glycine max
  unsure (1)..(98): unsure at all Xaa locations
  Clone ID: PAT_MRT3847_4673C.1.pep
IREGFHYNLHFPGGVIAMLTMLNDGAVEYEDGTLAIEAQMGKDVVLFLIWVVTFEMEERKLMGFKWIFVLSLALLXAAYYCRLRWSVLKFCKLVFDVV

SEQ ID NO: 226700 - protein, 36 aa, Glycine max
  Clone ID: PAT_MRT3847_46740C.1.pep
KLSKYLHGQSVKKRIYVPGKILNIVLGRKNIKVGVQ

SEQ ID NO: 226701 - protein, 163 aa, Glycine max
  unsure (1)..(163): unsure at all Xaa locations
  Clone ID: PAT_MRT3847_46741C.1.pep
VLSMWRYFVGDLGFEVSKMTCPYMKCAVSFFIAFGNAADDTIHCEAFPHKLVQCAEIQEKAVLXFSQEEFLTAWSTQVRAATTMSGDGCPYMDAMVHDRSESTIPGEFVIGVKVTTINNMXAYGLIPGISGSGLLGTIPEPISQQTVWNQMATVRTPLSYDSS

SEQ ID NO: 226702 - protein, 120 aa, Glycine max
  Clone ID: PAT_MRT3847_46742C.1.pep
MVEKAKGRKEEVVTREYTINLHKRLHGCTFKKKAPKAIKEIRKFAQKAMGTNDVRVDVKLNKFVWSQGIRSVPRRIRVRIARKRNDDEDAKEELYSLVTVVEIPKDELKGLGTKVIDDED

SEQ ID NO: 226703 - protein, 261 aa, Glycine max
  Clone ID: PAT_MRT3847_46743C.1.pep
MAVGKNKRISKGKKGGKKKAADPFAKKDWYDIKAPSLFQVKNVGKTLVSRTQGTKIASEGLKHRVFEVSLADLQGDEDHAFKKIRLRAEDVQGKNVLTNFWGMDFTTDKLRSLVRKWQTLIEAHVDVKTTDNYTLRMFCIGFTKRRANQVKRTCYAQSSQIRQIRRKMREIMTNQATSCDLKELVRKFIPEIIGKEIEKATSSIYPLQNVFVRKVKILKAPKFDLGKLMEVHGDYSEDVGAKVDRPADEIVAEEPTEIVGA

SEQ ID NO: 226704 - protein, 72 aa, Glycine max
  Clone ID: PAT_MRT3847_46744C.1.pep
VSLRASPCIASYAMLWIFFIHSSFPQLVNGGCFFRVLMIIRHYYIDRFPSSSNTLSSNSEDIRYAVGTSVAA

SEQ ID NO: 226705 - protein, 244 aa, Glycine max
  unsure (1)..(244): unsure at all Xaa locations
  Clone ID: PAT_MRT3847_46745C.1.pep
MGGTCADLHHHESDIELTDAERIGTDVGPDSGTKSQGEEAEGQHYVEVTMDIHRDSVALHSVKTVAADDVDMVEEEEEEGDKLGLMGKKRLEKKTSFGASVVQSAANRMKQLKRLASFSKPAPKHFERTKSAVGHALTGLKFISKTDGGAXWVEVEKRFHKLTATTDGYLPRALFAQCLGLNKKFEAYAKKLFETLARQKGIQGGSIYKIQMKEFWDHIXDQSFDTRLKTFFDMVDKNANGTLP

SEQ ID NO: 226706 - protein, 183 aa, Glycine max
  unsure (1)..(183): unsure at all Xaa locations
  Clone ID: PAT_MRT3847_46746C.1.pep
MGGTSADLHHHESDIELTDAERTDTKLGASDSKAGNDVGLDSGTKSQAEAEGQHYVEVTMDIHRDSVALHSVKTVAAGVDMVEEEGDKLGLMGKRLEKKTTFGASVVQSAANRMKQLKRLASFSKPAPKHFERTKSAVGHALTGLKFISKTDGGAGWGEVEKQFNKLTATTGGXLPRALFAQC

SEQ ID NO: 226707 - protein, 791 aa, Glycine max
  unsure (1)..(791): unsure at all Xaa locations
  Clone ID: PAT_MRT3847_46747C.1.pep
MGTDVVVGGASSDSHHHHRDSDIELIAERAPLPHSGPLNKRRSSKLNNTSSASTSATEEQDEGDYVEVTMDIQGDSVALHSVKTVNNDQSEDEKLILLGKGMEKKRSFGASVVRSASIRIQQVSQELKRFASLSKQTAPAARVHYDRNKSAASHALKGLKFISIKTTDADAGWVEVERQFDALTASTNGYLHRSLFAKCIGMNKESEAFAGELFDALSRRRGIQGDSINKAQLKDFWDQVSDQSFDSRLRTFFDMVDKDADGRITEEEIKEIICLSATTNKLANIQKQAEEYAALIMEELDPEDTGFIMVNDLEMLLLHGPTHSTRGDSKYLSQMLSQKLKPTFADSAVMRWCRDAKYFLLDNWQRSWVLALWIGVMFGLFAYKFVQYRRKAAYEVMGHCVCMAKGAAETLKLNMALILLPVCRNTITWLRNKTKLGVVVPLDDNINFHKVIAVAIAVAVAVHSIYHLTCDFPRLLHASDEKYKLMQPFFGDRPSDYWYFVKSWEGVTGIIIVVLMAIAFTLANPRFRRGRAKLPKPFNKFTGFNAFWYSHHLFVIVYALLVVHGIKLYLTKEWYKKTTWMYLAIPITIYALERLVRAFRSSIKSVKILKVTLYPGNVLSLKMSKPQGFSYKSGQYMFVNCAAVSPFEWHPFSITSAPDDDYLSVHIKILGDWTRSLKAKFTQACQQPLNGQSGLLRAECLKGDNSPSSFPKVLVDGPYGAPAQDYREYEVVLLVGLGIGATPMISILKDMVNNFKANDEEEGGQDRGXSDFKTRRAYFYWVTREPGSSDW

SEQ ID NO: 226708 - protein, 47 aa, Glycine max
  Clone ID: PAT_MRT3847_46748C.1.pep
GVKLAIHLIISVSITIYIDLSLTYIYLAMVAPCPTFMMVRTKNTPAM

SEQ ID NO: 226709 - protein, 100 aa, Glycine max
  unsure (1)..(100): unsure at all Xaa locations
  Clone ID: PAT_MRT3847_46749C.1.pep
YTISLRMNNRLGLVVLLLAQILVLHVKAHESDQAQAPLTVLNPFEHKTQTGVQLHDDDQNSDHKVAVSGAIEESPSSSEEKSGESNEAAEAPXIRRMGKH

SEQ ID NO: 226710 - protein, 74 aa, Glycine max
  Clone ID: PAT_MRT3847_4674C.1.pep
EISKEPNLKFLKVTCSQVMHTITSQMLSSLELAYAKMTWRRNLQESSYFVHCLLKIRSNKSRVIYVIVLVKSMK

SEQ ID NO: 226711 - protein, 50 aa, Glycine max
  Clone ID: PAT_MRT3847_46750C.1.pep
SSSRLAFDPCIWPLLRQPSHPRTMVIVITKSTDPPHSRLALNDKQTGYCN

SEQ ID NO: 226712 - protein, 107 aa, Glycine max
  Clone ID: PAT_MRT3847_46751C.1.pep
FIDSFISLLRVRVISLVSFRIPIGISNTVKEREIWQEVVELQHLRSMSHSHIHRRISYRMFLTALRVLLHGVSCFSFFFHHRFRFSWPLNFEPDSSVIFRKACLEIL

SEQ ID NO: 226713 - protein, 60 aa, Glycine max
  Clone ID: PAT_MRT3847_46752C.1.pep
KPMDRGNFIPQRRGFYALHYKNPEEQNLINCAQLEKTIVLILIEYTTYQHVLMEYFFVGK

SEQ ID NO: 226714 - protein, 78 aa, Glycine max
  Clone ID: PAT_MRT3847_46753C.1.pep
VNHPNGVQTLVNMVFRVSDQKCSESAVEVLLTVCGEFERAREEAIESGVLTRLLLLLQSQCSNTTKSKARMLLKLLRS

SEQ ID NO: 226715 - protein, 56 aa, Glycine max
  Clone ID: PAT_MRT3847_46754C.1.pep
SNFVRVSDKLQRIKEEKTNVLMILTSIGSSYIKRVMIVNSNLHCIRKKYVYDKIGR

SEQ ID NO: 226716 - protein, 75 aa, Glycine max
  unsure (1)..(75): unsure at all Xaa locations
  Clone ID: PAT_MRT3847_46755C.1.pep
MAFGSLTIVFSLRVSSATACDRCLSQTKASXFANASALSAGARGXGSLVQHISAGYVDAGVDSRVIIGLRSGACF

SEQ ID NO: 226717 - protein, 95 aa, Glycine max
  Clone ID: PAT_MRT3847_46756C.1.pep
YNLSNRLKSLQGLCKQHFMEEDSELLPIMEAVGLSKEEEEDALEHCFVVMQGTHGRLLKFLLEGLPPNDSMKYLDLISMCRDKERMESMLRVVVE

SEQ ID NO: 226718 - protein, 64 aa, Glycine max
  Clone ID: PAT_MRT3847_46757C.1.pep
AQDQRGCDIANSIDAGGLGTGVLQRAPNTISPLISVTNVESYLLGGTGGTDGGTFILLGTPLSI

SEQ ID NO: 226719 - protein, 136 aa, Glycine max
  unsure (1)..(136): unsure at all Xaa locations
  Clone ID: PAT_MRT3847_46758C.1.pep
VLSSLSLFRARSARAASAWLLLGPAFLVCSRRFLLXCFFSARFGGWLLLFSGPGAAGGVFCPPPSFGVAFVFXLYPTRSVSPPPCFSLACFLLPAIARSVLPFFPFTHELKNFSNKIKKKKKKKKKKKKKKKKKQK

SEQ ID NO: 226720 - protein, 50 aa, Glycine max
  Clone ID: PAT_MRT3847_46759C.1.pep
LICRLTVTLNLTVLEMGENMKRRFANMRTCLWPSGVSCEHSQAKAYIISS

SEQ ID NO: 226721 - protein, 299 aa, Glycine max
  Clone ID: PAT_MRT3847_4675C.1.pep
MYTSMTPIFFYASCSITFIQFIRKINNRLPTQATEQVAQLLFRVPISFHLGQTRVISAQLFDNDDLRGAMETILQNPQLNSTEFYVVTELIPQPQSSSPQPSCPQLQLSPPQQLPYNNIDLNNPVSSYNNLESQDPFDIYTSYTQILSENDSFFHGQQTSFDKQNHPSSPFTPPSQLPQMQTSNRDEHPIANEDLIIRFHHENMDDFTEDEDQQFFDHINQQSDDQSDDQTDDEGVGRPTTPPSPPLQYQQPRCPVDLNFDHLPHYIDRHHFVHQQHNVQPPVGVLEVGMTFDDKAQCI

SEQ ID NO: 226722 - protein, 80 aa, Glycine max
  Clone ID: PAT_MRT3847_46760C.1.pep
KAVYKGICNGPKCVVNVAKSKSVLLWMNIAPCDPGLASINIEPLHIDLIKDDSMKIIVDTQDVSKENYRFIQPEVDVFSL

SEQ ID NO: 226723 - protein, 119 aa, Glycine max
  unsure (1)..(119): unsure at all Xaa locations
  Clone ID: PAT_MRT3847_46761C.1.pep
AGRRNVGRPKKKPVSTSVKASLHFPIRPIGRSFKKGRYAHRVGTGAPVYLTKLLQYLSAKVLKFSENAARDNKKNMIIPIHVLLAVKNDNDLXKLLTDVTITHNNILADINPIVLPKKT

SEQ ID NO: 226724 - protein, 77 aa, Glycine max
  unsure (1)..(77): unsure at all Xaa locations
  Clone ID: PAT_MRT3847_46762C.1.pep
LPHXYKAEIACRRTNWPRIIRLQRYDTFESFKCPTRLQKNINKGCVLFLKGLLFQEVNQVVDVLQNNRMNSRIQTQF

SEQ ID NO: 226725 - protein, 125 aa, Glycine max
  Clone ID: PAT_MRT3847_46763C.1.pep
NKRNRKSMDGASLHTGGSIPHRLHWKRMKEEKGTDPSLAEFYFRTHRRKKDQSWVGPRAESAYDKFEQRKTELSSKSSKFTSGEGGTDSQADSQPSMHLCPSVRGLSPDSEIWGPQVLKVLPYRY

SEQ ID NO: 226726 - protein, 47 aa, Glycine max
  Clone ID: PAT_MRT3847_46764C.1.pep
VMAGLGLTNVIWRLLIMVPSLRLCHLVFKPYDVSLRVFLFPGFRHFP

SEQ ID NO: 226727 - protein, 157 aa, Glycine max
  Clone ID: PAT_MRT3847_46765C.1.pep
MGFSSFLGRVLFASLFILSAWQMFNEFDDTGGPIAKELIPKFTVLKRNLSSKLGVKTPDINVRSVIASIIFLKGVGGILFVLGSTFGSYLLLLYLGLSTPILYDFYNYRSNNPEYYLLLNDFIQSTALCGALLFFIEMKYSITRRQIRKKTPKAKTI

SEQ ID NO: 226728 - protein, 82 aa, Glycine max
  unsure (1)..(82): unsure at all Xaa locations
  Clone ID: PAT_MRT3847_46766C.1.pep
MASLKVAFLAAVLCMVVVSAPMAHAAITCGQVTSSLPNCIGYLQKGGTSSXVCCNGAKSLIAVVSTTVDRQTVCNCLKLSPA

SEQ ID NO: 226729 - protein, 157 aa, Glycine max
  Clone ID: PAT_MRT3847_46767C.1.pep
MGFSSFLGRVLFASLFILSAWQMFNEFDDNGGPIVKELIPKLTVVRRNLSSKLGVAIPDINVRTVIASTMLLKGVGGVLFVLGSTFGSYLLLLYLGISTPILYDFYNYRSNIPEYYLLLNDFIQSTALCGALLFFIEMKYSITRRQMRKKTPKAKTV

SEQ ID NO: 226730 - protein, 502 aa, Glycine max
  Clone ID: PAT_MRT3847_46768C.1.pep
MELSRLFVSDTCFFSPPIRCSPSPALSTFFAVKNRRSRRRSSFCSASNPDTLVAGGAAVVAGAGEKHEEDLKSWMHKHGLPPCKVVLKDKPCPNDSHKPIHYVAASQDLQVGDVAFSVPNSLVVTLERVLGNETVAELLTTNKLSELACLALYLMYEKKQGKKSFWYPYIRELDRQRGRGQLSVESPLLWLKSELDYLSGSPIKDEVIQREEAIRKEYNELDTVWFMAGSLFQQYPYDIPTEAFSFEIFKQAFAAIQSCVVHLQKVSLARRFALVPLGPPLLSYQSNCKAMLTAVDGAVELAVDRPYKAGDPIVVWCGPQPNSKLLINYGFVDENNSNDRLIVEAALNTEDPQYQDKRMVAQRNGKLSVQVFHVYAGKEREAVLDMLRYMRLGYVSDPSEMESVISPQGPVCPVSPCMERAALDQLADYFKARLAGYPTTLAEDESMLTDDNLNPKKRVATQYVRLEKKMLHACLQATTDFINQLPDHTISPCPAPYAPLLK

SEQ ID NO: 226731 - protein, 95 aa, Glycine max
  Clone ID: PAT_MRT3847_46769C.1.pep
RLEWSKPLVTFSLSCGSCSSPGGSSRPQSKGANRTISRGASRTYKGADQGKAQKESHKTKLPSRLCLRAGRELSSNPYRVMLLLEQGTSLTDLIL

SEQ ID NO: 226732 - protein, 50 aa, Glycine max
  unsure (1)..(50): unsure at all Xaa locations
  Clone ID: PAT_MRT3847_4676C.1.pep
SLTHXSXXXYYYFLSRXGXXWCATVSDXXGSCASSCXAQAPGXAXSQPXX

SEQ ID NO: 226733 - protein, 162 aa, Glycine max
  unsure (1)..(162): unsure at all Xaa locations
  Clone ID: PAT_MRT3847_46770C.1.pep
MLPGRFSFFGGGGDSGAVVDNANSSPSKGGGDELAVVQPTLKLETDRQVYRPGDPVILTIQISNPANGYSFLMEXLWFEIRGIEKLDTQWFGTQKLMPGSKQRSCSLRDPLCISGSPSRHTLTATMRIRRAPPRNQRQLNRNHSWYDQKVVIVKVYKFIIRS

SEQ ID NO: 226734 - protein, 92 aa, Glycine max
  Clone ID: PAT_MRT3847_46771C.1.pep
YVRNDRGTPMILDNNYYRNILDSKGLLIVDHQLANDKRTKPYVKKMAKSQDYFFKEFSRAIPLLSENNPLTGPKGEVRKQCNVANKPHDQDP

SEQ ID NO: 226735 - protein, 98 aa, Glycine max
  unsure (1)..(98): unsure at all Xaa locations
  Clone ID: PAT_MRT3847_46772C.1.pep
VLGXFFFFFFFFFFFFFFFFFFFFFFLGNQGPFFFKAPKEKTTLGSFLLYFVAPPLNPLKGSLGPFLNPFFFLLIERGPLNFLKGEGLFDFFPGVWEV

SEQ ID NO: 226736 - protein, 80 aa, Glycine max
  Clone ID: PAT_MRT3847_46773C.1.pep
STIRYTIYPLQLVTVFLLMEEDSLIPQHTLILIVSNHNLLELNHTSQRKTEHNTTSLIRHKHGTSAAEKRKMAQWRKKQR

SEQ ID NO: 226737 - protein, 83 aa, Glycine max
  Clone ID: PAT_MRT3847_46774C.1.pep
ANAGSGMAVHDDCKLRLLELKTKQTHRFIVLKIEDQQKLVIVEKLGEPAQGYEDITGSLPADECRDAVYDGEHVTERNGRESK

SEQ ID NO: 226738 - protein, 52 aa, Glycine max
  Clone ID: PAT_MRT3847_46775C.1.pep
SIDRSQCYHFLCCTANINVLYMKFSPMCIEATQIAIKTITVCIPLGETEYSP

SEQ ID NO: 226739 - protein, 117 aa, Glycine max
  Clone ID: PAT_MRT3847_46776C.1.pep
FRRMGEEVKSLVVEEEMGVVESKEWYLVSYAPHGVPTTDHLKLRKVRLSIAPESIPDAHVAIEMLLFSVDPYLRGRFTGTLDGLYFPQFELNQVITIFGIGRVKRQMTVNMKREILF

SEQ ID NO: 226740 - protein, 46 aa, Glycine max
  Clone ID: PAT_MRT3847_46777C.1.pep
NVVDLKCPYSNTKQKLLYIYMENKFMCATKSSIMKYVLNLAFIHYT

SEQ ID NO: 226741 - protein, 47 aa, Glycine max
  unsure (1)..(47): unsure at all Xaa locations
  Clone ID: PAT_MRT3847_46778C.1.pep
AXXXTNGCTDXXXXNXXXXXXXNXXXILXXNXNLXAEXXSLRTQXRR

SEQ ID NO: 226742 - protein, 117 aa, Glycine max
  Clone ID: PAT_MRT3847_46779C.1.pep
MSLRIKAVVDKFVQELQEALDADIQDRIMKDREMQSYIEEREREVAEREAAWKADLSRREAEIARQEARLKMERDNLEKEKSVLMGTASNQDNQDGALEITVSGEKYRCLRFAKAKK

SEQ ID NO: 226743 - protein, 69 aa, Glycine max
  unsure (1)..(69): unsure at all Xaa locations
  Clone ID: PAT_MRT3847_4677C.1.pep
RKRGHRGCGSCWKRGNGXQGRKKNPDLSYTEKTXTTETVNMEGAPAEANLEEAEKGVPDENQDSKREPT

SEQ ID NO: 226744 - protein, 109 aa, Glycine max
  unsure (1)..(109): unsure at all Xaa locations
  Clone ID: PAT_MRT3847_46780C.1.pep
VTVLIKPHFGYLLKRATCRSXPYMQPGFFDLIRMKLPTVYDIKHLIVLYNSPHGGLNKLAKSLQLXQIGACHQAGSNSSLTPGTFRQLTERFIRGSAKKDNCVTDHISH

SEQ ID NO: 226745 - protein, 108 aa, Glycine max
  unsure (1)..(108): unsure at all Xaa locations
  Clone ID: PAT_MRT3847_46781C.1.pep
GRVGPSKAKYWRETDSDTVFERDRRREKERDRSRDRTIGGKRDRDPENERDDKNRERRDDRYGHKDRRQEKERDRSWDTVFERDRRREXKEIEWEHKRGKERERSRER

SEQ ID NO: 226746 - protein, 71 aa, Glycine max
  Clone ID: PAT_MRT3847_46782C.1.pep
CNVGQLENAVLVMEEALRKGFCPSRLVYSKLSNRLLASDKSERAYKLFLKIKHARSLENAKKYWRSNGWHF

SEQ ID NO: 226747 - protein, 91 aa, Glycine max
  Clone ID: PAT_MRT3847_46783C.1.pep
LRIRHEELVTPLCVNPLAWYSDEIFGGKSIQNERSVYSENPLTYLDDLIYQQGESYGITDSPHGMPHALSDPQLNKSGARSGYISQDGLGQ

SEQ ID NO: 226748 - protein, 101 aa, Glycine max
  Clone ID: PAT_MRT3847_46784C.1.pep
KFTTYPQKTSTFFCHFFGGILHFQGEDLALPLRGTTTGKKTLIPRLFTKPKFPSKVDSGHSSIFGFISRGTFNNIKGAKPAKPENPGKIQTLAKLNRQKGD

SEQ ID NO: 226749 - protein, 46 aa, Glycine max
  Clone ID: PAT_MRT3847_46785C.1.pep
ILELKGSSRYLQHPAVHMDLSLSHFVNYNVLPLTMASKLNRKRRKK

SEQ ID NO: 226750 - protein, 58 aa, Glycine max
  Clone ID: PAT_MRT3847_46786C.1.pep
FQFEIIFFHKKYICLFLSLFCLLKYLKYARKWLNSVKDKNLVFQKLLKVFLKHVSMNE

SEQ ID NO: 226751 - protein, 114 aa, Glycine max
  unsure (1)..(114): unsure at all Xaa locations
  Clone ID: PAT_MRT3847_46787C.1.pep
SRATSSPLSPASSCFLAGSPLIGTVSPATDPKPCIHTKPRPLNFRASAIPHTVQFAVECGYSNYEEVSGTNSDEGLEITNLGIAPQIVDALAKKGIAXSSPFRICLEVGILKQM

SEQ ID NO: 226752 - protein, 52 aa, Glycine max
  Clone ID: PAT_MRT3847_46788C.1.pep
GGALTTERPVSTIQDSSLLTRACYILSKLTYHQIPIHWSTIYKLVTTITLPF

SEQ ID NO: 226753 - protein, 61 aa, Glycine max
  Clone ID: PAT_MRT3847_46789C.1.pep
GQYHQRHGEVAGSLARQPIVGFGQRPMVSGVSGQCLEWVFPWEPHLRVAVQSHMFCNKTYV

SEQ ID NO: 226754 - protein, 106 aa, Glycine max
  Clone ID: PAT_MRT3847_4678C.1.pep
LFMASASSPPPPPSSPTWFSHSISVKLTNSNYILQCNQLHPVIKGHGLSHFLFFISKNTNKLDINSSTRGTVQNTHQDQDMRKYGSLIQVNYQELSYQTSDSNPVK

SEQ ID NO: 226755 - protein, 462 aa, Glycine max
  Clone ID: PAT_MRT3847_46790C.1.pep
MQPPRRKNNNLPNSETSTTMKGKRNSSISISIVVVVFSIFLFGVFMYNEDVKSMAEFTFLRPKAQEIQEETVSNNNSRTQPERNRVEDSEESQEPIDLKAVVAEEKIVEEYEEENEEVVLPPEECDLFTGEWVFDNLTHPLYKEDQCEFLTSQVTCMRNGRSDSLYQNWRWQPRDCSLPKGRRLMFVGDSLNRNQWESMICLVQSVVPQGKKSLSKNGSLSIFTIEDYNATVEFYWAPFLVESNSDDPKMHSILNRIIMPESIEKHAVNWKNVDYLIFNTYIWWMNTATMKVLRGSFDEGSTEYDEVPRPIAYGRVLNTWSKWVEDNINPNRTKVFFSSMSPLHIKSEAWNNPDGIKCAKETIPILNMSTTLQVGTDRRLFVVANNVTQSMKVVPVNFLNITTLSEFRKDAHTSVYTIRQGKMLTPEQQADPTTYADCIHWCLPGLPDTWNEFLYTRIISQS

SEQ ID NO: 226756 - protein, 474 aa, Glycine max
  unsure (1)..(474): unsure at all Xaa locations
  Clone ID: PAT_MRT3847_46791C.1.pep
MQPPRRKNNNLPNSETSTTMKGKRNSSISISIVVVVFSIFLFGVFMYNEDVKSMAEFTFLRPKAQEIQEETVSNNNSRTQPXEKRVEDSEESQEPNDLKAVXGRIEDSGESMRXENEEVVLPPEECDLFTGEWVFDNLTHPLYIEDQCEFLTSQVTCMRNGRSDSLYQNWRWQPRDCSLPKFKPRLLLEKLRGRRLMFVGDSLNRNQWESMICLVQSVVPQGKKSLSKNGSLSIFTIEDYNATVEFYWAPFLVESNSDDPKMHSILNRIIMPESIEKHAVNWKNVDYLIFNTYIWWMNTSSMKVLRGSFDEGSTEYDEVPRPIAYGRVLNTWSKWVEDNIDPNRTKVFFSSMSPLHIKSEAWNNPDGIKCAKETIPILNMSTTLQVGTDRRLFAVANNVTQSMKVVPVNFLNITTLSELRKDAHTSVYTIRQGKMLTPEQQADPATYADCIHWCLPGLPDTWNEFLYTRIISQS

SEQ ID NO: 226757 - protein, 63 aa, Glycine max
  Clone ID: PAT_MRT3847_46792C.1.pep
KKFLSLKYQINNNILAKKGPFDPQKKKSFPKVPSRDSLGGPFKLQELFPRTTFGKTIFFWEGN

SEQ ID NO: 226758 - protein, 159 aa, Glycine max
  Clone ID: PAT_MRT3847_46793C.1.pep
MTKFRKLGRPTGHRMSMLRTMVSQLVKHERIETTVAKAKEIRRLADNMVQLGKEGSQHAARQAASFVRGDDVIHKLFTELAYRYKDRAGGYTRLLRTRIRVGDAAPMAYIEFIDRENELRQAKAPTPQPPQRAPLDPWARSRLSRQFAPPKEDKSGSDL

SEQ ID NO: 226759 - protein, 157 aa, Glycine max
  unsure (1)..(157): unsure at all Xaa locations
  Clone ID: PAT_MRT3847_46794C.1.pep
MTKFRKLGRPTGHRMSMLRTMVSQLVKHERIETTVAKAKEIRRLADNMVQLGKEGSQHAARRAASFVRGDDVLHKLFTELAYRYKDRAGGYTRLLRTRIRVGDAAPMAYIEFIDRENELRQAKAPTPQPPQRXPFDPWARSRLNRQFAPPKEDKIWI

SEQ ID NO: 226760 - protein, 90 aa, Glycine max
  Clone ID: PAT_MRT3847_46795C.1.pep
GEKQTGNVHKFCKKKPLQTLNTQKTTVKPLPFLKGDPLKNFIGATRGPNSKTGFFQKKKKSYPPGTLFLAQGIIQIPGNFRPKKILGVIK

SEQ ID NO: 226761 - protein, 53 aa, Glycine max
  Clone ID: PAT_MRT3847_46796C.1.pep
GSTGFLWANRQKRTPLLQVPGLVNLIGNHLWVNWDQQSSSKPYQAPFCHSTHC

SEQ ID NO: 226762 - protein, 333 aa, Glycine max
  Clone ID: PAT_MRT3847_46797C.1.pep
MVRKTIIIIYLVKIIICRRGQRTESCKHTEEKRKMTSSRPPPSKSVDLDLTIVSAKHLKNVNWKNGNLKPYVVFWVDPERRLATKSDDSGNTSPVWNERFALPLPLPLHDSFLTLEIFHSKPSDTPKPLVATLRLPLKDLHDLHDSTRLRKFPLSRPSGRPHGKIHLKLGLLGRPQFDYASPNPNPNPNPSPNFVCYRGYTPSPSHSHSHSPSPPPSPYTSYTDSYSGYYPGYYSGAPPPPPPRPFFDRYAGSSGPSAPLDYSSTYDSKPKAPKMGLGAGLAVGAVAGALGGLALEEGLNYEEDKIAERVENDVTAANVAAARDNYSDYRVDY

SEQ ID NO: 226763 - protein, 285 aa, Glycine max
  Clone ID: PAT_MRT3847_46798C.1.pep
MASSRPPPSKSVDLDLTIVSAKHLKNVNWKNGDLKPYVVFWVDPERRLATKSDDSGNTSPVWNERFALPLPLPLHDSFLTLEIFHSKPSDTPKPLVATLRLPLKDLHDSTRLRKFPLSRPSGRPHGKIHLKLGLLGRPQFDYASLNTNPNPNFVCYRGYTPSHSPSPPASPYTSYTSYTDSYSNYYPAYYSGAPPPPPPRPFFDRYAGPSGPSAPLDYSSTYDPMPKPPKMGLGAGLAIGAVAGALGGLALDEGLNYEEDKIAERVENDVAAAARDDYSDYRVDY

SEQ ID NO: 226764 - protein, 309 aa, Glycine max
  Clone ID: PAT_MRT3847_46799C.1.pep
MYSLAQHKYIPRFHLQACKNHPPHHPSSPVFCSTTTTTSRDKPNPKPLVIEPWLVPVPPTVVTADNPRPMNNDPSLQSTWSHRAWVAAGCTTLLISLGESIKGAMDLNMWAEPILAGWVGYILADLGSGVYHWAIDNYGDASIPIVGTQIEAFQGHHKWPWTITKRQFANNLHALARAVTFTVLPIVLLCHDPIVEGFVGMCSGCIMFSQQFHAWSHGTKSRLPPLVVALQEAGVLVSRSQHAAHHRPPYNNNYCIVSGVWNEFLDKHKVFEALEMVLYFKTGVRPRSWSETASEWIEEIETPSQIQAQ

SEQ ID NO: 226765 - protein, 105 aa, Glycine max
  Clone ID: PAT_MRT3847_4679C.1.pep
SRRPPFFFFFSCLFYFLLNFSEIYWDEGFFCHQTISNLNFFEVLPNFRSKRTAKRCINFFLTTTGRGGRVIFLIILLPRVELWSEVRHFTALTTCNRCPMLRIFT

SEQ ID NO: 226766 - protein, 81 aa, Glycine max
  Clone ID: PAT_MRT3847_467C.1.pep
TNAFLLLVSCFLLAFCSIPPGAQILKEKSNMDSTSDARTYYQSETHDDHVFKPKEDKDNANEVFSMDYTPARRKPPIHNLN

SEQ ID NO: 226767 - protein, 157 aa, Glycine max
  unsure (1)..(157): unsure at all Xaa locations
  Clone ID: PAT_MRT3847_46800C.1.pep
EPQWINGVGPFVEFRGAAISHQYIFRGCPTKVVGPFGSQVFLKKKEIRFSPPPQQEILGLGSPKAKQGFEFKLVRGSPFLGFFPHPGVGGKTQNPGVFELVDKTAFMARGEGHPLGFKFLFSPRVFTPWGGAFLEKKKNKDPKKKFCGXKRNRPQHK

SEQ ID NO: 226768 - protein, 81 aa, Glycine max
  Clone ID: PAT_MRT3847_46801C.1.pep
QDHRLYLLPMMLSSQFSVSDFFSYNFNFSFSKLTQNNITRLSFAGNIEDSEKNTSKSKTRVQQQQDHSALIDIPNDFPIAG

SEQ ID NO: 226769 - protein, 54 aa, Glycine max
  Clone ID: PAT_MRT3847_46802C.1.pep
IKMMSLEKMGMCGASVHDWNPHMSLLRAKRCRLHDVLSLSECGYSSTLEPNSEL

SEQ ID NO: 226770 - protein, 170 aa, Glycine max
  Clone ID: PAT_MRT3847_46803C.1.pep
RVVARTEEEESGVSIQLEFPKGRVKKIMALDKDVKRVSSEALFLVSRSTELFLQFLAEKSAQVAIEKKRKTVNLEHIREAVKRHQPTRDFLLDELPPPSQPTKPDRPTQPAGRPKLDPPPRGTRRIDLFFRKPELDNPAQAQPPENPAQAQPPENPDQDQAQSPVPVDES

SEQ ID NO: 226771 - protein, 113 aa, Glycine max
  unsure (1)..(113): unsure at all Xaa locations
  Clone ID: PAT_MRT3847_46804C.1.pep
RPLNDPKPALSTKMIIWXKNRVFNMFGQSGQRFLASSSEHQDKGNEIAQLQVIRRSLGKTLHFDKHMHPEASLFLNLWLDSEAERCYRKYKTYHCLMEAGLDVNCTTVAELLS

SEQ ID NO: 226772 - protein, 51 aa, Glycine max
  Clone ID: PAT_MRT3847_46805C.1.pep
KKKVIDIEWRQGKRPCKTNIIMEGKRVTCLIWDHSREFDDCCGYHGEHGGR

SEQ ID NO: 226773 - protein, 169 aa, Glycine max
  Clone ID: PAT_MRT3847_46806C.1.pep
RKLGIRLERGSANMDVLIALGTNAAYFYSVYSVLRAATSPHFEGNDFFETSAMLISFILLGKYLEILAKGKTSDAIAKLMNLTPDTAVLLTLDGDGSVVGEEEIDSRLVQKNDVIKVVPGAKVASDGFVVWGQSHVNESMITGEARPVAKRKGDTVIGGTVNENGVLHV

SEQ ID NO: 226774 - protein, 74 aa, Glycine max
  Clone ID: PAT_MRT3847_46807C.1.pep
SFWGPPERCHFCKPRFLSWDFLPLDVFKESGSELAVKSAGKLHHKGKPYEMVDGDPLTWWPFFESGLCAAFFLF

SEQ ID NO: 226775 - protein, 87 aa, Glycine max
  Clone ID: PAT_MRT3847_46808C.1.pep
PSLFRALPHLDVPHHPPPQRHISLFVRHRATGPTRLPRARYVGSVRGRRRRCTLGMLGWAFMSVLVSRAKRVCIAHAGTRSCSAGHW

SEQ ID NO: 226776 - protein, 109 aa, Glycine max
  Clone ID: PAT_MRT3847_46809C.1.pep
GKALISPGKVRNHSGLMSLKHKNVVKLIPPSHGFLARCGRKNWVFHAPSFFIQGSKVISSNLKRFFFFLFSFNPQFIFWLSNVTVLIQWKFNQNFVPKKQKKKKKSKNK

SEQ ID NO: 226777 - protein, 102 aa, Glycine max
  Clone ID: PAT_MRT3847_4680C.1.pep
TSHEGRKSMMKLAERMVLSFSTGVGASTANAWTPLPLDLENVRVMTRKSVDDPGRPSGIVLSAATSLWLPVPARRVFDFLRSENTRNQVVTYQISMLLTLYS

SEQ ID NO: 226778 - protein, 79 aa, Glycine max
  Clone ID: PAT_MRT3847_46810C.1.pep
CFLRQPTIGLILIVESKYKHVANKPKHYRGALKFEKPSQATYASQSIFFNTELREGPMHYKRRKHPQRFTTLRLHHCRR

SEQ ID NO: 226779 - protein, 60 aa, Glycine max
  Clone ID: PAT_MRT3847_46811C.1.pep
FSISWRLSQYDTSHVTVYSTPCLVRTLYQSKSYVGSSFRDLDNLLQLLSRSMIVSINHEN

SEQ ID NO: 226780 - protein, 118 aa, Glycine max
  Clone ID: PAT_MRT3847_46812C.1.pep
NPEWEPGVFSGPEKFFPPLKSLIAKIPYAPQGKTASQPSSSFSANNPNSRGAAPVAPGKPLASLGPLIGPPFLPHLAPVPSRPPWGPWSPPGPPPGSPPRVRPRPPPPRPPLSPPPPP

SEQ ID NO: 226781 - protein, 56 aa, Glycine max
  Clone ID: PAT_MRT3847_46813C.1.pep
LLAPICRHFVMFTPFPPPARILAPTYYTIVYIYSTSHQITLLCDVGLTGEAEPIFP

SEQ ID NO: 226782 - protein, 60 aa, Glycine max
  Clone ID: PAT_MRT3847_46814C.1.pep
IWQYSKSIILKPYRLYNRCFLPKKNKILLFLVSKCHVFQHLDKNLIPSVYDPRDAPMNLV

SEQ ID NO: 226783 - protein, 571 aa, Glycine max
  unsure (1)..(571): unsure at all Xaa locations
  Clone ID: PAT_MRT3847_46815C.1.pep
EKLFTDTLAKTMVEPRRRCFTLPAVDLXKKAVGGIIYIRVISANKXSRSCXKTCRRQPNGTSNGCSEDNFDDKDLQTFVEVEIEELTRRTDVRLGSTPRWDAPFNMVLHDNAGTLRFNLHESSPNNVRCDYLASCEIKLRHVEDDSTIMWAIGPDSGVIAKQAQFCGEEIEMVVPFEGSNSGELKVSIVVKEWQYSDGSHSLNSLRSNSQRSLIGSSSLLSKTGRKLKITVVEAKDLAAKDKSEKINPYIKLLYGKVVKKTKVALTTTSTTTNPVWNQSFEFDENDGDEYLNVKCFSEEIFGDENIGSANVNLEGLGDGSIKVEWIPLEGVSSGELKLKIEVVKVEDQEGSRGSTNGWIELVVIEARDLIAADLRGTSDPYVRVNYGNSKKRTKVIHKTLNPRWNQTLEFLDDGSPLILHVKDHNALLPESSIGEGVVEYQRLPPNQMSDKWIPLQGVKSGEIHIQITRKVPEMQTRHTLDSQPSSLSKSHQIPTQMREMMKKFRSLIEDENLEGLTTTLSELESLEDTQEGYITQLETEQMLLLSKINELGREIINSSSRASSSPSQSGI

SEQ ID NO: 226784 - protein, 44 aa, Glycine max
  Clone ID: PAT_MRT3847_46816C.1.pep
NVRTLKFIWYSRVIATSMECIPWDKALQKGVLDPIILSGGHIFY

SEQ ID NO: 226785 - protein, 47 aa, Glycine max
  Clone ID: PAT_MRT3847_46817C.1.pep
PTIMEWKTRTHYPVDKDLRHGTNTRANPRCQNCTGRSHTMEPLEEMH

SEQ ID NO: 226786 - protein, 50 aa, Glycine max
  Clone ID: PAT_MRT3847_46818C.1.pep
NMRLTKAFTPLLFGYGVVTHKRVEGINQPLMLHCNAQHLSKNLLKTFPKL

SEQ ID NO: 226787 - protein, 60 aa, Glycine max
  unsure (1)..(60): unsure at all Xaa locations
  Clone ID: PAT_MRT3847_46819C.1.pep
AKSLYEAPEYRVITPAILSARLRIKGSRPRKAIRXLTAKGSIRMVLAQPGYQISPRASNP

SEQ ID NO: 226788 - protein, 650 aa, Glycine max
  Clone ID: PAT_MRT3847_4681C.1.pep
CFCPELERCGSSFGIYFDNSKYCNNSNGNYTANSIYQTNLNTLLSTLTSHTEIDYGFYNFSHGQNSDKVYAIGLCRGDVKPDECRSCLNNSRVSLTRLCPKQLEAINWEEKCMLRYSNRAIFHTMDASFSYHMNNVNNATDAEEFNKVLGELLRNLSDKAASGDSRRKYAADTAVFANLQTIYGLVQCTPDLSRQDCGECLHWSLADFGNVFKNKVGAVVLRPSCNVRYEIYPFYDEPTPSASVPLSLKEKGNSLRTTIAIVVPTVLVVVALLIFISIYFRRRKLARKNLLADEDDDEIELAESLQFNLDTIKVATNNFSDSNKLGEGGFGAVYQETLSNGQVIAVKRLSSDPGQGGVEFKNEVLLLAKLQHRNLVRLLGFSLEGKEKLLVYEFVPNKSLDYFIFDPTKKARLDWDRRYKIIRGIARGLLYLHEDSRLRIIHRDLKASNVLLDEEMIPKISDFGMARLVVVDQTQENTSRVVGTYGYMAPEYVMHGQFSIKSDVFSFGVLVLEIVSGQKNHGIRHGENVEDLLNFAWRSWQEGTVTNIIDPILNNSSQNEMIRCTHIGLLCVQENLANRPTMANVALMLNSCSITLPVPTKPAFFMDSATTSLPNMSWEVNSGTTRSNQSTTKSAHDSVSEASISELYPR

SEQ ID NO: 226789 - protein, 108 aa, Glycine max
  unsure (1)..(108): unsure at all Xaa locations
  Clone ID: PAT_MRT3847_46820C.1.pep
MRRLDAQIVLTFDLFDDANADDSGVWXSVYASIRVQQRNGSRSXTTVQVLRTEFTYIKILKYVKTEFCCNATVVQDPDLGQVIXLLXYQXEHVSSFLVQDGIVKQIHI

SEQ ID NO: 226790 - protein, 115 aa, Glycine max
  unsure (1)..(115): unsure at all Xaa locations
  Clone ID: PAT_MRT3847_46821C.1.pep
FIXFXCHRCTDNFYYFLIRLNTRYFNHPRVLSQFYFTVFIRLGQEVYALRDIIHFIVEASLNKKQDSPIDEREEIVYLFNIMGYNMYIYIYIYIYIYIYINKLKDNFFYLKCQLY

SEQ ID NO: 226791 - protein, 48 aa, Glycine max
  Clone ID: PAT_MRT3847_46822C.1.pep
EGFLSAPSDGRFMIVSYKGRVLSRLYLPPPQVYQTDFGLFPILCITSP

SEQ ID NO: 226792 - protein, 82 aa, Glycine max
  Clone ID: PAT_MRT3847_46823C.1.pep
MRFVYFFHFRFFYLNFWGNSIDVFFFFFFIGEDSDKQFHDDDLGMQRGDESARSENESKFRNELKHIKWRPPGIGTKQDWVD

SEQ ID NO: 226793 - protein, 88 aa, Glycine max
  Clone ID: PAT_MRT3847_46824C.1.pep
VTWGDISPSQRLKFGFLYLCIELLAGCRESIVGSEEPALQYVFDHETRRTMLHSYSTPLFNAFGLLLPASADRRPLDPHTYLGEKGLH

SEQ ID NO: 226794 - protein, 177 aa, Glycine max
  unsure (1)..(177): unsure at all Xaa locations
  Clone ID: PAT_MRT3847_46825C.1.pep
DAFSGSSSGWTIASFSEVEKLGKESPVEPSLPSKNAIAVIMYTSGSTGLPKGVMITHGNIVATTAAVMTVIPNLGSKDVYLAYLPLAHVFEMAAESVMLAAGCAIGYGSPLTLTDTSNKVKKGTKGDATVLKPTLLTAVPAILDRIRDGVGKKVEQKGGXRRIFPYSYKRRLVAVKE

SEQ ID NO: 226795 - protein, 107 aa, Glycine max
  Clone ID: PAT_MRT3847_46826C.1.pep
YTSGSTGVPKGVMITHGNIVATTAAVMTVIPNLGSKDVYLAYLPLAHVFEMAAESVMLAAGCAIGYGSPLTLTDTSNKVKKGTKGDATVLKPTLLTAVPAILDRIRD

SEQ ID NO: 226796 - protein, 56 aa, Glycine max
  unsure (1)..(56): unsure at all Xaa locations
  Clone ID: PAT_MRT3847_46827C.1.pep
PRAAFGGIWIGALTVLANFMGAIGSGTGILLAVTIIYQDFETFXKEKANQLGFFGF

SEQ ID NO: 226797 - protein, 90 aa, Glycine max
  Clone ID: PAT_MRT3847_46828C.1.pep
SQRDLRRAGARALNIAPTTRGGARAGARVLPTLRGKRGGIALRVHTARVSGVDLGVHVSKKTLGENERARFRESADRGLRGRLCVCEGAL

SEQ ID NO: 226798 - protein, 95 aa, Glycine max
  Clone ID: PAT_MRT3847_46829C.1.pep
PPGKTKRGPKGCKKKTPPGGEAKLNGPKAGKMQIFPRPMGPREGGKVFFFFFGKFKEQLGEGFGFRGPFKGQKPPPGGGYPLKRAPKGGKGGPKA

SEQ ID NO: 226799 - protein, 94 aa, Glycine max
  Clone ID: PAT_MRT3847_4682C.1.pep
YIVIFFGGSGSCYVIKFCTLIFCLCVFESMGSLSDCCWDCGYLIINIKPFEFKMEEKSTSCNVCDTWCSFSLYVHIEQVAATAVWELMTLLIKP

SEQ ID NO: 226800 - protein, 63 aa, Glycine max
  unsure (1)..(63): unsure at all Xaa locations
  Clone ID: PAT_MRT3847_46830C.1.pep
ESQVKHALVVKAMGRTGSRGQETQDTGKLWDDQNRHIMRNGKGPVTXRDILTLLQSEREARKL

SEQ ID NO: 226801 - protein, 197 aa, Glycine max
  Clone ID: PAT_MRT3847_46831C.1.pep
MGNCVFKGLHHGVSENMMVKVVTSNGGIMELFSPITVECITSEFPGHGIFRSRRDMFSEPLPKNEELRGGEVYYLLPLNPSSSRKSLTRQFSDAEATLTPYRMSTCEKNNNNNNVYSEPPEVIPRYNSSGVWKVKLVISPEKLSEILSQESRTEALIESVRTVAKCGNGVPSSVANSDQWSVASSWKGSMSEKMGLQ

SEQ ID NO: 226802 - protein, 218 aa, Glycine max
  Clone ID: PAT_MRT3847_46832C.1.pep
MAYFHSSISLCNSSVDQYMANSLDFEPKSRHRKTPNSLQSPPCRRSRSAVVDVVIFAAVIAAFGFLLFPYAQILASESVKFGILIVNLVKEEVSFTPWIYMFIGVSVTFAALTTWVLVACTIRKCGNPNCKGLRKAATFDIQLETEDCVKNSPSLTKDGGVKKGLFKVFCDHHRELEAELKKMAPPNGRAVLVLRGRCGCSVGRLEVPGPKKNRKTKK

SEQ ID NO: 226803 - protein, 46 aa, Glycine max
  Clone ID: PAT_MRT3847_46833C.1.pep
QLSLILHLHIIRRHGQHLLWSPCISFWLSLLCRLYCHIMGMLLACK

SEQ ID NO: 226804 - protein, 114 aa, Glycine max
  unsure (1)..(114): unsure at all Xaa locations
  Clone ID: PAT_MRT3847_46834C.1.pep
KGGFPRWRFPRPEQNWRNVFGEGLSFWGFSRFFPQEVVDGKNPLKGGIPWGFFRVYTCFKRWPKKGHWIFIYGGALEVLCPWHGSRAYLGLLPIVXLFFFFFFFRKYYTYFFWV

SEQ ID NO: 226805 - protein, 54 aa, Glycine max
  Clone ID: PAT_MRT3847_46835C.1.pep
MLHSQRIEAQLNVITIQTRCLVSAWKLGHGEKGNEDNFFRLYIMFIKTNKKLGH

SEQ ID NO: 226806 - protein, 75 aa, Glycine max
  Clone ID: PAT_MRT3847_46836C.1.pep
SLPVFGGKWHAPFTVALTLAPVVFTSFLSFLFAMALFPGHFLFWLFFLGFLLGFSREVLNRGFLLGFRLSVLPSL

SEQ ID NO: 226807 - protein, 41 aa, Glycine max
  unsure (1)..(41): unsure at all Xaa locations
  Clone ID: PAT_MRT3847_46837C.1.pep
LLPFRTIFXGXXXXXSELXMXXXGXFNXPSSRXSXXXXRXX

SEQ ID NO: 226808 - protein, 115 aa, Glycine max
  unsure (1)..(115): unsure at all Xaa locations
  Clone ID: PAT_MRT3847_46838C.1.pep
NHDKPIFIQLVSTNVRAASTAVGDGXPYSYAKAHERTVSTMPAEFEIGAKLTTINSMQAYGLNPGNAGFPLAGTVHPSISHQTCMEXMASERTLLIIERYQHSFCQYAIDLLRGG

SEQ ID NO: 226809 - protein, 105 aa, Glycine max
  unsure (1)..(105): unsure at all Xaa locations
  Clone ID: PAT_MRT3847_46839C.1.pep
FKNPWPRRIALFIEDYVRPTSIYLXXRKPCGLSDTKLHFKGYIRTGTNHWPTLLYDPKGRTHSIFHNNCPPRMQSKTHWPVLYNPPTVNALPLPTSFHLGNTPPP

SEQ ID NO: 226810 - protein, 69 aa, Glycine max
  Clone ID: PAT_MRT3847_4683C.1.pep
TLSSYQPFSQIPPPISTLTKLTPSPTLNYSPLPSLNFHHHTYIFNIYILILIIHNNKIQSNYNIHFIPF

SEQ ID NO: 226811 - protein, 42 aa, Glycine max
  unsure (1)..(42): unsure at all Xaa locations
  Clone ID: PAT_MRT3847_46840C.1.pep
YIRDGDGLKYEESYISSLCYWNIVIANLFEIIAFLXKTRAEK

SEQ ID NO: 226812 - protein, 127 aa, Glycine max
  Clone ID: PAT_MRT3847_46841C.1.pep
SQRLCCLSLFVLWFFVFDAQIPKMKGVRDWVFSQILSKSLVSPSPLSGSNSLYAGEHRNENFNEQGSDHSANSVSSPIPSNSSNSSYGDQSNQHSSSLQLVSDTEIYQYQHNTNGRRKDTLAKVEEL

SEQ ID NO: 226813 - protein, 105 aa, Glycine max
  Clone ID: PAT_MRT3847_46842C.1.pep
FSIFYSYVCNRRRPYRRGRNHSPQRIDTMVVQHICAQFQCEGPQHSTAMEVQIFYVHTQGRFLSQLASVIFCCKTDIKGNTLLKQKRLNTYNKVDVQTTKHCLEN

SEQ ID NO: 226814 - protein, 71 aa, Glycine max
  Clone ID: PAT_MRT3847_46843C.1.pep
GQEILYSRYNISFTYRKGLHLRAPVFYNAGRGPKGKNTNFCNLTGGGMNFQAISLGEPFNKKKHPGEKPIK

SEQ ID NO: 226815 - protein, 57 aa, Glycine max
  Clone ID: PAT_MRT3847_46844C.1.pep
VGLYWIHIWGLVAGIMIVLLFYVYKCYSVVMVDEAHERTLSTDILFGLVKVDRKFLS

SEQ ID NO: 226816 - protein, 71 aa, Glycine max
  unsure (1)..(71): unsure at all Xaa locations
  Clone ID: PAT_MRT3847_46845C.1.pep
MASARPSSNGLAEAIDEGKIGPRDDPKVXRARSCAEQSMRDNDLAKKMGCFGPEXTLGPNLVVHMXQGSLF

SEQ ID NO: 226817 - protein, 55 aa, Glycine max
  Clone ID: PAT_MRT3847_46846C.1.pep
RIHQMQSSVFKLKLTTKMCTKRMKLNSCLLNLMLTYVQHGKAPDNQVQGDSKTSL

SEQ ID NO: 226818 - protein, 73 aa, Glycine max
  Clone ID: PAT_MRT3847_46847C.1.pep
IIGLLRTVMATGISHRTPHYQSSIQIQRNQIDRGKTLAPLFKGKSKERKKRVKAKTRKFRCGIPLWVFLLCLC

SEQ ID NO: 226819 - protein, 132 aa, Glycine max
  Clone ID: PAT_MRT3847_46848C.1.pep
VKANFQIDPKSLKFMKNNYGKPELDWQYADDWSLPHLHFNISHTSSLIACGVTVGSPIGIDVEEKQRRLKNDILAFAQRYFSPHEIEMLTHISDPELRLQEFIKLWTLKESYVKAISMGFLNSPFKTFTISI

SEQ ID NO: 226820 - protein, 108 aa, Glycine max
  unsure (1)..(108): unsure at all Xaa locations
  Clone ID: PAT_MRT3847_46849C.1.pep
FISAVMALXSFLHVXIVRFATPGFSSRNRPYRPPLFGSTPLTIPLRVPLFILYPRALPPSSPIGLPPSVAITVLVSLHTHKQLRFSPLVPSSSSQLLRQLLPGGLAPK

SEQ ID NO: 226821 - protein, 51 aa, Glycine max
  unsure (1)..(51): unsure at all Xaa locations
  Clone ID: PAT_MRT3847_4684C.1.pep
MFFDGYGYHGTSFEQIYRCYPASFIEKPQIEXGDKIIMPPSTLDRLASLHI

SEQ ID NO: 226822 - protein, 49 aa, Glycine max
  Clone ID: PAT_MRT3847_46850C.1.pep
NCAISIAVLSSCYYNPIQEVRSTFVLNKSNITDIQIEHNCDSNFGLSLE

SEQ ID NO: 226823 - protein, 71 aa, Glycine max
  Clone ID: PAT_MRT3847_46851C.1.pep
VKQNLSNSTDDPVSRYYDNIKGENYLKNTFRSLFLSNITKGTQKTNPPIPYYILDNHFVMKPFPILQVCPD

SEQ ID NO: 226824 - protein, 63 aa, Glycine max
  Clone ID: PAT_MRT3847_46852C.1.pep
PYSSGEVVENRQGKKWWWTLMAVQRWRMMHKVDYFSVHRSHRLGLPLDWSIHSHPPSVVFSQP

SEQ ID NO: 226825 - protein, 87 aa, Glycine max
  Clone ID: PAT_MRT3847_46853C.1.pep
KYKQSHTRHLGLSAAKSNSLLPERHNILLIPSSISNSMEIKLIWNPERHNYLLIQSSISNTAEIKLTWCGLAVEVGYLIVGYYNHLI

SEQ ID NO: 226826 - protein, 94 aa, Glycine max
  Clone ID: PAT_MRT3847_46854C.1.pep
GPTSQSPPEESSRPPKPGGWLLKPQVKTRFDPKTGGADPKKFSKAISEVGFSSVNQAFSNKRFILFFSPKKENQISKRKEIEWPKLNPCWAQGK

SEQ ID NO: 226827 - protein, 120 aa, Glycine max
  unsure (1)..(120): unsure at all Xaa locations
  Clone ID: PAT_MRT3847_46855C.1.pep
LSRGLLSNTIFSMDLIHSTGKAQXFMDLVTNITKLGGTPNLAEFYSEVKTVDPHSIKRRQSKNSTKVLHMYHHLVSQRLPFKDGGKCHNDMLDAMLKKANDDKFRGRNMIEHDSQELFVA

SEQ ID NO: 226828 - protein, 57 aa, Glycine max
  unsure (1)..(57): unsure at all Xaa locations
  Clone ID: PAT_MRT3847_46856C.1.pep
FFDAIKMHFPMGXDIKHLSGFCGGLHGGLNKLAELLEVERSAVFPRSGAPSPSVLCP

SEQ ID NO: 226829 - protein, 101 aa, Glycine max
  unsure (1)..(101): unsure at all Xaa locations
  Clone ID: PAT_MRT3847_46857C.1.pep
AERPRFMSRFKREEVRDSSLGDSPHNKTXMAMKRMQVXKVXRMIACAQARFAYSLVSTNSRSEKTPVNALVQLNFKPFRSSSRVEYIRSTGHGPCSFSVSS

SEQ ID NO: 226830 - protein, 111 aa, Glycine max
  Clone ID: PAT_MRT3847_46858C.1.pep
EIITSLRKNRFQITCFFCVCFDHPMERPSKENTHWKLKLFKLICDHNFISMLSWVASGKRFCLSFGRDRLNILYFNFFCFYISFEFLVDNACFTDLFGLWNLLIYRYKAEI

SEQ ID NO: 226831 - protein, 85 aa, Glycine max
  Clone ID: PAT_MRT3847_46859C.1.pep
DNKKGMGPQKGIPGEPKGLPSSLGLPCSIEISRGAALYICFKLKGRSPPMGCGGKAFAIYSLFISGIMGPLNYMGQPCQGHLSVD

SEQ ID NO: 226832 - protein, 134 aa, Glycine max
  unsure (1)..(134): unsure at all Xaa locations
  Clone ID: PAT_MRT3847_4685C.1.pep
IRSTTAQYLGKKVAQAKDATMETGKSAAKVATYLRDKALSTGWSGAQYSTEITMEGTKVATNAVMGVAEYAGQKASKLAGMSVDTAKGLAAIAGRXAKEYSAKKKVDAKKDLEAKREAQNEVVIFINGSSSMCR

SEQ ID NO: 226833 - protein, 226 aa, Glycine max
  Clone ID: PAT_MRT3847_46860C.1.pep
DAMAKRAFLQVLDAVEYCHSIGIYHRDLKPENVLVTDQGMTCKLADFGLATTDHVTSDFGCGSTFYMSPECQTSAPKAYSCYASAPNDVWSLGVMLVNLTCGRNPWKRASFEDSTFRAFMKDPKFLRTILPVSTELDAILRCMFEFNPANRATIPEIREMILRCSSFTATKSAVATPLSSPPFSPVDYSRDAAYNAYYQAPAVPQFAPLPAQPTPHHPSSTLPHLG

SEQ ID NO: 226834 - protein, 50 aa, Glycine max
  unsure (1)..(50): unsure at all Xaa locations
  Clone ID: PAT_MRT3847_46861C.1.pep
YTLEGGDGFKLSVSLKWSPSKEFXYTGQVVRYEDNFYSTTYLVFIIIFTF

SEQ ID NO: 226835 - protein, 176 aa, Glycine max
  Clone ID: PAT_MRT3847_46862C.1.pep
MRPLSLVRWLGDASVSVAPKSHQRNRMSGNSSHSIVRVVPDETLHFCSEHSLEDKKEEKMRMRNKYRKPTTLRCNAGSRCSTSVVVLSLLGCLYLLHFYTLIHHRDRNGEESLLRISNHPQFRELQEVEEEDVQIPPPRGKRFPRAAKRRPNRTTTLIDDFLDENSQLRHVFFLVK

SEQ ID NO: 226836 - protein, 63 aa, Glycine max
  Clone ID: PAT_MRT3847_46863C.1.pep
GVSQNIFRPHWVRTNKLMWTQPRGSNDTIRQGLTLRISQDLGRKNMGQLTLGDRLFYNRKKKH

SEQ ID NO: 226837 - protein, 58 aa, Glycine max
  Clone ID: PAT_MRT3847_46864C.1.pep
CHSVTRSTMVTHVLMVYLWQLRKVQQAERQCSQVDQCCFELSYESPWLLLFIDTLIVK

SEQ ID NO: 226838 - protein, 55 aa, Glycine max
  Clone ID: PAT_MRT3847_46865C.1.pep
KKKKKKKKKKKKKKKKKKKKKKKKKRAANRKKQKIKNTGMRHKKIFYKETLNSMG

SEQ ID NO: 226839 - protein, 55 aa, Glycine max
  Clone ID: PAT_MRT3847_46866C.1.pep
LCKIDFQAMWFMFHVSMFLFQKQDTICYPMKLSIIASTQSIMDSWIIFFNIKLNI

SEQ ID NO: 226840 - protein, 33 aa, Glycine max
  Clone ID: PAT_MRT3847_46868C.1.pep
CFHYDSPWLQVISKRALLWIIHVRGLVVVFIIG

SEQ ID NO: 226841 - protein, 95 aa, Glycine max
  Clone ID: PAT_MRT3847_46869C.1.pep
PTRPENRADCFICSELQINQHAGFEYILEHHKCFIAPAQSSDVRRSPGIMEYNIYACNSAIWVAAGLIFLGGVISNKADIICPLSIYVHYFEIFS

SEQ ID NO: 226842 - protein, 146 aa, Glycine max
  Clone ID: PAT_MRT3847_4686C.1.pep
MENNQSNISSEDVKDNSTEGVGGASGETASDICCSCSKSSSCKANKCKCRTLGGTCGSSCGCLASKCANRSSVSNEAQVEGAGNDSSIDEADKDRLLVAQGAELLQGALVEGPAEVHSDHGPRKPLSDIGNTLVRVSHSLKREVPK

SEQ ID NO: 226843 - protein, 58 aa, Glycine max
  Clone ID: PAT_MRT3847_46870C.1.pep
PRVREIGQPPLPDKNFFFLPICFPFRTLVSQSFMFEMHLYYIILFYFFIKSCIFSFHL

SEQ ID NO: 226844 - protein, 127 aa, Glycine max
  Clone ID: PAT_MRT3847_46871C.1.pep
MARQLVLALIFVAIIGMAMANEAPSASPKASPSPKSSPSSSKSSPAPSAESPLSSPPSPTSSDETDISTAPAPASDPIELYAPEPEPFEDPFTTPEETDPADVTSGASALRFSTAVTVVAVAGIFAF

SEQ ID NO: 226845 - protein, 85 aa, Glycine max
  unsure (1)..(85): unsure at all Xaa locations
  Clone ID: PAT_MRT3847_46872C.1.pep
QFEGSIXISNXXGERYCLSVRSRYXRWIQDFSXXXQXFHHHSXNNGHLYVMXPAKALXLALDVXSXNVLWQRSXGPLSKXXSAPV

SEQ ID NO: 226846 - protein, 36 aa, Glycine max
  Clone ID: PAT_MRT3847_46873C.1.pep
FFLLAFYGTAFSSTLHCMSYIWMVKFSFGFKWYILA

SEQ ID NO: 226847 - protein, 61 aa, Glycine max
  unsure (1)..(61): unsure at all Xaa locations
  Clone ID: PAT_MRT3847_46874C.1.pep
NAGNEDWAEGGENSALQFQPAITTPRDNLARLPLWCMLLGHYLRGPEXQLETTDMLSLTSD

SEQ ID NO: 226848 - protein, 51 aa, Glycine max
  Clone ID: PAT_MRT3847_46875C.1.pep
PLSTFFIFPSPSTHNTNISFPKLKTPQHQKLQQLSHTFTYTQPYIQPISSI

SEQ ID NO: 226849 - protein, 231 aa, Glycine max
  unsure (1)..(231): unsure at all Xaa locations
  Clone ID: PAT_MRT3847_46876C.1.pep
MANPIDGGEFECLSGFGNHFSSEALAGALPGGXNSPLVCPYGLYAEQISGTSFTSPRNRNLFSWFYRIKPSVTHEPFKPRVPGNGRILSEFNNSSSSANPTQLRWKPMDAPDSPMDFIDGLNSTCVVLSSFMRHGYAIHMXMARYYVPYWYDLNNFCPYNTVLFLLLDFLFFPPRWLVSEHTFRPPYYHRNCMSEFMGLIHGGYDAKADGFLPGGASLHSCMTSVGLDKCN

SEQ ID NO: 226850 - protein, 58 aa, Glycine max
  Clone ID: PAT_MRT3847_46877C.1.pep
LYFKNLVTAFQKPWQEQTNPPTNLTLNVEHVLSLNLLLHKPLTRVPTQQILLSSSRSR

SEQ ID NO: 226851 - protein, 211 aa, Glycine max
  unsure (1)..(211): unsure at all Xaa locations
  Clone ID: PAT_MRT3847_46878C.1.pep
MENPIDGGEFVYLSGFGNHFSSEALAGALPVAQNSPLVCPYGLYAEQISGTSFSFSRNRNLFSWFYRIKPSVTHEPFKPRVPGNGRILSEFNNSNSSANPTQLRWKPLDAPDSPTDFIDGLSTVCGSGSSFMRHGYAIHMXLVTTECGRLKGSPGEIAILPQGFRFSVNLPDGPSRGYVAEIFGTHXQLPDLGPIGANGLASPRDFLXPTA

SEQ ID NO: 226852 - protein, 165 aa, Glycine max
  Clone ID: PAT_MRT3847_46879C.1.pep
KFCPYNTVLFDHSDPSINTVLTAPTDKPGVALLDFVIFPPRWLVAEHTFRPPYYHRNCMSEFMGLIHGGYEAKADGFLPGGASLHNCMTPHGPDTKSYEATIARGNDGGPCKITDTMAFMFESSLIPRISQWALESPFLDQDYYQCWIGLKSHFTVTETSPENTN

SEQ ID NO: 226853 - protein, 99 aa, Glycine max
  Clone ID: PAT_MRT3847_4687C.1.pep
ILSNHKSIHKRKKNRNRNRNREKKRKEISVVPQKTLKTSHNPTLWHYKLICIRTVVGSMQPRYRWLIHPRVLRVHEHKLVPQLVTRCFQPRQLDDLAQF

SEQ ID NO: 226854 - protein, 147 aa, Glycine max
  unsure (1)..(147): unsure at all Xaa locations
  Clone ID: PAT_MRT3847_46880C.1.pep
TDKPGVALLDFVIFPPRWLVAEHTFRPPYYHRNCMSEFMGLIHGGYEAKADGFLPGGASLHSCMTPHGXPDTKSYEATIARGNDVGPCKITDTMAFMFESSLIPRISQWASESPFLDQDYYQCWIGLKSHFAVTKTSPENPSLGNGD

SEQ ID NO: 226855 - protein, 217 aa, Glycine max
  unsure (1)..(217): unsure at all Xaa locations
  Clone ID: PAT_MRT3847_46881C.1.pep
MANPIDGGEFECLSGFGNHFSSEALAGALPAAQNSPLVCPYGLYAEQISGTSFTSPRNRNLFSWFYRIKPSVTHEPFKPRVPGNGRILSEFNNSSSSANPTQLRWKPMDAPDSPMDFIDGLSTMCGSGSSFMRHGYAIHMYNANKSMDNCAFCNADGDFLIVPQQGRLLITTECGRLKVSPGXEIAIIPHGFXXFSVNLPDGPSRGYGAEIFGTHFH

SEQ ID NO: 226856 - protein, 211 aa, Glycine max
  Clone ID: PAT_MRT3847_46882C.1.pep
MENPIDGGEFVYLSGFGNHFSSEALAGALPVAQNSPLVCPYGLYAEQISGTSFTSPRNRNLFSWFYRIKPSVTHEPFKPRVPGNGRILSEFNNSNSSANPTQLRWKPLDAPDSPTDFIDGLSTVCGSGSSFMRHGYAIHMYTANKSMDNCAFCNADGDFLIVPQQGRLLVTTECGRLKVSPGEIAILPQGFRFSVNLPDGPSRGYVAEIFG

SEQ ID NO: 226857 - protein, 104 aa, Glycine max
  Clone ID: PAT_MRT3847_46883C.1.pep
MATGATPDGLFWSVYEGCISCYDNCVERRPYHRNCGCALHNKSLINCTHKLPRCNNVSYPMRRAWSEGSLVLAASSSSPSQVATGGRPQPSLANVEEENKNCFS

SEQ ID NO: 226858 - protein, 255 aa, Glycine max
  unsure (1)..(255): unsure at all Xaa locations
  Clone ID: PAT_MRT3847_46884C.1.pep
MLSIFHKGFAHPPEELKSPASNSGSNKPKIPEETLREFLSHHPHNTFSLSFGHSAVLAYTRPDPPSFVHQRLFCGIDDIYCIFLGSLNNLCSLNKQYGLAKGTNEAMFVIEAYKTLRDRGPYPADQVVKDLDGSFGFVVYDSKVGSVFAALGSDGGIKLYWGIAADESVVISDDLDVMKEGCAKSFAXPFPPGCMFHSEGGLMSFEHPMNKLKAMPRIDSEGAICGANFKVDKYARVNSIPRVGSQANWMEWTQH

SEQ ID NO: 226859 - protein, 338 aa, Glycine max
  unsure (1)..(338): unsure at all Xaa locations
  Clone ID: PAT_MRT3847_46885C.1.pep
MVKNHLYILDGGILFGFCNGIMLKGFFFLLLSLTGFCVXLQEKQLLEIWQLLLPIVYGFLEIVVLSQTYVHTLAGVALRIIRDPAPGGSDLVRNSRRAYTTSALIEMLRYLIFAAPETFVALDCFPLPSSVVSHTINDGNFVLKATEAAGKIKSSSEDVVCLFRSKGFDAQFQSLAFDHVISCIQERVEDLTKAVSPGYPGQCLAKASQALDKSLVLGDIHGAYKFLFEDLCDETVSEGWVAKVSHCLRLSLKWFVTVNKSLVYSVFFLCEWATCDFRDFRNAPPCDVKFTGRKDXSHVHIAIRLLKMKLRDMQISPKHKSGSTPGSLESVILAKMFK

SEQ ID NO: 226860 - protein, 63 aa, Glycine max
  unsure (1)..(63): unsure at all Xaa locations
  Clone ID: PAT_MRT3847_46886C.1.pep
IKCTVSFFIAFGNLADDTINLEAFPHKLVQFXEIHEKVVSKFSQDEFLTAVSTNVRAAITIFF

SEQ ID NO: 226861 - protein, 57 aa, Glycine max
  Clone ID: PAT_MRT3847_46887C.1.pep
SIDQNIFVFEAGSLFWDGKVNLGIVWCAYSRIIFHGTYFSSVMTPQGWNPWTFTGHE

SEQ ID NO: 226862 - protein, 63 aa, Glycine max
  Clone ID: PAT_MRT3847_46888C.1.pep
EAQAQTHSGPPSPFQACSNTVLPPMSTPISPKQGPNSFSAPIGLKPTRIKAKIVPSPHENGHH

SEQ ID NO: 226863 - protein, 43 aa, Glycine max
  Clone ID: PAT_MRT3847_46889C.1.pep
LPPPHDRGLHLGEGGGRILNHLSFFSLNSIILSIHAHRKKKCN

SEQ ID NO: 226864 - protein, 371 aa, Glycine max
  Clone ID: PAT_MRT3847_4688C.1.pep
ERYSCSHCSNAVKKGGESPTVEGNGNVLGKKDGGLRTVVTLIGAPNWLECSALAKVAVNLSEWSDVRPGMDCEVHPCALRDNLPRPMGHFYVISGFFVVYRFFNLTAEATLEDVLEKGREFCEKRWDVARKSVAPQPFIEQYCFRAPYIASLLREGLHITDKHITVGSGSITWTLGVALLEAGKAYSVRFGLRGFYLLQMKMNPLILIPILILSFILLLCALSWVVNWMPRFFRRQYLPFFRHNSASSASGINIPSPFRFQRWSPMNSGDGRTKTPLSPTIAGSQDRPFSLGHGLSDNSGNIQLMESSFHPSASSVSHSYSSNNLGQMQFDSSSIGAFWSPHRSQMHLQSRRSQSREDLNSSLAETHMVKA

SEQ ID NO: 226865 - protein, 273 aa, Glycine max
  Clone ID: PAT_MRT3847_46890C.1.pep
MGKSRKYSKGHATGFVPDFRHAVETMGESEGLGNLGRVDNELTMSEISCAPKRKRVDESFDVPFQLLSLTKMARSGRKDLTLRLKSELEEVRKLQKKIAGMSSITTELSPYSDIRSCSVGEKRPPLESLALHGKKRPLLKHNGPKTKRSISGRFISAKSAAPVTPSYAVLMKQCETLLKRVMSHQFGKVFDKPVDIVKWNIPDYFTIIKHPMDLGTVKSKLISCEYTSLMDFAADVRLTFSNAMSYNPPGNDVHVMAETLSKYFETRWKAIEK

SEQ ID NO: 226866 - protein, 58 aa, Glycine max
  Clone ID: PAT_MRT3847_46891C.1.pep
VSRAPAMSSIASLFIGIISGSSMIWVTPSIASPSIFVFIQSISLLSSISGCHVREVQM

SEQ ID NO: 226867 - protein, 73 aa, Glycine max
  Clone ID: PAT_MRT3847_46892C.1.pep
LRVRFLSGGSERLLEILGPGIDGGLLLPILEALPDAMLILVSGLSGSKEVSQSKAFVGKELLAGKTTLLLTII

SEQ ID NO: 226868 - protein, 98 aa, Glycine max
  Clone ID: PAT_MRT3847_46893C.1.pep
WRKSPLRVPAAVLLLQTPMVTTVCKVLPHNPQARCEPITWIFSAALQRVIVITITRRTLLIVGFWKTDTNRHTTVITAWCAAYYYNFATERVRDCPLP

SEQ ID NO: 226869 - protein, 205 aa, Glycine max
  unsure (1)..(205): unsure at all Xaa locations
  Clone ID: PAT_MRT3847_46894C.1.pep
MSAPVNIIVGSHVWIEDPAQAWIDGEVSKINGEEVHARTTDGKAVVKNISKVFPKDNEAPPGGVDDMTKLSYLHEPGVLHNLATRYELNEIYTYTGNILIAINPFQRLPHLYDTHMMEQYKGAAFGELSPHVFAVADVAYRAMINEGKSNSILVSGESXAGKTETTXMLMRYLAYLGGRSGVEGRTVEPTXLESNPVLEAFGHAK

SEQ ID NO: 226870 - protein, 55 aa, Glycine max
  Clone ID: PAT_MRT3847_46895C.1.pep
MESSILIYLLIFKHSIDSILRTRQIIMLDLISEHEEPMMIPQMNYLTLNMTLLAE

SEQ ID NO: 226871 - protein, 52 aa, Glycine max
  unsure (1)..(52): unsure at all Xaa locations
  Clone ID: PAT_MRT3847_46896C.1.pep
ISDSIREXXXRKQEXEIDFLLCCLALSVLISSYXFXXYSVHVHPYDXFLTXX

SEQ ID NO: 226872 - protein, 74 aa, Glycine max
  Clone ID: PAT_MRT3847_46897C.1.pep
SMLSSVFIHNIGHKQGSVLYEFGSGQDQFHYLLLLLSLSLSPFFFSSIFFYLFCCFTFFQGKIVSFKDMETDDA

SEQ ID NO: 226873 - protein, 153 aa, Glycine max
  Clone ID: PAT_MRT3847_46898C.1.pep
LEVTDLWFPLSLRMATGTGTRARDAGIDQLLGVVPRIFCICYAICGYEPFSGALTAIERIRYRSLTLKDWLDDISQHATIMIAQMTTGTLSIIDSAMAMTEAYWALDVETLVWPEAWGSMDRPYADANVNVHRRFRDREYSVHLVPVNDLDAT

SEQ ID NO: 226874 - protein, 63 aa, Glycine max
  Clone ID: PAT_MRT3847_46899C.1.pep
GRSSTYFDLSLSISTVLGLSFFRKLLCEYLGLKVSYYGREGGPMPVFLPLDKLFLKGVAGKIN

SEQ ID NO: 226875 - protein, 40 aa, Glycine max
  Clone ID: PAT_MRT3847_4689C.1.pep
RATHEYTINLHTRFHGCTYKMKAPKAIYVIGKLYQQAMWT

SEQ ID NO: 226876 - protein, 347 aa, Glycine max
  unsure (1)..(347): unsure at all Xaa locations
  Clone ID: PAT_MRT3847_468C.1.pep
MAMSGASPNHSPKPGFSSPWSQIVAAAAPPSSSPPPEDSDNGGGSNADTGKRAAWIKPSTAASSSVMGADSWPLPSESARAPAKSPSPSLSPSELVKASTDTSSVPPPLQGPGSLTPSPHRNVRDNANANNNNNTGQTHPKSFKRSNSNTARAARYHPPHMSGPQGPIAPAGSHNYNSALKEHQPRAGFLPNDHPPHRNSFRHRNGGGPHQRGDGHHHHNNYGGRRDQDPGNQDWNNHRNFNGRDNFMSPRFGPRFIRPPPPPNPAQLFPPPPPLRPYGGSIGFTELPPQMVYVPPPPLESMRGVPFVSPIPPNAMFFQPLDNQLHTKTVNQIDYXFSNENLVKDTY

SEQ ID NO: 226877 - protein, 46 aa, Glycine max
  Clone ID: PAT_MRT3847_46900C.1.pep
GTDENTVMVILGHRTVYQKELMRRVYGAIFQEDVVKRLGSDILGDF

SEQ ID NO: 226878 - protein, 74 aa, Glycine max
  Clone ID: PAT_MRT3847_46901C.1.pep
VGAVLLCATGAATKADAFFSSSQRRFSLLSYLFSLPFSFFIYYFLPSFISLNSCDHETLLDFVGWHVFLWHNFH

SEQ ID NO: 226879 - protein, 143 aa, Glycine max
  unsure (1)..(143): unsure at all Xaa locations
  Clone ID: PAT_MRT3847_46902C.1.pep
NSARGREREREREREREREREREREREREGGRHDATMPMCSHPAVAGSSPLYHCAMRMIGNRHRCDCSVPQMDRVICXRGIESLRHAVRSANSTVXLNNSQPYAHMCRYAEHFDRLKRVTREQLCKYVGGITSHSGNQIYAMG

SEQ ID NO: 226880 - protein, 61 aa, Glycine max
  unsure (1)..(61): unsure at all Xaa locations
  Clone ID: PAT_MRT3847_46903C.1.pep
HKCAAVTERVLAACYKALNDHHVWPGAEFGTSRVFFFFFFFFFFFRVFFFFFNSLKXFXFF

SEQ ID NO: 226881 - protein, 69 aa, Glycine max
  Clone ID: PAT_MRT3847_46904C.1.pep
LCTYVYSSMNVRLTIYVLTDILTVKARCKGMLIIVKSSTSMLSAIVRSCRVATETHRVNLFQQMHLPES

SEQ ID NO: 226882 - protein, 143 aa, Glycine max
  Clone ID: PAT_MRT3847_46905C.1.pep
EQSAGVNNANPTSSPKLGKLKSLSQSMDDTATSETRPTTTLPKDRHGKENQSCTSSSKSSKQSICKGQTTKSPIKKLPIDNKSLQKRRDPPKKQQELRLKDQPIAEVRNLRENPQGDECPNIISENILKCLSNIILRMSAAKN

SEQ ID NO: 226883 - protein, 50 aa, Glycine max
  Clone ID: PAT_MRT3847_46906C.1.pep
IINTGHVCSVGRSRSLKTFFLVKSLGPVCVYNVESNVFVLHSHKLLAKNA

SEQ ID NO: 226884 - protein, 48 aa, Glycine max
  unsure (1)..(48): unsure at all Xaa locations
  Clone ID: PAT_MRT3847_46907C.1.pep
SLRILSSXILVTFSDRIQRNHTSPPWXLXXXISDTGGPKTYSSCHXQK

SEQ ID NO: 226885 - protein, 100 aa, Glycine max
  Clone ID: PAT_MRT3847_46908C.1.pep
LSGSRPVLALGGIYRPIGAAFPNNPTCRPGLGGRPGPGPTGLLPFLAPPSRGLGPGPPLGALFQTSIRTPGATDFHGGLFPGRSPFLRGSLVGSFPPLIG

SEQ ID NO: 226886 - protein, 74 aa, Glycine max
  Clone ID: PAT_MRT3847_46909C.1.pep
RVRCGGVLFKVYIVGDAIKVVRRFSLPDVSNWELSKDAGIYRFPRVSCAAASADDADLDPTVAELPPRPLLEKL

SEQ ID NO: 226887 - protein, 92 aa, Glycine max
  Clone ID: PAT_MRT3847_4690C.1.pep
SEHKFVLKDKKKPIIFSMARLDRVKNMTGLVEMYGKNARLRELANLVIVAGDHGKESKDREEQAEFKKMYSLIDEYKLKGHIRWISAQHEPR

SEQ ID NO: 226888 - protein, 60 aa, Glycine max
  Clone ID: PAT_MRT3847_46910C.1.pep
LFLRYPSNSHETPFISPSPKHLVSISKVGHNAQTCRWVKKNLLQNPPYVCCLLLRCKPCL

SEQ ID NO: 226889 - protein, 95 aa, Glycine max
  unsure (1)..(95): unsure at all Xaa locations
  Clone ID: PAT_MRT3847_46911C.1.pep
MQIFVKTLTGKTITLEEESSDTMDNVKAKIQDREGILPDQQRIIFARKQLEDXRTLADYNMYKESSLHQALRIRGVMQIFHXTLTGETTTLDVGS

SEQ ID NO: 226890 - protein, 75 aa, Glycine max
  unsure (1)..(75): unsure at all Xaa locations
  Clone ID: PAT_MRT3847_46912C.1.pep
HLKRIFFAGQVFDGHGGKSAAQFVRDHLPRVIVEDADFPLELEKVVTRSFLEIDAXFARSCSTESFLSSGTTALT

SEQ ID NO: 226891 - protein, 99 aa, Glycine max
  Clone ID: PAT_MRT3847_46913C.1.pep
KGSGCFPVSVGNTKSTLVSSAGRLFPPCCPFILCELAPTVFVSVISRQSSSGSFLGPFVPLLGTSGCSPYNSGSFCLLRYCNGIPFSPRILLRLWFRLF

SEQ ID NO: 226892 - protein, 125 aa, Glycine max
  unsure (1)..(125): unsure at all Xaa locations
  Clone ID: PAT_MRT3847_46914C.1.pep
KSSRLKQVQEHLCTLNSLCLVLGFDFKQTINGIHPSLVDSKGSKSVSNDTIQQLAVAIQELREVKLQRMQKLQDLATTMLELWNLMDTPIEEQQMFQNVTCNIAASEHEVTEPXTLSXDFINLXE

SEQ ID NO: 226893 - protein, 72 aa, Glycine max
  Clone ID: PAT_MRT3847_46915C.1.pep
SSCFGTHSLQPDKGCPKLDSLMRAHTMITRSSYTTIHCYGLNHNPISCIGSGGGVYKFYPKRHRCHMQARAC

SEQ ID NO: 226894 - protein, 84 aa, Glycine max
  Clone ID: PAT_MRT3847_46916C.1.pep
GCSGIWFPGALFGGPPFWFKLPNAAGLLVIPLGGSSPGVFVPLSVPGSVLLLVGGAVPRERSSSKKKEGAPASSGSELACVRLH

SEQ ID NO: 226895 - protein, 116 aa, Glycine max
  Clone ID: PAT_MRT3847_46917C.1.pep
EGCSFRYFLGSKNQNLAYSLFISNSPCWIFFKYHLSALFIAMPELLSSAKSAVEKGQSQGRDKTYVKQLSDYIIPNLVEALHKEPEVEICASMLDALNECIQVSESHLDEKQVRSI

SEQ ID NO: 226896 - protein, 58 aa, Glycine max
  unsure (1)..(58): unsure at all Xaa locations
  Clone ID: PAT_MRT3847_46918C.1.pep
RSNHKPRRTLHNSMVERDLRARIDGNMWVCLDTANLIQLXLEALDLAISSNRNMPDCG

SEQ ID NO: 226897 - protein, 58 aa, Glycine max
  Clone ID: PAT_MRT3847_46919C.1.pep
TDACRIIILNLSTHIGSLFFLKLMLLISVFHLSYPTRIHNQLVQHPSQILHSLNENTF

SEQ ID NO: 226898 - protein, 235 aa, Glycine max
  Clone ID: PAT_MRT3847_4691C.1.pep
FGTSPFRKSDAYLLAQKWKWARDEVKKTNLHGIQVKGDRYIFIYGGSDKWTREFTVAVDKIKRHDTIRRADAIIDYYHLGKDDPKIVPRFWIGIEGKRQKKHSENLDCEIQEIIRSLLCLKQDTQGWAILSKGSNVRILGHGQPMYQTVADFEKWKERVLVKEGFDIAFQEYYDTQRDLPAPQPCEFNTLDVLATITCPNASCGRVMEVTSVNYKCCHGGNVADHAIKSRSTTAT

SEQ ID NO: 226899 - protein, 96 aa, Glycine max
  Clone ID: PAT_MRT3847_46920C.1.pep
EDTAVSAMLVIHAMAIEIDAGWRKQDIWLFVQAILSAASGENIMSINDTGYHHNYMGHEDDIPSWENPGDIPMSDYDVLTAPGKSYSITWGAKGPY

SEQ ID NO: 226900 - protein, 71 aa, Glycine max
  Clone ID: PAT_MRT3847_46921C.1.pep
ADTYIQAGQRVMDRCTCRVQCFFLPVRKASLSEQFTPASLYKARVRPPVVLIPNIRALSRSQVNIQAYARV

SEQ ID NO: 226901 - protein, 100 aa, Glycine max
  unsure (1)..(100): unsure at all Xaa locations
  Clone ID: PAT_MRT3847_46922C.1.pep
NKRKDFKFSINISWLLLYTGNCNNFSDSHLPRTSQIDSIESNIERIKISSQCVERQAMEIGEECQRKFSELKEHHAKIQKYYPTRFLVTNKIPKXAKKEI

SEQ ID NO: 226902 - protein, 155 aa, Glycine max
  unsure (1)..(155): unsure at all Xaa locations
  Clone ID: PAT_MRT3847_46923C.1.pep
RVIHLMTVVATDAAYPSXFITYVPMIGLQQTINVLVTADQTPGRYYMAARAYQTAMNAAFDNTTTTAILEYKSATCSKKNGQLPRPILPVLPAFNDTATATAYTAGIRGLSKINVFTNVDVSLYFIVGLGLINCTNPNSPRCQGPNGTRFAASIN

SEQ ID NO: 226903 - protein, 66 aa, Glycine max
  Clone ID: PAT_MRT3847_46924C.1.pep
SLDVNEVGFLASVKLLDQNYLRLRIFNGFCIRVQGGFINFQSGKKTLNQIVNHCVYSYTLFYFMRF

SEQ ID NO: 226904 - protein, 50 aa, Glycine max
  Clone ID: PAT_MRT3847_46925C.1.pep
PKPLGKHKDFLPNPVGERNTDFNYRLMKQPHASSPKDQIKSYNRIPTKAK

SEQ ID NO: 226905 - protein, 119 aa, Glycine max
  Clone ID: PAT_MRT3847_46926C.1.pep
MGMAAESQFHVLAVDDSLIDRKLIERLLRTSSYEVTTVDSGSKALEFLGLCENDESNPSTPYVCPNNHQEVEVNLVITDYCMPGMTGYDLLKKIKESSSLRNIPVVIMSSENVPSRINR

SEQ ID NO: 226906 - protein, 45 aa, Glycine max
  Clone ID: PAT_MRT3847_46927C.1.pep
DSGVVGSEDILREFKTLFCFYDLRKLKLIHWALLGLLADKKKGLD

SEQ ID NO: 226907 - protein, 222 aa, Glycine max
  Clone ID: PAT_MRT3847_46928C.1.pep
LLTGPVLPEEAEGKLEENWANWLDAFANESIVYCAFGSQINLEKDQFQELLLGFELSGLPFLVALKTPRGCESVEEALPEGFEERVKGRGVVSRGWVQQLLILKHPSVGCFVNHCGFGSMWESLMSDKQIVLVPQLGDQVLNTKLLVEELGVAVEVERGGNGWVSKESLSKAIKLVMDGDSEVGARVKKNHMEWKKTGGSPNLMNGYMDRFVQNLQDFPLHG

SEQ ID NO: 226908 - protein, 189 aa, Glycine max
  Clone ID: PAT_MRT3847_46929C.1.pep
LTLEISDNKWPNAAELPFLWRYNKMSMLNLVASLVKTGVHGRIYSSGDGRPLPGSITVSGINYTVRAGNTFGDYHRILAPRDKYEVVATMPGYKSKNTTIWLDEGPVTLDFVLDPEVSVKGSVLQNIYKCDCNNESKQEFVHFLWGAHLEVFFVVIVILGFLLLLFHRRAKVKISTSRQSAGAKRTVEV

SEQ ID NO: 226909 - protein, 73 aa, Glycine max
  Clone ID: PAT_MRT3847_4692C.1.pep
PTTMAPLNKVLLLLTLLFPAVDATYKNKKDKKNSVFHKIPKFPKFPVPIIGGDQKVVVDGGNHAIAKPDFGNK

SEQ ID NO: 226910 - protein, 106 aa, Glycine max
  Clone ID: PAT_MRT3847_46930C.1.pep
IAVVATMPGYKSKNTTIWLDEGPVTLDFVLDPEVSVKGSVLRNIYDCDCNGESKQEFVQFLWGTHLEVFFVVIVVLGFLLLLFQRRQKVKFSTSRQSAGAKRTVEV

SEQ ID NO: 226911 - protein, 126 aa, Glycine max
  Clone ID: PAT_MRT3847_46931C.1.pep
QKEDKVKRDNQTLTNLLADGHRDYVLSHTHTGLKKVPVASLVGKTIGLYFSAEWCVPCAKFTPKLISVYEKIKHELAEKGEEDFEVVLISSDRDQASFDSYYSTMPWLALPFGDPEIKNLVRHYNV

SEQ ID NO: 226912 - protein, 61 aa, Glycine max
  Clone ID: PAT_MRT3847_46932C.1.pep
FIRQRRTQWTLATQINCTKCVVRFRKEYMVKPNSRLALFTEQSIVLVSSQIMPDGISCSTS

SEQ ID NO: 226913 - protein, 90 aa, Glycine max
  Clone ID: PAT_MRT3847_46933C.1.pep
SRLRSGLVLDSYALQSTDPVALTKTAPFQRTPSDLPMNTMPSRSKGLTSALLLSTLHWTHCLDFSPSLNQRLRCISDSYLLQHDCYTHKS

SEQ ID NO: 226914 - protein, 71 aa, Glycine max
  Clone ID: PAT_MRT3847_46934C.1.pep
FDIILTRIFQLTSHTNTHQLNPLASCTHQKQNNPRFENTVLTPLPRRQQNPSPIQTITLYYDLTNTLNRPQ

SEQ ID NO: 226915 - protein, 73 aa, Glycine max
  unsure (1)..(73): unsure at all Xaa locations
  Clone ID: PAT_MRT3847_46935C.1.pep
AGNCGCGSACKRGNPSXGCMMYPDLSYTKVTTTRTVLMAVAPIKAHSETANFAVSPDNHVYTCQANYSCNPYT

SEQ ID NO: 226916 - protein, 52 aa, Glycine max
  Clone ID: PAT_MRT3847_46936C.1.pep
GVLILTHKSAWYYPNGVILKTAIHSDILSNSEKRLEYDPQHQLIYDTVLDNI

SEQ ID NO: 226917 - protein, 44 aa, Glycine max
  Clone ID: PAT_MRT3847_46937C.1.pep
IEQTWSLAGQVAVVTGSRRGIGKAMAIELAKRGTDVVVNYANAV

SEQ ID NO: 226918 - protein, 78 aa, Glycine max
  Clone ID: PAT_MRT3847_46938C.1.pep
GPESRSTHAPEGLWLKANRASTSLTSTPLGKRLISESEPPTVPVSNILNLTLITSQDSHQHNTHKLVEFCLELRSTGY

SEQ ID NO: 226919 - protein, 34 aa, Glycine max
  unsure (1)..(34): unsure at all Xaa locations
  Clone ID: PAT_MRT3847_46939C.1.pep
XXXXXTXKPLXICLKXLXXKLXDCDFLKRKLTIC

SEQ ID NO: 226920 - protein, 50 aa, Glycine max
  Clone ID: PAT_MRT3847_4693C.1.pep
QREKIKGGMGDCHLVHYTNNTFGVLVLWPPYLAFLRWENKLLLLGQGPWK

SEQ ID NO: 226921 - protein, 49 aa, Glycine max
  Clone ID: PAT_MRT3847_46940C.1.pep
FEVKKLEETVRSIEMPGLSSGASKLVPAGYGSNKLQIVMLIVIDLESVE

SEQ ID NO: 226922 - protein, 56 aa, Glycine max
  Clone ID: PAT_MRT3847_46941C.1.pep
QGMHNCTRDLHPVVTRWLLHDSHDHHRTWSSGQELDVLICIHASSSRPRSSTMLMT

SEQ ID NO: 226923 - protein, 112 aa, Glycine max
  Clone ID: PAT_MRT3847_46942C.1.pep
KSKVAWRIFDSVILILIKVAWRIFHSVIVILILILILIKVAWRIFDSVILILILLEREKFVVQRLGLGKKQRLVGSEVVETQFVEQQQHMGFLSRVWNWALSLVMSRCSGNQ

SEQ ID NO: 226924 - protein, 84 aa, Glycine max
  Clone ID: PAT_MRT3847_46943C.1.pep
AAVAEISRVLRPGGVFVATTYILDGPFSVIPFLSSLRQNVRQVSGSYIFLSERELEDLCRACGLVGFKCIRNGLFVMISATKPS

SEQ ID NO: 226925 - protein, 378 aa, Glycine max
  Clone ID: PAT_MRT3847_46944C.1.pep
GKMENITELDLSECPITKLPPSFRNLTRLQELELDHGPESADQLMDFDAATLISNICMMPELYDISARRLQWRLLPDDALKLTSVVCSSVHSLTLELSDELLPLFLSWFVNVENLRLEGSKCTVIPECIKECRFLSILILSGCDRLQEIRGIPPNLERFGATKSPDLTSSSISMLLNQELHEARDIHLISLPIVKIPEWFECQSRGPSIFFWFPNKFPVITVCIVTSGPKKYSNYLVLNVIINKKHKHRHQRFYSNANAIPSTSGTVFHLISLQMVKKELSKSEWNRAEIVCNRSWDEYGIHVLKEQSSMEDIRFTDPFRKRKICSSEEVGVGGKKQRLVGSEVVETKFVEQQQHMGFLSHVWNWTLSLVISRRSGNQ

SEQ ID NO: 226926 - protein, 76 aa, Glycine max
  unsure (1)..(76): unsure at all Xaa locations
  Clone ID: PAT_MRT3847_46945C.1.pep
TSTGKTIDREVEYYDTIDXVEAKIQHNEGCXPGQHKTRLLXKQHEDGQPLIDYRVHKASTLHIVLWLTGGMQISCV

SEQ ID NO: 226927 - protein, 45 aa, Glycine max
  unsure (1)..(45): unsure at all Xaa locations
  Clone ID: PAT_MRT3847_46946C.1.pep
TLSXDVNTSPLLGCLVTSFHTFLSRPYLXVXDSLXPXLXSHPFXI

SEQ ID NO: 226928 - protein, 52 aa, Glycine max
  Clone ID: PAT_MRT3847_46947C.1.pep
FIIFSRPFFFTFPLAAQKTPYGWVFKVRIFFCPQKKGYLIFGPFFNPLVVFF

SEQ ID NO: 226929 - protein, 125 aa, Glycine max
  Clone ID: PAT_MRT3847_46948C.1.pep
MMMITEMPTMNPDRFICMRAIVIFMKLHVADGAQDHVMCIETERDALIQFKAALLDPYGMLSSWTTSDCCQWHGIRCTNLTDHVLMLDLHGVNRSWRHAYCTVIGSCSDAIDVMAVVKVFKLHHR

SEQ ID NO: 226930 - protein, 162 aa, Glycine max
  Clone ID: PAT_MRT3847_46949C.1.pep
MGNYISCTLSTAGSSKLHWRGIKVIFPSGEIEKLEEGVKAAELMLEMPSFFVVNTRSLKIGGRFSALNADEELECGYVYVMVPMKRLNSLVKASDMGALLLTAKKVTRVVPEKEESEEPKFKLDDGILEFSSPEFMHRLSMSRSKKPLLETIAEEPHVCSRS

SEQ ID NO: 226931 - protein, 65 aa, Glycine max
  Clone ID: PAT_MRT3847_4694C.1.pep
MRVFPRLKSLSRAVHEEQEREHDDEEKKKAAEKLYTSLTVWRKSLLMSCNGFTVIDSYGNLVYRV

SEQ ID NO: 226932 - protein, 130 aa, Glycine max
  unsure (1)..(130): unsure at all Xaa locations
  Clone ID: PAT_MRT3847_46950C.1.pep
INGAPFRGGXRPMRVVSFSNTRVEMEPNMNSRFQLQRTTTNGDYVQGKDLAMVKVNVPCAAVGLTSSYTPTPLMESGTQKDRGLIVEYFGRMYNVAHNVNQPQEKDLLEGNVYFESKSRYRLEKVACTKA

SEQ ID NO: 226933 - protein, 77 aa, Glycine max
  unsure (1)..(77): unsure at all Xaa locations
  Clone ID: PAT_MRT3847_46951C.1.pep
RLGLFAFCVAGGSCVLVASVLVCSVLRCRRLWLSFFXCLCCSAFPCGGVWGFLLCHCPSLSCLFLRFXPRGSPRGFL

SEQ ID NO: 226934 - protein, 61 aa, Glycine max
  Clone ID: PAT_MRT3847_46952C.1.pep
HTNKSLEAELQTYKEMSSVPKEPASKENIHTSMLRNKLEIAQIMLNPCCSFKTNKIAEDSI

SEQ ID NO: 226935 - protein, 87 aa, Glycine max
  Clone ID: PAT_MRT3847_46953C.1.pep
GEQHVVTGDRRGVRNRRGPRRSAVIGIRGLIGGFDFARIYNVLGNPRNGVGMNALFLKVRGVWDLSLPHSLSLRLFFFLWSEYDPTA

SEQ ID NO: 226936 - protein, 156 aa, Glycine max
  Clone ID: PAT_MRT3847_46954C.1.pep
ETDKVPSVDKSISDLEGMGVIIYGLDEPVGISNDGEISWDNIAGYEHQKRVVEDTILLALHSPEVYDDIARGTRHKFESNRPRAVLFEGPPGTGKTSCARVIANQAGVPLLYFPLEAIMSEFYGKSERLLGKVFSLANTLPNGAIIFLDEIDSFAA

SEQ ID NO: 226937 - protein, 86 aa, Glycine max
  Clone ID: PAT_MRT3847_46955C.1.pep
NTGGFPIYLLWQGAKKKQGEKTLWVGGVPTVFFSPKKKKFKRFLALFGENFTGAKKNGLKHKNLNKLPLPRFFFHNSQQGEAKPWF

SEQ ID NO: 226938 - protein, 89 aa, Glycine max
  Clone ID: PAT_MRT3847_46956C.1.pep
MKELGVVAILLSIEFFDVIVYTVSKAAMKKGMNDFVFVMYSNAFATCLLLPITFIFYRKRALPPLTYFIVGQLFINGFLSCSVQMLRFF

SEQ ID NO: 226939 - protein, 246 aa, Glycine max
  unsure (1)..(246): unsure at all Xaa locations
  Clone ID: PAT_MRT3847_46957C.1.pep
DPDLSTPIAPTSNPSRTAAAQTTTTTTSTPSIRYRECLRNHAASMGSHVVDGCGEFMASXGEGTPESLRCAACECHRNFHRKEVEGELRPQPQPQPQTHVPNYHSYYTNKHNGHLHYPTPSSSSLHHRLVTPTSLVSPVMMAFGGPAESSSEDLNMFQXTLGGAQLISVQQHAPLLSSSKKRFRTKFSQPQKDRMMEFADKIDWKIPKPNEQEVQQFCSQVGVKRQVFKVWMHNNKQTTSSKKQQM

SEQ ID NO: 226940 - protein, 64 aa, Glycine max
  Clone ID: PAT_MRT3847_46958C.1.pep
GTGAIMAVGASEPTVVGTKDGRIGIKSQMQVNVTADHRVIYGADLAAFLQTLAKIIEDPKDLTF

SEQ ID NO: 226941 - protein, 58 aa, Glycine max
  Clone ID: PAT_MRT3847_46959C.1.pep
SLQIEQLYSHQSCHSYYSDKTNNTLPFYSVLHDQNYLLQLGTILILYQEFINLSALLI

SEQ ID NO: 226942 - protein, 69 aa, Glycine max
  unsure (1)..(69): unsure at all Xaa locations
  Clone ID: PAT_MRT3847_4695C.1.pep
TGFSFHNPLLAPFQNQGFAKLCFSQRHTAHKHTTXXHTHRGKRGILRERERETGRQREKGALQVMIDTM

SEQ ID NO: 226943 - protein, 312 aa, Glycine max
  Clone ID: PAT_MRT3847_46960C.1.pep
IQLYVGVAAAVLSSAGYKVVVLEKGNYFSTQDYSSLEGPSMNQLYETGGILASVDSRVLVLAGSTVGGGSAVNWSACIKTPHKVLNEWSENHKLPFFSSQEYLSAMETVCERIGVTENCTQEGFQNQVLRKGCQNLGLKVDYVPRNSSGNHYCGSCGYGCPKGEKQGTQATWLVDAVERDAVIITGCKAERFLLESNRSGNGRKKKCLGVMAKALNSRVTMKLQIEAKVTISAGGALLTPPLLISSGLKNKNIGKNLHLHPVLMTWGYFPESNDSEFKGKVYEGGIITSVHKVPSPDSNSDSRAIIETPLLG

SEQ ID NO: 226944 - protein, 96 aa, Glycine max
  Clone ID: PAT_MRT3847_46961C.1.pep
MEPKPKYSPSEKKVKTPNIFERAKEEIEAVFHRDKSPHHHKETHGTSDDIDEGTSPDEIKAPGVFERVKEEIEAVAEAIHPKKESESGTRDVSSPK

SEQ ID NO: 226945 - protein, 119 aa, Glycine max
  Clone ID: PAT_MRT3847_46962C.1.pep
PIINFNFFFPNWVLALLKAKKFHPREKKFMAGTTRDTLPSKTRKEGNFSLLQRKGGANLWGGKKKILRVFSLRGNIEGFPPKGERKQAKGLKNTWDFHFTLGKDPQKFGGKDPHGAGAA

SEQ ID NO: 226946 - protein, 70 aa, Glycine max
  Clone ID: PAT_MRT3847_46963C.1.pep
NSARGWGKKGSSRRSPSLTPSPIQPTLPFFNSTNLPHLLPFIHRSITLSSFHIEPLSQHPINTNLHCNIN

SEQ ID NO: 226947 - protein, 93 aa, Glycine max
  unsure (1)..(93): unsure at all Xaa locations
  Clone ID: PAT_MRT3847_46964C.1.pep
RRGYKTTIIMGLCLYSLGAILFWPVAKFTGKSPNQAIFGGFVVCTAVIACGLGLARSRRPTRTSRSSPPQQGVXXXIQFXQXXXXXRLRSTXQ

SEQ ID NO: 226948 - protein, 134 aa, Glycine max
  unsure (1)..(134): unsure at all Xaa locations
  Clone ID: PAT_MRT3847_46965C.1.pep
EIRHRTKLTASKCTDXKAARKQLPNKVDRESTTATGGEKETRRLMPKRMTLXRDIQTCHKMTELPIRKLTFXRIAREIAQDCXTDLRCQRSADSVLEEAVEVNLGEIIEDTTHCAILAKRGTTMSKDMPLDRIV

SEQ ID NO: 226949 - protein, 77 aa, Glycine max
  Clone ID: PAT_MRT3847_46966C.1.pep
MVVGQLLNAHSFDWRTNTIGPPSHLPHHFVLSHLLHCSKHRRRHTSLTWMNGLWSGEATTPSFTLATLPLPMKALHR

SEQ ID NO: 226950 - protein, 64 aa, Glycine max
  Clone ID: PAT_MRT3847_46967C.1.pep
MRPLAFLVHRPKSLCTFFFFFQPVISTHKKFIHSALRYYYSYIYTYDKMQGELLMRSFCTEPAI

SEQ ID NO: 226951 - protein, 55 aa, Glycine max
  unsure (1)..(55): unsure at all Xaa locations
  Clone ID: PAT_MRT3847_46968C.1.pep
WWGGRGGAFVRFQLVGMPVMXSVARPLVESTADFSSSVSYSSFVACMLVELFIGP

SEQ ID NO: 226952 - protein, 42 aa, Glycine max
  unsure (1)..(42): unsure at all Xaa locations
  Clone ID: PAT_MRT3847_46969C.1.pep
HANFTVSRYIIIXXSNFCCKETSNLVLFRCAKIXYCFXFXGS

SEQ ID NO: 226953 - protein, 102 aa, Glycine max
  Clone ID: PAT_MRT3847_4696C.1.pep
QPKWVKKNFYNPPPGPGKKFFHFLKKGGKKLKKTPLKKKRRPQKGGPPRKKVSKKAPPLDGGGNRPPPFENLKLTKPMFFCLEKKRVTFPGGGGDNFRKKGP

SEQ ID NO: 226954 - protein, 141 aa, Glycine max
  unsure (1)..(141): unsure at all Xaa locations
  Clone ID: PAT_MRT3847_46970C.1.pep
AFLRAFRLPWVAFXPAFFAGVGFPFPPFSFSWLXVXAXXAXPPPSWPRGVLSLWPCXXSFLCCXSSVLGLCGPCXWWXPGXFFXXPPPVLFXXPLRXXXFSXXXXPLXXXGPRVCVXXXSLPXXPXSSSLXLFWFSPPPPP

SEQ ID NO: 226955 - protein, 312 aa, Glycine max
  Clone ID: PAT_MRT3847_46971C.1.pep
LEVIGRGGYAEVYKGTLNGGDEVAVKRLTRTSTDERKEKEFLLEIGTIGHVRHSNVLPLLGCCIDNGLYLVFELSTVGSVASLIHDENLPPLDWKTRYKIALGTARGLHYLHKGCKRRIIHRDIKASNILLTADFEPKISDFGLARWLPSQWTHHSIAPIEGTFGHLAPEYYLHGVVDEKTDVFAFGVFLLAVLSGRKPVDGSHQSLHSWAKPILSKGEIENLVDPRLGGAYDVTQFNRVASAASLCIRASATCRPIMSEVLEVMEEWKMDKGKWEMPEEEEQEEELWGFEDLEYEYDSSFSMSLPDSVGST

SEQ ID NO: 226956 - protein, 159 aa, Glycine max
  Clone ID: PAT_MRT3847_46972C.1.pep
MLATSAVASLPVLPPVRRGGHHIEQNVVSTLSFPRRLLTTNNSIPLSGTQFPFGRRAHSTHTATIICAAALNARCGAEQTQTVTRQAPTITHVPGKEKSPQLDDGGTGFPPRDDDDGGGGGGGGGGNWSGGFFFFGFLAFLGFLKDKETDDTYRDDRRR

SEQ ID NO: 226957 - protein, 207 aa, Glycine max
  Clone ID: PAT_MRT3847_46973C.1.pep
FVNVFVIFCALFQDVTMKIMSFSQQGCQAICILSANGTISNVTLRQPTFSGGTLTYEGRFEILSLSGSYITTENGLTKSRSGGMSHSLAAPNGRVMGGGLAGLLVAAGPVQVLWASFVPGHQLEQQKPKKPRVEHISMAAPTYVNPTSAEEIRIGLGGVKPIMTPAAFQVHHIFGNGQSSGNSASDDSAPFPENESNPSHADAGVAC

SEQ ID NO: 226958 - protein, 99 aa, Glycine max
  unsure (1)..(99): unsure at all Xaa locations
  Clone ID: PAT_MRT3847_46974C.1.pep
PPSPKGFPIIRNKVRKRELTXHRGLCNLDAHYCGICHLHMDVXHMVAISDPDALRHVLQAHYNLVTNRPTSIDINYLTYNHPYMVLTHYSPFWRPMTKL

SEQ ID NO: 226959 - protein, 59 aa, Glycine max
  Clone ID: PAT_MRT3847_46975C.1.pep
WLIRGGVECRCPFYGVEAIAYPVNQTGPRVCLGRGTAFFQMKKLVAGVIQTFKGVLEVS

SEQ ID NO: 226960 - protein, 73 aa, Glycine max
  Clone ID: PAT_MRT3847_46976C.1.pep
HASAISSASFSRNHSVLLHRPNDSTNASQQSHKQVATGWLVTTGWSATSHGNGIRINLQYTKLISDPIHSGSL

SEQ ID NO: 226961 - protein, 55 aa, Glycine max
  Clone ID: PAT_MRT3847_46977C.1.pep
AFRSDHSEPRRVFLLLLHGSSDSSFSHTSVLINVSRVANTLYYSTILLVEPNRSI

SEQ ID NO: 226962 - protein, 80 aa, Glycine max
  Clone ID: PAT_MRT3847_46978C.1.pep
EHYSTRVISFTLLALSGRESFPRAPGPVSPTGRIRGVSHFSSKSFTRLFVITPSEELSMPLATVCDVTRLQCTPCTFCYC

SEQ ID NO: 226963 - protein, 38 aa, Glycine max
  Clone ID: PAT_MRT3847_46979C.1.pep
ALNSASPLRYCCTCILKIHINIIDKFIIYITPHKSDPS

SEQ ID NO: 226964 - protein, 300 aa, Glycine max
  Clone ID: PAT_MRT3847_4697C.1.pep
MAEPVVDDEYLKEIDKARRELRAFITSNQCAPLMLRLAWNDAATYDARNRAGGPNGSIRTDKELKHEANEGLLKATQLCEHVKAKLKKVSYADLYQLAGVVAIEVSGGPTIEFLPGRKDSMESSAEGLLPDVKQGASIIRNIFSRMGISDDKHIVALCGGLTWGETLKDRSDSKGQWPKDPLKFDNSYYKKILSKDLSSRLPIEDALLTDQSFRRHVEEYSKDENSFFKEYAMSHKKLSELGYNLKKQNQSKVADEEQNQPKGPYEKLNQHRGLIGIGIVSVVTVILGYLLKRKKNQLKK

SEQ ID NO: 226965 - protein, 88 aa, Glycine max
  Clone ID: PAT_MRT3847_46980C.1.pep
FFFFFFFFFFFFFFFFFCFFFFFLTPKRGPFIYYWEKKKGGKKKGAPMGGLSKKEAGQIQKMGAIQRGPIFLENYINKRGGKPKPGAN

SEQ ID NO: 226966 - protein, 69 aa, Glycine max
  Clone ID: PAT_MRT3847_46981C.1.pep
FSSSHASVQITSFPPRHSEPLVLEHILDQGVWEKNSTCYAGFLSCNSDYDARDIRTHYIVLNSPSQLSY

SEQ ID NO: 226967 - protein, 257 aa, Glycine max
  unsure (1)..(257): unsure at all Xaa locations
  Clone ID: PAT_MRT3847_46982C.1.pep
MDSELLSILPPIMSFFLFMIVALKIGSNLKKTESSPNIPPGPWKLPIIGNIHHLVTSAPHRKLRDLAKMYGPLMHLQLGEVFTIIVSSPEYAKEIMKTHDVIFASRPKILASDILCYESTNIVFSPYGNYWRQLRKICTLELFTQKRVNSFQPTREKELTNLVKMVDSHKGSPMNFTEAVLLSIYNIISRAAFGMECKDQEEFISVVKEAVTIGSGFNIXDLXPSAKWLQLVTGLRPKLERLHRQIDRXTGGIINEH

SEQ ID NO: 226968 - protein, 226 aa, Glycine max
  unsure (1)..(226): unsure at all Xaa locations
  Clone ID: PAT_MRT3847_46983C.1.pep
MPQPLFLFLLLCLLCSSSGLSQVLSLERETQILLGVKNTQLEDKNKSLKNWVRVRRHHPCSWTGITCDSRIHSLVSIDLSETGVYDEFPFGFCRIHTLQSLFVASNFLTNSISLNSVRLCSHLRLLNLSDNYFVGVLPEFPPEFTELRELDLSKNNFTGDIPASFGQFPHLRALVLSGNLLGGTIPPFLVXGNLSELTHLELAYNPFKPGPLPSQLGNLCNLETLV

SEQ ID NO: 226969 - protein, 77 aa, Glycine max
  Clone ID: PAT_MRT3847_46984C.1.pep
CPHRGQILHLKGSSIVSPTPIFTKIWTMPNTFLLYYVGINMIYGHRIWTVSTGAGVWNRSMERGLIYQSDVTSYSNR

SEQ ID NO: 226970 - protein, 175 aa, Glycine max
  unsure (1)..(175): unsure at all Xaa locations
  Clone ID: PAT_MRT3847_46985C.1.pep
MASEKKLSNPMREIKVQKLVLNISVGESGDRLTRAAKVLEQLSGQAPVFSKARYTVRSFGIRRNEKIACYVTVRGDKAMQLLESGLKVKEYELLRRNFSDTGCFGFGIQEHIDLGIKYDPSTGIYGMDFSVVLERPVYRVXRRRMCXSSVGIQVRDPKDDAMKWLLVTYDGVIVN

SEQ ID NO: 226971 - protein, 181 aa, Glycine max
  Clone ID: PAT_MRT3847_46986C.1.pep
MASEKKLSNPMREIKVQKLVLNISVGESGDRLTRAAKVLEQLSGQTPVFSKARYTVRSFGIRRNEKIACYVTVRGDKAMQLLESGLKVKEYELLRRNFSDTGCFGFGIQEHIDLGIKYDPSTGIYGMDFFVVLERPGYRVGRRRRCKSRVGIQHRVTKEDAMKWFQVKYEGVILNKSQAIV

SEQ ID NO: 226972 - protein, 75 aa, Glycine max
  Clone ID: PAT_MRT3847_46987C.1.pep
YALVITGLIFPSSSSTILYHESMQSLLVCQYVVHNAREKYGTPFLRGWGVCKSIDLFSVVVKLWILTISLNGMQF

SEQ ID NO: 226973 - protein, 77 aa, Glycine max
  unsure (1)..(77): unsure at all Xaa locations
  Clone ID: PAT_MRT3847_46988C.1.pep
MVSSFTCLKSMAGFPTRKTNNDITSIACNRLRVQCIHVSPPIVKKKFDTFSYLPYLYYSQLSNEVXYLLTKGLIPFF

SEQ ID NO: 226974 - protein, 163 aa, Glycine max
  Clone ID: PAT_MRT3847_46989C.1.pep
DVLNISVGESGDRLTRAAKVLEQLSGQTPVFSKARYTVRSFGIRRNEKIACYVTVRGDKAMQLLESGLKVKEYELLRRNFSDTGCFGFGIQEHIDLGIKYDPSTGIYGMDFFVVLERPGYRVGRRRRCKSRVGIQHRVTKEDAMKWFQVKYEGVILNKSQAIV

SEQ ID NO: 226975 - protein, 225 aa, Glycine max
  unsure (1)..(225): unsure at all Xaa locations
  Clone ID: PAT_MRT3847_4698C.1.pep
MGTSPWGKKKKRAPYKKKKQPSFLLGKPAKKVYPHNKKKKRRHGRKKKKGGGKKQKKKKPPLPPFKKRKKPHXGRLDLGQNKMGGGKEKKKNFPPPNKWGGGKKPTPLKRENNPPPPKKKSNSFFFXKEVSPGQKKKKKKKGGVVLKKKKKLFCGAPPPQKKEGEARARKKKKRKKKKKRGGPNRGGRKNPPKRGGKKKKERGTPIKKKPGGKKKNTPGGKKKPP

SEQ ID NO: 226976 - protein, 86 aa, Glycine max
  Clone ID: PAT_MRT3847_46990C.1.pep
ASSCLDQALRAVPSHPRTTTPLPLTTHIKTLHHAPSTPKSPPPGSPPPAVTSPPGGTSPPAATPTAVPAPPTAAPTPGSSAAGSAP

SEQ ID NO: 226977 - protein, 51 aa, Glycine max
  Clone ID: PAT_MRT3847_46991C.1.pep
LLHLYMFLHIADINEVSLLIPHLNSHAIVILLINEGHADMILVLLLEQRQE

SEQ ID NO: 226978 - protein, 275 aa, Glycine max
  Clone ID: PAT_MRT3847_46992C.1.pep
DPLLLAATASASLRHQETLRPEPLFLDPYAGCFVPHNSPKDVIQDLHPYCLATKFIDDKLLHTVSLIDGLKQLILLTDGMDTRPYRLQLPSSILIFDISPESVFRIAAEKLKGVGAKMPKVCIFYHIPLESSDIEQAMQFNGNNGSRPRIWHLQGFPVMTLANFEEVLSMISSLAMKGSLFVGELPACVAETDIEIKSNTRQWVDKLFMSKGFRVEIINYKGFAERSGKDFVSGHYNNILFVAEQLLHSDDQMESWRREFQRIENEGDEEGFEEL

SEQ ID NO: 226979 - protein, 170 aa, Glycine max
  unsure (1)..(170): unsure at all Xaa locations
  Clone ID: PAT_MRT3847_46993C.1.pep
GSSTDSVTVSYLQLYMETLQDLLNPANDIIPIAEDPRSGDVSMPGATLVEITDQHSSLELLRVGEANRIAANTKLNTESCRSHAMLMVHIKRSVLENEDMPSQNGDASHLTKPSQPLDWKSKSHVADLSGSERVHKSGSEGHMLEEAXSINLSLSSLRPCMTALAENNAH

SEQ ID NO: 226980 - protein, 317 aa, Glycine max
  Clone ID: PAT_MRT3847_46994C.1.pep
MDESFTPAPPPPPMSLSRHDHVQRMINSKRYKSPSKTIYSDRFIPSRSGSNFDLFNLPSPSSSEDSCSCSPYSTALRRALFGPDTPDKFESPNIFRYKTETRKSMYSLSPTPFTSQDDLLPGYDNNHKPPKRPRKIPPSSFKVLDAPALQDDFYLNLVDWSSNNILAVALENSVYLWNASSSKVTKLCDLGIDDSVCSVGWAPLGTYLSVGSNSGKVQIWDVSQGKSIRTMEGHRLRVGALAWSSSLLSSGGRDKSIYQRDIRAQEDFVSKLSGHKSEVCGLKWSYDNRELASGGNDNRLLGWNQKSTQPVLKFCEH

SEQ ID NO: 226981 - protein, 659 aa, Glycine max
  Clone ID: PAT_MRT3847_46995C.1.pep
LEIDADMNNRGKGRLKYLLQQTELFAHFAKGDQSSSQKKSRGRGRHASNFTEEEEDEEYLKGEEDGLANTRLVTQPSCIQGKMRDYQLAGLNWLIRLYENGINGILAGEMGLGKTLQTISLLGYLHEFRGIKGPHMVVAPKSTLGNWMNEIRRFCPVLRAIKFLGNPDERRHIRDELLVAGKFDVCVTSFEMAIKEKSALRRFSWRYIIIDEAHRIKNENSLLSKTMRLYSTNYRLLITGTPLQNNLHELWSLLNFLLPEIFSSAETFDEWFQISGENDQQEVVQQLHKVLRPFLLRRLKSDVEKGLPPKKETILKVGMSQMQKQYYRALLQKDLEVVNAGGERKRLLNIAMQLRKCCNHPYLFQGAEPGPPFTTGDHLIENAGKMVLLDKLLPKLKERDSRVLIFSQMTRLLDILEDYLMFRGYQYCRIDGNTGGDDRDASIDAFNKPGSEKFVFLLSTRAGGLGINLATADVVILYDSDWNPQVDLQAQDRAHRIGQKKEVQVFRFCTEYTIEEKVIERAYKKLALDALVIQQGRLAEQKTVNKDELLQMVRFGAEMVFSSKDSTITDEDIDRIIAKGEEATAELDAKMKKFTEDAIKFKMDDTAELYDFDDEKDENRFDIKKIVSENWIEPPKRERKRNYSESEYFKQTMRQVSTN

SEQ ID NO: 226982 - protein, 78 aa, Glycine max
  Clone ID: PAT_MRT3847_46996C.1.pep
TQYASLMLIIRASSINFQYLQPISITNKFSPSPSHQSTPQNHKSKHHPASHKSPPTGMAQKAATQSHNAAMDPCCMTR

SEQ ID NO: 226983 - protein, 123 aa, Glycine max
  unsure (1)..(123): unsure at all Xaa locations
  Clone ID: PAT_MRT3847_46997C.1.pep
SCPGFLVSVSLPVGAPSFVFLSGLASFFGFPRFFSGLSLGPVGVSPSGCLGLSCIFWLGLFVPSVWVSVLPEFRPLVVCCXAVFSVSGGCLFAGLPRPGSLPVVSPPLCVLGAGRVYGRVGRP

SEQ ID NO: 226984 - protein, 101 aa, Glycine max
  Clone ID: PAT_MRT3847_46998C.1.pep
ASPLLTSKEGLQKIIDPIIKPVFSVDTMVKVAAIASMCVQPEVTQRPFMGEVVQALKLVCSEFEETSYVRLKSFREDDLATSVPGERVGISECNITLPQPG

SEQ ID NO: 226985 - protein, 87 aa, Glycine max
  unsure (1)..(87): unsure at all Xaa locations
  Clone ID: PAT_MRT3847_46999C.1.pep
GSVVHDSSGCCARRRHLVTKAARWSALVTGXVIXLQLFMPGLVALRDIMVYLNCTFVLIRILPFQRLLRXVAQDFRSVVRFQSDRCF

SEQ ID NO: 226986 - protein, 268 aa, Glycine max
  Clone ID: PAT_MRT3847_4699C.1.pep
RGSLERSSSPRSSTCATPNAFSHYSSEANKGNQQQLEHVRKRLRPPSCAAVTKIKGKGKVKTQWVCCNCGHSTGKWWGQCPECQIVGTMNEFRESKLTGTKSSGGLAVSEDPVGSWLPQRPQELRPLKLEEINRRFNYQQWRIPLSGSFGNEVSTVLGGGLVPGSLTLVGGDPGIGKSTLLLQLNWKIAAMIAKECSDDEEPPVVYVSGEEVPRIDKRVNTLAKLGYRMCVVPKQAEKLLETEGLGKMKVLGCEVLKEVINAVFSRDN

SEQ ID NO: 226987 - protein, 61 aa, Glycine max
  Clone ID: PAT_MRT3847_469C.1.pep
AAIPMNLINWGNFFKFSDLFSNPAIFLTLKKRGRGWRLLQPPIFDLKTLELAERQYMTTFF

SEQ ID NO: 226988 - protein, 143 aa, Glycine max
  Clone ID: PAT_MRT3847_46C.1.pep
TLFHFIFIFYMVVFCLMKKNPIKFGFPCPGGNNTSKWGPRGGGVSFLRPPPGRKNYFGLSGGNVIIPLIWWGGANNSPKLSPLSMWGNKGRFFPPLGPPPPNGLERGGGAAPNFVGLKEKNLPRNQRPPLVLGFLGEKFAPPR

SEQ ID NO: 226989 - protein, 57 aa, Glycine max
  Clone ID: PAT_MRT3847_47000C.1.pep
SCCLETRLLKSIFFCKGLLINSGIFWIHYYCLKKWHWLPKKKKKKKKNKKKKKKKKK

SEQ ID NO: 226990 - protein, 474 aa, Glycine max
  Clone ID: PAT_MRT3847_47001C.1.pep
RAARSESARALNNKDEVLLRIDWRESVPHPDNRVEYELWTNSNDECGARCDEQMNFVKNFKGHAQILERGGYTLFTPHYITWFCPPPFILSSQCKSQCINHGRYCAPDPEKDFGEGYEGKDVVYENLRQLCVHRVANESNRSWVWWDYVTDFHVRCSMKEKRYSKDCAEEVMKSLDLPMDKIKKCMGDPEADVENEVLKNEQQVQIGRGSRGDVTILPTLVINNVQYRGKLERTAVLKAVCSGFKETTEPSVCLSGDVETNECLERNGGCWQDKHANITACKDTFRGRVCECPVVNGVQYKGDGYTTCEAFGPARCSINNGGCWSETKKGLTFSACSDSKVNGCQCPVGFRGDGTNKCEDVDECKERSACQCDGCSCKNTWGSYDCKCKGNLLYIKEQDACIERSESKFGRFLAFVVIAVVVGAGLAGYVFYKYRLRSYMDSEIMAIMSQYMPLDQQNNVVHAETQPLRQQGTV

SEQ ID NO: 226991 - protein, 35 aa, Glycine max
  Clone ID: PAT_MRT3847_47002C.1.pep
PIYAYLYNTSMKKKSSPNSLVINFSKHFMCSKLPV

SEQ ID NO: 226992 - protein, 190 aa, Glycine max
  Clone ID: PAT_MRT3847_47003C.1.pep
ARGTTVMVDENTMGEGGQLDEAALRNLQCLIETLHSQTLRYEYPYMDDLKMDCELRLLVFSEAKSLIPVDLNVAIVGGLKPFDDVDLEKLASYRSYLAFHGRVGSKVSIPDETAEYIQTEFAHYRQKAGQNDIQQATNQLKCRLKIARLLAQSHTEHVVTVDIWQRAVCIHEDIESRSLPRPSFENHRCI

SEQ ID NO: 226993 - protein, 119 aa, Glycine max
  Clone ID: PAT_MRT3847_47004C.1.pep
RSGRPERGGLEYVTAVHGATTTDSLRPERRRQFDGSSRRRLTRPGNPTLCRAEHRHLSVITSRQCVAPPVKPVVRHRQKRIPLKRSSTTTIARPREAGNGPALPHMMLRSLSNTRKKKR

SEQ ID NO: 226994 - protein, 113 aa, Glycine max
  unsure (1)..(113): unsure at all Xaa locations
  Clone ID: PAT_MRT3847_47005C.1.pep
MSERRESDEELKMKVRECLNKSGKYLVVVDDVWETQVWDEIKSAFPDANNGSRILITSRSTKVASYAGTTPSYSLPFLNKQKSWELLFKKLFRDEESVXPELVELGKSIAERC

SEQ ID NO: 226995 - protein, 77 aa, Glycine max
  Clone ID: PAT_MRT3847_47006C.1.pep
FKVSPLFWQGMFPQLGSCYSVASLLLSMCPSVLRKSVPLISVLFSAFPPMFCALVCVLSVQIAFLYDVSSINVLSTF

SEQ ID NO: 226996 - protein, 91 aa, Glycine max
  Clone ID: PAT_MRT3847_47007C.1.pep
PLGRGCIRFWHPPPGLFSSPKHLLSIFVANTTPLFFIAKWLLPFFWTCFSLSSSPKGGFSFFVLFSPGAPSCKKTFFFLVLPIFFFFFPGR

SEQ ID NO: 226997 - protein, 954 aa, Glycine max
  Clone ID: PAT_MRT3847_47008C.1.pep
SSLSKKEKISFCQCLRQVKVPQGYSSNIKSLVQLKELKLVGKVVDPVKFDELENEAAIILCQLEMYFPPTFFDIMIHLIVHLVREIKCCGPVYLRWMYPIERYIKILKGYTKNLYHPKASIAERYITEEAIEFCSEYIEKAKPVGLPESRHDDRVGGKGSRGLHVITPSLEDLLQAHLYVLNNNENTSETLRKLADGPKRSVITWQGYDINKYSFYTKAQDDKSTMQNSRVTLRAESQHFASVHDDNPCVASIPYFGFIDEIRELNYVKFIVCVFKCKRVDSNTGVRTDDIGFTLVDLKKIGYHNDPFIMVEQARQVFYVQDPCDEWWCMVLQGKTIGVNVEDDDSYMDTYVSPLIMASPSASPPPPPPPPSDASASLSAKKRTRKASRLRSLSTRPLGVERPMVHVDPATGKADGPHRKKLRTYLEIVAHDKVDVTYENWKEVPTAQKDSIWEADQDGVDDTVCEKYGISKEKWAQSCQTHRDPSWEKKAQAIQKQNTAPHVLSHGGYEYLEQKLLAEKTKKKLEEAAQSGSIDGTIDLPSPVRCHVKWKMAHTKKIGEMTTEAAKEIVEKIDSFEEQGTHGSFVPHGRQDVLTAAIGRLEHPGRVRAVGADVPNSSSLPPKELQQLTQQIRDQLEESITEKVARQLIASFNQTQSQVQSQMQSQGLALPPEPLVGPSSPRVSTNESCVDPSGNDPETGDSDRCDLYIEANPARLVALGRVYEGSTIVHNTPLFPGQVKVGMEEVKDPDASILVPTDEVSIVGQAIHTFLAWPTHLVKSLSQQTVVSPTKPPPKLDPEVDDPLYLMTLTIPELFLRPYQVTWDATVFGVFNPDFPLYIKHEDLSEIAHGGQCLSISMLQLWILHLTETSMRVGNSDIYGFLELQSIQSGHWQMAVIMPKEHLVVWFCLLHISALKGLDDAPQPKSKAPARWIVIKYFNDPRPLEPERLKALRI

SEQ ID NO: 226998 - protein, 104 aa, Glycine max
  unsure (1)..(104): unsure at all Xaa locations
  Clone ID: PAT_MRT3847_47009C.1.pep
SCRVSGCSVCWCLRFLRSAGLLXACCGAPAGXXPCPGLRFCRXLAGARGLFVPPAPPAVGFFLLGFXGGPPPRRRELTPALPPVRVERRRYGGVTSRHSKRCQE

SEQ ID NO: 226999 - protein, 137 aa, Glycine max
  Clone ID: PAT_MRT3847_4700C.1.pep
MNPLTLVKRTQNINAREAALGIGEQASWHTKYKDSAYVFVGGIPFDLTEGDLLAVFAQYGEVVDVNLVRDKGTGKSKGFAFLAYEDQRSTNLAVDNLNGAQVLGRIIRVDHVDKYKKKEEEDEETERQKKGICVPCV

SEQ ID NO: 227000 - protein, 88 aa, Glycine max
  Clone ID: PAT_MRT3847_47010C.1.pep
SFFFFFFLFFFTIFFFGVILYGKNKKGSPIPRTLYLKITTNPYPPSIHRIPPGPTPLLKLPPMRWRPKQKKPSQNPPKQGKAERSLLV

SEQ ID NO: 227001 - protein, 81 aa, Glycine max
  Clone ID: PAT_MRT3847_47011C.1.pep
NLLYREWRVVLCDLDATAIGVLSIILCVLFVYNPVIFALGRKEAPKFAGSWPILGHLRLLSGVETPDRVCGALAYKYGAIF

SEQ ID NO: 227002 - protein, 41 aa, Glycine max
  unsure (1)..(41): unsure at all Xaa locations
  Clone ID: PAT_MRT3847_47012C.1.pep
QRNNGPPFCXVWASCSRRPPGILPFWVTINPIQWGYELFNV

SEQ ID NO: 227003 - protein, 49 aa, Glycine max
  Clone ID: PAT_MRT3847_47013C.1.pep
DSREKRSSCKDHNISYHRNVIRYYFILQGVTPKIPVHILRRKNNINNIK

SEQ ID NO: 227004 - protein, 57 aa, Glycine max
  Clone ID: PAT_MRT3847_47014C.1.pep
SAQVEQGQVNSVETFYECTLLLQNVEYSNKLIVVDFTASWCCPCPFYRASFLHHYLS

SEQ ID NO: 227005 - protein, 473 aa, Glycine max
  unsure (1)..(473): unsure at all Xaa locations
  Clone ID: PAT_MRT3847_47015C.1.pep
CFGFGLSDCVLFLQLHKLLDFLNSITLKNSVISIRNKKLPLMTKQKIRNALLVHLVILFFFSTSVVSARVVSLLQNYGNPIFRSNFHSIYDTSKYGVFQLSNGLGKTPQMGWNSWNFFACNINEMVIKETADALVSTGLADLGYVYVNIDDCWSSVTRNLKGQLVPDHKTFPSGIKALADYVHGKGLKLGIYSDAGVFTCQVRPGSIFHETDDADLFASWGVDYLKYDNCYNLGIPPKERYPPMRDALNATGQKIFYSLCEWGVEDPALWADKVGNSWRTTGDINDSWASMTTIADLNDKWAAYAGPGGWNDPDMLEVGNGGMTYQEYRAHFSIWALAKAPLLIGCDVRNLTAETLEILSNKEVIAINQDSLGVXQGRKVQVSGADGCRQVWAGPLSGNRLAVALWNRCSKVATITASWEALGLESGVHVSVRDLWQHKVVTGDAVSSFSARVDIHDCQLYIFAPFTVSHSVE

SEQ ID NO: 227006 - protein, 73 aa, Glycine max
  Clone ID: PAT_MRT3847_47016C.1.pep
VNDHDKERYMKMDLSSKDKSDGIAKSACLCDNNALSANHSKCRVHQLMTFSPPEADQNDSGDRRFCSNKQHRG

SEQ ID NO: 227007 - protein, 43 aa, Glycine max
  Clone ID: PAT_MRT3847_47017C.1.pep
RLEREVNDNEKNPIEMVVIRGNSLVTVEVLQIQVFKCKLTIVK

SEQ ID NO: 227008 - protein, 111 aa, Glycine max
  unsure (1)..(111): unsure at all Xaa locations
  Clone ID: PAT_MRT3847_47018C.1.pep
LEDGREITRLGSNGDKRYLLQQLMNETIILHYLPHKHMAXIYGCAANHEEFVLVTEYLSNGNLAAHIHSEMDXKITLPWLKRLDIAFDIGNALNHLDNYGIIHRSVKCRNI

SEQ ID NO: 227009 - protein, 112 aa, Glycine max
  Clone ID: PAT_MRT3847_47019C.1.pep
SAELVNAIQPACSNAAFADSMMSTKTEPIVCFTARQSLSNISFSGVTKDSVGDYQDCGASSMLLMGEPPWCPPCPESSLHSANRSNAVMRYKEKKKTRKYVSCNDFIYSYWC

SEQ ID NO: 227010 - protein, 85 aa, Glycine max
  Clone ID: PAT_MRT3847_4701C.1.pep
RFPGVDPRRPKKKKKKKKKKGKKKKKKKKKKKKKKKKKKKKKKKKKKKKKKKKKKKKKKGGPFLKNPILLPPPSKGLFFFWGPLI

SEQ ID NO: 227011 - protein, 298 aa, Glycine max
  Clone ID: PAT_MRT3847_47020C.1.pep
MAGKSNEKKGGRRGRACVVVLGDIGRSPRMQYHALSLANQASLEVDIVAYGGSEPHTALLANPSIHIYIMKQWLTASQSLPKILRPIMLLLKPLVQFCMLLWFLCVKIPSPDIFIVQNPPSVPTLVAVKWASWLRNSSFVIDWHNFGYTLLALSLGRNSHFVSLYKWFEKHYGKMADASLCVTKAMQHELAQNWGINATVLYDLPPDIFHPASLEERHKLFCRLNEDLFRSLGVRDCVSNGTSLVASYRQNETLFATEFGSNIYLKPNRPALVVSSMSWTPDKDFAILLEAAVMYDRR

SEQ ID NO: 227012 - protein, 160 aa, Glycine max
  unsure (1)..(160): unsure at all Xaa locations
  Clone ID: PAT_MRT3847_47021C.1.pep
HDSYFVNHGLAPRELNLHSSEEACHLXRKALSRTEWLHTADXPTIQQIEDARFMQRQRNAPEAHDNADLPWTIXLEELTRSQLGFDRQEGMXDQAVLDNTHECSEGNCTGETRLPTEANWRYTVRKLPSEAAVAYATQHDWPLSKNWSGIIYNCPHAFVL

SEQ ID NO: 227013 - protein, 63 aa, Glycine max
  unsure (1)..(63): unsure at all Xaa locations
  Clone ID: PAT_MRT3847_47022C.1.pep
TCNXIIYLCWITHLIGFLFLQSMIQNNCFKIIKIYYRNNIYMKLINNLVDLSVGSLLYMDLAF

SEQ ID NO: 227014 - protein, 47 aa, Glycine max
  Clone ID: PAT_MRT3847_47023C.1.pep
GSGQPNLYGFNPYLHANGGFSLFFHRSIARNLISTVLRFNRESITRT

SEQ ID NO: 227015 - protein, 76 aa, Glycine max
  Clone ID: PAT_MRT3847_47024C.1.pep
MLEPRESDIPVLFLVLVVLPLVAYILLGKWSETSKKRDRINLLAHLAAEEALRAEEMAVADVIPPVSASKNEHHVC

SEQ ID NO: 227016 - protein, 63 aa, Glycine max
  Clone ID: PAT_MRT3847_47025C.1.pep
TAAYVPSWAPATARVSSSAERGARSSTTKAKSSGRGQTALCPMVDMNGWNSKNVECDQGSLEP

SEQ ID NO: 227017 - protein, 120 aa, Glycine max
  unsure (1)..(120): unsure at all Xaa locations
  Clone ID: PAT_MRT3847_47026C.1.pep
MLEPRESDIPVLFLVLVVLPLVAYILLGKWSETTKKRDRINLLAHLAAEEALRAEEMAVADVIPPVSASKNEHHVCARCSGPARTRCSRCKIVRYXCSGNCQIFHWRLNHKQECQQLGTS

SEQ ID NO: 227018 - protein, 78 aa, Glycine max
  Clone ID: PAT_MRT3847_47027C.1.pep
LFFFFFGSRHPPVQSGTRCVTIRPLFFAFLDILELWGNVHPTIYAEISNTHGQEFPKKRWDNIREQTLRTIMLMLWSH

SEQ ID NO: 227019 - protein, 58 aa, Glycine max
  Clone ID: PAT_MRT3847_47028C.1.pep
IFFFFFFFPLFFFKKLLFLQPNNQILHLKNNPKTKPNFNLSNQNYITNLITKSYLKKI

SEQ ID NO: 227020 - protein, 62 aa, Glycine max
  Clone ID: PAT_MRT3847_47029C.1.pep
GLVHKGDVGYNKCWFLLGTLVSSFKGSLFFGQSLKSPPSFCNCCSQNWVIDSGWQNEFYPIV

SEQ ID NO: 227021 - protein, 213 aa, Glycine max
  Clone ID: PAT_MRT3847_4702C.1.pep
FSTRRGKHVSDSSEVDDEEYGLNVSSDEDCENESVGDSEEKKDVAGLFRAEESRDFSYIVEVLTEAGISNRSLFTDFSTWHSAECPISPSVFKILEKKFGEQQLWKRSERKLLFDCINLGLLEILQPYLYIPMWEKPMSRRLNAEPSQNMIEEEMWGLLVAQEKKASKGLADSILEGEIRWIELVEDVEDIVREIVNLLIEELANEIVSLEKF

SEQ ID NO: 227022 - protein, 120 aa, Glycine max
  Clone ID: PAT_MRT3847_47030C.1.pep
MVNPGLFSANKSVNSVKVSFRIPYFTQWGQTLLVCGSVPVLGSWNVKKGVLLRPIHQGAELIWGGSITVPKGFRCQYSYYVVDDNKNVLRWEMGKKHELVLPEGIRSGHEIEFRDLWQTG

SEQ ID NO: 227023 - protein, 42 aa, Glycine max
  Clone ID: PAT_MRT3847_47031C.1.pep
YHSTNVTSDKGNTTTPFLLAPTSIANHIHGDIAFESKAELDS

SEQ ID NO: 227024 - protein, 34 aa, Glycine max
  Clone ID: PAT_MRT3847_47032C.1.pep
SHWLNNERSIKLVTKENHTIKLYIKTEVTHQVTE

SEQ ID NO: 227025 - protein, 154 aa, Glycine max
  Clone ID: PAT_MRT3847_47033C.1.pep
MQQSLKMQKNVQTEGLEQSGNRVSEENLPGSNSTVPGKGEKVNAAAAGSSNLEGGELENTAKSVASNETEKNSNTEMSETNKNQTISHVENTDATKNEFKGDTQTDETSDSVEHQDTDSSDSHILKNVAEGRTDLDTLPDIRNEGDNRDATATD

SEQ ID NO: 227026 - protein, 150 aa, Glycine max
  unsure (1)..(150): unsure at all Xaa locations
  Clone ID: PAT_MRT3847_47034C.1.pep
MGRKFFVGGNWKCNGTTEEVKKIVTTLNEAKVPGEDVVEVVVSPPFVFLPFVKSLLRPDFHVSAQNCWVRKGGAYTGEVSAEMLVNLGIPWVIIGHSERRQLLNESNEFVGDKVAYALTLGLKVIACIGETLXQREAGTTTACCAEQTKS

SEQ ID NO: 227027 - protein, 141 aa, Glycine max
  Clone ID: PAT_MRT3847_47035C.1.pep
APSRPGRLLQVKRMAVGFFIAALSMVASAVMQHYIYQMSPCGEYAGGKEIIDGEEVDCRPAPINVWAQSLPYILIGIAEIFANVTSYEHAYSKAPENMKSLVMSVNLFMSAISAAIGQAFTPISTDPYLVWNYTTVACIAF

SEQ ID NO: 227028 - protein, 66 aa, Glycine max
  Clone ID: PAT_MRT3847_47036C.1.pep
HFGGLPKLVFLLLLSDTCNNSKSQFSFSHTYQKKTTNKRNTNKIFYITLSNTCRNLLKITKVLLLI

SEQ ID NO: 227029 - protein, 52 aa, Glycine max
  unsure (1)..(52): unsure at all Xaa locations
  Clone ID: PAT_MRT3847_47037C.1.pep
ATLNSNATPKCTTLTPDXTNLIEVNLKQMXKXPNGTTPFILKHTFFTKPIIF

SEQ ID NO: 227030 - protein, 46 aa, Glycine max
  Clone ID: PAT_MRT3847_47038C.1.pep
RLIAAQFSWFSFYLGLETTDDPNPLDQRLIRLADSGCSWPKDLFRR

SEQ ID NO: 227031 - protein, 70 aa, Glycine max
  Clone ID: PAT_MRT3847_47039C.1.pep
LTNNHPFISCPGFVFYKNFWGGSKGGAFKRGPSYNLNENLFWKKVSKRSKWGGGKHTIPQSGKNLWELPP

SEQ ID NO: 227032 - protein, 81 aa, Glycine max
  Clone ID: PAT_MRT3847_4703C.1.pep
FVSTFSLSGVFSPPGDAQCVLGGLATFSSSGGASRSWIISRGFLFFYAFAFELGGNQTPSFFFLLSPRGGLADKGEAFSPS

SEQ ID NO: 227033 - protein, 97 aa, Glycine max
  Clone ID: PAT_MRT3847_47040C.1.pep
NVHLSPEEREKALSINKSLLRAKSAAGDGQVHCEKLTNLVIQSVTDAGGRIDYAEIVDQNNLEKVEQIKSPVVFCVAAWFGKVRLIDNMEINLSMNV

SEQ ID NO: 227034 - protein, 95 aa, Glycine max
  Clone ID: PAT_MRT3847_47041C.1.pep
QLHIYCIGSPCFTCMLIPVLFKRTRFPLRALNKKWGKYSNKLSSFIKGEPLKITPYKRCAALNGKKLAPYYSPITPNSLGLVIKLTISRGIKKLF

SEQ ID NO: 227035 - protein, 65 aa, Glycine max
  Clone ID: PAT_MRT3847_47042C.1.pep
HNMTSLSLNDCNNCCVLPSLGQLPSLKQLYISRLKSVKTVDAGFYINEDCPSSVSPFSSLETLEI

SEQ ID NO: 227036 - protein, 210 aa, Glycine max
  unsure (1)..(210): unsure at all Xaa locations
  Clone ID: PAT_MRT3847_47043C.1.pep
MNEKANVSKELNAKHKKILEGLLKLPENKECADCKAKGPRWASVNLGIFICMQCSGIHRSLGVHISKVRSATLDTWLPEQVAFIQSMGNEKANSYWEAELPPHYDRVGIENFIRAKYEEKRWVARNEKPKSPSSFREEKSPSHWQKPVERGGHDYAAVSENTFEERKXIQPSHXIPATRISVPAPPKGLSWYYCGKPQHVRSGPVAHHHS

SEQ ID NO: 227037 - protein, 90 aa, Glycine max
  unsure (1)..(90): unsure at all Xaa locations
  Clone ID: PAT_MRT3847_47044C.1.pep
MAPLGRGXKPPPAKGRGAPPRYWGLPRPKPPNPPKRGGGPHPPKRLNKWKPVPYPNFWVIKKTFGFLGTPPPRNAMFFPGPVCKNFPSQN

SEQ ID NO: 227038 - protein, 94 aa, Glycine max
  unsure (1)..(94): unsure at all Xaa locations
  Clone ID: PAT_MRT3847_47045C.1.pep
AYKELEMKRKGYKKRLDDLQTALRKHLEQIQADLVDQEKLQATLDDEHLNAACXLKKACEMVALLEAQLKEMNPNLDSISEYRKKVSSYNERVE

SEQ ID NO: 227039 - protein, 88 aa, Glycine max
  unsure (1)..(88): unsure at all Xaa locations
  Clone ID: PAT_MRT3847_47046C.1.pep
LTRLSILIFVQISADFMIFFSILRKFXPNFASIPFPIFAALYCILFILFAXIXISILQFTNINSIXNLIIILLTLFLEISIPQFFNQY

SEQ ID NO: 227040 - protein, 107 aa, Glycine max
  Clone ID: PAT_MRT3847_47047C.1.pep
RFRLPTQTICCALLVLIGLHKLTLTVQIVTGRVLLRFVTPALPCGHGLVFGTRNYYSWLMYHDQHYSNAPYFYVYAYTHSLANTPITLMMVPRHNLDDTSLTVQPTS

SEQ ID NO: 227041 - protein, 64 aa, Glycine max
  unsure (1)..(64): unsure at all Xaa locations
  Clone ID: PAT_MRT3847_47048C.1.pep
YKVKFLTXTRVTCSSLMIPKPKVIMIHHHHTIMMSMKMTIIINNLKHINTQRLLSHIHYKSQMT

SEQ ID NO: 227042 - protein, 162 aa, Glycine max
  Clone ID: PAT_MRT3847_47049C.1.pep
LVWGSSSNGEYVKAGLAELEHWCYKATDEYAGSAWDELKHIRQAIGFLVIHQKPKKTLDEISHDLCPVLSIQQLYRISTMYWDDKYGTHSVSSDVISNMRVLMTEDSNNAVSNSFLLDDDSSIPFSVDDISKSMEQIDIADIEPPPLIRENSGFSFLLPRPD

SEQ ID NO: 227043 - protein, 78 aa, Glycine max
  Clone ID: PAT_MRT3847_4704C.1.pep
NTSTKINNIPLLPILGMIQKLKPLFLKANLFFLKFWLFQKCLFQPSPLLNKVKTPTGGGNPPQGGLFYICWLETEPHL

SEQ ID NO: 227044 - protein, 130 aa, Glycine max
  Clone ID: PAT_MRT3847_47050C.1.pep
LGELTQRLSSLGMISSDSLKARPRATHPIIKTHYWTRQDQLILHASMDCDNHAFGNVKTTKRAWNILKKMFASKTRVCIMYLKEHLSCYTNRIKIDLLTLNFSILWFFFFIEQLFYFFYIVYICNNCYIY

SEQ ID NO: 227045 - protein, 52 aa, Glycine max
  Clone ID: PAT_MRT3847_47051C.1.pep
INVQNRELHGKTISTQVEIMPLECALNSAVNSISYGFIAKYSYTLIPIYSTK

SEQ ID NO: 227046 - protein, 83 aa, Glycine max
  unsure (1)..(83): unsure at all Xaa locations
  Clone ID: PAT_MRT3847_47052C.1.pep
QSGLXTILKTXNNTNKKLYILKHENQTVGSMIYFFQPNHHQPLFSLLISPILSLLTIFLNQSKKIYTIHNFINKHYKLTSFFS

SEQ ID NO: 227047 - protein, 251 aa, Glycine max
  Clone ID: PAT_MRT3847_47053C.1.pep
MHHFAMDNSHLLQFLPNTTTTTTTTNTPFFHAAPHTHTMHHPLSTNSSNNTNYYPFHLSQITETPSHHDRALAAMKNHKEAEKRRRERINSHLDHLRTLLPCNSKTDKASLLAKVVQRVKELKQQTSEITELETVPSETDEITVLSTTGGDYASGGGDGRLIFKASLCCEDRSDLIPDLIEILNSLHLKTLKAEMATLGGRTRNVLVVAADKEHSIESIHFLQNSLRSILDRSSSGDRSKRRRGLDRRLMS

SEQ ID NO: 227048 - protein, 39 aa, Glycine max
  Clone ID: PAT_MRT3847_47054C.1.pep
TTKHLKKKRKKRPCYNDCYLKAKAAIAATTSLQVQDLLK

SEQ ID NO: 227049 - protein, 63 aa, Glycine max
  Clone ID: PAT_MRT3847_47055C.1.pep
RKIKMEGIFKELKDSRMPWRRIFSPILKYPIKLFISLYLAISHLSFLGSYFIVHNRKYMGEVN

SEQ ID NO: 227050 - protein, 94 aa, Glycine max
  Clone ID: PAT_MRT3847_47056C.1.pep
RSRRLSFVKSPRLCRGKRAFPGSLFGPAVNCPSRSFYWMPAPTFRRSPFGGFPPPIRTCLLFPFLGGLAPLGPFGAHFLLGGGGAPSYLVFFSF

SEQ ID NO: 227051 - protein, 110 aa, Glycine max
  Clone ID: PAT_MRT3847_47057C.1.pep
VSMQRGSRIHFVPFYFSFFLALTNAVLVPTTFVVFLLLLAFFGGTGFCLTCTTQKLTRLQQKALFQLSGPFLTLFLFLQWTQDPENVSLWVAFGAAPPNPGGWVSWGINP

SEQ ID NO: 227052 - protein, 66 aa, Glycine max
  Clone ID: PAT_MRT3847_47058C.1.pep
EHNNNLKLCLTWTVSPICIYICSNSATYISDKAMRICISMAIIGRVKKLTNKTSNKGYVKSGHNKL

SEQ ID NO: 227053 - protein, 86 aa, Glycine max
  unsure (1)..(86): unsure at all Xaa locations
  Clone ID: PAT_MRT3847_47059C.1.pep
APYIKCTDSLGIVFGNSADDTINSEAFAHKLVLVGEIQEKVVLRFXDEEFLTRGPTHVRTDGLIVVDGRTYFEALAFDGLLLAIAG

SEQ ID NO: 227054 - protein, 83 aa, Glycine max
  Clone ID: PAT_MRT3847_4705C.1.pep
SQSKISNNRTYHFSHYCCWSWSWSWTTRIVLRIIVLVSIDGWGIASTHVVNTWMGNCIHSCCKVFYINYSLIIMNCKVHCTFK

SEQ ID NO: 227055 - protein, 56 aa, Glycine max
  Clone ID: PAT_MRT3847_47060C.1.pep
LIVFFFLFFKTALSSLPLPQFSLNSNTIFFPLKSSSNNQSKILLKNPSMLPRHPRF

SEQ ID NO: 227056 - protein, 30 aa, Glycine max
  unsure (1)..(30): unsure at all Xaa locations
  Clone ID: PAT_MRT3847_47061C.1.pep
GRGXWLTXXQPVLRXQLVNMLIGPDWAINI

SEQ ID NO: 227057 - protein, 232 aa, Glycine max
  unsure (1)..(232): unsure at all Xaa locations
  Clone ID: PAT_MRT3847_47062C.1.pep
MVELAKLLQLHAHSITILLTTGLLDHPSIDTYIHRISISHPSIFFHRLPHTSLSTTTTVSMAAKAFNFININTPNVATTLTQITKSTNIKAFIIDLFCTSAMEPASSLGIPVYYFFTSGAAVLSLFSYFPKLHQETHVSFKDMVGVELRVPGNAPLRXREHAGANVEEGRPCLLGHAGVLHAPXPEARGIIVNSFEELEPVAVDAVADGACFPDAKRVPGVYYIGPLIAEPH

SEQ ID NO: 227058 - protein, 71 aa, Glycine max
  Clone ID: PAT_MRT3847_47063C.1.pep
STTDDIMLQSTLNIIGVSALPAIEEVDMLYDDRVIHFFNTHVHAYIDGNTWVVCCLPQTKNYHDMLCIIIH

SEQ ID NO: 227059 - protein, 100 aa, Glycine max
  unsure (1)..(100): unsure at all Xaa locations
  Clone ID: PAT_MRT3847_47064C.1.pep
DEVRREARKWVVSGEVAEVTAVAREVLKEDEEEVVEEERAREREEERERREFVVHVPLPDEKEIERRLREXRQKDLLSRYASEGLVEEQTEAKDMLNIQR

SEQ ID NO: 227060 - protein, 100 aa, Glycine max
  Clone ID: PAT_MRT3847_47065C.1.pep
FVSHSWPETTVGFDANMFHQKVCSELVHHNNKRIDGLNGLLGPPAAIFEYSQPAAATQSLVRQLTQLADCIAIAKAPLEFQFFPPTETSASLDNTFPRAV

SEQ ID NO: 227061 - protein, 111 aa, Glycine max
  Clone ID: PAT_MRT3847_47066C.1.pep
AKWTTIDNMCAYGLNPGISGTRLLCTSPSSISQQAGCHQVATERTPLHVDSSTQSYRQFSIDLRGGGILEDKTGDRITLIQKTALSNYTRVAARKKGCLMAKIVTAGNARA

SEQ ID NO: 227062 - protein, 75 aa, Glycine max
  unsure (1)..(75): unsure at all Xaa locations
  Clone ID: PAT_MRT3847_47067C.1.pep
DRAFEELWKLKVPTKFSVFAWRLLRDRLPIKINLHRRQVEVNDRRCPFCSTMDVDAXHLFFHCNKINPIREESLS

SEQ ID NO: 227063 - protein, 246 aa, Glycine max
  Clone ID: PAT_MRT3847_47068C.1.pep
MPSAQDPFYVVKAEIQDSIDKLQSTFHQWESKSGAAEQGHLTKEVLAGCESIEWQVDELDKAIAVASRDPSWYGIDEAEVESRRRWASSARSQVGTMKKAMESGKGSSTTSHASVNGMRRELMRLPNSHQTDSSNQYAARDNDDFIQSESDRQTLLIKRQDEELDELSESVRRIGGVGLTIHDELTAQEKILDELGSEMDSTTNRLDFVQKKVAMVMKKASAKGQIMMILGLLALFIFLFILVFFT

SEQ ID NO: 227064 - protein, 49 aa, Glycine max
  Clone ID: PAT_MRT3847_47069C.1.pep
SFLLPSKEYLNNKTITLLHFFLFSIPYPNSMSSFKETRINVQINCTNIS

SEQ ID NO: 227065 - protein, 471 aa, Glycine max
  Clone ID: PAT_MRT3847_4706C.1.pep
MELIYLLYLVPTLYACFLIWKMLDERRDRECYILNYQCYKPPNDRMLGTEFCGKLIRRTENLGPSEYRFLLKAIVSSGIGEQTYAPRNIFEGREATPTLRDSIGEMEEFFHDSIGKLLAKSNVSPSEIDVLVVNISMLATVPSLSSRIINHYKMRHDVKVYNLTGMGCSASLISMDIVKCIFKTQRNKLALLITSESLSPNWYTGSDRSMILANCLFRSGGCAILLTNKRSLKDKAMLRLKCLVRTHHGAREEAYGCCTQQEDDQGRLGFHLGKTLPKAATRAFVDNLRVIAPKILPIRELLRFMFVSTIKKINKSSNAPKSVASTGATKSPLNFRTGVDHFCLHTGGKAVIDGIGMSLDLSEYDLEPARMTLHRFGNTSASSLWYVLSYMEAKKRLKKGDTVFMISFGAGFKCNSCLWEVMKDLGEANVWDDCIDEYPPESLANPFMEAYGWINEVDDPYTYEHLPEFLK

SEQ ID NO: 227066 - protein, 54 aa, Glycine max
  Clone ID: PAT_MRT3847_47070C.1.pep
FSIKYILSSCWSQVATPMTIHVSSLLNNKKVFSSISICKILLLLYVWISPKFKK

SEQ ID NO: 227067 - protein, 56 aa, Glycine max
  Clone ID: PAT_MRT3847_47071C.1.pep
KGKMYCFKNLHSEMTSLRVLQCRTSLTILVVQKATLAHTKRGEELSLLETSLNKLR

SEQ ID NO: 227068 - protein, 106 aa, Glycine max
  Clone ID: PAT_MRT3847_47072C.1.pep
VLNFSKASLLNFYKYQISPFLFYSNHISYFHQIFFTNISNITIHKPHIIKSKINPLKFHFLQIQFNQKFNHIISISFNTLLYAILNSFFLYFFQNFSFKNIKYFFT

SEQ ID NO: 227069 - protein, 85 aa, Glycine max
  Clone ID: PAT_MRT3847_47073C.1.pep
TQSDTILLHPSSQSDIDEIENLMNDMGHQSDPSVRPPSPRRTYITGYDSVSAVPSPHSSVTILFCMIRSANLPFLVVPPIPAQSN

SEQ ID NO: 227070 - protein, 109 aa, Glycine max
  Clone ID: PAT_MRT3847_47074C.1.pep
VNIMAHTMDIPLSTDQLAKISKLLKKHKTLCQKVSSSKTTSEHSEDREQNEMHGMVREGTDFLRRVNRTASISTEAKPISNQKLDTNISDDEECGSDSETEKAQSSLPF

SEQ ID NO: 227071 - protein, 273 aa, Glycine max
  Clone ID: PAT_MRT3847_47075C.1.pep
TVLKPENVLVRDDGHIMLSDFDLSLRCAVSPTLIRTSYDGDPSKRAGGAFCVQPACIEPSSMCIQPACFIPRLFPQKNKKSRKPRADPGLPSSTLPELVAEPTQARSMSFVGTHEYLAPEIIKGEGHGSAVDWWTFGIFLHELLYGKTPFKGSGNRATLFNVVGQQLRFPESPATSYASRDLIRGLLVKEPQHRLGVKRGATEIKQHPFFEGVNWALIRCSTPPEVPRPVENEVPAGKVVGPVDPVGVGSTSKRIVGTDNMKSGGKYLDFEFF

SEQ ID NO: 227072 - protein, 41 aa, Glycine max
  Clone ID: PAT_MRT3847_47076C.1.pep
LQVYVMYGSRSHMPTYRLTTCTPLTILLGNKVLIFFHDWVA

SEQ ID NO: 227073 - protein, 51 aa, Glycine max
  unsure (1)..(51): unsure at all Xaa locations
  Clone ID: PAT_MRT3847_47077C.1.pep
YIVAYKIITFGLKGKKKKKKKKKXQXPTNKLFNPKINYQTXTYKLATSPYN

SEQ ID NO: 227074 - protein, 60 aa, Glycine max
  Clone ID: PAT_MRT3847_47078C.1.pep
QALTIWDILFFVQKYKLINLLKHATKPLLKKQRFWKVLRFHEQLYAQCEPKNEKWGRNVV

SEQ ID NO: 227075 - protein, 50 aa, Glycine max
  Clone ID: PAT_MRT3847_47079C.1.pep
SFFFDTHVASKHVNVRSNKVIEQLQSIFLHLLYATSQFRVLPGVTWKVRI

SEQ ID NO: 227076 - protein, 75 aa, Glycine max
  unsure (1)..(75): unsure at all Xaa locations
  Clone ID: PAT_MRT3847_4707C.1.pep
KTPPCCEKKKKKKKKKKKKKKKKKKKKKKKKKKKKKKKKKKKKKKKIKKKKXXXKXKKKKNKKGGAPTKKTFLNP

SEQ ID NO: 227077 - protein, 46 aa, Glycine max
  Clone ID: PAT_MRT3847_47080C.1.pep
FNKAIGQLEFLYPGKSQPKVLELDNHLGLIINPPYPFRSFKLPPLK

SEQ ID NO: 227078 - protein, 72 aa, Glycine max
  Clone ID: PAT_MRT3847_47081C.1.pep
PHWDYRGSVLTNYSSFGVLSDPNCVTELSYDPKTIDTCCDLEDDYIEFALGKKRRDWRSPAASHFDCNATDS

SEQ ID NO: 227079 - protein, 88 aa, Glycine max
  Clone ID: PAT_MRT3847_47082C.1.pep
KGWIPCLEFELEPGFVYREPNRSPGNYDGRYWALWNLPKFGCPKAFQVFKELQKAKTAYPHGFIRILGFGNVPQVQGISFIAYKPPGF

SEQ ID NO: 227080 - protein, 85 aa, Glycine max
  Clone ID: PAT_MRT3847_47083C.1.pep
KKPNPGALKNKSWIKNSKKVLANGPSCSLIKPKKQPFNHGPIHDLGKENPNIWGSKVFFFLPSLVTPKPQKTPNLKASFPSSTEL

SEQ ID NO: 227081 - protein, 74 aa, Glycine max
  Clone ID: PAT_MRT3847_47084C.1.pep
KKNTMGVKTLNPFSRGLACFFIILAPQVFPFEKGHFSPPQKFGLGPPLGHPGVHFFNFGSFFFGQFYRIKFFPR

SEQ ID NO: 227082 - protein, 54 aa, Glycine max
  Clone ID: PAT_MRT3847_47085C.1.pep
DVWAIRYTFSYIHLTGSMELGMTFYAKIDSWFFSKQGTLAPYTVFWVLFTNSFL

SEQ ID NO: 227083 - protein, 122 aa, Glycine max
  unsure (1)..(122): unsure at all Xaa locations
  Clone ID: PAT_MRT3847_47086C.1.pep
MRESGRIWGGATWARVRGGARGASVWERGGVNMWREAGGTFTGRGAETXXAVCAGERGPDRDFFIYRRHFNRGGVNLGADMGLLGGAEAGYCTXXGMGWISSGLXQLCGTGGHVGRFTTLYG

SEQ ID NO: 227084 - protein, 417 aa, Glycine max
  Clone ID: PAT_MRT3847_47087C.1.pep
MRGAEGGDGGFAVRGGNIYWGRKEETDFRGIVVIFAWVSVPQNLLQEFVDLCSSLKWNSLVCFAHYLSAFRDESAMPLAFCVLDELIEELRTRSCPVVFATFSAGSKACLYRVFQLIDGKCATPLNLVNLPSLGNCLSGHIYDSGPIDVTSDFGFRFTLHPSIVKVPGPSKLVSWVAKSVTSGLDALYLTRFESQAAEHWQALYSSVNFGAPFLILCSENDDLVRYQSIYEFAQQLRNLSGDVNLVNFSSCSHLGHYKHHPIEYRAAVSHLLEKASSIYSQKMLLERERTGMDGTQDEISELICDLQKVAINSNKSLRRVAVGPTDHFFLPSSAGHYSDRESGAPQDEQKEKPVFVPSFPSISAHSVLGQFLFDVCVPKNVEGWDVKSSGNLNGRSCASAPRHSLFRGTKRIGRSKL

SEQ ID NO: 227085 - protein, 87 aa, Glycine max
  Clone ID: PAT_MRT3847_47088C.1.pep
HEWSFHPLTPPTISARGVMVAAVGSNGSFFQWQEGLRGLEASRSHNEEATRWSGRRGTTEEWMASTGWKDWREGERRPFCRLLAARA

SEQ ID NO: 227086 - protein, 38 aa, Glycine max
  Clone ID: PAT_MRT3847_47089C.1.pep
LSHTFVLLHTLTTMEAIKTGVFSGRSELSFALYLHNAK

SEQ ID NO: 227087 - protein, 92 aa, Glycine max
  unsure (1)..(92): unsure at all Xaa locations
  Clone ID: PAT_MRT3847_4708C.1.pep
SLDPLERRLXXFFFFFFFWGTLWPRSYGLTKGPSLTDLHNIRPADVNGKKSHCSIFLLVKITISVDITSFSQSIHQGGTSTMVNALLAQANV

SEQ ID NO: 227088 - protein, 75 aa, Glycine max
  unsure (1)..(75): unsure at all Xaa locations
  Clone ID: PAT_MRT3847_47090C.1.pep
YSISIIIVPFTKNGTKKTNKQLSLFSLSLHIPNLTQLLMHPDFINGSHKTFINHKDSLTNPTXVSTPFQTDTIII

SEQ ID NO: 227089 - protein, 144 aa, Glycine max
  Clone ID: PAT_MRT3847_47091C.1.pep
RSSATEVYQKFLNFARAMMKKRDKLSWQVGINPYSMEWTGSATRLLSKGNDIVRSDYAPYDGLITKQVISKMADMINRLCGGDQKLMREKTHLLLARCSRMAICKKDVRRGECGIPSGFPLTVIRNNILNEMLIRYSYEELLPQ

SEQ ID NO: 227090 - protein, 103 aa, Glycine max
  unsure (1)..(103): unsure at all Xaa locations
  Clone ID: PAT_MRT3847_47092C.1.pep
GRPRRAVNLSFLYLSYLHLSHINFRLGCIKNVPPSPPYLQFXKFQDINNXDSIFHNATFHKCEFTASNLHGSLLTYACLHISHLQDTCLLYSIFCXADLHTAH

SEQ ID NO: 227091 - protein, 73 aa, Glycine max
  Clone ID: PAT_MRT3847_47093C.1.pep
WVNPSCIGQHLLCECFNMLSAICTETEYCAIAHAGNCYHDLGMLWGDARAKLLTNHALIGVLTGKPCVSGGRS

SEQ ID NO: 227092 - protein, 242 aa, Glycine max
  unsure (1)..(242): unsure at all Xaa locations
  Clone ID: PAT_MRT3847_47094C.1.pep
VKSADRISDAALESAVLQSIPCIRSGSFADIGPRRYMEDEHIRIDDLSSHLGSLYNFPQPSAFYGVFDGHGGPEAAAYIRKNVTKFFFEDVNFPRTSXLITYFWKRLLMVANAGDCRAVLCRKGEAIDMSQDHRPIYPSERRRVEELGGYIEDGYLNGVLSVTRALGDWDMKLPKGAPSPLIAEPEFRQVALTDDDEFLIIGCDGIWDVMSSQHAVSLVRKXLRRHDDPEKCARTLLWEHYA

SEQ ID NO: 227093 - protein, 374 aa, Glycine max
  unsure (1)..(374): unsure at all Xaa locations
  Clone ID: PAT_MRT3847_47095C.1.pep
MVAEAEVACQQNVGVLDVKHFPNNGSNVSPYRRRQTLFSLSVRDRSHMMRSDSAVLQFLPCIRYXVLADLGPRLYMEVXSLRIDDLPSHLGSLYNFPKPSAFYGVFDGHGGPEAAAYIRKHVIKFFFEDVSFPQTSEVDNVFLEEVEDSLRKAFLLADSALADDCSVNSSSGTTALTALIFGRLLMVANAGDCRAVLCRKGEAIDMSEDHRPIYLSERRRVEELGGYIEDGYLNGVLSVTRALGDWDMKLPKGAPSPLIAEPEFRQVVLTDDDEFLIIGCDGIWDVMSSQHAVSLVRKGLRRHDDPEKCARDLVMEALRLNTFDNLTVIIVCFSSLDHAEPEPSPPRQRKLRCCSLSAEALCSLRSLLEGSASN

SEQ ID NO: 227094 - protein, 387 aa, Glycine max
  unsure (1)..(387): unsure at all Xaa locations
  Clone ID: PAT_MRT3847_47096C.1.pep
RSNLREAYSNTINSSGHSCFAAMTSVLVFGFCVAVSLVLALGSVSAQPTRAFFVFGDSLVDSGNNDFLATTARADAPPYGIDYPTHRPTGRFSNGLNIPDLISLELGLEPTLPYLSPLLVGEKLLIGANFASAGIGILNDTGIQFLNIIHIQKQLKLFHEYQESSSLHIGAERXKTVXNRALVLITLGGNDFVNNYYLVPYSARSRQFSLPDYVRYLISEYRKVLKRLYDLGARRVLVTGTRPMGCVPAELATRSRTGDCDVELQRAASLFNPQLVQMLNGLNQELGADVFIAANAQRMHMDFVSNPRAYGFVTSKIACCGQGPYNGVGLCTPTSNLCPNRDLYAFWDPFHPSEKASRIIVQQILRGTTEYMHPMNLSTIMAIDSKT

SEQ ID NO: 227095 - protein, 454 aa, Glycine max
  Clone ID: PAT_MRT3847_47097C.1.pep
MATTSAFLLLPLLLLLHLAIAAHGIGINYGTLGDNLPPPAAVANFLKTKTTIDRVKIYDVNPDILRAFAGSGISVTVTAPNGDIAALTKIDSARQWVATHIKPFHPQTKINYILVGSEVLHWGDTNMIRGLVPAMRTLHSALLAEGITDIKVTTAHSLAIMRSSIPPSMGRFRPGYAKHVLGPMLKFLRETRTPLMVNPYPYFGYNGKNVNFLLFRPNRGLYDRYTKRSYTNQFDALMDAVHSAMNALGYGDVDIAVGETGWPSVCDGWDACSVANAQSFNRELVKHLATGKGTPLMPNRSFETYIFALFNENQKPGPIAERNWGLFQPDFTPVYDSGILRNGQAVTPARPTPTRPAAPTKPAPAVGGQKWCVPKADASNQALQANINYVCSQGVDCRPIQPGGDCFAANNVKALATYAMNAYYQANGRHDFNCDFSQTGVITTTNPSHDKCKI

SEQ ID NO: 227096 - protein, 67 aa, Glycine max
  Clone ID: PAT_MRT3847_47098C.1.pep
FPVRPLFLGNPRIFKDRRRRQCHGRQVRSFGYEKFTGDLPSPSKVLHRRRNRGASIGPNTPPGVELG

SEQ ID NO: 227097 - protein, 82 aa, Glycine max
  Clone ID: PAT_MRT3847_47099C.1.pep
SPMISSLLSSSQDAQVNATIRSILKMITDYGTPWDTGVSHEVDAYRHVAEYHGYLDHSTRRCYRHRVTHAQGVLTIRLDHNL

SEQ ID NO: 227098 - protein, 102 aa, Glycine max
  unsure (1)..(102): unsure at all Xaa locations
  Clone ID: PAT_MRT3847_4709C.1.pep
VVDAIXXSSLLKTFXHXLXVXXXGXQCXXCXXXRYXXIXVTSXTLXXXRXXXXLGXTRNHXXMTXLAHXIGXXXXXIXXXXXHXXXKXXARAEFPSLRTRXC

SEQ ID NO: 227099 - protein, 72 aa, Glycine max
  unsure (1)..(72): unsure at all Xaa locations
  Clone ID: PAT_MRT3847_470C.1.pep
DIGSTFAEGHDFIMKCDVEDNPSGHHKRMRRGICNGSCTFSSEKHRXHASEGTANWLTAGVLISMVAPDIVP

SEQ ID NO: 227100 - protein, 89 aa, Glycine max
  Clone ID: PAT_MRT3847_47100C.1.pep
HIHPFLLILIPSLFNHYKLIFAFINLYKILTPTNPIRLRLVACVSLSIIFTNPYSNFVSNDTQMQSKICYQLITFSNNFYLTPTHIDLS

SEQ ID NO: 227101 - protein, 232 aa, Glycine max
  Clone ID: PAT_MRT3847_47101C.1.pep
MNFWKLYIASFMSILKLLLITALGAFLAHDRFNILRENARKHLNAMVYFVFTPALIYSSMSNTLTFRSMVMLWFMPLSILLTYIAGTVLGWILIKTIRVPHHLHGLVLGCCAAGNLASLPLIVVPTICKDKNSPFGDEVVCHKNGLAYASLSMAIGYTYAWSITFNVVRIYSPKISNEVKVDETTENSKSATENDPENLLKCPCGALVMAEDIAKPNGGMDQPDFECKVPNG

SEQ ID NO: 227102 - protein, 63 aa, Glycine max
  Clone ID: PAT_MRT3847_47102C.1.pep
LLNTNLHIYSTFHLQLITIIICSGVITQSGTPKLLIFLHITNNIPLMHTCLYFCILLHLSYQL

SEQ ID NO: 227103 - protein, 54 aa, Glycine max
  Clone ID: PAT_MRT3847_47103C.1.pep
EKNFSRNGVIKKSKNRSVGFICMFLFPLLQYQRTFALKYKVTKLSVCMHQNACK

SEQ ID NO: 227104 - protein, 32 aa, Glycine max
  unsure (1)..(32): unsure at all Xaa locations
  Clone ID: PAT_MRT3847_47104C.1.pep
TAAKKLXXGEYHAEWINIWKNKDNDVLAGQWV

SEQ ID NO: 227105 - protein, 53 aa, Glycine max
  Clone ID: PAT_MRT3847_47105C.1.pep
WLRSQEALIIVTRLSSIISMLANGFEAIRSSHMRENIDLLIRSIPRVVTPSVH

SEQ ID NO: 227106 - protein, 57 aa, Glycine max
  Clone ID: PAT_MRT3847_47106C.1.pep
TYLYIDKPITLMFTSVSIFILIIINVGIGYKRKTMMMMMQQRLLFNMNYLEDYNFFP

SEQ ID NO: 227107 - protein, 146 aa, Glycine max
  unsure (1)..(146): unsure at all Xaa locations
  Clone ID: PAT_MRT3847_47107C.1.pep
RFPVDTAAASPKTLFSTVLPMEVHQEVRQQARNIVRNMMKHRGKVGSNAGINACSVECTGLLNKVLNKVSDNQASYDARIARQITSQVVSMMARLIDSVXGVKQKLTHERTHLRSRRGSRMADGKRDVCRVQCGIPFRVPLTGICN

SEQ ID NO: 227108 - protein, 65 aa, Glycine max
  Clone ID: PAT_MRT3847_47108C.1.pep
CIGYPYAARASRSIGLILYELKPDRIIAIPMRSLCKLHCVLICLYHAAYPIPMRRSMLGSILSDY

SEQ ID NO: 227109 - protein, 151 aa, Glycine max
  Clone ID: PAT_MRT3847_47109C.1.pep
MDLVASCKEKLQHFRIKELKDVLTHLGLSKQGKKQDLVDRILAILSEDQVSKLWTKKNAVGKQEVAKLVDDTFRKLQVSGAIDLASKGQGASDSSNVKIKGEIDDSYQSDTKIRCLCGNVFDTEPLVKCEDTRCHASQHISCVIIPEKPMD

SEQ ID NO: 227110 - protein, 96 aa, Glycine max
  unsure (1)..(96): unsure at all Xaa locations
  Clone ID: PAT_MRT3847_4710C.1.pep
PLGAPLKGEKVAPKLFYSAKKKIESPPGGGIQWVGGNPLSGAYKFXHKIKEFXSLCNPFLSQMFPGPGAPPRAGGKDKNVPPFGPGGAGPQIEEVD

SEQ ID NO: 227111 - protein, 41 aa, Glycine max
  Clone ID: PAT_MRT3847_47110C.1.pep
WMHFFCSYSRQSIKSLASASLAMSRTSEAKTLCSMFVLIPL

SEQ ID NO: 227112 - protein, 116 aa, Glycine max
  Clone ID: PAT_MRT3847_47111C.1.pep
MEEAQKESRKRSKVLTSKKSCSTTCQNLLALAQFLTKLTLMNLNYETYFVSLNNMFQHLCLVVSNQTLTLSHYASASSSSSCFHVKPQSLDNIPLNLDHPKFNMQTTSHNTISDLS

SEQ ID NO: 227113 - protein, 71 aa, Glycine max
  Clone ID: PAT_MRT3847_47112C.1.pep
KTLTGKTITLEVESSDTIDNVKAKIQDKEGVPPDQQRLIFAEKQLEDGRTVADYNIHKGVSLACGIQLWGG

SEQ ID NO: 227114 - protein, 132 aa, Glycine max
  Clone ID: PAT_MRT3847_47113C.1.pep
FGENNRIRITNCMVMHILHLLHHSAEKAKSSKRTHHRIRTKVMLWRLLTTKSLVLTIQTIGEHRMVGERGAHHSEAVQHVPRIAQHRIHHVVHLSHLLVHLIKWVSEGVSSATKHFDEKLLRSNSKVKLLLI

SEQ ID NO: 227115 - protein, 69 aa, Glycine max
  Clone ID: PAT_MRT3847_47114C.1.pep
YSHSEVRKMIENILLNLAAFSTFLALINLPRASGLLFLVFKFQKERGKLNHHPKAIPTYWSLLKPQRRG

SEQ ID NO: 227116 - protein, 124 aa, Glycine max
  Clone ID: PAT_MRT3847_47115C.1.pep
TPTSAGNSPRASVLSTSAAKHYRGPLNAITSSLIHLDHISTDYLTVLLKRTITLYSIMKTLFVTLHKIASTLQHPHLSWLVQQSHALMTFSSAHTTNCTAASSLTAPHSYYVEAKRDYMAKTAI

SEQ ID NO: 227117 - protein, 419 aa, Glycine max
  Clone ID: PAT_MRT3847_47116C.1.pep
MLQTSTFLFIPKYMDTDATGDPVDKLKAIQNDDVEYQDEDDDFDDEEEEEDDPITLGFVDKPKNEWSLRRQYFPSKTGGVPAWLDPLNIPSGRSSVCDICGDPLQLLLQVYAPTDKETTFHRMLFVFMCPSMKCLLRDQHEQWKRHPEKPSRSVKVFRCQLPRINPFYSPECPQYNESHEPAGSGAALCDWCGTWKGDKLCSSCRQARYCSEKHQAMSWRTGHKTACQQMKVSSPVFGPNKSGTTSLESHKVGSKNLWPEFEISIEDESEYNRDISEENSLANSLISRNRNDDTMNSLMDNFKGDDDKKSWASFQERIAEAPEQVLRYYRNTNAKPIWPVSSGRPSNADIPKCSYCSGPMSCEFQILPQLLYYFGVDNEVDSLDWASIVVYACEASCEASLPYKNEFAWVQIYSLSTTL

SEQ ID NO: 227118 - protein, 70 aa, Glycine max
  unsure (1)..(70): unsure at all Xaa locations
  Clone ID: PAT_MRT3847_47117C.1.pep
KEQWIYSQDGCCTGRLTHVPASQAVVTDKCPYLVAIVHDYIASTIPGEFXLMYSXTTIHNLCAYSVNHGL

SEQ ID NO: 227119 - protein, 76 aa, Glycine max
  Clone ID: PAT_MRT3847_47118C.1.pep
PQPLNLFEWHLYEYEISKCDVCALYRLELKLVDGKKSSKAKIVTGDSVADLQKHMGSLSAKGTRQGDFLSLSRHCE

SEQ ID NO: 227120 - protein, 106 aa, Glycine max
  Clone ID: PAT_MRT3847_47119C.1.pep
DFLITGHSRTNLSFRGAMQGSVLPTRDEGPSGRFGKIRVIDGRGRLYFILLSRMNGVIRAVLRGGELLDFGDFTFDLYLDPFRRPLLLFDFILKPMLRGPLRRAYY

SEQ ID NO: 227121 - protein, 53 aa, Glycine max
  Clone ID: PAT_MRT3847_4711C.1.pep
SLGSMHYVPHIDSNQCNWLHCIHVRSHDLTLTNAISTIYISADIGTYQIIASI

SEQ ID NO: 227122 - protein, 368 aa, Glycine max
  unsure (1)..(368): unsure at all Xaa locations
  Clone ID: PAT_MRT3847_47120C.1.pep
GSRELLLLKECKPFTVGFPNLDGTALEYHQFDINKDMDDSFYAGTGFCEEGRVPHISSYLPSVCPPPSAFLGPKCALWDCPRPVQGLDWCQDYCSSFHAALALNEGPPGMTPVLRPXGIGLKDNLLFAALSAKAQGKVVGIPKCEGAATAKSPWNAPGFXLLVSFLWLTCXYYFRKVVPALTDCPDHFFLLLQLFDTCVLEGETIREWLFFDKPRRAFESGNRKQRSLPDYSGRGWHESRKQVMNEFGGLKRSYYMDPQPLNLFEWHLYEYEISKCDARALYRLELKLVDGKKSSKAKIVVTSDSVAGLQKHIGSLSAKGRTKLGIGGGVYSASNRVALQLNAPYQYGLTSSPYDDYVVDNTRDYYVT

SEQ ID NO: 227123 - protein, 77 aa, Glycine max
  Clone ID: PAT_MRT3847_47121C.1.pep
ALVGHMASHTRHKLRVEELKEQARSLSLWTNTYMHQCSICGLEYNLGHALGGHMRKHRDALNDGSPSMAYIDQVIEK

SEQ ID NO: 227124 - protein, 107 aa, Glycine max
  Clone ID: PAT_MRT3847_47122C.1.pep
MASKALLVVALLLAATFLVASANEQAQAAKEEKKAEVQDWHGGGGYPGHGGGGSGGYPGHGGSGGGGYPHCRWSCCNRGYHGGCRSCSHPDHIPNPMDRSELVEVHN

SEQ ID NO: 227125 - protein, 68 aa, Glycine max
  Clone ID: PAT_MRT3847_47123C.1.pep
RMLGRTRGARHGSPVLNEEGTLATPDIDKGSWVSESSSSEVQFSHQIILCLPPSFLINNILVYACCSE

SEQ ID NO: 227126 - protein, 44 aa, Glycine max
  Clone ID: PAT_MRT3847_47124C.1.pep
LDQQKERVVIEESCHELFSSSTIYKIFLYLNCISKAFFLCCGPL

SEQ ID NO: 227127 - protein, 337 aa, Glycine max
  Clone ID: PAT_MRT3847_47125C.1.pep
MSLKSVTVLTTYLIYASIVAKSAMDPYKALNIILNPNGTLTRLSIPPQSPPSPDPTLPTAVLSKDLTINQSKHTWARIYLPHKALDYSPNTNSKLPLIVFYHGGGFLFYSANSTYFHDFCVRMANDTQSVVVSVDYRLAPEHRLPAAYEDSVEALHWIKSSNDPWLRHADYSRCYLMGESAGGNIAYTAGLRAAAEVDQIKPLKIKGLILIQPFFGGTKRTPSEVRLAEDQTLPLPITDLMWNLSLPVGVDRDYEYSNPTIKGGAKILDRIKALGWKVAVFGVEGDPLVDRERELVGLLQHKGVQVVGLFYQGGRHGIFVGDPSMSVKVFDLLKTLH

SEQ ID NO: 227128 - protein, 53 aa, Glycine max
  Clone ID: PAT_MRT3847_47126C.1.pep
RERLLPQEHNNHNTQSPLAPRGVGAASSSSGGGGDSALEKRQVLNVPKTHISV

SEQ ID NO: 227129 - protein, 174 aa, Glycine max
  unsure (1)..(174): unsure at all Xaa locations
  Clone ID: PAT_MRT3847_47127C.1.pep
KEFQGVGLVNFNNTELDHWEQLIPNATHVVLELEYAAKNVTWESLYPEWIDEEEETEVPVCHSLPSLRSPGNXLNLIAVKLPHVNGGNWSRDVARLHLQLAVARLATSFKGNYPVYVLFVTNFFPIPNLFTCKELVGHEGDVWLYKPNLKVLGEKLHLPVGSCELALPLRGKEL

SEQ ID NO: 227130 - protein, 713 aa, Glycine max
  unsure (1)..(713): unsure at all Xaa locations
  Clone ID: PAT_MRT3847_47128C.1.pep
DPFSAVDAHTAAILFNDCVMTALREKTVILVTHQVEFLSEVDTILVMEDGKVTQSGNYENLLTAGTAFEQLVRAHKEAITELDQNNEKGTHKEESQGYLTKNQSEGEISTEGKLGVQLTQEEEKQIGDVGWKTFWDYISFSRGSLMLCWTNLGFSALVAXYCSSWMKLALAIEVPKITSAILIGVYALISFSSAGFVYVRSLFTAHLGLKASTAFFNSFTTAIFNAPMLFFDSTPVGRILTRASSDLSILDFDIPYSITFVASVGLEIMVTICIMALVTWPVLIVAIPAMVASKYVQGYYQASARELMRINGTTKAPVMNFAAETSLGVVTVRAFNMTEIFFRNYLKLVDTDAALFFHSNVAMEWLVLRIEALQNLTVITSALLLISVPPGVVTSGLVGLSLSYAFSLTGSQIFWTRWYCNLLNYIISVERIKQFIHLPVEPPAILEDHRPPSSWPSKGRIDLQALEIRYRPNAPLVLKGITCTFKEGSRVGVVGRTGSGKSTLISALFRLVDPAKGYILIDGINICSIGLKDLRMKLSIIPQEPTLFKGSIRTNLDPLGLYSDDEIWEALEKCQLKETISRLPNLLDSSVSDEGGNWSLGQRQLFCLGRVLLKRNRILVLDEATASIDSATDAILQQIIRQEFVECTVITVAHRVPTVIDSDMVMVLSYGKLVEYEEPSRLMETNSSFSKLVAEYWSSCRKNSSSNLSRQQH

SEQ ID NO: 227131 - protein, 69 aa, Glycine max
  Clone ID: PAT_MRT3847_47129C.1.pep
VKPNAWLSFLIVVLGSSMLYGWICVGQSYQLVGIWLIVMGKHDPLASLKVNRLCYEMNFFLKTTPLIDV

SEQ ID NO: 227132 - protein, 80 aa, Glycine max
  Clone ID: PAT_MRT3847_4712C.1.pep
VIPCVFVSFPPLCGFDLSRCTQGCPRPFSALVLCCNCPYKILFQQLPSSSSMLGYTLRLETKVSFLFWLFLRYGKYWLTY

SEQ ID NO: 227133 - protein, 95 aa, Glycine max
  Clone ID: PAT_MRT3847_47130C.1.pep
VSENALSASDGIPNDHVLSVISVLFLELGEFSFVLMRNIVLKLADLMTQISGGKVHNEHLEKCIGSAVYAMGIERFLTLVPISLNEHSYTYSNIW

SEQ ID NO: 227134 - protein, 75 aa, Glycine max
  unsure (1)..(75): unsure at all Xaa locations
  Clone ID: PAT_MRT3847_47131C.1.pep
IPKVLLSSVCISLSLAIRLVALLAVQVHEAHCQASMYQHSSEACLLPFXSLELVRPLTRQAEQPVYIGEDQAYGS

SEQ ID NO: 227135 - protein, 95 aa, Glycine max
  unsure (1)..(95): unsure at all Xaa locations
  Clone ID: PAT_MRT3847_47132C.1.pep
XXXYPXPXAXXXXXAXXXXSXXXKMFXFXGVXXXXXXRXNXTSDXXLISGXXSXXRIVXXXXXXRGSXXXYXXXEXXXXLXXIXXPXXTYASXAT

SEQ ID NO: 227136 - protein, 54 aa, Glycine max
  Clone ID: PAT_MRT3847_47133C.1.pep
NLILILYLDLGSPKEQFSKFHNAKQGSPPPKTYASSAIHYIFSTKKKNLKRHLT

SEQ ID NO: 227137 - protein, 77 aa, Glycine max
  Clone ID: PAT_MRT3847_47134C.1.pep
DCTKESMSGSVSNICRHLIRLSYIPIFYDTGHLVSIYTYRENCNCHTSAPSVDEFSRVFDGVLVPCSFTLIVAYPPF

SEQ ID NO: 227138 - protein, 45 aa, Glycine max
  Clone ID: PAT_MRT3847_47135C.1.pep
NSIKLKWYFGGNKRSEPIVFLRWVLWKISDGQDFFYILAVIPFVQ

SEQ ID NO: 227139 - protein, 62 aa, Glycine max
  unsure (1)..(62): unsure at all Xaa locations
  Clone ID: PAT_MRT3847_47136C.1.pep
SXKLILFXHASSSSSLNSTXFXXXXXNTHKLTPLSSSFXHPTTVLRXTPSSXTTPRXTFTVR

SEQ ID NO: 227140 - protein, 151 aa, Glycine max
  Clone ID: PAT_MRT3847_47137C.1.pep
MTDKMAEEVKATENPAVEAPAAEEKKPVTETVAETATAAKENVFSMFGGGAKKEAKKDDDEENDRSGSAKAHKEKAAEGCDDDDKVQEEEADVHFEPVVHLTEKVDTKTNEEAEEQTFKMRAKLFKFYRESKEWKERGTCDVRLLKHKENG

SEQ ID NO: 227141 - protein, 68 aa, Glycine max
  Clone ID: PAT_MRT3847_47138C.1.pep
LLSSSYYMNFFIFHWAKTHSFPTWFVIVHRLCATFLRHRRNATTLAGIGSHIQTHDFLRHLGPGEPEG

SEQ ID NO: 227142 - protein, 46 aa, Glycine max
  Clone ID: PAT_MRT3847_47139C.1.pep
IYNFLLGNFKIQSACFIKTIVRLLNVEIAFEHSYTLLATAQYIAFY

SEQ ID NO: 227143 - protein, 88 aa, Glycine max
  Clone ID: PAT_MRT3847_4713C.1.pep
RTIPNAGLPKTQRMLPKVISDIDSNALAQLASSVSQFVELNIFLVISGYLATQKFHKNSTCTHIHPIFPRWHTCTKIHENLLFELFVL

SEQ ID NO: 227144 - protein, 80 aa, Glycine max
  Clone ID: PAT_MRT3847_47140C.1.pep
MSCATRKTPAPGQAVYSASKYALNGYFHTLRAELCQKGIQVTVVCPGPIETSNNAGSRVPSEVCVFANSSSITTVKKDKT

SEQ ID NO: 227145 - protein, 255 aa, Glycine max
  unsure (1)..(255): unsure at all Xaa locations
  Clone ID: PAT_MRT3847_47141C.1.pep
QPRNISSEAKKNIPFYMFIDEETEMYMKNASILSSSRRVGLWRIIIVRNIPYADSRRNGKVPKLLLHRIFPNVRYSIWIDGKLELVVDPYQVLERFLWRQNATFAISRHYRRFDVFVEAEANKAAGKYENASIDHQIQFYKYHDGLTHYSRTKLPITSDVPEGCVIIREHIPITNLFTCLWFNEVDRFTSRDQLSFSTVRDKIMAKTDWSISMFLDCERRNFVIQAYHRDILEQMPPPAAVTXVLVHPLILIGLR

SEQ ID NO: 227146 - protein, 116 aa, Glycine max
  unsure (1)..(116): unsure at all Xaa locations
  Clone ID: PAT_MRT3847_47142C.1.pep
FPPEIKLKENGSWICDLDLFHHRAYECFILGYSPGKVNNTDNQLKFKSVKNDPVVMSIPGDYSRKLPIADLLLKHIFGLKPPXCIELFAIXAGWVAWGNEPFYFQDLKYFVKKLDK

SEQ ID NO: 227147 - protein, 1457 aa, Glycine max
  unsure (1)..(1457): unsure at all Xaa locations
  Clone ID: PAT_MRT3847_47143C.1.pep
MDGNCISSSISRSISRSSWKMEEVFTSGRYCRRTSYVEEDEEDLKWTANXLLYTYDMGRISINEIFSECYQTGVHKEIDVRKLDVNDRQQIIDKIFRVAEEDNEKFLKKFRNRIDKVGIRLPTVEVRFQNLTVEADSYVGSRALPTLPNVALNLLESALGIFGISTAKRTKLTILKNASGIVKPARMALLLGPPSSGKTTLLLALAGKLDPELRVKGEITYNGHKLNEFVPRKTSAYISQNDVHVGEMTVKETLDFSARCQGVGTRYDLLTELARREKEAGIFPEADVDLFMKATAMEGTESSLITDYTLKILGLDICKDTIVGDEMHRGVSGGQKKRVTTGEMIVGPTKTLFMDEISTGLDSSTTYQIVKCLQQIVHLNEGTILMSLLQPAPETFNLFDDIILISEGQIVYQGPRDHIVEFFESCGFRCPERKGTADFLQEVTSRKDQEQYWADKNMPYRYVTVTEFANKFKRFHVGIRLESELSVAFDKSSAHKAALVYSKNSVPTMDLFKACWDKEWLLIKRNSFVYIFKTAQIIFIAFIAATLFLRTEMHRNNEDDAALYIGAILFTMIMNMFNGFAELALTIGRLPVFYKHRDHLFHPAWTYTLPNFLLRIPISVFESLVWVGVTYYIIGFAPDASRFFKQLLLVFLIQQMAAGMFRVISGVCRTMIIANTGGALMLLLVFLLGGFILPKREIPDWWVWAYWVSPLTYDFNALDGNEWFAWNLMHGMASDPLFVPGSTTQNFTVKGYIEDHYGFKSDFMGPVAAVLVAFTVFFAFVFSFCIKALRLSKQDKRTSSMLEVQVMRRHVRSSRQCMGSQATSGLRKVDSANDSATGVTPKKGMILPFQPLAMSFDTVNYYVDMPAEMRDQGVTEDRLQLLRGVTSSFRPGVLTALMGVSGAGKTTLMDVLAGRKTGGYIEGDIRISGFPKNQETFARVSGYCEQTDIHSPQVTIRESLLYSAFLRLPKEVSKEEKIQFVDQVMDLVELDNLKDAIVGLPGVTGLSTEQRKRLTIAVELVANPSIIFMDEPTSGLDARAAAIVMRTVRNTVDTGRTVVCTIHQPSIDIFEAFDELLLMKRGGQVIYSGPLGRNSHKITEYFEAIPGVPKIKEMYNPATWMLEVSSVAAEVRLGMDFAEYYKTSSLFQRNKALVKELSTPPPGATDLYFPTKYSQSTLGQFKSCFWKQWLTYWRSPDYNLVRYFFTLACALMIGTVFWRIGKNRESSADLTMIIGAMYAAVIFVGINNCQTVQPIVAVERTVFYRERAAGMYAPLPYALAQVFCEVPYVFFQTVYYSLIVYAMVSFEWKVEKFFWFFFVSFFSFLYFTYYGMMTVSITPNHQVASIFAAAFYGLFNLFSGFFIPRPKIPKWWVWYYWICPVAWTVYGLIVSQYRDIEDHLFVPGSTTQNFTVKGYIEDHYGFKSDFMGPVAAVLVAFTVFFAFVFSFCIRALNFQTR

SEQ ID NO: 227148 - protein, 102 aa, Glycine max
  Clone ID: PAT_MRT3847_47144C.1.pep
EKTGSPMSPFAHYLSSIILLPISSGPFHSLPFFRKTLSVFQRVLLSGEPYSAEQKLSQLAPLDSSPPCQSSPAFSLAPSERHVPPPSPIISFNLFHICPPLR

SEQ ID NO: 227149 - protein, 215 aa, Glycine max
  Clone ID: PAT_MRT3847_47145C.1.pep
AFLLGGFILPKREIPDWWVWAYWVSPLTYGFNALSVNEMLAPRWMHPQTSSDKNTTLGLSVLRNFDVYAKKDWYWIGAAALLGFTVLYNVLFTLALMYLNPLGKKQAIISEEDASEMESGGDTNEEPRLVRPPSNRESMLRSLSTADGNNSREVAMQRMGSQATSGLRKVESANDSATGVAPKKGMILPFQPLAMSFDTVNYYVDMPAEMRDQGV

SEQ ID NO: 227150 - protein, 52 aa, Glycine max
  Clone ID: PAT_MRT3847_47146C.1.pep
MRPDLLISTRVTEYFEAIPGVPKIKEMYNPATWMLEVSSVAPEVRLGMDFAE

SEQ ID NO: 227151 - protein, 101 aa, Glycine max
  Clone ID: PAT_MRT3847_47147C.1.pep
MLELCSQILSITLYTSDTHLAEANTRSSRQTDDIAHKTGLDTEVRPSPKLAMEDDPSTYRAMIFIEFMQLQQSHEHHSKTCLKTMDMGNQLSCYHSLTRKQ

SEQ ID NO: 227152 - protein, 137 aa, Glycine max
  Clone ID: PAT_MRT3847_47148C.1.pep
MAPIIIVRSAAAIFDGINNCQTVQPIAAVERTVFYRERAAGMYAPLPYALAHVFCEVPYVFFRTGYYSLIAYAMVSFECKVEKYFWFLHDSFFSFLDFTYYGMMTVSITPNHQVASISAAAFYGLYNLFSGFFIPRP

SEQ ID NO: 227153 - protein, 221 aa, Glycine max
  unsure (1)..(221): unsure at all Xaa locations
  Clone ID: PAT_MRT3847_47149C.1.pep
NKEIRPTHYSNLNLTLTDKMAKRSDFAQKLLDDLRLRKERMASSQTLSSNQSHHLPIDAYAYTKQTYRGSRNTKATEIVSTRTGEMLNSSSRSYRSVNNGQISNQMVPYGKAQSSRQTGDLSLALAFAFENGGKLRRNDSIMGFLHQIKRGTLEFSMSERQFASTSNYPMQINEISKGAQKLNQILRAGLNGLNMDSYSIQFAXELLQGAIDLEEVPQMLV

SEQ ID NO: 227154 - protein, 117 aa, Glycine max
  unsure (1)..(117): unsure at all Xaa locations
  Clone ID: PAT_MRT3847_4714C.1.pep
KKKTGHADGRKIKNFFFQHPTHXPAXFFYIXXPPPHXXKXNTLPNSHPSKAPNLTTYINNKSXTTHITIXDHKPLSKLHKTQTFXPXTIIQTPPINKIXNXXHIKTPKVLQTFNTIL

SEQ ID NO: 227155 - protein, 51 aa, Glycine max
  Clone ID: PAT_MRT3847_47150C.1.pep
ELFYIFVKCVMNSNCYFMLIYAHYHECLLLHEVTADFLYKTCFVVFFTGSL

SEQ ID NO: 227156 - protein, 120 aa, Glycine max
  Clone ID: PAT_MRT3847_47151C.1.pep
NIQWHGKTTEGGSIMYHFYEQLDLFELHNLILHPNSLHNHFLLHATTDGDFRPCHYLVQIWCSSAGSSPTSMTPPRGKPYFAIFILFCNCILKILYRSVILACNNNGFRRLVVSPMGRRT

SEQ ID NO: 227157 - protein, 44 aa, Glycine max
  Clone ID: PAT_MRT3847_47152C.1.pep
LAFRTVWRHLLSVKELHGRRMMQKELAIISQGTHHPIGYLYRSC

SEQ ID NO: 227158 - protein, 96 aa, Glycine max
  Clone ID: PAT_MRT3847_47153C.1.pep
SFLPENIVKENQRVTCTTIYSCENFSLCLFFLPAKGVIPLHNHPEMTVFSKLLLGQMHIKSYDWVDSEVSHNLLHQPSQCEYHISIKIKLNGKICF

SEQ ID NO: 227159 - protein, 89 aa, Glycine max
  Clone ID: PAT_MRT3847_47154C.1.pep
QAVFFYGNQDPPEGPSLKKTPIASNGSTNQSKTKGIFFSSPTLGNQSNQMVGNPRRIPPSPSIHLGWCQSLSLLLCSPLSTGRVGGRVG

SEQ ID NO: 227160 - protein, 42 aa, Glycine max
  Clone ID: PAT_MRT3847_47155C.1.pep
GSHSFQGSRLRPKQGTLIYLEGGPLPKRPSLTRMAHAVLLMC

SEQ ID NO: 227161 - protein, 68 aa, Glycine max
  unsure (1)..(68): unsure at all Xaa locations
  Clone ID: PAT_MRT3847_47156C.1.pep
PRVRKQAGKATKHRLRIIXLFLLXSFVLFXIISXIINFISLPFVNQKSFFTLPLTNTIKIQFQLSGRF

SEQ ID NO: 227162 - protein, 43 aa, Glycine max
  Clone ID: PAT_MRT3847_47157C.1.pep
MILAAELSVQLSRRRLMMTHSSMDAPLRAYEQYKSGRSTRYRL

SEQ ID NO: 227163 - protein, 48 aa, Glycine max
  unsure (1)..(48): unsure at all Xaa locations
  Clone ID: PAT_MRT3847_47158C.1.pep
SGKAACFIXLFGHYNFIFLCSLLVPSHFYNISFLGKVSMFFYKEDGIF

SEQ ID NO: 227164 - protein, 101 aa, Glycine max
  Clone ID: PAT_MRT3847_47159C.1.pep
NIIIFQFKSLHSKEIVYDPVLSNTSKQRTRKPGVLGDRRRSPGSIFYTRKLAWRPEPSREKRQRSRLLLRLLRVGGLGVRLPVGGLALLGVLGGLGAVVLG

SEQ ID NO: 227165 - protein, 224 aa, Glycine max
  unsure (1)..(224): unsure at all Xaa locations
  Clone ID: PAT_MRT3847_4715C.1.pep
MAPATSERVELARLCASKDWSKAIRILDSLVSHSNAIQDLCNRAFCYSKLXLHKHVIKDCDRALQLDPTLLQAYILKGSALSVLGRKENALLVWEQGYEHALHQSADLKQLRELEELIATAKQGNNTLCESETHRSLPQTKSVSLSNGSSSETCKIQDTLGTRAELCGDATGDKSETCLKSADNSNLKHESHDEYRESNKSDGQVNGSPDVLDTLSYNSESCND

SEQ ID NO: 227166 - protein, 125 aa, Glycine max
  Clone ID: PAT_MRT3847_47160C.1.pep
RFQKRKSVSIHCCPSDSCRTTLTNSLDAVQTDPIQYTHTHPQIEGGRALEQGSSTFSLPLRKRNLVGERGLVRASIRFGPIILNSCVFGPVGCCFDGVYYFLFFVIYDLLQVIIYFSYLWYFLCI

SEQ ID NO: 227167 - protein, 56 aa, Glycine max
  Clone ID: PAT_MRT3847_47161C.1.pep
LLFFVSFILRDSAVIFKRKRGRFYKNHTVYNHHNHNHRNRKRNMTAAAGKYQWVPE

SEQ ID NO: 227168 - protein, 149 aa, Glycine max
  Clone ID: PAT_MRT3847_47162C.1.pep
KRRSVTELEKIGADYMPPTKRQRGGGGEVGLANILESVVDTIVKDRYDLSYLFLKPVSKKEAPDYLDVIERPMDLSRIRERVRNMEYKSREDFRHDMWQITFNAHKYNDGRNPGIPPLADMLLEYCDYLLNENDDSLTEAEAGIEIRDF

SEQ ID NO: 227169 - protein, 48 aa, Glycine max
  Clone ID: PAT_MRT3847_47163C.1.pep
HITGFEFMGLWRAGWLMPQFSPQSEYRGWICFRAIEVLSRVYIIRPKR

SEQ ID NO: 227170 - protein, 226 aa, Glycine max
  Clone ID: PAT_MRT3847_47164C.1.pep
FDPTDQEILEHLEAKVRSDIHKLHPLIDEFIPTLEGENGICCTHPEKLPGVSKDGLIRHFFHRPSKAYTTGTRKRRKVHTDADGSETRWHKTGKTRPVFISGKLKGYKKILVLYTNYRKQRKPEKTNWVMHQYHLGNNEEEKEGELVVSKVFYQTQPRQCGSLMKDSYPAKLKGEGVHEVTNHKNTGYVEYYNNSFVSFDQGDQHRSSTAQLVSHFPVHGGATFIP

SEQ ID NO: 227171 - protein, 80 aa, Glycine max
  Clone ID: PAT_MRT3847_47165C.1.pep
VPYPLSEWTGSTRGLIVRSSSCRRLLARVVVECSVAPLKRYQHACRTTPYGPNPLWGIIHVTHGVPGGCLLCLAARKGTG

SEQ ID NO: 227172 - protein, 114 aa, Glycine max
  unsure (1)..(114): unsure at all Xaa locations
  Clone ID: PAT_MRT3847_47166C.1.pep
EDTLALRKQIHDLMTSDGLFQFIKGPVGTFTXLDLPAEHFMCMGSFHLSGLGDNGKECRQXHPNIRRAYXMKNNLEANSKDPVTLFQSVITSLNRPFVVFEYVSNRDHQQYKQR

SEQ ID NO: 227173 - protein, 115 aa, Glycine max
  Clone ID: PAT_MRT3847_47167C.1.pep
GYSFFFFFFFSPGEGKKRNGHCLTDHFAQNREKVIRKNFEGKKRGADLSPLGKTLREHSNFERAPNHSPYWRGPNPLVENGLFGRPLNFGLWKHIKAQAQKGWFFQLLCGPDPHS

SEQ ID NO: 227174 - protein, 104 aa, Glycine max
  unsure (1)..(104): unsure at all Xaa locations
  Clone ID: PAT_MRT3847_47168C.1.pep
FFGLGIDRVIHITFSAKXXXXXXXXGXGGGSARWLTAHLGIADPATNVNPAXCWXLALXLACPAAGXPXNSXXQLFGFLMLCXFXPNXASSXSPGKFFASXXCR

SEQ ID NO: 227175 - protein, 73 aa, Glycine max
  Clone ID: PAT_MRT3847_47169C.1.pep
RSRRLAALPQTQARPRFITGYREPVREIAPRFPPRASQQRNHQDLPLCPVPVETGLPTRSREVHSSGLLPLLF

SEQ ID NO: 227176 - protein, 464 aa, Glycine max
  Clone ID: PAT_MRT3847_4716C.1.pep
MEGASWNSSVCVAPFLSKTYDMVDDPSTDLVVSWGENNNSFVVWNVPQFATDILPNHFKHNNFSSFVRQLNTYGFRKVDPDRWEFANEGFLRGEKQLLKSISRRKSAHVNGSQQASQVHKSAAGACVEVGKFGLEEEVERLKRDKNVLMQELVRLRQKQQGTDNQLQNVGQRVQSMEQRQQQMMSFLAKAMQSPGFLAQFVQQQNESSKHIPGSNKKRRLQRQEEDSLATKDLHSSLDGHIVKYQSSINEAAKALFRQILQINNSTTQSSIKNPDVFLIDDIPSAIASDSSSSSTQVSNVMVPPISELTSMEVGSQFPLSCMPSNISEVQSSPAVLGFCRSQGMETESSLLNHELNVMGADTRNMGEIDMMSTVLDEADEADHFSPDTDGISKLPEISDEFWELFLRPSPLTEDTEETKCSSLGCGLTEDQGLPSEMGNKQENFDTIQHVDCLTQQMGLHALEY

SEQ ID NO: 227177 - protein, 38 aa, Glycine max
  Clone ID: PAT_MRT3847_47170C.1.pep
LLFPVLPLLPFRPLPVLPRSFPSPLLLLAVSLVRSPGP

SEQ ID NO: 227178 - protein, 51 aa, Glycine max
  Clone ID: PAT_MRT3847_47171C.1.pep
GGCFLYFERKETKQNFFFLFAKPTNQKPFKNSPLFWVLALLPPITTPSSDI

SEQ ID NO: 227179 - protein, 115 aa, Glycine max
  Clone ID: PAT_MRT3847_47172C.1.pep
DKCSTSTDTQTDSNHHSATSPHVITRYQQEQTNHRPITEHILRDDTKQEIAVQMDLFFFSASKLVFDPPPKWHLTKTLNARLVSCPCKSKIASLPNLTYKQLYIASEICTIYAHI

SEQ ID NO: 227180 - protein, 222 aa, Glycine max
  Clone ID: PAT_MRT3847_47173C.1.pep
VAGGGGSGGGMSSRVPGGMFGDDMFASFGEGGGVHMSQGASRKAPPIESKLPCTLEEIYKGTTKKMKISREIADASGKTMPVEEILTINVKPGWKKGTKITFPEKGNEQPNVMPADLVFIIDEKPHGVFARDGNDLVVTQKISLAEALTGYTVHLTTLDGRNLTIPINNVIHPTYEEVVPREGMPLPKDPSKKGNLRIKFNIKFPTRLTEEQKAGIRKLLNA

SEQ ID NO: 227181 - protein, 101 aa, Glycine max
  Clone ID: PAT_MRT3847_47174C.1.pep
PPPKKPPNFSLPKNLKKKKNPHLTRGGGAHPHGPNLFYTKKKNNPNSLAKSLPGKIKIKIKGRNLKKKTPKPFPKENPLKPLKFLNFLRGGKNHKGKQGIP

SEQ ID NO: 227182 - protein, 49 aa, Glycine max
  Clone ID: PAT_MRT3847_47175C.1.pep
NVHLGYHHDEVENIYDVSQFGMLALASFTIPTRVTTLSGTHWWGQGQVF

SEQ ID NO: 227183 - protein, 77 aa, Glycine max
  unsure (1)..(77): unsure at all Xaa locations
  Clone ID: PAT_MRT3847_47176C.1.pep
FPESXTEVPGAVPDXVVWIXTIKVLYDIASANYTGLFSVPCLXDKNLMKFGYLESVYINRMFISEFNSFAENPHLDL

SEQ ID NO: 227184 - protein, 86 aa, Glycine max
  Clone ID: PAT_MRT3847_47177C.1.pep
NFSPPPQSFPIGGFLKKNPYPLWEKNGAIFKKKPFFGPHPLKRENRVGGKISPKKTGKKKKTLADYPPKKERGYPPKAGFFKPTHC

SEQ ID NO: 227185 - protein, 55 aa, Glycine max
  Clone ID: PAT_MRT3847_47178C.1.pep
IVEILHHLNFASHTHKYVKFLLPLTIRKHPGIPWLSRLYSRYTLPATPHQFLLFS

SEQ ID NO: 227186 - protein, 213 aa, Glycine max
  unsure (1)..(213): unsure at all Xaa locations
  Clone ID: PAT_MRT3847_47179C.1.pep
MLLAMLLNLVLASFVFLSFIRDGSAGITSSFIRSEWPAVDIPLDHEAFAVPKGYNAPQQVHITQGDYDGKAVIISWVTTEEPGHSHIQYGTSENKFQTSEEGTVTNYTFHKYKSGYIHHCLXFVGDLSYADRYQYNDVGLRWDTWGRFVERSTAYHPWLWSAGNHEIDYMPYMGEVVPFKNYLYRYTTPYLASNSSSPLWYAVRRASAHIIVL

SEQ ID NO: 227187 - protein, 44 aa, Glycine max
  Clone ID: PAT_MRT3847_4717C.1.pep
NPYLSSSTYLLSSLTLIPPTEPRLLFYNSIPQKHPIHPKFNILL

SEQ ID NO: 227188 - protein, 72 aa, Glycine max
  Clone ID: PAT_MRT3847_47180C.1.pep
HIVMKTLTGNTITHNVDIYDTIDNVIANIQDKEGVPPDHQTLIFAVKHVEDGMTDGDYLIHYELPIDLVLRL

SEQ ID NO: 227189 - protein, 153 aa, Glycine max
  Clone ID: PAT_MRT3847_47181C.1.pep
ARALSEWDQIGTITHVPTIYFYRPTSQDKDNVNTVASTLKDALSRALVPFYPLAGRLHWINKGRLELDCNAMGVHFIEAESSLTLENLGDFSPSSEYNNLVPNVDYTLPIHELPVVLIQLTNFKCGGFSISLNTSHAVADGPSALHFLCEWAR

SEQ ID NO: 227190 - protein, 512 aa, Glycine max
  Clone ID: PAT_MRT3847_47182C.1.pep
MWLASFRSLLCKCFIPRWLGLCRLIKTTLIPLERRMLLAMLLNLVLASFVFLSFIRDGSAGITSSFIRSEWPAVDIPLDHEAFAVPKGYNAPQQVHITQGDYDGKAVIISWVTTEEPGHSHIQYGTSENKFQTSEEGTVTNYTFHKYKSGYIHHCLIEGLEYETKYYYRIGSGDSSREFWFKTPPKVDPDSPYKFGIIGDLGQTFNSLSTLEHYIQSGAQTVLFVGDLSYADRYQYNDVGLRWDTWGRFVERSTAYHPWIWSAGNHEIDYMPYMGEVVPFKNYLYRYTTPYLASNSSSPLWYAVRRASAHIIVLSSYSPFVKYTPQYMWLKEELKRVEREKTPWLIVLMHVPLYNSNGAHYMEGESMRSVFESWFIEYKVDVIFAGHVHAYERSYRYSNVDYNITGGNRYPLPNKSAPVYITVGDGGNQEGLASRFLDPQPEYSAFREASYGHSTLEIKNRTHAIYHWNRNDDGKKVPTDSFVLHNQYWGHNRRRRKLKHFLLKVIDEVASM

SEQ ID NO: 227191 - protein, 158 aa, Glycine max
  Clone ID: PAT_MRT3847_47183C.1.pep
FVSDPSNTRISASSRSTYRSVLADFLQPQNVKNLCSLFVVLSQVAAKTNAEMTGKVDQQTKTGNFEASVASSSKSLQETRDVHQLVCDDHVNKDEADAVDIANYNRPLSPETLALMCDEQDDMIFGNSSANGVACNSTLQNMIQKSSNSDGCTDVCRE

SEQ ID NO: 227192 - protein, 73 aa, Glycine max
  unsure (1)..(73): unsure at all Xaa locations
  Clone ID: PAT_MRT3847_47184C.1.pep
PRVRPRVRTVARRRQKGAPSSPAATTSTFAARRSSTLDPAAKESSSYRRGSXTRXSNGAPIAPKRGGRQEKSK

SEQ ID NO: 227193 - protein, 92 aa, Glycine max
  Clone ID: PAT_MRT3847_47185C.1.pep
SFTSHYFFLRPTSPWGPTLFFGGSASAYYSEHLFKNTNPLFWPGFFKWNQVGHSVPKAVPVRLLAGCTVDPVRFVPNSASTSGVFRSQYPRK

SEQ ID NO: 227194 - protein, 125 aa, Glycine max
  unsure (1)..(125): unsure at all Xaa locations
  Clone ID: PAT_MRT3847_47186C.1.pep
LIYQDLLTDNKLLSNSFHYNEIKNKMLXEXKGXXIIKGAVNININTDPSTENKEDKKFNNATIKIMNISNTFGLRNQPTFDKKQVITFIKKLIKNXTPKLDAXKQELWKRHVXRXTRYLGSKIKN

SEQ ID NO: 227195 - protein, 74 aa, Glycine max
  unsure (1)..(74): unsure at all Xaa locations
  Clone ID: PAT_MRT3847_47187C.1.pep
MPNPKVFFDMTIGGQSAGRIVMELYADVTPRTAENFRAHFTGEKGVGRTASPVHXQGLVLHRVSPEFMCQVATS

SEQ ID NO: 227196 - protein, 80 aa, Glycine max
  Clone ID: PAT_MRT3847_47188C.1.pep
KYFICLQVFIFPPKFSNDIQGLVIERIQNSLAAAGKKKIIYLGDGNGDFCPSLRLKDSDYLMPRKDLSLCDLVSKILIDK

SEQ ID NO: 227197 - protein, 62 aa, Glycine max
  unsure (1)..(62): unsure at all Xaa locations
  Clone ID: PAT_MRT3847_47189C.1.pep
MESKGGKKKASSNRSKXLFYXTPLGYRIEDVRPNGGITKFKSAAYSIVYFLSDAMNSGICFG

SEQ ID NO: 227198 - protein, 112 aa, Glycine max
  unsure (1)..(112): unsure at all Xaa locations
  Clone ID: PAT_MRT3847_4718C.1.pep
ELKSGKGFRKVDPDRWEFANEGFLRGEKQLLKSISRRKSAHVNGSQQPSQVHKSAVRACVEVGKFGFEEEVERLKRDKNVLMXELXRLRQKQQGTDNHLKMLATCAVNEQRQ

SEQ ID NO: 227199 - protein, 61 aa, Glycine max
  Clone ID: PAT_MRT3847_47190C.1.pep
PIPKPIEINKSPNTITRIILTNPISSISLQNIHTNHPKTYYHNQNYNKLKSTFFLSIASKL

SEQ ID NO: 227200 - protein, 164 aa, Glycine max
  Clone ID: PAT_MRT3847_47191C.1.pep
MESQGPNPHHESNKPTIPHKSEGHIQAYHEGGLNQQKMARSDAGADAKILNATLASPYHELNPVWRDTSTFMDRCDEDHSIEVVKDEISTVKEGPSEVAWTTRQYHGWTMRETRVKAAPVHASAYWYLENESPALHRYGNAAISTEAHPQSLDNSPVDIQHLRC

SEQ ID NO: 227201 - protein, 49 aa, Glycine max
  Clone ID: PAT_MRT3847_47192C.1.pep
IKWVFFLLKKERGGVPPNLCFQKKKKKKKKKKKKKKKGKKKKKKKKRGR

SEQ ID NO: 227202 - protein, 86 aa, Glycine max
  unsure (1)..(86): unsure at all Xaa locations
  Clone ID: PAT_MRT3847_47193C.1.pep
GEWILLNAFMQDFDPIRHVLEHVPVEENELTYFEKQAALRLAQLDRVAERLSRHVMEHHEVMVKGMNLXRELEKELRIGNXICMNG

SEQ ID NO: 227203 - protein, 95 aa, Glycine max
  unsure (1)..(95): unsure at all Xaa locations
  Clone ID: PAT_MRT3847_47194C.1.pep
VSVNDDLRSLCPDYLRLSLRTRLPKRLCIQAVGSTYGKYFRVQTYGESHGGGGGCVIDGXPPLVPIYEGDMXWMIDSRRXEQSRTTTPRKETDSC

SEQ ID NO: 227204 - protein, 43 aa, Glycine max
  Clone ID: PAT_MRT3847_47195C.1.pep
NFQFDPRVRPLTRSTTRRLLNYVKRCENLGRVYCLPVITHGLF

SEQ ID NO: 227205 - protein, 84 aa, Glycine max
  Clone ID: PAT_MRT3847_47196C.1.pep
RRCYARSLDTHQWSWCVLVKEKCPRTRSRGRNARILLHKQNKQTMRFPCSRQHHLFQFHPRLIETTDDKQQLCRCRAIHTQNNC

SEQ ID NO: 227206 - protein, 84 aa, Glycine max
  Clone ID: PAT_MRT3847_47197C.1.pep
FELAPPLAPPGFPFYSSGSNFLGNFKGKTFSPRKNLFPFFPQPLKPPPKKKIVTPPGPVPNFPGEPRGPPPGPPRGPKLCPLFP

SEQ ID NO: 227207 - protein, 68 aa, Glycine max
  Clone ID: PAT_MRT3847_47198C.1.pep
NKTSRNWTDPFSLSFFPTQLRSSSCHFNPTIIIIRKKKKKKHVEQIPSSFIFITHIIRFSNLSFGLTR

SEQ ID NO: 227208 - protein, 368 aa, Glycine max
  unsure (1)..(368): unsure at all Xaa locations
  Clone ID: PAT_MRT3847_47199C.1.pep
MWFSFWRSRDRFTLDHLSVVLLPYGXRYLTDQLAKVQIVNEVNKDFVIEALRSIAELITYGDQHDPSFFEFFMEKQVVAEFVRVLKLSRTVSIPLQLLQTVSIMIQNLRSEHAIYYMFSNEHMNYLITYSFDFHNEELLSYYISFLRAISGKLNKNTISLLVKTRNDEVVSFPLYVEAIRFAFHEENMIRTAVRTVTLNVYHVGDECVNRYITSVPHTDYFSNLVSFFRNQCMDLNRLVSETLKNPCPDSTSTIIAAVDEIEDNLYYFSDVISAGIPDVARLITDSILMLLIFPLLLPSLRVVDANDMQSGVVTSLYLLCCILRIVKIKDLANTIVVALFYPPTPRPRVKLKDEKRYIDEFVDTGVQE

SEQ ID NO: 227209 - protein, 109 aa, Glycine max
  unsure (1)..(109): unsure at all Xaa locations
  Clone ID: PAT_MRT3847_4719C.1.pep
LILQPIIKALLPAHGIDLSKPTAPLSTTTXIHAEDNWSVSNXKSPKSRSSTLRMKLAEDDDFNQNGLTHDGIGRNSRFKAICAIPTQPKKMLSKFWSTTNRTAAATEKN

SEQ ID NO: 227210 - protein, 71 aa, Glycine max
  unsure (1)..(71): unsure at all Xaa locations
  Clone ID: PAT_MRT3847_471C.1.pep
ARGYDEICFDIGCFTIVEPGDLVXGIHDIDKCAEKTERCLKSCYRALTDPPLLVNGALWEQCIVAYGFYIA

SEQ ID NO: 227211 - protein, 567 aa, Glycine max
  Clone ID: PAT_MRT3847_47200C.1.pep
RIVDTNDMQSGVVTSLYLLCCILRIVKIKDLANTIVAALFYPLETFTRFSRGKVNGYISDRGLTSVSQEPDDDNIAKCNAECLTVNVPQSSSSSGLDTESIMSEDNCSSSNLALREVLLAYVTKGDDVQVLGSLSVLATLLQTKELDESMLDRLGILPQRKQHKKQLLQALVGEASGEEQLFSSENSLMRDGSGCEPGVYLEKIKEQYGLSFLPSDFLMSPRVPRFQVLDALVSLFCRSNISAETLWDGGWLLRQLLPYSEAEFNSHHLELLQVSYKNSATALVKEVRGFWPDLLITVLCNEWRKCKKAMESSYPPKEPKCILFPSQMLSSEEDIPEGSSFAAGEKMHELVKVFVVLHQLQIFTLGRPLPEKPLIYPPGDLPANSRAQTSGLDVSGPKPGTEVSLVNAVPCRIAFERGKERHFCFLAISAGTSGWLVLAEELPMKKLYGVIRVAAPLAGCNPRIDDKHPRWLHLRIRPSSLPVLDPAKFNPNRKLKTKAFVDGRWTLAFRDEESCKSALSMILEEINFLSDEVHRRLKPLLNLETALDLSGPEEDSSSHSTTPPNSV

SEQ ID NO: 227212 - protein, 106 aa, Glycine max
  unsure (1)..(106): unsure at all Xaa locations
  Clone ID: PAT_MRT3847_47201C.1.pep
FGEIQERGVLIFXHQEFLTAGTSXVRTATTLWADGCTYLFAMVYDRSVSTVPGDCGIGVKLATINILCAYGLNSGISGCXFRAPLSNPFDSRXVWNKMVSGRTPLN

SEQ ID NO: 227213 - protein, 43 aa, Glycine max
  Clone ID: PAT_MRT3847_47202C.1.pep
EAFRRIREGPALIRTKGKAGTGTIIEAVRHVRSVMSDIRVFRT

SEQ ID NO: 227214 - protein, 76 aa, Glycine max
  Clone ID: PAT_MRT3847_47203C.1.pep
YKYTSGRSLINIVRISDQFWRIRRYNCHVYYIKFIISNLYTGKYNCCNSGCGMLKNRKSIYNRIYSCKSSCLSAYV

SEQ ID NO: 227215 - protein, 272 aa, Glycine max
  Clone ID: PAT_MRT3847_47204C.1.pep
KDLWSWKNEGIVLAAEESNVTHDLYKTNVLERPKVIYNEKIRKYVMWMHIDDANYTKASVGTAISDTPDGPFEYLGSQRPHGYESRDMTVFKDEDGVAYLIYSSEENNVLHIGPLTEDYLNVIPVMRRLFVGQRREAPAVFKHQGTYYMITSGCTGWAPNEALVHAAESILGPWETMGNPCVGGNKMFRIATFLAQSTFVLPLPGFPGSFIFMADRWNPANLRDSRYVWLPLIVEGPADHALEYSSGLPLWSRVSIYWHRKWRLPQGWSTFK

SEQ ID NO: 227216 - protein, 95 aa, Glycine max
  Clone ID: PAT_MRT3847_47205C.1.pep
VLVLLLCLVTFPTCVLSQVQLKESGPGLVQPSQTLSLTCTVSGFSLTSYNVHWVRQPTGKGLEWMGVIWTGGSTDYNSALKSRLSISWDTSKSQV

SEQ ID NO: 227217 - protein, 87 aa, Glycine max
  unsure (1)..(87): unsure at all Xaa locations
  Clone ID: PAT_MRT3847_47206C.1.pep
ALILFRAVAVLPSRTVLSEVILLVPPVPPPXVAFWAXSVALSWDTSXRENPSSLLRLHRHLCLIGGSNQHHIQLTFCAPCVAKICNC

SEQ ID NO: 227218 - protein, 157 aa, Glycine max
  Clone ID: PAT_MRT3847_47207C.1.pep
MRPILMKGHERPLTFLKYNRDGDLLFSCAKDHNPTVWFADNGERLGTYRGHNGAVWCCDVSRDSGRLITGSADQTAKLWNVQTGQQLFTFNFDSPARSVDFAVGDKLAVITTDPFMELPSAIHVKRIANDPAEQTGESVLLIKGPQGRINRAIWGPL

SEQ ID NO: 227219 - protein, 65 aa, Glycine max
  Clone ID: PAT_MRT3847_47208C.1.pep
CKVIKSTMVVSILIFGVSLKSLYKLQGTMDDGVRGTRIRGLEPPYGVVYGVQRTNIPHFKWLEIR

SEQ ID NO: 227220 - protein, 78 aa, Glycine max
  Clone ID: PAT_MRT3847_47209C.1.pep
FSGSRLRLHVRVFIWHALELLSCSTAFFSSLTVVGHQGPQVQPRTSEYQPFRSAMRQITLNYGSRNVGSVNLGNNLKR

SEQ ID NO: 227221 - protein, 52 aa, Glycine max
  Clone ID: PAT_MRT3847_4720C.1.pep
LVVTSGPWKINYSISQSLNFNFFSLWQCSFNPSGDPTKKPTIALPTQIISHS

SEQ ID NO: 227222 - protein, 89 aa, Glycine max
  Clone ID: PAT_MRT3847_47210C.1.pep
NNRPICKKIIFKGEAGLDFLPPENHQKKAQDPGQPKMPGKNPTKPPFLWPDPAKGNPELPFRRGVLKKKGLDPKASPPGWISSFGTWNS

SEQ ID NO: 227223 - protein, 345 aa, Glycine max
  Clone ID: PAT_MRT3847_47211C.1.pep
MMSNIAFRLTLVFLLFSAVLSTPPEDPIKCATSENTTCTITNSYGAFPDRSICKAAQVLYPTTEQELVSVVASATRNKTKMKVATRFSHSIPKLVCPEGENGLLISTKYLNKILKVDVEARTMTVESGVTMKQLINEAAKVGLALPYAPYWWGLTIGGLMGTGAHGSTLWGKGSSVHDYVVELRIVRAAGPEEGYAKAESLNEQHEDLNAAKVSLGVLGVISQVTLKLEPLFKRSITYVAKNDSDLGDQVAAFGHAHEFADITWYPSQRKAVYRVDDRVPFNTSGNGLYDFIPFRPTPSLELAILRTTEDLQESTGDADGKCIGSKTTTNTLITAAYGLTNNGII

SEQ ID NO: 227224 - protein, 183 aa, Glycine max
  Clone ID: PAT_MRT3847_47212C.1.pep
EDLLKLPNRGKALEVGYEYFDDLVLEPFFQRSSNLTWGNYFVMHDLVHDLALYLGGEFYFRSEELGKETKIGIKTRHLSVTEFSDPISDIEVFDRLQFLRTLLAIDFKDSPFNKGKAPGIVASKLKCLRVLSFCGFASLDVLPDSIGKLIHLRYLNLSRTRIKTLPESLCNLFNLQTLVLKPI

SEQ ID NO: 227225 - protein, 202 aa, Glycine max
  Clone ID: PAT_MRT3847_47213C.1.pep
RSIHRLSNWLRKTNRKPLLAALEKMKEELMLLGFISLLLTATSRMIANICIPSKFYNSAFAPCTRSEIDEEMEDNGSEERKLLMASSYPHLVRRMLNGINSSTCKEGYEPFVSYEGLEQLHRFIFVMAVTHISYSCLTMLLAIVKIHSWRVWEDEAHMDRHNSLTEITKELTMRRQSTFVKSHASNPLIKNSSLIWVTCFFR

SEQ ID NO: 227226 - protein, 103 aa, Glycine max
  Clone ID: PAT_MRT3847_47214C.1.pep
LAIRLPSSGAGIFIRMRTAIGMYSGVVRRMFSGKGVIFPSSGVGDAGIKCCIRYVPRVAFRLVFVKCVSIRFIRLYSAVRVLIIVHTMFVHQSLVITVWSCHL

SEQ ID NO: 227227 - protein, 104 aa, Glycine max
  Clone ID: PAT_MRT3847_47215C.1.pep
QTFLASYHFLDQVRQQSDLASPYRAQSFFSSPSEHLLRLFNKPSLSQSCHQPRRHLLDVPLLVSHIKTVKRGRLFHVHNLVRIQNYAFLGQISTNEPMYLITVG

SEQ ID NO: 227228 - protein, 94 aa, Glycine max
  Clone ID: PAT_MRT3847_47216C.1.pep
VFEQLRERKSLSAHATNYVNYYSFALLVYSLHTLLCDIGLSDRFKLFLFLSQFSDEHAVQAGENLYYCSHSSMRYGTSRVDSSIYVIYFTLLFH

SEQ ID NO: 227229 - protein, 63 aa, Glycine max
  Clone ID: PAT_MRT3847_47217C.1.pep
RDIVERGFRLGKERVFQLISCKNRGSGLDFGGHYKKVYCWKEGEVSVGILRRAAFWFFVFMCV

SEQ ID NO: 227230 - protein, 49 aa, Glycine max
  Clone ID: PAT_MRT3847_47218C.1.pep
DVGILPFLDCSIEDDDTLGGNENNSIEVRLVWFTMEREVRNKIKTIFYP

SEQ ID NO: 227231 - protein, 119 aa, Glycine max
  unsure (1)..(119): unsure at all Xaa locations
  Clone ID: PAT_MRT3847_47219C.1.pep
CSLCSISIGHGCSCSLIKNNSSSAAAAALFKPRAKQADTIIPQIIGAPQTLQSRGGNGGPDPGTKIPSSEGDSNXSPKLNKVAAIDEANSVYDYRIRXRTGHHESLEKGTFQTKVDADN

SEQ ID NO: 227232 - protein, 212 aa, Glycine max
  Clone ID: PAT_MRT3847_4721C.1.pep
ANCIRSLCNADVKEGFVFGKDASLPETYVRDAKIPTKDLSGNSASKRTTLAFFAGSMHGYVRPILLQHWENKDPDMKIFGRLPKSKGNRNYIQYMKSSKYCICAKGYEVNSPRVVEAIFYECVPVIISDNFVPPFLEVLNWESFAVIVLEKDIPNLKNILLSIPEKQYLRLQMRVKKVQQHFLWHKNPVKYDIFHMILHSVWYNRVFSAPAR

SEQ ID NO: 227233 - protein, 107 aa, Glycine max
  Clone ID: PAT_MRT3847_47220C.1.pep
PGSSLPPLLQRPSTHGSSNSSLGRTVIQCHVYVGEASGSSEMKIQECVFQEPGMVTVSPKEEYNCVHEVVHIGGDHSESIINGDYRFAVLVEVKVLVCMHTYKHAYL

SEQ ID NO: 227234 - protein, 74 aa, Glycine max
  unsure (1)..(74): unsure at all Xaa locations
  Clone ID: PAT_MRT3847_47221C.1.pep
METPRIIEFAHRNMDIMPRKKQRXTWDMHVPPPPAPAPPVPPTKXQVLSTMYCKQEVGNGVVPKYAYSSLFYRG

SEQ ID NO: 227235 - protein, 87 aa, Glycine max
  unsure (1)..(87): unsure at all Xaa locations
  Clone ID: PAT_MRT3847_47222C.1.pep
LSXQPRLWKSDFGINASCSRECAVGCWTCIGWVCGRFXRVEHKTLVEANVESCLSFIQXCQDLALRHVHAGTLLHSXFVVISEQNTF

SEQ ID NO: 227236 - protein, 78 aa, Glycine max
  Clone ID: PAT_MRT3847_47223C.1.pep
YVVTKELKLTENQKLHCLGTVRLGLSRLLLQSWRTQHRAKQRQSGPAQQPGWGRERPFRPPRGHRGNLPGACLYARVE

SEQ ID NO: 227237 - protein, 252 aa, Glycine max
  Clone ID: PAT_MRT3847_47224C.1.pep
IELMAARDLVNSRSAVVQTVNGVNRKYNDPRAGRKGRISSRANEISGTGVDDFESRSLDADDLKIELQARKQREAALEAALAEKEFVEEQYRKKTEEAKRREEALENDLANMWVLVAKLKKDGGAVPESNINIKKVDEEAHTNDLKTNGIESDIVPKEQILDVSIPENEIANEDPLVVRLKARMKEMRDKEFKHLGNGDANSHVCKVCFESSTAAILLPCRHFCLCKSCSLACSECPICRTNISDRLFAFTS

SEQ ID NO: 227238 - protein, 157 aa, Glycine max
  Clone ID: PAT_MRT3847_47225C.1.pep
RGPKKREASLENDLANMWVLVAKLKKEGGAVPESNINIKKVDEEAHKYDRKTNGIESDIVPKEQILDVSIPENEIANEDPLVVRLKARMKEMRDKEFKHLGNGDANSHVCKVCFESSTAAILLPCRHFCLCKSCSLACSECPICRTNISDRLFAFTS

SEQ ID NO: 227239 - protein, 74 aa, Glycine max
  Clone ID: PAT_MRT3847_47226C.1.pep
TAPKGRLVLSRVLAKLPVLLCFSPLNVHAACGVFPYSVLMFPFLPFVCRKKKINHPPPVVIYSKVPLIIIFYII

SEQ ID NO: 227240 - protein, 63 aa, Glycine max
  unsure (1)..(63): unsure at all Xaa locations
  Clone ID: PAT_MRT3847_47227C.1.pep
LGISLPSCMHAIDRYSLISFAFVRALLYGVIIVIFLLFVVKXKCIFFSIYELFLVTVCNFLXX

SEQ ID NO: 227241 - protein, 137 aa, Glycine max
  Clone ID: PAT_MRT3847_47228C.1.pep
HSSAHLHAQDASPLSLLYDFEELEGEWDFLTRVVALTFYPTVSGRKPLTLGEIEILGVSLPWSDVFTNEGPGTRLVEHVKKFEEELNPFVSDSDTNPFNSSSSEKASPPKQGGTSADLLLTSCLGRTPFTPTCATRY

SEQ ID NO: 227242 - protein, 79 aa, Glycine max
  Clone ID: PAT_MRT3847_47229C.1.pep
MHKYEPTLHPTSTYAHEQYFIVTDPFPARNALALWHLVEILANYPTHPEGTTADLENSTALPCAQALGADTSHMTHTDG

SEQ ID NO: 227243 - protein, 396 aa, Glycine max
  Clone ID: PAT_MRT3847_4722C.1.pep
ISNLQGFRKVDPDRWEFANEGFLRGEKQLLKSISRRKSAHVNGSQQASQVHKSAAGACVEVGKFGLEEEVERLKRDKNVLMQELVRLRQKQQGTDNQLQNVGQRVQSMEQRQQQMMSFLAKAMQSPGFLAQFVQQQNESSKHIPGSNKKRRLQRQEEDSLATKDLHSSLDGHIVKYQSSINEAAKALFRQILQINNSTTQSSIKNPDVFLIDDIPSAIASDSSSSSTQVSNVMVPPISELTSMEVGSQFPLSCMPSNISEVQSSPAVLGFCRSQGMETESSLLNHELNVMGADTRNMGEIDMMSTVLDEADEADHFSPDTDGISKLPEISDEFWELFLRPSPLTEDTEETKCSSLGCGLTEDQGLPSEMGNKQENFDTIQHVDCLTQQMGLHALEY

SEQ ID NO: 227244 - protein, 103 aa, Glycine max
  unsure (1)..(103): unsure at all Xaa locations
  Clone ID: PAT_MRT3847_47230C.1.pep
MARYTVRVLVTGAARQIGYALVPMIATGVMLGPDQPVILHMLEIPPASESLNGVKMEXLVDDAFTLLKCVVAITDVDEACTGVSIAMMGGGFPRSESMDRKDV

SEQ ID NO: 227245 - protein, 255 aa, Glycine max
  Clone ID: PAT_MRT3847_47231C.1.pep
MVLMGGVGVPSISICFLFQTRPTRHLCLKFRLKHSLSYSITSMALTNNTTTNERKLPILLFDIMDTLVRDPFYQDVPAFFGMSLKELIDCKHPTAWIEFEKGLIDEMELARKFFKDGRDFDLEGLKTCMRSGYSYIEGIEQLLLSLKLNNYEMHAFTNYPIWYQLIEDKLKLSKYLSWTFCSWAFGKRKPDTEFYKEVVRHLKVDPTNCIFVDDRQKNVEAAIEVGIRGVHFQNVNSLCEKLPLMGIDISTNEDR

SEQ ID NO: 227246 - protein, 118 aa, Glycine max
  Clone ID: PAT_MRT3847_47232C.1.pep
PWNAVRRGKLDVARTSVARLRSAAPDSEEVEANLAYVRHVTTLEAEETSGASFFDCFRGTNLRRTEINCVVWAAQILCGNAILGYSVVFLQAAGFGETQALDLNIALSACYIIRGGIC

SEQ ID NO: 227247 - protein, 142 aa, Glycine max
  Clone ID: PAT_MRT3847_47233C.1.pep
MVLSADDKTNIKNCWGKIGGHGGEYGEEALQRMFAAFPTTKTYFSHIDVSPGSAQVKAHGKKVADALAKAADHVEDLPGALSTLSDLHAHKLRVDPVNFKFLSHCLLVTLACHHPGDFTPAMHASLDKFLASVSTVLTSKYR

SEQ ID NO: 227248 - protein, 172 aa, Glycine max
  Clone ID: PAT_MRT3847_47234C.1.pep
MMERILCFIYLVSLILFQANAAEPISDKQALLGLLEKLPPSRSLNWNASSSPCTSWTGVTCNGDRSRVIAIHLPGFGFHGTIPPNTISRVTGLQTLSLRSNFINGHFPCDFSNLKNLSFLYLQYNNFTGPLPDFSAWRNLSVVNLSNNFFTGTIPLSLSNLAQLTAMNLGIN

SEQ ID NO: 227249 - protein, 171 aa, Glycine max
  Clone ID: PAT_MRT3847_47235C.1.pep
MGGEVLTMADVTANLQAATTASTPYALPTNLPLLSAFLSFALAQFLKIFTSWYKEKRWDSKRLLDSGGMPSSHSATVSALAVAICLQEGAGSPAFAIAVVLACIVMYDATGVRLHAGRQAELLNQIVCELPPEHPCSNVRPLRDSLGHTPLQVVAGGTLGCIIAFLMRRSS

SEQ ID NO: 227250 - protein, 48 aa, Glycine max
  Clone ID: PAT_MRT3847_47236C.1.pep
FPERSKNGHQCIYRIVHYSTCMLSKSRSKCVFRTVERKMELANTTLRF

SEQ ID NO: 227251 - protein, 69 aa, Glycine max
  Clone ID: PAT_MRT3847_47237C.1.pep
LHLLARKRCEEPALICLKYNSGGEVILIVKEPGTDVKAFKCYSLEIKENDIREGRNLPILFFYLPWNYP

SEQ ID NO: 227252 - protein, 87 aa, Glycine max
  unsure (1)..(87): unsure at all Xaa locations
  Clone ID: PAT_MRT3847_47238C.1.pep
DSLDTLLXIGVDPVDLLVGRCVTRMEDGVLGAPIFFSSGRREPSAAXGPSATSFSVACXSGTAPLTRXXGSQTLERETHGEAGRVKL

SEQ ID NO: 227253 - protein, 52 aa, Glycine max
  Clone ID: PAT_MRT3847_47239C.1.pep
TSWPSGHHHGGPCHLKECRAAMTVAMRGHIEAPLWSSMAKDKQCGGGPWQSS

SEQ ID NO: 227254 - protein, 152 aa, Glycine max
  unsure (1)..(152): unsure at all Xaa locations
  Clone ID: PAT_MRT3847_4723C.1.pep
LSKRYVKWVEFLEXFPYMIKHKKGISNVNADALSMGYDLFSTLETKFIGFKHIEELNEHDLDFXSKYSNCVQTAXKGYFWHNDYSFKEKRLCVPKGSIRKLLVKEAHNGGLMGHFGIQKTLDLLHEHLFLPHMKHDVNKXCDNYIVCKKSKS

SEQ ID NO: 227255 - protein, 143 aa, Glycine max
  Clone ID: PAT_MRT3847_47240C.1.pep
ARVYAPEHLQEYGVGLTNSRGPFLRILRPHLVIGECTQLPHDFLNEAKDLGYITRWRPQEHVLSHPSIGALLTHCSWNSTLEGICGGAPMIRWPNFAEQQTHCKDICALWGIGMALKDDVKREDATSLVKEMITLERWKDLRH

SEQ ID NO: 227256 - protein, 51 aa, Glycine max
  Clone ID: PAT_MRT3847_47241C.1.pep
MIEKLVSVEVKSRIFSDKVSGRWCHNRSAALRPLGSACRVGRSQSLEVRRS

SEQ ID NO: 227257 - protein, 66 aa, Glycine max
  Clone ID: PAT_MRT3847_47242C.1.pep
SAIEIPIEIESRNKQRYNKPQSLSYILTLVWWWFLCSDGKRHREAKGVIHRKRWRGSSEAGYILFN

SEQ ID NO: 227258 - protein, 79 aa, Glycine max
  Clone ID: PAT_MRT3847_47243C.1.pep
IYHKLVIKSFIQNNVENTLIFCNKSFLISLLYPVSSSIRHRSAFSINKSVASRKQKLTFLFFSQEILEVKLSLGTSYLF

SEQ ID NO: 227259 - protein, 114 aa, Glycine max
  unsure (1)..(114): unsure at all Xaa locations
  Clone ID: PAT_MRT3847_47244C.1.pep
KXXXXNXXSIENXXIFKFLXSNSRXXNXXNLFYXXKIIFIYSITHKPFLFGRFMGIILKNVIXCKNIILCGIIVLIREKIETKEEKLIHFVWFNISNSRLHSKLWSKVEKDIDS

SEQ ID NO: 227260 - protein, 154 aa, Glycine max
  Clone ID: PAT_MRT3847_47245C.1.pep
KDFCIPVDGGMDALAFEDFLLEEKRKELEELAWAQAERERQAEEQRRMEADRAAKEEDRARAKAEVGRMRETLPQLLKNAVKSIDNVWYIEPSEFKGNELIRLYYNRSSGPLANANEIWIHGGHNNWKYGLSIVERLVKSVLKRGEWWYADVVV

SEQ ID NO: 227261 - protein, 59 aa, Glycine max
  Clone ID: PAT_MRT3847_47246C.1.pep
RQDKFVNHLNKSLCVCVLAAGMLLCRNHIVIFMLKVKCSNMSFSCTQTIIEQKVGFLFF

SEQ ID NO: 227262 - protein, 35 aa, Glycine max
  Clone ID: PAT_MRT3847_47247C.1.pep
KYFIQAQNLKPYSMYWGEVMAGHVGRGVLEEEVWR

SEQ ID NO: 227263 - protein, 72 aa, Glycine max
  Clone ID: PAT_MRT3847_47248C.1.pep
SVNFLSDSPIFYVDRIFGYWKNCSNRVRIDHLILITSLVSGIFCVSVAPFAIIIFETFCFHYFCDPWMCFEY

SEQ ID NO: 227264 - protein, 236 aa, Glycine max
  Clone ID: PAT_MRT3847_47249C.1.pep
MDVKKGGSVVQAQVKLQKHNEKEMGMRKGPWAVEEDTILVNYIATHGEGHWNSVARCAGLRRSGKSCRLRWLNYLRPDVRRGNITLQEQILILDLHSRWGNRWSKIAQQLPGRTDNEIKNYWRTRVIKQAKQLKCDVNSKQFRDTLRYVWMPRLLERLQPTSQALEPNQSGLVLHASSSLLPSNSDHSIERGSDLWPGFNNQMLLEQGSGGDLLESLWDDDNMCFLQQLSYDLQMK

SEQ ID NO: 227265 - protein, 58 aa, Glycine max
  Clone ID: PAT_MRT3847_4724C.1.pep
PSDKSFFSLVTKPGREASMEHQGSDEIHPASQPKSARQQISLRDCGCSITALFGLSLS

SEQ ID NO: 227266 - protein, 239 aa, Glycine max
  Clone ID: PAT_MRT3847_47250C.1.pep
MDVKKGGSVVQAQVKLQKHNEKEMGMRKGPWAVEEDTILVNYIATHGEGHWNSVARYLSITGLRRSGKSCRLRWLNYLRPDVRRGNITLQEQILILDLHSRWGNRWSKIAQQLPGRTDNEIKNYWRTRVIKQAKQLKCDVNSKQFRDTLRYVWMPRLLERLQPTSQALEPNQSGLVLHASSSLLPSNSDHSIERGSDLWPGFNNQMLLEQGSGGDLLESLWDDDNMCFLQQLSYDLQMK

SEQ ID NO: 227267 - protein, 51 aa, Glycine max
  Clone ID: PAT_MRT3847_47251C.1.pep
VFFSFSIYVFCFIIYHIMIVLKMHFSVYRYFRFIKSNSLLDSHKNLDSILC

SEQ ID NO: 227268 - protein, 259 aa, Glycine max
  unsure (1)..(259): unsure at all Xaa locations
  Clone ID: PAT_MRT3847_47252C.1.pep
MLSYGCHIRHLSVLNSTRLRQHSSSIAKTAMGSLSALYQPIQYPTARRDDSVLDDFHGVKIADPYRWLENPEAEEVKEFVQKQVALTDSVLQRCDCRPKLAEKITKLFDNPRYNAPFRRGDNKYFYFHNTGLQAQSVLYVQDTLEAEAEVLLDPNALSEDGTVSLNTLSVSKDAEFLAYGLSSSGSDWVTINLMRIRDKTVQPDTLSWVKFSSISWTHDTKGFFYSRYPAPKDGELVDAGTETNANLYMSSXYHFLGTD

SEQ ID NO: 227269 - protein, 50 aa, Glycine max
  Clone ID: PAT_MRT3847_47253C.1.pep
VLSLRILLTEAHASSDLRAGQEVSLASTPWIKFKSHSYGKLAHRLCHYSH

SEQ ID NO: 227270 - protein, 37 aa, Glycine max
  Clone ID: PAT_MRT3847_47254C.1.pep
ACKFISLENIKLLIVYGFSNTNSIHLKLKIFNRRLMK

SEQ ID NO: 227271 - protein, 122 aa, Glycine max
  unsure (1)..(122): unsure at all Xaa locations
  Clone ID: PAT_MRT3847_47255C.1.pep
VLANADTPEDALAARNNGAEGIGLCRTEHMFFASDERIKAVRQMIMAPTVELRQQALDRLLSYQRSDFEGIFRAMDGLSVTIRLLDPPLHEFLAEGNVXEIVRELCSETGANQEDALARIEK

SEQ ID NO: 227272 - protein, 68 aa, Glycine max
  Clone ID: PAT_MRT3847_47256C.1.pep
MAVWTLSRCCQWRHPWFCTLRCFTAFMDFVVVDSDNGNEAEHSCLEESISIFGGVEVQEPYVGMEIDS

SEQ ID NO: 227273 - protein, 125 aa, Glycine max
  unsure (1)..(125): unsure at all Xaa locations
  Clone ID: PAT_MRT3847_47257C.1.pep
SLPAAXNNPEDAHELKDTAXPTAXKESKPXHTSTSQNRPGXXHPXXRRXPXXXXAPPRPRNKTGPEAAAEAAAERPNKAAKPEPAGGPKPREATAPEAPEEPAEARGHAHAETPPAKGQXPEHHP

SEQ ID NO: 227274 - protein, 59 aa, Glycine max
  unsure (1)..(59): unsure at all Xaa locations
  Clone ID: PAT_MRT3847_47258C.1.pep
MATEPSDRIQRDTLVVRKPCFGLLTGCPQCLSAYISLRFSQFAFNLDLXSXYPDADQVA

SEQ ID NO: 227275 - protein, 118 aa, Glycine max
  unsure (1)..(118): unsure at all Xaa locations
  Clone ID: PAT_MRT3847_47259C.1.pep
KSSTNHAASIILDPFPPSEAYLNQSLDSPILPLLEXLSRTGFPLMIKHYPYYFFMQDKRAGPLYKALFLHLTADKEIDDPKGGLXYTNXLEAMENTAYFSLKNLNITDVVVLCTQTGW

SEQ ID NO: 227276 - protein, 387 aa, Glycine max
  Clone ID: PAT_MRT3847_4725C.1.pep
MVLQRLVLVGHSLMLMIHLYGRVGPPLPCHIYYPNRLASGWAAVPAILDRVRDGVLKKVNSKGGLSKKLFHLAYSRRLQAINGCWFGAWGLEKALWNFLVFKKVQAILGGRIPFILCGGAPLRLIVDIKYNHHFIAPIGQGYGLTETCAGGSFSDFDDTSVGRVGPPVPCSYIKLIDWPEGGYSTSDSPMARGEIVIGGPNVTLGYFKNEEKTKESYKVDERGMRWFYTGDIGRFHKDGCLEIIDRKKDIVKLQHGEYVSLGKVEAAVSASPFVDNIMLHADPFHSYCVALVVVSHSALEQWASKQGIAYSDLSELCSKEETVKEVHASLVKEAKTARLEKFEIPAKVKLLSEPWTPESGLVTAALKLKREILRKTFQADLSELYAS

SEQ ID NO: 227277 - protein, 78 aa, Glycine max
  unsure (1)..(78): unsure at all Xaa locations
  Clone ID: PAT_MRT3847_47260C.1.pep
TQDYLNSIIWQADYGCACKKFYSRDAXLMHXNNYNELDWLGNQDDFKRDEAADFDHFSHETRHVCYIAEIHGASGDYC

SEQ ID NO: 227278 - protein, 451 aa, Glycine max
  Clone ID: PAT_MRT3847_47261C.1.pep
MASPSELSLDCKPQSYSLLLKSFGDQTDHSYKLEEFLNRLEEERLKIDAFKRELPLCMQLLTNAMEASRQQLQAFKVNHGAKPVLEEFIPMKHLASESSEKATNMSDKANWMTSAQLWSQASSEGTKQQPPITTLKESDIGFSISPKLALDNKQRNGGGAFLPFSKERNSCQGSTLRPLPELVLASAEKEMEDKKRAEVEIKGVSCQSRKENSGSDGAVVDQGKGGSPVASSHAQTTTTTTSAQTHRKARRCWSPDLHRRFVNALQMLGGSQVATPKQIRELMKVDGLTNDEVKSHLQKYRLHTRRPSPSPQAGAAAPQLVVLGGIWVPPEYATAAHTATPTLYGAHPTSHAPPPHYCAATPMPQDFYTTAPPQPLLPPPPPHHNALHHLHMYKAAPHGQGSPESDVPSNGERSESIEDGKSESSSWKGENEGERKGISKGSNGSEITLKF

SEQ ID NO: 227279 - protein, 58 aa, Glycine max
  unsure (1)..(58): unsure at all Xaa locations
  Clone ID: PAT_MRT3847_47262C.1.pep
ALAEGCGETDPREIGIKELRERKIRFTMAGCXPDGSYQYGGGDELIGIDSWKRHVGGD

SEQ ID NO: 227280 - protein, 145 aa, Glycine max
  unsure (1)..(145): unsure at all Xaa locations
  Clone ID: PAT_MRT3847_47263C.1.pep
SPQAGAAAPQLVVLAGIWVPPEYATAAHTATPTIYGAHPTSHAPPPHXCAATPMPQDFYTAAPPQPLLPPPPQHHNALHHLHMYKAASHGHGSPESDVPGGGERSESIEDGKSESSSWKGESGENEGERKGIGEESNGSEITLKF

SEQ ID NO: 227281 - protein, 41 aa, Glycine max
  Clone ID: PAT_MRT3847_47264C.1.pep
MRARFPLLPLGAVLLASAAVSFDIAYCDKQNPSHNKCLRSC

SEQ ID NO: 227282 - protein, 112 aa, Glycine max
  unsure (1)..(112): unsure at all Xaa locations
  Clone ID: PAT_MRT3847_47265C.1.pep
INVRISELLIDSINSTPLAILVGSFFNYFVNNILPYMVMTNNLSYHFSIKKKLTNVTSVSXDGYLAETSHITSIGNILYGNYSIXLIITSIILLLAMVGAIVITLKPQTNSK

SEQ ID NO: 227283 - protein, 259 aa, Glycine max
  Clone ID: PAT_MRT3847_47266C.1.pep
MTHVVDSISSFICLVSWDFQPYIAVCYDGDCSGIEDDITHAILVVGNGSEGDEDYWIVKNSWGTSWGMEGYIYIRRNTNLKYGVCAINYMASYPTKEPTAPSPSSPPSPPSSPPPSPLTPPALPPPSPPATPPLSPPLPPATPPPLPPPPPSKCGQFSYCPAHETCCCLYEFFGFCLVYGCCEYKNAVCCIWTEYCCPSDYPICDIRDGLCLQKHGDLMGMAARRRQKGRHKLPWTKFEQTEKTYHHLQTGRNAFAAVL

SEQ ID NO: 227284 - protein, 60 aa, Glycine max
  Clone ID: PAT_MRT3847_47267C.1.pep
SFSPAPLFTLCLSCPLSKTQKGFHNIKAIICSQPKKKKKDSPPAVYSARRPVNLVRHIIH

SEQ ID NO: 227285 - protein, 50 aa, Glycine max
  Clone ID: PAT_MRT3847_47268C.1.pep
NKTPHLYDLMQHALLLSSSMATLIPPHSSGTTTTVVCCDHYGDSLDLPRT

SEQ ID NO: 227286 - protein, 77 aa, Glycine max
  unsure (1)..(77): unsure at all Xaa locations
  Clone ID: PAT_MRT3847_47269C.1.pep
TFPLSSYSPVIPPKGLFKSNPALLTNSFTKPQIIKFLXGSIPTFFAHFTPPLEPLPLPLVIPDLFGGSFFHCPFVFP

SEQ ID NO: 227287 - protein, 164 aa, Glycine max
  Clone ID: PAT_MRT3847_4726C.1.pep
KTQRLEELAIKQSRQLIPVTPSMPKALVNNSEKSKPKTAVRNAEMNMSVKSMPQQPSALHIVNHSVRSGNAKVDAPKTSGKFTDLKSVVWENGVSPTTPKDPSSQTNHSNIRTGNNLAVASAAASTPLKKTNNIKSPTERKPISLDQKLGSTMDKKNSISQVQS

SEQ ID NO: 227288 - protein, 51 aa, Glycine max
  Clone ID: PAT_MRT3847_47270C.1.pep
GRHPLSHFILCIEHLMRLAPWWLPSSPHASRHSLSVFCQFHVCCVLRLIPF

SEQ ID NO: 227289 - protein, 57 aa, Glycine max
  unsure (1)..(57): unsure at all Xaa locations
  Clone ID: PAT_MRT3847_47271C.1.pep
WXVLGGAGCXAXXCFXXLXXGGAPGXFSPLXVVXXSXWXLACXSSXWXLVXXXXGXP

SEQ ID NO: 227290 - protein, 129 aa, Glycine max
  unsure (1)..(129): unsure at all Xaa locations
  Clone ID: PAT_MRT3847_47272C.1.pep
MGLPWYRVHTVVLNDPGRLLSVHIMHTALVAGWAGSMALYELAVFDPSDPVLDPMWRQGMFVIPFMTRLGITNSWGGWNITGGTITNPGIWSYEGVAGAHIVFSGLCFLAAIWHWVYWDLXIFCDERTG

SEQ ID NO: 227291 - protein, 54 aa, Glycine max
  Clone ID: PAT_MRT3847_47273C.1.pep
VVSSGKYFALRMNPPPSLPARIIKVGSSYGFSSSFFFVSLSESRVERAKIRGGA

SEQ ID NO: 227292 - protein, 47 aa, Glycine max
  Clone ID: PAT_MRT3847_47274C.1.pep
ERYNKIGSFRESACVQNRFLLEREEVLAVSQWFKRYTSIKWSYFGQY

SEQ ID NO: 227293 - protein, 59 aa, Glycine max
  Clone ID: PAT_MRT3847_47275C.1.pep
FVLEKKLASSQVPEDEQINLLKDLELKETEYMRLKRHKICVDDFDLLTIIGRGAFGRLC

SEQ ID NO: 227294 - protein, 55 aa, Glycine max
  Clone ID: PAT_MRT3847_47276C.1.pep
ADAQPSTVKGLAGTKLYFKPFRQNFIPKTIKSGADETKYGDERVYFDLEDLCNTT

SEQ ID NO: 227295 - protein, 52 aa, Glycine max
  Clone ID: PAT_MRT3847_47277C.1.pep
LYDILVKMVLFSFTIAPTPVADDHEHPESAKTVSSNTVQMRTYRQSQPIHTA

SEQ ID NO: 227296 - protein, 73 aa, Glycine max
  Clone ID: PAT_MRT3847_47278C.1.pep
DLTVLDDLFGPKGHSSGGIVLLRILLPFSAGSPDVDYVRECFRALRDLLQPRLHLLQEILPQFHEKPKHIPGL

SEQ ID NO: 227297 - protein, 91 aa, Glycine max
  unsure (1)..(91): unsure at all Xaa locations
  Clone ID: PAT_MRT3847_47279C.1.pep
IKGAARKCGRGVQFGEMERXQLLVHGAAYLLYDRLHTXYDYHIADVCSICGSMLTTTFIKPXNWPVRKIGGLPPGRVPEKGISHTKLFMIP

SEQ ID NO: 227298 - protein, 45 aa, Glycine max
  Clone ID: PAT_MRT3847_4727C.1.pep
SFNLLIFYPNCFFLTQIPNHKNNSLISYPFRGKQKKLKCSLILFD

SEQ ID NO: 227299 - protein, 220 aa, Glycine max
  Clone ID: PAT_MRT3847_47280C.1.pep
MEEEEHEVYGGEIPDEGEMEGDIDMSAADDEAAVDDDAAVKELDEMKRRLKEMEEEAAALREMQAKVEKEIGSVQDPANAAASQANKEEADARSVFVGNVDYACTPEEVQQHFQSCGTVNRVTILTDKFGQPKGFAYVEFVEAEAVQEALLLNESELHGRQLKVLPKRTNVPGMKQYRPRCFNPYMAYGFRRPYTPYLYSPYGYGKVPRFRRPNRYMPYY

SEQ ID NO: 227300 - protein, 117 aa, Glycine max
  unsure (1)..(117): unsure at all Xaa locations
  Clone ID: PAT_MRT3847_47281C.1.pep
HGSKIVLFCRRWCTWWSLSVVNKDGKLPLTYASILRLFGYSDSLCDVLNSCIVTSSARDMRSPCSRFVXVLVLLPCLSSAVRVARPLFSXPPVRWGLAPGPLCSLPARCLRRLAXAL

SEQ ID NO: 227301 - protein, 104 aa, Glycine max
  Clone ID: PAT_MRT3847_47282C.1.pep
GNKMLVNFEHILSVAVFNNCISVASSVSFAFFCLYFPSSSFSISTRVCHTGTFSCSLVSLVGCISVLRPSKLGCFIFAFSWFFTSIRVSAGCAFSTLVWSVTWR

SEQ ID NO: 227302 - protein, 34 aa, Glycine max
  Clone ID: PAT_MRT3847_47283C.1.pep
CGSISVATVIVSSGTNPCPTPDIYHSTYYNWCGV

SEQ ID NO: 227303 - protein, 81 aa, Glycine max
  Clone ID: PAT_MRT3847_47284C.1.pep
KMGCFFFLIQKIGHHFFAGVLFIHHHLFFEWGFFFFAQGFFSFRGCLFFLYRVPSLLGHPPICSGFRVFYKTRVYGVGFLK

SEQ ID NO: 227304 - protein, 58 aa, Glycine max
  Clone ID: PAT_MRT3847_47285C.1.pep
ISRLALILLYIFLPSSRNALKFCGYAFYLLLLTTFLLSPFLFPPPPPPPPPKKEDVIQ

SEQ ID NO: 227305 - protein, 160 aa, Glycine max
  Clone ID: PAT_MRT3847_47286C.1.pep
PTRPGEVTEEKKEVEVTEEKKEAEVIVEEKKEVEVTEEKKEVEVTEGKKEVEVIEEKKETEVTEEKKEVEVEVREEKKESEVKEEEKGREVVPEESSKSSKVTLSGLLNFIDGIWSACGGERIIVFTTNYVEKLDPALIRRGRMDKHIEMSYCCYDAFKV

SEQ ID NO: 227306 - protein, 40 aa, Glycine max
  unsure (1)..(40): unsure at all Xaa locations
  Clone ID: PAT_MRT3847_47287C.1.pep
VRTVTIYSNNTEILTEISMHLPLYYLXTNPVDLVMVPNPH

SEQ ID NO: 227307 - protein, 72 aa, Glycine max
  Clone ID: PAT_MRT3847_47288C.1.pep
HNHHLNCNLLCFQLHHYQFNYVFTSFPFNLNTVIFKCSFLPDNNIGKSYEKFIPLFLVSTQKEIVFLLNSSS

SEQ ID NO: 227308 - protein, 96 aa, Glycine max
  Clone ID: PAT_MRT3847_47289C.1.pep
TRTERTLACLGLSTSPTRSALSGYRVICKKEIATSETALTLLAKVLHLSYCNRYRPWTSSKPYTPLLLLLLNSIIYLTRTLLTLLLQLLLPQIPHS

SEQ ID NO: 227309 - protein, 100 aa, Glycine max
  unsure (1)..(100): unsure at all Xaa locations
  Clone ID: PAT_MRT3847_4728C.1.pep
VQYVSSLLRCGLKTIXGLINSGGYTIYVXIHNRPYNVIKNCNYTXSIDSIHTREWNCSTANVFCXRXLYQSIATSTFPKINSLSFIEVIVHKDYTTQDFA

SEQ ID NO: 227310 - protein, 117 aa, Glycine max
  Clone ID: PAT_MRT3847_47290C.1.pep
VCYFCNHTLLATQHRAPCLPVTQPKSTPSPKPRYPSPVRACFSTLRFSARRGLVWQTYFRVTDLGVPARVGSRPMSVSWFRALRASSSQRAPACPIFLFYLATGRLLLAWPSFCVFL

SEQ ID NO: 227311 - protein, 73 aa, Glycine max
  Clone ID: PAT_MRT3847_47291C.1.pep
VRCKLLGVSYIHINIVSSLLLRQVLMISQNPPKCPGPGGPGAPQPGGPPGPRLPGPILSYGFLSRQRKHFFFF

SEQ ID NO: 227312 - protein, 68 aa, Glycine max
  unsure (1)..(68): unsure at all Xaa locations
  Clone ID: PAT_MRT3847_47292C.1.pep
LQKPKGMDCERGTMFGXRDLIGDPRNLKRMREAHCPMGADITHSLQQASRKMLDGGGVASGCLIELIP

SEQ ID NO: 227313 - protein, 58 aa, Glycine max
  Clone ID: PAT_MRT3847_47293C.1.pep
VAPLATGSSDKSVSLWDLNMRAYVHTMSNLSVQVWEVAFIPPAGSYVLGGRLASVSYD

SEQ ID NO: 227314 - protein, 81 aa, Glycine max
  Clone ID: PAT_MRT3847_47294C.1.pep
GDELVSKAACSLWDHHAPAIGNDTCNFSAIGSLKHSSTMGQIHLARPPCAGIVHVVSFNKLVVYCYIEMVVCDMSPLAMFW

SEQ ID NO: 227315 - protein, 38 aa, Glycine max
  Clone ID: PAT_MRT3847_47295C.1.pep
TLEEPYSDPSEHTNGGQFNLFKLDGECLLILPRACALP

SEQ ID NO: 227316 - protein, 44 aa, Glycine max
  Clone ID: PAT_MRT3847_47296C.1.pep
IWKGVAYPSQGLYDTETALPNIRKLTGFDHGNSFTNLLSWIHIK

SEQ ID NO: 227317 - protein, 65 aa, Glycine max
  Clone ID: PAT_MRT3847_47297C.1.pep
HVYVSKIISVYSFHHQKKKKKKKKKKKKKKKKKKKKKKKKKKKKKRFKRVGGARFKESKFTTPLL

SEQ ID NO: 227318 - protein, 48 aa, Glycine max
  Clone ID: PAT_MRT3847_47298C.1.pep
LGFSTFNKQIKTQRIEKRSFQCYDIHLCTKTSGFYDTIQDDVYGGPTL

SEQ ID NO: 227319 - protein, 53 aa, Glycine max
  Clone ID: PAT_MRT3847_47299C.1.pep
CSLFKLEDIKVLLTDLNCSIVLLTYCTPYIVSSNLNFILCQKFLSKLNLLFIK

SEQ ID NO: 227320 - protein, 180 aa, Glycine max
  unsure (1)..(180): unsure at all Xaa locations
  Clone ID: PAT_MRT3847_4729C.1.pep
MGRKEKQNTKAIEEERDQDNFNGASTPPLVFSSDDDEANQDLSLKIIKKAMRMRTAKHAPNDDVSSPFSQKPDLALPPSGGVSDGPSAIADSEVMEKKKTAKLKVEAGDQSVVIAEEQEMEETINATENHVEGRPEIGXNMVLRKLLRGPRYFDPPXNSWGACFNCGEEGHAAVNWSTVK

SEQ ID NO: 227321 - protein, 83 aa, Glycine max
  unsure (1)..(83): unsure at all Xaa locations
  Clone ID: PAT_MRT3847_472C.1.pep
VISKELGKCMMINKSSVHEDANEDGXLGAWAMGLGNKNIDDADMQRGTAPDXNWNALASEKRVVXFDWSGRGNRKAVERDKLV

SEQ ID NO: 227322 - protein, 59 aa, Glycine max
  Clone ID: PAT_MRT3847_47300C.1.pep
SNNIVPSKFPKSCVCPFHIIPFFIIYYVKILNEDIPPNILKLLFSKLTQQKLIQIMINY

SEQ ID NO: 227323 - protein, 105 aa, Glycine max
  unsure (1)..(105): unsure at all Xaa locations
  Clone ID: PAT_MRT3847_47301C.1.pep
VXXXLXGVXXXXGXVXXXXXXXLXXXXVWXXXCXXVXXXXXXXFFXFCVGXXLGXXCXGXWXVXXXXCXXXXXXXXXVXXFXXVXFGCXCLXXLXFVXXXVXVXX

SEQ ID NO: 227324 - protein, 34 aa, Glycine max
  Clone ID: PAT_MRT3847_47302C.1.pep
DDSARAPKLGMRLDFDLNAFKENVLSSLYLRDGT

SEQ ID NO: 227325 - protein, 151 aa, Glycine max
  Clone ID: PAT_MRT3847_47303C.1.pep
MEDVQQEPAQTPKKSNVQESDIQFRCLDQVDSLGLILITNRSRYLINWLVNSMLKLKHPNTQGVSLVKIYGPKVKFDRGPALAFNIFDWKGERVEPALVQKLADRSNISISYAFLHHIWFADKYAQEKGRVLHTTVVGDQEVVTTTNKKKD

SEQ ID NO: 227326 - protein, 214 aa, Glycine max
  Clone ID: PAT_MRT3847_47304C.1.pep
MMANTIFTQTITCLAVGKYPASNVDHPNIHPLRFNSKLKENNRFSVPEKNLALRFQNGSTRKMNMAVYASIIPGDPIDPSPGSPGSWKIWIIGTIFTILVSFTRGKWGPLLQLKEKVETTIDEAQRVVDIIEDVAEGVDKVAEEAVKHLPDGKFRDAVEFVEKVAEDIDKGAERAEDALEKVENMEKEFESFIESTTHHQENSVTTTAEAKEQK

SEQ ID NO: 227327 - protein, 101 aa, Glycine max
  Clone ID: PAT_MRT3847_47305C.1.pep
TNLKNVFSPRKIWIIGTIFTILVSFTRGKWGPLLQLKEKVETTIDEAQRVVDIIEDVAEGVDKVAEEAVKHLPDGKFRDAVEFVEKVAEDIDKRAERAEDA

SEQ ID NO: 227328 - protein, 90 aa, Glycine max
  unsure (1)..(90): unsure at all Xaa locations
  Clone ID: PAT_MRT3847_47306C.1.pep
AAAAVAPPPPAVSLMNPTENSVKFAPPPSLAASRSEEKESKSKSSCHNGLCKQNMGAXAGVVTAGGICLGFFAGALDWVXSKKLNRVKKL

SEQ ID NO: 227329 - protein, 91 aa, Glycine max
  unsure (1)..(91): unsure at all Xaa locations
  Clone ID: PAT_MRT3847_47307C.1.pep
AFALFFCWDSENTLAHNSSAELLSCQLXTSYLANLYFXDGAPINXGVLRQPIHITEGYYVXKQDVSIEYDACTFANDCGSLSVGKVVNHIH

SEQ ID NO: 227330 - protein, 235 aa, Glycine max
  Clone ID: PAT_MRT3847_47308C.1.pep
VEQGESIAAPRSLPLASRSGPASGPVPAPSAVAVVTASAPWPSPDPSSPGIRIPLGVLSFPAPPPPSLASGVGGWGVPFPHLSGLGAPMLRGLGQFNRHLKWHATRESEENGLISASRWYLKSNDWILGKAEYPSENEFTDSVDTSTRPADKSQEDAMVLADEKQCLCVLCGELFEDFYCQETGEWMFKGAVYLANSDSKSEMGIRDVSTGRGPIIHASCLSDNSVSSVLETGQD

SEQ ID NO: 227331 - protein, 142 aa, Glycine max
  unsure (1)..(142): unsure at all Xaa locations
  Clone ID: PAT_MRT3847_47309C.1.pep
PPGAPPAASGGTHARHTPAPTETPGHDPAPQXGGGTPGHPRGNAPGAAANRDAXEAXAQARKEGRDPAREGKEXTREASKWSPEPPAAXEARKARKPQPEAMDTRKQRAKNRAQSTKGMSRNKPQPNKQRTRAAAHEKQTTR

SEQ ID NO: 227332 - protein, 70 aa, Glycine max
  Clone ID: PAT_MRT3847_4730C.1.pep
MRGFFVTKKQKWVGGVSAPHTNLLSAKGGFRGKSLGKTIFLTKPPQAILALTSVFPRARREKTNPNFTGF

SEQ ID NO: 227333 - protein, 83 aa, Glycine max
  Clone ID: PAT_MRT3847_47310C.1.pep
GTPPMTPPAIRASHILPRAYLGALMTLSLATMSWSERYSTVVAWQYPAPPSFIHALPRKTKELFIANQPNRRRFTRGIGVSVI

SEQ ID NO: 227334 - protein, 40 aa, Glycine max
  Clone ID: PAT_MRT3847_47311C.1.pep
SATPIYDSAMAAIRLYSTSVGSACMLGILSKMIATHVPIF

SEQ ID NO: 227335 - protein, 107 aa, Glycine max
  unsure (1)..(107): unsure at all Xaa locations
  Clone ID: PAT_MRT3847_47312C.1.pep
LEPVDPSYLKTLGQVHSGWNFGGIGELVDNSRDAQATKKDIFVDLIHLKKSGKDVPMLSVIDDGNGMNHAEGIKMVSFGHKPSYXDDQDHIGQFGGGFKTGAMKLGR

SEQ ID NO: 227336 - protein, 132 aa, Glycine max
  Clone ID: PAT_MRT3847_47313C.1.pep
GDGSDLIGQICNENPEKKIECTNILRADPTVLGAKNLLQLSEAILNLAVNKTEKAEDFLKGLANTTDVPAIANCALYYENAVERFMNSLQKLKCQDLKVANYLAAIAGDEPSSCETELSAAHIVNHAISAVN

SEQ ID NO: 227337 - protein, 98 aa, Glycine max
  unsure (1)..(98): unsure at all Xaa locations
  Clone ID: PAT_MRT3847_47314C.1.pep
KSXIYKSSGKKLVLLLLKLPISPLLSDSDVCVHCLKQLGFRTANQICSKLNECQDLSNLVKYNNFLVYFLRQMYGLHILKVLYIHLIVEQKIIVGIQC

SEQ ID NO: 227338 - protein, 525 aa, Glycine max
  unsure (1)..(525): unsure at all Xaa locations
  Clone ID: PAT_MRT3847_47315C.1.pep
MGKEKVHINIVVIGHVDSGKSTTTGHLIYKLGGIDKRVIERFEKEAAEMNKRSFKYAWVLDKLKAERERGITIDIALWKFETTKYYCTVIDAPGHRDFIKNMITGTSQADCAVLIIDSTTGGFEAGISKDGQTREHALLAFTLGVRQMICCCNKMDATTPKYSKARYDEIVKEVSSYMKKVGYNPDKIPFVPISGFEGDNMIERSTNLDWYKGPTLLEALDQINEPKRPSDKPLRLPLQDVYKIGGIGTVPVGRVETGVLKPGMVVTFAPTGLTTEVKSVEMHHETLTEAHPGDNVGFNVKNVAVKDLKRGFVASNSKDDPAKEAANFTSQVIIMNHPGQIGNGYAPVLDCHTSHIAVKFAELLTKIDRRSGKELEKEPKFLKNGDAGLVKMIPTKPMVVETFSEYPPLGRFAVRDMRQTVAVGVIKSVEKKDPTGAKVTKAAQKKAKXLCWMVYQGNSIIMTTIXWFLVRSTSFFRVGNLFIRFCVRFAPSSRNFCSQNWVLDRRWQGYFFFIVMLCFYYNVSL

SEQ ID NO: 227339 - protein, 90 aa, Glycine max
  unsure (1)..(90): unsure at all Xaa locations
  Clone ID: PAT_MRT3847_47316C.1.pep
SSFKXSLILGTSEKEEELAQSCEAALKSSPDCAIKKKDVYXVSISXRQCDVEQXDSAKKXVXVKGKMSRVTXNDDASTSNLDPAMLKRNS

SEQ ID NO: 227340 - protein, 87 aa, Glycine max
  Clone ID: PAT_MRT3847_47317C.1.pep
LEHLLVNSKLPIHATREGIPCQVRKQHASNAGLQGIQSLIQSCTNNDKDCHTAVELQVCNPNSIGHLTLISQKILSIQMYKSKGPRT

SEQ ID NO: 227341 - protein, 116 aa, Glycine max
  unsure (1)..(116): unsure at all Xaa locations
  Clone ID: PAT_MRT3847_47318C.1.pep
QSSPTPPAEPAGQAQRAEANXDRPPGEDDRQEGAAHTGDKKPGAQAPRPTQTKRAATPKERQPEXPGDKXPRGATTXDERRGGTEHEGHEPAPGGXQKHATPKRPPXEEKPTKAAQ

SEQ ID NO: 227342 - protein, 60 aa, Glycine max
  unsure (1)..(60): unsure at all Xaa locations
  Clone ID: PAT_MRT3847_47319C.1.pep
VMNTFGGCNRGGNWNTGGGCHLETLPDLGSLPPVSDIHFRNVADILSERMNXSEVLNLDL

SEQ ID NO: 227343 - protein, 104 aa, Glycine max
  unsure (1)..(104): unsure at all Xaa locations
  Clone ID: PAT_MRT3847_4731C.1.pep
HHARCGQLSINLDVDVKKCDSTDGLLTLLVHXTPPAHDGHWAPHMQLEAFEKNHISDKGLQPVRVKIHVCKLFSDVDPPRTMRIPMSLHSLDIGHVKHSVSLHA

SEQ ID NO: 227344 - protein, 113 aa, Glycine max
  unsure (1)..(113): unsure at all Xaa locations
  Clone ID: PAT_MRT3847_47320C.1.pep
GAPAVPSAIWDFGAFPMDGYEQWPGHVDRSWSXSCSSTSFSMRWCVLXAPAGALSTTGGGCGGAVPPPLHFPVPPFGIYSVQPSGWDFSSVFFCYFCAPSLNFSIPVSLCSRI

SEQ ID NO: 227345 - protein, 69 aa, Glycine max
  Clone ID: PAT_MRT3847_47321C.1.pep
GPAGIPVRLQRLNIDNRITVAAPYIEQAFVLDTKNLQVFLLLVPIAKGRKHSLCWPQTCESFSVTLAIC

SEQ ID NO: 227346 - protein, 56 aa, Glycine max
  unsure (1)..(56): unsure at all Xaa locations
  Clone ID: PAT_MRT3847_47322C.1.pep
GSXRRTWXQTLXXSXLMESXFRXXDHKKRXSXXXYXXLXXXVLEHXRIPSXRTXAG

SEQ ID NO: 227347 - protein, 62 aa, Glycine max
  Clone ID: PAT_MRT3847_47323C.1.pep
LPLRPLLRFDEILTHLGGLVIRSCARLTLTTSTPVKGTMWDRFSTLLQTSSSVLLHLLTVLL

SEQ ID NO: 227348 - protein, 95 aa, Glycine max
  Clone ID: PAT_MRT3847_47324C.1.pep
EYYAVKDSRNPNLRSVPCMPIKADLKWPKEAWILGQDVSAGFTPSMYIILFPHFWLPLCALLHTTASHPLPIAAILYLSFWFRPCLLSLLRGTGS

SEQ ID NO: 227349 - protein, 127 aa, Glycine max
  Clone ID: PAT_MRT3847_47325C.1.pep
SEVKGRTFASSPFDDPILSTLAPEGASSLGMFDVHNQLGSSRPHESVSALRSSQELVSSCKSSCRLFGFSLTEDTHLAKKEASASTITLPLSSGPSFTRLVEDEFHPGHSLPSKGVGSNCTKGVLQY

SEQ ID NO: 227350 - protein, 345 aa, Glycine max
  Clone ID: PAT_MRT3847_47326C.1.pep
MASCTAPPSLMLVHSQDLSPSLRSFSHRPISRTTFSLYPLLLKPSKWLHIEPKSRTCHALVAALSAEVQVPETFDDTEEDDGADGSTATNTVPTTKPKKGKAALPLKRDRTRSKRFLEIQQLRERKKEYDLKTAISLVKETAKTKFVETVEAHFRLNIDPKYNDQQLRATVNLPKGTGKPVKVAVLTQGEKFDEAKNAGADLVGGEDLIEQIKAGFMEFDKLIASPDMMPKVASLGKILGPRGLMPNPKAGTVTPNIPQAIAEFKQGKVEYRADKTGIVHLPFGKADFPEEDLLVNLLAAVKSVEANKPSGAKGVYWKSAHICSAMGPSIRLNIREMLDYRPPSE

SEQ ID NO: 227351 - protein, 52 aa, Glycine max
  Clone ID: PAT_MRT3847_47327C.1.pep
GFKLIISTHQVYTTDDITSNTRFSQFGENVSEENNQCISPSHIPLLIHVANK

SEQ ID NO: 227352 - protein, 115 aa, Glycine max
  Clone ID: PAT_MRT3847_47328C.1.pep
KTNLLFKAQGPQTGVIPLTLGLKKKMGRKRPGAHPPPQNFNKTNFEPFGVPGFNFNPESPLNVNYPPFLGFPKTLAPKLTPRHGESRNGGNFFLQGNGPFIFLNPGAQTLWALGG

SEQ ID NO: 227353 - protein, 303 aa, Glycine max
  Clone ID: PAT_MRT3847_47329C.1.pep
PRVPARPLERTEEECLKMVENNMDKNPELALMGSCVLVMLMKDQDVYVMNLGDSRAILAQERPNDRHSNPCLIKDDMRHRNRSRELLVGMELDRISEESPVHNINKHVNMINKNREISVCRLKMRAVQLSTDHSTSIEEEVSRIRAEHPDDNQAIFNDRVKGQLKVTRAFGAGFLKRPSFNEPLLKMFRVDYVGNAPYLSCASSVLHHRLSSSDRFLVLSSDGLYQFFSNEEVVAHVTWFMENVPEGDPAQYLIAELLFRAAKKNGMDFHELLDIPHGDRRKYHDDVSVMVVSLEGRIWRSSG

SEQ ID NO: 227354 - protein, 49 aa, Glycine max
  Clone ID: PAT_MRT3847_4732C.1.pep
RKIPSFEGQETIKTKYPSFYDKLETICVQKMLICTCWGLEVSFIIYFCR

SEQ ID NO: 227355 - protein, 60 aa, Glycine max
  Clone ID: PAT_MRT3847_47330C.1.pep
FSPIAPRKLSLLNANLSRLLVFPPFSSLSLSPFYHLLTTMPFYHLLTTMQAHQSAQRFQA

SEQ ID NO: 227356 - protein, 122 aa, Glycine max
  Clone ID: PAT_MRT3847_47331C.1.pep
LFSLFFMSSSRSICSLCLCVSLNLVSSQIRRHTHFRSESPSMAESEFEPNVDLEEKSWHLLALLLRIGHAVYPQRLAAQCRLFAASPNFVCHVGTLRGSPISVTDNGLVTRSVGTVFPLGSF

SEQ ID NO: 227357 - protein, 287 aa, Glycine max
  Clone ID: PAT_MRT3847_47332C.1.pep
HRICLQTGKRPFPFLSCQPTRPPTRPPTRPPTRPRTRGIREPVSGSLLYGNNIISGAIIPTSAAIGLHFYPIWEAASVDEWLYNGGPYELIVLHFLLGVACYMGREWELSFRLGMRPWIAVAYSAPVAAATAVFLIYPIGQGSFSDGMPLGISGTFNFMIVFQAEHNILMHPFHMLGVAGVFGGSLFSAMHGSLVTSSLIRETTENESANEGYRFGQEEETYNIVAAHGYFGRLIFQYASFNNSRSLHFFLAAWPVVGIWFTALGISTMAFNLNGFNFNQSVVDSQG

SEQ ID NO: 227358 - protein, 102 aa, Glycine max
  unsure (1)..(102): unsure at all Xaa locations
  Clone ID: PAT_MRT3847_47333C.1.pep
MGASVIGAGDNTLTEMSAFGRSDGDIGAGYXATATQFRKHLPDYIRWDMYTSPIYIVPCLLTAGIKYMRHLSDSHISGLSDDGRYIFRTNHVRNLAIAEEEK

SEQ ID NO: 227359 - protein, 197 aa, Glycine max
  unsure (1)..(197): unsure at all Xaa locations
  Clone ID: PAT_MRT3847_47334C.1.pep
MPGKPDTDDWRVERGEQIQFQSSIYSHHQPWWRGVGENASKSSSDDQLNGSIVNGGGVPKEYQNIKHAMLSTPFTMEKHLAPNPQMELVGHSVVLTSPYSDAQYGQILTTYGQQVMINPQLYGMHHARMPLPLEMEEEPVYVNAKQYHGILRRRQSRAKAEIEKKVIKNRKPYLHESRHLHAMRRARGNGGXRFLNT

SEQ ID NO: 227360 - protein, 53 aa, Glycine max
  Clone ID: PAT_MRT3847_47335C.1.pep
LYIKGTSQFTFKTIFPYKGEGTPFLKAPNLLILPSKCFREGTLLGKVPVTMNF

SEQ ID NO: 227361 - protein, 75 aa, Glycine max
  Clone ID: PAT_MRT3847_47336C.1.pep
NVELMGVLVKSDTQGSNLAHTVQGEISQDINIREVYPALINDATELFCTGSRWHQITGTGNRLILKRGINQLLLE

SEQ ID NO: 227362 - protein, 303 aa, Glycine max
  Clone ID: PAT_MRT3847_47337C.1.pep
MPGKPDTDDWRVERGEQIQFQSSIYSHHQPWWRGVGENASKSSSDDQLNGSIVNGITRSETNDKSGEGVAKEYQNIKHAVLSTPFTMDKHLAPNPQMELVGHSVVLTSPYSDAQHGQILTTYGQQVMINPQLYGMYHARMPLPPEMEEEPVYVNAKQYHGILRRRQSRAKAEIEKKVIKNRKPYLHESRHLHAMRRARGNGGRFLNKKKLENNNSNSTSDKGNNTRANPSTNSPNTQHLFTNNLNLGSSNVSQATVQHMHTEQSFTIGYHNGNGLAALYRSQANGKKEGNCFGKERDPNGDFK

SEQ ID NO: 227363 - protein, 67 aa, Glycine max
  Clone ID: PAT_MRT3847_47338C.1.pep
FSLLFASGFYFPFYGFHANIQGSGNPPVQGGTKTKGIVITSELIRSGIPFFVAPKNGRCFEYRKCFF

SEQ ID NO: 227364 - protein, 274 aa, Glycine max
  Clone ID: PAT_MRT3847_47339C.1.pep
MDAAASQSLYPLHRCKTVHLVRHAQGVHNVAGEKNHDAYNSYEFFDAHLTSLGWEQVNNLRKHVKASGLSKNIELVVISPLLRTMQTAVGVFGGEAYTDGIGEPPLMTENVGHSDHPAVSSMNCPPFIAVELCREQIGVHPCDKRRTISEYRNMFPAIDFSLIESDEDILWESDVREKTDEVSARGLKFLEWLWTREEKEIAVVTHSSFLFNTLRAFGNDCHPDIKSEICTHFANCELRSIVIIDRGMIGSSESTTNYPGKIPRGPDVPSEAAD

SEQ ID NO: 227365 - protein, 59 aa, Glycine max
  Clone ID: PAT_MRT3847_4733C.1.pep
TYVRNKILGSTEWSWSAMFNPYLVDVMTIGGLYIVLLRQFLGFQSVRCSSMIVHISNPF

SEQ ID NO: 227366 - protein, 72 aa, Glycine max
  Clone ID: PAT_MRT3847_47340C.1.pep
IRSGAADKAVEHMYYSLRIVIAVKGMTCVMVRVAAEEEVSDDSSVDIMKAVMQHLGFLLSAAVQQQGSCLVT

SEQ ID NO: 227367 - protein, 62 aa, Glycine max
  Clone ID: PAT_MRT3847_47341C.1.pep
MGALLWSLLLLLHEAKGFSGDDEDPEEVVAVLQESVNLSLEIPSNEEIDNIIWFSQKNLATV

SEQ ID NO: 227368 - protein, 60 aa, Glycine max
  Clone ID: PAT_MRT3847_47342C.1.pep
GQLFQSFPTQKSITMAPITTASTKKCNSLLDGILNTKYPTLFLKRVIVGSSKANPSNSHF

SEQ ID NO: 227369 - protein, 62 aa, Glycine max
  Clone ID: PAT_MRT3847_47343C.1.pep
LCIRLISFSLFYAFWFSLIPCKERTKYNLSVSEIYSFRLTDLGAEECGSLHRDPVLNPHTGA

SEQ ID NO: 227370 - protein, 55 aa, Glycine max
  Clone ID: PAT_MRT3847_47344C.1.pep
MMATEYYYLLFLLWFLSSLTFLLDNHVVFLRVKILLLLGDIHSFAYSTNAWAFHS

SEQ ID NO: 227371 - protein, 62 aa, Glycine max
  Clone ID: PAT_MRT3847_47345C.1.pep
RKAGYIKVWKKRKPSNPRWVERGPEPYGNILRRRTRMVTPTETRLLLHDESDYITWRPPRCF

SEQ ID NO: 227372 - protein, 386 aa, Glycine max
  Clone ID: PAT_MRT3847_47346C.1.pep
YEVLNMSNGGGKTGRQLEQPGTWGRRKVGGGDDYARAIAKIAVAQVCESEGFQAFQQSALEALSDVVARYILNVGKSAHCHANLSGRTECHAFDVIQGLEDMGSVQGFAGAADVDHCLESSGVIREIVHFVNDAEPVMFAHPIPRFPVVKERVPNPSFLQKGEEPPGEHIPAWLPAFPDPQTYSQSPAVNGRGTEPRAVKFDQERESGKGEWPALNLQQQMVSNMFEKSASIDPADAKAKRVAAEGNPFLAAPLKIEDKEVASVPPPAKLFNDEALDNPVVENLVENEPISALETFAPAIEAMKSTICDSKEDQTKFCANEKPTVRFKIGIKNKLLGKSIGLIPQKEEHEKTLPWFAMEDEKDDRKRRAEKILREFLENPDQLVQL

SEQ ID NO: 227373 - protein, 66 aa, Glycine max
  unsure (1)..(66): unsure at all Xaa locations
  Clone ID: PAT_MRT3847_47347C.1.pep
YLLIYKRWYGRALRIVINIGSSQESFSVLLFSLRXLFXENETTSNKKYKILRKNKRIRIFISYTTN

SEQ ID NO: 227374 - protein, 181 aa, Glycine max
  unsure (1)..(181): unsure at all Xaa locations
  Clone ID: PAT_MRT3847_47348C.1.pep
KGEGPVVLFLHSFPELWYSWHHQILSLXSLSYHTITPNLHGYSDTKTPPSISSYNCFHIVGDLIALIDSLGVQQMFLVAHDWGAIISXYLYMFHPNKIKAYIYLSIPLLHRDPNIRTINNIHTLYKDNYYIYRFQKPRKIRTQMTKVSTKYILENILTTHNPSPAILPRRKCQFSAEIPNS

SEQ ID NO: 227375 - protein, 51 aa, Glycine max
  Clone ID: PAT_MRT3847_47349C.1.pep
NIKFWVSYGSLGDLLSLNEDLGSLAPFSDFLRQHNTAIVFLHTTFFIGVTN

SEQ ID NO: 227376 - protein, 105 aa, Glycine max
  Clone ID: PAT_MRT3847_4734C.1.pep
SRKLNPQFLLGRATLSRAKKIFKPNPFFFNRNHGPATENRFKPKGKLKTKIMANPLGVRSRFFRKKKKSPRGLPQKNAFVFHRIRRLRRGAQGKMGTSKPVNHLL

SEQ ID NO: 227377 - protein, 58 aa, Glycine max
  unsure (1)..(58): unsure at all Xaa locations
  Clone ID: PAT_MRT3847_47350C.1.pep
NYKCYILDFAIVVIPLSAILLWHFGGGGGGGLLXGIDYLDFGAPVRCLCCVTKTHVLQ

SEQ ID NO: 227378 - protein, 76 aa, Glycine max
  Clone ID: PAT_MRT3847_47351C.1.pep
TCIVNYLHLLVAAPEGPLLHQWANSNLTVTFVHEGSPSDLTKRIGSKNLIARRCCAPTPRVLEPVKQIQVMVLAAF

SEQ ID NO: 227379 - protein, 268 aa, Glycine max
  Clone ID: PAT_MRT3847_47352C.1.pep
MIWKPSEASLSNNKKRPFNDHTHTPRRRLPKSLIALQHPNASSFSPHPRPCDSRMTLPVMKFSGQISYSRTFDAVEKAATKLLQILQEKTTDMMQTAIGFDIEWKPTFRKGVPPGKVAVMQICGDTRHCHVLHLIHSGIPQNLQLLLEDPTVLKVGAGIDGDAVKVFRDYNISVKGVTDLSFHANQKLGGDHKWGLASLTEKLLSKQLKKPNKIRLGNWEAPVLSKEQLEYAATDAFASWCLYQAIKDLPDAQKVTDRSGQVDAVPQE

SEQ ID NO: 227380 - protein, 92 aa, Glycine max
  unsure (1)..(92): unsure at all Xaa locations
  Clone ID: PAT_MRT3847_47353C.1.pep
DSSSPTYFDFLLLAAYLXSDMQLGLAMLCARSVRAKNTMNMMLTNELDAADSGLYYYLCGFDFATDARDSDSGDRWVGESDHGTLELGVRIN

SEQ ID NO: 227381 - protein, 79 aa, Glycine max
  unsure (1)..(79): unsure at all Xaa locations
  Clone ID: PAT_MRT3847_47354C.1.pep
NFSTTRPIGFAVFLVHLATIXITGTGINPARSLGAAIIYNRDHAWNDHWIFWVGPFIGAALAAIYHHVIIRAIPMTSRS

SEQ ID NO: 227382 - protein, 488 aa, Glycine max
  Clone ID: PAT_MRT3847_47355C.1.pep
MCSSETINIAASTQKLDVDNRIALRFYYRIADNILKQADIFRAETNIVDLYIMLLRFSSLVSETIPRHRDYRSSPQGKKEALRKKLLHSMNELEKLKPKVQQKINEFNSRRAYQPNGWEKCHSNNFMDFSPAKKQTLTSYNKKKAVIPTTGEFVYQGSRGQQFSSVRPVEENMRRLSLSLLRPKEETLSRHSILGPNGLKGQWRPPASDKGVRYPTIIDLSPVEIPSLQQPLVDGSLTKKDNSISEQHKSDLESILTQSDDCKAKHADEAPSLISFEATEIPAQIEVTRQPSPPPVLAEVQDLVPAMLPHVIEEGCKTEIPMSDSIVRAESPLQLHISTSMMESFMKLAKSNTDKNLETCGILAGLLKNRKFYITTLIIPKQEATSSSCQATNEEEIFEVQDKQSLFPLGWIHIMLPEAVAIVMAPTDSSRNHGIFRLTTPGGMSVIRQCQQRGFHPHNQPPDGGPIYDTCTDVYMNPDLKFDVIDLR

SEQ ID NO: 227383 - protein, 64 aa, Glycine max
  unsure (1)..(64): unsure at all Xaa locations
  Clone ID: PAT_MRT3847_47356C.1.pep
MAEEHRCQXPCFXANNXGFFRQXXTQNMCSKXYRDFXLXEQQSSKAKXVLNXXPSSRRDQRFFG

SEQ ID NO: 227384 - protein, 163 aa, Glycine max
  unsure (1)..(163): unsure at all Xaa locations
  Clone ID: PAT_MRT3847_47357C.1.pep
MCSSETINIAASTQKLDVDNRIALRFYYRIADNILKQADIFRAETNIVDLYIMLLRFSSLVSETIPRHRDYRSSPQGKKEALRKKLLHSMNELEKLKPKVQQKINEFNSRRAYQPNGWEKCHSNNFMDFSPAKKQTLTSYNKKKAVIPTTGEFVYXGSRGQQF

SEQ ID NO: 227385 - protein, 499 aa, Glycine max
  unsure (1)..(499): unsure at all Xaa locations
  Clone ID: PAT_MRT3847_47358C.1.pep
MCSSETINIAASTQKLDVDNRIALRFYYRIADNILKQADIFRAETNIVDLYIMLLRFSSLVSETIPRHRDYRSSSQGKKEALRKKLLHSVNELEKLKPKVQQKINEFNSRRAYQHNGWEKYHSNDFMDFSPAKKAVIPTTGEFVYQGSRGQQFSSARPVEENMRRLSLSLPCPKEETLSRHSVLGPNGLKGQWRPPASDKGVRYPTIIDLSPVEIPSLQHSLEDGSLNKKDNSISEQHKSDLESILTQSDDCKAKHADEAPSLISFEATEVHAQIEVTRQPSPPPVLAEVKDLVPAVLSHVNEEGCKTEILTSDSIVRAESPLXLHISTSMMESFMKLAKSNTDKNLETCGILAGLLKNRKFYITTLIIPKQEATSSSCQATNEEEIFEVQDKQSLFPLGWIHTHPTQSCFMSSIDVHTHYSYQIMLPEAVAIVMAPTDSSRNHGIFRLTTPGGMSVIRQCQQRGFHPHNQPPDGGPIYDTCTDVYMNPDLKFDVIDLR

SEQ ID NO: 227386 - protein, 587 aa, Glycine max
  unsure (1)..(587): unsure at all Xaa locations
  Clone ID: PAT_MRT3847_47359C.1.pep
MAMVDQPLYPIAVLIDELKNEDIQLRLNSIRRLSTIARALGEDRTRKELIPFLSENNDDDDEVLLAMAEELGVFIPYVGGVEHANVLLPPLETLCTVEETSVRDKSVESLCRIGAQMREQDLVEYLIPLVKRLAAGEWFTARVSSCGLFHIAYPSAPEAVKTELRAIYGQLCQDDMPMVRRSAATNLGKFAATVEAPHLKSDIMSVFEDLTHDDQDSVRLLAVEGCAALGKLLEPQDCVAHILPVIVNFSQDKSWRVRYMVANQLYELCEAVGPDPTRSELVPAYVRLLRDNEAEVRIAAAGKVTKFSRILNPDLAIQHILPCVKELSTDSSQHVRSALASVIMGMAPVLGKDATIEQLLPIFLSLLKDEFPDVRLNIISKLDQVNQVIGIDLLSQSLLPAIVELAEDRHWRVRLAIIEYIPLLASQLGVXFGALCMQWLKDKVYSIRDAAANNIKRLAEERGPEEFGPDWAMQHIIPQVXDMVTDPHYLYRMTILQSISLLAPVLGSEISSSKLLPLVINASKDRVPNIKFNVAKVLQSLIPIVDQSVVESTIRPCLVELSEDPDVDVRFFASQALQSCDQVKMSS

SEQ ID NO: 227387 - protein, 105 aa, Glycine max
  Clone ID: PAT_MRT3847_4735C.1.pep
LNLFYDRKDAKHLAPGKTAKTRAPESENRSRKTITSLNDASIAGFVELEESMMTLKADNTNAKAVPSGDNALGYICLYLYSAEIAPYEAYAAKRKAELEKLIKAY

SEQ ID NO: 227388 - protein, 261 aa, Glycine max
  Clone ID: PAT_MRT3847_47360C.1.pep
LSTDSSQHVRSALASVIMGMAPVLGKDATIEQLLPIFLSLLKDEFPDVRLNIISKLDQVNQVIGIDLLSQSLLPAIVELARPRHWRVRLAIIEYIPLLASQLGVGFFDDKLGALCMQWLKDKVYSIRDAAANNIKRLAEEFGPDWAMQHIIPQVLDMVTDPHYLYRMTILQAISLLAPVLGSEITSSKLLPLVINASKDRVPNIKFNVAKVLQSLIPIVDQSVVESTIRPCLVELSEDPDVDVRFFASQALQSSDQVKMSS

SEQ ID NO: 227389 - protein, 84 aa, Glycine max
  unsure (1)..(84): unsure at all Xaa locations
  Clone ID: PAT_MRT3847_47361C.1.pep
KPADRRVRLQXSKPFLTFILSCPSCYSPALFKRPHSKPSNTTITRSSSTTYILTNQKKSQKQIHTTKLPSKLFLRARNQFNNNP

SEQ ID NO: 227390 - protein, 134 aa, Glycine max
  Clone ID: PAT_MRT3847_47362C.1.pep
MAMVDQPLYPIAVLIDELKNEDIQLRLNSIRRLSTIARALGEDRTRKELIPFLSENNDDDDEVLLAMAEELGVFIPYVGGVDHANVLLPPLETLCTGEETCVRDKSVESLCRIGAQMREQDLVEHFIPLLKGWL

SEQ ID NO: 227391 - protein, 50 aa, Glycine max
  unsure (1)..(50): unsure at all Xaa locations
  Clone ID: PAT_MRT3847_47363C.1.pep
DKQCKISPCVDGRESRLKXKTQFLLSNAHXLCRGTYRRARAEFRAYVRVX

SEQ ID NO: 227392 - protein, 72 aa, Glycine max
  unsure (1)..(72): unsure at all Xaa locations
  Clone ID: PAT_MRT3847_47364C.1.pep
MLTKYTKCRGNFNCITLQYLHXLPATNNIVTYNYNTHTFNYLMRDEYTYCGSADKSMGRQWRMTLLEHIKDE

SEQ ID NO: 227393 - protein, 107 aa, Glycine max
  Clone ID: PAT_MRT3847_47365C.1.pep
MNAFKAYKACVPIAWSPNIYITLVRGIPGTRRLHRRTLEALRLRKCNRTVMRWNTPTVRGMLQQVKRLVVIETEEMYKARKQKEEAHRALRPPLVISHKPPSVTDAL

SEQ ID NO: 227394 - protein, 108 aa, Glycine max
  unsure (1)..(108): unsure at all Xaa locations
  Clone ID: PAT_MRT3847_47366C.1.pep
KKIXFFXRMXXXXERXMXFXKGNXXGDXGXVXXXDXKXRLKWKXDXXXRFIEVVXXLGGXXKGXXKKVMKXIGIXGXXLYYXKXNXXKXRLXKSXDGKSKNMKXKIXI

SEQ ID NO: 227395 - protein, 76 aa, Glycine max
  Clone ID: PAT_MRT3847_47367C.1.pep
HVRFVYASSCMFGVLRSFASPHSFRVKLVMLRTLWPLTCAVLPRVIPLSHVIKKNYKKKWFQTTNLKIKIIKKQKK

SEQ ID NO: 227396 - protein, 300 aa, Glycine max
  Clone ID: PAT_MRT3847_47368C.1.pep
MFGSKKSPLKVAKPSSVESWTNPFDSDDEGKDTKKYSSSRKTSSERALATLGVNTNPFDDDIDANKKSSSTSYAFQSANRNRYKNDFRDSGGLENQSVQELESYAVYKAEETTNSVTNCLKIAENIREEATQTLVTLHQQGEQITRSHHVAADIDHDLTRGEKLLGSLGGLFSKTWKPKKTRAITGPVIVGDDPVRRKGNHLEQREKLGLTSAPKGQSKLRSPPQEPTNAFEKVEVEKNKQDDALSDLSDLLGELKGMAVDMGSEIERHNKALNHLYDDVDELNFRVIGANQRGRRLLGK

SEQ ID NO: 227397 - protein, 51 aa, Glycine max
  Clone ID: PAT_MRT3847_47369C.1.pep
LMEFFWSLRPASLGLGTSLALVALVRARSKTNIHHLAMYLFVSHTLGLSLS

SEQ ID NO: 227398 - protein, 285 aa, Glycine max
  unsure (1)..(285): unsure at all Xaa locations
  Clone ID: PAT_MRT3847_4736C.1.pep
GLPIDHSNMVDLSTQTSGTLTRDWSPMSICPPHGRVSSSXHFLIGSSSSNAPVDVGGFHNEFGTSRNPTAPQSFHNNLTQTARGVHSNYSQRSTPTFRASSSLRLGRVAPSDDGLHMVSESYSSRQPRPLTTVGWQNNNRNGRSRIPSDRYRSLDDEGFMIVDRTSLYGPRNMLDRHRDMRMDIDNMSYEELLALGERIGHVSTGLSEDLISKYLTETIYCSSEQSQEEEACAICLEEYKNMDDVGTLKACGHDYHVGCIRKWLSMKKVCPICKASALPEDKKGK

SEQ ID NO: 227399 - protein, 539 aa, Glycine max
  Clone ID: PAT_MRT3847_47370C.1.pep
LVQTSVLVNSLSVCISLLDPKRHTFGAYYTYNRQMTNGSTVAANPETVEGMLESLGDLLKLLDVSSAENLLLTTFGKLQPPLGKHRLKIVEFISVLVTVGGEAAERKLIDLGAVQRIIHLFFEYPYNNFLHHLVENIIMSCLESKNSSLLEHLLRDCDFVGKIIQAEKLFTLEADTNKPTIPAEGKSAPRIGCIGHITRISNKLIQLGNNNSVIQEHLQGNSDWTDWYLSVLSNRNAVENVYQWSCGRPTALHDRNRDSDEDDYQDRDYDVATLANNLSQAFRYGIYNNEDIEEVHGSLERDDEDVYFDDESAEVVISSLRLGDDHESGSLFTNSNWFAFEEGRDRVGNERSTGSLASPSPTADEVFVKASGDDVIAGEDEELADTATSPEAGLKLEHGGTDKPVEWVEWRESSDANDPSDVLPNGVLEIEPGSNNPGVAESSSPSSSVALTKDEQIATDEPSASLNDSSIETSDRNKDKTEPTQGVETPSTRASATSVDDPVTEVGGDRNKDTTDNKKAVDRPVTAVEGDSNQDTTNN

SEQ ID NO: 227400 - protein, 64 aa, Glycine max
  Clone ID: PAT_MRT3847_47371C.1.pep
FRISSMKVQWVKPWAFIHKGTGYFQSNTTMKTTITIIIINIILTTNIPFLYTLNHKPTLAKTLS

SEQ ID NO: 227401 - protein, 82 aa, Glycine max
  unsure (1)..(82): unsure at all Xaa locations
  Clone ID: PAT_MRT3847_47372C.1.pep
LYDDEFKDLRACNLYCVVTHGPVXPRLRDGKSGIDALRFDNPTQSRGFTGLFNNMACRGEHVPPKVNEIFAIVGEERQVSIC

SEQ ID NO: 227402 - protein, 52 aa, Glycine max
  Clone ID: PAT_MRT3847_47373C.1.pep
LEKYLYFMCTKEKQMRRLKNYCMTSQNGQKAWGYKMDLQHLVQAQALCKRPK

SEQ ID NO: 227403 - protein, 71 aa, Glycine max
  unsure (1)..(71): unsure at all Xaa locations
  Clone ID: PAT_MRT3847_47374C.1.pep
AVFGAAVVMVAWPCHVASYQRVPLRMKTAYGERSLHVKCTRSRLAXEAHNMRAFKTIPEEGVEPADDYIKG

SEQ ID NO: 227404 - protein, 95 aa, Glycine max
  unsure (1)..(95): unsure at all Xaa locations
  Clone ID: PAT_MRT3847_47375C.1.pep
FTLPXFVFHTSISVYFTFFFLFILISCTTMSLGHTLFPQAFFSCNFNILILLESTPFNFYPIIAFGTFFFSNPSSFLFGFLAPLIFNGRVKTSVF

SEQ ID NO: 227405 - protein, 102 aa, Glycine max
  Clone ID: PAT_MRT3847_47376C.1.pep
RGGVNFKFPLLSTTGKTYTMEGGARKKNGEFPSDAGVIPRAVKQIFDILEAQNAEYSMKVTFLELYNEEITDLLAPEETLKFVDDKSKKPIALMEDGKGGVF

SEQ ID NO: 227406 - protein, 47 aa, Glycine max
  unsure (1)..(47): unsure at all Xaa locations
  Clone ID: PAT_MRT3847_47377C.1.pep
VNIRSVDEAVVIGAALSLSSSAFVLXLLAERGELPTRFGSATLRILL

SEQ ID NO: 227407 - protein, 168 aa, Glycine max
  unsure (1)..(168): unsure at all Xaa locations
  Clone ID: PAT_MRT3847_47378C.1.pep
RGLFVVGPESASAHPGPACYRKGGPLTITDANLFLGRLLPDFFPKIFGKNEDEGLDEQASKALFEELTKQINEDTAGSTDKAMSLDEVAYGFIKIANETMTRPIRSLTEARGHDTSXHRLATFGGAGGQHAVAIAESLGITQILGHKYSSELSAYSMALADVVDERQE

SEQ ID NO: 227408 - protein, 54 aa, Glycine max
  unsure (1)..(54): unsure at all Xaa locations
  Clone ID: PAT_MRT3847_47379C.1.pep
XRFXXAAXFRXGHXXRRDQCXTXMSRVRXXRLGPYXHXYIDCLXVXXXLYRLQQ

SEQ ID NO: 227409 - protein, 178 aa, Glycine max
  unsure (1)..(178): unsure at all Xaa locations
  Clone ID: PAT_MRT3847_4737C.1.pep
MGSEGKPMLPVLDFTIEDLKPGTNSWLSTCTSVRQAFEENGYFVAVYDKASIELQNGVFGSMKELFDLPTETKRRNIFEGMPLKGYVGQHPKIPLHESMGIDPGTTLEGIQSFAEKMWPHGNDSICKYIFEYAKVAEVLNRMVVRMIFXSYGLLEHYDTFIGSTNYLLRLLAHKAPRN

SEQ ID NO: 227410 - protein, 251 aa, Glycine max
  unsure (1)..(251): unsure at all Xaa locations
  Clone ID: PAT_MRT3847_47380C.1.pep
MEITGLVPLVGENYALKLKNSMQDLLAEIPKESPNFSPFVDAFYELMQAKVDSSFEVIWVYAAINFRGRNSEKGDALDRILAAKDLFKLLSACSASICASKSIALLAPVVFAMHGVIVELFGRELILKREKKAMREVKSLVDVVLGYISICCDNKVYKEETDSVNLILPFTDLARVSVDMNGDDEGFKSLLPLVSGDVCGWICSREFHGGYLGGAVIMEAFFMKLCLSFHLVTSRDELXMNLKKWAVGSIS

SEQ ID NO: 227411 - protein, 67 aa, Glycine max
  Clone ID: PAT_MRT3847_47381C.1.pep
SCFMMTVSLLLWVIAQCVVGVKGLLQADQIRSGAGHPPVKIQQVCRFHYIERHADESLVLLRLWDLK

SEQ ID NO: 227412 - protein, 51 aa, Glycine max
  Clone ID: PAT_MRT3847_47382C.1.pep
DQISGMIRMHRHWRLVTVVRFHRSSKVRIGISNLNELLLCFCPLSHFPFSS

SEQ ID NO: 227413 - protein, 74 aa, Glycine max
  Clone ID: PAT_MRT3847_47383C.1.pep
ISACFSTSETYRFVCTREASVDASVYISELHELSHDTYVHNEQCVHYQCSSHHAGHTPEHDPKHILVECRDRDR

SEQ ID NO: 227414 - protein, 187 aa, Glycine max
  Clone ID: PAT_MRT3847_47384C.1.pep
MVSFHKALAESTPKPEIHAEFEASSKKRKWEEPLTEGFFKDQIEKRKSVFDIELHPETPFSSDKWQPPSSHHMSLNLELNLMCESPRKKEEGYGYEMNEKKSSGSSPGGLSEREDLCKKDSDGKILSPSWLSSSEDDYKEMVATVCMRCHMLVMLCKSSPSCPNCKFMHPPDQNPSKFLKRRCSLFC

SEQ ID NO: 227415 - protein, 93 aa, Glycine max
  Clone ID: PAT_MRT3847_47385C.1.pep
FEAMVSFHKALAESTPKPEIHAEFEASSKKRKWEEPLTEGFFKDQIEKRKSVFDIELHPETPFSSDKWRQYLTIQVSLYWKLKPQPWHDLHVN

SEQ ID NO: 227416 - protein, 74 aa, Glycine max
  Clone ID: PAT_MRT3847_47386C.1.pep
MAETRCLAIIDEEEIEVDDDDIYENIEAPKFVDLTAPDCRRPDHDRHWFCFRVGCDQKHEQELDSEAIYKNFVL

SEQ ID NO: 227417 - protein, 112 aa, Glycine max
  Clone ID: PAT_MRT3847_47387C.1.pep
CTRARGSSGGGGGFSGGGGGSGSGTKKRFRTKFTQEQKDKMLAFAEELGWRIQKHDEVAVEQFCAETCVKRHVLKVWMHNNKHTLANSEQRSAGNGSNHLNSTTIIENSQLS

SEQ ID NO: 227418 - protein, 187 aa, Glycine max
  Clone ID: PAT_MRT3847_47388C.1.pep
DTFPVGGFSLEPRADPSTLKARSEGPAEIIRHVLFGYFSQKTGLLVHLEDSHLTRIQNNGGEAVYWETTINSFLDDYRPVEGIMIAHSGRSVVTLFRFGETAMSHTKTRMEEAWTIEEVAFNVPGLSVDCFIPPSELRFASMSEACELPQGQRVKTAVAAAAYHAKVTQLQKSHDSHTNNISWTVDV

SEQ ID NO: 227419 - protein, 75 aa, Glycine max
  Clone ID: PAT_MRT3847_47389C.1.pep
LIISIYKFDEAMTHSRKLLTTRCNLTILPAVICQIVHQRYKKLDAYANPQTSSQLNIHCPVNVISCCYHAIFVVE

SEQ ID NO: 227420 - protein, 298 aa, Glycine max
  Clone ID: PAT_MRT3847_4738C.1.pep
SWDRLEQSFRNNLTQTARGVRSNYSQRSTPTFRASSSLHLGRVIPSDDGLHMVAESYSSRHPRPLTTVGWQSNDRHGRSRIPSDRYRSLADEVGLNERFNSEGFMIVDRTSLNGSRNMLDQHRDMRMDIDNMSYEELLALGERISHVSTGLSEDLISKYLTETIYCSSEQSQEEEACCICPPHGRVSSSDANAFNHEASHFLIGSSSSNAPVDVGGFHNEFGTSRNPTAPQSFHNNLTQTARGVHSNYSQRSTPTFRASSSLRLGRVAPSDDGLHMVSESYSSRQPRPLTTVGWQNNN

SEQ ID NO: 227421 - protein, 125 aa, Glycine max
  unsure (1)..(125): unsure at all Xaa locations
  Clone ID: PAT_MRT3847_47390C.1.pep
FSLSCLLLLPAALILGPHVLANYENPPVFMPPTDKPPVYXPPIEKPPVYKXPPDENPPIYKPPVEKPPVSKPPVEIPPEYKPPAEKPPEXKPPIDKPPLYKPPAEKPSDYKPPIEKPPNCSSPPM

SEQ ID NO: 227422 - protein, 61 aa, Glycine max
  Clone ID: PAT_MRT3847_47391C.1.pep
KSNVYRLNKTPKNITNARFVTPHNNLVKGKKPLPWNSPPNTFKASHLVMYDPRVRHHTVKK

SEQ ID NO: 227423 - protein, 337 aa, Glycine max
  unsure (1)..(337): unsure at all Xaa locations
  Clone ID: PAT_MRT3847_47392C.1.pep
PVEIEEKLEYKDQIDEIDKVYKSYAEKMKKLDILXYQTMHALGLLQLKDPLKLISFPKSAIQGAKPVISQNLWPRKASKNSSDPLVKLVHELQRDLELVYVGQVCLSWEILCWQHKKALELQQYDSQGSHSHRYNHVAGEFQLFQVLVQRFIENEPFQGPRLQNYVKNRCVIRNLLQVPGIKDDSKGDEEEDAIASGKLADIIKESMRVFWEFVRADKDYGNVIFKASQHNRIDLKDPIISGLMVDIKTQLQKKERRLKDIVRTGNCIVKKFQKHHEDELDHEQLVARVGLRLISRVVNMSKLRKEQLIWCNEKLLRIKFLSRKIVQVEPSFLLFPC

SEQ ID NO: 227424 - protein, 100 aa, Glycine max
  Clone ID: PAT_MRT3847_47393C.1.pep
FHAWSHGTKSRLPPLVVALQEAGVLVSRWQHAAHHRAPYNNNYCIVSGVWNEFLDKHKVFEAMEMVLYFKTGVRPRSWSEPAPEWVEEIETPSQIQIQTQ

SEQ ID NO: 227425 - protein, 85 aa, Glycine max
  Clone ID: PAT_MRT3847_47394C.1.pep
PHFKLRKGCAIVRHSLYYPRSCSLWLSLPHYLCGRYSALYMFCFNLPSRFLGSPIYLMCYLLLLRLFSSAIIPFPLPPPPPPPPQ

SEQ ID NO: 227426 - protein, 52 aa, Glycine max
  Clone ID: PAT_MRT3847_47395C.1.pep
HFGKRYGQLIPCGFYEHVHILLFWELHSVHSMHRSTNYVIQQWISQEPDVVL

SEQ ID NO: 227427 - protein, 77 aa, Glycine max
  unsure (1)..(77): unsure at all Xaa locations
  Clone ID: PAT_MRT3847_47396C.1.pep
GEYGKMPTKTKLEETSMEWQLXDLLCAKTPSVLTTIDERLVGTEHEGYELMVAGIEKNAKVMMPLNXELLCKDAQDM

SEQ ID NO: 227428 - protein, 42 aa, Glycine max
  unsure (1)..(42): unsure at all Xaa locations
  Clone ID: PAT_MRT3847_47397C.1.pep
AALARXLAXIFWDSQQSGWPIYGQHREGHCENGLFEQSTITL

SEQ ID NO: 227429 - protein, 49 aa, Glycine max
  Clone ID: PAT_MRT3847_47398C.1.pep
QLPNYTITIVFSFSSNYNTVIFPHFKFFQKLVLNICSEQTNEHTYRMKN

SEQ ID NO: 227430 - protein, 73 aa, Glycine max
  unsure (1)..(73): unsure at all Xaa locations
  Clone ID: PAT_MRT3847_47399C.1.pep
XSXXCHXXXXLPQQXLPXRVILXXXXPXLXXFXIFGSXXFRVXXYLLHXXSVIXFXDXXXXPXLXKXXXINYN

SEQ ID NO: 227431 - protein, 87 aa, Glycine max
  unsure (1)..(87): unsure at all Xaa locations
  Clone ID: PAT_MRT3847_4739C.1.pep
KGEDIIRVIPWEEWXWAFELNNDDSNPHIALLPMHPXLRARFNETAAWKYALSMAEKPYGYHNMIFSWIDPLNENYPPPLDANVVLI

SEQ ID NO: 227432 - protein, 124 aa, Glycine max
  Clone ID: PAT_MRT3847_473C.1.pep
YAAERKRGTSSAAKHRVPSPEGISGGGVSFSPSFLLSLRSARAAAKSIIAFPFFHFHPFAFLIHPFTVSHDHRWHHGGGDQRGVEGSRLGFACCGCRRGRKQDRWKKTAEMIHRVNHGLAVEKV

SEQ ID NO: 227433 - protein, 74 aa, Glycine max
  Clone ID: PAT_MRT3847_47400C.1.pep
SMLYSVFRHNIGHNQGSVLYEFGSGQVQFHYLLLLLYRYLYPSSLSSIFFHSFCCCTFFQEKIGSFKDMETNDA

SEQ ID NO: 227434 - protein, 67 aa, Glycine max
  Clone ID: PAT_MRT3847_47401C.1.pep
QNPSTHFVSSFCRVGHTSNLGFRKPNISRLLRQMSYHTLILHFSVITNDKDSFHVQNIPEFSPSNSY

SEQ ID NO: 227435 - protein, 69 aa, Glycine max
  Clone ID: PAT_MRT3847_47402C.1.pep
RAYYHVLLNLPSTVALIALIILFILFLSRFMRRSVSMSFLLLALHVFHSPPPPPPPQAGGTPTHASSGQ

SEQ ID NO: 227436 - protein, 46 aa, Glycine max
  Clone ID: PAT_MRT3847_47403C.1.pep
KKPGAHIVSSGSWQQFLPSITSCLDQMSAHQSFTRSNANGVHRTRA

SEQ ID NO: 227437 - protein, 45 aa, Glycine max
  Clone ID: PAT_MRT3847_47404C.1.pep
LLCMWYLLFALPYVPFPIRQCQHVDPFTALNLPQRIHRLDSNSLQ

SEQ ID NO: 227438 - protein, 103 aa, Glycine max
  unsure (1)..(103): unsure at all Xaa locations
  Clone ID: PAT_MRT3847_47405C.1.pep
MCVDKYYETNEPYLNALFLLRHTAMDSTTPSIERLFHRREGLYXRGFSYTYDDVIXLPHYIDFADEAWDLCTRLTRHLHLAKPFVASPMXDTVSESAMVRPMA

SEQ ID NO: 227439 - protein, 53 aa, Glycine max
  Clone ID: PAT_MRT3847_47406C.1.pep
SPLHLASANGHLQVVFELLKVDHNLLGGKACSSLCRSRRKNSCYLTVETKTSR

SEQ ID NO: 227440 - protein, 183 aa, Glycine max
  Clone ID: PAT_MRT3847_47407C.1.pep
WPTSNHDSQTDCQKQESKTAQQQDQPSSGVELKQHGSLAEQLHHVTSQDINNPHLSQKQSQDECHQAPALQVSLHNSQAIGIQNSGKDPVLNNEVVKNHNPSSESQYAKLQQMSNQQATVSEQPSSQGNRSTSKQVPFGMLLPILLPQLAKDRAMQLQTLFAKLKKEEIPKDSFVRLMKGIVR

SEQ ID NO: 227441 - protein, 84 aa, Glycine max
  Clone ID: PAT_MRT3847_47408C.1.pep
RRRQQWSRCLGRGPCGSGRIPRPCRRRVCAGSIRVDLDANFHQRVRDESSRVRERMLHIMWGGIRDSPCIDSPCPVHLECHWSL

SEQ ID NO: 227442 - protein, 153 aa, Glycine max
  Clone ID: PAT_MRT3847_47409C.1.pep
RAYSSEFGSREEGLFQGLSHLWDLNLGWNSLVVLPDTVFQGLGNLHELVLAGNKLTYLQPALFCGLGELRELDLSRNALRSVKANVFVHLPRLQKLYLDRNLITAVAPRAFLGMKALRWLDLSHNRVAGLMEDTFPGLLGLHVLRLAHNAIAS

SEQ ID NO: 227443 - protein, 67 aa, Glycine max
  Clone ID: PAT_MRT3847_4740C.1.pep
FVFQGVHHMFQGSPARLCGPHQPRIYNIVFIRKKLVLSHAKGFKACSYEKRSSMQCFNSLFGQIFSL

SEQ ID NO: 227444 - protein, 160 aa, Glycine max
  Clone ID: PAT_MRT3847_47410C.1.pep
MADPQQQDNYMKRKPSNSNVLVLAALVPFGVSLLILVGLTLSATVISLTVVTPLFVIFSPVLLPAALFIALAVAGFLTSGVFGITSISSFAWLATNLRRSHSPEHPQRPRDDADRVAQKTDEAVRQAQETVHQAQKETATKAQKDISETRKAHKESVATS

SEQ ID NO: 227445 - protein, 179 aa, Glycine max
  Clone ID: PAT_MRT3847_47411C.1.pep
LEPIRLEVVEDKFISLLRTCGTCVRLHQIQAQIVTHGLEGNDYVTPSFITACARLGGIRRARRVFDKTAQPNGATWNAMFRGYAQANCHLDVVVLFARMHRAGASPNCFTFPMVVKSCATANAAKEGEEVHCVVAKRGFKSNTFVGCALIHMYSLRGGVFVADAYNVSAEMRDKNVFAW

SEQ ID NO: 227446 - protein, 76 aa, Glycine max
  Clone ID: PAT_MRT3847_47412C.1.pep
LPPSGKELLKLVWDIIRVSFYPPSDISTNSLDTLVAQHLGSIPWSGLINDEINILERDIECLITDDLVEELTKDMF

SEQ ID NO: 227447 - protein, 76 aa, Glycine max
  Clone ID: PAT_MRT3847_47413C.1.pep
YKHELKQCYFNCVGFFLSDRKQCLHCSPLDFRFFRREGVRLSGLEDQKPPKKKRIKKTQVISLPLPYYIVHLFIVL

SEQ ID NO: 227448 - protein, 64 aa, Glycine max
  Clone ID: PAT_MRT3847_47414C.1.pep
MDPPIKKKTLSRASLSPQRKDKCIVFPLVRYNEFREPVCQACNVVMLESIRAHLASPEHNEFQK

SEQ ID NO: 227449 - protein, 56 aa, Glycine max
  unsure (1)..(56): unsure at all Xaa locations
  Clone ID: PAT_MRT3847_47415C.1.pep
LLVFXXXQRXRSWXXLXXRRPGXAXXCRXFXRSPLXRXIGXGXXRDSSRIPSXRTR

SEQ ID NO: 227450 - protein, 223 aa, Glycine max
  Clone ID: PAT_MRT3847_47416C.1.pep
MDPPIKKKTLSRASLSPQRKDKCIVFPLVRYNEFREPVCQACNVVMLESIRAHLASPEHNEVMEKLKANAAGSTEDKNAKPVTGTNNSPKANPEQPQDTACQLPEFSQDVPRHESPSALPRDFCDDSGKIRTRSVSKVTETMDPPKEQEHQESIVSPSTDEALTSSKRGRSRKTKVTPIQIHCIVFDIFELHKTHYILTSLNSIKLAALSFVEFLLPHSLPSS

SEQ ID NO: 227451 - protein, 409 aa, Glycine max
  unsure (1)..(409): unsure at all Xaa locations
  Clone ID: PAT_MRT3847_47417C.1.pep
MDLEAEKEHEAAFAVASLSLSLPTIFPFVQPKNIPSTTLQPTKLKVPTQASSLTHLSLSTTTPPPSKTSFKSTVSANPLHAPLSLAPHRPRDPSNAAALRRAAVVWFRNDLRLLDNECLTAANNDSLSVLPVYCFDPSDYGKSASGFDKTGPYRAAFLIDSVSDLRRSLQARGSDLVVRVGKPETVLVELAKAVGADAVYAHREVSHDEAKAEEKVEAAMKEENGEVKCFXMPSNYGGFRDRVQKLEVRKTIXALDQLKGMPSRGDVEPGLIPSLMCVANASMVGGETEALQKLKKFAAECAAQPNKGFKDGTQSIYGANFSCKISPWLAMGCLSPRTMYEELKKTTSRAISASADKNDGGNGSSRNGTNWLMFELLWRDFFRFITKKYSSAKKQLEAAPVTACAGAYA

SEQ ID NO: 227452 - protein, 69 aa, Glycine max
  Clone ID: PAT_MRT3847_47418C.1.pep
RRKKHPLHLQGVSIVKQGQTQPKTWECKISFLEKEGTVLKHSFEDSTDVFNLTAPTFHCFFPGPVGGPV

SEQ ID NO: 227453 - protein, 402 aa, Glycine max
  Clone ID: PAT_MRT3847_47419C.1.pep
MEAEKHEAALAVASVSLSLPRVLPFFQPTTPQPTKLKVPTQASSLTHLSLSTPSKTSFKSTISSTPLHAPLSLGPHRPRDPSNAAALRRAAVVWFRNDLRLLDNECLTAANNESLSVLPVYCFDPADYGKSASGFDKTGPYRAAFLIDSVSDLRRNLQARGSDLVVRVGKPEAVLVELAKAVGADAVYAHREVSHDEAKAEERVEAAMKEENVEVKYFWGSTLYHVDDLPFQLEDMPSNYGGFRDRVQKLEVRKTIEALDHLKGMPSRGDFERGEIPSLMDLGLNPSATMSQNGKCVANASMVGGETEALQKLKKFAAECAAQPHKGFKDGTQSIYGANFSCKISPWLAMGCLSPRTMYEELKKTAGRVISASSNRNDGGNGSSRTGTNWLMFELLWRDFFR

SEQ ID NO: 227454 - protein, 46 aa, Glycine max
  Clone ID: PAT_MRT3847_4741C.1.pep
SKWNSWVACELPHREQTKLQMDLYLCACLQTKPEKLDTQVQMHQTY

SEQ ID NO: 227455 - protein, 73 aa, Glycine max
  unsure (1)..(73): unsure at all Xaa locations
  Clone ID: PAT_MRT3847_47420C.1.pep
ITSAILGSFGVASVGEYYVSETKLFRGYTPGTITNKDCAEQSGNKLQAWLSTAGXPVVMIAISRRHFIVKSGP

SEQ ID NO: 227456 - protein, 139 aa, Glycine max
  Clone ID: PAT_MRT3847_47421C.1.pep
RIEGTKNTNINCREGGMVCFFDYTGRAVRKDLKDCKKWFKLYWIFGERIERIWSSKTKYLKRVGWGLGYLSLTGCTKYNIIRSTRRGGRVKLNHLFFFYLSKTNKIVSFFRLNKSIKINRNHSWFSYIGSFAHSTHSDK

SEQ ID NO: 227457 - protein, 64 aa, Glycine max
  unsure (1)..(64): unsure at all Xaa locations
  Clone ID: PAT_MRT3847_47422C.1.pep
VFRWFKYYFIFLLKPFNFCCSRNCCCFRLVRVDFPSGLXGLRTDIPLESLVKKKNKIVDKRERS

SEQ ID NO: 227458 - protein, 68 aa, Glycine max
  Clone ID: PAT_MRT3847_47423C.1.pep
SLSFYFDYLLWEDHWKCSKNGKTSSIECIKTLTSVQSFLLAVKKKIKCVRLGDLICLIFSNHPNKPVP

SEQ ID NO: 227459 - protein, 173 aa, Glycine max
  Clone ID: PAT_MRT3847_47424C.1.pep
LSSDDINSADSVEKKNHLSTGDSSNSVTVSITVEGTQNCGAGPDTPTSKKEEGEARGNKDANFSSKEKESKKINNNNTEASKFGQVYSAPLGNINLEAEQAAMQKQIVDMYMRSMKQFTESLAKMKLPMDLDKPEKVDHGDVDVIQNLDNSKLEIDKKKKDGSRVFYGSRAFF

SEQ ID NO: 227460 - protein, 187 aa, Glycine max
  unsure (1)..(187): unsure at all Xaa locations
  Clone ID: PAT_MRT3847_47425C.1.pep
MAFHLEIIMLILIFIALAQPSERVNAEPTQDKQALLAFLSQTPHANRVQWNTSSSACDSWFGVQCDSNRSFVTSLHLPAAGLVGPIPSNTISRLTRLRXLSLRSNALVGPIPFDFANLTSLRNLYLQNNHLSGEFPTTLTRLTRLTRLELSSNNFTGPIPFFLNNLTRLTGLFLKNNSFSGSLPSIT

SEQ ID NO: 227461 - protein, 304 aa, Glycine max
  unsure (1)..(304): unsure at all Xaa locations
  Clone ID: PAT_MRT3847_47426C.1.pep
MHRSGATMAWNVFKFCTALRGLGSIMILLVLGVVGATYYAVVLTNYGPALYAGGLDSLVALAVLILFHSLLVMLLWSYFSVVFTDPGSVPPNWKPMIDEERGEADPLVGTEFSNLPSDPNPRVRYCRKCNQLKPPRCHHCSVCGRCVLKMDHHCVWVVNCVGALNHKFFLHILFYTFLELLQLFVPLLXPSLHSVVSEDXPGMPISLATTFLAFVLNLAFALSVLGFLIMHISLVAANTTTIEAYEKKTTPKWRYDLGRRKNFEQVFGMDKKYWFIPAYSDEDIRKMPALQGLDYPSKPDFDSQ

SEQ ID NO: 227462 - protein, 241 aa, Glycine max
  Clone ID: PAT_MRT3847_47427C.1.pep
LILFHSLLVMLLWSYFSVVFTDPGSVPPNWKPMIDEERGEADPLVGTEFSNVLSDPNQRVRYCRKCNQLKPPRCHHCSVCGRCVLKMDHHCVWVVNCVGALNYKCFLLFLFYTFLETTLVTASLLPHFITFFSDGEIPGTPGSLATTFLAFVLNLAFALSVLRFLIMHISLGAANTTTIEAYEKKTTPKWRYDLGRRKNFEQVFGMDKKYWFIPAYSDEDIRKMPALQGLDYPSKPDFDSQ

SEQ ID NO: 227463 - protein, 38 aa, Glycine max
  Clone ID: PAT_MRT3847_47428C.1.pep
PPLKNNGPCYLGYFSGSPQKFLYMTPFNIWAPVLMGFY

SEQ ID NO: 227464 - protein, 107 aa, Glycine max
  Clone ID: PAT_MRT3847_47429C.1.pep
LHRPYRPTIIFLCSYNNIISNGKTKNKTRASNFTFKKIIKGKKTRLVISDPTLNTWRLFLYGPRIRLLLPPTSQTQKPIQLPELPHRVNTLPTYNRTRFVIIAIPTR

SEQ ID NO: 227465 - protein, 66 aa, Glycine max
  Clone ID: PAT_MRT3847_4742C.1.pep
ILISKFKRKKGTSPSGGKWHTLTSFLADFKRNTLLLSCKNKNNKTNQRSCQHINTQRDGAFSNLKA

SEQ ID NO: 227466 - protein, 81 aa, Glycine max
  unsure (1)..(81): unsure at all Xaa locations
  Clone ID: PAT_MRT3847_47430C.1.pep
IXXXNXQXXQXXXXNXXXXLXXXXXXXXXXTKXNQXTIXNNIXTLXXXSXXXXXXYXNXVXXXHXXHXXXXXXXXXXSXTX

SEQ ID NO: 227467 - protein, 70 aa, Glycine max
  Clone ID: PAT_MRT3847_47431C.1.pep
GYPLCPRLLEQFGRFSFQRSFSVCFCCRRRFYLLLAGAPSALPPLFGPYSQGGFLSLKSNRLLLPVPSRG

SEQ ID NO: 227468 - protein, 52 aa, Glycine max
  Clone ID: PAT_MRT3847_47432C.1.pep
REIIFYHYFPHHFCPPLCWYCRCNIVEVWLLAQILPFVLLGLIYMLNALLGV

SEQ ID NO: 227469 - protein, 72 aa, Glycine max
  unsure (1)..(72): unsure at all Xaa locations
  Clone ID: PAT_MRT3847_47433C.1.pep
GGAPKARAGSFSLLGSASPGVEAHHILGVLERGLFLKPGPGVFAFCIYSVRFFAAFLAXQKDKRRIHRTSGR

SEQ ID NO: 227470 - protein, 108 aa, Glycine max
  unsure (1)..(108): unsure at all Xaa locations
  Clone ID: PAT_MRT3847_47434C.1.pep
PGATHASALCYARSSYPVFLSMEDHLTPXHHDKFAKMATEIFAKTLYFPETDHYTDFPSPESLKKRMIMTTNPPKEWRTSAIISKPVPNGTAPSAKESRRLELPGSAA

SEQ ID NO: 227471 - protein, 100 aa, Glycine max
  unsure (1)..(100): unsure at all Xaa locations
  Clone ID: PAT_MRT3847_47435C.1.pep
ANTTCRPCTGSSRTVVEGEQAGAQDDMSGGTVTVVPTNPGREVAKECKLGMYTNLCSNGGLNYIXDLVPENTGRRALNFGKSECEKGHXVPSTGVLSLPR

SEQ ID NO: 227472 - protein, 87 aa, Glycine max
  unsure (1)..(87): unsure at all Xaa locations
  Clone ID: PAT_MRT3847_47436C.1.pep
SGDNRLTEKTIFTCRDWDILGVYYTIAPQFRKFLPHYIRWHLHTLMIYMHPSFLTAESKYKRNXLSSILISGIFYDSRYXFWTKHEK

SEQ ID NO: 227473 - protein, 149 aa, Glycine max
  unsure (1)..(149): unsure at all Xaa locations
  Clone ID: PAT_MRT3847_47437C.1.pep
MAEREAIGYAGLNESSLEMAAKAMRHGYKVQAIETNEPGIEELVKLVGVKCPSPTEAGREVSHXVVLIYDVDQTNHLIVNDKEALKDLKSDTVLDVRVNIAPLLLQKLEKDLAEIHTIAYVHDSEDVKGRADDLNEKVTIASSGRLDAI

SEQ ID NO: 227474 - protein, 65 aa, Glycine max
  Clone ID: PAT_MRT3847_47438C.1.pep
GAPKFPSICPFSVDMRERKILNRTHHVGISRHYVTKENLLIKRENLTLTAKECLASPKVKYPSQF

SEQ ID NO: 227475 - protein, 133 aa, Glycine max
  unsure (1)..(133): unsure at all Xaa locations
  Clone ID: PAT_MRT3847_47439C.1.pep
YAPQLQSMCPRNVDSRTAIDMHPSAPRSCDDVYCENLQQGEGLFLSEPVLFADSRCKGTVNACASSSKIFHVYFDAAMXKLGLAGIEHAQNGNIRHECSVIFFKKGHMSISKSWAFVSYIRVPVFKIISTGSI

SEQ ID NO: 227476 - protein, 55 aa, Glycine max
  Clone ID: PAT_MRT3847_4743C.1.pep
WLTLHIFNNHNQFLFTIKIIVLSVTKFFTLRRMFEFIYHVVHPTNLRFKLPSFVS

SEQ ID NO: 227477 - protein, 89 aa, Glycine max
  unsure (1)..(89): unsure at all Xaa locations
  Clone ID: PAT_MRT3847_47440C.1.pep
PDPRRKRDVPYLTNLPIPYAKLXKYSYADLXNPERSDPSGNGCDGIHHTATPIDFARTSLGRPNQPSMNARYAYEGCLKAQTEGGFTLL

SEQ ID NO: 227478 - protein, 204 aa, Glycine max
  unsure (1)..(204): unsure at all Xaa locations
  Clone ID: PAT_MRT3847_47441C.1.pep
GRWGPDVRLARRIRRDTVERGRDVHSVLEQYAKFVKPAFDDFILPSKKYADIIIPRGGDNLGAIDLFVLHIRTKLGQHNLCKIYPNVNVIQSTFQTRGMHTLIRDRDLSKHDFVFYSDRLIRVVVEHGLGYLPFTEKQVITPTGSIYTGVDFCKKLCGVSIIRSGESMENALRACCXGIKIGKNLIHRESGDETPLIYEKLPKE

SEQ ID NO: 227479 - protein, 28 aa, Glycine max
  Clone ID: PAT_MRT3847_47442C.1.pep
WPTWSFRYNSALSPLIIDYGLYLVTFAF

SEQ ID NO: 227480 - protein, 77 aa, Glycine max
  Clone ID: PAT_MRT3847_47443C.1.pep
TVISVAWQPPPTFYLKCNVNVVFFNLQHKIGGFGMCLRDEKGVLVGEILLCRCMRERLLLCYNYKVFDRMHQPTLDV

SEQ ID NO: 227481 - protein, 51 aa, Glycine max
  Clone ID: PAT_MRT3847_47444C.1.pep
LYLIDIIEDLRFFNRDKIAEIVQINPLWMWRLGEKEVPKSTSTIAFDKSGS

SEQ ID NO: 227482 - protein, 56 aa, Glycine max
  Clone ID: PAT_MRT3847_47445C.1.pep
PSMTPCPLGIRDWHLLLYLSRCKSCRLSHGNPYPYPCIIMLHENLLVEYLYRAPTL

SEQ ID NO: 227483 - protein, 168 aa, Glycine max
  unsure (1)..(168): unsure at all Xaa locations
  Clone ID: PAT_MRT3847_47446C.1.pep
AASPALPDALAHLLSRHATSSAAWGVQSAAGGLHSLLAVVSEFRPIITSKPDIIRALVGIISHSDSPTRSIKDALKACFGVALHPPSRIVLIRLGAVPALFALVAKGKDGNRRAGIIEDATAVIAQVAACEESEEAFRKVSXVSVLTMMLSSESGSCSLRTKENAVAA

SEQ ID NO: 227484 - protein, 88 aa, Glycine max
  Clone ID: PAT_MRT3847_47447C.1.pep
YHIHFRKMEIRFSRVLGNMKINLHPFITLGRSHIPPLYKWGLVRSYCKQARSFKSESEIVFCNPLLEKSYISPIFGECLRNIVNHPIG

SEQ ID NO: 227485 - protein, 352 aa, Glycine max
  Clone ID: PAT_MRT3847_47448C.1.pep
MDSSSHMASLPEDIITDEHLQQQTQPASASAFASVPQRPPTKSSSEKYAPLDWSVYFDKEDDVAIPESNDVFHVYTAGTEGPVVFCLHGGGYSGLSFAVSASKIKEKARVVAMDLRGHGKSLTEDDLDLSVETMCNDVLAVIKELYSDSPPAIILVGHSMGGSIAVHVAARRSLSALAGLVVVDVVEGTAMASLIHMQKILSSRMQHFSSIEKAIEWSVRGGSLRNIDSARVSIPATLKYDHSKKCYLYRTELEKTEQYWKGWYEGLSDKFLSCPVPKLLLLAGTDRLDRSLTIGQMQGKFQMVVVRHTGHAIQEDVPDEFATLIVNFISRNRIGPHGIEIPGLRKPAFSKP

SEQ ID NO: 227486 - protein, 102 aa, Glycine max
  Clone ID: PAT_MRT3847_47449C.1.pep
KHGIKLKECQSKKFIIFILQGGSFLVYLIPDSRFGKGWLAKARYLQKNFINNHTNQILSGVIIKLNLKYLFKGKAHGTVRTVVKISAREIPQFHEGLFGYEK

SEQ ID NO: 227487 - protein, 94 aa, Glycine max
  unsure (1)..(94): unsure at all Xaa locations
  Clone ID: PAT_MRT3847_4744C.1.pep
MKMKVRDLFVATRLVAWQCHSYNMYPLRMNTGYGARTPEVKCARXKLSMLAHNIFGYQTITEKCVEASXEYIHGEQCSSDSKTSYQQAYFYATD

SEQ ID NO: 227488 - protein, 137 aa, Glycine max
  Clone ID: PAT_MRT3847_47450C.1.pep
MASSSWEYFGEIANVAQLTGIDAVKLIGMIVKAANTARMHKKNCRQFAQHLKLIGNLLDQLKISELKKYPETREPLEQLEDALRRSYILVNSCQDRSYLYLLAMGWNIVYQFRKAQSENDRYLHLVPLISLVDNNRL

SEQ ID NO: 227489 - protein, 89 aa, Glycine max
  Clone ID: PAT_MRT3847_47451C.1.pep
TSWQDLQLGENQTNSSQASGEKLHKPKGSITKMINKTFNLFEIKLEMILCHLVLYFTQNCLGKSCFLRCQDYTLIKATYPYYHKNQRII

SEQ ID NO: 227490 - protein, 47 aa, Glycine max
  Clone ID: PAT_MRT3847_47452C.1.pep
NIHAFPQKGKAYQKEGCLQKSNFNLKSRERLETLSTALVYVQNNHFT

SEQ ID NO: 227491 - protein, 68 aa, Glycine max
  Clone ID: PAT_MRT3847_47453C.1.pep
KTTLTLMMEKEHLWTYGKTPLKMNFGGKKNVPECRHTLEGRDPCQLKKNCISHFRKGLKGRCLIFQVE

SEQ ID NO: 227492 - protein, 67 aa, Glycine max
  Clone ID: PAT_MRT3847_47454C.1.pep
MEFKVLRQLTLHISLCRCLSLCFKSESLGIWSRIECVGPVGILTFLRALSVSIARALLLASFSKNSF

SEQ ID NO: 227493 - protein, 467 aa, Glycine max
  unsure (1)..(467): unsure at all Xaa locations
  Clone ID: PAT_MRT3847_47455C.1.pep
FLGRFSKMESVKPSAVTPSKSKLARTFAKVLHVRAVTGIAPVDGLKNVKVDADLNNEANKCKSALNNEEDEELQERKATEALLAKTFASISTVKASYAQLQNAQSPYDPDGIQAADQLIVSEFKTLSELKQCYFKKQFDPLPARAILAAKLKELQSVNRTFEIMGKKXESQARLKESEIIFLREKLEEANVHRGSIEKRLNQSGSLSVLDNLHMSGLSPSHFVTVLRHTVRSIRSFVKLLVNEMRSAGWDIDASVKAIMEQNVVYWKEDHKCFAIESFVCREMFDSFNFPNFSLPNESLPDRNRRQLFFGRFNELKPEKAKDFLAGKPRSPFAKFCRIKYLRLVHPKMEASFFGNLNQRSLLNAGEFPNTNFFTSFAEMAKRVWLLHCLAFSFEPPQASIFQVGKWCRFSDVYMESVNENDEEMPVESETQIAFTVVPGFRIGKTVIQCQVYLSQRQVKNFTSTKQR

SEQ ID NO: 227494 - protein, 47 aa, Glycine max
  Clone ID: PAT_MRT3847_47456C.1.pep
TLVCIFGNRYPGMLILAFLRCRFYLAKWGTSLIRIKIIIYCRAGEKQ

SEQ ID NO: 227495 - protein, 83 aa, Glycine max
  unsure (1)..(83): unsure at all Xaa locations
  Clone ID: PAT_MRT3847_47457C.1.pep
HTGLLFCLSCASKWFTLPTLLSRGSFTMPLPGLLRRXNTIRITGPDLISHPIDGLHYVSVALMRTLGPDVLLLVATLRLPLDR

SEQ ID NO: 227496 - protein, 147 aa, Glycine max
  Clone ID: PAT_MRT3847_47458C.1.pep
MRCLARWLPTVLWAWFRGYHSLDSASLGMETFRSRVSDSRNSTLEKIPEVIEKPQVKESSKGLRRLLKFGRKNHNSPTAGRDMESDNTSIDGSEANEIGTNGSSNEVHTLKNLISRDDTLTASATPPKSSRSFSLLSPFRKATKEKR

SEQ ID NO: 227497 - protein, 178 aa, Glycine max
  Clone ID: PAT_MRT3847_47459C.1.pep
RVRKINNILYQIMDKLTGKELVSTFEFIESGVVKSLVNCLSHGQYIREKKRVHGVCNYNPVIEKRFEALASVCLCASQPLSGETPLSMLIRNLQTALASLEAFPIVLSNGPKLRNSFATVPNGCSIPYPCLKVRFVKGEGETFLNDYTEDFHTGDPFSSGHSIERYLWAKGSAKAQSM

SEQ ID NO: 227498 - protein, 73 aa, Glycine max
  Clone ID: PAT_MRT3847_4745C.1.pep
AKRKFSPLHNTTTAYASKNSRVSISVCASLVLKVTTYKDANNAQPIAKCSCFGKLFTNNKVAKEEPNATLPSS

SEQ ID NO: 227499 - protein, 47 aa, Glycine max
  Clone ID: PAT_MRT3847_47460C.1.pep
AASCTHTAAQTMTSSSDKVSISSPYRPYIIAPPCTSRLLILNSSRFS

SEQ ID NO: 227500 - protein, 64 aa, Glycine max
  Clone ID: PAT_MRT3847_47461C.1.pep
MRSPRIIGASRSYGFLGGCKNCLTDDLANAYRKACVRNDPDMGGHPEKLKELAPACEVVGYPEK

SEQ ID NO: 227501 - protein, 178 aa, Glycine max
  Clone ID: PAT_MRT3847_47462C.1.pep
GSRQDEITDSSGNRSSGIVADNETVLVNIAVSTQSNKTTSFPAVIPEDWEESAQSVSTKENLDLNNMPQVLHQSSLAEQSFSENDLFTKSFVSSIDAFLDEQVKNDNNEVDICRSETSNFGAFYSAPGIPAPSAVSSVVQVLTGKVLVPAAVDRSGTSISCFASSKGISLMLFAYYVG

SEQ ID NO: 227502 - protein, 44 aa, Glycine max
  unsure (1)..(44): unsure at all Xaa locations
  Clone ID: PAT_MRT3847_47463C.1.pep
ALVGGAVLLQSAVLSGLVLVSHVDSGFWLXKREVLVNVVKNLLL

SEQ ID NO: 227503 - protein, 88 aa, Glycine max
  Clone ID: PAT_MRT3847_47464C.1.pep
RPEFPGRPTRRHASSARDDEGTHRQTAANYYPFPSQPASEITCIDRAYGMMNGCFFRSSYFLSSTYQKPYASVKRKNWGVSTRDEYAN

SEQ ID NO: 227504 - protein, 57 aa, Glycine max
  Clone ID: PAT_MRT3847_47465C.1.pep
YINTLTLFHSLRKLTYGPLTKAASINNLQYLIHINYFFFISNPPPPLYFYTFFSFDY

SEQ ID NO: 227505 - protein, 126 aa, Glycine max
  unsure (1)..(126): unsure at all Xaa locations
  Clone ID: PAT_MRT3847_47466C.1.pep
IIPGYWVILIVPFTINHVCAYRLNPGISGSRLLGTIPQFILQQTVXHRMATVRTPLPLPTRMHSLGQISICLKVMGILVDTTGHXITLIQNSPISYLLRVAAWTKGCLIGKIAMLITAATQKSDCS

SEQ ID NO: 227506 - protein, 100 aa, Glycine max
  Clone ID: PAT_MRT3847_47467C.1.pep
IDCSEKTTARGGGGIKQAPGDQATTSGGRAEKTGRRTPHQDTTEGRRQRKTTRTRRKRPEGALRACSSAESPTISTNNQHRGHPRPGEQGSRNLTTRRKR

SEQ ID NO: 227507 - protein, 92 aa, Glycine max
  Clone ID: PAT_MRT3847_47468C.1.pep
LACRACLSLRILSGRRRALEGASRRVQSRSSHGSPRWYRHHQYGSCHRSRPRPCRLRRTSPWSCASSVVCFQCYGKASARQVCILCVYTCLT

SEQ ID NO: 227508 - protein, 93 aa, Glycine max
  Clone ID: PAT_MRT3847_47469C.1.pep
MKSKGGVELSGRNVLHRKWALLLCVASFCAGMFFTNRIWSMAEYKEISRASTEIERIKLNSEGCNLNLVSMSVTLLLMLYFGYDSVLDFPPIP

SEQ ID NO: 227509 - protein, 75 aa, Glycine max
  Clone ID: PAT_MRT3847_4746C.1.pep
EPLVCGNNKAHYIHHFVSRSFSSSSDATTSREDTRARNGVNRATLTQRTDLVALQNKEGSKAATGRSEDHPADRV

SEQ ID NO: 227510 - protein, 164 aa, Glycine max
  Clone ID: PAT_MRT3847_47470C.1.pep
VLVSPKISDVIHAQSNKLGSFSHGFTYSGHPAACAVAIEALKIYKERNIVDQVNKIAPRFQDGIKAFSDSPIIGEIRGTGLILGTEFTDNKSPNDPFPPEWGVGAYFGAQCEKHGMLVRVAGDNIMMSPPYIISQGEVDELISIYGKALKKTEKKVQELKSQRK

SEQ ID NO: 227511 - protein, 80 aa, Glycine max
  Clone ID: PAT_MRT3847_47471C.1.pep
FSCVVVPGLQITLYAFIDGYACERLINLSETISCSRNTMILDDILLRLPLSGSKMLTYYLSLLPARGHWMSSKLSLLGCS

SEQ ID NO: 227512 - protein, 34 aa, Glycine max
  Clone ID: PAT_MRT3847_47472C.1.pep
MGIRFLLMGNKPGQTLLAQYYKYLTLEQRRALTC

SEQ ID NO: 227513 - protein, 56 aa, Glycine max
  Clone ID: PAT_MRT3847_47473C.1.pep
DSVLRLAWQRALPFSALMIPGPIFICSPCQFCIQINMAFFFRDKTRVKSVLCWVRI

SEQ ID NO: 227514 - protein, 121 aa, Glycine max
  unsure (1)..(121): unsure at all Xaa locations
  Clone ID: PAT_MRT3847_47474C.1.pep
VIGAMGLINERPIILALYNPTIQGECSDEQAYXWSQRRAIIASRSPFTPDXYEGKVYVPGQDQNAYILSGFCLGIIMXGTIQMHDDLLVAVSDAFAAQVSQXNFVXGLIYPPFTNIREISA

SEQ ID NO: 227515 - protein, 46 aa, Glycine max
  Clone ID: PAT_MRT3847_47475C.1.pep
FLIFNKRENRVLILDNFSPYYYLSLKLALQHVVTKQRIRIIEADLN

SEQ ID NO: 227516 - protein, 48 aa, Glycine max
  Clone ID: PAT_MRT3847_47476C.1.pep
ILKAYPTLFNLIHLNSESLPSLPCSLKLLDESTYRFELRAYHYLRIAG

SEQ ID NO: 227517 - protein, 632 aa, Glycine max
  unsure (1)..(632): unsure at all Xaa locations
  Clone ID: PAT_MRT3847_47477C.1.pep
MAASEENSALFPIFILTIMAIPIVPYTITKLCRAASKKSKSIHCHCSECSRSGKYHKSIFKRISNVSTCSNFTLLLLWVVMIVLVYYIKTMSREIEIFDPFNILGLEPGAAESEIKKKYRRLSIQYHPDKNPDPEAHKYFVEYIAKAYQALTDPIARENYENIRXLLGNYVMHQTLSTYYYLMKPSLAPSKVMDVFIKAAEYMEIPVRRTDDEPLQKLFMLVRSELNLDLKNIKQEQAKFWKQHPALVKTELLVQAQLTREFAALSPSLQSDFRRILETAPRLLEELIKMAVIPRNAQGHGWLRPAIGVVELSQCIVQAVPLSARKSTGGSPEGIAPFLQLPHISETITLKKVARKVRTFQELHDMDSLERADLLIQTGGLSSTEVQDIETVLDMMPSLTLEVTCETEGEEGIQEGDIVTLHAWINVKRGNGLIGALPHAPYYPFHKEENYWFLLADSVSNNVWFSQKVSFMDEAAAVTSASKAIEESMEGSGANVKETSKAVAEAVEKVKGGSRLVLGKFQAPSEGNYSLTCYCLCDSWLGCDRRTNLKLKVLKRTRAGTRAAVLADEGPIMEDGVEEDEDNEDEEYDDDYESEYSEDEEDDQNTKNKQQAANGTVNKHGKAAESSGSEEE

SEQ ID NO: 227518 - protein, 82 aa, Glycine max
  unsure (1)..(82): unsure at all Xaa locations
  Clone ID: PAT_MRT3847_47478C.1.pep
TCTNHTITKNLYMICHKDIKLALNPLNAARLSNILIXTAKAXKSDLPKRALPNIIXTLAPAYDXKDQVYMYFRDTTGDILNP

SEQ ID NO: 227519 - protein, 40 aa, Glycine max
  unsure (1)..(40): unsure at all Xaa locations
  Clone ID: PAT_MRT3847_47479C.1.pep
CXXVSDLXPXXANGIRGVTTNPAIFERAISXXNXXDDQLR

SEQ ID NO: 227520 - protein, 219 aa, Glycine max
  Clone ID: PAT_MRT3847_4747C.1.pep
SVLLKFKEKTNYELVYRIDEIVGDAVDSAIRDIKRFAHSVILHKSSVYPLNDFFLTGSTKIVPKFKSSNISVYVETFSNEFVSSAWDFLSDSTVEINTFVQDAEIDGVITDFPKTANRYRRNKCLNLGENTPPYMKPVQVGGLFKQIAKYSLPPAVAPAPALTEDEVTEPPLRSVSKIAPSSPIAGTGPVAQPPRNAQTKVAVCFFMSTLSLLVASLLL

SEQ ID NO: 227521 - protein, 86 aa, Glycine max
  Clone ID: PAT_MRT3847_47480C.1.pep
PQTPRLPLHGHRTSGPSPSSRLRLSRCLNASPSSSPTVAFARTSLSLLIIKTSPCALCMSLTASASTTTHRAAADNRKNGDRYCSP

SEQ ID NO: 227522 - protein, 43 aa, Glycine max
  Clone ID: PAT_MRT3847_47481C.1.pep
MFTFRYGFYRLRLRYCCHHVEVGGQQPYVTAVSLPLTVIVLTL

SEQ ID NO: 227523 - protein, 75 aa, Glycine max
  Clone ID: PAT_MRT3847_47482C.1.pep
VSLHQEVRKDVIQLLCSIFLANLGESEGAGEDKHLQLNDEAAVLQGEKEAEKMIVEAYFALLLAFLSPERNSIYH

SEQ ID NO: 227524 - protein, 779 aa, Glycine max
  unsure (1)..(779): unsure at all Xaa locations
  Clone ID: PAT_MRT3847_47483C.1.pep
AVAEGISAPPRAVEAQEFGEMMEHVDEVNFALDGLRKGQPLRIRRASLVSLLTICATTHQRRLLRTQGMAKTIIDSILGLSLDDSPSNLAAATLFYVLTGDGQDDHLLESPGSIQFLMKLVKPIISSAIKDKAPKFGYKLLSLRQNDDMLKNTNTTGRLDSSSAEVFSRVQEILVNFKELKTCQNDSRVERPELCPKWLALLTMEKGCLSAISLDETSGAVRKAGGNFKEKLREHGGLDAVFEVTMNCHSDLENWMKDSSLSTKDSRNDKRIKSLTLLLKCLKIMENATFLSNDNQTHLLGMKRKLSPQGPPTSFTELIITVIKILSDLCLHRSASAASNDNKPYDPFSMTSHDSELDQLRDYKENETLSISSTRKYHGVERASSVKSSNASQINRILTCNRLESSLSISETPSTSTTDTYSLKMRVSSSMSGSCSGASKSSYCKTSTIQNSSGKNVRFMEGTPVVILDDSQDPFAFDEDDFAPSKWDLLSGKQKKSHSKKHLVANREFENECQSHTKRFQPSCXLSSCCCSSSDVGDEKDSSLLADCLLTAVKVLMNLTNDNPVGCRQIANYGGLETMSMLIAGHFPSFSSSSSFAQIKENGAGTTKDHQSDRHLTDHELDFLVAILGLLVNLVEKDGHNRSRLAAASVLLPSSVSLHQEVRKDVIQLLCSIFLANLGESEGAGEDKHLQLNDEAAVLQGEKEAEKMIVEAYSALLLAFLSTESKSIRAAIADNLPDQNLASLVPVLDRFVEFHLSLNMISPETHKAVSEVIESCRIR

SEQ ID NO: 227525 - protein, 177 aa, Glycine max
  Clone ID: PAT_MRT3847_47484C.1.pep
VKYCIGLYPFLTLNPHSTTQLVIGKIAKSQVLAAALSYLTASLGLLLVQALRFLVRKSLGKSWSANAVEAACSHLSQYHTMRNVLYMAMTEFRKLSEAPDWIFMRERKAQLAFLFGVDDHWGPLHLLEEISKHVPGMATYIERENHTHGFCCTEAGSLWVAQHVVNLIKNQMACSNQ

SEQ ID NO: 227526 - protein, 92 aa, Glycine max
  Clone ID: PAT_MRT3847_47485C.1.pep
REDDRRGEKFSYILTKTNSSSVILGVDKIFSFKKMSFGKKLFLQILWWFSLIGLSSQIRSHYSFVVREANYTRLCSTKSILTVNGNFPGPTI

SEQ ID NO: 227527 - protein, 91 aa, Glycine max
  unsure (1)..(91): unsure at all Xaa locations
  Clone ID: PAT_MRT3847_47486C.1.pep
KSPPPPSPVPNPPYSXQSPPPPSPIPQXPYYYHSPPPPSPSPPPPYYYKSLPPPSPSPPPPYYHKSPPPPSPVPPPPCYLDSPPQPSPSPP

SEQ ID NO: 227528 - protein, 140 aa, Glycine max
  Clone ID: PAT_MRT3847_47487C.1.pep
LETERVHGIYPVHDGHLLREGELQLVCEYANEPLIEEANVQPVNRPEAACGDIHGQPHELEQHSHTAADVTQTHFVHMGDAVDRSHYRKEAYTLLLLLKARYPTHITLLHGNHAGSQLTRVSGFYNECRHWYSDANARRT

SEQ ID NO: 227529 - protein, 43 aa, Glycine max
  Clone ID: PAT_MRT3847_47488C.1.pep
FSKREVIANDRSVLDQIIYTSTAIAYPTENDPNSNLDTSDNSL

SEQ ID NO: 227530 - protein, 45 aa, Glycine max
  Clone ID: PAT_MRT3847_47489C.1.pep
PFIVNCKGGKGGVTTQSTKPPFYSLFATPLTRVLTPGWTRGSGRE

SEQ ID NO: 227531 - protein, 49 aa, Glycine max
  Clone ID: PAT_MRT3847_4748C.1.pep
GGEFYVCVQLFWLETKLDFFLSHILSFRKLFRSHCAPLLLKPPAPNRLF

SEQ ID NO: 227532 - protein, 38 aa, Glycine max
  Clone ID: PAT_MRT3847_47490C.1.pep
PPKRPPRTIKSPLGKKEGNVAGRQFQSNDINLATPNAT

SEQ ID NO: 227533 - protein, 102 aa, Glycine max
  Clone ID: PAT_MRT3847_47491C.1.pep
AKRPYNSINRLVRPKDSIALRGRAMRNAMRLGSSLTIWHSRLHVSSTSYLDIVGIIFIIVLNDVKLDASYVTMSFTNQDSYNVIKPSTVDEDKNDEDLVLEL

SEQ ID NO: 227534 - protein, 49 aa, Glycine max
  Clone ID: PAT_MRT3847_47492C.1.pep
CIQPWDVSYKDQRIQRLILGESAAHHGFRRSTKNHSFLTANCWPPVKSD

SEQ ID NO: 227535 - protein, 55 aa, Glycine max
  Clone ID: PAT_MRT3847_47493C.1.pep
WKTLKPNQIRIKINKFLKKKKSATRWCFVAGSKRSLTNLKSTVGKRIKATLADAW

SEQ ID NO: 227536 - protein, 85 aa, Glycine max
  Clone ID: PAT_MRT3847_47494C.1.pep
PSYVGLLYDIFTLVGTPAEESWPGVTSICGSCALRGPPQQPKVLAKEFAMLNPDGLDVLSIMVCLCPHYRISSEDGVKHPYFKGV

SEQ ID NO: 227537 - protein, 85 aa, Glycine max
  Clone ID: PAT_MRT3847_47495C.1.pep
ALLRKYMERACIVLIMALLSLMVRKSDMMILVSDDKVGMFPPDDLHVKACIDTIFAPASTPVVWVLFSGHNSGSATPREPQNVHS

SEQ ID NO: 227538 - protein, 67 aa, Glycine max
  unsure (1)..(67): unsure at all Xaa locations
  Clone ID: PAT_MRT3847_47496C.1.pep
XGFXAEVXDQNXDSXHLRVXXAKKXXPISXNXCKEHEDXXRHFXXXPXAEXRXXVRVXXTXXRXCDV

SEQ ID NO: 227539 - protein, 114 aa, Glycine max
  unsure (1)..(114): unsure at all Xaa locations
  Clone ID: PAT_MRT3847_47497C.1.pep
ATSFLSFFTAEIKYKRNLCNIQISGLFYDGRFKLGTKHDKNLALTEEEKMEVIRNRGIPADALAKRAHEFEKHVAHESLKDQYSCWLTSWCSTKVXNNPAKIMNXLRQSVVGDL

SEQ ID NO: 227540 - protein, 56 aa, Glycine max
  Clone ID: PAT_MRT3847_47498C.1.pep
VKSFLLGEKARISEMVRILKWLNKFMLAGLISLGNRPVLAVFWIHLRSYASNNYTR

SEQ ID NO: 227541 - protein, 67 aa, Glycine max
  Clone ID: PAT_MRT3847_47499C.1.pep
VSELHSWSYGLTPHSLARKGFLLSCGGARGRLYRTLCTCAASTIILRLATTLHTLASCSVEWFSFGL

SEQ ID NO: 227542 - protein, 259 aa, Glycine max
  Clone ID: PAT_MRT3847_4749C.1.pep
MAKRSMCVFLCVTLFMVGFSECSSTSTFLYSGCTQQRYTPNSPYEWNINSLLTSLVNSATYSAYNNFTVVGSTQQDAVYGLYQCRGDLAMPDCAACVARAVTRAGDICRGTCGGSVQLDGCFVKYDNATFLGAQDKAVVLKKCGPSVGYNPDAMGSRDAVLAGLAAAGGNFRVGGSGGVHGVAQCTGDLSYGECQDCVAEAISRLKSDCGTADYGDMFLGKCYARYSVGGAHDESKAHGKAQHRRMLPLLLLPLMGFKF

SEQ ID NO: 227543 - protein, 87 aa, Glycine max
  unsure (1)..(87): unsure at all Xaa locations
  Clone ID: PAT_MRT3847_474C.1.pep
XXGXNXLPXCWLXGEGSDRXXAAXRPXXXLAXPGGIXPXXWNVALTLSDGXXTXXLXGXXXXRXXXLNENLHLERRGRELRKENELI

SEQ ID NO: 227544 - protein, 47 aa, Glycine max
  Clone ID: PAT_MRT3847_47500C.1.pep
GLTLFLTNLINCRLHAIPFFKYTKYNIPIPSSSVIQIFNKPSPPAIT

SEQ ID NO: 227545 - protein, 64 aa, Glycine max
  Clone ID: PAT_MRT3847_47501C.1.pep
KKTRWAILFSGDFDLHICAGNVWTKGELVCVFPLLGPKVSWGKLVYSRFFQKRRGKFGNLSFSW

SEQ ID NO: 227546 - protein, 51 aa, Glycine max
  Clone ID: PAT_MRT3847_47502C.1.pep
FLLSNSNIAYFPPPSLIGFYLDKTGMDLLVHTRINKLIVTTKVYILHSTMR

SEQ ID NO: 227547 - protein, 95 aa, Glycine max
  Clone ID: PAT_MRT3847_47503C.1.pep
MGMRYLYILASTSVLLPTSLLSFLAICWSMGRTGYNSRGFALVPPYFILTSIYTVFGYDSTSFACLLMRLSVMPVLQNQSDSTGSQIVKITSEFP

SEQ ID NO: 227548 - protein, 72 aa, Glycine max
  Clone ID: PAT_MRT3847_47504C.1.pep
ETSALEEEHTESEAVAHHRKIKDEHGIFVGGLCREATDEDLRKVVQRICEIVELRLHKYSLTDKNKGYAFEK

SEQ ID NO: 227549 - protein, 181 aa, Glycine max
  Clone ID: PAT_MRT3847_47505C.1.pep
LDGKAELYKDVAHSYLFLANNMQYVVVKVRKSNLGFLLGEEWLDKHKLKVREYASKYERVGWSAVFSALPENPAAELTAEQARACFVRFDAAFHEACRKQASWFVSDPKFRDEIKGSIASKLVQKYSEFYEKNRVGSESVRGFLPDDIGKYLSNILCNGDSGSVSSHSSSTTSSSHRSNRR

SEQ ID NO: 227550 - protein, 65 aa, Glycine max
  Clone ID: PAT_MRT3847_47506C.1.pep
GRPWCCVRWASLAPGRRWGGRFLCCPVGSWHGVVCGWGSVGFRGIRAFWVIVVKVAPGGALRLRW

SEQ ID NO: 227551 - protein, 83 aa, Glycine max
  Clone ID: PAT_MRT3847_47507C.1.pep
NKYFIIIMYLKHKVSDTLGQLVPCMQHAYYDSSSQVILQSITNTPFFPFQSVSITTFNQTVKSFSSTLSKFTSDRGKAPTTFT

SEQ ID NO: 227552 - protein, 217 aa, Glycine max
  unsure (1)..(217): unsure at all Xaa locations
  Clone ID: PAT_MRT3847_47508C.1.pep
MLLRNRSRAVTKPSLMGDHSSSQPCPNQSYKRTIIPSLFSPKFRAWAAKCLSAGAEALRSPTSILDTRALSSPFGSPLSHEAAASENTTSWDSKCIGLALVGALKDETFPQNSTKPSSGTVLFGTKHRVKIPPLPLSLPPPSFESKTCASAAAADCAAKTKDSPXIFATGVLSLSEMELSEEYTCVIAHGPNARTTHIFDNGIGESYWGLASAPRGA

SEQ ID NO: 227553 - protein, 47 aa, Glycine max
  Clone ID: PAT_MRT3847_47509C.1.pep
LIFGNTYTSNPSYYRSYQIIPLILIYSIECFIFVKFCQSCANDSLPL

SEQ ID NO: 227554 - protein, 37 aa, Glycine max
  Clone ID: PAT_MRT3847_4750C.1.pep
ASARRTKTSRLGAPKGPPQKAAVIRPPIGGAMFWTLV

SEQ ID NO: 227555 - protein, 58 aa, Glycine max
  Clone ID: PAT_MRT3847_47510C.1.pep
LRVRPRVRARVLARVRPLFRSNQCGVLWQGVRICSKRRGRSRIHMMCDKKVFHIKAGW

SEQ ID NO: 227556 - protein, 78 aa, Glycine max
  unsure (1)..(78): unsure at all Xaa locations
  Clone ID: PAT_MRT3847_47511C.1.pep
ATRNNRGAYGXNPGKAGXXXXGTXXQTXXQQTXRNQTATERTPQNXDPSKQSXXQXXXDPXXGGNPADKTGDXTTXIQ

SEQ ID NO: 227557 - protein, 39 aa, Glycine max
  Clone ID: PAT_MRT3847_47512C.1.pep
RIEGIYASLAGGYGQWGSSRMTKLIPYRSAIGLVADFGS

SEQ ID NO: 227558 - protein, 169 aa, Glycine max
  Clone ID: PAT_MRT3847_47513C.1.pep
VLVRNEIQKFLYPSSVIIILISLSVSNVVHVCIFLVVINHNHYVGRRKPSIHHGTPMILGHGYVILYHHFLFLTNVVVFTRYLLPQPHTLSLSLASPKTYPNLTLPSLNLKRKGHEGGEIGELREGEIGNEKGRNAWLRKKERYEICKRERKIEGNGTLRIERRIEGIG

SEQ ID NO: 227559 - protein, 166 aa, Glycine max
  Clone ID: PAT_MRT3847_47514C.1.pep
MFDTPGLLHPYLMSMRLNRDEQKMVEIRKELRPRTYRIKVGQAIHIGGLTRLDLVEASVETIYATVWASLNVSLHMGKIENADEVWRNHVGIRLQPPTGNDRAAELGTWQEREVKVSGTSWDVNTIDIAIAGLGWFSLCLKGEATTKLWVFHGVEVTLREPLVLDR

SEQ ID NO: 227560 - protein, 57 aa, Glycine max
  Clone ID: PAT_MRT3847_47515C.1.pep
KQDLNLSVVCDSQSRSQSSLYHVISMIFIHSHICFRLKQLIFPLYIQLDIKSFMTPH

SEQ ID NO: 227561 - protein, 42 aa, Glycine max
  Clone ID: PAT_MRT3847_47516C.1.pep
PCSQSRICCCFISLLVYHGLVYVGLSCSGPFPVIDPHLYSVI

SEQ ID NO: 227562 - protein, 87 aa, Glycine max
  unsure (1)..(87): unsure at all Xaa locations
  Clone ID: PAT_MRT3847_47517C.1.pep
ESKQAVENSPFLEKLKYRGYEDLFMVDAIDEYAVGQLKEFEGNKLXSATKDGLKLDESEDETMKQEALKEKFDNLCTVIQDVLGDNV

SEQ ID NO: 227563 - protein, 43 aa, Glycine max
  Clone ID: PAT_MRT3847_47518C.1.pep
GKNMDQNFFQFDPAPTQIEPPPTRKTPNYFLELQKTLCLEQPL

SEQ ID NO: 227564 - protein, 56 aa, Glycine max
  Clone ID: PAT_MRT3847_47519C.1.pep
NDRRAMLHAGVLSLNPLQWFFTFLYNTDVASVTAGLVMYLASLKKHSWFSALVRYI

SEQ ID NO: 227565 - protein, 65 aa, Glycine max
  unsure (1)..(65): unsure at all Xaa locations
  Clone ID: PAT_MRT3847_4751C.1.pep
PDWTGLQIRLSIVHLDSIFSGSFGNPENIIICGVIICLWSTTPKYVSCSSKMHDLRRSGGSTXCS

SEQ ID NO: 227566 - protein, 222 aa, Glycine max
  Clone ID: PAT_MRT3847_47520C.1.pep
PSRPPTRPPGFNMRKQESEVESENPRGSAEWGGDGLIGLPGLGLGSKQKSLAEIFQDDLGLNASVTGFPSRPASRNAFDENGDIISSVESELAHLRRDSLATDTLRSVSNVPVSSAAQNTGPQASYSYAAALGSSLSRSTTPDPQLVARAPSPCPTPIGGGRVVAAEKRGINSPDAFNGVSSGVNEPADIVAALSGMNLSADDVLDGDSHFPSQVESDVDNH

SEQ ID NO: 227567 - protein, 229 aa, Glycine max
  unsure (1)..(229): unsure at all Xaa locations
  Clone ID: PAT_MRT3847_47521C.1.pep
EGDTANFIETEQLLETEEFKFSFLQARGSIPLLWEQIVDLSYKPHLRVISHEETPKIVERHFHDLMQRYGEIVALDLTDKHGEEGQLSAAYAAEMQNQQNVRYVPFDFHHYCGSSNFDNLKILYDQISEDFEKQXLSRYFLIDRQGNILEEQRGLVRVNCIDSLDRTNVTQCYLAQKSLNLQLQRIEALTSSECISMFEEEYGKFRXLWADQGDEISLEFAGTHALKGD

SEQ ID NO: 227568 - protein, 87 aa, Glycine max
  Clone ID: PAT_MRT3847_47522C.1.pep
QSQDLFSTVWINATKGDVDCPPFGFYVFFLIKALVSFKRAYASCCISVKSVSSVQTNLGSRSLHAIGFLCSPFFHLKINTSYRFHSS

SEQ ID NO: 227569 - protein, 138 aa, Glycine max
  unsure (1)..(138): unsure at all Xaa locations
  Clone ID: PAT_MRT3847_47523C.1.pep
YGCEKTTEGELVEKPHNYPIIGTKWVFRNKLDENGIVIRNKARLVAKGYNQEEGIDYEETFAPVTRLEAIRMFLAYDSIMNFKLYEMDVKSAFLNGLIQEEVYVEQPLGFEDSQKLDHVYRLKKAXYGLKQAPRAWYE

SEQ ID NO: 227570 - protein, 71 aa, Glycine max
  Clone ID: PAT_MRT3847_47524C.1.pep
IKNYFFNLTCPSNILMMTCQRIGVGDNNHNDEGLNEDNGRLSLRHYLLCKLIPLSSFFYGTICLVMAATVT

SEQ ID NO: 227571 - protein, 129 aa, Glycine max
  Clone ID: PAT_MRT3847_47525C.1.pep
MEGGLKGSSLQDMKLLFVEMGVGYDLHGQDITAAAMRACRDAISANSIPAFRKGSIPGVTSDHMKLHVKLGVPHPLQQNLNKDKIKSVFPYGQIMNFEVVDGGLVCSTEEMAEKNDDCYIVNAAVYVGY

SEQ ID NO: 227572 - protein, 59 aa, Glycine max
  unsure (1)..(59): unsure at all Xaa locations
  Clone ID: PAT_MRT3847_47526C.1.pep
ETDKGCQRQSKKSRNGIDETICTMRLCQNXGQKSLPDIYKPXLVTLQTAPSLDFPSLWV

SEQ ID NO: 227573 - protein, 52 aa, Glycine max
  Clone ID: PAT_MRT3847_47527C.1.pep
MLYTPFEIVVVQYAQVQAPLNILKPDKRFSFATPGVINHSLARCSPPVCYVV

SEQ ID NO: 227574 - protein, 90 aa, Glycine max
  unsure (1)..(90): unsure at all Xaa locations
  Clone ID: PAT_MRT3847_47528C.1.pep
GSPASLSALSHLVTEEVVYQVVSDLLSPLVNAAAVVALHLGRGXXXXXXXXXXRPCCVRVVPFWEIGLXRCRCYXRARLVRWEAWTLHGV

SEQ ID NO: 227575 - protein, 89 aa, Glycine max
  Clone ID: PAT_MRT3847_47529C.1.pep
APPTIRRLFCSKAPQKKNYENFYPKEQKEHPRGNDKKYESTDKSNANTEDSGNLQEAFMKPVHHLVSPVSSIGLLLTSSSFGPRAQKQI

SEQ ID NO: 227576 - protein, 152 aa, Glycine max
  Clone ID: PAT_MRT3847_4752C.1.pep
LEEQNRALQMEKMNTMMASQARASFQKVTSNGMRRPMHSILGLLSMMQDDNLKSEQKLIVNSMLRTSTVLSNLINDAMDYSTRDDGRFPLEMKPFGLHAMVKEAACLAKCMCVYRDIGFVVDVDKSLPDNVIGDEKRVSQVILHMVGNAING

SEQ ID NO: 227577 - protein, 114 aa, Glycine max
  Clone ID: PAT_MRT3847_47530C.1.pep
LIWLGIHHSLSRAYSSVVVLTMLRAPRGLWYIGSFVIGVLEVTGGCLLSSSWVCTSLMCFGDRERKLPERRKIFLGSLLPCPSLLDPALPSDSWPGVCWLLLLTTLLGTVPLGA

SEQ ID NO: 227578 - protein, 71 aa, Glycine max
  Clone ID: PAT_MRT3847_47531C.1.pep
PLRALAYSALQGWHYVVIGVCVSYQHALDQLRDLPQQNTISANYYHGSPIGHAIESQSAKLNPLEGYNGSD

SEQ ID NO: 227579 - protein, 103 aa, Glycine max
  Clone ID: PAT_MRT3847_47532C.1.pep
MMRESFKGKGGSSSLQSMKEKEKHLVEKIQGIFNSLQCARKEGRGNDIVIFEEQMHQLLREWKAELESPANSLADGSFGSFPSELAQMLLGSEDKDDATSPLT

SEQ ID NO: 227580 - protein, 479 aa, Glycine max
  Clone ID: PAT_MRT3847_47533C.1.pep
MNSDQFQKNSMFVETPEDGGKNFDDDGRVRRTGTWITASAHIITAVIGSGVLSLAWAIAQMGWVAGPAVLFAFSFITYFTSTLLADCYRSPDPVHGKRNYTYSDVVRSVLGGRKFQLCGLAQYINLVGVTIGYTITASISMVAVKRSNCFHKHGHHVKCYTSNNPFMILFACIQIVLSQIPNFHKLWWLSIVAAVMSFAYSSIGLGLSVAKVAGGGEPVRTTLTGVQVGVDVTGSEKVWRTFQAIGDIAFAYAYSNVLIEIQDTLKSSPPENKVMKRASLIGILTTTLFYVLCGCLGYAAFGNDAPGNFLTGFGFYEPFWLIDFANICIAVHLVGAYQVFCQPIFGFVENWGKERWPNSQFVNGEHALNFPLCGTFPVNFFRVVWRTTYVIITALIAMMFPFFNDFLGLIGSLSFWPLTVYFPIEMYIKQSKMQRFSFTWTWLKILSWACLIVSIISAAGSIQGLAQDLKKYQPFKAQQ

SEQ ID NO: 227581 - protein, 479 aa, Glycine max
  unsure (1)..(479): unsure at all Xaa locations
  Clone ID: PAT_MRT3847_47534C.1.pep
MNPDQFQKNSMFVETPEDGGKNFDDDGRVKRTGTWITASAHIITAVIGSGVLSLAWAIAQMGWVAGPAVLFAFSFITYFTSTLLADCYRSPDPVHGKRNYTYSDVVRSVLGGRKFQLCGLAQYINLVGVTIGYTITASISMVAVKRSNCFHKHGHHDKCYTSNNPFMILFACIQIVLSQIPNFHKLWWLSIVAAVMSFAYSSIGLGLSVAKVAGGGEPVRTTLTGVQVAVGQTGSSXVSWPAFASGYIAFAYAYSNVLIEIQDTLKSSPPENKVMKRASLIGILTTTLFYVLCGCLGYAAFGNDAPGNFLTGFGFYEPFWLIDFANICIAVHLVGAYQVFCQPIFGFVENWGKERWPNSHFVNGEHALKFPLFGTFPVNFFRVVWRTTYVIITALIAMMFPFFNDFLGLIGSLSFWPLTVYFPIEMYIKQSKMQKFSFTWTWLKILSWACLIVSIISAAGSIQGLAQDLKKYQPFKAQQ

SEQ ID NO: 227582 - protein, 210 aa, Glycine max
  Clone ID: PAT_MRT3847_47535C.1.pep
CQDSSSNSTTQFWRTVPKGTFVYVDPEFLASGELTPKSDVYSFGIILLRLMTGKPALGIIKEVQYALDAGKLKSILDPLAGEWPFMLAEELIRLALRCCEMNRKNRPDLYSDVWRILEPMRASSRVTNTSQLGSQRLCQPPPYFICPIFLEVMQDPHVASDGFTYEAEAIREWLESGRDNSPRTNSKLAHRNLVPNHALRHAIQNWLQSH

SEQ ID NO: 227583 - protein, 70 aa, Glycine max
  unsure (1)..(70): unsure at all Xaa locations
  Clone ID: PAT_MRT3847_47536C.1.pep
TDPTPYLNNLSGEHDLNVLLFIADQSSSGRLPYFVVKTATDTHYLCTYPPLLVVNSTPEHDPSLLPLXCI

SEQ ID NO: 227584 - protein, 88 aa, Glycine max
  Clone ID: PAT_MRT3847_47537C.1.pep
PPPGFFSPRKIFFLARIMGSFPWARWTLLGVGGLLFGLFKAGGGLKCPPQGLGPCQLPRGFVFLKRWGAFPSFFFVLGPPRFRFLEKI

SEQ ID NO: 227585 - protein, 50 aa, Glycine max
  unsure (1)..(50): unsure at all Xaa locations
  Clone ID: PAT_MRT3847_47538C.1.pep
LFIRSHSIXDGXXEPSXTXLXRFMXGXGGRTSEQXRSFCLLAIPPLNHXR

SEQ ID NO: 227586 - protein, 54 aa, Glycine max
  Clone ID: PAT_MRT3847_47539C.1.pep
DLYFVVGFKCRFPLYGQCASVFFREGASRMVGPFNGRSRLIYGPQVRVLQPLDG

SEQ ID NO: 227587 - protein, 124 aa, Glycine max
  unsure (1)..(124): unsure at all Xaa locations
  Clone ID: PAT_MRT3847_4753C.1.pep
SLGRTPSRRGHLFCSYSPVVFRAPDYLERIPLATXEGAPECAFTAKHGSKMAPRQICSLQRAQEITLIPATSVEEAYNKLIVELEKSVPTLPGIACPKVENLPRGKRPVRPKTRCLTILPMEFN

SEQ ID NO: 227588 - protein, 127 aa, Glycine max
  Clone ID: PAT_MRT3847_47540C.1.pep
FKSQQQRAVFLVDVLVLEESRTMTESQWLNFFDALLCTDVTRKIGYDFRNDMRVLRSTFPFIAKLFPTVRKVVCMYRLLSKVDQYPEASRIVFDRTDVAKPTLSLSGVSEYFLNIKLEKTEREGNWS

SEQ ID NO: 227589 - protein, 104 aa, Glycine max
  Clone ID: PAT_MRT3847_47541C.1.pep
MISSTIATTANSTGNRMGAGLTGLKTMVNFMTRMTNSDTTYVVSYIGRNQCIQQWTPVWTTNVETMFYILYYVDEQDDAEVEYVVKNLLMTGWKSYLEHEFEHR

SEQ ID NO: 227590 - protein, 54 aa, Glycine max
  Clone ID: PAT_MRT3847_47542C.1.pep
LHNLRVRKPALHSLNDMGAEQNSATPAYRSINSFANAILPKFKGVPSIIPPKIH

SEQ ID NO: 227591 - protein, 172 aa, Glycine max
  unsure (1)..(172): unsure at all Xaa locations
  Clone ID: PAT_MRT3847_47543C.1.pep
VGXXXXXXAICKHEGVPLWFPGTKAVWECYNTASDADLIAEQHIWGAVDPRAKNEAFNCSNGDVFKWKHVWKVLAERFGIREYGFLEGEDLRLSEMMKEKGAVXEEIVKKNGLQRTKLEDVGDWWFADLILRMEAVLDSMNKAREHGFFGFRDSKKSFMNWIDKTKACKIVP

SEQ ID NO: 227592 - protein, 129 aa, Glycine max
  Clone ID: PAT_MRT3847_47544C.1.pep
NFFKPGRTNTFNSSWVGLFGKRYRPLKKGKKRNPGCLTSNWGNRVLITALTITMGVTPTTIFTSVLTTGTTTTVVKRKCLFIPPQGIHLVLKSFCSIGSFVHLITILIHVGDFIIRGGNIFVKSNIFFF

SEQ ID NO: 227593 - protein, 193 aa, Glycine max
  Clone ID: PAT_MRT3847_47545C.1.pep
MDDIVGYGFRPTDEELVKFYLKHKLLDDDPCVHFILDVDLCEVEPWDLPLLLADSAVRFNGREWFFFSPVDYKYSNSKRVNRTTKCGFWKPTGKDRGIRSKDTNNVIGTKKTLVYYQGRVSSGVKSNWVIHEYHAVTFHESQRTFVLCRLMKKPGKTTEGGTDALICDEGGPSRSMVSDYENQATTQGIPSVS

SEQ ID NO: 227594 - protein, 84 aa, Glycine max
  Clone ID: PAT_MRT3847_47546C.1.pep
CSVHFLLHSRSHMVRVFSRHQSLCHTVSMAQQDSQIGWSENGAAAATVSFVTVKPQLHIKSPSANDAILFFKAAFGADEVGRTH

SEQ ID NO: 227595 - protein, 57 aa, Glycine max
  Clone ID: PAT_MRT3847_47547C.1.pep
PTRPLFSSLLFSARHSTSGLGLFFHSDSVFVFSSKRVRNSSVDKLLPQAVTRKVVEV

SEQ ID NO: 227596 - protein, 385 aa, Glycine max
  Clone ID: PAT_MRT3847_47548C.1.pep
RPRVRPRVRLKSKYLSTLLSATSFDADGGLFPLAFGVVDVENDDSWTWFLSELHKVLEVNTECMPEFIFLSDGLNSITDAVRRKFPSSSHAFCMRHLTESIGKEFKNSRLVHLLWKASYSTTTIAFKEKMGEIEEVSPEAAKWLQQFHPSQWALVHFKGTRFGHLSSNIEEFNKWILDTRELPIIQVIERIHSKLKTEFDDRRLKSSSWCSVLAPSAEKLMTEAIDHASTYQVRLDDEVEFEVLSADRSDIVNIGSHSCSCRDWQLNGIPCSHATAALISCRKDVYAFTQKCFTAASYRNTYAEAIHHIPGKLEWSKTDDKSSMDDNILVVRPPKLRRPPGRPEKQMCVDDLNREKHTVHCSRCNQTGHYKRTCKAEMINSIEQF

SEQ ID NO: 227597 - protein, 83 aa, Glycine max
  Clone ID: PAT_MRT3847_47549C.1.pep
MRWLGSIDERQLWGCLFLSIGSVFFVGYFSIAVLCKLFPPSHIPLISALQNDWYYCFLVPLTLPIIVVAVYFHWLSMKLFKHA

SEQ ID NO: 227598 - protein, 219 aa, Glycine max
  Clone ID: PAT_MRT3847_4754C.1.pep
LEAGIAEELRMGNSGFLYYNQASGGPSSYKSTLGGHHHQALLAQTHQGHVGFGAASSSTSSLGVVNALRNSKYAKAAQELLEEFCSVGRGQFKKNKFNRQLSNPSSNLRGSGGGASSSSSKDVPPLSAADRIEHQRRKVKLLTMLDEVDRRYSHYCEQMHMVVNAFDMVMGFGAAVPYTALAQKAMSRHFRCLKDAITAQLKHSCEVLGEKDGAGNSGL

SEQ ID NO: 227599 - protein, 59 aa, Glycine max
  Clone ID: PAT_MRT3847_47550C.1.pep
PTRTPVSTMEGLALPVAQLRSQQLAFSRPKLFGIDEGTAYGYVSLIRHRVSGLRYRTSL

SEQ ID NO: 227600 - protein, 313 aa, Glycine max
  unsure (1)..(313): unsure at all Xaa locations
  Clone ID: PAT_MRT3847_47551C.1.pep
MESEREIMMIPCFDFGKALEEGSEEWKEMSKKVREACESHGCFLLVCDEMIPKGVREEFFSNMEALFDLPEERKMKHISPKPYSSYSGKSPVIPLSETFGIDDVPLSASAEAFTNLMWPQGNPPFCETLKIMSSKMLKLSSLILKMIVEDYGIQQHYISDVEKMKSSSNSRLIKYKIPENNNDSNTGLVSHTDKNALTIICQNEVQGLQVLSKTDNWIELXDGFVVIVGDILKAWSNGRLHAATHRVMMSGDKERYSFGLFTMPKEEMDIEVPIELVDEKIHPLRYHPFKYGEYISYFVSNLKENALEVFAGL

SEQ ID NO: 227601 - protein, 156 aa, Glycine max
  Clone ID: PAT_MRT3847_47552C.1.pep
MTLKYFITFLLIAAMAINIPQTLAQLGILSGLLGSVSNIQGTVFCTSKDNMGVKGASVPVFPNAQVQLVCGGKELSNAKTNDDGTFSMMMDPLLLDLASLLSGCNLVVATPLSNCNAKLPSTGGLISTLNFAGITSVGTQTMANIIPSGFHFLPSI

SEQ ID NO: 227602 - protein, 51 aa, Glycine max
  Clone ID: PAT_MRT3847_47553C.1.pep
KGPFPYWIRIRTSHSLRCKCKPCHSCVNNIEFLGPCFATVIFIHINRFLFF

SEQ ID NO: 227603 - protein, 147 aa, Glycine max
  Clone ID: PAT_MRT3847_47554C.1.pep
DSLRCVKPKRYQFVCASGHFSVRSPLSFQRHCGNTFAQCPLFFDRLRNFLLFHSFLCNQLLLQLSNSLRVCHLHLSVPYVDLFSLVFIRCTFIRWHSVDKLLRPLWQLWQSSVPIIMRTDISSIASGTSQIENGINSRNTTPEWANA

SEQ ID NO: 227604 - protein, 86 aa, Glycine max
  unsure (1)..(86): unsure at all Xaa locations
  Clone ID: PAT_MRT3847_47555C.1.pep
RVLGLFFLFLHSLQAGRILKYRALLSFKAFCXTDDPTHALFSWNLHTPYTSWLGLTCDYIRHVSRHNLAXSSLSGAISDDLSHLTL

SEQ ID NO: 227605 - protein, 103 aa, Glycine max
  Clone ID: PAT_MRT3847_47556C.1.pep
MMACASQTLIAADSCSFPSHRAMRKSQRLFSQNTSNLVLTVRASSEDSDCNVDECAPDKEVGKISMEWLAGEKTKVVGTYPPRRKGWTCYVEKDTAGTTTYIH

SEQ ID NO: 227606 - protein, 115 aa, Glycine max
  unsure (1)..(115): unsure at all Xaa locations
  Clone ID: PAT_MRT3847_47557C.1.pep
LKGRKDTDATTHYTDNSINAPNITNEAICTGFYQAGYAQTNNNMQLFLASFRTNGSRTLSMLMKKHQQTPFSVTSLXYDSFIPWALDAAKQHGLHGAAFFTNLSDVCNIFWRIHH

SEQ ID NO: 227607 - protein, 89 aa, Glycine max
  Clone ID: PAT_MRT3847_47558C.1.pep
KIGESWCWIQITRAVFGFFRPRVFYPRLFVLFKIPRVGIWGQRLIKKLFSRVFGFKCCSTVNFLLKRPSFFQTTKSFFKKPPRRYKIAK

SEQ ID NO: 227608 - protein, 59 aa, Glycine max
  Clone ID: PAT_MRT3847_47559C.1.pep
HSSSPTLFLNYLISFTIAHPTFPLVFIYSIPNYTHITTKKTNLITTYYDHKTTNSIQNF

SEQ ID NO: 227609 - protein, 87 aa, Glycine max
  Clone ID: PAT_MRT3847_4755C.1.pep
YGCTEELWIRPVLTLFVYIYAIMYAGYALTLRSYTSTLVNTAQAVKGQQLCMLITFSNDIITRSQNNVNLYSERHIILYSVTPVIGV

SEQ ID NO: 227610 - protein, 78 aa, Glycine max
  Clone ID: PAT_MRT3847_47560C.1.pep
ELNEVWDHEESVGENAEPAGVGNKGSICGDMVGELYRGGPNDVDGADPLVETCMVCREAETNVEQLHAIKAMNIAMNP

SEQ ID NO: 227611 - protein, 540 aa, Glycine max
  Clone ID: PAT_MRT3847_47561C.1.pep
MEEEQKLVKGTTNLEGSESEAKLELTVDEVVEEYVGSLGFSQMVHVFLVSLAWIFDAQSTLATIFSDAQPPAWRCKTGLCHGNNNSTGSVCGLVPGTWEWVGGNTSSIIAEWNLVCDRRFLAAVPASVYFLGSLIGSGVYGHLSDSWLGRKKTVQLSCILTSITAFATSLSPNIWTYVFFRFANGFTRSGIGICCLVLTTESVGRKWRGQVGQYGFFFFTIGFLTLPLVAYPTRTCWRNLYKLLSLLPLAYSLLLLPLVSESPRWLLIRGRDKEALQVLDRFARLNGKKKLPNNLTLVNPCGSSCDETSPNNNKENLWTTKWAAIRMVTVMLAGFGVGFVYYGVQLNVENLNFNLYVSVAINALMEIPAVVIGTFLLGFTNRRLLLSVSSYIAAVSSILCTFFSHKGGTSKVHNNNSYGGNWGQLIIEAIGFMGASTAFDILYIYCVELFPTNVRNFAVSMLRQAIMLGASVAPLLVVLGRLSPSLSFLVFGVFAISSGVLSIWLPETRNAPLYETLKQQEEEEKHSWMSQNDCALEMGK

SEQ ID NO: 227612 - protein, 66 aa, Glycine max
  Clone ID: PAT_MRT3847_47562C.1.pep
TGNIDIIIMQAIKRATLQTFYMETKTGSYENVLYQFHGPNKLPTILLFEVYRSKKITETHSFLHHN

SEQ ID NO: 227613 - protein, 101 aa, Glycine max
  unsure (1)..(101): unsure at all Xaa locations
  Clone ID: PAT_MRT3847_47563C.1.pep
XXXFXLVXXLXXVXLFXCVXXXMXXQSXXXFXXXXXXSXCCXXXXXFFXFXXCFXXXXXXXXXSXXLXXFXXXFXXXVXXSIXPXFXFXXXEFXAXVRXLX

SEQ ID NO: 227614 - protein, 83 aa, Glycine max
  unsure (1)..(83): unsure at all Xaa locations
  Clone ID: PAT_MRT3847_47564C.1.pep
RSXNTGSTHASAHASVRLREDDRRVHHVVFFYALANSLGKKHYKPNPPSHCIHTTIMQTPQQSSSNQPQKKKKKKKKSGRSRG

SEQ ID NO: 227615 - protein, 84 aa, Glycine max
  Clone ID: PAT_MRT3847_47565C.1.pep
GGDISSAKLKVPHFISGLRGVIHLRLEVRAFYIWFLGGTEHQVPWACVSTLATRSGVFFIPSYMGPMGWAHPFIIGGKRKLGGK

SEQ ID NO: 227616 - protein, 66 aa, Glycine max
  Clone ID: PAT_MRT3847_47566C.1.pep
FPLLSKKKKKKKKKKKKKKKKKKKKKKKKKKKKKKKKKKKKKKKKRGGLFGEPRLTPAGGKSHGVF

SEQ ID NO: 227617 - protein, 206 aa, Glycine max
  Clone ID: PAT_MRT3847_47567C.1.pep
MDRLRRLWMSLLPFGFLLFFSSAFIGVPGALAWSKEGHVMTCQIAQALLEPEASEAVYQLLPDHVKGNLSALCTWPDQIRHWYKYRWTSPLHFIDTPDNACSFQYSRDCHDPHGVEDMCVAGAVKNFTSQLMHYKEGTSDRRYNMTEALLFLSHFMGDIHQPMHVGFTTDEGGNTIELRWFRPKSNLHHVWDREIFSLHYRLYDRV

SEQ ID NO: 227618 - protein, 79 aa, Glycine max
  Clone ID: PAT_MRT3847_47568C.1.pep
KGPPPYFFPLNPPQILPPPRNFLGAQKNDLGGYDQKGLWKSFFKGGGRGKISREIGCFAKGEKPLGVPPGVSKQRGLFF

SEQ ID NO: 227619 - protein, 44 aa, Glycine max
  Clone ID: PAT_MRT3847_47569C.1.pep
MELFNLLYGKHIIVWYGIKRNDSHHCRCASYVALGHIRFRGHIN

SEQ ID NO: 227620 - protein, 78 aa, Glycine max
  Clone ID: PAT_MRT3847_4756C.1.pep
LEKLIHHVLQLMIGTTLIGSCYLTDPLFSSYEPADPILGGGVTIPVNRKRILNLCRWQLLLNWLKIGKFTCDSGPHTW

SEQ ID NO: 227621 - protein, 59 aa, Glycine max
  unsure (1)..(59): unsure at all Xaa locations
  Clone ID: PAT_MRT3847_47570C.1.pep
VNSIMEERDHRCSNNSTMITTTKKKTSRRSPTSDKLKNQHPCEKXAMKPYRGIMMLKWG

SEQ ID NO: 227622 - protein, 62 aa, Glycine max
  Clone ID: PAT_MRT3847_47571C.1.pep
GSNNAAHVILRLKKGEGITIHRFIVPICAGYCHAHEHNLEMYQHKSKALMPKKKKNPCAMIP

SEQ ID NO: 227623 - protein, 54 aa, Glycine max
  Clone ID: PAT_MRT3847_47572C.1.pep
EILKEDACGLYNVNIVVFSKEIKNFNTTKHGRKRKRNLQEKIQPIDYKINVVVN

SEQ ID NO: 227624 - protein, 70 aa, Glycine max
  Clone ID: PAT_MRT3847_47573C.1.pep
YHGFNLQSATSTYFKLQNCIKMASVTYFLTHYNPQFKTVSDMIIYSLVHTASISLTPFSLRKTLWGTDQH

SEQ ID NO: 227625 - protein, 86 aa, Glycine max
  unsure (1)..(86): unsure at all Xaa locations
  Clone ID: PAT_MRT3847_47574C.1.pep
MQXRXSSHRVXXMGNNRSXIXALXISMFAXXASIYVXRAEAGXENRXYLIKELDXXXGXGQSAISXDDTXKIIXCREXHKKLDXXE

SEQ ID NO: 227626 - protein, 82 aa, Glycine max
  Clone ID: PAT_MRT3847_47575C.1.pep
ARAHLHPTTTSLLHHQLSITNKLVTHPQLPTMVERIVARKPLATTTDTDPHHIISTNLDAFCCTHQYSTLCQGYIRPLLSIT

SEQ ID NO: 227627 - protein, 742 aa, Glycine max
  unsure (1)..(742): unsure at all Xaa locations
  Clone ID: PAT_MRT3847_47576C.1.pep
MAVAAKSSSTHAEKAANGESSAERCPENEVALQFPETDDPSLTVMTLLAWLLRIASCVLLIFLNTFFTLRTQPLTIXPFCMHIAVLPIGRFMGSTLPTKXYRFLGWSLTFNPGPFNMKEHVIITIFANCGVSFGGGDAYSIGAITVMKAYYKQSLSFLCALFIVLTTQMLGYGWAGILRRYLVDPVEMWWPANLAQVSLFRALHEKEPKSKGLTRMQFFLIAMGASFLYYALPGYLFMVLTFFSWICWAWPHNITAQQIGSGYHGLGIGAFTLDWAGISAYHGSPLVSPWSSIVNVGIGFIMFIYIIVPVXDWKFNTFDAHKFPIFSNQLFTASGHKYDTTKILTPEYDLNVDAYNKYSKLYLSPLFALSIGSGFARFTATLTHVALLYGRDIWRQSRSAMSNAKLDIHGRLMKAYKQVPEWWFLSILFGSMALSLLMAFVWKTDVQLPWWGMLFAFGLAFIVTLPIGVIQATTNQQPGYDIIAQFMIGYVLPGQPIANLLFKIYGRISTVHALSFLSDLKLGHYMKIPPRCMYTAQLVGTLVAGVVNLAVAWWMLDSIKDICMDDKVHHDSPWTCPKYRVTFDASVIWGLIGPKRLFGPGGLYRNLVWLFLIGAVLPVPIWVLSKIFPEKKWIPLINIPVITYGFAGMPPATPANIASWLVTGMIFNYFVFRYNKRWWQKYNYVLSAALDAGTAFMGVLIFFALQNAGHNLKWWGSELDHCPLATCPTAPGIEVEGCPVFK

SEQ ID NO: 227628 - protein, 80 aa, Glycine max
  unsure (1)..(80): unsure at all Xaa locations
  Clone ID: PAT_MRT3847_47577C.1.pep
XESAEXXKRSFKYXWVLDKLNAERGXRXFTIDMALWKFETTKYYCTVIXAPGHRDFIXNMITGTSQADCAXLIXDSTXGG

SEQ ID NO: 227629 - protein, 40 aa, Glycine max
  Clone ID: PAT_MRT3847_47578C.1.pep
IPILSLGLSALTEILKYEELAATKDCEMRLIILSVMLSMN

SEQ ID NO: 227630 - protein, 141 aa, Glycine max
  Clone ID: PAT_MRT3847_47579C.1.pep
SNIVDPYSDKFPGAADVSETSRSALCTEGILSLLEQAVEKGSALVLDDEFLDDDLLYQTTVAFAKSTPPEPVYKLPKQVVIVKSERQEGLTLETEEITSVTRIGEKMNKSSKIRRKEYGRGSLNVLVPHRTINVDKLAILK

SEQ ID NO: 227631 - protein, 122 aa, Glycine max
  Clone ID: PAT_MRT3847_4757C.1.pep
NLLIQGVFTGRCGTNLDHGVVAVGYGTENGTDYWLVRNSWGSAWGENGYIKLERNVQNTETGKCGIAIEASYPIKNGANPPNPGPSPPSPATPSIVCDEYYSCNSGTTCCCLFEYRGFCFGW

SEQ ID NO: 227632 - protein, 129 aa, Glycine max
  Clone ID: PAT_MRT3847_47580C.1.pep
HREGRKAHRRFRFLTPLEGAVNICMHFNPSSSASSRLLSIRISLDDDFDYQDRHLNLPFYIIVLQEPPIPRPCQNLKLLKANYMKNLTFLRHAQHTVDPNTSLLELSYLQQMEDVARRSAQAQADRMCR

SEQ ID NO: 227633 - protein, 60 aa, Glycine max
  Clone ID: PAT_MRT3847_47581C.1.pep
NVTATSFRDSIIIVLSFSIMYLWRLLKFERTTKRRCALHPLSLYMKFQEPYVKSEPNRLE

SEQ ID NO: 227634 - protein, 167 aa, Glycine max
  unsure (1)..(167): unsure at all Xaa locations
  Clone ID: PAT_MRT3847_47582C.1.pep
MPTLISSRFLLLVGESLHMRRALATSRSVLLHTSVKCMSQVEPHHGSLTVSGIGLQTETEPRNRSKTNKVKPLGSPSENRKSKGKPFGINEKKKTFRVVEKQQIESAPFAANSFSELGLPLVLIERLEKEGFTVLTEVQSAAVPTILNXHDVIIQSYTGSGEDVAYL

SEQ ID NO: 227635 - protein, 390 aa, Glycine max
  unsure (1)..(390): unsure at all Xaa locations
  Clone ID: PAT_MRT3847_47583C.1.pep
MAEEAQYSSGPDSAPLKRKYEDQPSGIELAKQRAQEVAARLLNAAPPPPLDAKRPKPDTGFDSLDLKPLYSASPPPVSYGHQGSSKKIDIPNGRVGVIIGKGGETIKYLQLQSGAKIQITRDIDADPNSSTRTVELMGTPEAISSAEKLINEVLAEAESGGSGIVTRRFTGQAGSDEFVMKIPNNKVGLIIGKGGETIKNMQASTGARIQVIPLHLPPGDTSTERTLKIDGTPEQIESAKQLVYQVISGENRVRNPAMSGGYPQQGYQSRPPCQSGRGLLQPXATWGPPQYNMQPATYLISTLCHPGXGGYSVTNWDQSTAPQQQSXHAGYDYYIQQQQQNPGPXSDGTAYNYSQAPSSGYNQPGQGYAQDGYRGYESPPQLGYGEPPSY

SEQ ID NO: 227636 - protein, 81 aa, Glycine max
  unsure (1)..(81): unsure at all Xaa locations
  Clone ID: PAT_MRT3847_47584C.1.pep
EEGLPSGGKKIFCRNFFPLKRAXKIKIYGGGNNHLLLKQILLKFKTLENPHLAGVKMHLLKWFPPHYLNQKTSAYQIGKMV

SEQ ID NO: 227637 - protein, 120 aa, Glycine max
  unsure (1)..(120): unsure at all Xaa locations
  Clone ID: PAT_MRT3847_47585C.1.pep
MLKYIARDKEFRRIPVIMMPAQDEVSIVVKCLRLGAADYLVKPLRTNELLNLWTHMWRRRRMLGLVEKNILNYDFDLVVSDPSDANTXSTTLFSDDTDDKSKRSTNPEAGISVQQEQEST

SEQ ID NO: 227638 - protein, 164 aa, Glycine max
  Clone ID: PAT_MRT3847_47586C.1.pep
QEYFIQFHRVAYVYFLAMAALNQLPPLAVFGRTVSLFPLLFVLCVTAIKDAYEDWRRHRSDRNENNRECLVLQSAQFCPKKWKNIQAGDVIKISADEMIPADMVLLGTSDPSGIAYIQTMNLDGESNLKTRYAKQETASAVLPDACAVSGVIRCEPFCRLLAAV

SEQ ID NO: 227639 - protein, 44 aa, Glycine max
  Clone ID: PAT_MRT3847_47587C.1.pep
AFLVNFSWLTHLAPRGLVFMFRAAFLCGLFRGKDFLPGGIFGDY

SEQ ID NO: 227640 - protein, 49 aa, Glycine max
  Clone ID: PAT_MRT3847_47588C.1.pep
SFRTILLDIFFIIPKSESLFIVTKLFVLIFSFSCFDLNSFYGSRLFNTS

SEQ ID NO: 227641 - protein, 62 aa, Glycine max
  unsure (1)..(62): unsure at all Xaa locations
  Clone ID: PAT_MRT3847_47589C.1.pep
SSVVVLCRLXGLCSXPCGXXPLGLVGVCXWLCGXGRGXRLGXXGXSLPRASLVLLQSRLYLR

SEQ ID NO: 227642 - protein, 57 aa, Glycine max
  Clone ID: PAT_MRT3847_4758C.1.pep
PVPTQKAFMGNRALQRVKTPIIKIHNPSNPKKKGGPLFFFYGTKGPETLLPGVPLEP

SEQ ID NO: 227643 - protein, 65 aa, Glycine max
  unsure (1)..(65): unsure at all Xaa locations
  Clone ID: PAT_MRT3847_47590C.1.pep
PTNWSGWHSVCILSLSFTQTDKPFLLQSVLSINYLSLSVCYFFLCLLCLVWAGNEWMSMQWXASS

SEQ ID NO: 227644 - protein, 78 aa, Glycine max
  unsure (1)..(78): unsure at all Xaa locations
  Clone ID: PAT_MRT3847_47591C.1.pep
TEMANKDLDRYYSALDKALMRXHTMKMEEINKILGKLGQQPIXGQDXAFISFHSNSXGARTRSSISRVQMQSVIPNLE

SEQ ID NO: 227645 - protein, 57 aa, Glycine max
  Clone ID: PAT_MRT3847_47592C.1.pep
PGPFKAYMCFPIMLRSCVILVAAVRLKCVYGVLRTLKKSYFYSFPIFCNFSISVFPC

SEQ ID NO: 227646 - protein, 101 aa, Glycine max
  unsure (1)..(101): unsure at all Xaa locations
  Clone ID: PAT_MRT3847_47593C.1.pep
HLTLHYSFLXPPXNYXTXLIYLNFPYXXDXXYTXXNXSXXXYXYLXXXXXXSXQFDXSXTXXSXSSXXPXSPDXNPXIRXTLXXXGXKPXXEFXAYYXXSN

SEQ ID NO: 227647 - protein, 81 aa, Glycine max
  Clone ID: PAT_MRT3847_47594C.1.pep
FPPFCGPRFFPVFWGHSAPIFFSLDRKNGPRGRMEGIFGPLGLAFNPSRFMPHSPSPPECVRFSGAKDSGPFFSQNLGPGH

SEQ ID NO: 227648 - protein, 69 aa, Glycine max
  Clone ID: PAT_MRT3847_47595C.1.pep
DSCIAHHYDQLSFRFRGRCGTLAFLSMVRCSRLLSWSSLVCGLRTWFCPCAAYAPSYAVLSRRCALYLR

SEQ ID NO: 227649 - protein, 104 aa, Glycine max
  Clone ID: PAT_MRT3847_47596C.1.pep
SRVKGTHSGTLFSFFAEDYNDNDDIILRQLSFLRTVWVSDATVESMLVMEEFRKLLLLSDRALFLVEFELWNCATKLSFRKRVSLVTGRRFRNNGYEWKKTLIL

SEQ ID NO: 227650 - protein, 315 aa, Glycine max
  Clone ID: PAT_MRT3847_47597C.1.pep
MWFLGWKGASGFSASSTAEQVTQGIDGTALTAIVTGATSGLGLETTRVLALRGVHVVMAVRSLDSGKNVKETILKEIPSAKIDVMELDLSSMASVRKFAADFNSSGLPLNILINNAGVMATPFTLSQDNIELQFATNHLGHFLLTNLLLETMKKTVGVCNQEGRIVILSSEAHRFAYREGIQFDKINDESGYSSYFAYGQSKLANILHANELARRLKEEGVEITVNSLHPGSIITNILRYHDYINALANMVGKYFLKNVQQGAATQCYVALHPQVKGISGEYFMDSNKGNPASLAKDSELAKKLWEFSLSLTNPK

SEQ ID NO: 227651 - protein, 71 aa, Glycine max
  Clone ID: PAT_MRT3847_47598C.1.pep
MEDACSPLWVVLGLRAWCQWFIELMCMRTMMCSTPDMIILMQRRSMSNIKGVSVQKKGLTMHTSVIHQNAE

SEQ ID NO: 227652 - protein, 142 aa, Glycine max
  Clone ID: PAT_MRT3847_47599C.1.pep
ELQFATNHLGHFLLTNLLLETMKKTVGVCNQEGRIVILSSEAHRFAYREGIQFDKINDESGYSSYFAYGQSKLANILHANELARRLKEEGVEITVNSLHPGSIITNILRYHEYINCLANMEGKYLLKNVQQGAATSMLCGHC

SEQ ID NO: 227653 - protein, 137 aa, Glycine max
  Clone ID: PAT_MRT3847_4759C.1.pep
MLLTHIHVFSPFTRFTYALHASPVRASSAPTRRRLVKTAAPQEPKNLRHLTSRIVQLTRRKQLRQILDEVEVAKKHFGKLNSIVMNAVVEACVRCGDIDSAIRIFDEMKKRDGCGVDTVTYATLLKGLGEAQRVDEA

SEQ ID NO: 227654 - protein, 62 aa, Glycine max
  Clone ID: PAT_MRT3847_475C.1.pep
MVVPESQMNSQNEVESPLQLEEQQQQQNNNNNKNHPFSSLGRQSSSIYSLTLDEFQHTLWEN

SEQ ID NO: 227655 - protein, 111 aa, Glycine max
  Clone ID: PAT_MRT3847_47600C.1.pep
FLGWKGASGFSASSTAEQVTQGIDGTALTAIVTGATSGLGLETTRVLALRGVHVVMAVRSLDSGKNVKETILKEIPSAKIDVMELDLSSMASVRKFAADFNSSGLALNILM

SEQ ID NO: 227656 - protein, 78 aa, Glycine max
  unsure (1)..(78): unsure at all Xaa locations
  Clone ID: PAT_MRT3847_47601C.1.pep
WKSNPLLVRAIWVLRWIQECDKDCYRHTFFKVRPQESMYTEATSGSPLAAHEPDYERAHASINSRSTQQXPXXXXXSX

SEQ ID NO: 227657 - protein, 74 aa, Glycine max
  unsure (1)..(74): unsure at all Xaa locations
  Clone ID: PAT_MRT3847_47602C.1.pep
MASSLAPSTSAATGLRLTHSLRFSPKPNSLRFATSPGVTLLCTRVTAHLDDVDLDXSPTATSPPMDPISTELHS

SEQ ID NO: 227658 - protein, 73 aa, Glycine max
  Clone ID: PAT_MRT3847_47603C.1.pep
LIILYKKRSTLGALFPNNNFREFPKGVKLRSISKHRTLLLLERLKTGTLEIACFKKKKQAPCIILTGGPPGFF

SEQ ID NO: 227659 - protein, 62 aa, Glycine max
  Clone ID: PAT_MRT3847_47604C.1.pep
ILLHTWHPMKPATPVMRIFFGLLGVAHFCIKELLSHEQYDALNLTKISPFRSKLEKRSNLKR

SEQ ID NO: 227660 - protein, 106 aa, Glycine max
  unsure (1)..(106): unsure at all Xaa locations
  Clone ID: PAT_MRT3847_47605C.1.pep
XXXXXXLAXSFGXXFFVXCXXXWVFXXXXLXXXFXXXXGFCXLXXCGXVCVXXWVGXXGXXXTSXPVVYCHXVXXXXXSXXXCXVXVXCLGXSGSXGFVXXVRVRX

SEQ ID NO: 227661 - protein, 88 aa, Glycine max
  unsure (1)..(88): unsure at all Xaa locations
  Clone ID: PAT_MRT3847_47606C.1.pep
GRAEGIRAHHLLTKLFACSXAXESLVFASLPEERXWEAXRPNTPIPTAQRELPKPIPAGVEIEQHPKQMDDTQXPKTFNYKENHQPGK

SEQ ID NO: 227662 - protein, 79 aa, Glycine max
  Clone ID: PAT_MRT3847_47607C.1.pep
GTSENPRLVSQHASEITIAGIGTHPLTQTTFRPSYLLSPFELGTSTRLMPEGNKTFLMPCGYAYKLASGSYMPESSRFS

SEQ ID NO: 227663 - protein, 115 aa, Glycine max
  Clone ID: PAT_MRT3847_47608C.1.pep
WTYLHVALWNYNSEKKLPFFFLKVPKRLLLNTSPALNCVIQTILKATDQLMPNMKYEGPKKRPYRAHTYTGACFLSPRNVRLKNTIFYLVTILHLQSSCLFILKTCSFNLCHFFY

SEQ ID NO: 227664 - protein, 70 aa, Glycine max
  Clone ID: PAT_MRT3847_47609C.1.pep
SPPPCQQSWKLFTKFYLGNLGEVLILKIPKGQFRHVKINNIGSTSPRPNVVLGGALQKQQQYCRNPRFLE

SEQ ID NO: 227665 - protein, 113 aa, Glycine max
  unsure (1)..(113): unsure at all Xaa locations
  Clone ID: PAT_MRT3847_4760C.1.pep
RLREDDRRGSLNGMEFLSFTLPSAPELKIMCLSCICASFYIMISYSTSCVSKLIAFAHDCIRGYRKTGIDLWKKVFNQSEXFYFFSHSSIPTFFTFHLNSPVATSIQGASLKS

SEQ ID NO: 227666 - protein, 100 aa, Glycine max
  unsure (1)..(100): unsure at all Xaa locations
  Clone ID: PAT_MRT3847_47610C.1.pep
GGRAFKXKSPRFSPRFPNSRPNIFIFPRVAPPLVGGYGYGYGGPFYGGGGGFPFFFFAPGPRVTLGVGGGFSPIFRFMFFGAPPPVVGGFFGSRNENFFF

SEQ ID NO: 227667 - protein, 54 aa, Glycine max
  Clone ID: PAT_MRT3847_47611C.1.pep
YSNKPPDVRVIIYVGPRRLRREILFFLFERPPLLNCISSPVVKFMVYFLLHPSG

SEQ ID NO: 227668 - protein, 43 aa, Glycine max
  Clone ID: PAT_MRT3847_47612C.1.pep
RVMTLPACTCKFGSHCTSTISVTFMDHSMLRLMRCLNSAGSPA

SEQ ID NO: 227669 - protein, 83 aa, Glycine max
  Clone ID: PAT_MRT3847_47613C.1.pep
HLWNLFNLSKFPLNKFFFLSNLSLSIFFASTRWAAFSYPKRAVICPKPSPFPFLKIFFFFFFFFFFFAFLLVFFAKPFFFSLT

SEQ ID NO: 227670 - protein, 86 aa, Glycine max
  unsure (1)..(86): unsure at all Xaa locations
  Clone ID: PAT_MRT3847_47614C.1.pep
FHIKLFGLKWQWCSHCCSLIPNSLREIVQRNGTQKTRTPLNYDTSKQSLCQLSIDLLGGRISVDKXTGYSITLIRYSPISNLLRAA

SEQ ID NO: 227671 - protein, 43 aa, Glycine max
  Clone ID: PAT_MRT3847_47615C.1.pep
LPLREKKKKKKKKKKKKKKKNKKKKIKKKKKIKIKNYKKNING

SEQ ID NO: 227672 - protein, 65 aa, Glycine max
  Clone ID: PAT_MRT3847_47616C.1.pep
YIVAFKVVVIKINNHYHINVNLLLNHQYQNLFNFPFFLLIFFLADTRNVQVASEIWNKRHGLRNV

SEQ ID NO: 227673 - protein, 62 aa, Glycine max
  Clone ID: PAT_MRT3847_47617C.1.pep
KRYGQRYIQMIKEIWKSQRTYCFHLSVNCANCELIRAYCVQLPSNYTLDEEIRYILSSCEKC

SEQ ID NO: 227674 - protein, 53 aa, Glycine max
  Clone ID: PAT_MRT3847_47618C.1.pep
VPTTMRFAFSLIWSFVSMYLFKSGGCLNLLSVRRRDHRCQGRTQIWISPFVVF

SEQ ID NO: 227675 - protein, 71 aa, Glycine max
  Clone ID: PAT_MRT3847_47619C.1.pep
RYIYVYSSEAYAREQTQIVRKLVSEHNGSDFVFAEEPEAKKELWKVRKEALWACFAMEPNLVAMTTGGGGG

SEQ ID NO: 227676 - protein, 223 aa, Glycine max
  Clone ID: PAT_MRT3847_4761C.1.pep
SPYQKPLNSARPPLIPSEDESDKQEESFFGSIGKLLTNAGASVVEIMGALFPGFRKNPPQSYEFQSPPLFQQPQKQVNAWPVQESFVIPDEDEPPSIDPRTPTPRKTYAFMSKDAEKMQQLWQSRAFYSGWDGDLQQQQQLKHQQQQQQQQLKHHRHQYHSSVPHTYYEQSHEETNEIVFGAVQEQDGKKGTVVIKPVDYGQSVYDHHYIRPRISSMGHINKY

SEQ ID NO: 227677 - protein, 127 aa, Glycine max
  unsure (1)..(127): unsure at all Xaa locations
  Clone ID: PAT_MRT3847_47620C.1.pep
GSSFIAGLGFSSFHTASKSSVELHSQEEEVVIALGSNVGDRLHNFKEALXKLMRNSGINITXHACXYETDPAYVPDXPCFNNLTGRGCTXLGPHELLAGLKKIEKDLGRTGWIPDGPRAIDLDILFY

SEQ ID NO: 227678 - protein, 44 aa, Glycine max
  Clone ID: PAT_MRT3847_47621C.1.pep
FRSTHSPPRFFFSFHPAFLCRGQPQHMLTGQPQNITSTPNKIDL

SEQ ID NO: 227679 - protein, 96 aa, Glycine max
  Clone ID: PAT_MRT3847_47622C.1.pep
QVNMHQNSAEGHHMGNFPPTNFLSFFGPLILVWIGGAPLLVLASIALCTCMMAPQNSPISNIHVYKSTLINLFSIISNWAKTKLNSNSIMNWIVAH

SEQ ID NO: 227680 - protein, 34 aa, Glycine max
  Clone ID: PAT_MRT3847_47623C.1.pep
EKAWIKLMPTLKSYVKGLIPKLYTFTNLRLKASC

SEQ ID NO: 227681 - protein, 53 aa, Glycine max
  Clone ID: PAT_MRT3847_47624C.1.pep
DLSLAYVSRSRTLHGHRACIAVRSYAGRAIRARSQCRRRKEDCRIEYTCCRTK

SEQ ID NO: 227682 - protein, 91 aa, Glycine max
  Clone ID: PAT_MRT3847_47625C.1.pep
KSLVQVALFFFSFTCHTSIHRSRSIFDNDVMHENMHCVTRSMLLKSKSSNTWTKFGNRQDLLKSGDLLCKKSLRTSMTDPKSALTETSGLA

SEQ ID NO: 227683 - protein, 78 aa, Glycine max
  unsure (1)..(78): unsure at all Xaa locations
  Clone ID: PAT_MRT3847_47626C.1.pep
LSLVVPLFLSCASRACWCGPSCWLCXSSFPVSPLCSVRVVAGVLALLLSSSLSFFAXFFRCAVRFPXSVSARPPLXLV

SEQ ID NO: 227684 - protein, 85 aa, Glycine max
  Clone ID: PAT_MRT3847_47627C.1.pep
PPGVALAAPIKLRNRGVIGAGERVVVVSPAHGLKFAQSKIDYHSGLIPGMGRYANPLVSVKADFGSVMDVLKDFLHNKSPDFNKS

SEQ ID NO: 227685 - protein, 39 aa, Glycine max
  Clone ID: PAT_MRT3847_47628C.1.pep
NTFSLSYVFSCARYRFVNHCSLCLFAHEPEPLYMNFHKQ

SEQ ID NO: 227686 - protein, 54 aa, Glycine max
  Clone ID: PAT_MRT3847_47629C.1.pep
YIFIMVTKILSVISIYSVSYTVLCARPEFKASDHNSSTIHVTNFASECRSFKMT

SEQ ID NO: 227687 - protein, 98 aa, Glycine max
  Clone ID: PAT_MRT3847_4762C.1.pep
KLYFIFLYINGPTVLPTEILIVDISFGTKCGSKEFFNPHKSWKTRLILRWAPLTQHICPFIIIFMCQLLVRMHSKPYLLYPTKEFIKNQKITSHYTSP

SEQ ID NO: 227688 - protein, 62 aa, Glycine max
  Clone ID: PAT_MRT3847_47630C.1.pep
YFFWGVYFVYSSRSFPQNKILSTSQSTKHGATRGVKGLNAPAYNNRARIYYSRGVGPGPPCL

SEQ ID NO: 227689 - protein, 68 aa, Glycine max
  unsure (1)..(68): unsure at all Xaa locations
  Clone ID: PAT_MRT3847_47631C.1.pep
MVNPGLFSANKSTNSVKVSFRIPYFTQWGQSLLVCGSVPVLGSWNVKKGVLLXPVHQGAELIWGGSIT

SEQ ID NO: 227690 - protein, 167 aa, Glycine max
  Clone ID: PAT_MRT3847_47632C.1.pep
NHPQPHLLSQTQPQPQGATSHFHGNFQLSQPQTHVVAQQQHQQQQPHPHPQVHNNANTNAHVAAPTPPKRANQKPPSRPQGSSNATQSSAFKTMELTVAPPRKKRSFPGNLIPEKVAKLVPESAIYAKLLELETQIDSALARKKIDVQANVRNPRCVRKTLRVYVYN

SEQ ID NO: 227691 - protein, 71 aa, Glycine max
  unsure (1)..(71): unsure at all Xaa locations
  Clone ID: PAT_MRT3847_47633C.1.pep
SICLPRKRRVXIMEKVLCFKHPSAGIVIICGVKVGCLCMKRPARDIIHPKVSNLFHSLIDISLSFSFHLWV

SEQ ID NO: 227692 - protein, 67 aa, Glycine max
  Clone ID: PAT_MRT3847_47634C.1.pep
PDLETCCSEVAIFTRRSEIPGDVRPASVRRSRNERAKRRGKLVFHDRNNVSHFARNFGLFFCLRKMN

SEQ ID NO: 227693 - protein, 448 aa, Glycine max
  unsure (1)..(448): unsure at all Xaa locations
  Clone ID: PAT_MRT3847_47635C.1.pep
AVLLLIILSTALEGNGEDDHEPCKEKVLDPRPHSVSILEFGAVGDGKTLNTVAFQNAVFYAKSFADKGGAKLYVPSGKWLTGSFNLTSHLTLFLERGATIIASQDYAHWTAMDPLPSYGRGIDVPVGRYRSLIYGQNLSDVVITGDNGIIDGQGSVWWDLISTHSLNYSRPHNRDMDGSDNIIISNLTFLNSPTALEHPVEDEWKNNEKIQIPTKSPFTRGIGPDSSDHVXSDIWKVSTCHDATVLTSGWDEXGVPYGNPTLXVHIRGVYLQLSSCAGLVVGSEMYVGISDIIAEQLHITNSTFGIELKTTRGRGGYMKNIFISDAKLENIYLGISMTGSSGSHPDDKYDPNAVPDVGNVTFENVIGANIAIAGNFSGIVDSPFTPICLSNVTFSTSSESSPSWFCSNVMGISKEVFPEPCPDLQNTYSNFSSCFSSLHPSSSFVSSA

SEQ ID NO: 227694 - protein, 58 aa, Glycine max
  Clone ID: PAT_MRT3847_47636C.1.pep
DLLGFVMQEDHFPRVALELMSRILPIPQAVRCLLALGEFFLRLRALGSLWPHRPRGRA

SEQ ID NO: 227695 - protein, 56 aa, Glycine max
  Clone ID: PAT_MRT3847_47637C.1.pep
GYKKCTIYKARFFFFCFFFFFPLPSSILSTEEVCSTSLTFLGFLKISLSLPKKKNK

SEQ ID NO: 227696 - protein, 130 aa, Glycine max
  unsure (1)..(130): unsure at all Xaa locations
  Clone ID: PAT_MRT3847_47638C.1.pep
DLEEQEPDLANLVNVLRDVFLHTAYEARRLIRNALSSIEXLHNADVPTIAHIVXLHSLQMMMTAPGTKENMDLLLLLSRGXKTRASRHITNYTVFDDKLVLANTQEFFDGNFTEDPWLPINVNRLYPIKH

SEQ ID NO: 227697 - protein, 112 aa, Glycine max
  unsure (1)..(112): unsure at all Xaa locations
  Clone ID: PAT_MRT3847_47639C.1.pep
MRIFTFTHEARQFRRKALSRIEWQPKAVVPTPSHIAQIHMHPLMLYALESDDNIVLLTPMDLLLEQPACLAHXNILKLEKPHLVAHTQLFFYGIFSDQLCLPLISKNRSFVQ

SEQ ID NO: 227698 - protein, 51 aa, Glycine max
  Clone ID: PAT_MRT3847_4763C.1.pep
LTNAPTSFQCLMNHIFQHALRKYVLVFFDDILVYSSTWHEHLCHLEVVFKV

SEQ ID NO: 227699 - protein, 71 aa, Glycine max
  Clone ID: PAT_MRT3847_47640C.1.pep
KSLLIFSFFFPPPEGLPPPKFVRETPLPLLTQGFFFSGPQKKKKKKKKKKKKKKKKKKKKKKKKKKKNKKK

SEQ ID NO: 227700 - protein, 211 aa, Glycine max
  Clone ID: PAT_MRT3847_47641C.1.pep
MSCPLHLLCFGSIKFTIFIDVGGKLLRESLGGISDDTLLNSLGLVNDLSSVDIVNFSLPNLPAPPNAFRGIRRKSSSLRRWLAICTDDLIGNGKYQTTSNLLRKYLGDFLIASYLNVVEESGYDERHAKEIERAVLLQTLDCFWRDHLVNMNRLSSAVNIRSFGHRNPLEEYKIDGCRFFISMLSATRRLTVEALLRYWTSPMESQELFLS

SEQ ID NO: 227701 - protein, 70 aa, Glycine max
  Clone ID: PAT_MRT3847_47642C.1.pep
MLHFSDETSRSSANETSGPGGPAIITDITVNKSVEFSYEELATATDNFSLANKIGQGGFGSVYYAELRGE

SEQ ID NO: 227702 - protein, 55 aa, Glycine max
  Clone ID: PAT_MRT3847_47643C.1.pep
YGRPFFFSCTIFTDQEKRGRSFEGESTEWNHSQRPLYKESPQATQKRFINDSHAG

SEQ ID NO: 227703 - protein, 168 aa, Glycine max
  unsure (1)..(168): unsure at all Xaa locations
  Clone ID: PAT_MRT3847_47644C.1.pep
FYIQSEIYKLRFFFLIFLFVISIIFLIICPNFFCILLGXDGLGLVSYLLVIYYQNFKSFYSGLITALTNRVGDVFILCSISLFFCYGSFNYINFFFNYNIYFCYIFLIASLTKSAQIACSAWLPTAMAAPTPVSTLVHSSTVVTARVYIIILLTYDLLQDIKYLSMMM

SEQ ID NO: 227704 - protein, 35 aa, Glycine max
  Clone ID: PAT_MRT3847_47645C.1.pep
HRRGRPLRHSKTLITSLAPVCSPLASLLTSGWMRG

SEQ ID NO: 227705 - protein, 117 aa, Glycine max
  unsure (1)..(117): unsure at all Xaa locations
  Clone ID: PAT_MRT3847_47646C.1.pep
MKPCLLGLCHSSQPNLSISALRNRINIHCCRCILNSDHTFLTWDWNRWLRHFCQIEHAXNFASVLKVQLDDAIDNDDYEEAANVDRXALMETTSTDTDAEVTDQLKSAMYDERYHDA

SEQ ID NO: 227706 - protein, 41 aa, Glycine max
  Clone ID: PAT_MRT3847_47647C.1.pep
LSQEVFTIASMDPAIDVAPTFDIAALYDEYIIMTRLYPNDD

SEQ ID NO: 227707 - protein, 81 aa, Glycine max
  unsure (1)..(81): unsure at all Xaa locations
  Clone ID: PAT_MRT3847_47648C.1.pep
SAGSEKNKMKVRRKLREPRFCFQTRNDVDVLDDCYKCKKYGXKVVKNSLHPSKMKRKMTPMKCQVAIIQGLRQKRIFRLTQ

SEQ ID NO: 227708 - protein, 57 aa, Glycine max
  Clone ID: PAT_MRT3847_47649C.1.pep
TLALSLINSPLTSDIFASFQAQQKSNLSICPSSTCGAPLIPIDHSAFPQNNKKKINH

SEQ ID NO: 227709 - protein, 210 aa, Glycine max
  unsure (1)..(210): unsure at all Xaa locations
  Clone ID: PAT_MRT3847_4764C.1.pep
MSGVLLWVSSGPKENINSLVSFSCRSGGGGERTQKRFSGISFASGASAFSSAVAAETLRSSEERVYEVVLKQAALVKENKRGTKIALDLDKDVEGDFTNVDLLNAAYDRCGEVCAEYAKTFYLGTQLMTAERRKAIWAIYVWCRRTDELVDGPNASHITPGALDRWEQRLSDVFEGRPYDMYDAALSHTVSKYPVDIXQPFKDMIERDED

SEQ ID NO: 227710 - protein, 43 aa, Glycine max
  Clone ID: PAT_MRT3847_47650C.1.pep
SNGTPPCKRRHLSAGRVWVVTPQAWTRYTLPSRPKRPGSFSPF

SEQ ID NO: 227711 - protein, 58 aa, Glycine max
  Clone ID: PAT_MRT3847_47651C.1.pep
DLLNFFPYPLFFQVFFHPPFFIHPPCILNTPWKGFEQFSIFYPDKIVKLLKTGKRERL

SEQ ID NO: 227712 - protein, 85 aa, Glycine max
  Clone ID: PAT_MRT3847_47652C.1.pep
AVTKPDIIDEVMWQGVHERIFLYEADAEEFIVNNTNVYDMIFVDAYDGEDIFPHKLWDPDSPFLKALSNQLHPKHGTVVVNLHLT

SEQ ID NO: 227713 - protein, 79 aa, Glycine max
  unsure (1)..(79): unsure at all Xaa locations
  Clone ID: PAT_MRT3847_47653C.1.pep
PSNPTILNFSXTSPIYHSQYFFXXTNLTPPTXPNPTHFIITSPLSXINPFSQYPSFNHNNSSSFSPNPSPSTNFLSSIP

SEQ ID NO: 227714 - protein, 138 aa, Glycine max
  unsure (1)..(138): unsure at all Xaa locations
  Clone ID: PAT_MRT3847_47654C.1.pep
MGRGVSSGGGQSSLGYLFGSGEAPAAKPATNNAPAQPEVQAVNNAPPSKASPPTKTIDPNKAAGINSHSTDGQNTGNFITDRPSTKVHAAPGGGSSLXYLFWWTWRGEMIPCLQSFCSMNDLFWKFRSWKHNRRYGVL

SEQ ID NO: 227715 - protein, 194 aa, Glycine max
  Clone ID: PAT_MRT3847_47655C.1.pep
MSNHHHVVQTSPPKLFGFPLTEQEELNSDAERKYEVGEDRKFRCHYCKRVFGNSQALGGHQNAHKKERQRARRFQIHTHRRSIAAPSSASVLNSHAIIRSVPSVTVTTLPSSIYLRGGPPTTSSLLPIFHPRQPNNTKHFPSRPILIPSSTYHRTNCTPSFPFQLYASPSVLQSAPNVRDFSAESREVDVHLKL

SEQ ID NO: 227716 - protein, 108 aa, Glycine max
  Clone ID: PAT_MRT3847_47656C.1.pep
MGRGVSSGGGQSSLGYLFGSGEAPAPKPATNNAPAQPEVQAVNNVPPPKASPPTKTIDPNKAAGINSHSTDGQNTGNFITDRPSTKVHAAPGGGSSLGYLFGEPGEGK

SEQ ID NO: 227717 - protein, 108 aa, Glycine max
  Clone ID: PAT_MRT3847_47657C.1.pep
MGRGVSSGGGQSSLGYLFGSGEAPAAKPATNNAPAQPEVQAVNNAPPSKASPPTKTIDPNKAAGINSHSTDGQNTGNFITDRPSTKVHAAPGGGSSLSYLFGGPGEGK

SEQ ID NO: 227718 - protein, 256 aa, Glycine max
  unsure (1)..(256): unsure at all Xaa locations
  Clone ID: PAT_MRT3847_47658C.1.pep
ACVLGHKSPMEKTVHIAVVPGPGSSHLVPILQFSKRLVHLHQNFHVTCIIPSVGPPSCASKSILETLPPNITSIFLQPVKPENLPQEVAIEAQIQFTVTFSLPSIHQTLKALTSRTHFVALVADSFAFEALDFAKEPNMLSYIYFPTSATTLSWYLYVPKLDKETSCEYRDFPEPIQIPGCVPIHGRDLNNQAQDRSSQAYKLFVQRAQRLPLVDGIFMNTFLEMETSPIRTLKREGKRSPLVYDXWTIVPGGDDD

SEQ ID NO: 227719 - protein, 68 aa, Glycine max
  Clone ID: PAT_MRT3847_47659C.1.pep
EDIELNSSVNIIRFYSSQKSSAPLDCAPTLYSISMQIYIYKKKNIFRLCMPAELCLHQSPSISKLILR

SEQ ID NO: 227720 - protein, 63 aa, Glycine max
  unsure (1)..(63): unsure at all Xaa locations
  Clone ID: PAT_MRT3847_4765C.1.pep
IHCQISQRKVQXTSNKFSSAIXRPSHLYIRLLSSNINYSRKTRRKLRHLRIVIVLQFSHLKTI

SEQ ID NO: 227721 - protein, 70 aa, Glycine max
  Clone ID: PAT_MRT3847_47660C.1.pep
NDYGTHFDADGNKALPSSFQSLTASSIYIGDLFGALIAASINDRWGRKMVFWIASICILLGGCAHVGLST

SEQ ID NO: 227722 - protein, 46 aa, Glycine max
  Clone ID: PAT_MRT3847_47661C.1.pep
SLPCVIMNAVPAVLVMTDLIACVLQTVLVHTIDILCVRNVKKLKSD

SEQ ID NO: 227723 - protein, 113 aa, Glycine max
  unsure (1)..(113): unsure at all Xaa locations
  Clone ID: PAT_MRT3847_47662C.1.pep
EVQIQPSSRDLLLWGSNSDGSYSTKSAYNFLKNEDSQTIEDSAFKNIWNLKLPPRACAFSXESSXNRIPTKVNLRRRHVTLPSSICPLCDEEEETVGHVMYSCIKTRCLWWET

SEQ ID NO: 227724 - protein, 54 aa, Glycine max
  Clone ID: PAT_MRT3847_47663C.1.pep
YHIGCDYRRRIGSYPHYATSKSLEELVRLNHSLLELQQKDDPHIMKHTSRSIHS

SEQ ID NO: 227725 - protein, 342 aa, Glycine max
  Clone ID: PAT_MRT3847_47664C.1.pep
MDTEFKTIEASIMSMLGQLQSEVEILQRMVYKNKNQHRRSSYFQRLLKVRRDLRLLQSANMEELVSSCLLVIKGDRPKQKLHLLGSLKRRKCDGDKHNFMERLLGAARLLAEMVEPILKAASEVSVLFAQSFFMGFSVTIMALLARLRVLVQQILLDVVSLFNMVSSLSISKQSIKITHNGIEVFRDFYPVSDDFVTLECVWKSDKFILLERKHKTNDESHVEDSGGNVSVQTSDVNYNSIESFLGDDQLFHERVEADVVAKEDPNHIDDMNTDLLTGSSQIDDKETRYSDQDTTKAFINESSQEAGLPASSRSSTNDKLQSCPKKVAFVSIKNLTLMRHKS

SEQ ID NO: 227726 - protein, 87 aa, Glycine max
  unsure (1)..(87): unsure at all Xaa locations
  Clone ID: PAT_MRT3847_47665C.1.pep
KSPNESKIKGIFNVFEASIPKKVMDKFFQIKQDSPIKGPFFFHKTXGAFKPVEKLWDGELLAKNFIKMLTKALSLKQIDSAFYLLRF

SEQ ID NO: 227727 - protein, 136 aa, Glycine max
  Clone ID: PAT_MRT3847_47666C.1.pep
QQHRSHWLTNATTQCGQAFSQTQYCCSGAYGSPTTCKPSPYSQIFKNACPRAYSYAYDDKTSTFTCASAAAYTITFCPSPSSNPRYFLLFTLTVKKGSFVFTAKYERCGNWDSRIFCSDLFFHFTLQQLFTSITTK

SEQ ID NO: 227728 - protein, 85 aa, Glycine max
  Clone ID: PAT_MRT3847_47667C.1.pep
QRGWVLPRRRSGCNARYPFPAAAAAATTTPFAPPVIVCSHIDPSTPHRYGQIVALFGRVAPSCRLLYVSPLPCGHPPSLHPFFKR

SEQ ID NO: 227729 - protein, 47 aa, Glycine max
  unsure (1)..(47): unsure at all Xaa locations
  Clone ID: PAT_MRT3847_47668C.1.pep
FPCYLVSLKGFRLTQXTPRXILSXGDSNXSEXKRGRXQYHSEYLLIF

SEQ ID NO: 227730 - protein, 329 aa, Glycine max
  Clone ID: PAT_MRT3847_47669C.1.pep
MDQLTLAFPFLLTLHLLVSGVVATTSFTLVNKCDYTVWPGILSNAGIATLPTTGFVLQTGESKTVTAPTSWGGRFWGRTLCTQDSAGKFSCLSGDCGSGKLECAGNAATPPATLAEFTLDGAGGLDFFDVSLVDGYNVPMLVAPQGGSGDNCTSTGCVGDLNGACPSELRVTSVDGKQSVACKSACEAFGSPQYCCSGAYGSPTTCKPSPYSQIFKNACPRAYSYAYDDKTSTFTCASAAAYTITFCPSPSSNPSQKSWQGQNPKSDSSGSASASASGSPQLNNGTMVYVGSMDESELWSAGSTHGPESQTIAGFVSITIAVWLLCHLY

SEQ ID NO: 227731 - protein, 148 aa, Glycine max
  Clone ID: PAT_MRT3847_4766C.1.pep
PSKQDKNNFFKRREPFGKKNSLAEKKKRTPPPPWGDGGPKYPGYKPPLKIKPPNPFFGPTLLKINPQNGSGPPGPLFKKKKKPRPLFFFPPGPPLGSPAKHTKFRGPAWQRPFTSFSKQKWPQYKGPPPLGKKPRGGVKFPWPPGKKG

SEQ ID NO: 227732 - protein, 103 aa, Glycine max
  Clone ID: PAT_MRT3847_47670C.1.pep
TPPDQLFICYGCIYSNSGRSLPVGGTLSTNRAGLREPVINLHFCPPAHGACINVVVASRVASIYPYVTHQIERFDQSLNIGYVTPQVSDLQKSIKQGGNPAYH

SEQ ID NO: 227733 - protein, 59 aa, Glycine max
  Clone ID: PAT_MRT3847_47671C.1.pep
YVESMNAHYHRYGRQTSYYIILEGPSWRHDPRLLLTTHPSLTKTKANIRQDIEQACTST

SEQ ID NO: 227734 - protein, 119 aa, Glycine max
  unsure (1)..(119): unsure at all Xaa locations
  Clone ID: PAT_MRT3847_47672C.1.pep
RHSARAGHALLHTLYVQPLRHNTHLFGGXWALYLLINPDGTCQGVNALNMEDGTLHSDLTAXTFLVIGGYAKAYFSATSTHTSTVDGNAMDARAEIPIVDLQFAQIHPTRIYGARCLIT

SEQ ID NO: 227735 - protein, 70 aa, Glycine max
  Clone ID: PAT_MRT3847_47673C.1.pep
MASSGAVPFWRAAGMTYITYSNICANLVRNCLKEPYKAEAISREKVHFALSKWVDAKPEKPTIRSDTPEQ

SEQ ID NO: 227736 - protein, 107 aa, Glycine max
  unsure (1)..(107): unsure at all Xaa locations
  Clone ID: PAT_MRT3847_47674C.1.pep
LTIHAMVIEPLLGTDDASLVFSPNSFSAVPLWENIMCXNNTRFPHNTLLYXDEIPIGADAWKISMSEQYLLNAVEKTYSVTYGAKATYSIYCSTHQGPAMVAKNPVH

SEQ ID NO: 227737 - protein, 41 aa, Glycine max
  Clone ID: PAT_MRT3847_47675C.1.pep
LSFIKVTRVRTKAGNSTKIQKWGFVPKKGMVPHPTKVLTRK

SEQ ID NO: 227738 - protein, 52 aa, Glycine max
  Clone ID: PAT_MRT3847_47676C.1.pep
KAKIMLFFLLYLPPKTLLKLFQLIKGLRERLLCHPIMGAILFETAPISSGVK

SEQ ID NO: 227739 - protein, 63 aa, Glycine max
  Clone ID: PAT_MRT3847_47677C.1.pep
SERTVGITHVGKFHLQEVIVSCSNCNGAIQGGLSVRTHILPISRLLSLEWLLKMLNENVPSNS

SEQ ID NO: 227740 - protein, 67 aa, Glycine max
  Clone ID: PAT_MRT3847_47678C.1.pep
VFIIYNQGHSGVGIRASLVSSFSSNHRSNIYIAREIGIRYGSDSIFFSQNFFLGKFWLSTINYFSDC

SEQ ID NO: 227741 - protein, 50 aa, Glycine max
  Clone ID: PAT_MRT3847_47679C.1.pep
IIKLWGFPTLNKKTKSPHHWREQYNNGFEIAKIDLVFGGITLTLAYQTRL

SEQ ID NO: 227742 - protein, 144 aa, Glycine max
  Clone ID: PAT_MRT3847_4767C.1.pep
ELIIVANDSGKENFPTKKVGAKRNKRPVGGSPETFEFDDLRGTHWTDMGIQSGSEKQQSQRSSRRDYQHAPAEPEKPFIVYTRRSYSRKQCSDSNHVAVPEKHSGCADENSPVELVLNFAELDSVPSEMRLNKIFRRFGPLNES

SEQ ID NO: 227743 - protein, 104 aa, Glycine max
  Clone ID: PAT_MRT3847_47680C.1.pep
ASPIVTNGEKVYLKELTTLIKMDETICVSEEDHHKSGSSSKPSSPTLRRKRSFFDLNEEAVDGGGDDSTSDDDGLMTSNGISSQEGNLSSNNSSSEEGKERAST

SEQ ID NO: 227744 - protein, 78 aa, Glycine max
  Clone ID: PAT_MRT3847_47681C.1.pep
RNSRSTHASASPSPRCHYRRLLVFPLAALRFATPFSEPNRLLPPLKCSSSEPETAMHAPSDRTHKLIYGGGGGNFFFF

SEQ ID NO: 227745 - protein, 90 aa, Glycine max
  unsure (1)..(90): unsure at all Xaa locations
  Clone ID: PAT_MRT3847_47682C.1.pep
RKNPPRALLFFAASAGGGFRAAVSLRFRGSRPGFLFGLGHPASSHLGLAGIGFLTFVLYPCALRAGFXLAELSQEKLPAEAMWETILQCP

SEQ ID NO: 227746 - protein, 148 aa, Glycine max
  Clone ID: PAT_MRT3847_47683C.1.pep
MISLADVYHVVTATVPLYVTMFLAYISVKWWKLFTPEQCSGINKFVANFSVPILSFQVISSNNIYKMSLKLVYADVVQKLLAFLVFTAIIRIKDRGGLKWIITGLSLSTLPNTLILGIPLMKAMYRDEASLLLPQIIFLQSMVWYNLL

SEQ ID NO: 227747 - protein, 35 aa, Glycine max
  Clone ID: PAT_MRT3847_47684C.1.pep
SLSSFSSLLTEPLFLLFFYINSELELLIIPVQDSL

SEQ ID NO: 227748 - protein, 44 aa, Glycine max
  Clone ID: PAT_MRT3847_47685C.1.pep
CPDYSLIDMLRCQNPPPVLFLKKANLKPLPMPDAYYSSTRRFGC

SEQ ID NO: 227749 - protein, 43 aa, Glycine max
  Clone ID: PAT_MRT3847_47686C.1.pep
FCHLIFLSLSNLDYEAKILFFSLTMLWIQIPERVVVRVDVRVG

SEQ ID NO: 227750 - protein, 63 aa, Glycine max
  unsure (1)..(63): unsure at all Xaa locations
  Clone ID: PAT_MRT3847_47687C.1.pep
VSHIPRLEDWPDMPVDRNGFKLRPHKYHSFSQAXEVQPKQSVSNNTGPGLPSERLQNGQMAKL

SEQ ID NO: 227751 - protein, 70 aa, Glycine max
  unsure (1)..(70): unsure at all Xaa locations
  Clone ID: PAT_MRT3847_47688C.1.pep
VTNPLFDKRTMQFGNGGALPPKRDPTRFMKWXRTSKFNERSAISSXRLKDTPSLNQFTKTIDKNLVTKFL

SEQ ID NO: 227752 - protein, 50 aa, Glycine max
  Clone ID: PAT_MRT3847_47689C.1.pep
IHPGKPFQALGVNKKLILANGNPLAPLYYYYYYAQSLKCVSSKSLYVEAE

SEQ ID NO: 227753 - protein, 79 aa, Glycine max
  Clone ID: PAT_MRT3847_4768C.1.pep
SRGIDKDLQRINFCIGVVEGELIVQLVAMIGAYVVIEWVRVGIVAEGLGNSSGEEIEVGEEDGIKGETNTVVLVAYALT

SEQ ID NO: 227754 - protein, 82 aa, Glycine max
  Clone ID: PAT_MRT3847_47690C.1.pep
VCLKMISFHGFYPVFNLLDKGASKTYTHCTGQNAPQSHSFITTTQSMAANKNNVKPTTTSITTTRPNQTFPSSLLFSLKPCY

SEQ ID NO: 227755 - protein, 352 aa, Glycine max
  unsure (1)..(352): unsure at all Xaa locations
  Clone ID: PAT_MRT3847_47691C.1.pep
MYTPIPQSGSPFPAXSVQDPGLHIWRVEKLKPVPIARENHGIFFSGDSYLVLHNGPEEASHLHLWIGQQSSRDEQGACXAVLAVHLNTLLGERPVQHREVQGNESDLFMSYFPQGLKYXREGGVESAFQKTTSGTPPAAIKKLSQVKGKKXIPANRRALSWDSFNTGDCFILDLGQNIFAWCGGKSNILERNKARDLALAIRDSERQGKAQVEIITDGEEPAEMIQVVGPKPALKEGNPEEDITADQTNAQAAALYKVSDAPGQMNLTKVADSSPFASELLIPDDCFVLDNGLCGKIYIWKGRKANEKERQAALQVADGFISRMRYSPNTQVEILPQGRESPIFKQFFKDWK

SEQ ID NO: 227756 - protein, 149 aa, Glycine max
  Clone ID: PAT_MRT3847_47692C.1.pep
RAFNAGGGAITWFPGHMAAATRAIRHRLKLADLVIEVRDARIPLSSANADLQPHLSAKRRVVALNKKDLANPNIMHKWTHYFETCNQNCVAINAHSKSSVKKLLEVVEFKLKEVICKEPTLLVMVVGVPNVGKSALINSIHQIAKSRFP

SEQ ID NO: 227757 - protein, 377 aa, Glycine max
  Clone ID: PAT_MRT3847_47693C.1.pep
MSGLKELLKKGLGLGDMAFNAGGGAITWFPGHMAAATRAIRHRLKLADLVIEVRDARIPLSSANADLQPHLSAKRRVVALNKKDLANPNIMHKWTHYFERCNQNCVAINAHSMSSVKKLLEVVEFKLKEVICKEPTLLVMVVGVPNVGKSALINSIHQIAKSRFPVQEKMKRAAVGPLPGVTQDIAGFKIAHKPSIYVLDTPGVLVPSISDIETGLKLALAESVKDSVVGEERIAQYLLAVLDTRGTPLHWNHLNNRRIDGIEYEAEENHEYSLKNLKPKRRNLPNRSDLVYVEDLVMQVQRALYSSLSEFNGNVEDESDLESLIDLQFSALQKALKIPHKASEARLMVSKKFLTLFRTGKLGPFILDDVPDVKPVS

SEQ ID NO: 227758 - protein, 40 aa, Glycine max
  Clone ID: PAT_MRT3847_47694C.1.pep
PSKITDLIFINLLTTSIIGQNPNDFHHNKLPLKYTTFEKT

SEQ ID NO: 227759 - protein, 360 aa, Glycine max
  Clone ID: PAT_MRT3847_47695C.1.pep
GSRNSSHEALTQSFQLAFSLRNISLNENVKLQPSRRRSLFTLATSMIIFASKAYNILSLISIAKTTLTDRTVDPFLQLVNDSKLQAVTDTDKQPSKVYGSKEDDEDALKSLSAIKLTESQSKESFATMIVQSLGKSSNESSILRERLLNDFSPDDACPLGAQLSAETTGNMYQSGLKEDKLPDMVDISLFTIDDDIPPCGLESQANSDSMQQPSQNLSLLSVDDILGSVSETTHQVGRISISTPFDMPYKEMALHCEALLVGKQQKMSTFMGTLPMQGYSFRIPAPEYYQQKDESSNSSVQQTLSSSGNPFLDSNFDSNSHNTLPDTAPRLCATAYQHQAAFFQLPASRPYDNFLKAAGC

SEQ ID NO: 227760 - protein, 45 aa, Glycine max
  Clone ID: PAT_MRT3847_47696C.1.pep
SLVYISLSLQLDYNMSIIYFYSLFFSYRVKYTKKPKLEIYSLFYD

SEQ ID NO: 227761 - protein, 63 aa, Glycine max
  Clone ID: PAT_MRT3847_47697C.1.pep
FRAEKIKYSPCFFVMFGPLGCVVFYPKRGIFKKANAVITPNGHRGVVVDNNSGTCPACCCAPG

SEQ ID NO: 227762 - protein, 289 aa, Glycine max
  unsure (1)..(289): unsure at all Xaa locations
  Clone ID: PAT_MRT3847_47698C.1.pep
MSSSELSSFFLLPLSAILSFDALLGVMFLVAVFGYWLVPGGLAWALSKFKPAIPGPCGYPVVGLVWAFIGPLTHRVLAKLAETFDAKPLMAFSVGFTRFIISSHPDTAKEILNSSAFADRPVKESAYELLFHRAMGFAPYGEYWRNLRRISATHMFSPKRIAAQGVFRARVGAQMVREIVGLMGKNDVVEVRKVLHFGSLNNVMKSVFGRSYVFGEGGDGCELEELVSEGYDLLGLFNWSDHFPLLGWLDFQGVRKRCRSLVDRVNVFVXGKIIMEHRVKRDAESEDNK

SEQ ID NO: 227763 - protein, 125 aa, Glycine max
  Clone ID: PAT_MRT3847_47699C.1.pep
RMCEWSISRSLPPREASSSGPPREHEVILMRTTVETGRGRMPIPPNLSQAIKGTSIRREAPSMQRSHQEANTETYAKGTRRPRPWERRGNSSIPKRRILSSHKNRGHKLCFSYYLGMIKCGLKLV

SEQ ID NO: 227764 - protein, 59 aa, Glycine max
  Clone ID: PAT_MRT3847_4769C.1.pep
YKKSCVKPKDICVLMQIMIPNYFDYMQINTNIKNCLMRHQIMLHKFTLEASNNSKLEPN

SEQ ID NO: 227765 - protein, 59 aa, Glycine max
  Clone ID: PAT_MRT3847_476C.1.pep
VERFNVCFKFFMLYVRPGVILDVHPGGSCGLFFCQILFIHLIIGGVNFFGLSLLLSPLC

SEQ ID NO: 227766 - protein, 61 aa, Glycine max
  unsure (1)..(61): unsure at all Xaa locations
  Clone ID: PAT_MRT3847_47700C.1.pep
MDFSSGGGGADLEMFXPKYQXGNTLWRESFGHGKSAEPEGTGHRDAIXILNRRRIKNMGLG

SEQ ID NO: 227767 - protein, 109 aa, Glycine max
  unsure (1)..(109): unsure at all Xaa locations
  Clone ID: PAT_MRT3847_47701C.1.pep
FFFFFFFFFFFFFFFFFFFFFFXKQKTLRCPFLTILKINQTHNGKCCLLLTEKRQPQEQLVNFFHFLPIQAHFLEEQVSHVFCKVEYGVVLHSTLKTPAELMATFFLTS

SEQ ID NO: 227768 - protein, 46 aa, Glycine max
  Clone ID: PAT_MRT3847_47702C.1.pep
ITKHTSCVRTDFLNHGQASQTVLVVLLIRRDNGYPHSDKPVEKLDT

SEQ ID NO: 227769 - protein, 167 aa, Glycine max
  Clone ID: PAT_MRT3847_47703C.1.pep
AYTGFVSLKRHRGRGFRFRTWSQAQAQGVPLPEQVTVTDPDNSVSGDSIRQRFLNFYASRGHKVLPSASLVPDDPTVLLTIAGMLQFKPIFLGKIPRQVPCAATAQRCIRTNDIHNVGLTARHQTFFEMLGNFSFGHYFKKQAILWAWELSTAEFGLPPDRLWISVY

SEQ ID NO: 227770 - protein, 68 aa, Glycine max
  Clone ID: PAT_MRT3847_47704C.1.pep
NPLYLLHHTPHLSHAMPTPLNLILDISCRCRFAAYHRITPLNCPSCSLPFNNSNGTPFQVCTSFPGAI

SEQ ID NO: 227771 - protein, 61 aa, Glycine max
  Clone ID: PAT_MRT3847_47705C.1.pep
HGDKMDPQEPQCNSRKLSQCTSSFYFFYSLFVSFIFTHCFFEQNHFINFPPLFLSGFVNYV

SEQ ID NO: 227772 - protein, 30 aa, Glycine max
  Clone ID: PAT_MRT3847_47706C.1.pep
ISFIYSSLCALIKRSRSLFPSFFLLYYHSI

SEQ ID NO: 227773 - protein, 85 aa, Glycine max
  Clone ID: PAT_MRT3847_47707C.1.pep
KKKKKKNCVQKKTNKKKKKRGRFIHTEKSPRKKKRAGRPLYTTHPSLPCHATALTFLLRNLNSIPLPLLTNIWNKKALSLPNLIA

SEQ ID NO: 227774 - protein, 75 aa, Glycine max
  Clone ID: PAT_MRT3847_47708C.1.pep
HQVLTPKIGYQRPHTINAQPKVQDQCYWTSDLKTVHLQVPTSWTAPIAKEEECEQASKAGNNGTSCCSANTGDSS

SEQ ID NO: 227775 - protein, 76 aa, Glycine max
  unsure (1)..(76): unsure at all Xaa locations
  Clone ID: PAT_MRT3847_47709C.1.pep
MTHLICLILILAALILSPQILANYENPPLYKPTTDKPPLYKPPVDNPTVYKPSAENPPIYNPPIXNPPAYNPPVDK

SEQ ID NO: 227776 - protein, 60 aa, Glycine max
  Clone ID: PAT_MRT3847_4770C.1.pep
FERSYVASRMGSGDWFKTIISSRKSKEGRSKKLKTKIYTRKKSNGLANGMKSENLESDGV

SEQ ID NO: 227777 - protein, 150 aa, Glycine max
  Clone ID: PAT_MRT3847_47710C.1.pep
MGDSKANSKSVAAAQTIPNSVKFMFGGIAGMGATLFVQPLDLVKNRMQLSGMQGTREFSSSFHALRTIVAREGPLALYNGLSAGLARQATYTTTRLGIYTWLLEQFSNNNSATVTVATVQQTAPTSFALKALLGMSCRGIAWWSEYDGLA

SEQ ID NO: 227778 - protein, 100 aa, Glycine max
  unsure (1)..(100): unsure at all Xaa locations
  Clone ID: PAT_MRT3847_47711C.1.pep
RILLNAGFNEIEPDLNEDARDQYATNGDDADDFXIYGIYDDHHTYHEGEQKGTFWGSIAEEMAAAEPPTGFQGIISWLFPPAIALGVYFNVPVILKVNWN

SEQ ID NO: 227779 - protein, 57 aa, Glycine max
  Clone ID: PAT_MRT3847_47712C.1.pep
TFSCTSLTLQDATLALKLGGEQGLYQHQNALHRGRIWNQRIYDIPILREHRKANSGS

SEQ ID NO: 227780 - protein, 50 aa, Glycine max
  Clone ID: PAT_MRT3847_47713C.1.pep
SMHKHLQATIKSTTFQVSDNWPKFNATMSQISGVAHTVASLATKYVTNVA

SEQ ID NO: 227781 - protein, 159 aa, Glycine max
  unsure (1)..(159): unsure at all Xaa locations
  Clone ID: PAT_MRT3847_47714C.1.pep
LEPIRLEEKDQLREEMKAGKVFQGMREALIKFPPTYKFERHKPGLGGYDSGEKKRIPAWCDRIIYRDTRSAPVSECNLDCPVVSSILQYDACMDVTDSDHKPVRCKFNVKISHVDRSIGRKEFGGIMTSNEKIRSSLEELSXVPEATVSPNSLILQNLD

SEQ ID NO: 227782 - protein, 46 aa, Glycine max
  Clone ID: PAT_MRT3847_47715C.1.pep
TIPEECVENTWEPIYGYQYSSDSNAFSQQAYYYPRDLGLHTKDTCL

SEQ ID NO: 227783 - protein, 71 aa, Glycine max
  unsure (1)..(71): unsure at all Xaa locations
  Clone ID: PAT_MRT3847_47716C.1.pep
VGRVIMRNTCTKQVCSGNPWSGPNRVMYLGPFSGEPPSYLTCELPGXTYGWDTAGLXATQETLARYREFGI

SEQ ID NO: 227784 - protein, 47 aa, Glycine max
  Clone ID: PAT_MRT3847_47717C.1.pep
FYYIFIFFHAFFIHIFFYYTIILTIIQFIIFDYLFNTIFYEIENNKY

SEQ ID NO: 227785 - protein, 84 aa, Glycine max
  Clone ID: PAT_MRT3847_47718C.1.pep
PHDHFSFRQLIRSMHCLSGQAIHQNGEDHQDSHLKARNPSKVSLFYTLMHGTDTLGLTDYHANIIFWFPFEFVSACPHMTYTGA

SEQ ID NO: 227786 - protein, 70 aa, Glycine max
  Clone ID: PAT_MRT3847_47719C.1.pep
KGPFWNYHPCYFDATIIVATNTRSIFIFLLGSRSIYAHLSPPMSYSSRRCASQPMEFECHGKLDPHYQLT

SEQ ID NO: 227787 - protein, 83 aa, Glycine max
  Clone ID: PAT_MRT3847_4771C.1.pep
IYNIMVEYSYLVLSRIHMTPALMPSWGYTVMSPSCDPRSCNAYLLQAPPVPGASFRRPHGLLLRQPGPSIRSSQQQSSCTSVE

SEQ ID NO: 227788 - protein, 234 aa, Glycine max
  unsure (1)..(234): unsure at all Xaa locations
  Clone ID: PAT_MRT3847_47720C.1.pep
MKVTVVSRSGREVVKGGIELSDSATIADLQEAIHKRTKKYPSRQRLTLPVQPGSKAYALFYCEXHYAKRILETFFVHRFSHATSPLSNVFRNCAYYWTFGSYIAYYVNXPLYTPVNDLQMKIGFAIGILCQISNFYCHIILKNLRSPGGEGGYQIPRGFLFNIVTCANYTTEIYQWLGFNIATQTVAGYIFLVVATFIMTNWALAKHRRLKKLFDGKEGRPRYPRRWVTLPPFL

SEQ ID NO: 227789 - protein, 95 aa, Glycine max
  Clone ID: PAT_MRT3847_47721C.1.pep
MKVTVVSRSGREVVKGGIELSDSATIADLQEAIHKRTKKYPSRQRLTLPVQPGLKERPVVLNYKKSLKDYTSGNSETLTVVFKDFGPQVSYRTLF

SEQ ID NO: 227790 - protein, 112 aa, Glycine max
  unsure (1)..(112): unsure at all Xaa locations
  Clone ID: PAT_MRT3847_47722C.1.pep
MQISMNNHLRASYASNVPCSAVRKPSSSGFDXSSDVATATTNSRSIAFAKRSQSFIDRGAAATHHHIGGMSDSSNPSCLVYSTLPWWSSPTGKPDCGRNGHELNKLMKSAIF

SEQ ID NO: 227791 - protein, 75 aa, Glycine max
  Clone ID: PAT_MRT3847_47723C.1.pep
TAARRRQKGGFLFNIVTCANYTTEIYQWLGFNIATQTVAGYIFLVVATFIMTNWALAKHRRLKKVCLLTFYISAH

SEQ ID NO: 227792 - protein, 270 aa, Glycine max
  Clone ID: PAT_MRT3847_47724C.1.pep
MVDNESLSEFLASAVDAAQKAGEIIRKGFYQTKNVEHKGQVDLVTETDKACEELIFNNLKQLYPTHKFIGEETTAAYGTTELTDEPTWIVDPLDGTTNFVHGFPFVCVSIGLTIGKTPTIGVVYNPIINELFTGIRGKGAFLNGNPIKVSSQTELISSLLATEAGTKRDQETVDASTNRIKSLLFKVRSLRMSGSCALNLCGIACGRLDVFFELGFGGPWDVAGGAVIVREAGGVVFDPSGADFDITSQRVAASNSFLKDALVDTLRQMV

SEQ ID NO: 227793 - protein, 59 aa, Glycine max
  Clone ID: PAT_MRT3847_47725C.1.pep
CWTQLTYKVLRVPLIMMSAIFFALYLKCTFTHHIPTFHPILISCSIINVTFMKIPSLII

SEQ ID NO: 227794 - protein, 64 aa, Glycine max
  unsure (1)..(64): unsure at all Xaa locations
  Clone ID: PAT_MRT3847_47726C.1.pep
TALXGSWEPQSRPSGAEFNCQLMFVFPCRCFCFVSLAYLRSGRVVLLACPKGLVLWNPGVVYGG

SEQ ID NO: 227795 - protein, 214 aa, Glycine max
  unsure (1)..(214): unsure at all Xaa locations
  Clone ID: PAT_MRT3847_47727C.1.pep
MKVTVVSRSGREVVKGGIELSDSATIADLQEAIHKRTKKYPSRQRLTLPVQPGSKERPVVLNYKKSLKDYTIGNSETLTVVFKDLGPQVSYRTLFFCEYLGPLLLYPVFYYLPVYQYFGYKGERVIHPVQTYALYYWCFHYAKRILETFFVHRFSHATSPLSNVFRNCAYYWTFGSYIAYYVNHPLYTPVNDLQMKIGFAFGILCQXKFYCHIF

SEQ ID NO: 227796 - protein, 59 aa, Glycine max
  Clone ID: PAT_MRT3847_47728C.1.pep
TGTEGPDRPIRPLICQPFRFIWSRSKPPNRGCFTRRQFTSRYYNVSSTSAKQITVRVPC

SEQ ID NO: 227797 - protein, 224 aa, Glycine max
  unsure (1)..(224): unsure at all Xaa locations
  Clone ID: PAT_MRT3847_47729C.1.pep
PRVRGKSCANGFSLMMEHDRERKIALVAAGAAAGISSGFNAPVAGCFFAIETVLRPLRAENSPPFTTAMIILASVISSTVSNVLQGTQSAFTIPEYDLKSAAELPLYLILGMLCGVISVALTRLVARFTKLFKIIQDKFGITTVVCPALGGFRAGIIALKYPAILYWRSTYEEDILRTGKSAXSSPGIWLLAQLIDAKVIXTALCKGSGLFGALYAPSLMIGAA

SEQ ID NO: 227798 - protein, 292 aa, Glycine max
  unsure (1)..(292): unsure at all Xaa locations
  Clone ID: PAT_MRT3847_4772C.1.pep
MGSGDWFKTIISSRKSKEGTSKKVKTKIYTRKKALRPLENLVSAGVSVETIAATRIQTAFRAYKARKALRRMKGFTKLKILTEGLXSLKSKPVQAVTYLHSWSKIQAEIRARRICMVTEDKIRRKKLESQLKLEAKLHDLEVEWCGGSETKEEILGRIHDREEAAVKRERAMAYAFSHQWRANSSQNQLLGNYELSKANWGWSWKECWIAARPWESRIPSLSVTPEKAQHKQPSPSKVQKDKNTSTPKTPVSFKPPSANAKGTPPSANAKGTSKARRLSYPTTEKTLVQRVQ

SEQ ID NO: 227799 - protein, 152 aa, Glycine max
  Clone ID: PAT_MRT3847_47730C.1.pep
GCLGVLAPFVFGFFVGAFVLVGGPFVGASVAPAASFGPAVVGWGWKIHWVFWVGPLVGGGLAGFMFGLIFVGLGRRGFRRGFFLGGFGTECWLLFGPGVMPCFLCCVCLVCVSCGRSVVFLAFLPLPGVFAPSCLLCIPPFGSGGGGCLVGG

SEQ ID NO: 227800 - protein, 95 aa, Glycine max
  unsure (1)..(95): unsure at all Xaa locations
  Clone ID: PAT_MRT3847_47731C.1.pep
ILGVXXYXXQGTAXXXAGIXXXPXXXPFRXXXXLXXQXFXXGDVAXTSEXETNPXRLSXRSQHXXXXRTAXXXAXYXXXXXXSSRIPSLRTRXCD

SEQ ID NO: 227801 - protein, 82 aa, Glycine max
  Clone ID: PAT_MRT3847_47732C.1.pep
WESMFPIEVCGPNHGFAMWSSEWAMQPSWHLSVLVGISKRSSVWHILLGLSQDFEIAGHTLMPAFTVPQATARASDNAESSA

SEQ ID NO: 227802 - protein, 47 aa, Glycine max
  Clone ID: PAT_MRT3847_47733C.1.pep
QGSNEMFGGELCFHKAPTNEEFPQQTCRQITALHKYDCLPANISTNA

SEQ ID NO: 227803 - protein, 34 aa, Glycine max
  Clone ID: PAT_MRT3847_47734C.1.pep
PPPFVVRPNRTGESCRLRWVNYLHPGLKRGKMTP

SEQ ID NO: 227804 - protein, 87 aa, Glycine max
  unsure (1)..(87): unsure at all Xaa locations
  Clone ID: PAT_MRT3847_47735C.1.pep
IPFHLITRLWDTYLAEGDALPDFLVXIFASFLLTWSDKLQKLHFQELVMFLQHLPTENWTPRELKMVLSRAFMWHTMFNNSPSHLAS

SEQ ID NO: 227805 - protein, 88 aa, Glycine max
  Clone ID: PAT_MRT3847_47736C.1.pep
MVYVKAQKSKACFKRYRVKFKRRRQGKTDYRARIRLINQDKNEYNTPKYRFVVRFSNKDVVAQMISASVAGDIVLAAAYAHELPQYGL

SEQ ID NO: 227806 - protein, 127 aa, Glycine max
  unsure (1)..(127): unsure at all Xaa locations
  Clone ID: PAT_MRT3847_47737C.1.pep
MGTDEESTAKVSKPSSSSSTQESATNKKGSFDQMLVDGANARKNSVSTIPHSSVPGNPAVSMSPTSLNIGMDLWXPAGAEAAKMRHNQSSASEAVTPPTIMGREVALGEQWIQAQFNLQFQCQFIFF

SEQ ID NO: 227807 - protein, 83 aa, Glycine max
  Clone ID: PAT_MRT3847_47738C.1.pep
MYWDVLFGAQSVSNEVVSEMREIVSKDNQCLSSNSFLLDDDMSIPFSAEDIDKAIPAINTVDIDLPAFLCEYPCAQFLILHEK

SEQ ID NO: 227808 - protein, 98 aa, Glycine max
  unsure (1)..(98): unsure at all Xaa locations
  Clone ID: PAT_MRT3847_47739C.1.pep
PSAIAIDPGLIYVSISXADFVEMSDGVGASXVRDLFRQAKENAPCIVFDDEIDAVGRQRGTGIGRRNDEXEQTLNQLLTEIDGSDGXTRIIVIAATNR

SEQ ID NO: 227809 - protein, 68 aa, Glycine max
  Clone ID: PAT_MRT3847_4773C.1.pep
IQRHLGTLDVHPQTQYYVESFHGADLAIMNCLPSRRRAKGLACKSESLHVQGPLKRFYCIQALFILHV

SEQ ID NO: 227810 - protein, 209 aa, Glycine max
  Clone ID: PAT_MRT3847_47740C.1.pep
MQISLSNLAFKTPQLFPIHHPIFPPKPPLNHQVSTQSHVNNVLKGSSGYLSEISKVIDHEEQYRVARSQVSRKVLDLEGYSIEGLSVGGQETCIIIPEFKCSFDIGRCPSRAIQQNFLFITHAHLDHIGGLPMYVASRGLFNLKPPSLFGSPWWLLWMGERRMGIHRTMGQVELNAEVVALDVGETYEIRNNLVVRPFRTQHVIPSQGY

SEQ ID NO: 227811 - protein, 219 aa, Glycine max
  unsure (1)..(219): unsure at all Xaa locations
  Clone ID: PAT_MRT3847_47741C.1.pep
LACDQHVQTDTLLDDEFQETRSPGMVSESSKAKVAKLVDGYLAEIARDPNLPLSKFVNLAELVSSFPRAFHDGLYRAIDMYLKEHPGISKSEKKRICRLMNCRKLSAEACMHAVQNERLPMRVVVQVLFFEQLRATTSSGGNGTPDHSGSIRASLPGGSHGSSRSEEEWEAVGTMEDIKSLKGELIALKLXQEEQGEPAAEATTMTVVKAILRVLLLVK

SEQ ID NO: 227812 - protein, 103 aa, Glycine max
  Clone ID: PAT_MRT3847_47742C.1.pep
VRGCFGATRFSVSQQTGNGPGRLCCWWSESLGFYVLHMRPLRQFICCLNSKCSCFSTTVRYSLFNIRTNSSIWSWCICIPASCSNLIINFCWYAHSSLTYWES

SEQ ID NO: 227813 - protein, 177 aa, Glycine max
  Clone ID: PAT_MRT3847_47743C.1.pep
AHISCNRLEEKCKALTLLTLSSTTILPVVISRRSTSTPLPTTISSSKCFPTSLLLHGPSTKPHPIITSFSPTTSNTPTWPPSFATTRSPPTTTRPPLSCSTTTSSSPPPPLPPTPNSSTCPLTPPRQTTSLTPPPSNLSLPTVSLLPFKLSTTASLDLFNPIIKLTIFSPILFLFRR

SEQ ID NO: 227814 - protein, 55 aa, Glycine max
  Clone ID: PAT_MRT3847_47744C.1.pep
LDTSLSKSSGRCSRILQVIDQFFRITLHAISGACESIFICITSKIFVADHSGPRA

SEQ ID NO: 227815 - protein, 98 aa, Glycine max
  Clone ID: PAT_MRT3847_47745C.1.pep
TIAIYKGPFMQSKRSFCRRLPAIQSGPQICYEPMGIISRFISVQHSKLSQCVNCLALKPQPLIAYRYISSFALSFLVNLFCYKCVDPKKKKDEGRPLS

SEQ ID NO: 227816 - protein, 94 aa, Glycine max
  Clone ID: PAT_MRT3847_47746C.1.pep
LLLLPISLSKTSAYQSIQLLPLSFVVIPRWRGEKILTPAFMLEPTQIVGSDVYRNLPLPKHLLFPNLLNCPKSITYWHRKHFTYHSDVYRLTNC

SEQ ID NO: 227817 - protein, 180 aa, Glycine max
  Clone ID: PAT_MRT3847_47747C.1.pep
MFDCGPKSEYMGGQRENFLRLEALDSTLSSSSDAGVIKSGFNIDKLSHGHGSSTTSRSFKRGMRRGSEGLKSIGRSLGLGVSRAVFPEDLKVSEKKIFDPQDKFLLLWNKLFVISCILAVSIDPLFFYLPVINDSFHCLGIDRKLATIVTTLRTWVEGFYLIHMALQFRTAYIAPSSRVF

SEQ ID NO: 227818 - protein, 71 aa, Glycine max
  Clone ID: PAT_MRT3847_47748C.1.pep
MSDGEAKTPFQISNKPSLFYHLAILPSFSDNLLPHLTVSHHYGTFSVSSPPVHGIVRTTNNTSFFLTRYGL

SEQ ID NO: 227819 - protein, 72 aa, Glycine max
  Clone ID: PAT_MRT3847_47749C.1.pep
GLASDPKKTTTLHLQENKPDSLAMVSLLDGPIQATIPGKGQIDNWATLLNVPLHTTVINTFVILFLIRSERR

SEQ ID NO: 227820 - protein, 348 aa, Glycine max
  Clone ID: PAT_MRT3847_4774C.1.pep
MEAKTKPWLALSLFLLATNCMQQCVHGESQVPCMFVLGDSLSDNGNNNNLQTNASSNYRPYGIDYPTGPTGRFTNGKNIIDFISEYLGFTEPIPPNANTSGSDILKGANYASGAAGILFKSGKHLGDNIHLGEQIRNHRATITKIVRRLGGSGRAREYLKKCLYYVNIGSNDYINNYFLPQFYPTSRTYTLERYTDILIKQYSDDIKKLHRSGARKFAIVGLGLIGCTPNAISRRGTNGEVCVAELNNAAFLFSNNLKSQVDQFKNTFPDSKFSFVNSTAGALDESLGFTVANVPCCPTRPDGQCVENGTPCQNRNAHVFYDEYHVSSAACNFIAMGSVSQFQNLVES

SEQ ID NO: 227821 - protein, 387 aa, Glycine max
  Clone ID: PAT_MRT3847_47750C.1.pep
METGIACYTRGPFLPSVSSKHSPPSISPSFGLRSLKSSSLFGESLRVASKSTLKVSKTKNTSLVTRCEIGDSLEEFLTKATPDKGLIRLLVSMGEALRTISFKVKTASCGGTQCVNTFGDEQLAVDLLANQLLFEALNYSHFCKYACSEENPELLDMGGPVEGGFSVAFDPLDGSSIVDTNFTVGTIFGVWPGDKLTGITGRDQVAAAMGVLGPRTTYVLALKDFPGTHEFLLLDEGKWQHVKETTEIGEGKLFSPGNLRATSDNPDYAKLIDYYVNEKYTLRYTGGMVPDVNQIIVKEKGIFTNVSSPSAKAKLRLLFEVAPLGFLIEKAGGYSSDGHQSVLDKVISNIDDRTQVAYGSKNEIIRFEETLYGKSRLKGGVAVGAAA

SEQ ID NO: 227822 - protein, 69 aa, Glycine max
  Clone ID: PAT_MRT3847_47751C.1.pep
MWANFEAAEELTIRKQLWTLSKRMGVGMTKFICQVPIIFSTCGLVDTVQEGYTGFHMGAFNVEVSGVEK

SEQ ID NO: 227823 - protein, 172 aa, Glycine max
  Clone ID: PAT_MRT3847_47752C.1.pep
MGFYAEDPLSGLTIGQAIYEVALMIAVLRWVLCLIFRVINDRRTTQSDETPTPEPCSQMTRDNDSILLLTTFGEIKERLPETEETCAVCLSQLSVEDEVRELMNCYHVFHRECIDRWLEHEHENHSATCPICRAPLLSSSCHHSSATCLPPPQPSWAVERLLYLFGDDLLPC

SEQ ID NO: 227824 - protein, 202 aa, Glycine max
  unsure (1)..(202): unsure at all Xaa locations
  Clone ID: PAT_MRT3847_47753C.1.pep
MLTAGDYSNHGRPLQPETSLAELNLPRVLCVLSSMLEKLVARNEKLIDILSQELDGLNSGSVRLGNSLNTFHGVRAPSISIPKYLERIYKYTNCSPSCFVVGYVYIDRLTHRHPDSLVTSLNVHRLLVTSVMVASKMLDDEHYNNXIYAPSRGGXSNAELTKLELELLFLLDFXVMVSSRVFESYCFHLEKEIGCQWHGHED

SEQ ID NO: 227825 - protein, 47 aa, Glycine max
  Clone ID: PAT_MRT3847_47754C.1.pep
KISIFFQKPPNSHEITTQDQNFTKILTFTLTSALTPASYPFNYLLYK

SEQ ID NO: 227826 - protein, 135 aa, Glycine max
  unsure (1)..(135): unsure at all Xaa locations
  Clone ID: PAT_MRT3847_47755C.1.pep
MEIDLSPQLAKKVYESNGGSYHAWSPSELPMLPEGNIGAAKLALQKNGFALPCYSDSSKVAYVLQGSGVAGIVLPESEEKVVAIKKGDALALPFGVITWWYNREDTELAXLFLGDTLKAHKTGEFTDFYLTGPNG

SEQ ID NO: 227827 - protein, 64 aa, Glycine max
  Clone ID: PAT_MRT3847_47756C.1.pep
LLKFCGFYLMVNKKSFGRCLLLAAIAGVGVHLTNNCAIKLGIRLILYMLGHLLLWHPSVVFSQP

SEQ ID NO: 227828 - protein, 195 aa, Glycine max
  unsure (1)..(195): unsure at all Xaa locations
  Clone ID: PAT_MRT3847_47757C.1.pep
GSSKTFERVEGVLHVVPGTGMWECVDFFPVSSKGENGLDTSINGENVKHVVKVSLDDDRHDYYALGTYDEKNVKFTPDDFNNDVGIGLRYDYGIFYASKTFYDQSKGRRVLWGWIXXESDSEYADVAKGWASVQGIPRTVALDKKTGSNLIQWPVAKVESLRLRSDEFQNLKVKPGSVVPLEIGTAAQLDIVAEF

SEQ ID NO: 227829 - protein, 142 aa, Glycine max
  Clone ID: PAT_MRT3847_47758C.1.pep
TTPARFSPSTSRRIAAAWWRPASTCGTSSARATNVSSAPRSPSASSKSRRRAAPGSRPRRPSPTPRSTRLATRLSTCATATTAYAVPRWPAMHPRPRSKAATTSTSRTCSSPEGITLIAFTRQYCTVSRIARSAINFHGRSW

SEQ ID NO: 227830 - protein, 292 aa, Glycine max
  unsure (1)..(292): unsure at all Xaa locations
  Clone ID: PAT_MRT3847_47759C.1.pep
MKGMNLTKKKLIPILVLILSVISILRLLSLNVKTLPFSARISVLSPAPQHNCSQPLSTCNKTASHAPESSDQPINTPNITTTLTEKEFKVLSDLIALKSPCNLLIFGFQPQYLILSKMNAAGSTIFLDEAPDKISKFXLNPXNIILSSMKYNISAIAGYKLLKNARLNPATCVPNPRFLQKSKCKLALKNLPSQVYEKKWDVMVVDGPNGDSPESPGRMGSIYTASVLARSGNTSDVVVHDVDRMIEKWFSWEFLCDGNLLYSKGKLWHFRIKVHSNSTRFCPAEEGSTIGK

SEQ ID NO: 227831 - protein, 85 aa, Glycine max
  Clone ID: PAT_MRT3847_4775C.1.pep
RDSFTKMFVLETILMVTGSPKFGVYETDFGFGRPTKVEMVHSFKGMSLAESGDEEGGLEVGLVCTSTEIEYLNSVIEQGLGVSKS

SEQ ID NO: 227832 - protein, 129 aa, Glycine max
  unsure (1)..(129): unsure at all Xaa locations
  Clone ID: PAT_MRT3847_47760C.1.pep
LKFFLHHKIFFSQQEIIGGRIYTRPPALILLKLSHEFEKHISHESLNDQIPAVNKLYSTKINNFAKIINLIQNLVXDLKLLTYWKLYDHKHIPLSNITARENHLLQIPLISQXEILSSTPTHFKTSMIS

SEQ ID NO: 227833 - protein, 196 aa, Glycine max
  Clone ID: PAT_MRT3847_47761C.1.pep
MLSFKLSLYLLIASVFVFHLLPSPVLCNDEEDLLHDINVYRKVLNLPVLDESGKASCLAEEIAENLEHTKCEDFRDYYPLPSYTSKIPKFQKSINKCKININTTKDGVIMPLCVPKLDPDALFSNYTKSNRFSKYLNNSKYKIAGLGSEDDWMVLIISTNTSSGDFSSATSLLAGALKGHYLMLPFFLSTLIVFFN

SEQ ID NO: 227834 - protein, 93 aa, Glycine max
  unsure (1)..(93): unsure at all Xaa locations
  Clone ID: PAT_MRT3847_47762C.1.pep
SPEKSKCSNCIDAVSRHTIQVFPKSWAAIMLAXDIAGMWNSRRNMAEIRYVGQLLDVSVLXPTGPIRDEHILPESQPVGGIVKDMRKPPPDSS

SEQ ID NO: 227835 - protein, 182 aa, Glycine max
  unsure (1)..(182): unsure at all Xaa locations
  Clone ID: PAT_MRT3847_47763C.1.pep
RSLARNSARGDLKDSFINSAVQIDVSGNRMAVVIHVPYRLRKGCRKMHVQLVRELEKKFSEKDVILIATRWILMPPKKGSAVHRPCTRTLTAVHDAMLEDIELTAEIEGXRARYKIDGHKIMKVLLDPYERNNTDYILETFAAPYMKLSGKDMXFEYSTTDAYVLYASSAYSSELYMEDAGF

SEQ ID NO: 227836 - protein, 60 aa, Glycine max
  Clone ID: PAT_MRT3847_47764C.1.pep
NFRLTQNCVMFFVVVETIILCFTLCLNTYKKLMQYMFLNYIKFKTIIIIIELLHNLGNTI

SEQ ID NO: 227837 - protein, 57 aa, Glycine max
  Clone ID: PAT_MRT3847_47765C.1.pep
FSCGTNHETRGGLTEEDGMPQLRTNGIRAEGQANRAHGSEQHAAHESLTAQTPAADK

SEQ ID NO: 227838 - protein, 107 aa, Glycine max
  unsure (1)..(107): unsure at all Xaa locations
  Clone ID: PAT_MRT3847_47766C.1.pep
XSAPVXXAXXSLIHRSTLPPXXSXXHXCHXXXXLSSLLPXPXXAXXRTSLXRTXXXXXXXHHIGXXPXRXXXLXXPSXXXLLPTXSXTVLXXSXCDLXPXXXXXXXA

SEQ ID NO: 227839 - protein, 126 aa, Glycine max
  Clone ID: PAT_MRT3847_47767C.1.pep
HTAAVNRNQVISRSFLHHHLSSRRANVNRHCRRFKGYIFTREGETVKPLFNGGHPNRSNHLCINRCRFGDLSLPSCCSQHHPSRHRHAHPYPRWGRHLHMPLRSHQGPQGLFIWHCSYWSFLRQEV

SEQ ID NO: 227840 - protein, 125 aa, Glycine max
  unsure (1)..(125): unsure at all Xaa locations
  Clone ID: PAT_MRT3847_47768C.1.pep
PRAIDLXILFYGKYKVRSDILTIPDERIWERPFVXSPLMDLLGSAIDSDTVASWHSFSGHSRGLTGLWEDLGSESLIGEFGKEGMYRVMPVANGLLDWSRRTSVMGILNVTADSVSDGGNFKSVE

SEQ ID NO: 227841 - protein, 60 aa, Glycine max
  Clone ID: PAT_MRT3847_47769C.1.pep
RKVAHEYSTPSPVDLLGADAVEGCIECFKVLLKHKVAIRYYHQQVLPSIEGTQQVATPLQ

SEQ ID NO: 227842 - protein, 47 aa, Glycine max
  Clone ID: PAT_MRT3847_4776C.1.pep
PQETYFCFLDMVDWSEKTEPTHECKFKSQLVLNVTFEKIENKRKKKG

SEQ ID NO: 227843 - protein, 135 aa, Glycine max
  unsure (1)..(135): unsure at all Xaa locations
  Clone ID: PAT_MRT3847_47770C.1.pep
VLLALEYLHMLGVVYRDLKPENILVREDGHIMLTDFXLSLRCAVNPMLLKSSDVDPAKISGLSAQASCIEPFCIEPSCQVPCFSPRLLPTAAKARKLKVDLAAQVRSLPQLVAEPTDARSNSFVGTHEYFAPEII

SEQ ID NO: 227844 - protein, 121 aa, Glycine max
  unsure (1)..(121): unsure at all Xaa locations
  Clone ID: PAT_MRT3847_47771C.1.pep
EVLITAPGKETSPQCGWCNEYDYSPLNPSSAMLGPTNCFVPXVKVLDQKFGGGKGTMTTTHSYTGDQRLXDASHQKKKSARAXXXNIXPTXTGAXXAXALXXPTLXGXXXXXXLRXPXXNX

SEQ ID NO: 227845 - protein, 88 aa, Glycine max
  Clone ID: PAT_MRT3847_47772C.1.pep
PTAGGVLASFGMLGVIIIAEPYAYFAFAGKRVIVQPLLRPVPVGSLAAAYLFHKGLFDSFVPRYLFWGVLSGLFRFRSFFSLTEVDKA

SEQ ID NO: 227846 - protein, 58 aa, Glycine max
  unsure (1)..(58): unsure at all Xaa locations
  Clone ID: PAT_MRT3847_47773C.1.pep
EQARSRLGTSMCGMMRWLDSLLLHALSVFQCELLEGVHIVAIRSYDQIXRLFLLTSPR

SEQ ID NO: 227847 - protein, 376 aa, Glycine max
  Clone ID: PAT_MRT3847_47774C.1.pep
MGSVAAEELNLDLRSSFVPKTITDFLRHLSANNNHPATLRDFLSRLEDELRKIHAFKRELPLSMLLLNDAISVLKSEEEEENDDDKDDNECRDKRNWMSSVQLWNNNTTTTTTNNNNNASDRKQLLHKLQTKKSEEGQSVAEDPFQTCSNRNGGRRAFMPFSRYSSSSSSVPVTTVGLGAASKEEKEESVRNRLSLLTPSVKAWCAVLSGLFLLLLPRPRRVLRATSVPKPKQIRERCWSHELHRRFVNALQKLGGSQAATPKQIRELMQVDGLTNDEVKSHLQKYRLHTRRVPAASSNQPVVVLGGLWMSQDQYNDSSKVSSSGSGSPQSPLHLAAGSRGGTSPTEGDSIEDDEDARSESYSWKSHMNKPGKVDV

SEQ ID NO: 227848 - protein, 194 aa, Glycine max
  Clone ID: PAT_MRT3847_47775C.1.pep
MNRLSLLTPSSVKEGCGSRGSRSSSNRAVSSSSPPMVQPSLRATSLQQTARKQRRCWSPELHRRFVNALQKLGGSQVATPKQIRELMQVDGLTNDEVKSHLQKYRLHTRRVPAASSNQPVVVLGGLWMSQDQYNDSSKVSSSGSGSPQSPLHLAAGSRGGTSPTEGDSMEDDEDARSESFSWKSHMHKAGKVDV

SEQ ID NO: 227849 - protein, 39 aa, Glycine max
  Clone ID: PAT_MRT3847_47776C.1.pep
GPGFGYEAGRRIEGMWFQRRTDSKVWCVIDKAVIHIEYK

SEQ ID NO: 227850 - protein, 201 aa, Glycine max
  Clone ID: PAT_MRT3847_47777C.1.pep
SYKYIYLPEKLILNMQNQQLLSKIANNDKHGENSPYFDGLKAYDRNPFHPKKNPQGVIQMGLAENQLCFDLIEEWIRNNPKTSICTPEGVHQFRNIANFQDYHGLREFTNAMANFMSKVRGGRVKFDADRILMSGGATGANELIMFCLADPGDAFMIPTPFYPGYVPSFPLYLCSFNVCHCSTHPSHVKSGKRKARIYKAV

SEQ ID NO: 227851 - protein, 82 aa, Glycine max
  Clone ID: PAT_MRT3847_47778C.1.pep
ETTKQMRLFLLLPQSLILSISLATDESNRRRSNPLSSARSGPRERLESVLHLLESRRVRNAASLVSQVLVLATKSSRASSSS

SEQ ID NO: 227852 - protein, 116 aa, Glycine max
  unsure (1)..(116): unsure at all Xaa locations
  Clone ID: PAT_MRT3847_47779C.1.pep
GRPXGRRGXAPAXXRARTVISSGSGDPRSXTRNRGPTTCGDSGXIHHNIDVTDGTGGGGRNNDSSNYGDHGDTPRMIDGLTRIRPAIGHHNRXDQSGGAKTMARXIHHQRWRCSKQ

SEQ ID NO: 227853 - protein, 139 aa, Glycine max
  Clone ID: PAT_MRT3847_4777C.1.pep
QEEYIQDGIDWAKVEFEDNQDCLNLFEKRPLGLLSLLDEESTFPNGTDLTFANKLKQHLNSNSCFKGERDQAFTVHHYAGQVTYDTTGFLEKNRDLLHLDSIQLLSSCTCPLPQIFASHMLTQSDKPAVGPLHKSGGAD

SEQ ID NO: 227854 - protein, 49 aa, Glycine max
  unsure (1)..(49): unsure at all Xaa locations
  Clone ID: PAT_MRT3847_47780C.1.pep
KLLVFFVAAVVLVSWLCHGVGYQRVSLRIQTGYGERSSXVICASFKLAV

SEQ ID NO: 227855 - protein, 70 aa, Glycine max
  Clone ID: PAT_MRT3847_47781C.1.pep
LENTTYDTAWSNVLTKWPYDSEKPHLTEYETKMIGSGKISGCLIQLKSHAYCVRLCYSTPHSDIQTYPIA

SEQ ID NO: 227856 - protein, 77 aa, Glycine max
  Clone ID: PAT_MRT3847_47782C.1.pep
IILIYNHSKYIVSKNSEEKFPGCYTFSFFGTPTITTAKLNWKNYLSWSASVELWFLGQGHHNHLEKGIDTVPSGRLG

SEQ ID NO: 227857 - protein, 89 aa, Glycine max
  Clone ID: PAT_MRT3847_47783C.1.pep
QAGTKRNRVKKGKEKQTTLGGGRAGGLSPGEESRPKKRSRSLKNQKKGGIKTPFNLGGDFKRGGIRIGKKKKLGKKRRVAKKLGSPGGF

SEQ ID NO: 227858 - protein, 101 aa, Glycine max
  Clone ID: PAT_MRT3847_47784C.1.pep
KGSDWIKAAITTTWDADSADPIIASIPATWESQLHQDGQEQTHALNEFTIVVTHMIYYCNKLDPTTPKWSYNKDNHTWDEASSYRIKMPSICAHKILQFTI

SEQ ID NO: 227859 - protein, 34 aa, Glycine max
  Clone ID: PAT_MRT3847_47785C.1.pep
SACYSKPGYLFILNPDWMIHAGSILAHAGNISSK

SEQ ID NO: 227860 - protein, 218 aa, Glycine max
  Clone ID: PAT_MRT3847_47786C.1.pep
MTPAMDKTSSSSDITTVHPDIFQSHILNRLDGPTLASAASATSHLRGLCTEHHLWRNICAATWPSLNDPLAAATIATFPATHRSIFSDSFPSLHHSPPNPIPTQPPTPPPPELISAVDIYYKGKPVFSRVIRTETHKGWFLCSPLWVDLLDPTEVVPTPLKFAQTNDEIELLNHLVENLALSWIIIDPTRKRAANLSSRRPGSARRHWLTAELEVLYA

SEQ ID NO: 227861 - protein, 74 aa, Glycine max
  Clone ID: PAT_MRT3847_47787C.1.pep
FFFFFFFFFFFFFFFFFFFFFFFLGPKGKKLFFGGSPKNAFVPRFIITVIKTKIGGLGLTPSKMKGSKREKVFS

SEQ ID NO: 227862 - protein, 65 aa, Glycine max
  unsure (1)..(65): unsure at all Xaa locations
  Clone ID: PAT_MRT3847_47788C.1.pep
RGCPTYLDSSYTGSTTTGTQHMGGGPVKVXSTSAAMGVPNGNEGCKCXASWNCNPCSSKRGGAEL

SEQ ID NO: 227863 - protein, 125 aa, Glycine max
  Clone ID: PAT_MRT3847_47789C.1.pep
MSPPCSFSPSSASSSSDSPSAEGQAQQNGQVLAPRPLPTWEEIRAAVPKECFEKSLLRSLYYLAIDLLVIGFLYAVVPFVETNFGLIGLVFWYCLLGMFLSSLFCVGHDCGHGTFSDWTWVNDIF

SEQ ID NO: 227864 - protein, 52 aa, Glycine max
  Clone ID: PAT_MRT3847_4778C.1.pep
GALRFEDGVNSPVARASLCKGVVAEADKGILKALESWKRVESGEGNGGPGAI

SEQ ID NO: 227865 - protein, 261 aa, Glycine max
  Clone ID: PAT_MRT3847_47790C.1.pep
MSKKQREQNHFVLVHGIGHGAWCWYKLKPLLESAGHKVTVLDLAASGIDTHDIEDIHTFSEYSKPLLDLLASLAPNEKVVLVGHSFGGISIALAMDKFPEKISLGIFLTAFVPDTQHKPSHVLEEYIDRYPYTGWMDTELWNSGGKTTLLFGIKFLSTKFYQLCSTEDLELVKTLRRKGSLFAEDLSKAENFSKEKDGSVPSAYIISNEDLVIPKEYQQWMIQNAGIDVVREIKGSDHMVMLSKPHKLCLSLLEIADKQVK

SEQ ID NO: 227866 - protein, 54 aa, Glycine max
  Clone ID: PAT_MRT3847_47791C.1.pep
FFFREKYPFWKNKEYSFWGEKYKFFPLRNNINSPKPCPWGAFKFGKKTPPLPLF

SEQ ID NO: 227867 - protein, 201 aa, Glycine max
  Clone ID: PAT_MRT3847_47792C.1.pep
KNILLTHDFEPLVADFGLARWHSEWNIDTEDRVIDTEERLVGTSGYLAPEYLDAGNLTYKVDVYAFGIVLLELITGRRISELEQFNGHSYLSEWFHPIRMLEPGHILQNVRSLKPCFDSKESVEFNLQLQAMARAVSLCLRVDPDARPPMSKILRVLEGGNPVRPMGLDINSVGNTSGHLSGLKSHTPPKGTINHSRRLSH

SEQ ID NO: 227868 - protein, 156 aa, Glycine max
  unsure (1)..(156): unsure at all Xaa locations
  Clone ID: PAT_MRT3847_47793C.1.pep
MTSSYIKCTDSFFIAFGNMADDTINFVAFPHTLVQXFGEIKEKDVLKFSQEEFLTACSTNVRAVSTLSGDGCPYFYAMVHDCSLSTIPVDFVIGVKLTTINNMLCIWAQILECKDIIFWAPIPKYFLQXTVFNQIVTLRTPXIFDSCKSRFCNFLL

SEQ ID NO: 227869 - protein, 146 aa, Glycine max
  unsure (1)..(146): unsure at all Xaa locations
  Clone ID: PAT_MRT3847_47794C.1.pep
LYITLQLHFLFLDSKSHTRDLTKNKIEWNKSLLLPPHLSHLLYNGLHSRLESTAIDIFKVDVIQLLEILSDEYCVRFXLSKSYYKALTSSMNNHFKLNHVIAIIEHCNDFFLLYTETITLVHVIDNFWFTDPSVYPNSTYLLQRCH

SEQ ID NO: 227870 - protein, 52 aa, Glycine max
  Clone ID: PAT_MRT3847_47795C.1.pep
GFVSDAKFCDIRKKRLAGPPVCLKIRYQSILVTTGWVSSTDQDLRCRTSRIL

SEQ ID NO: 227871 - protein, 56 aa, Glycine max
  Clone ID: PAT_MRT3847_47796C.1.pep
QLSLAGLTPSLHISSSVHHNSSPYRGTRGHVLEILRGSIFPFTRCPTQNIILPFCS

SEQ ID NO: 227872 - protein, 133 aa, Glycine max
  Clone ID: PAT_MRT3847_47797C.1.pep
RTLVMPPLWCRIDRLWFPHPGVLDGSMTRQPFLCPLDHVFEVNAMLKELPEEEFGPGIDIREYSILDNPILPSEVKKSWLDVQLCKDGTQDCFASNNTTVGGVLKFPRHSNEERVFKILMHLMVISVLDFKFF

SEQ ID NO: 227873 - protein, 180 aa, Glycine max
  Clone ID: PAT_MRT3847_47798C.1.pep
HNLKTSLVTNYWRVLLQVHPNLDEIEKEKVCSVLDPLKLSYEARVHASKNKRLPLQIVLHALYYDQLHIRSGTAEEKVALAVAEKKQLQADVSLVRENEELRSELMKMKMFISDMQKHGHGTSSSGRENIGLAKKPTFFSSMSKKLSKLNPFKNGSKDTSHIDDAPVDLTKPRRRRFSIS

SEQ ID NO: 227874 - protein, 94 aa, Glycine max
  unsure (1)..(94): unsure at all Xaa locations
  Clone ID: PAT_MRT3847_47799C.1.pep
MPGRSCGGRSARAAAVQXPRAAPDHHAPPPGPASXGGGXRSGGNGSTIGQGVAFGTGRAVAHKDEDADMGTSTIQHEAVDTEDADADPAPTANT

SEQ ID NO: 227875 - protein, 83 aa, Glycine max
  unsure (1)..(83): unsure at all Xaa locations
  Clone ID: PAT_MRT3847_4779C.1.pep
THWHSIRERHDDTLSGYRNAVPGLLTRVEAKGEGMLQQHQRGGENDKRPGESIKNLPERRERRTIRXSTQEAIGGTPFGALAV

SEQ ID NO: 227876 - protein, 87 aa, Glycine max
  Clone ID: PAT_MRT3847_477C.1.pep
SGTIPSEEIYQIMLKQPLIGTLNIFIFSSAHILPFLLNSRVLSFLSRFHPSHLKNKSGQKKETKGNIVLKSKKYNHYNWTRGRPDSD

SEQ ID NO: 227877 - protein, 79 aa, Glycine max
  Clone ID: PAT_MRT3847_47800C.1.pep
FFFFFFFFFFFFFFFFAPTGDLFSFQNNFISYPGGKTEQHLGFKRKIENMGPCDHSPKLKKGDSNLASIPLSKLCPQNF

SEQ ID NO: 227878 - protein, 84 aa, Glycine max
  Clone ID: PAT_MRT3847_47801C.1.pep
TLPRERIMSYCTRLILRSPTLRVCSFATRVAHVPYLRGATGARAAPSDPADDAPGGPEFLRASTAERRRGSLYDCHASCVTADY

SEQ ID NO: 227879 - protein, 333 aa, Glycine max
  Clone ID: PAT_MRT3847_47802C.1.pep
MTRRCSHCSHNGHNSRTCPNRGVKLFGVRLTDGSIRKSASMGNLTHYAGSGSGPLHTGLNNPGSPGETPDHAAAVADGYLSEDFVPGSSSSSRERKKGVPWTEEEHRMFLLGLQKLGKGDWRGIARTYVISRTPTQVASHAQKYFIRQSNVSRRKRRSSLFDIVADEAADTAMVQQDFLSANQLPTETEGNNPLPAPPPLDEECESMDSTNSNDGEPAPSKPENTQSSYPMLYPAYYSPVFPFPLPYWSGYSPESTKKEETHEVLKPTAVHSKSPINVDELVGISKLSLGESIGDSGPSSLSRKLIEEGPSRQSAFHATPTCGSSNGSAIHAV

SEQ ID NO: 227880 - protein, 333 aa, Glycine max
  Clone ID: PAT_MRT3847_47803C.1.pep
MTRRCSHCSHNGHNSRTCPNRGVKLFGVRLTDGSIRKSASMGNLTHYAGSGSAPLHVGLNNPGSPGETPDHAAAAADGYASEDFVPGSSSSSRERKKGVPWTEEEHRMFLLGLQKLGKGDWRGIARNYVISRTPTQVASHAQKYFIRQSNVSRRKRRSSLFDIVADEAADTAMVQQDFLSANELPTETEGNNPLPAPPPLDEECESMDSTNSNDGEPAPSKPENTHPSYPMLYPAYYSPVFPFPLPYWSGYSPEPTKKEETHEVLKPTAVHSKSPINVDELVGISKLSLGESIGDSGPSTLSRKLIEEGPSRQSAFHATPTCGDMNGSAIHAV

SEQ ID NO: 227881 - protein, 62 aa, Glycine max
  unsure (1)..(62): unsure at all Xaa locations
  Clone ID: PAT_MRT3847_47804C.1.pep
LXXXSLRWYPSXQIRXAPFTKPXIIDYXLXXTFGFXXHSKLXHXSTCXXLTAEPLXXLSLPP

SEQ ID NO: 227882 - protein, 68 aa, Glycine max
  unsure (1)..(68): unsure at all Xaa locations
  Clone ID: PAT_MRT3847_47805C.1.pep
MGETAFPQGTFRKGKRMAFTIRGGACAKNCILKKYAKGCLLMGRIFGGXLSFEVXKMASPYIKGPAFF

SEQ ID NO: 227883 - protein, 165 aa, Glycine max
  unsure (1)..(165): unsure at all Xaa locations
  Clone ID: PAT_MRT3847_47806C.1.pep
MKPSSLHFQNPNPIFCSPMAHSALRVLRLSPFLQPLRLRHAPSELRFLSARAPRRPASAFRSARRRDDENGSVTTAASATTDNGYVSEGRVVPTELHKEATEAYMAYAMSVLLGRALPDVRDGLKPVHRRILVAMHELGLXSQKPFKKCAXRVVVEVLGKFHPDG

SEQ ID NO: 227884 - protein, 99 aa, Glycine max
  unsure (1)..(99): unsure at all Xaa locations
  Clone ID: PAT_MRT3847_47807C.1.pep
AASTTKXQLLFMQXHXSLSRSXTXAAGSLLQSIFXGFWAGXCXXXKGSHAPLQADLXDLGSQSGVDVTKIAGFXLXTSAXVVSGGSAXSVXKRLTSTKS

SEQ ID NO: 227885 - protein, 58 aa, Glycine max
  Clone ID: PAT_MRT3847_47808C.1.pep
SLDCKTITLPEEAVDTIDNANIPIKDRDKIPTYCSKTYFCSKTTDDGLTSWDDDTSTD

SEQ ID NO: 227886 - protein, 66 aa, Glycine max
  Clone ID: PAT_MRT3847_47809C.1.pep
SGISHLLGFACFPIVPGCHLLKLSFLYAVRGQSIQSFPVLGYKVLYNQRHLFSQFNQKKWVVNLVC

SEQ ID NO: 227887 - protein, 54 aa, Glycine max
  unsure (1)..(54): unsure at all Xaa locations
  Clone ID: PAT_MRT3847_4780C.1.pep
GEXPXXXLFQGEXESAVEREHNILFSFSSFFEYQEMATTVMTSLPEFSGLRPQF

SEQ ID NO: 227888 - protein, 96 aa, Glycine max
  Clone ID: PAT_MRT3847_47810C.1.pep
TLHGAFFFFFETPVYCAYTTKLPAKLYHHDNDRASALRDMALIKFLSKGFINISRERIPFHNLPPQPAKLQPTRQCLIFTFSSFRTWATRDFGPDL

SEQ ID NO: 227889 - protein, 51 aa, Glycine max
  unsure (1)..(51): unsure at all Xaa locations
  Clone ID: PAT_MRT3847_47811C.1.pep
ILHACVVGRVXXRYHTTHQHTVXHSXLIHEGAXMGVIVGIMLLCFXFLSFX

SEQ ID NO: 227890 - protein, 169 aa, Glycine max
  Clone ID: PAT_MRT3847_47812C.1.pep
MGSGQIGGGGNGGGCSNGGSCCDMSVKCSCRWRLENQQYYKRLFSSGFIFFFGCFVLFGSIATLYGWFAFSPTVHTALSSSFGCREDNEGSWSIGVFYGDSPFSLKPIEAANVSNDETAAWPVANPVVTCASVSDVGYPSNFVADPFLFIQGNTFYLFYETKNSITMQG

SEQ ID NO: 227891 - protein, 40 aa, Glycine max
  Clone ID: PAT_MRT3847_47813C.1.pep
FVHSRSKIPTHLTQHQIIQLPSSLYTIIWMRQDNEKNNRD

SEQ ID NO: 227892 - protein, 28 aa, Glycine max
  Clone ID: PAT_MRT3847_47814C.1.pep
CLCVSTNASSTFPNGRYKNVAVKLNEIT

SEQ ID NO: 227893 - protein, 110 aa, Glycine max
  Clone ID: PAT_MRT3847_47815C.1.pep
YYISKPSFCCGLILDSIQVREIVAILDLDVLFYPCPRNGPNFRQKVLEMGGKLQFPYMVDPNTGASMYESDDIIRYLVDKYGLCLRIYSLFWNVLMPCSLFSWCISIYKI

SEQ ID NO: 227894 - protein, 75 aa, Glycine max
  unsure (1)..(75): unsure at all Xaa locations
  Clone ID: PAT_MRT3847_47816C.1.pep
QNQSTSSFNVXSLHLYKCSKPKFLRMKXPDEGWMRWFWLASETMRRGGSGRRLVAXGELVVMVVRRLLREVVVVG

SEQ ID NO: 227895 - protein, 63 aa, Glycine max
  unsure (1)..(63): unsure at all Xaa locations
  Clone ID: PAT_MRT3847_47817C.1.pep
AGNIAGLVDCKDAPKPDKXPVEDLKLIHEWKCSVRKVIKITLERLSLRSDTELKLSVARKMKD

SEQ ID NO: 227896 - protein, 51 aa, Glycine max
  Clone ID: PAT_MRT3847_47818C.1.pep
KNKTYQPFYKLKRTQKNKNNRAASDNSARQRGNYSRTGTFRLTIFPQSQSS

SEQ ID NO: 227897 - protein, 78 aa, Glycine max
  Clone ID: PAT_MRT3847_47819C.1.pep
FSYHSSPQAIYQHHWILSSLMMLVPHQLKPFCTKLHCYFNSLKPNLLPTGISSTKIRKRSQNRKVASSTHRNINKVKM

SEQ ID NO: 227898 - protein, 36 aa, Glycine max
  Clone ID: PAT_MRT3847_4781C.1.pep
LKTYECQPHQHLFKSVEGILILGGFISASLTCPDQS

SEQ ID NO: 227899 - protein, 52 aa, Glycine max
  Clone ID: PAT_MRT3847_47820C.1.pep
SLEHGGRLPKHCYVLTAMPNNLAGRKKNPPGPIRKFRGGTLKFPTFPYRETF

SEQ ID NO: 227900 - protein, 73 aa, Glycine max
  Clone ID: PAT_MRT3847_47821C.1.pep
CYFNLLVPLVLRGMMLFAKTAIVVVGDLGDTMGSNTGPLIQEKAETILICRKHIPFRRNLTPLIMCDYYYQSI

SEQ ID NO: 227901 - protein, 93 aa, Glycine max
  Clone ID: PAT_MRT3847_47822C.1.pep
CQCIVTPESRAANAPSLVVSSMSWIANVIAWDLFMVVPFVGSADPRFPLEGIAHRQSVIISESVLIIRMMLMEVIPATWTFGKLSLSVSKEHH

SEQ ID NO: 227902 - protein, 239 aa, Glycine max
  Clone ID: PAT_MRT3847_47823C.1.pep
HASGSIHPWLVKSAVCAEKFFTQAQLMELEKCKFDLRIGSKVKFVLSLIYRVVKKEKVLIFCHNIAPVKLFVEYFEKYFGWTKGREVLVLTGELELFERGRVMDKFEEPGGVAKILLASITACAEGISLTAASRVIMLDSEWNPSKTKQAIARAFRPGQQKVVYVYQLLVTGSLEEDKYKRTTWKEWVSSMIFSEAFVEDPSQWQAEKIEDDILREMVAEDRSKSFHMIMKNEKASTNK

SEQ ID NO: 227903 - protein, 40 aa, Glycine max
  Clone ID: PAT_MRT3847_47824C.1.pep
IRLFKNRHWFEKQLSKRKRDLASRESQNNSSLRRSINLKS

SEQ ID NO: 227904 - protein, 47 aa, Glycine max
  unsure (1)..(47): unsure at all Xaa locations
  Clone ID: PAT_MRT3847_47825C.1.pep
FNINTINNYLSITIRFILLRKKRXYRFKYIFIYCKCIYIYIINFSFN

SEQ ID NO: 227905 - protein, 56 aa, Glycine max
  Clone ID: PAT_MRT3847_47826C.1.pep
KFKHVLMLLELSISLHSREMSEENDWGIWATHSCQFDVPEVSLAMHKTITVINRKR

SEQ ID NO: 227906 - protein, 186 aa, Glycine max
  Clone ID: PAT_MRT3847_47827C.1.pep
KDDLKMVVSYLRSNKQISRIGLWGRSMGAVTSLLYGAEDPSIAGMVLDSAFSNLYDLMMELVDVYKIRLPKFTVKMAVQYMRRVIEKKAKFDIMNLNCLQGDKNVIKFDGDHNSSRPQFFYDSVSIFFYNVLHPPNVPRAHKLEKYYNLGDLKLGSGVDESLLYEILSSLRSASTDAASSSSVLSS

SEQ ID NO: 227907 - protein, 481 aa, Glycine max
  Clone ID: PAT_MRT3847_47828C.1.pep
MIEQFINFVIRPPRAEYNPDQYLWEKEFTLTGRTYQRQDLELKNTRGYTLKCSHYLPSPFPEDTSLPCVIYCHGNSGCRADANEAAVILLPSNITVFTLDFSGSGLSDGDYVSLGWHEKDDLKMVVSYLRSNKQISRIGLWGRSMGAVTSLLYGAEDPSIAGMVLDSAFSNLYDLMMELADVYKIRLPKFTVKMAVQYMRRVIEKKAKFDIMNLNCLQVAPKTFIPVLFGHASDDKFIQPHHSDLISEAYAGDKNVIKFDGDHNSSRPQFFYDSVSIFFYNVLHPPNVPRAHKLEKYYDLGDLKLGSGVDESLLYEILSSLRSASTDAASSSSVLPAISSTKSVSELLSEVAPVTDTESFFREDTNGNDEATDVQDKKLNGEGEDCCSYTSSNRESWGRCSSLGGSDEESCADDTLSQVFATPMRSTNEKEKDDDKKHEEKKKKKKGKKPKSERFEKLEALSRRLRLCLLKGSTHGRHKST

SEQ ID NO: 227908 - protein, 92 aa, Glycine max
  unsure (1)..(92): unsure at all Xaa locations
  Clone ID: PAT_MRT3847_47829C.1.pep
FSLDGQAKSAEGHFDLLPGAATSQEAVAHIXKSKSSLYASSDTKTNFXVKRPKERKLDLPCNKIAREXTTSDDRLGGTKQYASEPFFGGIQK

SEQ ID NO: 227909 - protein, 112 aa, Glycine max
  unsure (1)..(112): unsure at all Xaa locations
  Clone ID: PAT_MRT3847_4782C.1.pep
TLFRDTGVEVLHTIYHEPYADGMPFVEHLMISVDIHKMILLYTHLRVADTLRPFWIDSTYGRAYLVHALPDMLKIVPVXSSKRNGRPMLFDALXVTATGITTIGDGENDIGM

SEQ ID NO: 227910 - protein, 50 aa, Glycine max
  Clone ID: PAT_MRT3847_47830C.1.pep
GVRRQHNGTHVTGDIQVMWGHSSKGCRTLLRTDDELIPSPYLNSTSEPFT

SEQ ID NO: 227911 - protein, 81 aa, Glycine max
  unsure (1)..(81): unsure at all Xaa locations
  Clone ID: PAT_MRT3847_47831C.1.pep
CAYDPHDKGFQTSYFNQHCAISIXIPEFIQRTEHWSLRMSVIYELEIDCAGWHIKLFSGFVNQXKLGGDTPYILMSGPDLC

SEQ ID NO: 227912 - protein, 70 aa, Glycine max
  Clone ID: PAT_MRT3847_47832C.1.pep
PTTVFGKPRKKLKRPWPNLISIPTGGANHWRANRWFLMGVPPSVWPWKARCQMVGPFNSGPVQLGPSVLV

SEQ ID NO: 227913 - protein, 97 aa, Glycine max
  Clone ID: PAT_MRT3847_47833C.1.pep
MEWDSNSDLSDDDAVSYVLNDDDDDAVGPLPFPVLQTAPCGFVVTDALDPDHPIIYVNAVFEMVTGYRAEEVLGRNCRFLQCRGPFAKRRHPLVDST

SEQ ID NO: 227914 - protein, 48 aa, Glycine max
  Clone ID: PAT_MRT3847_47834C.1.pep
FRTYIDHAPFSSAIKFFPFLRVSVYIFWLHNQTRGSKICKLARESKYV

SEQ ID NO: 227915 - protein, 53 aa, Glycine max
  Clone ID: PAT_MRT3847_47835C.1.pep
QYNCRRSIHVIFPFYAEYEQNLIFMLLTQTTPNTKGVLAWHMHFLFSFPRSIF

SEQ ID NO: 227916 - protein, 77 aa, Glycine max
  unsure (1)..(77): unsure at all Xaa locations
  Clone ID: PAT_MRT3847_47836C.1.pep
RKVHIPKKKPFSRSVKAGLQFPVGRIGRYLKKGTYAQRVSTRAPVYLAAVLEXLTADVLELAWNAARDNNKNRIIPR

SEQ ID NO: 227917 - protein, 66 aa, Glycine max
  Clone ID: PAT_MRT3847_47837C.1.pep
KVETEKHQSLIVLFRYQFSCLRFGALGPCIFQCTLITFFFRSLSLFLLLLLWVFDCLLGPLQFMSS

SEQ ID NO: 227918 - protein, 499 aa, Glycine max
  Clone ID: PAT_MRT3847_47838C.1.pep
MAMAMAEASRITLHSTLLPFFTPKTHVGHRHLSLSSSRKHQVQCSVSAGAAAQTNPVAWGCEIDSLENSSALQRWLSESGLPPQKMGIERVEVGERGLVALKNIRKGEKLLFVPPSLVITPDSEWSCPEAGEVLKRNSVPDWPLLATYLISEASLMESSRWSNYISALPRQPYSLLYWTQAELDRYLEASQIRERAIERINNVIGTYNDLRLRIFSKYPDLFPDEVFNIESFKWSFGILFSRLVRLPSMGGNVALVPWADMLNHSCDVETFLDYDKTSKGIVFTTDRPYQPGEQVFISYGKKSNGELLLSYGFVPKEGANPSDSVELSLSLKKSDASYKEKLELLKNYGLSASQCFPIQITGWPLELMAYAYLAVSPSSMRGDFEEMAAAASNNTTSKKDLRYPEIEEQALQFILDSCESSISKYNKFLQASGSLDLDVTSPKQLNRRLFLKQLAVDLCTSERRILFRAQYILRRKLRDMRAGELRALKIFNGFRNLFQ

SEQ ID NO: 227919 - protein, 63 aa, Glycine max
  Clone ID: PAT_MRT3847_47839C.1.pep
QFPLEVQCLIKSISTICCKFKTTQALWSNFMLCISLIPRPVVLAIGTQDRNREKIQAETEQRE

SEQ ID NO: 227920 - protein, 64 aa, Glycine max
  Clone ID: PAT_MRT3847_4783C.1.pep
LRPTEQLLLRGIHFNRGIPEYITFLEHFLVVLASQITVKEARWGQKSKDHHHLRPTLNQEIIMF

SEQ ID NO: 227921 - protein, 46 aa, Glycine max
  Clone ID: PAT_MRT3847_47840C.1.pep
LLYTFSTTTTTTDFGTLYTGFCMIRAYQQYTHLAQSASVYCLVHQI

SEQ ID NO: 227922 - protein, 67 aa, Glycine max
  Clone ID: PAT_MRT3847_47841C.1.pep
EKHTHKHPLSSLTSSEKTTTTTKKNIIIKKTSESLMATRVIPSRILKKLRYNTTTKPLNAGQPLIFS

SEQ ID NO: 227923 - protein, 99 aa, Glycine max
  unsure (1)..(99): unsure at all Xaa locations
  Clone ID: PAT_MRT3847_47842C.1.pep
XGXXXXRXXXXYALXXXXXGXAXXHPRXVLXXXSPXFSGXXFXSXXXXXXAXXXLXXXAXWXXXXWXXXXXXXXXLFXFXXXXFXCXSRXXIPXLRTRA

SEQ ID NO: 227924 - protein, 106 aa, Glycine max
  Clone ID: PAT_MRT3847_47843C.1.pep
IHSSVPCYSLYSQEFCLWVPLINHSFNSISALRFCTYSDIALMSSILPLDQHPEWYLPPVFLESAFLSFTFIMIQRATIWSLYIIYQPSFASCFLLSLNLFALRQE

SEQ ID NO: 227925 - protein, 109 aa, Glycine max
  Clone ID: PAT_MRT3847_47844C.1.pep
RNSAREGTKKFKKPQITNPPKHQLKKGEEIQDTTTGSSPARRKQREKANTNRKEPWPKKRTEDPQTTRADREKQQEPEDRTKNTEGHQRNHNQNREKYNNRLKIRQDHK

SEQ ID NO: 227926 - protein, 58 aa, Glycine max
  unsure (1)..(58): unsure at all Xaa locations
  Clone ID: PAT_MRT3847_47845C.1.pep
KGKMQENPMQGKGEGFKFVLKRXKPQYLGCGERKGLKCKKDAMKLAVMKMIRPFGKRP

SEQ ID NO: 227927 - protein, 58 aa, Glycine max
  Clone ID: PAT_MRT3847_47846C.1.pep
IKEQMRRPWELTIYHAPRERNTVTDQLAALGANNTLGIYVVPPDGVLNAFLNDLAYCT

SEQ ID NO: 227928 - protein, 42 aa, Glycine max
  Clone ID: PAT_MRT3847_47847C.1.pep
LPNPCSTTMVVGQFPQERRQVQLVTVCCHQATYLRLRLVKFG

SEQ ID NO: 227929 - protein, 70 aa, Glycine max
  unsure (1)..(70): unsure at all Xaa locations
  Clone ID: PAT_MRT3847_47848C.1.pep
ENTHMIIDYIGHDDYGKSTSTGHLIYNLEGIDKRVIERFQIDASDIEHMSYKNAXMLYKLNSELERRITI

SEQ ID NO: 227930 - protein, 80 aa, Glycine max
  Clone ID: PAT_MRT3847_47849C.1.pep
CSLCYAVSILFHKLGVHPNPHDTYHYPVGRNIDLTPLMLCCTAPVPAVIIGWNLPRSTNDIMFLHLSASLSQMLKPYQAL

SEQ ID NO: 227931 - protein, 56 aa, Glycine max
  Clone ID: PAT_MRT3847_4784C.1.pep
PTTSHMSADPSSLHRKYSAGIPIRRGFSFSNHGSSEHIAVNNASRLIHFCQEFHFY

SEQ ID NO: 227932 - protein, 76 aa, Glycine max
  Clone ID: PAT_MRT3847_47850C.1.pep
YILYYKLVFNFPSRIQGVSFNNNINHQESSQGKWMRRSFLENKKSGNDLSVSGQLINTCHMLKSNTMDLKVRLIKK

SEQ ID NO: 227933 - protein, 87 aa, Glycine max
  Clone ID: PAT_MRT3847_47851C.1.pep
QAPFAVPPASASSHLAPPLKGPVSSPGVPSPPQPSPHGPPVRNSQLFSEVPPVFSPPPWPPFSGPLYHPLNFVARVSRRKGKNPVGF

SEQ ID NO: 227934 - protein, 471 aa, Glycine max
  Clone ID: PAT_MRT3847_47852C.1.pep
FVNVMRKKRKGSKTDGSADLAVILAPNHGSASSNLKSHYSLEDCCRLKKRCCKEEDADTEPATSFTRRLAGIATAPPCGTSSLITPGRGLKRKIGCIDVATQMGRKKKIEDDYVSGETIGQGKFGSVWLCRSKVSGAEYACKTLKKGEETVHREVEIMQHLSGHSGVVTLQAVYEEAECFHLVMELCSGGRLIDGMVKDGLYSEQRVANVLKEVMLVIKYCHDMGVVHRDIKPENILLTASGKIKLADFGLAMRVSEGQNLTGLAGSPAYVAPEVLLGRYSEKVDIWSAGVLLHALLVGSLPFQGDSLEAVFEAIKTVKLDFQNGMWKSISKPAQDLIGRMLTRDISARISAEEVLRHPWILFYTANTLKMLPIKTKLKNQIGATCQQLVAVREPRLGGNRIDNYSLSEGSSSESCYSDDQDECVLIDVLASAISHVRISEPKRSRVCGPTGPIVQQGSSNMKPNNLCKAF

SEQ ID NO: 227935 - protein, 99 aa, Glycine max
  Clone ID: PAT_MRT3847_47853C.1.pep
NIAIHPTHIFVSLNHEIQLHRASAFRYGSIYSQLELMDQKAGDDSSCVKKIISTCDVEALKKCLEENKGDYVKCQSQIESFKSSCSLRKTNLSLDSALH

SEQ ID NO: 227936 - protein, 117 aa, Glycine max
  Clone ID: PAT_MRT3847_47854C.1.pep
LVVRLREDGRRGSSAAVLGLVKLHFAFSFGEIELHRKHRASAFRYGSLYSQLELMDQKAGDDSSSVKKIISACDVEALKKCLEENKGDYVKCHSQIEAFKSSCSLKKPNPSLDSASR

SEQ ID NO: 227937 - protein, 45 aa, Glycine max
  Clone ID: PAT_MRT3847_47855C.1.pep
LPDKTASTAWDVLNVRFLCQTKHKIPTHGYNDQEEANWIFFRVQC

SEQ ID NO: 227938 - protein, 83 aa, Glycine max
  unsure (1)..(83): unsure at all Xaa locations
  Clone ID: PAT_MRT3847_47856C.1.pep
PHSDDYGTADYIYGNAASVHXYAADLYERKHNENQRNMFTAQVKEGPNQNXGVSILNCKVAAADDLISVESQFKNYLDHPCKN

SEQ ID NO: 227939 - protein, 249 aa, Glycine max
  unsure (1)..(249): unsure at all Xaa locations
  Clone ID: PAT_MRT3847_47857C.1.pep
KLSMETENCETFGTTSLDTTSVGIVGHYKFENGSSQFAFMKVENERGVSLDHSLSFSTENFVQTLAFCNSLILMSGFSGDKSCYHVLNPFTKHNVMIPQTSIQGGVVRVGLAYDGDQFFDVVLVEAGSSNSNGLKLHVFSSETGQWRCHYPINLAAAPSLPELEFQELGTPPLYANGAIHWEIGGYLLVYQVQGSHCALYELPNYFEGWSWQSTLSYRRSLCESGGEVYYCYTDFDGXHIWKLLNEEEH

SEQ ID NO: 227940 - protein, 67 aa, Glycine max
  Clone ID: PAT_MRT3847_47858C.1.pep
RGQKHNGGDLYFSPITKGGPLLKAPEVNTPLFFEPKTFKKNPNIRPKIGAPTKIETPNFYWLKISLW

SEQ ID NO: 227941 - protein, 65 aa, Glycine max
  Clone ID: PAT_MRT3847_47859C.1.pep
RLVQTLDPTPKPQVLCLRISILSSQRRLENLSSTLSFVATNFCFVQSVIELPSKSSSSKLHFLEL

SEQ ID NO: 227942 - protein, 85 aa, Glycine max
  Clone ID: PAT_MRT3847_4785C.1.pep
NTSKILPVFYCSLLKPHIGPLPNSFNQLPASSHYNHPLVLPLTIRSSKWDHSTIPPTRHVLVQWLGLPDDSSWENWEEMCSVSHL

SEQ ID NO: 227943 - protein, 46 aa, Glycine max
  unsure (1)..(46): unsure at all Xaa locations
  Clone ID: PAT_MRT3847_47860C.1.pep
TIAAPMPPNCCANATFLPFYSXGFRLXLEPWNGDILVNIPHLIRVX

SEQ ID NO: 227944 - protein, 43 aa, Glycine max
  unsure (1)..(43): unsure at all Xaa locations
  Clone ID: PAT_MRT3847_47861C.1.pep
XTXIEXEXGIFYLHFLFILFSFXLNHXIXPIPPHVQNNIMKLN

SEQ ID NO: 227945 - protein, 102 aa, Glycine max
  Clone ID: PAT_MRT3847_47862C.1.pep
YHKRGIWAIKAKNGGVLPGHDPKPRPETADEKRPKFYPADNIKKPIVNKHKPKPGKLRDSITPGTMLIVLAGGFKGKRVVFLKQDTIGGVLLTETSKKGGIA

SEQ ID NO: 227946 - protein, 68 aa, Glycine max
  Clone ID: PAT_MRT3847_47863C.1.pep
LLISLGCFHHLHWLSEVNITILASELQWLFQQVSLVHSSDALSLTCGSSNAATATVSTSTHVSCFCKT

SEQ ID NO: 227947 - protein, 115 aa, Glycine max
  unsure (1)..(115): unsure at all Xaa locations
  Clone ID: PAT_MRT3847_47864C.1.pep
MVFIREMLNILVPPLGLVLLLLMLPPYLLFKILRFIVRSIFSENVAGKVILITGASSGIGEHLAYEYGRRGARLALVARRENRLKEVASIAKLFGSPEVIIIPADVSSSQDCXRF

SEQ ID NO: 227948 - protein, 64 aa, Glycine max
  Clone ID: PAT_MRT3847_47865C.1.pep
EFLNFSLLLCARFLKGKKITLCAGHRLRESFPFPLLVDLLNTLLFDIGLRVRSKLCLVLSQFSG

SEQ ID NO: 227949 - protein, 36 aa, Glycine max
  Clone ID: PAT_MRT3847_47866C.1.pep
ARKHRSGIAAAPHASEYIKFLKKTNKLCIYKKSKTT

SEQ ID NO: 227950 - protein, 50 aa, Glycine max
  Clone ID: PAT_MRT3847_47867C.1.pep
TTSFAELSLACILICMLPIAQVIVRAANLFQGRPFRNLDLLNFTFESPTT

SEQ ID NO: 227951 - protein, 61 aa, Glycine max
  Clone ID: PAT_MRT3847_47868C.1.pep
SHNNNHYEIIISITLFLFIYLFIIITHHSKSVYLEYTKTKINRVLNHFILYFQMFPNAQIY

SEQ ID NO: 227952 - protein, 66 aa, Glycine max
  unsure (1)..(66): unsure at all Xaa locations
  Clone ID: PAT_MRT3847_47869C.1.pep
RILETHGLAPEIAEDLFHSIRNAPTIKMLVERNRMDTDSQXRLIFVDSRFRRLTRYYTNTKILPPL

SEQ ID NO: 227953 - protein, 68 aa, Glycine max
  Clone ID: PAT_MRT3847_4786C.1.pep
ISLIVPGQRAILRKQHERSATQRRWLRKSHASNWHMPRHWCIADQTQCSSGEGNSATLSHGMHMLPEL

SEQ ID NO: 227954 - protein, 143 aa, Glycine max
  unsure (1)..(143): unsure at all Xaa locations
  Clone ID: PAT_MRT3847_47870C.1.pep
MGACASSPSAKTTAASVNKGGGGGGAPASESFRRPSSIMVMDMLGRINEYKQPIPARNVLSENPHFYLCNSEDSXIGTCMPRVPDEEELLPGRIYFLVPLSHSDSPLSLPLLCDLAVKAGSALPNPNNNSSNGHRKKASVTRR

SEQ ID NO: 227955 - protein, 80 aa, Glycine max
  unsure (1)..(80): unsure at all Xaa locations
  Clone ID: PAT_MRT3847_47871C.1.pep
MLAGVDKTGAKSPKGLQSPHSNSVSSFKFVVFVRHLYCVTLVSVPLNMASSGLFGLXFDKQNLLLPRLFAVVDDIFCLFQ

SEQ ID NO: 227956 - protein, 121 aa, Glycine max
  Clone ID: PAT_MRT3847_47872C.1.pep
KLEAWSEIKGLYRGATPSFVGMAVEGSLFFGIYSQTKVYLQGGVQSGEPRPQVIIPSAAFSGAIISFVLGPTDLIKCRMQIQGTDSLVPKSSRYSSPLDCALKTVKAEGVRKFCSTMINVL

SEQ ID NO: 227957 - protein, 142 aa, Glycine max
  Clone ID: PAT_MRT3847_47873C.1.pep
PPPRFLPLLAPSPGLGFPLPWGESPKGSRAPRVPPTCPGSPPSRGAPIKKFFGPFLSALFPPPPFENPLFPPNCPPGFFAGQFHAKPQRFPGIFLFFFFPHLCNKMWGGGFRPPPWGRGKLFCDLGQGFPLFGPLPLKKGVG

SEQ ID NO: 227958 - protein, 82 aa, Glycine max
  Clone ID: PAT_MRT3847_47874C.1.pep
VSATVKPETQKAPPPMEAPAVSLDDLNEKTDTSGSQALIGEGSVGRVYYASLNNGETVAVKKRDVSSEPASNIELLTEVYMV

SEQ ID NO: 227959 - protein, 92 aa, Glycine max
  Clone ID: PAT_MRT3847_47875C.1.pep
PIRRTAPSSVTQDKIIFHTSLGWVCKKIFVIVGTVCFVFHTQWCKYKIQEMVCVFVPIKIGRNRTKKSNSDSIFFSLCENGAGDSWKKDGRI

SEQ ID NO: 227960 - protein, 100 aa, Glycine max
  Clone ID: PAT_MRT3847_47876C.1.pep
IKNKKTKQRGFKTPLDKKAFLFKNLKAPNPRVLVFAPNPRVSQKAKKGGTPRVELKHCYCFGGNRTNDHNLGGGDYKIKVAPEGTKSFDWRPFKNVLGGK

SEQ ID NO: 227961 - protein, 78 aa, Glycine max
  Clone ID: PAT_MRT3847_47877C.1.pep
SYRCWSSQYRAGQTRLISKYEILGSSYTLDSSQTHPKIAVFHWKTVIILRGRSYTNVPVFWKAGFNKKTGRVENNSPK

SEQ ID NO: 227962 - protein, 76 aa, Glycine max
  unsure (1)..(76): unsure at all Xaa locations
  Clone ID: PAT_MRT3847_47878C.1.pep
VGKTMEYDTDGYRGYDPEINAGDPNNVSDHWISKVYSFGMVIWENGYWLEXYFSFSPVQAAVGFSECGVEPDMPKD

SEQ ID NO: 227963 - protein, 74 aa, Glycine max
  Clone ID: PAT_MRT3847_47879C.1.pep
KQGFKWPITSKQRGFPNLSGHSGFLFTIAYLLVLAPSNPPVLMPRRIMAKKPQLVGDGNWQFYLEKVFRFRLGA

SEQ ID NO: 227964 - protein, 155 aa, Glycine max
  Clone ID: PAT_MRT3847_4787C.1.pep
APPFWGEARIPFKFLFEDGGVSLPLIGRGFWTNLNGVFLHFSVSPGKTQWVFSKNVSFFPAFAHVNPPRETGCSTKGGFLHFFVLPTKKSFFQTIFFLQKLVCNLSLKLKVVKTGNSFYGKNGFRFCNVLIKIFFLKKKKKKKKKKKKKKKKKKK

SEQ ID NO: 227965 - protein, 150 aa, Glycine max
  unsure (1)..(150): unsure at all Xaa locations
  Clone ID: PAT_MRT3847_47880C.1.pep
MRGLVFFVATMVGAWHCLACHMCTIRVNSXYGARTTKVRCSCWRLAVETHSMGGFETIPEECVESTKEYIRGWHSGXNSQVVDQEGYFYAKDLEGHPKDRFVFSMDGTGLCKVXYYKEHGCGGEKCNSGLDDEWVMKGNGALLGDTVRKY

SEQ ID NO: 227966 - protein, 67 aa, Glycine max
  Clone ID: PAT_MRT3847_47881C.1.pep
MHSVKITVSRQRLSFVMRSRQKRQDDRRGTEIMEDACEDVPPYEDSPNRNLSLRSMDLRYKEARHLR

SEQ ID NO: 227967 - protein, 117 aa, Glycine max
  Clone ID: PAT_MRT3847_47882C.1.pep
MQILDETLTGETMTLEEESSDTMDSAKGKIQDKEGIRGDQRRIIFDEKRLGDRRTLADYNIQRESALDLLLRVRDGVHILIKTLTGETITLEVESADTMGNVKGKIQDKEGIPPDQQ

SEQ ID NO: 227968 - protein, 75 aa, Glycine max
  Clone ID: PAT_MRT3847_47883C.1.pep
LFCLTTRTHYLCHHGAGPGLTPCLIRGLPLKRDQFISCAAYRHGSIYVQPFCCVPNAIAPNLAQGKRAPSKRTKR

SEQ ID NO: 227969 - protein, 87 aa, Glycine max; identical to SEQ ID NO: 190580
  Clone ID: PAT_MRT3847_47884C.1.pep

SEQ ID NO: 227970 - protein, 254 aa, Glycine max
  Clone ID: PAT_MRT3847_47885C.1.pep
MAGKGGSTPATYSPSPTTDKKKPSLFNEDLARPDGRSFHQCRPAFFRTGAVNAASGSAYAEVGNTKVIVSVFGPRESKKAMMYSDIGRLNCNVSFTTFATPIRGQGSDHKEYCSMLHKALEGAIILETFPKTTVDVFALVLESSGSDLPVVISCASLALADAGIMMYDLVASVSVSCFNKNLVIDPVLEEENGQDGSLMITCMPSRYEITQLTVTGEWSTPKINEGMQLCLDACAKLAKIMRSCLKEAVSDSQE

SEQ ID NO: 227971 - protein, 40 aa, Glycine max
  Clone ID: PAT_MRT3847_47886C.1.pep
PTNSQIFLTSFAATPSQSWYLDFDASHHVTNMSHSATNTF

SEQ ID NO: 227972 - protein, 126 aa, Glycine max
  Clone ID: PAT_MRT3847_47887C.1.pep
VSKKKKTPPFLKTFQKNLQKNRRFKKKGAKKKKNFFFPPSPPPLSQVFPSWRQSQVSFHHPPLESKANVFPPHEAVFSRAGKANTCDGGGPLKKKKPLYFLGPKFDEFQPFFFLARRVTPYLKCSP

SEQ ID NO: 227973 - protein, 86 aa, Glycine max
  Clone ID: PAT_MRT3847_47888C.1.pep
CFRMPGLDPGVNGGGQSGVGCVDGAIGPSVPPKGDNADFMRREWTLGRMTITVKTLLFKNNAPDSLSNHALGKKGIPFIMKGAERQ

SEQ ID NO: 227974 - protein, 170 aa, Glycine max
  Clone ID: PAT_MRT3847_47889C.1.pep
VELNSLPSSNQNNKGLVAKFTSNAPAANSLVAESKPREMASRNMFKQPDTNGVVNGELANVKVTNTSLNRQVTGSSPESTSNQSSRAAPSVVHGQGASDPVQLMRLLAERAHKQHFSFNDLLVDTPPVTLSGPSGQRDDSGNASAAAAEAWMSAGAGGFKTGPKNSSSPK

SEQ ID NO: 227975 - protein, 236 aa, Glycine max
  Clone ID: PAT_MRT3847_4788C.1.pep
MEGRMGLLFLVVLGAAWACDARELANPDLLSKLSRKPDACALCEEYSTKVLDYLNENKTQQEIIDILLNTCHQTSSFKQKCITLVDYYAPLFFLEIVTIQPGEFCHKVNLCQLITYISLLVQEDTSGFCEDTVSTLLAKLKDGDTKLQIIGTSLKGCNSVEKYAKCKRMVFEYGPLVFDNAEKFLESTDICTAIYAMQIFNSGWPANLSFRFLWKQRSNRFVVYLLQKISIYITTH

SEQ ID NO: 227976 - protein, 121 aa, Glycine max
  unsure (1)..(121): unsure at all Xaa locations
  Clone ID: PAT_MRT3847_47890C.1.pep
PILRNDLSAKSLTEGDFRARVDSQRTHRIKGMIKMVATAGIPENTCLALACAMKXSXRGSASSDIHTIXFKDCELWNPACTKATTMPFNPNPCSDPRSLEFLTRTGFHCEIICVTGWPATS

SEQ ID NO: 227977 - protein, 119 aa, Glycine max
  Clone ID: PAT_MRT3847_47891C.1.pep
MAEEGQVVGVHTVDAWNQQLQNGKDSQKLIVVDFTASWCGPCRFIAPVLAEIARHTPQVIFLKVDVDEVRPVAEEYSIEAMPTFLFLKDGKIVDKVVGAKKEELQLTIAKHVSAAAASS

SEQ ID NO: 227978 - protein, 58 aa, Glycine max
  Clone ID: PAT_MRT3847_47892C.1.pep
MAIFYALVARGTVVLAEFSAVTGNTGAVSRRILEKLPAEPDSRICFSFFFYPPPPPRA

SEQ ID NO: 227979 - protein, 68 aa, Glycine max
  Clone ID: PAT_MRT3847_47893C.1.pep
EYFPPQMQSFSFLGFFLISGDLYDRSSGMTKKVDFMSWMLCRRMWMWGHMCLFLRYSCLFNFSYLFLI

SEQ ID NO: 227980 - protein, 76 aa, Glycine max
  Clone ID: PAT_MRT3847_47894C.1.pep
LPSQRYMRQIAIQTLMATVPKKYAGVIQKKFSSISYDMGSVPSVPHRQAGTASSAHRFNRPGVAKRGDQARPPQNR

SEQ ID NO: 227981 - protein, 108 aa, Glycine max
  unsure (1)..(108): unsure at all Xaa locations
  Clone ID: PAT_MRT3847_47895C.1.pep
AICFTILFSLALAGESHVHASLPEEDYWEAVWPNTPIPTALQELVKPLPTNIKIDELPKQINNAQYPKTFLYKEYLHARETIKVQFTXRAYAQPYGGYTVVTDIRGAS

SEQ ID NO: 227982 - protein, 66 aa, Glycine max
  Clone ID: PAT_MRT3847_47896C.1.pep
QKQIAIKISTQLEGLISDSLSPTVNNKAATKQPAFASAFALSISSLHPYFFFFFFFSIMLFSFGFA

SEQ ID NO: 227983 - protein, 81 aa, Glycine max
  Clone ID: PAT_MRT3847_47897C.1.pep
GAKGIESKKAKCYGKYETFVTACFGQNQAPFFLAVIDFLTFVPRSPPPPMECKFYCVRFSPFRSHLFLFWKKGGQHQNLKE

SEQ ID NO: 227984 - protein, 47 aa, Glycine max
  Clone ID: PAT_MRT3847_47898C.1.pep
DAWFEKPYPFSCALLPYHFFFFFFFFFFFFFFFFFFFFFFQISIGNK

SEQ ID NO: 227985 - protein, 142 aa, Glycine max
  Clone ID: PAT_MRT3847_47899C.1.pep
NILCLCTNEIGQSETQYPDLFEYKNFSVCDSDDYNISSIFEEACDFIDYVEQTGQKVLVHCFEGRSISVTLVLAYLMLRKNHTLSEAWQALKRVHRRAQPNDGFAKILLELDQKLHGKVSMEWHQRKPVMKICPICGKNAGL

SEQ ID NO: 227986 - protein, 43 aa, Glycine max
  Clone ID: PAT_MRT3847_4789C.1.pep
NKTTNYLPDNFPFQKLSFKKIYSLKKKDIQTWDNPTKIIHGNI

SEQ ID NO: 227987 - protein, 70 aa, Glycine max
  Clone ID: PAT_MRT3847_478C.1.pep
GKNTPMDRRKYKNAPSLSLSQFADWDHMGRVREPPLHFSKIRETTELPHPCLFHSYSFPIPNQSCIPPPP

SEQ ID NO: 227988 - protein, 142 aa, Glycine max
  Clone ID: PAT_MRT3847_47900C.1.pep
EVMADPEARGVVNRAIKTLREVSKVYEGDGTNVPPLKIAEGNHLVTNLIAEFKKADAKEIPDNENPALVYAGVLAAGLVNAHNYDQQTWESTLCPYLSLAVPGYDNGPVVRELLQKKADEEGQDDRVFDDEEEGEDLCNCTF

SEQ ID NO: 227989 - protein, 92 aa, Glycine max
  Clone ID: PAT_MRT3847_47901C.1.pep
FLNPQIPFVLNRWMGKLTFPQGTSRSVMRIAFFAPAPPPIERGILLTLRDAPTGLAWCFHSRCGALDTCFWTSLVYCTFILNFILANIFYLL

SEQ ID NO: 227990 - protein, 92 aa, Glycine max
  Clone ID: PAT_MRT3847_47902C.1.pep
KQGFPVPRETKPHLNPFPWAPGNQTILICRRKKWGATTNLLKHYWLGPLLRKNFEKGISPRELPGGTYFGGYEGALKPKENKGGRTDFWGGA

SEQ ID NO: 227991 - protein, 90 aa, Glycine max
  unsure (1)..(90): unsure at all Xaa locations
  Clone ID: PAT_MRT3847_47903C.1.pep
PGFDSTASRIINIQPIXIHTSITXSLPXLHIRVIDVHSXHFSLPLALVFTQXXCCGSVXXQSLFHSIQVYSLFPSQVTSIITPSRGGLYS

SEQ ID NO: 227992 - protein, 58 aa, Glycine max
  Clone ID: PAT_MRT3847_47904C.1.pep
KTFIWTFGWVDQSTFCVHRTACTFLPRFAPVLNWPGRAFCAVTFKKIKCLKQNLPFFI

SEQ ID NO: 227993 - protein, 261 aa, Glycine max
  Clone ID: PAT_MRT3847_47905C.1.pep
PTRSPTRPPTRPPTRPEQCYAGVSMSSIIEEGYGVGGVVSLLWFKRSLPHYCTQFIEMCIMLCADHGPCASGAHNTIVTARAGKDLVSSLVSGMLTIGPRFGGAIDDAARYFKDAHDRALTPYEFVEGMKKKGIRVAGIGHRIKNRDNKDKRVELLQKFARTHFPCVKYMEYAIQVEDYTLSKANNLILNVDGAIASLFLDLFVGSGLFSKQEIDEIVEIGYLNGFFVLARCIGLIGHTFDQKRLKQPLYRHPWEDVLYTK

SEQ ID NO: 227994 - protein, 508 aa, Glycine max
  Clone ID: PAT_MRT3847_47906C.1.pep
MATGQLFSRTTQALFYNYKQLPIQRMLDFDFLCGRETPSVAGIINPGSEGFQKLFFGQEEIAIPVHATVEAACAAHPTADVFINFASFRSAAASSMAALKQPTIRVVAIIAEGVPESDTKQLIAYARSNNKVVIGPATVGGIQAGAFKIGDTAGTIDNIIQCKLYRPGSVGFVSKSGGMSNELYNTIARVTDGIYEGIAIGGDVFPGSTLSDHVLRFNNMPQVKMMVVLGELGGRDEYSLVEALKQGKVSKPVVAWVSGTCARLFKSEVQFGHAGAKSGSQLESAQAKNQALRDAGAVVPTSYETFEAAIKETFDKLVEDGKITPIKEITPPPIPEDLSTAIKSGKVRAPTHIISTISDDRGEEPCYAGVPMSSIIEKGYGVGDVISLLWFKRSLPRYCTQFIEICIMLCADHGPCVSGAHNSIVTARAGKDLVSCLVSGLLTIGPRFGGAIDDAARYFKDAYDRGLTPYEFVEGIRRDSELFVGRGMLFNSRDFIEYFPFTVFVWSM

SEQ ID NO: 227995 - protein, 608 aa, Glycine max
  unsure (1)..(608): unsure at all Xaa locations
  Clone ID: PAT_MRT3847_47907C.1.pep
MATGQLFSRTTQALFYNYKQLPIQRMLDFDFLCGRETPSVAGIINPGSEGFQKLFFGQEEIAIPVHATVEAACAAHPTADVFINFASFRSAAASSMAALKQPTIRVVAIIAEGVPESDTKQLIAYARANNKVVIGPATDGGIQAGAFKIGDTAGTIDNIIQCKLYRPGSVGFVSKSGGMSNELYNTIARVTDGIYEGIAIGGDVFPGSTLSDHVLRFNNMPQVKMMVVLGELGGRDEYSLVEALKQGKVSKPVVAWVSGTCARLFKSEVQFGHAGAKSGGELESAQAKNQALRDAGAVVPTSYEAFEVSIKETFDKLVEDGKITPIKEITPPPIPEDLSTAIKSGKVRAPTHIISTISDDRGEEPCYAGVPMSSIIEKGYGVGDVISLLWFKRSLPRYCTQFIEICIMLCADHGPCVSGAHNTIVTARAXLTIGPQFGGAIDDAARRFGGAIDDAARYFKDAHDRALSPYEFVESMKKKGIRVPGIGHRIKNRDNKDKRVELLQKFARTHFPSVKYMEYAVQVETYTLTKANNLVLNVDGAIGSLFLDLLAGSGMFTKQEIDEIVEIGYLNGLFVLARSIGLIGHTFDQKRLKQPLYRHPWEDVLYTK

SEQ ID NO: 227996 - protein, 50 aa, Glycine max
  Clone ID: PAT_MRT3847_47908C.1.pep
NNHTFLYVLYFYFINYLIEQLPIIFSEISCNSISNHYFYKFYFFFSYKRY

SEQ ID NO: 227997 - protein, 41 aa, Glycine max
  Clone ID: PAT_MRT3847_47909C.1.pep
LFPGPPQTYQDSLTMPSAASHRSRNFNPNPSRSTRKERYQT

SEQ ID NO: 227998 - protein, 122 aa, Glycine max
  Clone ID: PAT_MRT3847_4790C.1.pep
MGDEAEKLLQDSVRLINVWRPLTGPVVASPLAYADSRTVPDDQLAGVQHRYPHRTGETAGVKYSPEGKWHYLSGMKNDERILLQCYDSKDGARTPHSAFVDPRTQQGWPGRESIEVRALVFG

SEQ ID NO: 227999 - protein, 84 aa, Glycine max
  Clone ID: PAT_MRT3847_47910C.1.pep
HHLVPGHTTCAGSRAFSCISRFKCLPPFACSSCRELPSTLWRDNHTNSKMLVFCFVGIVLDHLSWDHRPWWVDFRDSLSEEMST

SEQ ID NO: 228000 - protein, 107 aa, Glycine max
  unsure (1)..(107): unsure at all Xaa locations
  Clone ID: PAT_MRT3847_47911C.1.pep
ATFWKLFSFLRDAGNGGVFVVNADLLFTPXSVLDPQSIKPNTCXVFQYKYRNVPLPCRAWFEGHMNIDPPVLTIIIKCKASVILENTDAQILMVPGRRFIAYGLSFI

SEQ ID NO: 228001 - protein, 76 aa, Glycine max
  Clone ID: PAT_MRT3847_47912C.1.pep
KKKSRWMSFSLWTLKAVGDFDVANDKRSVTTMVKVNVRCLVLAMDMVMIRTENYLIVIVATQMKERIFCVPLSVVL

SEQ ID NO: 228002 - protein, 129 aa, Glycine max
  Clone ID: PAT_MRT3847_47913C.1.pep
CRNVYGYIFSNEKEVIDYVTVMAPLVCISIILDSIQGVLTGIARGCGWQHLGVFVNLGAFYLCGIPMAALLAFLVRLGGQGLWIGIQSGAFVQTLLLSIITGCINWEKQAIKARKRLFDDQFSADNILV

SEQ ID NO: 228003 - protein, 73 aa, Glycine max
  unsure (1)..(73): unsure at all Xaa locations
  Clone ID: PAT_MRT3847_47914C.1.pep
RVSWGHKKSFIFVDRGFYSIETSLLLLALKDPTEHTAIDNLMVQQLDGTVNEXGWCKQKVLSWWNCYSTLPRV

SEQ ID NO: 228004 - protein, 53 aa, Glycine max
  Clone ID: PAT_MRT3847_47915C.1.pep
GIGGFDFFLTKELGLERIVGDLNPLHATASTEAGQSTIKNTTGFPPLHYGEDS

SEQ ID NO: 228005 - protein, 87 aa, Glycine max
  unsure (1)..(87): unsure at all Xaa locations
  Clone ID: PAT_MRT3847_47916C.1.pep
PIYKIRCFVLCSVFRVSWGHKKSFIFVDRGFYSIETSLLLLALKDPTEHTAIDNLMVQQLDGTVNEXGWCKQKVLSWWNCYSTLPRV

SEQ ID NO: 228006 - protein, 59 aa, Glycine max
  Clone ID: PAT_MRT3847_47917C.1.pep
MKPCTSLLFLALISALSFVVSDMVPSNEVWALRSFKEAVYEDPYQVLSNWDTVESDPCN

SEQ ID NO: 228007 - protein, 339 aa, Glycine max
  Clone ID: PAT_MRT3847_47918C.1.pep
MLLMLGLCFLLFSAFPLAFSERCHPQDKKALLQLQKDLGNPYHIISWNAKEDCCEWFCCVKCDEKTNRVISVALSSPFPDTNLSAQIPPSVGDLPYLESLVFHKFPKLVGPIQPAIAKLTKLKYLDLSNNNLSGPIPDFFAQLKNLDDIDLSFNNLSGPIPSSLGKLPKLAYLDLSRNKLTGSIPASFGSFQKPGPAIMLSKNQLSGRLPASLANLDSDRIDLSRNKLEGDASMLFGSNKRTWSLDLSRNNFAFDLSRVEIPHKTLARLDLNHNKIYGSLPVGLTKVEHFQLFDVSYNQLCGLIPKGGELQKIDKSLYSHNKCLCGSPLSPCNHKQMTV

SEQ ID NO: 228008 - protein, 45 aa, Glycine max
  Clone ID: PAT_MRT3847_47919C.1.pep
TFVNNQRVSNIFVLRYVSFLKCDPFFFGSCPAQAYNSNARQKKNI

SEQ ID NO: 228009 - protein, 78 aa, Glycine max
  Clone ID: PAT_MRT3847_4791C.1.pep
KFPYTCQGCGNENATTMVRFWLEVRVGQLNEIANFTLWDRECNALINESASEIKQQMIAQEGEFDPKDIPKAIDRILG

SEQ ID NO: 228010 - protein, 58 aa, Glycine max
  Clone ID: PAT_MRT3847_47920C.1.pep
VKVQSCKLKHVSHFSRISTRMIALAALAILGHRSAHSFPMETVRADTYQITLGMAVAW

SEQ ID NO: 228011 - protein, 171 aa, Glycine max
  unsure (1)..(171): unsure at all Xaa locations
  Clone ID: PAT_MRT3847_47921C.1.pep
GENFSPISPSGFNLLKRSAGIIEKRKALYVLVLGAPVKVNSLLVFTFGHQESRTDSLALLCKGLTSDVWKYVVEVNSSEMQPEGNLSFDPVWYVFCASFLSYWLRFSCLGHLILWFQHMAMVQIQTKDFLSCFDLSGSRVLLLTIQSSHSFKTMHGMLXQLCVHVLIXVML

SEQ ID NO: 228012 - protein, 50 aa, Glycine max
  unsure (1)..(50): unsure at all Xaa locations
  Clone ID: PAT_MRT3847_47922C.1.pep
SYILNESRLFSFYPLGDQSKFVHVQKKSPVTQXTFKTWVVGEKPSPYFSN

SEQ ID NO: 228013 - protein, 83 aa, Glycine max
  Clone ID: PAT_MRT3847_47923C.1.pep
LELLEPIRLERKLTHQLTHTIHFIYFIINNNAINHEHARILSQATFEKPVTTTEVYTTDRDTTYVESSLDADRRDVTYSETVI

SEQ ID NO: 228014 - protein, 94 aa, Glycine max
  unsure (1)..(94): unsure at all Xaa locations
  Clone ID: PAT_MRT3847_47924C.1.pep
LQLQAPSSLLMKGEHDHHFNLLNPEIXSWLLSSPTVVVEEEALHNSSQTIRSTLDNFSXIPQLXFXTAQXXNNXHSSSLVHHDQNPNPSTTTTT

SEQ ID NO: 228015 - protein, 57 aa, Glycine max
  Clone ID: PAT_MRT3847_47925C.1.pep
PRGRHAVVEQMSAYRGVPSIIHPRTYASYNNLPKVHWRNPPRHQQRGFTTWLAKWPT

SEQ ID NO: 228016 - protein, 59 aa, Glycine max
  Clone ID: PAT_MRT3847_47926C.1.pep
LVESMEGVDQRNSSAFGVPVPRPPNQKSRMPPSHPSINVSPSATPYSQYPQRLRSPGFF

SEQ ID NO: 228017 - protein, 48 aa, Glycine max
  Clone ID: PAT_MRT3847_47927C.1.pep
NWQFLNRSSTRVTELLNKKSNTYRHLPQGELVGLHPLQWGKEPLGRGG

SEQ ID NO: 228018 - protein, 70 aa, Glycine max
  unsure (1)..(70): unsure at all Xaa locations
  Clone ID: PAT_MRT3847_47928C.1.pep
LYQFIFYIPILITFYYYSFIILYLFFFKLFIFLSISYNILHILIYFIYYIIHFFTYXYLQLFYLFLIFIL

SEQ ID NO: 228019 - protein, 219 aa, Glycine max
  Clone ID: PAT_MRT3847_47929C.1.pep
VPEMDSVQQKHVIYYLLLFFSWVACCVVFGAELHRADIKQTDVQTTSSETITTVTDYSLSLYYEHYKISSGTQTQTRRSTTGTRVTETQLSGSSVNFRQCTSISLCNKCYSGGAGAIAMSVFAFLGLTLAAFLRAMAQTGKHSQIPRLGSSDSTYAMVERGTNYTLAGFYVLSIVAWAGGCMAATAQETGVSVVIPTGLIYVGLCLLSAFGAIYVLHRP

SEQ ID NO: 228020 - protein, 46 aa, Glycine max
  Clone ID: PAT_MRT3847_4792C.1.pep
VAVPNNRQAKYSLLQLMNLAMATDIFAYGITMVGKSLPCACYKLRE

SEQ ID NO: 228021 - protein, 44 aa, Glycine max
  unsure (1)..(44): unsure at all Xaa locations
  Clone ID: PAT_MRT3847_47930C.1.pep
YLAYHIVLKTYKEXPLDVLGINTNSKEQPEELPRRFARHVINRY

SEQ ID NO: 228022 - protein, 251 aa, Glycine max
  Clone ID: PAT_MRT3847_47931C.1.pep
AKYCRERMHLALAEEIESVKEGLLVENTKNDCRDLWKNTFTNCFLKVDAEVGGEVNREPVAPETVGSTSVVAIICSSHIIVSNCGDSRAVLCRGKEPMALSVDHKPNRDDEYARIEAAGGKVIQWNGHRVFGVLAMSRSIGDRYLKPWIIPDPEVTFLPRAKDDECLILASDGLWDVMTNEEVCDIARRRILLWHKKNGLALPSERGEGIDPAAQAAAEYLSNRALQKGSKDNITVIVVDLKAQRKFKSKT

SEQ ID NO: 228023 - protein, 199 aa, Glycine max
  Clone ID: PAT_MRT3847_47932C.1.pep
NLRNYTIPRITNHSFNDKGAKKALKSKLQTKSENIKNRKQQQIITNWASDNQQKDKILISNQIQPNDGPIKKKLKKRSKIAIKARKLWRENRNTRPWRERENRLEILKVTQAPKRLIRWKSSCLEVSPSPPVVIACCRRNPQIGETLQLFINNHNEDLILQRKQRINVSNSNRIHLCLSLPSTTSISCRQSLQICSDAW

SEQ ID NO: 228024 - protein, 71 aa, Glycine max
  Clone ID: PAT_MRT3847_47933C.1.pep
AYGLKLASLDPFYHGFHVTCIISYPMNLAVARGEKPTYPSSKPKITDWDKLEAQVKKEVCQLYIYKMFLFF

SEQ ID NO: 228025 - protein, 55 aa, Glycine max
  Clone ID: PAT_MRT3847_47934C.1.pep
MRIMIKGGVWKNTEDEILKAAVMKYGKNQWARISSLLVPKSARHCKARWYEWLDP

SEQ ID NO: 228026 - protein, 52 aa, Glycine max
  Clone ID: PAT_MRT3847_47935C.1.pep
KIIGNSKECNLFGGYKFSLIQNQQPIFYRLILKNKVIFSKQANPITHYINQK

SEQ ID NO: 228027 - protein, 48 aa, Glycine max
  Clone ID: PAT_MRT3847_47936C.1.pep
MRIMIKGGVWKNTEDEILKAAVMKYGKNQWARISSLLVRKSAKQCKAR

SEQ ID NO: 228028 - protein, 133 aa, Glycine max
  Clone ID: PAT_MRT3847_47937C.1.pep
RWSKIQPLNLGFFSGPKKGGGALRQKNFQRVPKKGPRGKFFRAKKTFCRKVVLRGIFYLRGKNRLGGGPDHFFLKISHFCFSKKIQNMGASLSFKKKNNKKRSCKLYNIPQNQSTELVCKNSIFKQEAAADRL

SEQ ID NO: 228029 - protein, 68 aa, Glycine max
  Clone ID: PAT_MRT3847_47938C.1.pep
MKSNLTKRLKKEVIYHMVNHISTIRIQPICFHLRPRQNKLKYIYIGKETRIIKKIGMFCKNNPLDQKL

SEQ ID NO: 228030 - protein, 54 aa, Glycine max
  Clone ID: PAT_MRT3847_47939C.1.pep
THHMVDKNSNEKIEIKPRSKDYQTKTLPQNKANIMVVALMFDPHDLDLNLMSYV

SEQ ID NO: 228031 - protein, 54 aa, Glycine max
  Clone ID: PAT_MRT3847_4793C.1.pep
ISMSTHSASAFTFPPLSWSDNQDANLSSGIIYPCCPWTLLHDEHLYHAPMMQHV

SEQ ID NO: 228032 - protein, 77 aa, Glycine max
  unsure (1)..(77): unsure at all Xaa locations
  Clone ID: PAT_MRT3847_47940C.1.pep
GXRGSDSXLKXYXRXXQMMKDLESEMMXKGGVXRIEXSRXFEXGLGSSXIWXQPQPCKXHHTNLTTRNSKIHDEFGD

SEQ ID NO: 228033 - protein, 143 aa, Glycine max
  unsure (1)..(143): unsure at all Xaa locations
  Clone ID: PAT_MRT3847_47941C.1.pep
RIHLSVVGXAALCALAPAPGPNCACVAALFFSSRSAASRASCSSVRLLPRAISFSMSPPFLGASCLSLCSNSWRYATRSWGGIEASSESIESRFSSMVPTPWPEVELPRLASFSGCDLRRLLPMWSFSFALVHDCGVEVLWLC

SEQ ID NO: 228034 - protein, 224 aa, Glycine max
  Clone ID: PAT_MRT3847_47942C.1.pep
MSLTIPSNLSKPAALRPKLSPKLRSAATTTIVCSTTNNNNNNNVSSDLKAFSAALALSSILLSAPLPAGADISGLTPCKESKQFAKREKQSIKKLESSLKLYEAGSAPALAIKASVEKTKRRFDNYAKQGLLCGGDGLPHLIVSGDQRHWGEFITPGILFLYISGWIGWVGRSYLIAIRDEKKPTMKEIIIDVPLASRLLFRGFSWPVAAYRELINGDLIAKDV

SEQ ID NO: 228035 - protein, 27 aa, Glycine max
  Clone ID: PAT_MRT3847_47943C.1.pep
ILPRHIIYKRGSRGRREPEELTHHTNH

SEQ ID NO: 228036 - protein, 69 aa, Glycine max
  Clone ID: PAT_MRT3847_47944C.1.pep
QMPQLHSLSSNVPTSDEPLFDLDIPYDLSEMLSSESIGQFQGLDIGDGVLHNLMPDCPSISVNNINNAF

SEQ ID NO: 228037 - protein, 170 aa, Glycine max
  Clone ID: PAT_MRT3847_47945C.1.pep
ARATLITKNNLKFRRNKMGRNHFQQQQHCADESMWMESQGQQQSYALHEDSWSSDNNYGHNHKQFPGMHMNMNNHNNRLGAFAAVDSDLSMQKHHHGNVGGAMHMNNRHGGKLGGGMFQDHGFGHGCYAQGGRKFPFGGHHHGNNNASHHEYFSACIMKYALSYYSHHAA

SEQ ID NO: 228038 - protein, 187 aa, Glycine max
  Clone ID: PAT_MRT3847_47946C.1.pep
GDRTVVVGNKRLMHACNVPICSEVEKYISENEILATTCIVVSIDGKIAGAFSVTDPVKPEAKRVIFFLHSMGISSMIVTGDNCATATAIANEMGIDEVFAETDPEGKADKVKDLQMTGMTVAMVGDGMNDSPDLLAADVGMATGAGTDIAIAAAVIASVKRRFEDVIIDIDISRTTMSRILLNYILA

SEQ ID NO: 228039 - protein, 108 aa, Glycine max
  Clone ID: PAT_MRT3847_47947C.1.pep
MPRRPCPPISLAQLWTVAPKRARKEIQLGLIELISMTSTLLSQKIIKYTALNEALKNEVDRLKIATGEIVMHTDAYGLGLHPLTYSQAPFFSHQSQHGQRELQAMKMW

SEQ ID NO: 228040 - protein, 54 aa, Glycine max
  unsure (1)..(54): unsure at all Xaa locations
  Clone ID: PAT_MRT3847_47948C.1.pep
KLDHLEKMNVFKMLARIIAPLXVXKXHLSPNXMENLGSYEPHIIHLINREXRFL

SEQ ID NO: 228041 - protein, 68 aa, Glycine max
  Clone ID: PAT_MRT3847_47949C.1.pep
SPCYNCSSSSSREWVKKQEFDELTKEMEEVKNERDKLQARVANTERLLEHNNALIRELIESMNMPCII

SEQ ID NO: 228042 - protein, 69 aa, Glycine max
  Clone ID: PAT_MRT3847_4794C.1.pep
VRFWVHFFVGRSEPDTFQELQQEVLGVIITPDSYPLIGVVNKMEKSVPSNTRLFLPLYLEHPQEASRVS

SEQ ID NO: 228043 - protein, 324 aa, Glycine max
  unsure (1)..(324): unsure at all Xaa locations
  Clone ID: PAT_MRT3847_47950C.1.pep
MFAFALASVVLIIGWLMDLCFLCFNTYMSHLFPDLHSIGGLVPLLGYLKNSHANIRAMAADVVTTIVQNNPRSQQLVMEANGFEPLISNFSSDPDVTVRTKALGAISSLIRHNKPGITAFRLANGYAALKDALASENVRFQRKALNLIHYLLHENNSDCNIVNELGFPRMLMHLASSEDSDVREAALRGLLQLAHNAKDGKDGNEKDSAKIKQLLQERNKXISLMSXEDLGVVREERQLVDSLWRTCFNEPSSLREKGLLVLPGEDVPPPDVASKYFEPPLRSSTANPSSKKDPEKNEIPLLLGSGPSPTYTNNQGSNKGDASS

SEQ ID NO: 228044 - protein, 372 aa, Glycine max
  Clone ID: PAT_MRT3847_47951C.1.pep
MAKEGPNWDGLLKWSIAHSDGTRPTRNLSEEDRRWFMEAMQSQTIDVVKRMKEITLVMQTPEQVLKDQGVTPADIEDMLDELQEHVESIDMANDLHSIGGLVPLLGYLKSSHANIRAKAADVVTKLVQSNPRSRQLVMDGQYATNSTTSLLRHTEELGVVSEEGQLVDSLLRTCFKEPSSIREIGLERLSGLDRVPVQRLLTKILNLVKELGFPRLLMHLASSEDSDVREAALRGLLQLASNTQDGKDGNEEDSEKMKQLLQERINNISLMSAEDLGVVREERQLVDSLWSTCFNEPSSLREKGLLVLPGEDAPPPDVASKFFEPPLRSSTANPSSKKDSNNEKKEIPLLLGSGPSLADTNNQGSNRENANS

SEQ ID NO: 228045 - protein, 74 aa, Glycine max
  Clone ID: PAT_MRT3847_47952C.1.pep
LAPLYFAPPLLKIKGKFSWPELVGVQGTVAEATIERENPSVNAIIVPLGSVVTTDLSSDRGWVRVLIMDVPLIS

SEQ ID NO: 228046 - protein, 191 aa, Glycine max
  unsure (1)..(191): unsure at all Xaa locations
  Clone ID: PAT_MRT3847_47953C.1.pep
MDEEYDVIVLGTGLKECILSGLLSVDGLKVLHMDRNDYYGGASTSLNLTQLWKRFRGDDTPAENLGSSREYNVDMIPKFMMANGALVRVLIHTNVTKYLNFKAVDGSFVYNKGKIYKVPATDVEALKSPLMGLFEKRRARKFFIYVQDYETNDPKSHEGLDLNQVTARQLISXYGLEDDTXDFIGHALALH

SEQ ID NO: 228047 - protein, 72 aa, Glycine max
  Clone ID: PAT_MRT3847_47954C.1.pep
KGGKVFYKMSEGANVVPLGGRAVFPIRPSWGPLFLIGPVFSPKIKRGRAFSSPLLVMWPTKIFLPFLNTHRA

SEQ ID NO: 228048 - protein, 53 aa, Glycine max
  Clone ID: PAT_MRT3847_47955C.1.pep
TWVLRNAAHSRRGTGTAMRAIKRADRKVCPYDRAENPHLQDQSKLMHGHQSPT

SEQ ID NO: 228049 - protein, 80 aa, Glycine max
  unsure (1)..(80): unsure at all Xaa locations
  Clone ID: PAT_MRT3847_47956C.1.pep
WWKLTFPQCTSRSVKENGLVCYRXXXGWVAREWLILMEYGQMAGCFQCGRYLCWEISSWEVSEDDFCPTLRCTVSFFIAF

SEQ ID NO: 228050 - protein, 70 aa, Glycine max
  unsure (1)..(70): unsure at all Xaa locations
  Clone ID: PAT_MRT3847_47957C.1.pep
YGGSLIIVCVRRHVGLLTQMDILITINLMVRTTGPPTCSSDLTSAXDHGVDNKKQDAHAAAXNGSDDFYD

SEQ ID NO: 228051 - protein, 79 aa, Glycine max
  Clone ID: PAT_MRT3847_47958C.1.pep
YYDETVTQDALQGKKIAVIGYGSQGHAQNLKDNGYDVVIGLRPGRSFNKAKEDGFDVYTVSEATQQADVVMVLLPDEIQ

SEQ ID NO: 228052 - protein, 107 aa, Glycine max
  Clone ID: PAT_MRT3847_47959C.1.pep
GKAPKTTKEKKKPFKGVFKPPKAQKKPPVRKLGKGETFSPPEPLKPIYGGLAQGKPPQNGGGKTPKFPPPFLGNPQRKKRAPIKKTKFKKGKKNWEKGNPRNLEGKN

SEQ ID NO: 228053 - protein, 229 aa, Glycine max
  unsure (1)..(229): unsure at all Xaa locations
  Clone ID: PAT_MRT3847_4795C.1.pep
DHRISDGNHNVERASPERAQDLDSSSPPVXRPVREILGESVVPLRISEPPKTNSGQAANGSALTQRTASSSSLASSNGTPAEVKLETIKSLIDFDDDPEPPVASAAPQAQQTTVAQHGMPANSNDNNWASFDVAPEAKAPQGPSNVNPLESMLTQLSVPVSLPSHVSGAQGLVMGSALTATAAGTPIISSFSTFPASGASVTSFGLTPASTHNNAGQWATLQYQQQQPL

SEQ ID NO: 228054 - protein, 174 aa, Glycine max
  unsure (1)..(174): unsure at all Xaa locations
  Clone ID: PAT_MRT3847_47960C.1.pep
EFRCSVICFTILFSLALARXNHVHTSLPKENDWEAGWPNTRIPTTLQELLKPLPTSVKIDELPKQIDNAQYPKTFFCKEDLGPSKTIKVQFTKRPYTQPYSIYTXLTDMKNTCEERYSFEKMCIKREXCEGEERVCAESLXTXIXCTMAKLKKNIQXRSXGWXDKREQCTREEI

SEQ ID NO: 228055 - protein, 53 aa, Glycine max
  Clone ID: PAT_MRT3847_47961C.1.pep
SGRAFLLFRQLDKMARAVNLFSWVKPGFFPSPRCEVRAGPLDRPPPYLRGMPS

SEQ ID NO: 228056 - protein, 66 aa, Glycine max
  Clone ID: PAT_MRT3847_47962C.1.pep
SNKRNMHLIIYGNLIYAHELLKVLYFTMNYSYSHERRSCIARTYHHSLILTDLTYNSQHEPYLHDA

SEQ ID NO: 228057 - protein, 151 aa, Glycine max
  Clone ID: PAT_MRT3847_47963C.1.pep
LCSRDNFEPSAFVWLKLQPYRQQTVVCRSSQKLSKYFFGPFKILQRIGYVAYELCIPPDSRIHPVVHVSMLRAYGGTQPPFTTMFLSAMISLNSGNPRDSPLPFSSPNSPKVKMRSFQVHNLLHLTISLQFQSKRVGTICTIESCSDHFHH

SEQ ID NO: 228058 - protein, 112 aa, Glycine max
  Clone ID: PAT_MRT3847_47964C.1.pep
EATLKRGGFPPWGPFFSGVPLFSLPRPFFSNPPWGGFFLGRGPELLGSLGPHGVVCLGAPKGKAGPFSFLIPWVPLGGAFPSFPNLGRGWPPLYVIRGAVLPFSNRGLSFVC

SEQ ID NO: 228059 - protein, 56 aa, Glycine max
  Clone ID: PAT_MRT3847_47965C.1.pep
IRLNESHKAQTLKKMKSEIVSSKVSGVAHCQAASPYPTKPCHLWCCESVKARNQPS

SEQ ID NO: 228060 - protein, 124 aa, Glycine max
  Clone ID: PAT_MRT3847_47966C.1.pep
ILLEDMATANGGTGTEEHKRKSNDLFLKQGGHQIMPRSPRLCTPIRKEWPEESLPNDNVIGLNSYVTSLAGSGPPSSSFCSTIDSEHIVEELPVRNYENQNINLVNHPHNSRQAKNQLTIESKY

SEQ ID NO: 228061 - protein, 212 aa, Glycine max
  unsure (1)..(212): unsure at all Xaa locations
  Clone ID: PAT_MRT3847_47967C.1.pep
MVKKSKKSKSKRVSLKKKYKVIRKVREHNRKKTKEAKKLRLSGKKKVEKDPGIPNDWPFKEQELKALEARRAKAIEELEQKKAERKERARKRKLGLLEDEDNSKLSDMDILKESNDFATVGKTRDSSDRAFYKDLVKVIEASDVLLEVLDARXPLGTRCVDIEKMVMKSGPXKRLVLLLNKIXXLVPKEAXXKWLKYLRERIPTVAFQVQHT

SEQ ID NO: 228062 - protein, 119 aa, Glycine max
  unsure (1)..(119): unsure at all Xaa locations
  Clone ID: PAT_MRT3847_47968C.1.pep
WKSLPESRFQEVARLYXVCWFNITGQIKTRVLSPNTQYAAFLVFQMIDASGFHXILRCYQFRGLQRPNVRKDKWLEIEMGEFFNSGLEEDEIYMNVRETSDMWKHGFILEGIEVRPKHV

SEQ ID NO: 228063 - protein, 38 aa, Glycine max
  Clone ID: PAT_MRT3847_47969C.1.pep
IKFRLHYKRVMRLHERVGKIGSFREEEFFFFFYCFFFV

SEQ ID NO: 228064 - protein, 205 aa, Glycine max
  Clone ID: PAT_MRT3847_4796C.1.pep
MGVGGTLEYLSDLMGSGHHHHKKKKKQFQTVELKVRMDCDGCELKVKNALSSLSGVKSVEINRKQQKVTVTGYVEPNKVLKKAKSTGKKAEIWPYVPYNLAPAHTGIITRYEDPYITMFSDDNPNACSIITVNFQILMQCFFFVLLYFQVLVAFLECCLLFWFLHKKMRRDVAVIIVFLFFCFSVPDCTLYLPPCRLAVGSFGGP

SEQ ID NO: 228065 - protein, 267 aa, Glycine max
  Clone ID: PAT_MRT3847_47970C.1.pep
MKSQDLPEGCVAHILSYICTPEDIVRLSLVSKAFYSAADYDTVWDRFIPSDFSSTISPLSSSNSKKDLYFTLSDRPTIIDQGRKSFQLEKRTAKKCYMLSARDISITWAPTQGEASQYWEWKSLPESIRFQEVARLYAVCWFNITGQIKTRVLSPNTQYAAFLVFQMIDASGFHHHPAMLSVSNVGGSRTSKYVCLDPNLEDNDLDDRFRGLQRPNVRKDKWLEIEMGEFFNSGLEEDEIYMNVRETSDMWKHGFILEGIEVRPKHV

SEQ ID NO: 228066 - protein, 171 aa, Glycine max
  Clone ID: PAT_MRT3847_47971C.1.pep
MKSQDLPEGCVAHILSYICTPEDIVRLSLVSKAFYSAADYDTVWDRFIPSDFSSTISPLSSSNSKKDLYFTLSDRPTIIDQGRKVRTLFLLACSDVFYGIPEMKCVVYVASLKFLQSFQLEKRTAKKCYMLSARDISITWGENFIQSLNTFTYSHTIFILYKKVNVVLRSF

SEQ ID NO: 228067 - protein, 82 aa, Glycine max
  Clone ID: PAT_MRT3847_47973C.1.pep
QTSRTSKYVSLDPNLEDNDLDDRFRGLQRPNVRKDKWLEIEMGEFFNSGLEEDEIYMNVRETSDMWKHGFILEGIEVRPKHV

SEQ ID NO: 228068 - protein, 88 aa, Glycine max
  Clone ID: PAT_MRT3847_47974C.1.pep
GPPPPITGLCVGLNKGHAATQKELPPRPSHSEGKTRKRGRSVRNLIREVAGFAPYEKRVTELLKVGKDMRGLKVAKRKLSTHKRAHKK

SEQ ID NO: 228069 - protein, 87 aa, Glycine max
  unsure (1)..(87): unsure at all Xaa locations
  Clone ID: PAT_MRT3847_47975C.1.pep
NRNPTSLFFINPHKSTTYSIRYKANFKTRSAQQTKYQTKIHMINXHYNIYYTPKYQSIIHSNNINILPQIISTFTDFNLQHSTSSTQ

SEQ ID NO: 228070 - protein, 310 aa, Glycine max
  Clone ID: PAT_MRT3847_47976C.1.pep
MAHAKTDSDVTSMDTSSSPKRAVYYVQSPSRDSHDGDKSSTATHATPACNSPVDSPSHHSYVHHSRASSSSRVSAGSYNNIASYWGRKGTRKNKLGSWTHECKVIEEEEGYYGEREGFSRKTQIFVGILAFAFIFTLFCFIIAGAARPYNVRISVKSFTVHNFLFGEGSDMTGVPTKMLTVNCSARMTVHNPATFFGIHVSSKAVNLMYSEMTVATGELKKHYLSRKSTRTVSVNLQGSKVSLYGADASLTGLVDNGKIPMTLVFEVGSLGNIVGRLVRSKHRRRVSCSVAIDSHNIEPIKLKENACTYN

SEQ ID NO: 228071 - protein, 96 aa, Glycine max
  unsure (1)..(96): unsure at all Xaa locations
  Clone ID: PAT_MRT3847_47977C.1.pep
GXSLNGFDVXGVEXARRCXRXRXRPCRPXRXXXXXRYPAXPGXREPGXPGTSXYPXXLPIXDXVGDFXPPXXSXXXXXXXGRFCSSXIPSXLXXXD

SEQ ID NO: 228072 - protein, 141 aa, Glycine max
  unsure (1)..(141): unsure at all Xaa locations
  Clone ID: PAT_MRT3847_47978C.1.pep
PEMSDYKVRKEPGLSWVEIGKQVHEFGSGGQYHPXRAMLSRLEIVIGQLKEMGYVPELSLALYDTEVEHKEDQLLHHSKKMALVFAIMNEGIKIMKNIRICVDCHNFMKLASYLFQKEIAARDSNCFHHFKYAACSCNDYW

SEQ ID NO: 228073 - protein, 115 aa, Glycine max
  Clone ID: PAT_MRT3847_47979C.1.pep
MSSVSFLLALFMVVALSIFPSIVGAIGEHRLRWVPETTTPCQSSIEECMAEGEFGMDSESHRRILATSQYISYKALQRNTVPCSRRGASYYNCKPGADANPYTRGCPTITRCRNS

SEQ ID NO: 228074 - protein, 153 aa, Glycine max
  Clone ID: PAT_MRT3847_4797C.1.pep
MGVGGTLEYLSDLMGSGHHHHKKKKKQFQTVELKVRMDCDGCELKVKNALSSLSGVKSVEINRKQQKVTVTGYVEPNKVLKKAKSTGKKAEIWPYVPYNLVVHPYAVPSYDKKAPPGYVRRVEAPAHTGTITRYEDPYITMFSDDNPNACSIM

SEQ ID NO: 228075 - protein, 86 aa, Glycine max
  Clone ID: PAT_MRT3847_47980C.1.pep
SLNYSLIKFLVPYHGDNMTKTFCNQKAESKLPIAQLCTPLTMNQTKHNPLVKTYNKTPETNCNLPLTHTSLLIACFLVENPCCPTV

SEQ ID NO: 228076 - protein, 115 aa, Glycine max
  Clone ID: PAT_MRT3847_47981C.1.pep
MSSVTFLLALIMVVALSMFPSIVGAIGEHRLRWVLKTTTPCQGSIEECMADGEFGMDSESHRRILATSQYISYKALQRNTVPCSRRGASYYNCKPGADANPYTRGCPTITRCRNS

SEQ ID NO: 228077 - protein, 80 aa, Glycine max
  Clone ID: PAT_MRT3847_47982C.1.pep
GLYREDYRSWCWGCITLKHSTLLLGTCIVSFSFIPLNVFGFFSPFTNVLLMCGKATRYYLIISKFLWFTFLGMYNAMNVT

SEQ ID NO: 228078 - protein, 58 aa, Glycine max
  unsure (1)..(58): unsure at all Xaa locations
  Clone ID: PAT_MRT3847_47983C.1.pep
NXKDVKHRFYFWKTIFIQKYGSGLFTRGWGIRMRPDKRITHSHRYITFLHLHGKIQVL

SEQ ID NO: 228079 - protein, 73 aa, Glycine max
  Clone ID: PAT_MRT3847_47984C.1.pep
LLRLQLWSTLVLCNDYCHQRCLILYLWLTSHTYCIEMRIAPFTGESPPLHNVNIKSIYERSSINVTHLSRLPV

SEQ ID NO: 228080 - protein, 47 aa, Glycine max
  Clone ID: PAT_MRT3847_47985C.1.pep
FISPNLFKSYGNLYLHQASSKHTDVNNYTLFKDLTLTLVHWKSIPCY

SEQ ID NO: 228081 - protein, 74 aa, Glycine max
  Clone ID: PAT_MRT3847_47986C.1.pep
YMSQLRFTNGCSTGSKLTCPSIRSQLTSTFSPHLSSSTVSSQFHSLDILLLPHHRHHPAHSQFTRRPTNHHFPT

SEQ ID NO: 228082 - protein, 60 aa, Glycine max
  Clone ID: PAT_MRT3847_47987C.1.pep
NAIKDSLKSGMSGFSPDILSTSPLTRDTKNMTCSEYGRHPAKKVVMFVFNAPFCSLLAAV

SEQ ID NO: 228083 - protein, 140 aa, Glycine max
  Clone ID: PAT_MRT3847_47988C.1.pep
PPTPHRRPATPHPHPHGSRSQHRPLTPPPSLPLPPRHPPIGPARPARSPIPPCKTQNITIAASVSVRLNPPPPLPEESTLLTGFASTVTPPPPLTPFSPVSGVAMRFQFFSPPSGNFLAAQFSGNFFSLSRSALQGASLG

SEQ ID NO: 228084 - protein, 40 aa, Glycine max
  Clone ID: PAT_MRT3847_47989C.1.pep
FFFFFFFFYFYFFFFFFFFFFFWQNEKGGTLLTQLKSGAR

SEQ ID NO: 228085 - protein, 96 aa, Glycine max
  Clone ID: PAT_MRT3847_4798C.1.pep
PIFKLDKVVRFDSVYIQDVWCSQGGDASTFNFFPSKKLIIPAPSIYVYKKESIIMQKLSSFTISASMTTTYMLHIASILSLTSLIFSLLYLTILIP

SEQ ID NO: 228086 - protein, 116 aa, Glycine max
  unsure (1)..(116): unsure at all Xaa locations
  Clone ID: PAT_MRT3847_47990C.1.pep
LTNXYVWGLXSXFKKRDXTPLKGXXHXLXMFXVYPCYCCXPGMPRTTSHHPXGLSPXKDFXNPXTPFQKKAFXPKPFLFFKNVXEKLLXSQGGFGRTPXKKTVGXFXVFALFAXNF

SEQ ID NO: 228087 - protein, 71 aa, Glycine max
  Clone ID: PAT_MRT3847_47991C.1.pep
LSRSNCPRSCHAVVWDRKQQAAGSPPKSVVRFKNQHPQLQLHPYKGVRPHGHSNSVKYTVTLRSQMHTHIA

SEQ ID NO: 228088 - protein, 47 aa, Glycine max
  Clone ID: PAT_MRT3847_47992C.1.pep
LLADVHRDTPDSTDTSDDLATAVTSPLPRCPSLGLYCQSLQDSGELE

SEQ ID NO: 228089 - protein, 47 aa, Glycine max
  unsure (1)..(47): unsure at all Xaa locations
  Clone ID: PAT_MRT3847_47993C.1.pep
YRXXXLXLXGTXPXXIXXXKSXXXXRPLGDLDSSRISEALRXXXCRX

SEQ ID NO: 228090 - protein, 33 aa, Glycine max
  Clone ID: PAT_MRT3847_47994C.1.pep
PNPRTCVAPHPQLQPIHTLKVNAASTSESQNTS

SEQ ID NO: 228091 - protein, 116 aa, Glycine max
  Clone ID: PAT_MRT3847_47995C.1.pep
MASKPPPSPSPSSSRSEPLVDLSSNKVEDSSPAGKDVLLVIDSLKKQVAAERVVSVKKRIEENRQKLVGVTNHVCTMSMERRNFSITDTNRSLDLLTKRQKDAIDMHNGVHASNGD

SEQ ID NO: 228092 - protein, 60 aa, Glycine max
  Clone ID: PAT_MRT3847_47996C.1.pep
LYPNHLAHIIDLDHLKIPIDDDPELVRVEPLVGLRILFITQFLSQDAVLQQELLHSELVV

SEQ ID NO: 228093 - protein, 59 aa, Glycine max
  Clone ID: PAT_MRT3847_47997C.1.pep
TETQLCLFISSGSRKEKVYFSLRYLKIMTQGECEPLLSKGQIDLKGGTPVIACLKRRTH

SEQ ID NO: 228094 - protein, 128 aa, Glycine max
  unsure (1)..(128): unsure at all Xaa locations
  Clone ID: PAT_MRT3847_47998C.1.pep
LEGSYTALEAWXSAVTEDPLKIVSSWIRPNVCAYKGVFCAANPHDETVAHAGIDLNHADLKGTLGKELSLLSDMSLLHLNSNRFTGPDPEHSETLXFLEELDLINNHLXGTTPSAILYMPCLIYLDLR

SEQ ID NO: 228095 - protein, 65 aa, Glycine max
  Clone ID: PAT_MRT3847_47999C.1.pep
CGQGNNADQLRPTLVPSLLGTRVEKIAAGLWHTLCVSVNGQIYAFGGNQFGQLGTGSDQPEVSDA

SEQ ID NO: 228096 - protein, 286 aa, Glycine max
  unsure (1)..(286): unsure at all Xaa locations
  Clone ID: PAT_MRT3847_4799C.1.pep
MEMVVAVPPPPPSSSMDFNFDSNCSSPYITAPSSPQRFGNFFFSAPTSPTRRHSSASTPNTTEDEFEFDFSGQLQRPSLSAEELFLGGKIRPLKPLSPSSNKRREKRVIEESSSLLSSPPPQRKLGRERASSFSISSATPLKGRRGSGIQVVSCDDTSSQGEKSNSSKTSESVSNSSFLSSISFGKGYRKWRLKDFLLFRSAXSEGRASDKDPFRKYAVLSKTTAHEDVRNVSSGSVSRRRGPVSAHELHYTVNRAASVELKKKTLLPYKQGFLGCLAFNPAMHGS

SEQ ID NO: 228097 - protein, 158 aa, Glycine max
  Clone ID: PAT_MRT3847_479C.1.pep
VLIPLLTSFAVCQLEEFVSIDCGGTSNYTDTSTGLAWISDSRIMQHGISVEVESPNRSMVQYQKRRDFPIESKKYCYTLSTEERRRYLVRATFQYGSLDSGDTYPQFQLYLDATKWATVSIYDASRIYVKEMIIRAPSNSIDVCMCCATTGSPFISTL

SEQ ID NO: 228098 - protein, 98 aa, Glycine max
  unsure (1)..(98): unsure at all Xaa locations
  Clone ID: PAT_MRT3847_47C.1.pep
MLPAVMAAGLAWSRPRYLTGLAQILPCGPVQMTEVATSNVVHEVLGRRAEDVHQXIIDYIINVLADEDFDFGLDGEGAFEALGELLVDSGCVTDFLEC

SEQ ID NO: 228099 - protein, 197 aa, Glycine max
  Clone ID: PAT_MRT3847_48000C.1.pep
GIPWERLNYSRDKYRETRLKQYKNYQNFSRSRHDLRKECFEVQKGETFYDFFFNTRLVKSTIVHFQLRNLLWATSKHDVYFMQNYSVMHWSALLRRGKEVLNVAKPIIPTLKRPGFLAQPVSRVQISTMTVKENLMVAGGFQGELICKNLKQPGVLFCGKITTDDNAITHAVDVYSNPAGSLRVITANNDFQGRVFD

SEQ ID NO: 228100 - protein, 430 aa, Glycine max
  Clone ID: PAT_MRT3847_48001C.1.pep
MEHQKSGSKLTRNHSSLLRSSVHNLSSIITQHEHEQQLLLDVHDDDDKNKKPKKPHVQAQAQAHHAQALAHRSSAYSALAVFFLGACSLLFYFFYLEVSSSENFLLALIFVAVALYFVSKNKGLIHRSFSLAKHSWEENVKRLGFSKAAAVARPVQWFIGDPAAATTTRKKAAAKIVREGVEFYSNGDFYEGEFHKGRSNGSGVYHYFVNGRYEGDWVDGRYDGYGIESWARGSRYRGQYRQGLRHGYGVYRFYTGDSYSGEWCNGQSHGVGLQTCSDASCYIGQFKYGVKHGLGCYHFRNGDRYAGEYFGDKIHGFGVYHFTNGHYYEGAWHEGRRQGIGSYTFRNGDRRCGEWDAGTLKQSLPPLSDVVLRAVQAARKTAENAINLKRVDDQVNKAVIAASKAATAARVAAVKAVQNRMDGKFCDTDV

SEQ ID NO: 228101 - protein, 449 aa, Glycine max
  unsure (1)..(449): unsure at all Xaa locations
  Clone ID: PAT_MRT3847_48002C.1.pep
MEHFNNDDLEYVVDEYYDVPDFAVEDTSSDIVPELTSDVDSDFEDEFPTSNAKTDTTASEARNGKDIQGIPWERLNYSRDKYRETRLKQYKNYQNFSRSRHXLRKECLEVQNGETFYDFFFNTNLGNFTIVHFQLQRLESVXWQLSWHDEYFLGHYLLMNWAALLRRGKEVLNVAKPIIPTLKRPGFLAQPVSRVQISTMTVKENLMVAGGFQGELIXNLKHPGVLFCGKITTDDNAITNAVDVYSNPAGSLRVITANNDFQVRVFDAENFASLGCFKYDWSVNNTSVSPDGKLLAVLGDSTECLIADANTGKITGSLKGHLDYSFSSAWHPDGQILATGNQDKTCRLWDIRNLSQSMAVLKGRMGAIRALRFTSDGRFLAMAEPADFVHIFDSHSGYEQGQEIDLFGEIAGISFSPDTEALFVGIADRTYGSLLEFNRKRHYNYLDSF

SEQ ID NO: 228102 - protein, 135 aa, Glycine max
  Clone ID: PAT_MRT3847_48003C.1.pep
LLCCRNGDRYAGEYFGDKIHGFGVYHFTNGHYYEGAWHEGRRQGIGSYTFRNGDRRCGEWDAGTLKQSLPPLSDVVLRAVQAARKTAENAINLKRVDDQVNKAVIAASKAATAARVAAVKAVQNRMDGKFCDTDV

SEQ ID NO: 228103 - protein, 106 aa, Glycine max
  Clone ID: PAT_MRT3847_48004C.1.pep
FKMQRKQVLFLSRQDQNVHLLGVPKIAPYGTGWEWDRRNRTLLVGLEPLIGTNMATCWGVLFCSQVAFVKKQSSRHPGVSAGCMFNNGWGDGKSHFSSQFVFFSNR

SEQ ID NO: 228104 - protein, 770 aa, Glycine max
  Clone ID: PAT_MRT3847_48005C.1.pep
MASVSTFCFVLFFFFFLTQCWFLTSAKKTYIVHMKHHEKPSVYPTHTDWYSASLQQSLTLTTADSDSDSNPLLYSYTTAYNGFAASLNDEQAEQLLRSEDVLGVYEDTVYQLHTTRTPEFLGLEKETGLWEGHTAQDLNQASNDVIIGVLDTGVWPESPSFDDAGMPEIPARWRGECETGPDFSPKMCNRKLIGARSFSKGFHMASGIGVREKEPASARDRDGHGTHTSSTAAGSHVTNASLLGYASGTARGMAPTARVAAYKVCWTDGCFASDILAGMGLGIEDGVDVLSLSLGGGSAPYFRDTIAIGAFAAMAKGIFVACSAGNVGRLREDDSRGAPWIMTVGAGTLDRDFPAYASLGNKKRFSGVSLYSGKGMGNEPVGLVYDKGLNQSGSICLPGSLEPGLVRGKVVVCDRGINARVEKGKVVRDAGGVGMILANTAASGEELVADSHLLPAVAVGRIVGDQIRAYASSDPNPTVHLDFRGTVLNVKPSPVVAAFSSRGPNMVTRQILKPDVIGPGVNILAGWSEAIGPSGLSDDTRKTQFNIMSGTSMSCPHISGLAALLKAAHPQWSSSAIKSALMTTADVHDNTKSQLRDAAGGAFSNPWAHGAGHVNPHKALSPGLVYDATPSDYIKFLCSLEYTPERIQLITKRSGVNCTKRFSDPGQLNYPSFSVLFGGKRVVRYTRVLTNVGEAGSVYNVTVDAPSTVTVTVKPAALVFGKVGERQRYTATFVSKNGVGDSVRYGFGSIMWSNAQHQVRSPVAFSWTLL

SEQ ID NO: 228105 - protein, 76 aa, Glycine max
  Clone ID: PAT_MRT3847_48006C.1.pep
MEFDEHEDQEEEEEEEMGFSVAAASYDSLGNAAVRSKMSGGEGVAVTGNSGRKGTLRYRECQKNHAVSIGGQARRR

SEQ ID NO: 228106 - protein, 55 aa, Glycine max
  Clone ID: PAT_MRT3847_48007C.1.pep
TAFPSSTIHSLLLVGILPWGIPAYSSFASFTPIFLTIFAYSLSRNLLSISCIHYH

SEQ ID NO: 228107 - protein, 87 aa, Glycine max
  Clone ID: PAT_MRT3847_48008C.1.pep
KKRGVFKIMPHPLDFTEKPPKLSFQNTSKPKGGLTPPAFGNIALKNGLPPVKSPLLISWLPPPNFNFNWTICKFRRFFLLQKKKLPF

SEQ ID NO: 228108 - protein, 129 aa, Glycine max
  Clone ID: PAT_MRT3847_48009C.1.pep
EKAQFSCPPSFPVGAKSLIHTMLDPNPERRITIEQIRNDEWFQKEYVPVSLIEYEDVNLDDVNAAFDNDEDQRTNQQCENDDMGPLTLNAFDMIILSQGLNLATLFDRGQDSMKYETRFISQKPPKVIL

SEQ ID NO: 228109 - protein, 96 aa, Glycine max
  Clone ID: PAT_MRT3847_4800C.1.pep
PKREKPEQRRPLHGQSAVTFSTAVSLSQKSPRKIRQDKEYNSQKVTPFFYPKQYKNQSEKNRSKKALKRNKRGEDKAEKERGTDDYQRRTKKGQYI

SEQ ID NO: 228110 - protein, 159 aa, Glycine max
  unsure (1)..(159): unsure at all Xaa locations
  Clone ID: PAT_MRT3847_48010C.1.pep
IDNNEPYMKIPCNDSKITSAVWGPLGECIIAGHESGELNQYSAKSGEVLVNVKEHSRQINDIQLSRDMTMFVTAYKDNTAKLFDSTTLEHQKTFRTERPVNXSALSPNYDHVVLGGGQEAMDVTTTCTRIGKFEAMFFHLAFEEEFGRVKGHFGPINSV

SEQ ID NO: 228111 - protein, 88 aa, Glycine max
  unsure (1)..(88): unsure at all Xaa locations
  Clone ID: PAT_MRT3847_48011C.1.pep
HKLSYQPDAVLPELLTEIMEDMPCERCVYAGEDKFNEINGVYNEXVDWSNQGVTILXSAPVKTITEAVDQTGETAPFLAPRVPQEFLI

SEQ ID NO: 228112 - protein, 54 aa, Glycine max
  unsure (1)..(54): unsure at all Xaa locations
  Clone ID: PAT_MRT3847_48012C.1.pep
SXERGTFLRSFRNCMCLRSSFSTADGVYHSPLLTDHSHSPVRYHCQCSSSFSYC

SEQ ID NO: 228113 - protein, 286 aa, Glycine max
  Clone ID: PAT_MRT3847_48013C.1.pep
SSRSSRFGSSGSQVSTKFKTPLIASSTPLRVRDLKDKVEASQKEPLIGPSSMTSRTRDLKEKREITHRTTRTSESSQRSVESNAAKYLKGQSLNRSWNGSADTSVSVKSPTNEEEDSSLKNKGKSISLAIQAKVNVQRREGLSLTGGRSLTGQKEHPDVKSNQPMKASVQKNLHKKSSGALRQNNLKQNYSIDKDKLPSKPLVTNSNSRKVLTGDSSYGRHRSSSNKSNAKPKVGSRKSAMEVTDSEKEVLYTSTNSFPRKKRSTDKDWNDRVVDNLFIEKMQKPA

SEQ ID NO: 228114 - protein, 104 aa, Glycine max
  Clone ID: PAT_MRT3847_48014C.1.pep
VEIAHQYLLQLKYHLALQSCGLLHTTLIFAVARGCISAEKETFCHHIISISTRELTPNLVPPPFTSQVKLVQKNFRTILLARCLYLSAFSTHSEESAVLYSITY

SEQ ID NO: 228115 - protein, 120 aa, Glycine max
  Clone ID: PAT_MRT3847_48015C.1.pep
KKNPPGGHFPNPPPPGGGGFFYLHGAPPGFPARKTGVVAHPPYVGVGPPFGPPGFSLYVSGPYFVGICEGVHLFPRKHLFPCFCPALIRPPIGKTGTPPGSGPEFPGGPPGAPPGPKFRK

SEQ ID NO: 228116 - protein, 58 aa, Glycine max
  Clone ID: PAT_MRT3847_48016C.1.pep
LRLSPVPGTVEFFRGYKGAPVCEENNGSYPVAVIKVGWRPAPQTVFSYMYRTRRQTIF

SEQ ID NO: 228117 - protein, 70 aa, Glycine max
  Clone ID: PAT_MRT3847_48017C.1.pep
PSAHLQRFLVKWLQQIEEHHVRFSWYVKQCCCFEESSYLCYKRLHFLSKHVVDVMHNASREGYSTTWLAT

SEQ ID NO: 228118 - protein, 117 aa, Glycine max
  Clone ID: PAT_MRT3847_48018C.1.pep
FETMGKPPSGFVSFLSYSCNTTFESEFPLSTSFMVTIIFFHQHKQNFKIQINILIFSETFLTDYLRVCKTHFNFAEPQVDQAAFVQAKLLTPHDQQHPFVCSYLKPHWRIQLLQRLR

SEQ ID NO: 228119 - protein, 36 aa, Glycine max
  Clone ID: PAT_MRT3847_48019C.1.pep
YQQSMAFDTSNASQDLCSRRWTQELLPRTTCVHSSL

SEQ ID NO: 228120 - protein, 47 aa, Glycine max
  Clone ID: PAT_MRT3847_4801C.1.pep
YASWEKVMNSFEELLRHVQTSYKHYHLTLCISILHFVMSFTGRCYIL

SEQ ID NO: 228121 - protein, 67 aa, Glycine max
  Clone ID: PAT_MRT3847_48020C.1.pep
MREFQNLVIVDDPSLSMAEPEYCGSISDDVLIIKPLTSAAVTCSFDLCLFMQPPAWIIFPSILVSID

SEQ ID NO: 228122 - protein, 51 aa, Glycine max
  Clone ID: PAT_MRT3847_48021C.1.pep
RLSNYQFTPKRTRLSCTSGNNPYNFVDNWNCREHIRGIGTAYRCQLGTRVR

SEQ ID NO: 228123 - protein, 196 aa, Glycine max
  Clone ID: PAT_MRT3847_48022C.1.pep
MGHLSMLVVNFVVYLEHIEPEEGPINEIGPKIEIDALPLNCSAKKVVKAIPTDSTENGIEDMDVDDAKGVDKGGSDAKIEVVGVETVPDVQDVETEVAGSASQVEQPSTNLGITPTPNVESALAQIPTTTQSVPTPSVETIFILPSMLTAFRLAPVRPPTPIRIIFPDKASYNKNQPNYTSFILIPRLPSHRDSKK

SEQ ID NO: 228124 - protein, 62 aa, Glycine max
  unsure (1)..(62): unsure at all Xaa locations
  Clone ID: PAT_MRT3847_48023C.1.pep
IQKPCSGFALHETFSAIIRRNSPRVASPTGHRGMSVSSSLRXLGLSNEGRCNGHEIGSGRNR

SEQ ID NO: 228125 - protein, 623 aa, Glycine max
  unsure (1)..(623): unsure at all Xaa locations
  Clone ID: PAT_MRT3847_48024C.1.pep
MEKIPEEELVNKLRNVLSEKRYLVVLDDIWGMEVWDGLKSAFPRGKMGSKILLTTRNGDVALHADACSNPHQLRTLTEDESFRLLCNKAFPGANGIPLELVQLKSLAKEIVVKCGGLPLAVVVVGGLLSRKLKSSGEWKRVLQNISWHLLEEQEKIARILALSYNDLPPHLKSCFLYLGLFPEGVNIQTKKLIRLWVAEGFLLQEGEETAEGVAQKYLNELIGXVAGQSTKARRHSMHSCHDRYDSLKHNAGHSRSLLFFNREYNDIVRKLWHPLNFQQEKKLNFIYRKFKLLRVLELDGVRVVSLPSLIGDLIQLRYLGLRKTNLEEELPPSIGNLQNLQTLDLRYCCFLMKIPNVIWKMVNLRHLLLYTPFDSPDSSHLRMDTLTNLQTLPHIEAGNWIGDGGLANMINLRQLGICELSGQMVNSVLSTVQGLHNLHSLSLSLQSEEDEFPIFMQLSQCTHLQKLSLNGKIKKLPDPHEFPPNLLKLTLHNSHLQKESIAKLERLPNLKVLILGKGAYNWPELNFNGEGFPQLHILRLVLLKELEEWTVEENAMPRLENMVIDRCEKLKKIPEGLKAITSLKKLKIIGMPVEFEHKLRTKDLFDFTNTPVIESTTDILAID

SEQ ID NO: 228126 - protein, 107 aa, Glycine max
  Clone ID: PAT_MRT3847_48025C.1.pep
PSAFLDAIMDDVLNSADAITCIPQCLDALCLNSNGLQAVKDTNSLRCFVKVFTSRTYLRALAGDTPASLSSGLDELMRHASSLRGPGVEMLVEILETISKIVASNKC

SEQ ID NO: 228127 - protein, 88 aa, Glycine max
  Clone ID: PAT_MRT3847_48026C.1.pep
KKFVSFGGEDLFNSTKGLGYGVFGEENNWGGLKFQFLLVMPTVHGEKNPFSAIEFLLQSTISFSTEQRKAKALSGLFFGGPAPPFLRV

SEQ ID NO: 228128 - protein, 69 aa, Glycine max
  Clone ID: PAT_MRT3847_48027C.1.pep
FPKNGSHFKGIPSHLSIWTWKFGIWGLTCLIFGWTHLDPEPYKRWPIGSFHPKISINLDQPGAIKNKAL

SEQ ID NO: 228129 - protein, 58 aa, Glycine max
  Clone ID: PAT_MRT3847_48028C.1.pep
STSRQTSHHVSLGAVQKPHLPKHLYYIQLFCYPQTTIQHVMCITNPESRIYMSSQFLP

SEQ ID NO: 228130 - protein, 79 aa, Glycine max
  Clone ID: PAT_MRT3847_48029C.1.pep
MSRSVPLVSTIFVLLLLLVATEMMGPTMVAEARTCESQSHRFKGPCLSDTNCGSVCRTERFTGGHCRGFRRRCFCTKHC

SEQ ID NO: 228131 - protein, 72 aa, Glycine max
  Clone ID: PAT_MRT3847_4802C.1.pep
RSVRRDATAVLHGPCGTHAWLATSPCRLCSHRHCWKEVYTHTTAGEGGSIRDYLVGEEEARIDQPRLYAPGE

SEQ ID NO: 228132 - protein, 38 aa, Glycine max
  unsure (1)..(38): unsure at all Xaa locations
  Clone ID: PAT_MRT3847_48030C.1.pep
LGYLDGKCGIRRRQRELQHWAIXXPGQEERGEGWDAKD

SEQ ID NO: 228133 - protein, 107 aa, Glycine max
  Clone ID: PAT_MRT3847_48031C.1.pep
GCNVRAPEVHPASLFMAEWFAARGGSPGPGLRLCSHAGCGRPETRKHEFRRCSVCGVVNYCSRACQALDWKFRHKAECSPVQRWLEEDGEDVGNDDGDGEVEVMVDS

SEQ ID NO: 228134 - protein, 90 aa, Glycine max
  Clone ID: PAT_MRT3847_48032C.1.pep
RKGKSPTAVKLQTFEICITRDHGQNSKGKTTWGSKAEVPFYFQPTNLFLKLHWVCYLIKGNFGVTFPFPFWFLLNIINCFAWASGRAFIK

SEQ ID NO: 228135 - protein, 46 aa, Glycine max
  Clone ID: PAT_MRT3847_48033C.1.pep
IELFPLEHSLLSNGSDLPLTLNKILFSNHYPAILFCTDCNIGAADD

SEQ ID NO: 228136 - protein, 44 aa, Glycine max
  Clone ID: PAT_MRT3847_48034C.1.pep
TDLWMKATSHLGHFLNLGGSTTFPRKGSLIILGLPSSRTTHVRA

SEQ ID NO: 228137 - protein, 267 aa, Glycine max
  Clone ID: PAT_MRT3847_48035C.1.pep
MPTQPDSPPNNNTLTQMFQNIFSDNSNIMLAAIISLLLVILFVLLLHLYAKWFLAQAQAQANARRRRRRRRTTVTVSDVLGPARFHHFHSFTIEDSSPLSTKGLDSSTIRTIPLFIYEHNNNNNKKVEEEEEELECVICLSAFKNGEVGRCLPKCGHGFHVECIDMWLSSHSNCPICRTSIVASIVENNSSDDHHGGDHDLVEIVTEGGSAAPSFETREGEHGNSNNGNGGARTSVSVVSENSSSEFFGCSLERMLGKGFPISSNVN

SEQ ID NO: 228138 - protein, 51 aa, Glycine max
  unsure (1)..(51): unsure at all Xaa locations
  Clone ID: PAT_MRT3847_48036C.1.pep
CXRXXXXILPXGFFXPXXXXXXXXPNSFQKXXCQCVSFSRRDTDKYTYLLE

SEQ ID NO: 228139 - protein, 32 aa, Glycine max
  Clone ID: PAT_MRT3847_48037C.1.pep
GPLKHTFHTQNLWEPKNRHPLRVRSTLKKQQL

SEQ ID NO: 228140 - protein, 50 aa, Glycine max
  Clone ID: PAT_MRT3847_48038C.1.pep
KDYRAKKSFFIGATPDTRALNSAVRPNHSLAARCHTTANCEVFWARLDAN

SEQ ID NO: 228141 - protein, 91 aa, Glycine max
  Clone ID: PAT_MRT3847_48039C.1.pep
VPRSEKHTKNHFYSTAGCGNCNTGNSDVEPLIAVHNMILSHAKAVELYRKHFQAKQGGIIGIVTHTFMYEPLRDEECDRQAVKRALAFVVA

SEQ ID NO: 228142 - protein, 138 aa, Glycine max
  Clone ID: PAT_MRT3847_4803C.1.pep
MDFNFDSNCSSPYITAPSSPQRFGNFFFSAPTSPTRRHSSASTPNTTQDEFEFDFSGHLQRPSLSAEELFLGGKIRPLKPLSPSSSRRREKRVIQESPPSQQRKLGKERASSFSVSSTTFSLGDKSNSSKTSESISNS

SEQ ID NO: 228143 - protein, 238 aa, Glycine max
  unsure (1)..(238): unsure at all Xaa locations
  Clone ID: PAT_MRT3847_48040C.1.pep
NARMTELKESVGLMEHEYNGVWETVGKIEDRISRQEAVAFSSGVREINFIERECEQLVERFKREIKNKDFKSLPTGSVTRLSKSVIQKDLETVHRKQAEQIILPSILDVEDLWPFFHEDSINFAQRLTRSLKDSREKQRNLEAQIRKKMKKFGKEKHSIIYSPEEEVVKGFPEVELKWMFGNKEVVLPKAVGLHLYHGWKKWREEAKAYLKQNLIKDAEFGRQFVGERQEXILLDRDR

SEQ ID NO: 228144 - protein, 71 aa, Glycine max
  Clone ID: PAT_MRT3847_48041C.1.pep
VLFLSYLLDSQLLRGIGLWTQTVITTSIFFTLLSGECYSRAFQSSLLYYISSFKLGPCCFASASSLYYEPS

SEQ ID NO: 228145 - protein, 99 aa, Glycine max
  Clone ID: PAT_MRT3847_48042C.1.pep
LIIISGRFPLHFIYNQLLLFIMSLVLDITSLVNNLAWGSTSLGLFFFFFSSFTSISHYYIKGLIISLYFSKITFLQYSFFPLRNTILKNYIVVIFTCGI

SEQ ID NO: 228146 - protein, 129 aa, Glycine max
  Clone ID: PAT_MRT3847_48043C.1.pep
FQALSYLKRGNNKIHSVKMSKFVGLFLLVLVSVAVAAEFDHGPVYPPEHDKQGPCGKFSTLRILTHKLRHCEKPARNLRAPVSSQCCNDLLNVSIPCLYAVFSSDAFKKVGVDPKIAITIPHRCHFIKP

SEQ ID NO: 228147 - protein, 48 aa, Glycine max
  Clone ID: PAT_MRT3847_48044C.1.pep
VLMINNVYVKVILDVVELVRFPCNFVALQMVRNPWMSPQGLACIGTCI

SEQ ID NO: 228148 - protein, 84 aa, Glycine max
  Clone ID: PAT_MRT3847_48045C.1.pep
GSRAFCESSPEISTSSETESDMSFSRYTPLMPHRHLFGDIQRERFFHSDHISYSGHGDSFSSSNFVDLDWLSSGNSCEEEPFER

SEQ ID NO: 228149 - protein, 50 aa, Glycine max
  Clone ID: PAT_MRT3847_48046C.1.pep
AGTITIFVDAHNIFTWLYLLKSKSDTLTIFKQFQTMFKTQLNLPIKAGGR

SEQ ID NO: 228150 - protein, 159 aa, Glycine max
  Clone ID: PAT_MRT3847_48047C.1.pep
NTSCNSCLPLLSISPVFLKHLNAKTLVCPTVKAMGSKRPFSNSSKPLSPFVEDTKNVKLKGLEASPGSKKLVVEENDVNSYSIEIQRLRNDPTIVDTMTVHELRKTLKRFKVPAKGRKDDLLSALKSFMDNNMCEQDSHLQEKQGLLISSENASVEVKA

SEQ ID NO: 228151 - protein, 58 aa, Glycine max
  Clone ID: PAT_MRT3847_48048C.1.pep
LLKVDGELSLSISWTGFVLNVELSVKLMRLPSSLDFSFQNASVTAFNASHFNRHEFSF

SEQ ID NO: 228152 - protein, 92 aa, Glycine max
  Clone ID: PAT_MRT3847_48049C.1.pep
KKFQKKRPRGYKKGQWGPLEKTGEKGGAKTPQFFRVGFWTNRGVLGGFNSKGGKNVLLALKGRGPKNTPGGLFHIFGTRVRGALWGTGYVLI

SEQ ID NO: 228153 - protein, 51 aa, Glycine max
  Clone ID: PAT_MRT3847_4804C.1.pep
LAQNCFFIASDRMVSVQLQTISTDFQRLSKTHDKIFIALTVLYAEAQTFFQ

SEQ ID NO: 228154 - protein, 71 aa, Glycine max
  Clone ID: PAT_MRT3847_48050C.1.pep
LIHRLYLSRDQDGKKILLMKNILQNEFCNTQSKCSYKGSHLCPQQTEKQRLIFSLPSPTIQGIRLYLLPHC

SEQ ID NO: 228155 - protein, 145 aa, Glycine max
  unsure (1)..(145): unsure at all Xaa locations
  Clone ID: PAT_MRT3847_48051C.1.pep
GDKMEXLAERAESLLLSLSRRFPALPQTALDMSKIQCNKDVGKSILESYSRILESLSSNIVARIDDVLYVDELTKHSNPISSFPKVGVIAHKSISVPHSLPGQSIPPHKSSFGTPSFSPAQCVSLKGSKIINHQQRQPSPKRGRS

SEQ ID NO: 228156 - protein, 36 aa, Glycine max
  Clone ID: PAT_MRT3847_48052C.1.pep
HMEAGTTICYGPSSYILLGSNLLETWTLEIHFICSS

SEQ ID NO: 228157 - protein, 86 aa, Glycine max
  unsure (1)..(86): unsure at all Xaa locations
  Clone ID: PAT_MRT3847_48053C.1.pep
KQRVCVTGGFWFISSNQEQLLSSWTRSATLAWSYGWDFFSTSPFVLVATYLGQPVRYELKLSQLLLLCMPNSNHFPSKKKKKKXPX

SEQ ID NO: 228158 - protein, 58 aa, Glycine max
  unsure (1)..(58): unsure at all Xaa locations
  Clone ID: PAT_MRT3847_48054C.1.pep
TASTRPXXXPRXLNXNKXSRXXXCGETXXXLTIPHDKPXXNLREXEREVAADGTIVGF

SEQ ID NO: 228159 - protein, 54 aa, Glycine max
  unsure (1)..(54): unsure at all Xaa locations
  Clone ID: PAT_MRT3847_48055C.1.pep
FIEKVQIDLPARLIHTEVGVXXRGRVQEANVMVVLHICITMYHVPTXMHAPPLP

SEQ ID NO: 228160 - protein, 297 aa, Glycine max
  Clone ID: PAT_MRT3847_48056C.1.pep
MGRTPVRFERVAAAFDADVARVRLCNSSENEQHSPEDSADLSDLVKSFMERGGEGEDAVGVRSDDGVENFDSEKREILEGIFDDDDGDAKEKIRREVQLAWGLVAEKDNSSPQFKQQLMSLLRYRGFDAGLCKCKWEKNTRFPAGDYEYIDVNFAGNRYIVEISLVTEFEIARSTDQYAALLDVFPLIFVGKMEELKQVVRLMCTAIKGSMKSMNMYIPPWRRIGYMQAKWFSSYKRITDEVATNRASSAFFTTRSIGFDARPVKSYNCRDDYGTKPAFRVCHLTTAFYVDSPGMQL

SEQ ID NO: 228161 - protein, 53 aa, Glycine max
  Clone ID: PAT_MRT3847_48057C.1.pep
IPGDPRVRHACAQTVSDPRILQKRGPCSIALMIIPNMTRIYTLITSIAEHMPY

SEQ ID NO: 228162 - protein, 107 aa, Glycine max
  unsure (1)..(107): unsure at all Xaa locations
  Clone ID: PAT_MRT3847_48058C.1.pep
FGDSGVVIYGMIPLTHSWYGTRSHPSGLTAGFHNRVIRDGXGPVAQIFARNSCTIRVPAMDLSDAEQAEDDDSSPELLLAGIMGGVRKHEVQVSGRNASESGVPGGV

SEQ ID NO: 228163 - protein, 63 aa, Glycine max
  Clone ID: PAT_MRT3847_48059C.1.pep
SRFGGNCGCRSACICGNGCLGCKMYPDLNYTDSTTTETLFMGVAPVKAQFETAEMGVSTKNHG

SEQ ID NO: 228164 - protein, 129 aa, Glycine max
  unsure (1)..(129): unsure at all Xaa locations
  Clone ID: PAT_MRT3847_4805C.1.pep
CSVDICSFDVCSSESFIRGXKKPNINVQSAGHTVPVFVNGQFSGXRVAVRHVVSFVSNCASLYFYLPVSIQYLCLIIMLLAIDLCFLLSLEDXDRHYETWEAGITGPVLLHGLDQGQNDLTRNKCSYKV

SEQ ID NO: 228165 - protein, 355 aa, Glycine max
  Clone ID: PAT_MRT3847_48060C.1.pep
MEVTPLSSPSPIHGLHLRHKEARFLAVASTLYFDGIPFILQLRTHRGTTTYKHPILRTSHNAPQCSLRAISKKHENVAWLSVSPKLHVQNKFPRDVVVRSELTAAGSAGDGYFLPELKVESKVRGVCFYVVTAFCAIFLFMMMLVGHPSVLLFDRYRRKFHHFIAKVWATLTVAPFYKIKFEGLENLPPPDTPAVYVSNHQSFLDIYTLLTLGRSFKFISKTGIFLFPIIGWAMFLLGIIPLKRMDSRSQLDCLKRCMDLIKKGASVFFFPEGTRSKDGRLGTFKKGAFSVAAKTNAPVVPITLIGTGQIMPAGKEGIVNIGSVKVVIHKPIVGKDPDMLCKEARKTIASVLTQS

SEQ ID NO: 228166 - protein, 318 aa, Glycine max
  Clone ID: PAT_MRT3847_48061C.1.pep
MSKQPIDPFRHINIVLNPNGTLNRLRHIPSTAPSSDPTLPVLTKDITINQQNNTWLRLFLPRIALSPNPKKLPLIVFFHGSGFIVTSAASTMFHDFCAAMSAAVPAVVASVEYRLAPEHRLPAAYDDAAEALEFIRDSSEEEEWLTKHADMSNCYLMGSSAGATIAYFAGLRATDTASDLSPLKIRGLILRQVFFGGTQRSKSEVRLENDEVLPLCVTDLLWELALPVGVDRDHEYCNPRAEKWVGKMGKMRELGWRVLVSGNGGDPVIDREKDLVLLLEEKGVVVVSDFDEEGCHGVEFGDESKANQLIQVVKRFVS

SEQ ID NO: 228167 - protein, 50 aa, Glycine max
  Clone ID: PAT_MRT3847_48062C.1.pep
RVMDLEWTGGAFGVFSPISGLVLHRVPVLKLHFKLYLVNVGDIEKGEIIT

SEQ ID NO: 228168 - protein, 235 aa, Glycine max
  Clone ID: PAT_MRT3847_48063C.1.pep
ERRLLNWEAIADLEPDELLPTVSWDCSSGISNLKLENAKSGTPKRRGRGTFSYEKKELYSDQLLDRSVVDVEREETPRSSEDNTDVQISKYGTGHVLVLADFSPSTRTTELEKLFENFQDRGFVIRWVNDTVALAVFRTPAVALEALNSVRCSFTTRILDEDDTLLSSIKARDLEPPRLRPKTSAQAAQRLIAHGMGLKLSSTGVGSREYRKQEDARRERIVTRQKLRDEAWGDH

SEQ ID NO: 228169 - protein, 84 aa, Glycine max
  Clone ID: PAT_MRT3847_48064C.1.pep
GKKTVFLKKNLLFFGYHPSLNGKHKPGGSQKYKGGTLTKHKVFLKKLVKIFIFYPNRGFFFKACPPLPGYFPFKKNNLTAPPGF

SEQ ID NO: 228170 - protein, 58 aa, Glycine max
  Clone ID: PAT_MRT3847_48065C.1.pep
NTLLEKDTYWTMVDYVNVSHCFQVTSTRRKPLCHKGWGIYMYVRREDDIQENTKAFSC

SEQ ID NO: 228171 - protein, 180 aa, Glycine max
  unsure (1)..(180): unsure at all Xaa locations
  Clone ID: PAT_MRT3847_48066C.1.pep
MKKIHNANDEGLTSRSPFGPSLDVARGDVSGNPVVKIAHKFDNGFSSISMCSQPQSMLPPVPNQNIQFPVFRTSSAMGYYHQNPVSLPAAPXNGLMPFPHTNPYLYAGPFGXLNEDPRFCLQYGGLQQPTPLFNPVAFPVYQPIARAKGLNTEESTLMSKTSMLPEHLRSFSRKGFSNRS

SEQ ID NO: 228172 - protein, 191 aa, Glycine max
  Clone ID: PAT_MRT3847_48067C.1.pep
SIRQRKVGENNKQLPKRQPHPLKVNLKHSQRQVQNKDQHPQHPPRLFPMRVNVTFVSAPTHLLNNAHVTASPGSKISPDVITRSNNVDNSPISPHYVINRGRKFSAIEKVVERRQRRMIKNRESAASSRARKQAYTFELEAEVAKLKELNRELQRKQEEIMEMQKNKDLDPACRPRVSKIHCLRRTLTGPW

SEQ ID NO: 228173 - protein, 106 aa, Glycine max
  Clone ID: PAT_MRT3847_48068C.1.pep
TPSYLMRELPFGSDGVFTPEAFVERTNYDLANDLGNLVNRTISMINKYFHGELPAYQGPKHELDEKMEAMALETVKSFNDNMESLQFSVALSTVWNDELLYHLLRS

SEQ ID NO: 228174 - protein, 52 aa, Glycine max
  Clone ID: PAT_MRT3847_48069C.1.pep
ADEIPLAFYFICRMCIWYPPPPSLVTISGYWACLLQFLFFIKSLLFVFNNHF

SEQ ID NO: 228175 - protein, 93 aa, Glycine max
  Clone ID: PAT_MRT3847_4806C.1.pep
NKKSNVNTSDLSLKFTIFTLQNSHEGKSAVVQGCNTMWYAKVQLCKIVRKVEFLYKVVHTSMCKNSTFGVTVDRWRIDHLPCNASKLTLMMAC

SEQ ID NO: 228176 - protein, 195 aa, Glycine max
  unsure (1)..(195): unsure at all Xaa locations
  Clone ID: PAT_MRT3847_48070C.1.pep
PTRPICINPIHWKIQKGLLRPLFLPXIPCTDVAGEIVEIGPQVKDFKVGDKVLAKLNHQYGGGLAEFVVASESLTAARPSEVSAAEAAALPIAGLTASDALTQIAGVKLDGTGQLKNILVTAASGGVGHYTVQLAKLGNTHVTATCGARNIDFVKGXDEVLDYRTPEGAALKSPSGRKYDAVINXTTGISWSTFD

SEQ ID NO: 228177 - protein, 328 aa, Glycine max
  Clone ID: PAT_MRT3847_48071C.1.pep
MNLMQAVRYDAYGGGPAGLKHVEVAVPSPKANEVLIKLEAVSINPIDWKIQKGLLRPLFLPRTFPHIPCTDVAGEIVEIGTQVKDFKVGDQVLAKLTHQYGGGFAEFAVASESLTAARPSEVSAAEAAALPIAGLTARDALTQIAGVKLDGTGQLKNILVTAASGGVGHYAVQLAKLGNTHVTATCGARNIDFVKGLGADEVLDYRTPEGAALKSPSGRKYDAVINCTTGISWSTFDPNLTEKAVVVDLTPNASSLWTAAMKKITFSKKQLVPFFVNVQREGLEYLLQLVKDGKLKSVIDSKFPLSKAEDAWAKSIDGHATGKIIVEP

SEQ ID NO: 228178 - protein, 89 aa, Glycine max
  Clone ID: PAT_MRT3847_48072C.1.pep
ALTVYARLEPQARGVPVCRTIHIAPQVSILSNKKISIGVSILRHPQAIVAIRTTTAAVRSYSLPQIQIYHSPAPASSRTRGRTSGKTRG

SEQ ID NO: 228179 - protein, 99 aa, Glycine max
  unsure (1)..(99): unsure at all Xaa locations
  Clone ID: PAT_MRT3847_48073C.1.pep
MPEILTPSGYDFPALALSPVTPFKQQPSXSPVPSTGSSSEEDRARAEKGFFKHPSPMTPPRDSEPQIVPLVPVTSRRVSAESPFLGHWRIECGAAVWMK

SEQ ID NO: 228180 - protein, 50 aa, Glycine max
  Clone ID: PAT_MRT3847_48074C.1.pep
PAHAVHSNIEHLFNIKSVDLKIHFGIFPLNIYVRCYQQTTKYQLIKNTHQ

SEQ ID NO: 228181 - protein, 65 aa, Glycine max
  Clone ID: PAT_MRT3847_48075C.1.pep
PTMQPPFTFNATCLFFIVPYLGWLAKTLRQTEIKISASTLVRGNGESLNGANESPLVELTLLALH

SEQ ID NO: 228182 - protein, 49 aa, Glycine max
  Clone ID: PAT_MRT3847_48076C.1.pep
LHIHGIMTLYNLTPVKSLFVSTHHPPPKNKGNPLEDEKLVLKQTFSRRT

SEQ ID NO: 228183 - protein, 143 aa, Glycine max
  unsure (1)..(143): unsure at all Xaa locations
  Clone ID: PAT_MRT3847_48077C.1.pep
ALNLALGSLPQFTICNRAGAGGXVXFTVPLFTAGLPTRKTNNDITNIVSNGGRVRCMQVWAPVGKKKHETLSYLPDLDDAQLAKEVEYLPRKGWIPCLESEREHGLVYREHIRLPGYYDGRYWTMWKLLMIGCTDASQVLKEL

SEQ ID NO: 228184 - protein, 102 aa, Glycine max
  unsure (1)..(102): unsure at all Xaa locations
  Clone ID: PAT_MRT3847_48078C.1.pep
WGGAAAXXLLWRPPXFXXAXGCPLSARPLFSRALGRFFYLTAPPSPPKDPDPAARGGDAFAFFVSGDSWSRRAAAELFYGGKINPLIEDDSSESAKSPLLPA

SEQ ID NO: 228185 - protein, 58 aa, Glycine max
  Clone ID: PAT_MRT3847_48079C.1.pep
YPFVVVVVCIGVWGVIRFRPWVVTLFESFQVPVLVGKPPWVGAFRGLLGWGGRKTENF

SEQ ID NO: 228186 - protein, 54 aa, Glycine max
  unsure (1)..(54): unsure at all Xaa locations
  Clone ID: PAT_MRT3847_4807C.1.pep
RVLLKWKTFLLXXRREYXIDLPAXFLFHXTYEELIIHYLYKKVIYTXFFSKAYL

SEQ ID NO: 228187 - protein, 64 aa, Glycine max
  Clone ID: PAT_MRT3847_48080C.1.pep
CANKMRSVDQSVSPYPRAHAHDPYGPQSPLDPVLSGLRVRWAVYKPQWNFIIPRERKGLIFCNH

SEQ ID NO: 228188 - protein, 80 aa, Glycine max
  Clone ID: PAT_MRT3847_48081C.1.pep
IILFIDEIHTVVGAGATSGAMDAGNLLKPMLGRGELRCIGATTLNEYRKYIEKDPALERRFQQVFCSQPSVEDTISILRG

SEQ ID NO: 228189 - protein, 96 aa, Glycine max
  unsure (1)..(96): unsure at all Xaa locations
  Clone ID: PAT_MRT3847_48082C.1.pep
MAMKTAEEHEVGISCFISDLPGFRGILKQRYSDFIVNEVDRDGTVVQLSSLDAPQEEPESFQENGTNTSDNVVSYASQIESFKSLAXDSDAVLLEE

SEQ ID NO: 228190 - protein, 64 aa, Glycine max
  Clone ID: PAT_MRT3847_48083C.1.pep
KREKNGLFPKKNVCKTLKTVKDYKIDQLGKKVKANPHKVRSLLLSNNFETSCVKAFNPRLQELV

SEQ ID NO: 228191 - protein, 134 aa, Glycine max
  Clone ID: PAT_MRT3847_48084C.1.pep
MIVQCLILEFVGNSGNSSSLVKEEAEQEWKSTYDSSITTTFSSGLHEFTMNMEGTWASESLRTSGSHDIVEEGFTNLLLKTNSDDPSLSSEDGGESKNDDGGDGSNNDFYEDNNNYWNSILNLVNSSPSHPPMF

SEQ ID NO: 228192 - protein, 84 aa, Glycine max
  Clone ID: PAT_MRT3847_48085C.1.pep
PFLVCPDRKENCKVRCRVPFSYGRLLTCCKTRALPLNLLKAAGGKVFFHFPPKPDGDLQIGHAKGKFIDFGGHKPPDADCPLGY

SEQ ID NO: 228193 - protein, 66 aa, Glycine max
  Clone ID: PAT_MRT3847_48086C.1.pep
YLKLRIGTQRCGAWHKTFITLPTLFLHITNAISFSHMRPSFLHRNSLKIHAITKNWDPTKIVPHAY

SEQ ID NO: 228194 - protein, 55 aa, Glycine max
  Clone ID: PAT_MRT3847_48087C.1.pep
FSATYALYSHALDNSRCNYLSIQHYNPLSSNLYMKEILLIRNNHPRHVSCNVLCS

SEQ ID NO: 228195 - protein, 50 aa, Glycine max
  Clone ID: PAT_MRT3847_48088C.1.pep
VGNRSGFEIFWSLKFKNKPEFPLGVKGGGFLLNEVNWGVRKIFLKFQCCP

SEQ ID NO: 228196 - protein, 75 aa, Glycine max
  Clone ID: PAT_MRT3847_48089C.1.pep
SFFKSLVSNNFELSSSVVIHDIAVVRCSLEVLVIETSYVSEKIVSRLHDRYGRACYFYIDAPWLPNKIKKELSSS

SEQ ID NO: 228197 - protein, 58 aa, Glycine max
  Clone ID: PAT_MRT3847_4808C.1.pep
GPKDLGPPVFYLRCELGKLGKVGRQVNPGRGGTSAFFFIGFFNPLNLEKERVRVPGDF

SEQ ID NO: 228198 - protein, 53 aa, Glycine max
  Clone ID: PAT_MRT3847_48090C.1.pep
KNVAFQSSAANKLANYLHLRTASPFKCLTIKRQSKQGLHIQQCNTHCNSCISA

SEQ ID NO: 228199 - protein, 399 aa, Glycine max
  Clone ID: PAT_MRT3847_48091C.1.pep
EEAGDLESSRLCKLRCFPPVALAWDDTSGLHVYPNLNSETIVVDSAPAHWSSTQHSVSTVAPAPVVPPSASRSSISISVCAAATGLPLCYGPLFVGFPIAGVCSALSRLAWAPDRALRVPAALAAVASALTLSPRRFPLAILPTFCSLFLSLLMSQPLPPFASFLQHLSKVLRANPVIVTAVTAMVLGSLVHPSFGLLILLFSHFLCCHNALCSFLTASYYVGSERLKFKFDGSFKRTFPSEDNSSSSPDSSKSFGETQLDLFHHRHGLLILHLVATMMFAPSVVAWIQRLALGESLPWLLDSVLCIGVILHGICNSKPEFNSFFLSYTGIPIRNVRLYFIYLIAGYWSYFSGLTLAPYRAFYVMGAVGGISFALRMLCRRNGEKKEVTYSSRKHSHRH

SEQ ID NO: 228200 - protein, 125 aa, Glycine max
  Clone ID: PAT_MRT3847_48092C.1.pep
RTTEGESNSRRTENHIEKDTELKHGNFKAGEDHAENVMDGPGAVLVNLLTSLRHLPPAMHSVLVVMALTWLSWFPFFLFDTDWMGREVYHGDPKGDTSEVDLYDQGVREGAFGLLLNSVVLGISS

SEQ ID NO: 228201 - protein, 72 aa, Glycine max
  Clone ID: PAT_MRT3847_48093C.1.pep
TRQKSTQSISKAFGLEPVGAKKVTCSLQADLKDLAHKCVDATKIAGFALATSALVVSVCSLAFPPIYCHFVH

SEQ ID NO: 228202 - protein, 212 aa, Glycine max
  unsure (1)..(212): unsure at all Xaa locations
  Clone ID: PAT_MRT3847_48094C.1.pep
ILPALVLAQIEPQYIMSRATFVRESSSKMYSSTIFAFTQMLAEMPYSLVCATAFFLLLYYGVGFDKASSRAGYFFVMCLLTEVYAVTLGQAVAALSPSITVAALFNPFLLVMFSVFCGVVAPKATLPYFWRSWMYQLDPFTRLISGVVSTALWNQPVVCRDSEYSVFPAPSGQTCGEYAGAFAEAVGGYLGNPDGTGDXKLCQYRNGQAVYA

SEQ ID NO: 228203 - protein, 94 aa, Glycine max
  Clone ID: PAT_MRT3847_48095C.1.pep
SVAKKEKDRSDRETVTPWFKFLWETYRTVLEILRNNSKLEALYAVIFLLMFLYNFLMLYMIHMYLLNVQNYACSYLILPIFYFFFQFQLLYASL

SEQ ID NO: 228204 - protein, 315 aa, Glycine max
  Clone ID: PAT_MRT3847_48096C.1.pep
MATSSKFDPSSSSPDKPLYPGQRGSHIAASLDRSGSFRESMENPILSSLPNMLRSSSLATNGDVESFFNYVRFDPKLLTLEHKSNRQMDFKRHVNAALGISPDESPSSSSKGKLLPSPVPEDMKRVKDALGANIVKARERVKMFSEALSVFHEVFPAITSKKRSRAEGFSNDRSNVMLSDRPVLGPSIGKVGVQGHPVTGGFELEQQKSDERTKNVVPNKRTRTSMVDVRMDVRTNSLVRPSGTVDRDKEKLRIANNGVVQSEERTLPIGGDGWEKSKMKKKRSCIKLDVSPSTTLTKTCYTFQETKQGMQQRLA

SEQ ID NO: 228205 - protein, 117 aa, Glycine max
  Clone ID: PAT_MRT3847_48097C.1.pep
SKMRSRDHTVSATHGDMDQNTRDIIMREFRSGSSRVLITTDLLARGIDVQQVSLVINYDLPTQPENYLHRIGRSGRFGRKGVAINFVTKDDEKMLFDIQKFYNVVIEELPSNVAELL

SEQ ID NO: 228206 - protein, 72 aa, Glycine max
  Clone ID: PAT_MRT3847_48098C.1.pep
KVSQLKKVLKKLRVLSEHYRIRVLLLIRKLLDRFRTKKLPFSPSVCEAVLGKTAPKRPCVISFSPFKIGVIS

SEQ ID NO: 228207 - protein, 414 aa, Glycine max
  unsure (1)..(414): unsure at all Xaa locations
  Clone ID: PAT_MRT3847_48099C.1.pep
MAGIAPEGSQFDARQYDTKMNELLTSDGQDFFTSYDEVYDSFDAMGLQENLLRGIYAYGFEKPSAIQQRGIVPFCKGLDVIQQAQSGTGKTATFCSGILQQLDYSVTECQAXLVLAPTRELAQQIEKVMRALGDYLGVKVHACVGGTSVREDQRILSSGVHVVVGTPGRVFDMLRRQSLRPDYIKMFVLDEADEMLSRGFKDQIYDIFQLLPSKIQVGVFSATMPPEALEITRKFMNKPVRILVKRDELTLEGIKQFHVNVEKEEWKLDTLCDLYETLAITQSVIFVNTRRKVDWLTDKMRSRDHTVSATHGDMDQNTRDIIMREFRSGSSRVLITTDLLARGIDVQQVSLVINYDLPTQPENYLHRIGRSGRFGRKGVAINFVTRDDEKMLFDIQKFYNVIIEELPSNVAELL

SEQ ID NO: 228208 - protein, 37 aa, Glycine max
  Clone ID: PAT_MRT3847_4809C.1.pep
QSTLWSLLLWWLLPLLRGSSHSCLALCSTPFFVQSFP

SEQ ID NO: 228209 - protein, 32 aa, Glycine max
  Clone ID: PAT_MRT3847_480C.1.pep
KKKNISIFVFFKLQFNSDVTLAIFHNNLYLYQ

SEQ ID NO: 228210 - protein, 59 aa, Glycine max
  Clone ID: PAT_MRT3847_48101C.1.pep
LKDLLNYMCQKDRSIRCQERNVKMLNYRNDLTRIRYYASILFNNLFYQNTIPQFPLRLN

SEQ ID NO: 228211 - protein, 137 aa, Glycine max
  unsure (1)..(137): unsure at all Xaa locations
  Clone ID: PAT_MRT3847_48102C.1.pep
MSTAPAPSSAPANNGTAPPTTTTDTPFAPTSATPSAPTPSTSECSSAETPXYSPAGTPFLPPSENSFFSPSGTSSFSSPGNSFGFPSPGTSTTPSTSSAAAASTSTTAAPNGVRTPRSPNWSLPSSPGGSSPTTPEA

SEQ ID NO: 228212 - protein, 80 aa, Glycine max
  Clone ID: PAT_MRT3847_48103C.1.pep
TRPSKKVVAVGGGYIGMEVAAVAVVWKLDATDCVFPISFSISSFWFKMQSSCSDLHYYLLLTCSSMLTENFHFGSLCIKL

SEQ ID NO: 228213 - protein, 76 aa, Glycine max
  Clone ID: PAT_MRT3847_48104C.1.pep
IDHSMKVPSLSIHFKMSGFSTRTKQESFDSLGSHTQSSMVNIPIFYVMSLSSLRYFYFERLENNEQYKSGIFGELL

SEQ ID NO: 228214 - protein, 71 aa, Glycine max
  Clone ID: PAT_MRT3847_48105C.1.pep
KNMGLIGPFISEQGKILSSGVNRLPLKHHRLIPIVIKQAGILFSSPFFNNENQFEKSESAARIIILRKKKI

SEQ ID NO: 228215 - protein, 37 aa, Glycine max
  Clone ID: PAT_MRT3847_48106C.1.pep
PPGGCFSCLILEFKKTLPSLFRYSVKLNWLIRYHSPK

SEQ ID NO: 228216 - protein, 100 aa, Glycine max
  Clone ID: PAT_MRT3847_48107C.1.pep
DSKATPQVCSTSVPLSSDADTEKVVQKGVRNDNDPTLVVRGFKELGVSEELVEVMEGIGELDTTEIQCAAIPAVMEGKSVLLSSPSEPDRTLAFMLPLIQ

SEQ ID NO: 228217 - protein, 51 aa, Glycine max
  unsure (1)..(51): unsure at all Xaa locations
  Clone ID: PAT_MRT3847_48108C.1.pep
SNCTNGNSYGVIVETENSYIXTDDMDAPTTDHHVKCKAGTNCTCTDCTCGH

SEQ ID NO: 228218 - protein, 95 aa, Glycine max
  Clone ID: PAT_MRT3847_48109C.1.pep
FRNVKYVSKVLYIAIFVIHQSMPIAVLFFRLARAIYSRLYLSFAIGSYYYYYCCDGWPLESRLVVFLVASLSQLLLYSKCQFILKKITTFKLLTN

SEQ ID NO: 228219 - protein, 203 aa, Glycine max
  Clone ID: PAT_MRT3847_4810C.1.pep
MAHPPTQSQSRAANKPKRSNLLRCIAIFILALIILVGIAVIIIWLVLKPKRLEYTVENAAIHNFNLTDANHLYANFDFTIRSYNPNSRVSIYYDTVEVSVRYEDQTLATNAVQPFFQSHKNVTRLHVGLTAQTVALYDSVPKDLRLERSSGDIELDVWMRARIRFKVGVWKSKHRVLKIFCSPVLVHFSKGKSFERAPCDVEL

SEQ ID NO: 228220 - protein, 159 aa, Glycine max
  unsure (1)..(159): unsure at all Xaa locations
  Clone ID: PAT_MRT3847_48110C.1.pep
KKGGEKRGGPPPVYLGPPGQNPLRKFPPKKIPPGGPNHKGPPPGGKKTPPPHPRGKRGLLPRGQNPKLGFPPRTPPIGGGKPPRPWEPPGKIKGPKGARKAPLPGGFPGPQGGGPPPGEGGPPRGGKWERANXKSGAPGAPQIGGGAPKGQENPPPFGP

SEQ ID NO: 228221 - protein, 38 aa, Glycine max
  Clone ID: PAT_MRT3847_48111C.1.pep
SSEIITNLEVVDRNHQHTSTLNCRLVRSSSVWHDFLSL

SEQ ID NO: 228222 - protein, 70 aa, Glycine max
  unsure (1)..(70): unsure at all Xaa locations
  Clone ID: PAT_MRT3847_48112C.1.pep
AVGVFAPVVPRSAMACVLECGDVMSSVVCICIGSVFLQVPSLRVCFWGKLNRRSWLVALCKXXASSRMRA

SEQ ID NO: 228223 - protein, 141 aa, Glycine max
  unsure (1)..(141): unsure at all Xaa locations
  Clone ID: PAT_MRT3847_48113C.1.pep
QTSSRTKPKGVQKGLMAKIITKFXKEGFYLKRVKPRTGDPPFGXKHQGYFFSKPFLKGLGEYLCPGPXVVARTGKGKKVVPPGQKIIEPPTPPQPNPETIRGTLPMTMERKVTHERNPLKRATKKMAWGSPKAPATCQTPH

SEQ ID NO: 228224 - protein, 68 aa, Glycine max
  Clone ID: PAT_MRT3847_48114C.1.pep
LSWRDTRATSLFVVFSFCSAVVLYATPPKVVAMVAGLYYLRHPKFRSKLPSVPSNFFKRLPARTDSML

SEQ ID NO: 228225 - protein, 124 aa, Glycine max
  Clone ID: PAT_MRT3847_48115C.1.pep
NFKIKLKEQNQTPTEPCPNPKLPTLNESDQVQPNLNTRINQRSTPNKNKNLGRRLSIKISKPPCKCKQTKTRAPNKDSRKGSLLLAGSKTGNSKRTAFGVVDHDYRDCDKFSFFIFVMNVCQKW

SEQ ID NO: 228226 - protein, 57 aa, Glycine max
  Clone ID: PAT_MRT3847_48116C.1.pep
NLKFRTWSRGVTRLPYRIWIYRWGPWRKYLCRGENDNPFSIPIKKCAPGLNLKGRVS

SEQ ID NO: 228227 - protein, 73 aa, Glycine max
  Clone ID: PAT_MRT3847_48117C.1.pep
FKGGLPPNFVGKVPSSPPLKEGEGLIWKGFFPPFKKGPGIGPGVPKKCPRFCFPPPLGLIPGSPPPPPKNPFS

SEQ ID NO: 228228 - protein, 97 aa, Glycine max
  Clone ID: PAT_MRT3847_48118C.1.pep
TDTNPASLMNLMTIGMAAKHMTEVQEEHGCVLKEEIHGTAGKNYTCTAVEGFTNDHRIGQVGATVHSYGTDTRDSYEHGVMEHNGHGVVTVRRKRSS

SEQ ID NO: 228229 - protein, 363 aa, Glycine max
  Clone ID: PAT_MRT3847_48119C.1.pep
SQCQFLQLPVHPKINKIVRLTYTNAGNGILALTSNGDHLLWKWPRDNLNLDGKATAQVSPHIWQSRSGLQLMSNKLTSSYSGVPVSCFSLSKNDSYLMSTSGGAISLFNMLTFKTVTTIMTPPPMATCLSFYPRDNNILAIGMDNYSIIIYNVRTNKIISKLEGHSKRVTALAFSSSFDLLVSGDINAQIFVWNTNGWEKQKDGYLQIHGQKVPEILSDTHIQFHPYQRHFLAVRSNYLAMHEATELKCCNQWVPEVSMVISQATFSSDGQAVYASFVDGTVGIFDTLKLQMHCRVNPSAYLSTTPSSSIYPLAIAAHPQKPSQFAVGLTDGRVIVFEPQKPGEDWSKFSLDDNEVINTGLWE

SEQ ID NO: 228230 - protein, 93 aa, Glycine max
  Clone ID: PAT_MRT3847_4811C.1.pep
IKLYGWAKIHSYMLSHIYIILLCQYIHAGSGVKNLIRFHSLILYTPHGSNLRTKNTESGYICIYMCVHTKQKSAYLCMLAASCKMLCYKLDSL

SEQ ID NO: 228231 - protein, 104 aa, Glycine max
  Clone ID: PAT_MRT3847_48120C.1.pep
SHRSIFSYSLTHPPSLLQLLNKYTSFLIFLFHFSSVVLLLFFFFLSLRFFYFTNVLFSEYANMDSFPHPNSTCLLFQIFYIVQLVNHYHKHSLISISFSLVLIH

SEQ ID NO: 228232 - protein, 66 aa, Glycine max
  Clone ID: PAT_MRT3847_48121C.1.pep
HVITFLTQNLHVMTCVCAPYVKVQQYPIVVLNALSTLSSVVSLVPVSYIKSMLLAAKVWKLQTTDK

SEQ ID NO: 228233 - protein, 389 aa, Glycine max
  unsure (1)..(389): unsure at all Xaa locations
  Clone ID: PAT_MRT3847_48122C.1.pep
MGYIGTHGVAALHRYKYSGVDHSYVAKYVLQPFWSRFVNFFPLWMPPNMITLMGFMFLLVSALIGYIYSPQLDTAPARWVHLVHGLNLVIXQTCDAVDLKQARXNKLXSPLGELFDHGCYALTXQFXALLLGSTSMCGRTSIWLSQISGHQIYIVWKVNNLVQTLKRHDMSGPSEGIMMIXICHFFTAIVGAEWWVQQFGKSLPLLNWLPYLGGIPTFKAILCLMIAFGVTPTVTCNVSNVYKVVKAKNGSMPLALAMLYPFVVLVGGVLVWDYLSPSDIMGKYPHLVVIGTGLTFGYLVGRMILAHLCDEPKGLKTGMCMSLMFLPLAIANVLASRLNDGVPLVDERLVLLGYCAFSVTLYLHFATSVIHEITNALGIYCFRITRKEA

SEQ ID NO: 228234 - protein, 63 aa, Glycine max
  unsure (1)..(63): unsure at all Xaa locations
  Clone ID: PAT_MRT3847_48123C.1.pep
PSQPFKGAPLIFXLDMTIQTVFLIKTLTVLGAEVCWFSCYIFSTYYYFHVFIFRFCSVFFNLW

SEQ ID NO: 228235 - protein, 131 aa, Glycine max
  Clone ID: PAT_MRT3847_48124C.1.pep
MQMQMQQTQQQLQATAAPFSTSTPPPPPPSSGGSACEAPPKQVAQAMDKLGQAERIIADIRIGADRLLEALFVAAAQPHQGNKPLQVFLKEDACMRQYLQDLLSLGKELEESGVLSESVRSRKDFWGWHMP

SEQ ID NO: 228236 - protein, 111 aa, Glycine max
  Clone ID: PAT_MRT3847_48125C.1.pep
VHARGFSVHHVFRHITEYAATALQYFLGNQSETCLYFLLHWICSYQTLFSKPCSKCSRLLAMDKQSTLLLPPVHRPYWQFSFSKILLNISSKDQNSDTTQAYHIDCLSEET

SEQ ID NO: 228237 - protein, 109 aa, Glycine max
  Clone ID: PAT_MRT3847_48126C.1.pep
PFSALSLPSLTLTSPAIPTTTMPTTFHLPSPTTPSATVTPSSVSPALEPFAPPLLSFAFFWFFFFSDSRAQSQQLRKIANVVPMVIVVVESKVQSTTCAALVNVFAWTV

SEQ ID NO: 228238 - protein, 40 aa, Glycine max
  Clone ID: PAT_MRT3847_48127C.1.pep
PWLEIREYPPKECELRFEYCERYRLNKLHVYQWPLNDGLS

SEQ ID NO: 228239 - protein, 60 aa, Glycine max
  unsure (1)..(60): unsure at all Xaa locations
  Clone ID: PAT_MRT3847_48128C.1.pep
GHPIQAEALKDGSSDLLLPATDGYPDDGIAGDGSXLLPPTWRTAWRTGNIPVPRPHVPSY

SEQ ID NO: 228240 - protein, 59 aa, Glycine max
  Clone ID: PAT_MRT3847_48129C.1.pep
GYDERSWFQRNPEATHRSKEGPIPADLLLRPRWLQIGKGKNLDYGLPKDLDWKGLNSIW

SEQ ID NO: 228241 - protein, 80 aa, Glycine max
  Clone ID: PAT_MRT3847_4812C.1.pep
KKRAPPPPGSTKTKIPEYLTRGTPTPSPRPTTLAATPPAKPPGKPKKRPPPKNLTPDNPQPHPGKKPAPPPKGKNPKKFP

SEQ ID NO: 228242 - protein, 65 aa, Glycine max
  Clone ID: PAT_MRT3847_48130C.1.pep
GSGLPPGLSNNLFGCFFFAPSGVIWGCLLCHTLPSFFLVFENVFFKKTLNFSACFFFPPKKNLFL

SEQ ID NO: 228243 - protein, 30 aa, Glycine max
  Clone ID: PAT_MRT3847_48131C.1.pep
EQMVSELESYISCLQMQVNALQFLCHTRVS

SEQ ID NO: 228244 - protein, 43 aa, Glycine max
  Clone ID: PAT_MRT3847_48132C.1.pep
IIPTQNLTPHNLSNIVMQYNNPEQNVIYYQYPSTQPNEIKPLT

SEQ ID NO: 228245 - protein, 69 aa, Glycine max
  Clone ID: PAT_MRT3847_48133C.1.pep
NRSNIDHMIPSCHSLFFFILQKQLDSVSIYWVTCRVYHNPPSFKRYNVGWIVKKDEMVASLFLQVTISL

SEQ ID NO: 228246 - protein, 360 aa, Glycine max
  Clone ID: PAT_MRT3847_48134C.1.pep
MGCFGFCKGDDSVTVADRGPFMQSTPTGNPSYHGRHTAVTAPRTINFQPIAVPSITVDELKSLTDNFGSKYFIGEGAYGKVYQATLKNGHAVVIKKLDSSNQPEQEFLSQVSIVSRLKHENVVELVNYCVDGPFRALAYEYAPKGSLHDILHGRKGVKGAQPGPVLSWAQRVKIAVGAARGLEYLHEKAEIHIIHRYIKSSNILLFDDDVAKIADFDLSNQAPDAAARLHSTRVLGTFGYHAPEYAMTGQLTSKSDVYSFGVILLELLTGRKPVDHTLPRGQQSLVTWATPKLSEDKVKQCVDVRLKGEYPSKSVAKMAAVAALCVQYEAEFRPNMSIIVKALQPLLNTRSVHSKEAPKM

SEQ ID NO: 228247 - protein, 53 aa, Glycine max
  Clone ID: PAT_MRT3847_48135C.1.pep
CKPSGGTIPLCMVGEYDLPVDIIDRGVTNMKMISPEHGPVDIWRTLQSDQYIG

SEQ ID NO: 228248 - protein, 149 aa, Glycine max
  Clone ID: PAT_MRT3847_48136C.1.pep
MSLFSDENHFSGLRIDSSKLGADPGMPVEVSSEAEETTKVGNNRRPTYRCKKCRRLVALQEHVIDHVPGEGERAFEFHKRRGGNPFNKSDEFECSSIFIEPLRWMKAGKKTFNYNIIMSLIFQRTVNLCFTFCAECSYNFVQEIKNGLL

SEQ ID NO: 228249 - protein, 58 aa, Glycine max
  Clone ID: PAT_MRT3847_48137C.1.pep
SCSPCNGCSKCRSFLNYSKHRSTTFSCMRKYTLIHRTTKDEARFTTTNNHTVEPPSMV

SEQ ID NO: 228250 - protein, 138 aa, Glycine max
  Clone ID: PAT_MRT3847_48138C.1.pep
SCNCKGCGNTRSGEFINEMKGFLEECEGELEVVKEEQTRIMELVKKTNEYYLAGASKDNMVNPFQLFVIVKSFVDMVDQACIELKKKVEKKNIVGGEAVSTTPPLSPSKRTPLRFPNFDLYFLSNVSESTSSSQSEDD

SEQ ID NO: 228251 - protein, 78 aa, Glycine max
  unsure (1)..(78): unsure at all Xaa locations
  Clone ID: PAT_MRT3847_48139C.1.pep
MGKVKISINGFGRIGRLVATVALQRDDVELVAGYDPFIITDYMTYMFKYDSVHGHWXHHDVTVNDQKTLLLRDKAITG

SEQ ID NO: 228252 - protein, 247 aa, Glycine max
  Clone ID: PAT_MRT3847_4813C.1.pep
MALLIHSLEMSVTPQITPNPNLKLRKFNSFKPHTKGKAIGSTRGVRIFCKVKDCAVLDENVNSYGQFSVPVKQGSKQSKEEEEEKQNYYVNVGYAIRTLREEFPDLFYKELSFDIYRDDIVFKDPMNTFIGIENYKSIFWALRFHGMMFFKALWVEISSVWQPVENVIMVRWTVHGIPRVLWESRGRFDGTSEYKLDKQGKIFEHRVDNIAMNSPPRFKVLGVEELIRSIGCPSIARPTYFEISSPP

SEQ ID NO: 228253 - protein, 204 aa, Glycine max
  Clone ID: PAT_MRT3847_48140C.1.pep
MKTINSLFGLLFLLLIAFTMKPAVASGVHDTDDRMLENGGDYFILPSFDEEGGGVTLASIGVTHPLAVVQSSSKNHLGLPASIKTKETMIIFTDEMVSIKFTNVPDYNNASTWTLVMDEFVKVWYVGIGNVADYPSHRIKTGKFQIKEDNFDYKLVFCADANTTSCEDVGVYVDGEQNRRLVLSEVGGVAVKFMNADKSRVAFD

SEQ ID NO: 228254 - protein, 86 aa, Glycine max
  Clone ID: PAT_MRT3847_48141C.1.pep
SNNVLLRKGSLRRLSALRSDLLGVLSTAEFSLAIVVHRLSAALELTDTAIGLSILRLSLVSVLGGCVVAHFVCLLGVCWGFVVWGI

SEQ ID NO: 228255 - protein, 55 aa, Glycine max
  Clone ID: PAT_MRT3847_48142C.1.pep
VSAITLNGVLIHTAQLCPNDEHLHEIHTGSNVRMHLVSRRETGTPMTAMHQARTT

SEQ ID NO: 228256 - protein, 76 aa, Glycine max
  unsure (1)..(76): unsure at all Xaa locations
  Clone ID: PAT_MRT3847_48143C.1.pep
GXXXDSXRXXRTSXPEXQPIGXAAQSQDDGKDYQXPAXAPLVXPTEFTSWSFYRAGIAEFVATFLFLYIXVLTXMG

SEQ ID NO: 228257 - protein, 45 aa, Glycine max
  Clone ID: PAT_MRT3847_48144C.1.pep
MMLPDRYIEHGSPQAQVEDAGLSSKHIAASVLYVMEGPKQALLFK

SEQ ID NO: 228258 - protein, 84 aa, Glycine max
  Clone ID: PAT_MRT3847_48145C.1.pep
GGHMGGPQEPPNNLSLGRGVYLCLLERDDLEHGVLLFKQESWKKLLSNSILLKKTIRKHELGTRGCQASETSYINSVSLAEPFG

SEQ ID NO: 228259 - protein, 45 aa, Glycine max
  Clone ID: PAT_MRT3847_48146C.1.pep
PRVRCLPHLQSESFDFLRRVIVMELAVCQTHQRVIAGRKRQVQGF

SEQ ID NO: 228260 - protein, 88 aa, Glycine max
  unsure (1)..(88): unsure at all Xaa locations
  Clone ID: PAT_MRT3847_48147C.1.pep
YFXXXXGXEXSYKVXXXGXSQIYSXTQXSXLXLXSFFXSXTNKQGNXHHHXXGPISPCQNHXHGGSXKVATXXXXLGNFCXNGXSEGX

SEQ ID NO: 228261 - protein, 82 aa, Glycine max
  Clone ID: PAT_MRT3847_48148C.1.pep
KGLLAFSSAVFLCHFFLPYDCWISVSVNLIRKGDLSDHSGKKTGRIMPMPCGYCNACWHLPFSTLYASCLVMIASKPVIRSF

SEQ ID NO: 228262 - protein, 47 aa, Glycine max
  Clone ID: PAT_MRT3847_48149C.1.pep
GNQQKALNLKDHRLLLMVEKPELQRRELLIYNKQGLMRHRTQALKNK

SEQ ID NO: 228263 - protein, 65 aa, Glycine max
  Clone ID: PAT_MRT3847_4814C.1.pep
MISVFPKTLIATRFLSRTRPRIHTPKLTAIRTMSSSTQRMFQLKLDPITGNSEWVVIEDNDDGDE

SEQ ID NO: 228264 - protein, 109 aa, Glycine max
  Clone ID: PAT_MRT3847_48150C.1.pep
MVALGSKTTSEEVKRMMAELDRNGDGYIDLKEFGEFHCGGGDGRELREAFELYDLDKNGLISAKELHSVMRRLGEKCSLSDCRRMIGNVDADGDGNVNFEEFKKMMTRS

SEQ ID NO: 228265 - protein, 139 aa, Glycine max
  Clone ID: PAT_MRT3847_48151C.1.pep
MDEEEVRKIFSKFDKNGDGKISCAELKEMMAALGSKTTSDEVKRMMAELDRNGDGYIDLKEFGEFHCGGGGDGRELREAFELYDLDKNGLISAKELHSVMRRLGEKCSLSDCRRMIGNVDADGDGNVNFEEFKKMMSRS

SEQ ID NO: 228266 - protein, 87 aa, Glycine max
  unsure (1)..(87): unsure at all Xaa locations
  Clone ID: PAT_MRT3847_48152C.1.pep
DXXXXRSXHXTNXXXXXXXEXXPXXXREXXXXXKRXPXXWXGXHGXXDXXXQGXXKSXEXVRXXRRXXGXXXDXRIHXXRATTSAXT

SEQ ID NO: 228267 - protein, 99 aa, Glycine max
  Clone ID: PAT_MRT3847_48153C.1.pep
RQRSGTLVNGVQQDPQRHRSPTYRARLVTTRYLLIRSFAFFLTLLIRSISTVQFILPMLCRLDSSKIDNLSPYGKKTQPLNFVLVAAATAAVAGCCVDG

SEQ ID NO: 228268 - protein, 56 aa, Glycine max
  Clone ID: PAT_MRT3847_48154C.1.pep
NKNLNTDIKINKTTKPLIEMDTQSHVVKTFWLQHSKFNTLSRCFDILKVFGLSISE

SEQ ID NO: 228269 - protein, 124 aa, Glycine max
  Clone ID: PAT_MRT3847_48155C.1.pep
RRLMAKNEMKIIGVVIMTMILFGFSQANYNPSFEKIGLNHVSDGIVCRLRCENKCKKFLIIPPGLIFYLICYHTCYANCHDMPIDAAHDCITSCGLTKPVDFNNDAPGLATDGVNSCLVKCYKK

SEQ ID NO: 228270 - protein, 145 aa, Glycine max
  Clone ID: PAT_MRT3847_48156C.1.pep
SNQNNGSLLSSTSFSSFPPGVSNSFTSQNISSSSSAATSSGISATGNSTSMATISPATIASSNSCFSTPVVASSSSAISFFKFGSSPVQSAGLPVSSSGSEPPETKSRQDAGISGLSSTAFGASSGIFGFSSSAMTTVNSQSQSS

SEQ ID NO: 228271 - protein, 63 aa, Glycine max
  Clone ID: PAT_MRT3847_48157C.1.pep
GATTHGDVLTLTKTNRGFHWISLLIMSCDNFVIDKNVQIMLFLQFVNAKLRNRQTELSYGQLR

SEQ ID NO: 228272 - protein, 109 aa, Glycine max
  Clone ID: PAT_MRT3847_48158C.1.pep
HGVLYCHMVEPRWDISGENKETPHTLAPMKKAFNGTFIVAGGYDRKEGNKAVAEKKANLVAYGRLFLANPDLPKRFEVDAPLNKYNRETFYTPDPVVGYTDYPFLEGSS

SEQ ID NO: 228273 - protein, 121 aa, Glycine max
  Clone ID: PAT_MRT3847_48159C.1.pep
MTREELTAYKEEKKNKAIQAQLAFANKIWADENKNKEEKEKAYEELEDNIKKWAGKNGQRNNIRALLCTVHEVMWPGCDWQPLSLSDLMMPNKIKVNYFKAITKFHPDKNQGAEYRQRYIA

SEQ ID NO: 228274 - protein, 82 aa, Glycine max
  Clone ID: PAT_MRT3847_4815C.1.pep
KGKNFPGGHPPPMGGNKRGFKKAPLPPKKKGGFFWGTQCPGGKGAPLEGKPAPRPPKRGGLGPPPFSFYEGAKKARGGKGPP

SEQ ID NO: 228275 - protein, 51 aa, Glycine max
  Clone ID: PAT_MRT3847_48160C.1.pep
FGPPCVGSCGSIGPFRDMGMFRYVWHRPSWSLSLCSRHIHLVPHKPQRWNL

SEQ ID NO: 228276 - protein, 91 aa, Glycine max
  Clone ID: PAT_MRT3847_48161C.1.pep
ISEACSLCCQNPSSVGCVVRTTLGLPCACELSKYVGGCIPLDSIHMFWRRLSFSDQGLSEPEVGIKDVMETIYQKFEELDVCGKFTLRSKL

SEQ ID NO: 228277 - protein, 110 aa, Glycine max
  Clone ID: PAT_MRT3847_48162C.1.pep
MEGGEEGLEMMVDSKDLQQQSKALDKLTDHVEDRQLDSTRVQEAMASIAASAEADRNAMRIREKELAAVKINAADVDIIANELELDKKVAERTLREHKGDAVAAIRHLLH

SEQ ID NO: 228278 - protein, 145 aa, Glycine max
  Clone ID: PAT_MRT3847_48163C.1.pep
TRHNIISFSMPLSPSSMASIPQFYPNYTFTTHDLSEYPVPLLNGGGNASVMDSTTIWGGGQDSLSIPVLDMNNGALDHIVSLDCDTMACAANWMPSFSEQLGGLSDLAISDCKIGFYGGGFQSFNNSRSYQPHVGEFGDECCGFV

SEQ ID NO: 228279 - protein, 88 aa, Glycine max
  unsure (1)..(88): unsure at all Xaa locations
  Clone ID: PAT_MRT3847_48164C.1.pep
SVYKANLEGKVLAVQKXSKDVTDELKILQXVNHGNLVKLMGVSSDNDGNCFVVYEYAENGSLDEWLFSKSCSDTSNSRASLTWCQRIS

SEQ ID NO: 228280 - protein, 118 aa, Glycine max
  Clone ID: PAT_MRT3847_48165C.1.pep
IISFSMPLLPSSMASIPQFYQNYTLTTHDLSDYPTPLLNGGGGSNDIVNASVMDTTTVWGGGQDSLINIPVLDMNNGALDHIVSLDCDTMACAANWMPSFSEQLGGFSDLAISDCKMG

SEQ ID NO: 228281 - protein, 57 aa, Glycine max
  Clone ID: PAT_MRT3847_48166C.1.pep
WPRTHIFKRPKVERIPFRALFPISELNLANISHLPGGFLIGSLTIPRPYQLDVVFEI

SEQ ID NO: 228282 - protein, 61 aa, Glycine max
  Clone ID: PAT_MRT3847_48167C.1.pep
VEPHCIAAHCPTWSTMNQSQPTRSIALDIKIPLFWPRSLNEVVWCCWWWGGGRGNLGFCSP

SEQ ID NO: 228283 - protein, 74 aa, Glycine max
  Clone ID: PAT_MRT3847_48168C.1.pep
WEIRSCGANAPTSVIVTIELNGTRLWDRPSPVMASFLARWPLSESPEILKPGDIATILNIHTACTDHVRHCPIP

SEQ ID NO: 228284 - protein, 72 aa, Glycine max
  Clone ID: PAT_MRT3847_48169C.1.pep
RRVDLTCELTATWTGVQIMSPVKIIAGELDITYITTRVKEYIHNGGFQRDWPYLLGLVVMERVYHFIAQGRP

SEQ ID NO: 228285 - protein, 126 aa, Glycine max
  unsure (1)..(126): unsure at all Xaa locations
  Clone ID: PAT_MRT3847_4816C.1.pep
MALRVLVMCISRVFTLDLARXSHAIDEHFWHAXGTNNRIPIALADLIRXEPARVDITDYPMQIEQPHXPITLFYKNXLHPGRPIACQLSTPSFDQPWDAGAWAKDIQHTTIDGHTPGELCLTKESI

SEQ ID NO: 228286 - protein, 59 aa, Glycine max
  unsure (1)..(59): unsure at all Xaa locations
  Clone ID: PAT_MRT3847_48170C.1.pep
LHVEXVYFCKTHENIDGKRALLCWESQTSTRKSYLKVWSLHSEINRVQSEESTPQNGDT

SEQ ID NO: 228287 - protein, 305 aa, Glycine max
  Clone ID: PAT_MRT3847_48171C.1.pep
MNQRWGVSNYDRRRKGLETTTTTEVEMPMRAGRDDALGEYFTEVKVGSPGQRFWLAADTGSEFTWFNCVMRNATTTATTKKTRKNKTKKKHHHHSKRNRTRTTRRTKKKKAKSNPCKGVFCPHRSKSFQAVTCASQKCKIDLSQLFSLSLCPKPSDPCLYDISYADGSSAKGFFGTDTITVDLKNGKEGKLNNLTIGCTKSMENGVNFNEDTGGILGLRFAKDSFIDKAAYEYGAKFSYCLVHHLSHRNVSGYLTIGGHHNAKLLGEIKRTELILFPPFYGVNVVGISIGGQMLKIPPQVWDFNS

SEQ ID NO: 228288 - protein, 139 aa, Glycine max
  unsure (1)..(139): unsure at all Xaa locations
  Clone ID: PAT_MRT3847_48172C.1.pep
LKKTNLKNKTKQAKRKKKKGREKKNFFLKKRKRTQKQKGKRGQTQEKKGLGEEKTKKQPFRQXRGEKKKKKRGTELTKKKPGNTQGPKNINKPRKSPWQQQPQKDKSKPLKDNGRPKEKKKTPGTRLELPPTNKTHKSR

SEQ ID NO: 228289 - protein, 68 aa, Glycine max
  Clone ID: PAT_MRT3847_48173C.1.pep
MEEECVHQQNVAGNKSNFPLQLLKKKDEGPPPSPPPSAAKAKRPPTKDRHTKVEGRGRRIRMPAACAA

SEQ ID NO: 228290 - protein, 67 aa, Glycine max
  Clone ID: PAT_MRT3847_48174C.1.pep
YCQIKSSKTKQINSVLPCIKKIPHLDSRITCLLYYYSCSAMMMMMMMMMMMMMMMMMMMMMMMMMMM

SEQ ID NO: 228291 - protein, 53 aa, Glycine max
  Clone ID: PAT_MRT3847_48175C.1.pep
DNCSSTLANGELTRSSTPLFSWSVSSDGIAAQPVASSIKSNSYFWLEPRKGTG

SEQ ID NO: 228292 - protein, 57 aa, Glycine max
  Clone ID: PAT_MRT3847_48176C.1.pep
LQLKANEMFNSEPLIKKAHCTFRSYKRQKENALTKGLQIAKDTFTAVPNLSRRKDRM

SEQ ID NO: 228293 - protein, 64 aa, Glycine max
  unsure (1)..(64): unsure at all Xaa locations
  Clone ID: PAT_MRT3847_48177C.1.pep
TETFYYARGKQSKSYFRIIVQRNVSNLNRENHFAPNLYKSSAFMLINKQCCILXGESAITKCIT

SEQ ID NO: 228294 - protein, 55 aa, Glycine max
  Clone ID: PAT_MRT3847_48178C.1.pep
YDALWVKYICKVQFGGEFDLLGNGILISRLTFLGTFVQAKTAVIPSLLLPRGCYP

SEQ ID NO: 228295 - protein, 330 aa, Glycine max
  unsure (1)..(330): unsure at all Xaa locations
  Clone ID: PAT_MRT3847_48179C.1.pep
MLTAVLRRTSSTLSRRGFPAALISASTATATATAGNHFRLLSAAVNSRTFHSNPGPLNFRASSCHRAEYAVDDFPYEEGSKGNADEGLEIAKLGISQDIVSALAKKGITKLFPIQRAVLEPAMQGRDMIGRARTGTGKTLAFGIPIMDKIIQFNAKHGRGRDPLALVLAPTRELARQVESEFCESAPNLDTICGYGGTPISRQMRELDYGVDIAVGTPGRIIDLLNRGALNLKDVQFVVLDEADQMLQVGFQEDVEKILERLPPKRQTLMFSATMPSWIKQISRNYLNNPLTIDLVGDSYHFWADEIAFHPIATDXFVKSRILAPLITEY

SEQ ID NO: 228296 - protein, 77 aa, Glycine max
  Clone ID: PAT_MRT3847_4817C.1.pep
NVLLAILASQSFNAPPTDLSHPLHRHASAHYRQPRDLPNIRTQTFAIPIIDFHNIPPSGYPAYSLRITKILPKVLER

SEQ ID NO: 228297 - protein, 77 aa, Glycine max
  Clone ID: PAT_MRT3847_48180C.1.pep
YQCLKCRLSGMYELILYTVSNSYHSDFLTLCGTALSIGNYPAMLILQIYTMCSLNLVDNDTDQLSSMLVSHVTVIRC

SEQ ID NO: 228298 - protein, 100 aa, Glycine max
  unsure (1)..(100): unsure at all Xaa locations
  Clone ID: PAT_MRT3847_48181C.1.pep
MTYLAIVNXDGKTLYRNQYAWNNVXYVIFLDSPAGVGFSYSNTIFGGSXPGDTSTALDSYXFLLPWLERFPQFKTSDLFISGESYAGHSVPQLAVTLLTS

SEQ ID NO: 228299 - protein, 79 aa, Glycine max
  unsure (1)..(79): unsure at all Xaa locations
  Clone ID: PAT_MRT3847_48182C.1.pep
KALDINNNIFLHCHPNXKECSKTTLPYLPTIHTPNDIKQYSRPTTLSTSNILYPFTSQVTIIAPAYPFFSNHSLTPNQI

SEQ ID NO: 228300 - protein, 51 aa, Glycine max
  unsure (1)..(51): unsure at all Xaa locations
  Clone ID: PAT_MRT3847_48183C.1.pep
MMRVRVPLLLLGLVFLSSVSVSSGIAYXDKENSRHNKFLHRCYSDMDSYRI

SEQ ID NO: 228301 - protein, 76 aa, Glycine max
  unsure (1)..(76): unsure at all Xaa locations
  Clone ID: PAT_MRT3847_48184C.1.pep
MLGNTLYPTGATWTDFLVFGRASYKTHSLVLIIPSEACGPNNGFEMWSSEWANXTSWHLSFLIDNPKQSTVFDILL

SEQ ID NO: 228302 - protein, 127 aa, Glycine max
  Clone ID: PAT_MRT3847_48185C.1.pep
LSNDPDTHDDFKPANKLENSNISLADVIEQDVKDNPVMIYMKGVPDFPQCGFSSLAVRVLQQYDVPLSARNILEDPELKNAVKAFSNWPTFPQVFIKGEFIGGSDIVLNMHQTGDLKEKLKDITSKQ

SEQ ID NO: 228303 - protein, 48 aa, Glycine max
  Clone ID: PAT_MRT3847_48186C.1.pep
LRSSDSSLQWYTLQRTNTNPLLARLRPIHSADVSSAYDVLGPTIYVVG

SEQ ID NO: 228304 - protein, 64 aa, Glycine max
  Clone ID: PAT_MRT3847_48187C.1.pep
SWRKHGNMERNQNLRVHQCMQNNLGNQDQRKRKRGRSHGKVLCLHGGRLTRKACLVKKPSTILN

SEQ ID NO: 228305 - protein, 64 aa, Glycine max
  Clone ID: PAT_MRT3847_48188C.1.pep
VSLGYQKGQAYFRFINLHNILVKYNFFWICIRTVVIVLIPVMPLLNITINRKSRFSTVDIFLDS

SEQ ID NO: 228306 - protein, 96 aa, Glycine max
  Clone ID: PAT_MRT3847_48189C.1.pep
HTKRLHTKRSKGASVWASYTSNSSLGPLEAPGPIPLMVYTSQPSQLMVALVSRLDGMRMSAQPHSDSTRSKGVLVKVTVRHQVLPSFFLVKNCFVS

SEQ ID NO: 228307 - protein, 55 aa, Glycine max
  Clone ID: PAT_MRT3847_4818C.1.pep
KPNIICSSSKGGGVKFNEVAIVQYYFMHIWISTISLSTKLEELGGEHATLFYIVL

SEQ ID NO: 228308 - protein, 247 aa, Glycine max
  unsure (1)..(247): unsure at all Xaa locations
  Clone ID: PAT_MRT3847_48190C.1.pep
MSMTMVMEEDEEDVEIEHVFIAHEIDLDYEFDAARFFDFTRPETPSEAHEAQLWFQNAAGYPPSPFVRRLLVAREDLFLEDVSDSPKSEHVECASNVVDDEKSSVPLGIGFSDTAFENCGPKTLGENISGLLAGIQQNDGTRSLQVPTGLTFGSKTISNNLNSKAKSAVPKSSTLMKPTASQLAKQNRPSKNIGSRFQKLLTRNEHNLSISSGVESQAAKRQKLEGGLFXRVXDVKQXTNFFHKAPM

SEQ ID NO: 228309 - protein, 46 aa, Glycine max
  Clone ID: PAT_MRT3847_48191C.1.pep
RVRTGPTGLHMGRHTGGLGDEYGPRKQLHASDVISPTMDPEVDNST

SEQ ID NO: 228310 - protein, 150 aa, Glycine max
  Clone ID: PAT_MRT3847_48192C.1.pep
MSPPPPPPSLSSDSVQFNSMLDESKFEVHLKLWALRIPCQHCKLATRILNGYLLDKPRVKPIAEDPTCDKNRYLILSDNVHNQDLSDIPKQKLDELKGLCEIEIVPYSLTLGYSHWSADHVLKQILPTGVEVPSSFETIGQIAHLNLHDE

SEQ ID NO: 228311 - protein, 53 aa, Glycine max
  unsure (1)..(53): unsure at all Xaa locations
  Clone ID: PAT_MRT3847_48193C.1.pep
RKDGSWLAWLDSKIEGSVLYVRXESTNNLPTTQLAQIDHPLTHTARDNESAIF

SEQ ID NO: 228312 - protein, 60 aa, Glycine max
  Clone ID: PAT_MRT3847_48194C.1.pep
RGQRKQFNFGGGPFTTLCRSKKKKNSLVPILGKKPPNNKICLEKTLINPYPGPVKYSFIF

SEQ ID NO: 228313 - protein, 86 aa, Glycine max
  Clone ID: PAT_MRT3847_48195C.1.pep
EKVLAGKSQIEDYFPEFARYTTPEDATPEPGQDPRVTRAKYFIRYEFLRISTASGDGRHYCYPHFTCAVDTENIRRVFNDCRDIIQ

SEQ ID NO: 228314 - protein, 59 aa, Glycine max
  Clone ID: PAT_MRT3847_48196C.1.pep
WPNPLLMWSDSTTSKRNLDVIKVGIFLTRTKRTTFVCSVGPPNGTTQILIAAKTPSNKP

SEQ ID NO: 228315 - protein, 304 aa, Glycine max
  Clone ID: PAT_MRT3847_48197C.1.pep
DASAHASAHASAHASAHAFATFDQQQGYGPATGGGSGSNPAQEGHTANYAARGDSAQAPSAQPTTVVQQGYPTNQQPSSNTVNYSLQGTPQPGYGVPPTSQAAYGNQPQPGYGTPQSQKPTGNPPVYGESQFPSAGGGYDQSAYPVQPPPSGYAQPESGSQRAPASGYGGAVQPGYGHQIYGAPQGGQPGYGQAPPSYSNSSFGAGYTHTLEYTGDGDGNAQAPHSAIAKASPLIFWPPFPSPSHRRFLLCFTVYGTSDTNVALHCLDGRNGVLFFFFLLFEYLVRLNRNSFWRRLKKLVGKLI

SEQ ID NO: 228316 - protein, 77 aa, Glycine max
  unsure (1)..(77): unsure at all Xaa locations
  Clone ID: PAT_MRT3847_48198C.1.pep
MCCHXQVQNPHNIKYNGTIEDLXYTWRTXSFHGLFKGNGTNCAQTVPNSVVKFFSYEQASKDFQIVSLHILMPVVNT

SEQ ID NO: 228317 - protein, 57 aa, Glycine max
  Clone ID: PAT_MRT3847_48199C.1.pep
LLHMESQLAQNNNTVSGKQNRLYNIRYLMTVILDFCVKLGKLKSFMKKAYSTSPLLY

SEQ ID NO: 228318 - protein, 144 aa, Glycine max
  Clone ID: PAT_MRT3847_4819C.1.pep
MEKQKTVMGLILLLLLFASDVSAWTGEIHGRVVCDVCGDSSLGPEDHVLEGAEVAVLCITKSGEVLNYQAFTDAKGIYTVAETMPESDRWDACLARPISSFHEQCTQLGEGSIGVKFSYNHPSGHSHTVRTFVYRPTSVPTYCI

SEQ ID NO: 228319 - protein, 217 aa, Glycine max
  unsure (1)..(217): unsure at all Xaa locations
  Clone ID: PAT_MRT3847_481C.1.pep
MSRNEGSSLQQAIGASAEAETMDTDAAAAIWKEIEASESYLVCSMYEEAAQLASSVLERLRHSHHDIDRDDMLESSAMVLLQAFNQLPSKTPHILNQLTLYFVSPKAIPSRLLLTGACFQIAQGSALSVQQFLHEFLNGWTLEHSQYSAVITEAASRDQSRRFILLPIVEYLQVVELYAVTLLAXFKKMVDLAISWVENASLPEEXRQELLRRLHMQ

SEQ ID NO: 228320 - protein, 71 aa, Glycine max
  Clone ID: PAT_MRT3847_48200C.1.pep
IIGTEGDVPILGMSRRCDPCYILRVPEMQAWKAYDLKDYEMKRNSVRREQSLRRSTTTIRRYDEWASLHGG

SEQ ID NO: 228321 - protein, 60 aa, Glycine max
  Clone ID: PAT_MRT3847_48201C.1.pep
RFVNTLSINIKTTCITQWLAIMSNRTSQIIEMASLITYDSTVDLWYNKTLRMQGTYKHYY

SEQ ID NO: 228322 - protein, 102 aa, Glycine max
  unsure (1)..(102): unsure at all Xaa locations
  Clone ID: PAT_MRT3847_48202C.1.pep
KKKKQKKKQKKKKKNKNKQKKQNHPXPNKKQQQPNKTKPTKKKKKQKKKKKTKXNQPKQTKPPTXKKNKPPTPTPSPTKPNEKNTTGKQTTTTKQTIEQIIS

SEQ ID NO: 228323 - protein, 52 aa, Glycine max
  Clone ID: PAT_MRT3847_48203C.1.pep
LLIIRNLWYYEYIKSNCLLQPLQSPKLSTAALDDPSLHTRACDLIPLPDSHL

SEQ ID NO: 228324 - protein, 42 aa, Glycine max
  Clone ID: PAT_MRT3847_48204C.1.pep
KGELNCPIRVGNLLERLFVGVFFVLIKEEKKGRSHKRLRWGN

SEQ ID NO: 228325 - protein, 58 aa, Glycine max
  Clone ID: PAT_MRT3847_48205C.1.pep
CCCSFTPNNTTLNDFYSFQIRNALGVSIQIKKNEYSSLANCYTSILPLSEIFSQVYGG

SEQ ID NO: 228326 - protein, 58 aa, Glycine max
  unsure (1)..(58): unsure at all Xaa locations
  Clone ID: PAT_MRT3847_48206C.1.pep
GRXNPVDPASVLLRTDDVRGKVLIIQVPNKDLNTKIARSKFKKNNNVLHSLIFIHHHV

SEQ ID NO: 228327 - protein, 70 aa, Glycine max
  unsure (1)..(70): unsure at all Xaa locations
  Clone ID: PAT_MRT3847_48207C.1.pep
LNTFYIPGNIIIPKHESILCIKWXIRIKIVSNQSFEKRKTRETKEXXKKLHNFXILQKDXFESSFVIMLI

SEQ ID NO: 228328 - protein, 62 aa, Glycine max
  Clone ID: PAT_MRT3847_48208C.1.pep
FCIALNIVSLASALPKYSTSSPSSALVASNVFIFYTNCYKFGCPELSWSVGDREGLFKAHVP

SEQ ID NO: 228329 - protein, 86 aa, Glycine max
  Clone ID: PAT_MRT3847_48209C.1.pep
EKNTGAKKPAQGRRTRQAEPEEGAEAQTTAKQEGYRHQDSARANKNQAEKGTARKKLFDDGVVKREDLWITNKLWMSNHAPEDVPK

SEQ ID NO: 228330 - protein, 84 aa, Glycine max
  Clone ID: PAT_MRT3847_4820C.1.pep
GPKLFLKQIPPNKVFFWKKKLSPLITIFWQFLTLQKKQSFFNRVNNILEMLNINLIMTRLSFLGKGCFQFFFQLYRRSPPSLSF

SEQ ID NO: 228331 - protein, 224 aa, Glycine max
  Clone ID: PAT_MRT3847_48210C.1.pep
DCTEMSWIDSVVYMSQFTNGQPREALLNRSISDLPFFKGKSDYVRDPIPDVGLKGLWPLFYEDEAQGAVIQFTPYGGKMYEISESEIPFPHRSGNIFHIHYLVRWREEGEEAKQKYINWIRRAYKYMEPFVSKSPRAAYLNYRDLDIGVNNNNGNTSYSQASIWGLKYFKNNFNRLARVKSMVDPLNFFRNEQSIPPLKSKGLNMQVENLGAVNVFIMRHKTNK

SEQ ID NO: 228332 - protein, 270 aa, Glycine max
  Clone ID: PAT_MRT3847_48211C.1.pep
EGNEKGLQPRINLQGYLLGNPITTRNEGNDQIPFAHGMGLISDELYASLQRNCKGEYENRDSRNVLCLRDLKHYDECLSGINTFYILDRYCKSDSPKKHEAQWRRSLTQKFEASLNSHLRVPDIRCQIFGFFLATQWANDESVRKSLHIREGTIGKWERCYTTDFEEQIFSSFEFHVNLSAKGYRSLIYSGDHDAVVPFMSTQAWIRALNYSIVEDWRPWLLEDQVAGYTRIYSNQMTFATVKGSGHTAPEYKPEEGFAMFSRWIANMPL

SEQ ID NO: 228333 - protein, 41 aa, Glycine max
  Clone ID: PAT_MRT3847_48212C.1.pep
GRLVTGHVSSGSPWYGRNRVKYLGSFSGDPGYYVTGEFGCD

SEQ ID NO: 228334 - protein, 462 aa, Glycine max
  Clone ID: PAT_MRT3847_48213C.1.pep
MFCNFHIILLIALALLVQISSQLGSKVEVLPGFEGPLPFELETGYVGLGEKDDDMQVFYYFVKSENDPQKDPLMLWLTGGPGCSSFSGLAFQIGPLRFKIEEYDGSVPNLILRPQSWTKVCNIIFVDLPFGTGFSYAKNLTAQRSDWKLVHHTHQFLRKWLIDHPEFLSNEFKSGADSYSGIPAPAIVQEISNGNEKGLQPRINLQGYLLGNPITTRNEGNDQIPFAHGMGLISDELYASLQRNCKGEYENRDSRNVLCLRDLKHYDECLSGINTFYILDRYCKSDSPKKHEAQWRRSLTQKFEASLNSHLRVPDIRCQIFGFFLATQWANDESVRKSLHIREGTIGKWERCYTTDFEEQIFSSFEFHVNLSAKGYRSLIYSGDHDAVVPFMSTQAWIRALNYSIVEDWRPWLLEDQVAGYTRIYSNQMTFATVKGSGHTAPEYKPEEGFAMFSRWIANMPL

SEQ ID NO: 228335 - protein, 89 aa, Glycine max
  Clone ID: PAT_MRT3847_48214C.1.pep
RPEIIRAGTTSPLRGAPPFFFFFSKGCSHFSQKKEKALIVPKSHISPKMGARVSTSYLPPQRTQLQAQLPDTKDTTSEMQLMPPSEWIP

SEQ ID NO: 228336 - protein, 40 aa, Glycine max
  Clone ID: PAT_MRT3847_48215C.1.pep
GLVRYVTNAFLSTDVHLLALLNLDFNVEWNQQEAWYTMSH

SEQ ID NO: 228337 - protein, 79 aa, Glycine max
  Clone ID: PAT_MRT3847_48216C.1.pep
FPRSQVFISVDLSISSLYTRLSISGLLISMCTSPIARCSLETQICHQLHNWSVSCQVQFQIANCRSPLWYYTLHQTPIG

SEQ ID NO: 228338 - protein, 85 aa, Glycine max
  unsure (1)..(85): unsure at all Xaa locations
  Clone ID: PAT_MRT3847_48217C.1.pep
FLWQRKGTXTTYGQDKLAATTPCDEPQVDQLQRGIYQADQAHVVVCRTLNRVYENNSNSQPTFVFTSAFLDARLSLDPVGHVFSI

SEQ ID NO: 228339 - protein, 76 aa, Glycine max
  Clone ID: PAT_MRT3847_48218C.1.pep
KRGKTPFFKKFWGQTFFGAPPLNKGGGYYIFFLAHLTPKFEVKWPLWAQSLEKPKPFWGSHLTTWEQKTQKPPFGV

SEQ ID NO: 228340 - protein, 59 aa, Glycine max
  Clone ID: PAT_MRT3847_48219C.1.pep
ILLSCVWFAHPLSWQQWIGAVIVFGAIYAKSFLRKAPEKTTSVEHVQNGNGNSNNLENP

SEQ ID NO: 228341 - protein, 44 aa, Glycine max
  Clone ID: PAT_MRT3847_4821C.1.pep
NLYTFADTSLLCLISHLCDSACKPETYIIYTGNSMNDAASALTL

SEQ ID NO: 228342 - protein, 79 aa, Glycine max
  Clone ID: PAT_MRT3847_48220C.1.pep
EHHRRLVNLWVVVLYYCSHGLGTACLLLHQESHDPKQRFHWLKGYLHIAKCKFFYFNDLYYNITMNTDFVCFTFQIEWW

SEQ ID NO: 228343 - protein, 63 aa, Glycine max
  unsure (1)..(63): unsure at all Xaa locations
  Clone ID: PAT_MRT3847_48221C.1.pep
MAGKGXXPAXGIDLGXTYXCVGVWQHXRXEIIAXDXGNRTTPSYVGFTDTERXXGXAXKNXVA

SEQ ID NO: 228344 - protein, 55 aa, Glycine max
  Clone ID: PAT_MRT3847_48222C.1.pep
STTASIERPIPLIKNFQATIEPVSHLMVAERLNLQIAHHKQSLLYSVDDREARSI

SEQ ID NO: 228345 - protein, 48 aa, Glycine max
  Clone ID: PAT_MRT3847_48223C.1.pep
CSSNLGASQNIMSHSSIGQDPSECSHQFKIIRGLRLRLKPVRLCHPLN

SEQ ID NO: 228346 - protein, 320 aa, Glycine max
  Clone ID: PAT_MRT3847_48224C.1.pep
MELSQLGFLEELVAPRRDSWNALSTGFCELLSNGCCWSFDTFLENPTFGAFSAPRFDSPYSSEVSAAYPFAADGFTMPLSELDPGSDEPPPPPPLPPSLEDAEIGFHDNNNKKKNNFEETKVVCKVEEKDREIPLFKIGMCDDGERKPKSKKLEGQPSKNLMAERRRRKRLNDRLSMLRSIVPKISKMDRTSILGDTIDYMKELLERIGKLQEEEGTSQINLLGISREQLKPNEAIFDVERRDQDTRISICCATKPGLLLSTVNTLEAIGLEIQQCVVSSFNDFSVEASCSEVAEQRDCIHPEEIKQALFRNAGFGEKCL

SEQ ID NO: 228347 - protein, 360 aa, Glycine max
  Clone ID: PAT_MRT3847_48225C.1.pep
MSRGSVNRKHVTRKDVKRVQALIEHCLTQNMNKEEAVELISQVEIEPNFIKLVWQKLEEENQEFFKCYYAKMAWKQKMMLLSIFSEEQGEITGLTSSAPLPTFDGSHNPAVSSQANCNVGLTTIPSSFPTFDGLHSPEVLSQPNSIFDGSHNPSFLSQPNSIAGLTPFASLPTFDELHNPVDLSQPNFSFDGSDNLAVLSQPNSNVDLTEIASLPNFDGSHNLAVLPQPNSNVDLTEIAPFPTFDGSHNSVVLSQPNSNMAHLPPLPYYTEEQIQASLMPTNMEQPIYSSSYDVFNNCGSSLQTSMQGGAVDVSAYDKDNWISGPSSMLSDQSEDMGMIQRINREMIESWPEYSGFHPLN

SEQ ID NO: 228348 - protein, 165 aa, Glycine max
  unsure (1)..(165): unsure at all Xaa locations
  Clone ID: PAT_MRT3847_48226C.1.pep
EAGKDRAXARGKNQXKRXENTTNRQXXKXKRRKGXXKKANEXTXXRXAKVFIXXXSSXGKXHEXNSPXTXTKXGXDQXQXXXGXXXXNXQXEXXQENXKKXKDXXRXXXKEXRQRKGEXXNEXSXEEXKXXEEEXDKAAKXXXEXKXKGKTXQXDTQRKKXKNEK

SEQ ID NO: 228349 - protein, 69 aa, Glycine max
  Clone ID: PAT_MRT3847_48227C.1.pep
KKNKKKKLKKKKKKKKKRKNKKKKKKKKKKKKKKKKKKKKKIKGGPFLKIQNLQLSLSNSKYLLRIPKF

SEQ ID NO: 228350 - protein, 166 aa, Glycine max
  unsure (1)..(166): unsure at all Xaa locations
  Clone ID: PAT_MRT3847_48228C.1.pep
MAAGLSAAITMKPLLRFHQPRLPKPIPTTLPFSPLRIFHHTASPIPQNFSTFTVCVLMQDPKQGTQMEIQAQEPPPSPPQQVLSQKLAEKLARKESESFTYLIAAVMSSFGITSMAVFAVYYRFAWQMEGEEVPLSEIFGTFALSVGAAVGMEXWARWAHRALWHA

SEQ ID NO: 228351 - protein, 223 aa, Glycine max
  unsure (1)..(223): unsure at all Xaa locations
  Clone ID: PAT_MRT3847_48229C.1.pep
MRHVHVTLLDVHDSPDVWPDAPIPTALLYLLAVXPTGVKDGALPIEVDGTQGPRTFFCRENLHSSTTLCVLITMRTYXNPSWGMYSSLRPMXDTIYRPYVPCEXDIAIVNASLAGEQKSRAESLVNSTSHSAMCTLXNNIHELSXSHANTREPRTVEGVYCLADTAVMRHDIMFTSEXYYWHKCPESTVVMLASLAGDVTKTQXLAVCHSNTSGMNHLMLHEL

SEQ ID NO: 228352 - protein, 43 aa, Glycine max
  Clone ID: PAT_MRT3847_4822C.1.pep
FNSSHIDFNIFFILLTNQTNLLIEFHRISRFSFQNIEMMDYLQ

SEQ ID NO: 228353 - protein, 139 aa, Glycine max
  Clone ID: PAT_MRT3847_48230C.1.pep
CYITLQLQRIARGTTEHLILYVLHGNLGFEVLYGCILSLVVPNDTIRIVKPTKGLKPTERDTEVVFTTGGLSEAKPGIIPDAGLLEFNSEGGAPYPKGPVPEDEDVGGAVGIDGSGVNGLGGGSAIGLDCVGGVGGDDF

SEQ ID NO: 228354 - protein, 31 aa, Glycine max
  Clone ID: PAT_MRT3847_48231C.1.pep
VCREISKRTSVQTSNYGGSRLVLKLTFNILT

SEQ ID NO: 228355 - protein, 49 aa, Glycine max
  unsure (1)..(49): unsure at all Xaa locations
  Clone ID: PAT_MRT3847_48232C.1.pep
WCLPMHXIPSGVVISNTKVPEVHLLTPLSNDTFRSLLKQTLSYVALMPK

SEQ ID NO: 228356 - protein, 91 aa, Glycine max
  unsure (1)..(91): unsure at all Xaa locations
  Clone ID: PAT_MRT3847_48233C.1.pep
GAPPLASQKENLVLNQESRPAFAAETPKKLNREIAVDASLSNWLGSSETTPVTKGLYVGTLERSSSQSSNSVVSHXNRPILGALTVEELKH

SEQ ID NO: 228357 - protein, 65 aa, Glycine max
  Clone ID: PAT_MRT3847_48234C.1.pep
SACDECYKRAQHDPPEIFMGNSLLQDHENSVRTAASLRCYHHFKESYRAPSHDRNANHYIGNVSI

SEQ ID NO: 228358 - protein, 85 aa, Glycine max
  Clone ID: PAT_MRT3847_48235C.1.pep
VVRRLATNLYFGFYLLHHGGIFLLLRPKRPWWNPVKSREKKHWLKSFKGSEEALLTLDNYHCQIRKAEPEAKANEIALAILEERL

SEQ ID NO: 228359 - protein, 81 aa, Glycine max
  Clone ID: PAT_MRT3847_48236C.1.pep
KFSRQRKKLQNPGQLEPLQKRPWEGFKILIPFLGGGALGPRSKQKRKFWLKKFQGWFLKGGYGGAKRKGGPYEVCDKQNSL

SEQ ID NO: 228360 - protein, 74 aa, Glycine max
  Clone ID: PAT_MRT3847_48237C.1.pep
AKCVLDLSIGKIGMAVGRGRKFRGRPRGRGSLGVTVIVLIARIKGDKLCLSLFVAALMGGGVKIPFVFMWPYRD

SEQ ID NO: 228361 - protein, 201 aa, Glycine max
  Clone ID: PAT_MRT3847_48238C.1.pep
MCCLKWFSNHRSLLYILSMWRGSDDNESSEQFLERIRWKRFSNVCTAVVKHDPNWLINSGGVYIVTGAQLLSKGSWPRNVLHLRLLFTHIPNCSIRKSEWTAAPEASRKSFLTNLSTTFSFTQHGTTGPPKQAPTALNSGVYPDGPPVPVRAGKLLKYVETAEVVRGPHDAPGHWLVTAAKLVTDGGKIGLQVKFALLDYW

SEQ ID NO: 228362 - protein, 40 aa, Glycine max
  Clone ID: PAT_MRT3847_48239C.1.pep
WSLLTSGDIFDFNLLGDHSFVVFFASISFLGHEWRYVGSC

SEQ ID NO: 228363 - protein, 91 aa, Glycine max
  Clone ID: PAT_MRT3847_4823C.1.pep
FYLYKHRYWLLAAFTPCCTSLQPRFNLLLCLLVSPPISSTDMRTFFSGEHYKSMRCPHIFGINSKLTLRIFAEQSPTRYSASSSPDAAVVL

SEQ ID NO: 228364 - protein, 86 aa, Glycine max
  unsure (1)..(86): unsure at all Xaa locations
  Clone ID: PAT_MRT3847_48240C.1.pep
AQHFRSHSTVTLVPPKQAPTVLNPGVYPDGPPVPVRAGKLLKYVEPAEVXRGPHDAPGHWLVTAAKLVTDGGKIGLQVKFALLDYW

SEQ ID NO: 228365 - protein, 61 aa, Glycine max
  Clone ID: PAT_MRT3847_48241C.1.pep
ERLRLVIRLLRVNNMRHEGNERLAKIWIFDRRTGETAKPYAWTSAPMNWERLYIHIIAYEH

SEQ ID NO: 228366 - protein, 46 aa, Glycine max
  unsure (1)..(46): unsure at all Xaa locations
  Clone ID: PAT_MRT3847_48242C.1.pep
LIKKLLYLIHLIKIXTDKKYYFKIRTDXIKYFNLLIQLKSFTNKLI

SEQ ID NO: 228367 - protein, 31 aa, Glycine max
  Clone ID: PAT_MRT3847_48243C.1.pep
KFGNEMLIQFQKNYPRVFLCNMLNHIFIREP

SEQ ID NO: 228368 - protein, 54 aa, Glycine max
  unsure (1)..(54): unsure at all Xaa locations
  Clone ID: PAT_MRT3847_48244C.1.pep
DGLKKSELKATAAEKVEQITASLGTSSSDGIPSSEASDRIKAGFIHFXKEKYDK

SEQ ID NO: 228369 - protein, 64 aa, Glycine max
  Clone ID: PAT_MRT3847_48245C.1.pep
LTFFALNNLFSQIKITILSFHWDNFPIYLQTSSSISRGKIFPQQLKKPSLFKIKTTLPILLVAP

SEQ ID NO: 228370 - protein, 62 aa, Glycine max
  Clone ID: PAT_MRT3847_48246C.1.pep
SEDSTTVGGRSKKREWKRWRGGGQRCGGRWRYYYAPNPIHIGSSRRRTLYKWGIAWKEMTFT

SEQ ID NO: 228371 - protein, 96 aa, Glycine max
  Clone ID: PAT_MRT3847_48247C.1.pep
MTPSSPSSVKAGMLEGVESALGLSKGSLPKPFYTRLQLWGAVFPTNTHGVPCIFDPFGRAGICGDWLLGSNIEAAVLSGIALANHIADYSQSPGTD

SEQ ID NO: 228372 - protein, 471 aa, Glycine max
  Clone ID: PAT_MRT3847_48248C.1.pep
MVGLGVSVSLKVGHVCSCSNGFGTVTMEAQKQKLSPSKTRRKSSYGTSRRSVLKKSFSQEQVTFTSPLSADPLVALIGGGISGLICALFLEKRGIRSTVFDTGIHGLGGRLGTRVVDPHPLKFDHAAQFFTVSDSRFAEIVDAWMEKGLVREWLGTVGDLNNGGEFVPFLPSPARYVATKGMRFLADSLLSHSRLVNVVRPCWISKLEPFNGMWHLSENGKPRGEFDAIVIAHNGKCANRLLMTSGLPLIAKQMKRLDLSSIWALLAAFEDPLPFPGSTEVPFEGAFVRGVDSVSWMANNTKKLEISECGGPHCWTFLSTAAYGKQNKVPQENIPSATAAKVKAGMLDGVESALGLSKGSLPKPLYTRLQLWGAALPTNTPGVPCIFDPFGRAGICGDWLLGSNIEAAVLSGIALANHIADYFQSPGTDPGEFAVGLNNEFQPLEGHDIGQFPGLGSEEKMSEGQAYELAK

SEQ ID NO: 228373 - protein, 49 aa, Glycine max
  unsure (1)..(49): unsure at all Xaa locations
  Clone ID: PAT_MRT3847_48249C.1.pep
LGSSWLXCRYRIDTXINKDXMETHLXXXLXLXFTLVXGXGAQAQGPSTS

SEQ ID NO: 228374 - protein, 169 aa, Glycine max
  Clone ID: PAT_MRT3847_4824C.1.pep
ARLICSFIQYLVQSFSISQKNSYGSLRFFLQNPSSSVLSLFLPSNHSATAAILPKLRNLSPPLISRQNKLAVTAIQVSDLSENYDDSVLEDVPHLTDFLPNLPVIDKSFGFNTAVEEAHIAINAAHGEVENVENGVGIVKLMLVGRYNAKQYFLLFLYCNSNFINNFIQ

SEQ ID NO: 228375 - protein, 110 aa, Glycine max
  Clone ID: PAT_MRT3847_48250C.1.pep
QVKLKPPHENKTKEATHGIWVNLSFTPKTCIFTLQFSTVHSNFLLFLKKRAHGVEYVQKTNKKHASLHYNSYDQVHSTGNFFTSSISTETRSLKGKPLLYQWIPSSVSKK

SEQ ID NO: 228376 - protein, 53 aa, Glycine max
  Clone ID: PAT_MRT3847_48251C.1.pep
LVFILSRKSLSKQRGGLIIKHELSIHTTKFFVSKFFQTLLLSPNFVNFLNPFI

SEQ ID NO: 228377 - protein, 72 aa, Glycine max
  Clone ID: PAT_MRT3847_48252C.1.pep
SGFPCFLSAVFEYPPPQVLEPSGNPARGHKKTGVVPGALPLGVRNPEGLSQLMGSVPLAPGGVLPTLPPNLW

SEQ ID NO: 228378 - protein, 138 aa, Glycine max
  Clone ID: PAT_MRT3847_48253C.1.pep
YLWTVNEEFDDFEDAPQIDNWDKVSYINRPVEIYKEDGKYFSLNDAVKRILPEFFLENSFVTDGDANINQSGEEGESSSDPGSCCNTLEIAEIKLVRIQGIEPILDIPFSWVVNNLMNPEYFLHMCVCLKVSKANAVQ

SEQ ID NO: 228379 - protein, 84 aa, Glycine max
  Clone ID: PAT_MRT3847_48254C.1.pep
TQLHCMSLECMPGGLSKAGIFVYLFYICGRIYLVSLTVPFFFLLTKLLPVLHSCNDWLSPLPFPCLVNGSNTITCVTLESVTAI

SEQ ID NO: 228380 - protein, 85 aa, Glycine max
  Clone ID: PAT_MRT3847_48255C.1.pep
KGKKTLKQAAPRAQNTKRIFPPQKKGPGQKGGIFGGTPAGFWGEGAPAQPGKNPPWGAGGNPAQKRGEKEPPPPLKHPAQAQELF

SEQ ID NO: 228381 - protein, 135 aa, Glycine max
  unsure (1)..(135): unsure at all Xaa locations
  Clone ID: PAT_MRT3847_48256C.1.pep
STRPLTAEIKYXRNLSNIIRYRTLYDDXYIFWTKHDKNFALTEEEKMGGIISKRLAGDGLAKLAHEFEKHVGYESLKDQIPDIDTSCSANCTXHAKIMKPYTKLLLVILNFLTDGKMHEGKHIAVSNISAGESHS

SEQ ID NO: 228382 - protein, 44 aa, Glycine max
  Clone ID: PAT_MRT3847_48257C.1.pep
GHLRNQQIICLFKQEYLIGGRTRGEIESATEAAEYKRSINASAD

SEQ ID NO: 228383 - protein, 105 aa, Glycine max
  Clone ID: PAT_MRT3847_48258C.1.pep
RKTSNRSRSMGENQHYHAIQTRQKKKNKSRMRVKFSCDTGMSVIHRCTEKETDLRRRKGNKRYCEVKRGENLKEDGNGERDLPAETTVTRRRLRRKTVRGENGRV

SEQ ID NO: 228384 - protein, 254 aa, Glycine max
  Clone ID: PAT_MRT3847_48259C.1.pep
MAETLRMVVAVIGNVASVSLYAAPTVTFKRVIRKKSTEEFSCMPYIIALLNCLLFTWYGLPVVSNKWENLPLVTVNGVGILFELSYVLIYIWFSTPKGKVKVAMTAVPVLIVFCVIAIVSAFVFPDHRHRKLLVGSIGLGVSIAMYGSPLVVMKKVIQTKSVEFMPLPLSFCSFLASVLWLTYGLLIRDIFVAGPSLIGTPLGILQLVLHCKYWKRRVMEEPNKVELQKGNNTEKLDLEMGHGKECVTVPSNCN

SEQ ID NO: 228385 - protein, 135 aa, Glycine max
  unsure (1)..(135): unsure at all Xaa locations
  Clone ID: PAT_MRT3847_4825C.1.pep
MLFYTTFFILYYIQLVITYICFSFPYFFMMKELACERECSRGEDYRLIKLTIPDFNAKKEQPTVVECKAHDAAWFHSIDHAHGWDKAITGMIEPKDGKKRIXVSFECETLKAEKAAEAHIRKFTPKXAGLDAVGK

SEQ ID NO: 228386 - protein, 229 aa, Glycine max
  unsure (1)..(229): unsure at all Xaa locations
  Clone ID: PAT_MRT3847_48260C.1.pep
PRPPKAVLPNWVNEFTTWAPSITAILYDGRLDERKAMKEELSGEGKFNVLLTHYDLIMRDKAFLKKIQWKYLIVDEGHRLKNHESALARTLDNGYRIQRRLLLTGTPIQNSLQELWSLLNFLLPNIFNSVQNFEDWFNAPFADRVDVSLTDEEQLLIIRRLHQVIRPFILRRKKDEVEKFLPGKSQVILKCDMSAWQXVYYQQVTDVGRVGLDNGSGKSKSLQNLTMQL

SEQ ID NO: 228387 - protein, 57 aa, Glycine max
  Clone ID: PAT_MRT3847_48261C.1.pep
SNRMYKRFYSYPKPEDSPSLFIHNGTPLLKCASKRHLVGFTMIPLQDHHLSCEIGII

SEQ ID NO: 228388 - protein, 71 aa, Glycine max
  Clone ID: PAT_MRT3847_48262C.1.pep
LWFDPLGWGSGSPEKIKGLGPKGIKNGGLAMLALMGAWFQPIYPGPGPIDTLFAPLADPGHGTIFGAFPPK

SEQ ID NO: 228389 - protein, 51 aa, Glycine max
  Clone ID: PAT_MRT3847_48263C.1.pep
CLGSGKKRGLCTTLLYTGVLKSHGFHPLSTDNWGDVDIKPFGNGNITYPKT

SEQ ID NO: 228390 - protein, 646 aa, Glycine max
  unsure (1)..(646): unsure at all Xaa locations
  Clone ID: PAT_MRT3847_48264C.1.pep
MAKATSGTVNPHSRTGVRIVVAGDQGTGKSSLIITAAAENFPVNVPPVLPPTRLPEDLYPDRVPITIIDTSSRAEDSDKVAEELQRADTVVLTYACDRPETLENLSIFWLPHLRKLEVKVPVIVVGCKLDLRDENQQVSLEQVMSPIMQQFREIETCIECSASRHIQVPEVFYYAQKAVLHPTAPLFDQESQTLKPRCVRALKRIFILCDHDRDGALSDAELNDFQVKCFNAPLQPSEIVGVKKVVQEKLSEGVNERGLTLTGFIFLHALLLIKGKFETTWTVLRKFGTNADHPHLSDLIPPTGRSRKQYHRLINRSLMAVSVGAAVVVVGLAAYRVYAARKNXVWLKDRFCEWINVHXFDLNAACSWLDMSSSTFSXWALMTLLNPAFSVENLIYIGFPCDSSSAIRVTRRRRLDRKKQHSDRNVLQCFVFGPRKAGKSALLNSFIGRPYSESYNPTTEDRYAVNVVDISMENRKYLVLREIPEDGVRKLLSNKESLASCDIAVFVHDRSDESSWRTSSELLVEIASHGEDTGFEVPCLIVAAKDDLDSFPMAIQESTRVSQDMGVEAPIPISVKLGDFNSLFRKIVTAAEHPHLSIPETEAGRSRKQYHRLINRSLMAVSVGAAVVVVGLAAYRVYAARKNASG

SEQ ID NO: 228391 - protein, 126 aa, Glycine max
  Clone ID: PAT_MRT3847_48265C.1.pep
MASLFARTKRFSWTTLVLLLELFTIVLHTADAQIGVCYGMMGNNLPPANEVIDLYRSNNIRRMRLYDPNEAALQALRNSGIELILGVPNSDLQGLATNVDTARQWVQRNGLNFWPSVKIKYVAVGN

SEQ ID NO: 228392 - protein, 69 aa, Glycine max
  Clone ID: PAT_MRT3847_48266C.1.pep
MRRIYDELKEIVKIQKFRRLVSYTGFYCFATLISYFYVNNTTRAGFSRAGQFYASYPQYMALLPFSWTA

SEQ ID NO: 228393 - protein, 244 aa, Glycine max
  Clone ID: PAT_MRT3847_48267C.1.pep
MGASTSAEPRVSAEQKEAEAVTASTGALPLLQKAFSKLANPETNAVPLENLQQCFSFGREGRSYSGSNVPDSFPVLLDHLASSLVDQFFVPDKEGIIWVEFVRGYNKCCARVSASVSLNMLMRVFAAISQSANVPLHLEFESGDDDCKVNGHVLPSNVFLLLALCWVMSWGGSRKLKGEGNLSLPDLNHLVLSVIASCGEVEGGLNVWDCDISSLEVQLPAREVVTWVMSTVPCLPDALSSISC

SEQ ID NO: 228394 - protein, 56 aa, Glycine max
  Clone ID: PAT_MRT3847_48268C.1.pep
VTGRCTVFIMQMRYLLLSPHAQRRFRRRPLRIGARVQPAGPWAELALTRNSCCHCA

SEQ ID NO: 228395 - protein, 115 aa, Glycine max
  Clone ID: PAT_MRT3847_48269C.1.pep
LGACEGKKIYVCQRIPYNVGFAPPLGFTPPRSFFSPAVKSPYPGGIACPDGPAALVCPLKSIVKLKVVLITLSSLGQGGVLIGLFCPFEDMVSSSCLLDFRSDMAFGAFKSSGDL

SEQ ID NO: 228396 - protein, 271 aa, Glycine max
  unsure (1)..(271): unsure at all Xaa locations
  Clone ID: PAT_MRT3847_4826C.1.pep
PRPHIRTXGDWTQELKHLLTKEDDKLPSVNCHAKFGELMQLDQRGQPRLLVDGPYGAPAQDYQNFDVLLLIGLGIGATPFISILRDLLNNTRAMDELVVQESNTETSQTTRSDESSNSFTSSNVTPGGSKRSRRTTNAYFYWVTREPGSFEWFKGVMDEVAEMDHKGQIELHNYLTSVYKEGDARSTLITMIQALNHAKHGVDILSGTRVRTHFARPNWKEVFTKIASKHPFSTVGVFYCGMPVLAKELKKLSLELSHKTTTRFEFHKEYF

SEQ ID NO: 228397 - protein, 44 aa, Glycine max
  Clone ID: PAT_MRT3847_48270C.1.pep
WLFHMPITQSTHTLCEKREFLTLSDTFHLSVISTSWLIITITRI

SEQ ID NO: 228398 - protein, 60 aa, Glycine max
  unsure (1)..(60): unsure at all Xaa locations
  Clone ID: PAT_MRT3847_48271C.1.pep
DYTVRPSLQXXISXXRLVXXXGLLAGKWLKXLXHPXKGNXSSKEXXPXIGPXXXFVSXKX

SEQ ID NO: 228399 - protein, 118 aa, Glycine max
  Clone ID: PAT_MRT3847_48272C.1.pep
KRTLVFLPLSNLSRHRRKLFLISLTVKLIGATYIADVAAKKDPCHINDKSTDLLIGSSPNDDKETIYNDEGENQGITKASINKSLPEVGLHALSPSTTNDKLHSCRRRWHLSQSRILH

SEQ ID NO: 228400 - protein, 58 aa, Glycine max
  Clone ID: PAT_MRT3847_48273C.1.pep
NPNFKQLRTFYLHNKIMPTSDCKTKSRCQDFLKEILPLSLLHTLGLKTDAFGRSLKNK

SEQ ID NO: 228401 - protein, 119 aa, Glycine max
  Clone ID: PAT_MRT3847_48274C.1.pep
ARGRRKGSGSRGFRPAALNKVPEQPSESPKEDDYDYLKEGRKQKEEKIKKALSRVKSMVQYPEARAQYRRLLNVVEDFRQTKGANLDLINSEETVDGVEDLIDIDMLLDDDNFIPIAFD

SEQ ID NO: 228402 - protein, 85 aa, Glycine max
  Clone ID: PAT_MRT3847_48275C.1.pep
SISYLSIWFYSFSITKKPKHHIHNTNTITGGEKKKDFFHQTGDLEREQENWMAFFLIKHHQSKQQNLSNYYLLTCKIRIRGSIIT

SEQ ID NO: 228403 - protein, 69 aa, Glycine max
  Clone ID: PAT_MRT3847_48276C.1.pep
ALSRVKSMVQYPEARAQYRRLLNVVEDFRQTKASNKGLINSEETVDGVEDLIDIDMLLDDDNFIPIAFD

SEQ ID NO: 228404 - protein, 260 aa, Glycine max
  unsure (1)..(260): unsure at all Xaa locations
  Clone ID: PAT_MRT3847_48277C.1.pep
NMSSKKEEKSQAAAERIKAAALSAAKGLIRAQAERAAAAAARNVNAYGQKEEGPIRWQEKREAKRQMYLMSTDKAVXLGERNDLKPAMSAAGGVAQCPMCFQSGHWTYECKNERVYISRPSRTRQLKNPKLRVNVSVTYDLDDNIPDAKVEKAKTSSKKTKRKHRKDSDSGSDSEDSVFETDSGSGSSSVTGSDYSSESSSGYSSSSDSEEERRRRRKKKQKRGRRKRYSSSESSDSDSASDSDSDDERSRRKKRHNRRH

SEQ ID NO: 228405 - protein, 42 aa, Glycine max
  Clone ID: PAT_MRT3847_48278C.1.pep
RDTLCTCALTAAGVVVTRSVTATHGRALSLARFTGYPSILAR

SEQ ID NO: 228406 - protein, 106 aa, Glycine max
  unsure (1)..(106): unsure at all Xaa locations
  Clone ID: PAT_MRT3847_48279C.1.pep
VLLTLTPWVMLIHMNKKDHFDACDDNLAVTEDALXEGSNFDTTDVGKNTAIWTGDGDQLKPCWITPSEDNMHHTEGFRSLNVSNGAEYHISHIAHAMRDARNHDAT

SEQ ID NO: 228407 - protein, 89 aa, Glycine max
  Clone ID: PAT_MRT3847_4827C.1.pep
PFISILRDLLNNTRAMDELVQESNTETSQTTRSDESSNSFTSSNVTPGGNKRSRRTTNAYFYWVTREPGSFEWFKGVMDEVAEMDHKVI

SEQ ID NO: 228408 - protein, 36 aa, Glycine max
  Clone ID: PAT_MRT3847_48280C.1.pep
SVDSNHITLMSMATRGLLRTWSAPFLRGAQQAFNWT

SEQ ID NO: 228409 - protein, 59 aa, Glycine max
  Clone ID: PAT_MRT3847_48281C.1.pep
IHDILHTLNCIFTKAKLAYNFFHLFYIYLNNTTSNSIISIKHTFISINNFFLHTFISNS

SEQ ID NO: 228410 - protein, 110 aa, Glycine max
  unsure (1)..(110): unsure at all Xaa locations
  Clone ID: PAT_MRT3847_48282C.1.pep
XXTXXXAQNTXXXXXXXXXHXHXXXAVXNXPXVXXQTNXPHXXTRKTSXXHXXXXXGIXTXLLLXAHLKPXNXSTXSSXXXLXAGSXFYYXYXSVXTXPXQXXHGXLXXC

SEQ ID NO: 228411 - protein, 70 aa, Glycine max
  unsure (1)..(70): unsure at all Xaa locations
  Clone ID: PAT_MRT3847_48283C.1.pep
NGHEQVTENTENHKHRLRARSALVKVFKQRRSMNTSLSALLPLXPPTSXSFKFSWFVRYINDTVVVVGPK

SEQ ID NO: 228412 - protein, 88 aa, Glycine max
  Clone ID: PAT_MRT3847_48284C.1.pep
KQTSLIARSPTDGRVNHVNWPIISNPTRRVIRKQFKLIKYLLKLHTNVHTTVPFQNNNIHLHVLFDWGNGKTVPSRKNSPNLKNRSPH

SEQ ID NO: 228413 - protein, 73 aa, Glycine max
  Clone ID: PAT_MRT3847_48285C.1.pep
KRFFGGPPFFQKVNNPLLRVLCQKIILKQKFLFPLFMENLGNHLKGPMKLVSISAPRFFFFFHEDKIRPSSPA

SEQ ID NO: 228414 - protein, 39 aa, Glycine max
  Clone ID: PAT_MRT3847_48286C.1.pep
NFTIIDPKSQNKSLFSLSTRYLIQIRNSSSLTDPLITED

SEQ ID NO: 228415 - protein, 59 aa, Glycine max
  Clone ID: PAT_MRT3847_48287C.1.pep
KNILCFINLYLKKYINIFYDLIEDNSRNWVYGLRFSGKICSRHSPFIACCLAPLPLNKA

SEQ ID NO: 228416 - protein, 94 aa, Glycine max
  Clone ID: PAT_MRT3847_48288C.1.pep
ITPLLSSFPYIAKPSSWLKLASYPSMLPPPTLLYLSFPLHLLDVDFQASFTLNCFINDPEAELCCIVFFTPPLAYISQKEKTTKKKKSSLFYTL

SEQ ID NO: 228417 - protein, 116 aa, Glycine max
  unsure (1)..(116): unsure at all Xaa locations
  Clone ID: PAT_MRT3847_48289C.1.pep
PDSEESSEYDSEDGYADAFIVDXSDTDMYPSSPIPNSGVVIEEIMDDDKPKKXDDPTKKLKKKKHVAQLKEKDNKSSELPIVAKGDTAPVVESEDEDGFQFPLQRKVCLSLRQKQK

SEQ ID NO: 228418 - protein, 173 aa, Glycine max
  unsure (1)..(173): unsure at all Xaa locations
  Clone ID: PAT_MRT3847_4828C.1.pep
MGLVCSNREEMQKMKNLGSIGSSGRLSAEEYEDEEISKLAISTFQSKEEEIERKKTEVREKVELQLGRAEEETRRLAHIWEELEVLDDPMRKEVAMVRKKIDLANKDLKPLGLNFQKKGEEYKEXALEAFNEKNKEKAHLVATLVEMLTESERLRMKKLEELCKIIESMSLKQ

SEQ ID NO: 228419 - protein, 123 aa, Glycine max
  Clone ID: PAT_MRT3847_48290C.1.pep
EYVSAIVFFLVINAIACSYAAASLVITLMARSNGRKNDVTLLGLTALDLVMMALLFSANGAACAVGVIAQKGNSHVQWMKVCNVFDAYCRHVTAALVLSIIGSTVFLLLVLLSVLKLHYRTGI

SEQ ID NO: 228420 - protein, 94 aa, Glycine max
  Clone ID: PAT_MRT3847_48291C.1.pep
FHRVLFSTWKPTKQLLSWQFGMKWKKLALKILYHACLFPTFLNSLRLGYDFGEIRGHIYEILNKERVKREMKLVDNNETLFLFAGRYDDSRARA

SEQ ID NO: 228421 - protein, 97 aa, Glycine max
  Clone ID: PAT_MRT3847_48292C.1.pep
SRLRSCQSSVSSREASLIHVASRCFIQCFSNSNVVSSRSYVVLVVIIGVGIGHHMSSGVMMISEGVIPEPNVEHGTLMFILSSEKTIKVNGSYVPHH

SEQ ID NO: 228422 - protein, 67 aa, Glycine max
  Clone ID: PAT_MRT3847_48293C.1.pep
DYLRKKTVVYNTPHAHEVVMATDFQNSTGSYQTRCMHIPLSKVQGSVRSCKTGSCFFFIRAACINII

SEQ ID NO: 228423 - protein, 156 aa, Glycine max
  unsure (1)..(156): unsure at all Xaa locations
  Clone ID: PAT_MRT3847_48294C.1.pep
MKLTAFFVARIXLGAWPCHGAGYQRFPLXMKTGYGERTSDVKCPSVKLAVEAHHIRAXFKTFLEECVEPTNDYISGETFRSDSKTDNQRAXFFLLAKRKVHHNDIFIFRHRLTPDFSNIPYXKKHGYGGGRNFNENLFWMNGVNKGRTLRAFPRDF

SEQ ID NO: 228424 - protein, 79 aa, Glycine max
  Clone ID: PAT_MRT3847_48295C.1.pep
FFFFFFFFFLNSQLVFNSYWQNYPVKIFVVHLQTFFKKRILEALPAHPKLCINEVLYPSMIKLDGNYDVPQNVSPLKSK

SEQ ID NO: 228425 - protein, 34 aa, Glycine max
  Clone ID: PAT_MRT3847_48296C.1.pep
LKYLKLFVKDTLMLHPPTPLLLSREFLQAFYING

SEQ ID NO: 228426 - protein, 60 aa, Glycine max
  Clone ID: PAT_MRT3847_48297C.1.pep
LVIIGKKIFIEGFKGSKKCFPEKGKKFFSKVVIFKKIFLGKLNFYHGGGVLKRDEITPFC

SEQ ID NO: 228427 - protein, 85 aa, Glycine max
  Clone ID: PAT_MRT3847_48298C.1.pep
VYLLLVRTDHVAASPVEWKHIETLICFLILLEIFIRFHRTLKKVSSIHSCILYLYDGCGYYFIVVFPLFYFSHKYISIYSCFLDG

SEQ ID NO: 228428 - protein, 79 aa, Glycine max
  Clone ID: PAT_MRT3847_48299C.1.pep
AGETRADPRARAYWIFWTRWYAIAFLKPYSSSLIHQHCHQPQPPHKVTGTKEVHHHVGRRKGGEGVGSLFCRRCNQIQN

SEQ ID NO: 228429 - protein, 50 aa, Glycine max
  unsure (1)..(50): unsure at all Xaa locations
  Clone ID: PAT_MRT3847_4829C.1.pep
GGXXXXXXFCTKTTCLIIISIRQDDHLTCYEHKFNIPLKPYLLNTTLLTS

SEQ ID NO: 228430 - protein, 94 aa, Glycine max
  unsure (1)..(94): unsure at all Xaa locations
  Clone ID: PAT_MRT3847_482C.1.pep
METMLPPNQAEEAIVTTSLNETESEVGMREEEKELQQQDHSMFNIKSFLWHGGSVWDAWFSCASNQVAQVLLTLPYSFSQXGMLSGILLQIFYG

SEQ ID NO: 228431 - protein, 64 aa, Glycine max
  Clone ID: PAT_MRT3847_48300C.1.pep
PLFLPVAVMNKISCFDSSHRVIKLLMVSIDLGFPSITVRLRCFSRHPIAFGSPESHLVVGSSSS

SEQ ID NO: 228432 - protein, 84 aa, Glycine max
  unsure (1)..(84): unsure at all Xaa locations
  Clone ID: PAT_MRT3847_48301C.1.pep
ARLSVPPITTTRFIKSTKAMEDHIAVAVWTVTAYARTYEVPWLRITPLTFTERARASIESAGRXRLTFYQLSLTPISGQNTVLL

SEQ ID NO: 228433 - protein, 112 aa, Glycine max
  unsure (1)..(112): unsure at all Xaa locations
  Clone ID: PAT_MRT3847_48302C.1.pep
VTVWGSLSRKKSGGNGQLLDASNIMELVENQQVFTTLVDHKFXDKDAKLSVKHLQPAXSHSTNPHSHHIYFEEKVSKSELKEVLSDILLGMAAGLKRDPIVILRIDGEDLLE

SEQ ID NO: 228434 - protein, 101 aa, Glycine max
  unsure (1)..(101): unsure at all Xaa locations
  Clone ID: PAT_MRT3847_48303C.1.pep
CFFFSPVSFWVSALLFGFVACPVFLGSPFSVGGGPPCRVGGVRGRPFSRSWVLLGFPCFWPPGVVGLXLSPXXPFLRVPCEICFKGLAPKXPWPQGGRRLV

SEQ ID NO: 228435 - protein, 127 aa, Glycine max
  unsure (1)..(127): unsure at all Xaa locations
  Clone ID: PAT_MRT3847_48304C.1.pep
LPNRLELEPHALPLESDRQKSGFGPSRGGTSTSPXDSGSMKIPPQELKTAIIKGKRDPYNDSTYYSNAAAAVLHENRQDLMLLTTSGADRDGCFIGISWRRTSSRKAKPLEPPKRVNEKAPENEGDD

SEQ ID NO: 228436 - protein, 132 aa, Glycine max
  unsure (1)..(132): unsure at all Xaa locations
  Clone ID: PAT_MRT3847_48305C.1.pep
QNWCLSRDFQRAAWLFNPHIVEMLFGLNQELGADVFRAANAQRMHMHFVSNPRVYGFVTXKITCCGQGPYNRVDLCSTASNLCPNRDLYAFWDPLHPSDKASRIIVQQILRGTTEYMHPMNLSTIMAIDSRT

SEQ ID NO: 228437 - protein, 84 aa, Glycine max
  Clone ID: PAT_MRT3847_48306C.1.pep
MEYQRQRSHQSQGRSRWVPASYFSVESLLLLSCLTASLLILPLLLPPLPPPPFLLLLLPIAILLVLIISAFMPSNVRDITHTYM

SEQ ID NO: 228438 - protein, 61 aa, Glycine max
  Clone ID: PAT_MRT3847_48307C.1.pep
VEFLPQPRSPLLEINRVITLTSFYKLSRKKDGGTQRHRCRPPNLLCRYTLRGNIRKIIIFF

SEQ ID NO: 228439 - protein, 73 aa, Glycine max
  Clone ID: PAT_MRT3847_48308C.1.pep
KIITPNKDNAKCYGREMGRKSGMGMMGKLKYTTLFLLLRIATLTVGINDREAMAYTHSHWWDLTQRFIFSYHD

SEQ ID NO: 228440 - protein, 80 aa, Glycine max
  Clone ID: PAT_MRT3847_48309C.1.pep
GKRYSRRVWTHVIPPRCPEEFRLRKTKNDQLKPEAKAKGEKISPKRQLQGSKPGFMVEGATLEPVTPISYDVVNAPKGGY

SEQ ID NO: 228441 - protein, 64 aa, Glycine max
  Clone ID: PAT_MRT3847_4830C.1.pep
THPKPSSFSSAFSGLSSFVYGSDGHGSDGSEHRCLTAESAIAITIFQNENGLALERSSSSLSRD

SEQ ID NO: 228442 - protein, 33 aa, Glycine max
  Clone ID: PAT_MRT3847_48310C.1.pep
MKKFTSHEFPKRCYFIVMRAKSNLSKHSISVCS

SEQ ID NO: 228443 - protein, 76 aa, Glycine max
  unsure (1)..(76): unsure at all Xaa locations
  Clone ID: PAT_MRT3847_48311C.1.pep
HLXXALXXSSYRSVQLCHXDXLPCXSLSSGRSTEHSCISGSCDMXSPYFGYGNILHWVHYFTGXHSIFSKARIHKP

SEQ ID NO: 228444 - protein, 65 aa, Glycine max
  unsure (1)..(65): unsure at all Xaa locations
  Clone ID: PAT_MRT3847_48312C.1.pep
MASAEGERWVGLATDFSQGSRXALQWAATNLLRAGXHLLLLHVIKEPDYXQSEAILWESTGSPLI

SEQ ID NO: 228445 - protein, 94 aa, Glycine max
  Clone ID: PAT_MRT3847_48313C.1.pep
KIDSYGHRLILGAELVCMMHSLGQPPTDEELETLLPEVACVCDAPMDLEEFTEMNTRDVDPDEDLENREDALCIVDLDGNGCITAEELKMVMGS

SEQ ID NO: 228446 - protein, 77 aa, Glycine max
  Clone ID: PAT_MRT3847_48314C.1.pep
PHQPPDQFYQSWRKRKECLPVLYQRQRARCWKPLYPENFDSVFNPKKVYDLKKAENGPSGSDESLFTTERARNGRVG

SEQ ID NO: 228447 - protein, 61 aa, Glycine max
  Clone ID: PAT_MRT3847_48315C.1.pep
RTCLPSNMYLHMISHNLTRSIIVHYNNHKHFIIIVVVASPSYNKSSLSIQTQPPILSFSQP

SEQ ID NO: 228448 - protein, 122 aa, Glycine max
  Clone ID: PAT_MRT3847_48316C.1.pep
CSVHDVKLLRDRKVITVEKERTDKGKKKKIMSNKDLMNLFLSITEEFPEVEIQVDSRFRHVIEKLNSYPTQEDRSMATCWKIIAYGVRGPSKIMWHFFRRFLTWIWCKWIEAYGILKRVYIP

SEQ ID NO: 228449 - protein, 94 aa, Glycine max
  unsure (1)..(94): unsure at all Xaa locations
  Clone ID: PAT_MRT3847_48317C.1.pep
ASXTLISDQEDAKPYARCPKKKRPLAERNTTRTEGTDKTRATEQPKQKQTRDHPQEKPQAERKGEEGGPRGQGETKATTGATATERTGNARHTA

SEQ ID NO: 228450 - protein, 344 aa, Glycine max
  Clone ID: PAT_MRT3847_48318C.1.pep
GLHYKKHLDGFSVMFVIIVLYVLFITILQNLVSLPYWGRMFAFVILMVLLATPFGIAIKAHWEESRKFSQSYTIGRGSSTNKGTTSSSHSASVDQVEYHELPSDEGQEQVTSDDKLPREEEKNLLQAMCTVDFWMLFVIMISGLGSGLATINNMSQIGQSLGYSAIEINNLVSLWSMWNFLGRFGGGHVSDYIMHRKGWPRPLLMTVTLGIMILGHLIIASGFQGNLYLGPVLVGICYGAHWSLMPTITSEIFGVKHMGTIFNTIAAASPLGSYILSVRVVGYIYDKQADKEDHSCFGINCFMPSFFILAAVAFLAFLVGLALFFRTRRFYKQVVLRRLKHYAR

SEQ ID NO: 228451 - protein, 98 aa, Glycine max
  Clone ID: PAT_MRT3847_48319C.1.pep
PRGFGPPPDCLLLTEAGRRLAAPTETAPPPLAPTEFVKRNLLGPPPQVTGCPLKFLRLRRSRGNSPSGGGALVLFPLKTKEGKGKKKKKKKKKKKTPP

SEQ ID NO: 228452 - protein, 90 aa, Glycine max
  Clone ID: PAT_MRT3847_4831C.1.pep
DILFLDQNLFCNNIFSKYEVCTFSKGKETMKRLFLYVTRVDLFLKNLCIMNSWNITSCCVHLVMNFFSEIRHFHIGGQLDIFSDINITNF

SEQ ID NO: 228453 - protein, 93 aa, Glycine max
  Clone ID: PAT_MRT3847_48320C.1.pep
IIGVKHMGPIFNTIAAASPLGSYILSVRVVGYIYAKQADKEDNLCFGIDCFMPSFFILAGVALLAFLVGLALFFRTRRFYKQVVLRRLKHYAR

SEQ ID NO: 228454 - protein, 65 aa, Glycine max
  Clone ID: PAT_MRT3847_48321C.1.pep
MKKSVLAASVAAAASATAASLSSSSHQDERRSRENTSSQNSSSTEKFAPRFDGLRFIETLVTAHR

SEQ ID NO: 228455 - protein, 40 aa, Glycine max
  Clone ID: PAT_MRT3847_48322C.1.pep
IRLEHVVNTPMRLECAIKSCDSQLLSSGSIDLPILYYNIL

SEQ ID NO: 228456 - protein, 40 aa, Glycine max
  Clone ID: PAT_MRT3847_48323C.1.pep
ASRANARELTKLLSHPQSLHQSALRYILKRLLHTVQTPAN

SEQ ID NO: 228457 - protein, 70 aa, Glycine max
  Clone ID: PAT_MRT3847_48324C.1.pep
WLDWLMMEPNGISPAWKEKNLYHRPGIFPKNRKFPTIPGRKEKVNPSRPLNQPNGFLTPGETIIIKGPVL

SEQ ID NO: 228458 - protein, 60 aa, Glycine max
  Clone ID: PAT_MRT3847_48325C.1.pep
SSERIVLSEMRGDNSRIDWCQSAATRHRRRKCPATTSINCGVTMATEEALRQGDATYNNE

SEQ ID NO: 228459 - protein, 128 aa, Glycine max
  Clone ID: PAT_MRT3847_48326C.1.pep
PTRPPTRPPTRPNRDASEITAEQVRHTKQSTDGEIPKSETKGVPEDKALQTILDDVTDGNEAVDQSRQEARQPEPKFTEKFNEEVQTTPYDTEETSEINATNDTEKQEKVQASHTKEKLGIEDEGIFY

SEQ ID NO: 228460 - protein, 89 aa, Glycine max
  Clone ID: PAT_MRT3847_48327C.1.pep
NPLWGKWWPIFQGWAFSRWVVFPEDRGLPLGTSFPFSEKTWWTASWTATPSFFTFKTLFSFGRNSGFHFSQRRADPGFFFFFFLFSEKE

SEQ ID NO: 228461 - protein, 36 aa, Glycine max
  unsure (1)..(36): unsure at all Xaa locations
  Clone ID: PAT_MRT3847_48328C.1.pep
XMGIHHASGTKARKKLLHLXSSVLTTVGIFILPHHA

SEQ ID NO: 228462 - protein, 258 aa, Glycine max
  Clone ID: PAT_MRT3847_48329C.1.pep
MAINHETWAFIFGLLGNVISFMVFLAPLPTFYQIYKKKSTDGFQSLPYIVALFSSMLWIYYALVKKDASLLLITINSFGCVIETIYLAIFLIYAPSKTRLWTIKLLLMLNVFGFGAMLLSTLYLTTGSKRLSVIGWICLVLNISVFAAPLCIMKRVIKTKSVEFMPFSLSFFLTINAVMWFFYGLLLKDYYIALPNTLGFLFGIIQMVLYLIYRNAKPQGLEEPTKVQELNGHIIDVVKPNHVTKNGPVPVIETASNV

SEQ ID NO: 228463 - protein, 102 aa, Glycine max
  Clone ID: PAT_MRT3847_4832C.1.pep
MATEGLEDTKPPLQDDDRAKSEIPEKDASSDDAAAKSRDANAGDKDGASDNQEVEEKDAAEEKKEEIDEDEEEEEDEVEEKEKGKGKKSKKDPVTPAPSERP

SEQ ID NO: 228464 - protein, 165 aa, Glycine max
  Clone ID: PAT_MRT3847_48330C.1.pep
MIEPYNKLVKLAARAFYDDLTSKGDNQPKTGRSDNRGIAVVVLDALTRRQWVREEDLAKDLKLHTKQLRRTLRFFEEEKIITRDHRRETAKGAKIYSAAVAATADGQQTAKEGEEKVKLHTHSYCCLDYAQIYDVIRYRLHRMKHKLKDELENKNTLQEYICPNC

SEQ ID NO: 228465 - protein, 120 aa, Glycine max
  Clone ID: PAT_MRT3847_48331C.1.pep
MATDTSAAASIPSFTGLKAGASEGSADASNVSAPQATRFCGMKACLKDVGIDVVATAASAVLTSNAMAIDVLLDTDDGTVDFSPNSFSKAPGENIVVKNNASFHHNVAFDEDDIPNDMDA

SEQ ID NO: 228466 - protein, 47 aa, Glycine max
  Clone ID: PAT_MRT3847_48332C.1.pep
FSTQPDKILDYIYYYKYCTELKGKLKSQMKNMINFIKIKSMQENVPS

SEQ ID NO: 228467 - protein, 432 aa, Glycine max
  Clone ID: PAT_MRT3847_48333C.1.pep
MKENGKKMIRQWVREEDLAKDLKLHTKQLRRTLRFFEEEKIITRDHRRETAKGAKIYGAAVAATADGQQTAKEGEEKVKLHTHSYCCLDYAQIYDVIRYRLHRMKHKLKDELENKNTLQEYICSNCGKRYNALDALRLVSFEDEDFHCESCNGRLEVESDKIAAQERGDGDDNARRRRREKLKDMLQKMEVQLKPLMDQLSRVKDLPVPEFGSLQAWEARASAAVRAANGDINAGDSKISQPGYNGVPYSGDTKVVVDFNTEGKGEGVKSETDSTSLKVLPPWMITSGMNLTKEQRGEVKQETKMDGTSTSTAAQYTDDKKSTIGHDNNQNIQDEYIKAYYAALLKQQHELEEAAKKQLSNTLAAANPSSSTSIRQVGMKSKREEDDDDTEWEEAPIAGNGNGGYTVDLNVEAEEVAAEDDDDDDDVDWEEG

SEQ ID NO: 228468 - protein, 74 aa, Glycine max
  unsure (1)..(74): unsure at all Xaa locations
  Clone ID: PAT_MRT3847_48334C.1.pep
IGXKLXSXMVSKPXAHXEXXXYXSRLATFRFQXVYNIXXXVXXSXLPYHLLHXKXKFIXXXCXSLLVVYFVVQV

SEQ ID NO: 228469 - protein, 64 aa, Glycine max
  unsure (1)..(64): unsure at all Xaa locations
  Clone ID: PAT_MRT3847_48335C.1.pep
LSKGLAFKRERALVEHILKAKCXRRSARGLSSKXNAKRAKTKPTRKSRQERVQQKRQSQLGDEE

SEQ ID NO: 228470 - protein, 71 aa, Glycine max
  Clone ID: PAT_MRT3847_48336C.1.pep
SARLLGLSGVYTVGSSYKVLNRHFSGENNYEVFKELWKLKLPSKVSHFDWRLILDRLPTKVNLRRRNVDLN

SEQ ID NO: 228471 - protein, 190 aa, Glycine max
  Clone ID: PAT_MRT3847_48337C.1.pep
KIKKKKKKKRKKKKKKKKKKKKKKKKKKKKKKKNKIKIGGDRFFGSRFFLPPCLRLFLFFFSVFGGGSLPFFFRGVLLVNPWLSPAFCLCTLFPFCRVAFLPRGPFPFGLFDLFVLAEWPLRPPLPPPLMVGGFSVSPPLALSLCPPLFACSFRFLPSFPRHACPLFPFWLLCWGPLLGFGFMVCGAFFP

SEQ ID NO: 228472 - protein, 150 aa, Glycine max
  Clone ID: PAT_MRT3847_48338C.1.pep
GFRLENGSRTPASVAVSDIPSPSNSTEGNSYNRGKRFFFGVAVAFAGPAFFCVVLVILGYVSFLKWRGVRKLQKSFRTVGCCPKEFGYKEVKLATKGFHPSRVIGKGSFGTVYKALFESSGTIAAVKRSRQYSHEGRTEFLAELSVIAGL

SEQ ID NO: 228473 - protein, 109 aa, Glycine max
  Clone ID: PAT_MRT3847_48339C.1.pep
LPNVLPLYICITGLNFNKPHGYYTYQSASAAITTDNAGITKTLPHSEINDYDFEPCGYSMNSDEGTGATTIHITPQDGFSHANLETVGTDFKQLNHNEMVNKVSACSLP

SEQ ID NO: 228474 - protein, 158 aa, Glycine max
  Clone ID: PAT_MRT3847_4833C.1.pep
RDRLKTVTEQCVQMAGLLNELRSRVNEEDNARISDLLERVEENISDIRQTSAPSIPDTEAEGSKGSREYGTQNTPLPKLNQVNTDSLDLLNENLQKNEQARATGFIGQNSVLQWLRTISSLQTDRSEEDSLKSVPEHRPSTEAEGVSFFTFWMDGDNV

SEQ ID NO: 228475 - protein, 122 aa, Glycine max
  Clone ID: PAT_MRT3847_48340C.1.pep
SDEGGNWSLGQQQLFCLGRVLLKRNRILVLDEATASIDSATDAILQQVIRREFAECTVVTVAHRVPTVIDSDMVMVLSYGKLVEYDDPSKLMETNSWFSRLVAEYWSSCRKNSSPNINRQQH

SEQ ID NO: 228476 - protein, 55 aa, Glycine max
  Clone ID: PAT_MRT3847_48341C.1.pep
GITNSLDFHRKVYTHKLAFEISSLDGNCLLFLFLGSDCEDSCPFDFSRTWFEGNF

SEQ ID NO: 228477 - protein, 65 aa, Glycine max
  Clone ID: PAT_MRT3847_48342C.1.pep
LIYMGANFKGVSLTAPRIKKHYTKQPVWSGQQKGPSMRKRRPYLPIKKQYNMKAGVCWHKRSPDN

SEQ ID NO: 228478 - protein, 145 aa, Glycine max
  unsure (1)..(145): unsure at all Xaa locations
  Clone ID: PAT_MRT3847_48343C.1.pep
SFSFEQTLTAKYAGGATCTHMCVXFSTSYIHENLVEQYIYFYYNPIMASTAPPAMQTFSLFDHLPEEMKMECFSHLKEKELCRSTAVCRRWNNLATDNALWPEYVKYFDPTAAKATQVPTPRVCHSAVVYNNKMIIFGGHNPMPG

SEQ ID NO: 228479 - protein, 131 aa, Glycine max
  unsure (1)..(131): unsure at all Xaa locations
  Clone ID: PAT_MRT3847_48344C.1.pep
CHGTGGNIRQLAQTEAVPAPKKLLTTEEWEKNPKIPRLKKKTMNRIGARGGTLPHEGRRYRNLAGNKGTKREFSATRHQDIGXATKTERAGEKKALQRAKAEEAGEKHNDXNPETLDTNPQLSIHPQQTPI

SEQ ID NO: 228480 - protein, 67 aa, Glycine max
  Clone ID: PAT_MRT3847_48345C.1.pep
FRVSAMQAVIMVVNLLWVYVMYVRFSCYYIYLESGLCVIFRTGFFVSIIGGCLFPVFYKHGPYSYSF

SEQ ID NO: 228481 - protein, 79 aa, Glycine max
  Clone ID: PAT_MRT3847_48346C.1.pep
IQTHHLKVKTQTKEAQLGACYNMKRLTSLFITNLFYYLLKEEIPRPKRVRNDRLHIFLHPKINTGSQHLVFIRARKCFF

SEQ ID NO: 228482 - protein, 99 aa, Glycine max
  unsure (1)..(99): unsure at all Xaa locations
  Clone ID: PAT_MRT3847_48347C.1.pep
EGKPVAADSSFFSHQLFLTYGGSSPXGEQPPLLLHKICHYRXLFFIIYILXETIKVLWPHSFPNISIRKLSKVACXLHFPRTIFSSHSSNYADLHPNIS

SEQ ID NO: 228483 - protein, 40 aa, Glycine max
  Clone ID: PAT_MRT3847_48348C.1.pep
ALSHPYSITNPVTFKHTLCAASVSLTHPTLYSHSLTPKMH

SEQ ID NO: 228484 - protein, 84 aa, Glycine max
  unsure (1)..(84): unsure at all Xaa locations
  Clone ID: PAT_MRT3847_48349C.1.pep
MDTALMEEHNILNDHDHNNKSDAHLTSAAAFVHGRIQDPRYDACTICLETFYDIHPFTLTNFNHDFHLQRILEXRQRTFQCPIY

SEQ ID NO: 228485 - protein, 82 aa, Glycine max
  Clone ID: PAT_MRT3847_4834C.1.pep
GGPKKKLGFKRFFFQKVFLWVELILAKIPSLKVSPSRGHVTLKILWTHYPNNLAGGPTQGPPLNLYLAGFLGPPTFIFFRRG

SEQ ID NO: 228486 - protein, 157 aa, Glycine max
  Clone ID: PAT_MRT3847_48350C.1.pep
PRVRYKPVPKPFPGYKPIPKTAPVPVYKPIPKPVSKPIAKPVSCQAYTNPVTVPVYKPIPKPVYKPIPKAVCKSIPKPVSEYKPIPKAVSDSADKPITKPEAKPIPNPMFKPISKSNPLYKPIPKSNAEFEPIPKPLAKPIPKSVSMSEAIPKPFPI

SEQ ID NO: 228487 - protein, 64 aa, Glycine max
  Clone ID: PAT_MRT3847_48351C.1.pep
SCMSLVMRSQSLTYGPVGTALYISSWPSYALGSYPLSLVVSVLIVDSDMQRLMLCPRSKQCRLV

SEQ ID NO: 228488 - protein, 264 aa, Glycine max
  Clone ID: PAT_MRT3847_48352C.1.pep
AGVFAETAWAGAAYYLLLFMLASHIVGSFWYLLAVERNDFCWQKACSGNGYNKNFLYCGNQYMEGYSAWQNRSKDILTSQCSVDNDNSPFDYGIFKQALSSRIVSSKKFFSKYCYCLWWGLQNLSTLGQGLETSTYTGEVVFSIALAIAGLILFALLIGNMQTYLQSLTIRLEEMRVKRRDSEQWMHHRLLPQELRERVRRDLLGNTFWFPPGRHLPSLKGTKIGGLGPPFFFFLFLLFLYFFFFFFFFFFFFFFWWGFFFFFF

SEQ ID NO: 228489 - protein, 31 aa, Glycine max
  Clone ID: PAT_MRT3847_48353C.1.pep
YQQENLSSYKFFRILWHHSYNKLTIETNLLE

SEQ ID NO: 228490 - protein, 67 aa, Glycine max
  Clone ID: PAT_MRT3847_48354C.1.pep
KKCIIINVIIQVCMMSRWGMGFYVKIMSLCGYFKRIMLCGWLNRIKCGSNNFCVNLGLKFMKMGMMM

SEQ ID NO: 228491 - protein, 354 aa, Glycine max
  Clone ID: PAT_MRT3847_48355C.1.pep
MERENWREHINSNGNYYDDDGVERSPAKPSSLSSSPPRLAYIDHRVSKFDTLAGVAIKYGVEVADIRKMNNLVTDHQMFALKTLHIPLPGRHPPSPCLSNGSSTPGHGNYDHSPPSQARHDLLDSFESLRIKSSERKVSPAMNSLQGYYGLKGTPSPSEDGPFPRNLPMSDRRLSRHRKSKSLVNVILEEIMEKSDDAPAAETREINSNKWNDKLGQGHQKSVADFTRIPELLLREDNSSSGVLSSRIGKGLALRQKAANRTAATIDSEPIGLNPAVLGMGDTSLNDGSYGVRKSSSTSCLQDQDTSGSSSIWPTSMWSLKPDLQALSSAAIGKPIFDGLPKPITGRKNKAALD

SEQ ID NO: 228492 - protein, 113 aa, Glycine max
  Clone ID: PAT_MRT3847_48356C.1.pep
MFRKRHILSSLARELLALQPLFLLFLFSLHHNTVQCQGRLSKHVSSEPPSPSRPSSAAPSSSGYKDDPRKIILSMVLGAVTGLVSSALFALVVRCVVQYLNRTPILKGPVIFS

SEQ ID NO: 228493 - protein, 153 aa, Glycine max
  unsure (1)..(153): unsure at all Xaa locations
  Clone ID: PAT_MRT3847_48357C.1.pep
MERENWREHINSNSNGNYYDRFVCDYDNGERSPAKPSSPPRLGYIEHHVSKFDTLAGVAIKYGVEVADIRKMNSLVTDHQMFALKTLHIPLPARHPPSPYLSNGSSTPGHGNSDHSPPNQAHHDLLDSFQSLRIKSSERKGLPAMNSLXGYYG

SEQ ID NO: 228494 - protein, 83 aa, Glycine max
  unsure (1)..(83): unsure at all Xaa locations
  Clone ID: PAT_MRT3847_48358C.1.pep
MPNHIDETHDFLLTAIQKDAESVHITRXRDVVTFKVRCAKYLDTLXCVFDPKKADTLSQSHPPSFNVQDLSRYTAIDQQEPIQ

SEQ ID NO: 228495 - protein, 56 aa, Glycine max
  Clone ID: PAT_MRT3847_48359C.1.pep
YTIMRFSRVYESIFHMAATALGNLEHQLYMNDLVDSLLELVFSFGFYSRSYSCILL

SEQ ID NO: 228496 - protein, 131 aa, Glycine max
  unsure (1)..(131): unsure at all Xaa locations
  Clone ID: PAT_MRT3847_4835C.1.pep
MADETQNRYESSEVEVQDRGAHDFLAMKKDEEDKPHAYEEVIAAEVEKVTVXTNDRXQRRLLKKLHRSDSPSSSSSEEEGEHGXNGRRRRRHRKXLKEKIVEKIEGDHHHHKDEDTCVPDEKVDVVEDSHA

SEQ ID NO: 228497 - protein, 83 aa, Glycine max
  Clone ID: PAT_MRT3847_48360C.1.pep
SRIYISLFSHCESWRTQRMFLNRFSFLEIAKTFVDSELGVSGHSGVTGSGGSIVLDQHWQWISIGKLNWPECCITSVETTCSY

SEQ ID NO: 228498 - protein, 53 aa, Glycine max
  Clone ID: PAT_MRT3847_48361C.1.pep
KLIYAFSSELSVYSSILNNIGMFIKLYLIKTIYNHRSTPLIQYSIVLTAFTKH

SEQ ID NO: 228499 - protein, 38 aa, Glycine max
  Clone ID: PAT_MRT3847_48362C.1.pep
LRLVWSLNYYMIFLVQFDHNFLLLQSCHNISVRKQLSS

SEQ ID NO: 228500 - protein, 37 aa, Glycine max
  Clone ID: PAT_MRT3847_48363C.1.pep
EGTFKVITFEEHQQRLDCVLHRPILQLFSDVWSYHGH

SEQ ID NO: 228501 - protein, 80 aa, Glycine max
  unsure (1)..(80): unsure at all Xaa locations
  Clone ID: PAT_MRT3847_48364C.1.pep
MATLMLKIKDIXDAMANTQKNNSTAHHLGLLNSKLAKIAGVLLTPSXKGAGGAGESFDLTTCGDSRSGLGGFPSVGKSTL

SEQ ID NO: 228502 - protein, 86 aa, Glycine max
  Clone ID: PAT_MRT3847_48365C.1.pep
HQRDAAKRECHDQTRGTSSTVGSDALPSLFSHISIATCRNSHNHFNWHDQTMLYHQYHWKQAGKKNQPYDFMWNRTWDNNQREHYY

SEQ ID NO: 228503 - protein, 180 aa, Glycine max
  Clone ID: PAT_MRT3847_48366C.1.pep
MEMEVELSSAQPKMGSQLISQPQRCGKGGLVTMPFIIASSRIGSRATLGLLPNMILYLMGNYNLHLGKATKILLLSVATTNFMPLPGAFISDSYLGRFLAVGLGSFITFLGMALLWLTAMIPQARPPACNSQSERCESATPGQMAMLISSLALMSIGNGGLSCSLAFGADQVNRKGNPNN

SEQ ID NO: 228504 - protein, 118 aa, Glycine max
  Clone ID: PAT_MRT3847_48367C.1.pep
IPCCTHTSEQIKSISTFSSLFFSPYSLSFFKKLLTNSHSINTKFFTFNIFNPFQPNIILQKFSNISSYNILQLTKFFNNLFPTSLSFFHTLYSSQIHILYIINSQNNHHFHTSFIFNI

SEQ ID NO: 228505 - protein, 47 aa, Glycine max
  Clone ID: PAT_MRT3847_48368C.1.pep
ESSAVFKGLQPVCVRVCVQIKKQSVVLYSLDCLQAIRVYVCGWKSKP

SEQ ID NO: 228506 - protein, 58 aa, Glycine max
  Clone ID: PAT_MRT3847_48369C.1.pep
CSRHYVWFPPRMCMQAQFLIGVSQRIIDAVHGSVFGDVKCPVRVRVFAWDLRLYFVGY

SEQ ID NO: 228507 - protein, 1034 aa, Glycine max
  unsure (1)..(1034): unsure at all Xaa locations
  Clone ID: PAT_MRT3847_4836C.1.pep
LHQLWFGRVIVSDCEGQNAGSKTSILIAAADPALLASPCHHSCGXHLVAGLPALEPYARLFHRYYXIATPSATQRFLLGLLEAPPSWAPDALDAAVQLVELLRAAEDYASGIRLPRNWMHLHFLRAIGTAMSMRAGIAADAAAALLFRILSQPALLFPPLRQVDGVXEVQHEPLGGNISSYKKQIEVSAAEASIEATVCGIASMTWCPXVAVLIVSVCIICQDDIRPHPTLSLIVEIPQIQRVHQIQPCVLSXNVSLSLRKVQQYLPXRGSPSKACIMKILIFTMEAILERTVLRFSIISXTMTHXIASRETHRCASNNLAQQGLRTIVDALFNVVSASPTKAATALVLQAERELQPWIAKDDDSSQKMWRINQRIVKLIVELMRNNEKESXNRKLKKQGXPVAAYDSYVLAAVCALACELQLFPLISRGNNHLASNKVQDIAKPVRLNGSSHELRNGLDSAVRHTHRILAILEALFSLKPSSVGTPWSYSSNEIVAAAMVAAHVSELFRRSKACMHALSVLIRCKWDNEIHSRASSLYNLIDIHSKAVASIVNKAEPLEATLIHAPIRKDSLVCVGVKRQNQCESSSCFDAGRTSVVPSEDSFPSKLDHNSNKTPCPKGASDYTLGKGVTGFSLDASDLANFLTMDRHIGLNCNGQIFLRSTLAEKQELCFSVVSLLWHKLIASPETQPCAESTSAQQGWRQVVDALCNVVSASPTKAATAVVLQVQNSSYHEWFHKITFGTNIELLFCLARILSFFYPKKYIISXQTSKIYELSFLIPLRIGFYCLESSIADAENLIYPMFICCIFFYXILLFPTFHMFSPARGLFTCQAERELQPWIAKDDDSGQKMWRINQRIVKLIVELMRNHETAESLVIVASSSDLLLRATDGMLVDGEACTLPQLELLEATARAVQPVLEFGESGLAVADGLSNLLKCRLSATIRCLSHPSAHVRALSISVLRDILHTGSIRCSPKPRRLNGTHNPSYQYFNLDAVDWQADIEKCLTWEAHSRLSNGLSINFLDIAAKELGCTISM

SEQ ID NO: 228508 - protein, 118 aa, Glycine max
  unsure (1)..(118): unsure at all Xaa locations
  Clone ID: PAT_MRT3847_48370C.1.pep
MSWGIPAPVTVAAAAKGPFVPPEDLLRSKGEIGWKGSAATSAFKPXEPRKVMEMPLGALTTSIPDAPTGKQSRAPLDIDLNVADERILDDISSQTYARHTDSASLATDDHDPVCSKMS

SEQ ID NO: 228509 - protein, 46 aa, Glycine max
  Clone ID: PAT_MRT3847_48371C.1.pep
FVTLFKKKEWSPKKIKGSFHPKSSSLGSSVGLGKPHFIVKKGGGVS

SEQ ID NO: 228510 - protein, 108 aa, Glycine max
  Clone ID: PAT_MRT3847_48372C.1.pep
KWWWEWPPQFSCQGSKTWRGWFGFGENNHRNGVFVGGPGPNKPKGPGFFLWVQRGDGLHPSPHVLLDFSPRAHRIFFILKQRFPRKGSYNKCEDLYSLWSYQGIKLFY

SEQ ID NO: 228511 - protein, 206 aa, Glycine max
  unsure (1)..(206): unsure at all Xaa locations
  Clone ID: PAT_MRT3847_48373C.1.pep
QMTEGKLICLXGGEDLEWIEKFTATAISVAKAASSRIGSRYVGKSNAKERMQKMIKTFTTRKFSYFWPNVTSIWFFWTRLESMLYSKLQHGRTVENDDIMSQVMTVLSFDGSDRGWAIFCRGATEMARAKGDSALICLQDFDKWKDRIEEDGVVQAMNDYLNKNKPPHHCNRLILPGSTGGIPQKVVCAECGRQMEKYFMYRCCVE

SEQ ID NO: 228512 - protein, 163 aa, Glycine max
  Clone ID: PAT_MRT3847_48374C.1.pep
EFGTRETWWSSDAELDQDTHNSKLISKQLRSLNIATPSLVFFLLYPHIVSFAMSHSNIRETTGFVWNILKSMPLSIGKAQVSNDGDNTSSVALKGWIPQLSGLKDAGFWVRKCVSYLYDYKNDGMGKRMVDKENKVPINEQNLFVVSKEKQKFFAARGLEQWW

SEQ ID NO: 228513 - protein, 52 aa, Glycine max
  Clone ID: PAT_MRT3847_48375C.1.pep
MDPKYWHTPSEFSTKRYLETGAEGEAGPLDLRGQHIQLLPFGSGRRMSTSAN

SEQ ID NO: 228514 - protein, 52 aa, Glycine max
  Clone ID: PAT_MRT3847_48376C.1.pep
PSKSIHGSCTDGLKGLFQTCIKQVLTQWSQNITYMKRVRRYRQCYIAWDLRM

SEQ ID NO: 228515 - protein, 56 aa, Glycine max
  Clone ID: PAT_MRT3847_48377C.1.pep
PFIRKSKASQFSFCRMIIRIGFFCVWFRSRAKTEEVSRFYESSVRLEDPNYVRLIH

SEQ ID NO: 228516 - protein, 58 aa, Glycine max
  Clone ID: PAT_MRT3847_48378C.1.pep
AVIIYYWVSPYSISSSSWCHVFPHIAWVKNISYRSRYLDLEPNVRGKGGVHVTSCHHG

SEQ ID NO: 228517 - protein, 142 aa, Glycine max
  Clone ID: PAT_MRT3847_48379C.1.pep
PTSFEKFANGVKQQANIKGVDRLTAKVGVVEIGKGVRGTSPTGKRISVGNPIRNLVQGIELGAKALRKSWEGNMEVKKKDTSKLRAAKCDPKPETPRRSTSSEKFPSKEESKMQPQTKSSKEEHKTQTSIKRVIVSGTMEQE

SEQ ID NO: 228518 - protein, 49 aa, Glycine max
  unsure (1)..(49): unsure at all Xaa locations
  Clone ID: PAT_MRT3847_4837C.1.pep
VKYQICPSLLEALSIWSLRFKXCQNDPRLYIPFTTLVPAVSLLTLLVNV

SEQ ID NO: 228519 - protein, 88 aa, Glycine max
  unsure (1)..(88): unsure at all Xaa locations
  Clone ID: PAT_MRT3847_48380C.1.pep
GFXRMRIYDRXHXVLQXLXDSNXEXLLXLPNIDLQXVASSXDNXXXWVXDNVRXFWXVRFRYXTVGXEXKPWDSFXQFVVPAMXXIQX

SEQ ID NO: 228520 - protein, 479 aa, Glycine max
  Clone ID: PAT_MRT3847_48381C.1.pep
MAEIQLTFDINFLTDLVAQKLRLAASMATHAALASTRIPSNTRFPSKASHSFPTQCALKRLEVTEFSGLRSTSCVTYANSARESSFFDLVASQLTPKQTNGSSTPVRGETVAKLKVAINGFGRIGRNFLRCWHGRKDSPLEVVVVNDSGGVKNASHLLKYDSMLGTFKADVKILDNETITVDGKPIKVVSSRDPLKLPWAELGIDIVIEGTGVFVDGPGAGKHIQAGAKKVIITAPAKGADIPTYVVGVNEGDYTHQISNIISNASCTTNCLAPFVKILDEEFGIVKGTMTTTHSYTGDQRLLDASHRDLRRARAAALNIVPTSTGAAKAVSLVLPQLKGKLNGIALRVPTPNVSVVDLVVNVEKKGLTAEDVNAAFRKAAEGPLKGVLDVCDVPLVSIDFRCSDVSSTIDSSLTMVMGDDMVKVVAWYDNEWGYSQRVVDLAHLVASKWPGAAKAGSGDPLEEFCETNPADEECKVYE

SEQ ID NO: 228521 - protein, 583 aa, Glycine max
  Clone ID: PAT_MRT3847_48382C.1.pep
MNILSERLLRALVVRMDIHIHMLLTSISCLFFITLPQSLSQPPSVFNYSACKEWPYNCGTLSGIFYPFWGENRPPHCGGGEAFRLSCHDDITTILIASHNLMVKNIHDTTRTMRVVPTDLDPNVCSLQSKNIYDDIHAKATHFLYPNPSLYSNNICEGFEVIYDVSENCTKCLGSEGECWKEEIDEHDIVSCYFCPDGSHSLRCSPPKRNPRKLRLIIGLASALMGGFMICIIICCTKSKSSTQVKFSFTIKNGQDIESFLKNHGALSQKRYKFSEVKKMTNSFKVKLGEGGFGAVYKGELLSGVPVAVKILNESKGNGEDFINEVASIIRTSHVNVVTLVGFCLEGRKKALIYEFMPNGSLDKFVYKKGLETTSSLSWDNFWQIAIGIARGLEYLHRGCNTRILHFDIKPHNILLDENFCPKISDFGLAKLCPRKESIISMSDPRGTIGYVAPEVWNRNFGGVSHKSDVYSYGMMLLEMVGGRKNINAEASHTSEIYFPDWIYNRLEQGGDLRPNGVMATEENEIVKRMTVVGLWCVQTFPKDRPTMTRVVDMLEGKMNSLEIPPKPVLSSPTRSVSESPTR

SEQ ID NO: 228522 - protein, 38 aa, Glycine max
  Clone ID: PAT_MRT3847_48383C.1.pep
THVVESLEVNSCNVNLSYYLFNVILFLLKKKKKKKKKK

SEQ ID NO: 228523 - protein, 85 aa, Glycine max
  unsure (1)..(85): unsure at all Xaa locations
  Clone ID: PAT_MRT3847_48384C.1.pep
MLLALLVFAAVATXAMAVAASDADDMLIRHVVPDVGERQXEENLLNAEHHXASFKAKFAKTYASKEEHDLRFGDFKSNLRRATLH

SEQ ID NO: 228524 - protein, 41 aa, Glycine max
  Clone ID: PAT_MRT3847_48385C.1.pep
GDIKMIESRIYNLLDSKSHILIDIKCTKGLSINHSHNFYKK

SEQ ID NO: 228525 - protein, 227 aa, Glycine max
  Clone ID: PAT_MRT3847_48386C.1.pep
KIISRNTLWLFLAIFSHSVAISFASDPDPVQDFCIPNPRFGAIKTAHNMHYILPCKNSSEVITEDFVFSGLTKASENFSNTGLAVVSANPTNFPGLNTLGLSFARADIEVGGINPPHFHPRATELVHVLQGKVYSGFVDSNNRVFARVLEQGEVMVLPKGLVHFMMNVGDEPATLFGSFNSQNPGIQKIPSAVFGSGIDEELLQEAFGLSSKQIGILRKKFDPKTSR

SEQ ID NO: 228526 - protein, 122 aa, Glycine max
  Clone ID: PAT_MRT3847_48387C.1.pep
NFNRLIRYEESLRPLLRSTLLTLSLSILQPLRRPHRIPLQQRHTSSPRLLQALLRREVHRLLLGLLLHYCGKAFRAFLQDRYYYNSKRYIRIFRRRRQVWPSPSIIFTRPCKHINQPKGSRP

SEQ ID NO: 228527 - protein, 97 aa, Glycine max
  Clone ID: PAT_MRT3847_48388C.1.pep
TAARRRQKGVVENKTLTLPRLRPLAPAAMSTSIEDQALSSTGSDLKCDGYGISLVVSSVLFVLYLAVHAKKNLNSLCRRGSYVVVSYFALPLARHAC

SEQ ID NO: 228528 - protein, 30 aa, Glycine max
  Clone ID: PAT_MRT3847_48389C.1.pep
MLGMDMLADAETSSKMDIPVSDFNHSKHES

SEQ ID NO: 228529 - protein, 56 aa, Glycine max
  Clone ID: PAT_MRT3847_4838C.1.pep
KKILARSLSELWIRVSNHGSQTSKRVVLPRLGTRPDHPLPAAADERINKGSELPRN

SEQ ID NO: 228530 - protein, 77 aa, Glycine max
  Clone ID: PAT_MRT3847_48390C.1.pep
GSCGLLGPPRISWHPETTGLHSELHSWISTITQTLFVGQSVRERPLTTWHKLGQAEETRIPAPSDAPTRDHDLGTVC

SEQ ID NO: 228531 - protein, 59 aa, Glycine max
  unsure (1)..(59): unsure at all Xaa locations
  Clone ID: PAT_MRT3847_48391C.1.pep
QGVIKHLVSKKYNRPTHKFPXPEKRDNSVRELRSQIPALFYTTLYNVKLKLINTPCINS

SEQ ID NO: 228532 - protein, 95 aa, Glycine max
  unsure (1)..(95): unsure at all Xaa locations
  Clone ID: PAT_MRT3847_48392C.1.pep
GGKGLKKEKAKQHHKVLRNNIQEITKPTIQHLTHKXNIKHISNLIYKKTHXILKIFLKNIIHNTITYTKHTXRKTVTTINIIYTLKKQEITLYEF

SEQ ID NO: 228533 - protein, 61 aa, Glycine max
  Clone ID: PAT_MRT3847_48393C.1.pep
CEIKESNKSQFINNLLLDKFVTIKELGGILSISSIDIERYAETHIKILASNLYYRKYINWQ

SEQ ID NO: 228534 - protein, 107 aa, Glycine max
  unsure (1)..(107): unsure at all Xaa locations
  Clone ID: PAT_MRT3847_48394C.1.pep
TPWVKRLQNPGFIYNGPGKKAPSINKAXDAPFRPPKEVLPGLIVSWMEISXIYGAPKMGPPFXAIIFSGPKTAPLAFRSLGLPQALDSVGNVPPXLVLTAAESPENS

SEQ ID NO: 228535 - protein, 49 aa, Glycine max
  Clone ID: PAT_MRT3847_48395C.1.pep
ETCPLSPPVFFGFKRVNGVHPFFVPPPPPPPPPPPPPPPPPPPPPPPPP

SEQ ID NO: 228536 - protein, 50 aa, Glycine max
  Clone ID: PAT_MRT3847_48396C.1.pep
SFFFFFFITEQFTSWGTDANILQLIITRLLGRTFCYITLTSCLSSLYIPY

SEQ ID NO: 228537 - protein, 86 aa, Glycine max
  Clone ID: PAT_MRT3847_48397C.1.pep
CFDSEESLEFNLQLQAMARAASLCLRVDPDARPPMSKILRVLEGGDPVRPMGLDINSVGNTSGHLRGLKSHTPPKGTISHSRRLSH

SEQ ID NO: 228538 - protein, 97 aa, Glycine max
  Clone ID: PAT_MRT3847_48398C.1.pep
GVGTRERVGVTEQSKAADWTLSPFVPWFCYLQISFILSYYLSFHPTQICWHPFRPHHYIISIASEHRTHLRFVSFPRPSPCPPPPRLLLSTPNSPRA

SEQ ID NO: 228539 - protein, 39 aa, Glycine max
  Clone ID: PAT_MRT3847_48399C.1.pep
VSSATATFAMTFSASMSVVEYYLLKRFPIPYSKYECEWE

SEQ ID NO: 228540 - protein, 64 aa, Glycine max
  Clone ID: PAT_MRT3847_4839C.1.pep
HLNNPKTGISTIFSPKSKLGLLPPMGASFSSRYLFGPTGELFTNFKARNVFQTLFFCIFSRTRG

SEQ ID NO: 228541 - protein, 552 aa, Glycine max
  Clone ID: PAT_MRT3847_483C.1.pep
LASALSDNHITGTIPSEIGNCSGIEILELGSNSLAGHIPADISRLTLLKVFDLSGNNLTGDVPEEISKCSSLTTLFVDHNHLSGAIPGSLSDLSNLTMLDLSANNLSGVIPSNLSMISGLVYLNVSGNNLDGEIPPTLGSRFSNPSVFANNQGLCGKPLDKKCEDINGKNRKRLIVLVVVIACGAFALVLFCCFYVFSLLRWRKRLKQGVSGEKKKSPARASSGTSGARSSSTESGGPKLVMFNTKITLAETIEATRQFDEENVLSRTRHGLVFKACYNDGMVLSIRRLQDGSLDENMFRKEAESLGKVKHRNLTVLRGYYAGPPDMRLLVHDYMPNGNLATLLQEASHQDGHVLNWPMRHLIALGIARGLAFLHQSSMVHGDVKPQNVLFDADFEAHLSDFGLDKLTVATPGEASTSTSVGTLGYVSPEAVLTGEATKESDVYSFGIVLLELLTGKRPVMFTQDEDIVKWVKKQLQRGQITELLEPGLLELDPESSEWEEFLLGVKVGLLCTAPDPLDRPTMSDIVFMLEGCRVGPDIPSSADPTSQPSPA

SEQ ID NO: 228542 - protein, 88 aa, Glycine max
  Clone ID: PAT_MRT3847_48400C.1.pep
QKKTAQIFLWVLVRSSFKPDVIRYNLLIEAFGQKLLYKEAESTYLQLLEGRCIPTEDTYALLIKAYCISWLLEKAETIFAEMQNYGLP

SEQ ID NO: 228543 - protein, 232 aa, Glycine max
  Clone ID: PAT_MRT3847_48401C.1.pep
NSNCHSSTLHLHSRIMAKEASLCLLFLFSFLSTSCSGSLVGFSYRERGDTSTSARTISFLQQSNVSPTQIRIFVTDHRILSTLSNSKVLTDVYLNKSQVENFIISKPSELKAHLLNILSHSNIKSIIASCGSECLAQNEMPLFLHALKSIGSVLRELHLGREVKISVAYPLSFLEKLNASHENSIRRILSFIKETKSFVMVEDSIGGELSMGDHFVHAIIKRATLAERHHRQ

SEQ ID NO: 228544 - protein, 555 aa, Glycine max
  unsure (1)..(555): unsure at all Xaa locations
  Clone ID: PAT_MRT3847_48402C.1.pep
MQNMLRAKQISSTLSSNARSILLGGSRCNAADGNSCTCPEDETCVSKRQQRKNNEDLLALKPPSLVSKATSQVVGTLVSGNLANGPASHKAGSVGQSGRVQQVQPTSYAPSKSDSATSACVVDGVQDHVAHSSSLNADQFYRAGIAAVNFISDVVNYKLPLSDGMGILNYSKNCMVDPARALPKIRSSNVQQIRTENFTSVHPKPPVPAHPGPSKHTNNNHGAKGKANKSNLAKGFKHVAASGTEKSGAAPNIPVNNHDRRALPQRTRTHSNHFVTNFGSNMQSSNPQMARPFKESFNKHTRDLNMPAGIAPTKRHFTNSGHVVEVVKDILKQLRWGPATEKALYNLNFSIDAYQANQILKQLQDHSVALSFFYWLKRQPGFWHDGHTYTTMVGILGRAREFGAINKLLEQMVKDGCQPNVVTYNRLIHSYGRANYLGEALNVFHQMQEMGCKPDRVTYCTLIDIHAKAGFLDVAMSMYERMQEVGLSPDTFTYSVMINCLGKSGNLSAAHRLFCEMVDQXGCVPNIVTYNILIAFAAKARNYQTALELYRDMQN

SEQ ID NO: 228545 - protein, 312 aa, Glycine max
  Clone ID: PAT_MRT3847_48403C.1.pep
MPLFLHALISISSVLRELHLGREVKVSVAFPLSFLEKLNASHENNIRRILSVIKEMKSFVMVEDYIDGEFSIGDHFVHAIIKRATLAASILPCKDVPIVLAIKSTVIFPSMELAQFSERVSKYLESKTHIRKRIAALYIEVHRTEDFASKKLKRRSLDDTTNPTNTVFPTNPASSTPIITPPDTPTIITVLATNPVTISPSNLAAMPVTVPSTTPVPNPITPTNPANSPVPVSNPATTPIATPPPVTNPVTSYPPPSGNVPPVVNPQPQPPPANTNAPAIHGQSWCVAKQGAPDASLQSALDYACGMGGADC

SEQ ID NO: 228546 - protein, 97 aa, Glycine max
  Clone ID: PAT_MRT3847_48404C.1.pep
IFGGNFYLSFWGFGLFLTARRVKRDPLLVVGGRFCTGCALLQGEAASPLRKKFCEYFPWFFSCVFRVFFGGLWGRRRAQKTKKKKKKKKKKKKKKIK

SEQ ID NO: 228547 - protein, 83 aa, Glycine max
  Clone ID: PAT_MRT3847_48405C.1.pep
PRWGLSNQPRHPGSYYHIQSSHEDILHARVRLDSVIVCFLEGISLSKSSKRKINFLQQFHQPVKVSYKPVNPRCSVRIPDGLS

SEQ ID NO: 228548 - protein, 51 aa, Glycine max
  Clone ID: PAT_MRT3847_48406C.1.pep
QRLDRIQLPGKPLSQNKALKKKMAKGRLSKNPQTRNLQKENSQKKRLSTLR

SEQ ID NO: 228549 - protein, 69 aa, Glycine max
  Clone ID: PAT_MRT3847_48407C.1.pep
NILNQYIHDDNDNETRFSILAREPMIPGTDWRFHTTIVFYLKEGPLILIRALADHALFHINLTQIENLI

SEQ ID NO: 228550 - protein, 54 aa, Glycine max
  Clone ID: PAT_MRT3847_48408C.1.pep
HTFDDTFAFRLATTQAYALNPTSYQADTFPSCISSSPSSYTPHTLFFLVHPVGL

SEQ ID NO: 228551 - protein, 63 aa, Glycine max
  Clone ID: PAT_MRT3847_48409C.1.pep
SPRKVRETHEGLIIQRKRPRFFSGGERKGLKLRVPGQKWEGQNSNVGGGMPKFGGCHVISREF

SEQ ID NO: 228552 - protein, 53 aa, Glycine max
  Clone ID: PAT_MRT3847_4840C.1.pep
GAVLRKLNPYLESGKVKPIVDPKGPFSFDKLAEAFSYLETNRATGKVVIHPIP

SEQ ID NO: 228553 - protein, 639 aa, Glycine max
  Clone ID: PAT_MRT3847_48410C.1.pep
MPALVNYSGDDELYPGGSFCPNPVELGRLYTTIGSNLDVYYPPTKRPRSIFEAIEREQYYQEPGIEVLPDECLFEIFRRLPSGKERSSCACVSKRWLMLMSTICKDEIERATSVDETVSSDENQDIEDDGYLTRCLDGKKATDVRLAAIAVGTSSRGGLGKLLIRGSNSERGVTNLGLSAVAHGCPSLRSLSLWNVSTIGDEGVSQIAKGCHMLEKLDLCHCSSISNKGLIAIAEGCPNLTTLTIESCPNIGNEGLQATARLCPKLQSISLKDCPLVGDHGVSSLLASASNLSRVKLQTLKITDFSLAVICHYGKAITNLVLSGLKNVTERGFWVMGAAQGLQKLVSLTVTSCRGITDTSIEAIGKGCINLKQLCLHRCCFVSDSGLVAFAKAAVSLESLQLEECNRFTQSGIIVALANIKTKLKSLALVKCMGVKDIDMEVSMLSPCESLQSLVIQKCPGFGSASLAMIGKLCPQLQHLNLTGLYGITDAGLLPLLENCEAGLVNVNLTGCWNLTDNIVSALARLHGGTLEVLNLDGCWKITDASLVAIANNFLVLNDLDVSKCAITDAGIAVLSRASLPSLQVLSLSGCSDVSNKSAPFLTKLGQTLLGLNLQNCNSIGSSTMELLVEKLWRCDILA

SEQ ID NO: 228554 - protein, 150 aa, Glycine max
  Clone ID: PAT_MRT3847_48411C.1.pep
MPALVNYSGDDELYPGGSFCPNPMELGRLYTTIGSNLDMYYPPTKRPRSIFEAIEREQYYQDPGIEVLPDECLFEIFRRLPSGKERSSCACVSKRWLMLMSTICKDEIEGTTSVAETVSSDENQDIDDDGYLTRCLDGKEATDVRLAAIA

SEQ ID NO: 228555 - protein, 72 aa, Glycine max
  Clone ID: PAT_MRT3847_48412C.1.pep
FILIKHLHHALECGRGFSLSSFGLVSVVMLCNFKARYLIFKGFGVVAGRPFVAIFFSSLLNQVLVFVGLSCF

SEQ ID NO: 228556 - protein, 130 aa, Glycine max
  unsure (1)..(130): unsure at all Xaa locations
  Clone ID: PAT_MRT3847_48413C.1.pep
PRVRPRVRSTLDKVLGDKHQNSTTPGVLQEPAQTQSLSDISAKSVNYWVGTTTLMPLVGRFVADAYTGGFNMVIFSSLVYLMGLSLLIXSQFIPSLKPSNNNQPRXVREGAFFLAIYCISLGTGGHKPCL

SEQ ID NO: 228557 - protein, 245 aa, Glycine max
  Clone ID: PAT_MRT3847_48414C.1.pep
PPLKARTCSPLKARACSPLKVRTCSPLKARMCSPLKARTCSPLKAMTCSPLKARVCTPLKMRTCGPLKARTCSPMKARTCSPLKARTCSPLKLRTCGPLKVRACSTLKARTCSPLKAKTCSPLKVRTCSPLKARTCSPLKEKLCSPLNVRTCSPLKARTCSLLKAKMCSPLNSRTCSPLKARTCSPLKARTCSPLKARTCCPLKARTCSLLKARTCSPLKTRACSPLMVGTCGPLKVRTLMNYCT

SEQ ID NO: 228558 - protein, 36 aa, Glycine max
  Clone ID: PAT_MRT3847_48415C.1.pep
PPEHHRLVSVLRVYFLCLCYPFLCIKLNNITHKKKK

SEQ ID NO: 228559 - protein, 393 aa, Glycine max
  unsure (1)..(393): unsure at all Xaa locations
  Clone ID: PAT_MRT3847_48416C.1.pep
MAGEKEEPNWMTPYKNFLIRGVLQPNEDEAQHLKRKASYYIILDGKLFKRGLKTPLLKCLNSQQANNVTXEIHEGIYDLHIEGHSLATKVVRAYYYWSTLRADTXSKRCRQCQEFTYIPRTPPDNLCSLSYPWPFAMWGMDILGPLHYFTKWIEARPPREIXVNGVEKFTWKHLIYRYGLPYAILTKNSTQFKAQAYEEILTRLDVKHPXTSIKHPQTNGQMKAANRVILKALHTRLDKSKDLWKEELSSILRAYHYSPQTTINETPFXLTYSIDAMILIKVEEPLTRRLLFQEQKNEENIRVEQEIKDEVQEMAKIKXRDYQALSIKXYNTKVHPRAFQLDDLVLRVRGEARKDSRAGKPGPNWEGLFRVVASLDSGEYRLQELDGKAIRRT

SEQ ID NO: 228560 - protein, 125 aa, Glycine max
  unsure (1)..(125): unsure at all Xaa locations
  Clone ID: PAT_MRT3847_48417C.1.pep
AALHIASNPVFHERTKHIEVACYFVREKLMAKEISTEXIGSNDQLAGILTKSLRGPRIQFLCSKLSAMVYMLQLEGECWKIGYDVPRVVAYILLCLLYSCCTWSAQSSVFCTYLFSLLSKLSFLI

SEQ ID NO: 228561 - protein, 39 aa, Glycine max
  Clone ID: PAT_MRT3847_48418C.1.pep
WATHDSYRAVILLVCAILIIVYSGNLEQEILVDMILTIN

SEQ ID NO: 228562 - protein, 91 aa, Glycine max
  unsure (1)..(91): unsure at all Xaa locations
  Clone ID: PAT_MRT3847_48419C.1.pep
SXARVRKLGIRLEXXDXKXXDXXRVXXXXXRXGVVXXFXXAIXDXDXXXXRXSKSRXXRXXDXXXYTALRSSPLXWXESXXXTXXGXXXXD

SEQ ID NO: 228563 - protein, 50 aa, Glycine max
  Clone ID: PAT_MRT3847_4841C.1.pep
FFHNESSDGETFLVSVPLYASNSYCTTYITDVTYNFQWLFTFIFSSVFHI

SEQ ID NO: 228564 - protein, 75 aa, Glycine max
  Clone ID: PAT_MRT3847_48420C.1.pep
FSKAACRGLVPSPLYNLPLTARLHINVEKSQLLLSFQSYHLLVPPGSLHLTIFSICLVYLLILKHELLDALICTF

SEQ ID NO: 228565 - protein, 78 aa, Glycine max
  Clone ID: PAT_MRT3847_48421C.1.pep
TNKIFLQVGFEQLKFSGKQARQQKKKEPLHTHCSCSTCGVGSAFNTFSSTSKMSHAHSHMGSGSRTTRRAFRVWENTL

SEQ ID NO: 228566 - protein, 158 aa, Glycine max
  Clone ID: PAT_MRT3847_48422C.1.pep
MVSRVHKRTAVYRSIQQLRSITNSHARRKTSVILDASKYIRGLKQKLQELNQLAVAATQKDIEYGPMPMLKVEQQEEGYLIKVLSQRSCQGLLAFILEAFERLGLVVLQARASCVESFCLEAFGIKESNEDTRLVDTQVVEQVVSKAINDWRKVTKQC

SEQ ID NO: 228567 - protein, 69 aa, Glycine max
  unsure (1)..(69): unsure at all Xaa locations
  Clone ID: PAT_MRT3847_48423C.1.pep
VAHIGATHPGDNAPPPTKTDXEETPKEXQQDQPRDTKPSAGTTTDARADGTEQEGEEPPHGGXQKDATP

SEQ ID NO: 228568 - protein, 99 aa, Glycine max
  unsure (1)..(99): unsure at all Xaa locations
  Clone ID: PAT_MRT3847_48424C.1.pep
TKVLEXDSRRGKARERRAQAQGQQEDPEXAETDXKKAXEXEPNNRXXKTEXKXXKQKAREHGGEDAQXHGSTXAKRKKREQARTATAKQEPEPRTKDSK

SEQ ID NO: 228569 - protein, 59 aa, Glycine max
  Clone ID: PAT_MRT3847_48425C.1.pep
LCNFIIIWAFLVHAFHGFSSFLDLIYCPVQRLLKRIMKMKRTWIKFLLIFDETDTKTIS

SEQ ID NO: 228570 - protein, 70 aa, Glycine max
  Clone ID: PAT_MRT3847_48426C.1.pep
GAGHMDELIGRLATNASIDSAVAEKTVGIILGFLRNEGPSENVEALINHIPGAEAAIEASKSGGGLSRLM

SEQ ID NO: 228571 - protein, 88 aa, Glycine max
  Clone ID: PAT_MRT3847_48427C.1.pep
DPWFHPGGPNRKLRAGPFRLTRFPKKEGEKSGEKEWGKKVSWGKMFPPQNTRKNKGETRGGKGGGAQKESELPLMPWFQRANLEGENL

SEQ ID NO: 228572 - protein, 53 aa, Glycine max
  Clone ID: PAT_MRT3847_48428C.1.pep
TPPNALNKIPSPFLVLHRKSFNLSAATISNPQNSTPIQGPSSQLRVNPGEEAK

SEQ ID NO: 228573 - protein, 59 aa, Glycine max
  Clone ID: PAT_MRT3847_48429C.1.pep
VMKSITFLIFHFLNFLKIILLYYLLLSQFPILFSYLFLLNLSTSHFSSQFPLHLLYSPL

SEQ ID NO: 228574 - protein, 66 aa, Glycine max
  Clone ID: PAT_MRT3847_4842C.1.pep
GLNVVLSIELRFRESRYRSHCISSYHSQDASPICPRKLVVHPFLSIGPNPLLHQEYRSGPSPAVVF

SEQ ID NO: 228575 - protein, 477 aa, Glycine max
  unsure (1)..(477): unsure at all Xaa locations
  Clone ID: PAT_MRT3847_48430C.1.pep
MDGAPQSAGGPALFLPLRGSRKIHSEMDGAPQSAGAGGPAPFLLKTYDMVDDASTNDIISSSSTTNTFVVSNHLENAXPQSWELVNEEFLKDQKHLLKNIHRRKPIHSHSHPPGSLVDPERAAFEEEIDKLSREKNSLESNIRNFKQHQSTAKPKLEDFLQRLDGVDKRQKQLLNFFEKALQNPTFVEHLSRKIESMDLSAYKKRRLPQVDHVQPVAESSLVDNHSNFRMEFGNVFRQDFSNKLRLELSPAVSDMNLVSRSTQSSNEDGESSQKKLSEVEPRGVQTRTALTFAPETLELADTGASFTFKMDSCLSRRATTAESSKLISLEPSSEEGDSLSCQLNLTLASCPLQVNRNSYSARSPQIDCQEIGKLAESRFFANGKESDSGVSSNLNVAAEATNLASSQEAPSNNQVNPAPPDRVNDVFWEQFLTERPGCSDNEEAISNYRANPYDEQDEGRSTHGISRNIKNMDQLTL

SEQ ID NO: 228576 - protein, 186 aa, Glycine max
  Clone ID: PAT_MRT3847_48431C.1.pep
MDGAPQSAGAGGPAPFLLKTYDMVDDASTNDIVSWSSTNNSFVVWNPPEFARLLLPTYFKHNNFSSFIRQLNTYGFRKIHPERWEFANDEFLKDQKHLLKNIYRRKPIHSHSHPPGSLVDPERAAFEEEIDKLSREKTSFESNIYNFKQHQSTAKPKLEDFLQRLDGIEHRQKQLLNFLRGLFRIL

SEQ ID NO: 228577 - protein, 46 aa, Glycine max
  Clone ID: PAT_MRT3847_48432C.1.pep
MVLLCRDSALLIISINIHAQLALKVKSSRAELRWPGNHDAHTRRYV

SEQ ID NO: 228578 - protein, 85 aa, Glycine max
  unsure (1)..(85): unsure at all Xaa locations
  Clone ID: PAT_MRT3847_48433C.1.pep
MGIPKMSHSPFPLRSLDHSHALLESLLHRLSLEQPQHHLHRMANAASGMAVQDDCKWRFLGVRARWTHRFRXCKVDXRQKQVIVE

SEQ ID NO: 228579 - protein, 78 aa, Glycine max
  Clone ID: PAT_MRT3847_48434C.1.pep
ANLGFNLMVRAMNLCLMPYHVTFSDQGKPLTMDSKEQVTTHDDIIYEMAKASEYTATLGNHTLEPVDLKTPRYDMVTQ

SEQ ID NO: 228580 - protein, 71 aa, Glycine max
  unsure (1)..(71): unsure at all Xaa locations
  Clone ID: PAT_MRT3847_48435C.1.pep
IITRISTTAAATMKLDDSFNNPQFXRHYLLFPFSHPLNQYIPHQLFKYKLPTYSQETTVNPLYYTLVSQLA

SEQ ID NO: 228581 - protein, 74 aa, Glycine max
  unsure (1)..(74): unsure at all Xaa locations
  Clone ID: PAT_MRT3847_48436C.1.pep
NIPKLSPPKNTPHLILKKGIVARGLAQTTYSVFLMKLSPKKXRGKMKKRMLAWKQKLFGRESKKDSPIQGPRNC

SEQ ID NO: 228582 - protein, 306 aa, Glycine max
  Clone ID: PAT_MRT3847_48437C.1.pep
MAINLYMFSSLMKYRIRSDETKKSDIDRGLCQALWGDSNVSDQFFELQCGGKWIQSGAGAEEGWRNKSISSEYILALPSERRGFSQRECGGGVMRKFNKWIEALEVEDIPCVRRQFTWYRPNFEAKSKLGRVFVSDWKGSGDGTCFRRMILLGMEFWFKIGCGSRVNFWTDEWDRRMWVAVSENLYTVSRAYAWLYEAVVGSSEEEMLKRVWKVKFPNKVGHFIWRLESAGHLFFSCEKVRDIWLECYSWIGVASVVQVVPREHFLQHWYCECGRIDGQRWMVLWASVTWCIWRHRNNYIFNNKEF

SEQ ID NO: 228583 - protein, 228 aa, Glycine max
  Clone ID: PAT_MRT3847_48438C.1.pep
MPQGGVLCIWSDQFFELQCGGKWIQSGAGAEEGWRNKSQILKQKASWAGCLSQIGRCLPKSQGGLGVRDLELFNMALPGKWRWNMLQEDDSLRNGILKKFLQVELNNYSIRPSEQDRRMWVAVSENLYTVSRAYAWLYEAVVGSSEEEMLKRVWKVKFPNKVRDIWLECYSWIGVASVVQVVPREHFLQHWYCECGRIDGQRWMVLWASVTWCIWRHRNNYIFNNKEF

SEQ ID NO: 228584 - protein, 48 aa, Glycine max
  Clone ID: PAT_MRT3847_48439C.1.pep
PLAHEKYIMDKIQGRGDDDDDDDDDNHILRTMRGRINYIRRNDGKDED

SEQ ID NO: 228585 - protein, 66 aa, Glycine max
  Clone ID: PAT_MRT3847_4843C.1.pep
APTRSYGCDITTDWRYYGTQSDFRIKTLGRENLLKAHLLINERLDLLRHSFGHPSKNSLTLEIGHK

SEQ ID NO: 228586 - protein, 95 aa, Glycine max
  Clone ID: PAT_MRT3847_48440C.1.pep
LHHIEPRVRIPEALNHRPWFCTIITRALTCLNFRGSKIPILRNPPCGKSLMTCNPLCYINRASSFPRSTNGSTPLPLTNTLHQCSLMLSNNFSTP

SEQ ID NO: 228587 - protein, 229 aa, Glycine max
  unsure (1)..(229): unsure at all Xaa locations
  Clone ID: PAT_MRT3847_48441C.1.pep
LFHLSLLFFLATMTKIQAIQTSISKLLIHPLLWRLTGFVSSIVGFSCYALSPSFHNMFGHWNALKIFVYTVVSSLLSIFMFFIKRCSWGHGRSFLLKAQVGFVVLTLTSLWSVFEDRSEEGKVENAHGKMMNLTSSGAFALMAMSLSRQLQLGFEVGVFNFLVGCFLVTVMKMSFKLAPVAALFCYLLVNIRSISDFILEMHARGATHHAGYSNTEFVYILWCKFRGWX

SEQ ID NO: 228588 - protein, 179 aa, Glycine max
  Clone ID: PAT_MRT3847_48442C.1.pep
MEITLSDNALKTFARCITCLARIGNELAIQAYSSQLLFHTINSSRSAYQCIALKPGFFDAYNVSGNSVQCSVLLKAVCAVLRTPITNIDHLTVRLPDPDASKLQWILDCYNGMRKTYWITCNVEPDIQHLSLDRQKFPSNFVVSPRDLSRLLANFQSSLQEITIIATEPSSLPLDASNE

SEQ ID NO: 228589 - protein, 66 aa, Glycine max
  Clone ID: PAT_MRT3847_48443C.1.pep
HARWRIQPRCTSRPWYLILITFVHFCGRYMCARLSVLGNQLLQLIFWEVFELFVLSNGCYLLIFWK

SEQ ID NO: 228590 - protein, 54 aa, Glycine max
  Clone ID: PAT_MRT3847_48444C.1.pep
MPTTHKTPFLIILSSNNPIILTPIHLSYLNLFHHTINTSYIYSLTHTSYPFSLN

SEQ ID NO: 228591 - protein, 227 aa, Glycine max
  Clone ID: PAT_MRT3847_48445C.1.pep
HASAVAATEIIQDLYEELEEERNAASSAANETMTMILRLQREKAELQLEARQFKRFVEERTSHDQQELLALEELLYKREQAIHSLTCEVQAYKHRLMSFGISESEGEGDQYEFPPYEYPPLRCNAMHASTDDNDEIDIDKYAFGETPKDRLKNLESRISQMERSPTYSQMDGEFSGKNILEKVIVGQSPRRAKHSRKFSCDSSSLCPEYMMDSPSFRKIDEDLSNLK

SEQ ID NO: 228592 - protein, 69 aa, Glycine max
  Clone ID: PAT_MRT3847_48446C.1.pep
YIGMLKEYVGKKNRMMLISSTCNRTDEIFLLNKKIKKSYTKIGGLDYFKYCEHYDKLLLPCTAMIAMLS

SEQ ID NO: 228593 - protein, 92 aa, Glycine max
  Clone ID: PAT_MRT3847_48447C.1.pep
VHTAILPIGPWRPPMIGNILLFDTYTPHLFLRDLTICYGPLMHFLLVELYLTEASLPELAIDMLQTPDVVYARRAYSLAYHILSHELTIIIS

SEQ ID NO: 228594 - protein, 25 aa, Glycine max
  Clone ID: PAT_MRT3847_48448C.1.pep
NLKMRVFICCHPTVCTCGTFESRHC

SEQ ID NO: 228595 - protein, 46 aa, Glycine max
  Clone ID: PAT_MRT3847_48449C.1.pep
SLFGFRPFFFFLNFLILLDSYFPWITFIAVSSSMSRDSFPWKISSY

SEQ ID NO: 228596 - protein, 74 aa, Glycine max
  unsure (1)..(74): unsure at all Xaa locations
  Clone ID: PAT_MRT3847_4844C.1.pep
CVNPLLPLVSPILTCVMISVHCLLETSYVKGNEGKKIKNMKIXKYDKEISRIFSTXLNNDKRLLTFCLSFLPFD

SEQ ID NO: 228597 - protein, 59 aa, Glycine max
  Clone ID: PAT_MRT3847_48450C.1.pep
GHGPERFQTARMMRSIGMEQTITTLPTILYMTSPTRLSASALGHLLCRSQSSSFRVRMF

SEQ ID NO: 228598 - protein, 78 aa, Glycine max
  Clone ID: PAT_MRT3847_48451C.1.pep
LGVFMKRALLPKLGGGPGVFAFIQAIKLMTGDFFKLGLIGGLMFSTGEYPRVEKPGETNSVLSTFHKNFGPHFFFDGK

SEQ ID NO: 228599 - protein, 110 aa, Glycine max
  Clone ID: PAT_MRT3847_48452C.1.pep
CYAGWLAGYWGLTVKYGRRNCCYSLFFFKRGTSEKGGYTFLLFSFLFEEYDFGSILSCFAHSIDWLFCLLLVGHFGASNTKTKTSSFSLRTLWICVLFYLNSFGFHLYFL

SEQ ID NO: 228600 - protein, 83 aa, Glycine max
  Clone ID: PAT_MRT3847_48453C.1.pep
SICTCCTSPEILPNKFSQLSSNLAEKLKEKRCEEMSKFFYHKHSFTRYILGMHVNQSIYTSGQNLQGLATKLLYFWKEHNMTV

SEQ ID NO: 228601 - protein, 36 aa, Glycine max
  Clone ID: PAT_MRT3847_48454C.1.pep
LEELYLYHLWFKHMTSSHVVGARISIILLPTPHQEL

SEQ ID NO: 228602 - protein, 72 aa, Glycine max
  Clone ID: PAT_MRT3847_48455C.1.pep
DKEYCLFLPNSLSQDFQPLTAEPHIPTSCQSILSILLFQFYKKIFVFICQLNKFHSSPTHNPKTAKTLAFPK

SEQ ID NO: 228603 - protein, 112 aa, Glycine max
  Clone ID: PAT_MRT3847_48456C.1.pep
PVRSTKYGLTPSSLQRVSLRVLIFLTHFIGCRRPPRLSPTVIQVDREVSSLSSIIVPASLSSMALSKQSHVGALSTRPPMSRLSAYDTQVHGMAEVYTPAPHPCLLKPLSPH

SEQ ID NO: 228604 - protein, 114 aa, Glycine max
  Clone ID: PAT_MRT3847_48457C.1.pep
MEVMGIPPRWEDPSCKFLAMILKAEVTEFLESSVSSDISGDLFIAFNATDHPETAVLPLPPEGMSWYRLVDTALPFPGFFSTSGEVVPEQTEGLFTYQVKSYSCTLFEANNRTI

SEQ ID NO: 228605 - protein, 52 aa, Glycine max
  Clone ID: PAT_MRT3847_48458C.1.pep
YCLHRALVYISVGYGEHPVANKDGLIYLVMIAEGIKRSQLLEIDYELVAGVT

SEQ ID NO: 228606 - protein, 173 aa, Glycine max
  Clone ID: PAT_MRT3847_48459C.1.pep
LVFISGLDDREKILLEEYTSVLVNYKDVRLKLNDVEKKNRDSIFELTLQLREMKNALSTKDKEIQVLHQKLDNPDANPDESPYTITTEYKYTPHEALLRKAGQGANVLDSENSPSNLDANAAASPLAEQVETERTGKNAFSSVRMTLEKLMAHQDKRQDLSNLEQKFRSDIND

SEQ ID NO: 228607 - protein, 68 aa, Glycine max
  Clone ID: PAT_MRT3847_4845C.1.pep
PVGLLPVGCSYGPLRQATSLHPSLGRQAFLRSVRIRRVHKIYACLCDHTVCDLDFTMYPYKRLAVLTN

SEQ ID NO: 228608 - protein, 40 aa, Glycine max
  Clone ID: PAT_MRT3847_48460C.1.pep
SYRQSHAISCATWQVCQACKAAASIVPPCTRYSQSLSIQC

SEQ ID NO: 228609 - protein, 60 aa, Glycine max
  Clone ID: PAT_MRT3847_48461C.1.pep
NYRHTYSCCRGELGKHGLRSLGARHGLPTLGVGVVKVWAGPPNSNTYVSKAKIYVVDVRN

SEQ ID NO: 228610 - protein, 87 aa, Glycine max
  Clone ID: PAT_MRT3847_48462C.1.pep
GAANISLIFVILGGYLFLWLLPDYSCLPHLIVYVQPSFDKVVPPSFYELGLAELVCIYNELREIGKAPPVIDAAELQQDPEVLSGAF

SEQ ID NO: 228611 - protein, 144 aa, Glycine max
  Clone ID: PAT_MRT3847_48463C.1.pep
IKHRIAEVNGREKHEAEKGEGPAEKNQHGYPELWYSWRHQILSLSSLGYRADAPELRGYGDTEAPPSISSYNRFHIEGELAALIDSLGVQQVYLAAHDWGAIIGRKLCMSRPDKEKAYERLSDPIRPRNHKGKPDDAKRPKKEK

SEQ ID NO: 228612 - protein, 84 aa, Glycine max
  Clone ID: PAT_MRT3847_48464C.1.pep
RTVAPTFLPPSSASASSASVYYPRKLTSESLMPDFSPMVSAHSVRTSYGHRSLPVGARNDVENPLSGQACSASGVSSVHIPLAS

SEQ ID NO: 228613 - protein, 306 aa, Glycine max
  Clone ID: PAT_MRT3847_48465C.1.pep
KHEQFRFGLFVAAARECPSYLSSLPPTRLKSPFVFFSRFSIVKQRRKEKEMDEGKHKSRKENHEVKDGDSKRSHRDRDRDRTGERGKDKNDGRHRDKEKRDRESRRHERESTDSGDRYDRDREKLKDKDKDVDRERGRDKKRERDRERERTDRVREKERERERKEDKERIRERERERKDHEREKEKERERGRKARGREKRREVDSDCSDGESKERDRKRHRKEDGDYKRERERSVSKSSRKSEEHEGSPRKKSGGDDSDTKDEEKKPTREEEMEDEQKRLDEEMEKRRRRIQNGKIWWEERRLNQQ

SEQ ID NO: 228614 - protein, 157 aa, Glycine max
  unsure (1)..(157): unsure at all Xaa locations
  Clone ID: PAT_MRT3847_48466C.1.pep
KNSGLKFLIYGRTGWIGGLLGKLCEEXRIDWEYGRGRLEDRKSLMEDMRRVMPTHVLSAAGVTGRPNVDWCESHKVETIRTNVVGTLTLADVCKEHGLYMMNFATGCIFEYDKEHPLRSGIVFKEEDKPNFIGSFYSKTNAMVEDLLKNYDNVCTLR

SEQ ID NO: 228615 - protein, 64 aa, Glycine max
  unsure (1)..(64): unsure at all Xaa locations
  Clone ID: PAT_MRT3847_48467C.1.pep
HTFEGRSFNQLFKLCRESFQWSHVAWDTXFCHRFKNLLLWISLLGLCLGKKAFETELLFQSYLI

SEQ ID NO: 228616 - protein, 103 aa, Glycine max
  Clone ID: PAT_MRT3847_48468C.1.pep
HMFRCMLIRAPTVMRVRECHETSLYSIYSVLKYCDCGSICHVCYCPSTFEFKCSCLRMESFGLPCDHIVTLLVELDFSEIPKCLVLDWWKKKCKKVYSWKICR

SEQ ID NO: 228617 - protein, 70 aa, Glycine max
  unsure (1)..(70): unsure at all Xaa locations
  Clone ID: PAT_MRT3847_48469C.1.pep
GLGKPAEYKQFELASLDQNLXKNVAGDIIGTNTDLADVNPTPXHPYTNAXRPARPRQXHLTHTMXPMLXT

SEQ ID NO: 228618 - protein, 44 aa, Glycine max
  Clone ID: PAT_MRT3847_4846C.1.pep
LIISMHDIYNALVQHSAASFANLQSSVSLTISQHLSNLHSAQLP

SEQ ID NO: 228619 - protein, 58 aa, Glycine max
  Clone ID: PAT_MRT3847_48470C.1.pep
FFFFFLFFFFFFFLFLFFFFFFFFFWAKNQIWGDLLLFPKKKRGTPFKAPKGYNPLLY

SEQ ID NO: 228620 - protein, 46 aa, Glycine max
  Clone ID: PAT_MRT3847_48471C.1.pep
YGTETSMFVRVFSSPFPWSRGFYVRGFFVVLNLPNKSANLELQFSI

SEQ ID NO: 228621 - protein, 103 aa, Glycine max
  unsure (1)..(103): unsure at all Xaa locations
  Clone ID: PAT_MRT3847_48472C.1.pep
PTPRTTQAQEGGRNRKHTTKGAGRPXATXAAAQQSXAXEANXXRQNTKQGTNTPEGKRAXXRXXXEAHNXXGXETXPEEGXEATKEXXXGEQXRXDPKTXNQQ

SEQ ID NO: 228622 - protein, 240 aa, Glycine max
  unsure (1)..(240): unsure at all Xaa locations
  Clone ID: PAT_MRT3847_48473C.1.pep
ISLESPNTYVESSSSLSFAWLAAARPLDDETHLNIVVIGHVDSGKSTTTGHLIYKLGGIDKRVIERFEKEAAEMNKRSFKYAWVLDKLKAERERGITIDIALWKFETTKYYCTVIDAPGHRDFIKNMITGTSQADCAVLIIDSTTGGFEAGISKDGQTREHALLAFTLGVKQMICCCNKMDATTPKYSKARYEEIVKEVSSYLKKVGYNPXRFPSFPISGFEGDNMIERSTNLDWYKGPT

SEQ ID NO: 228623 - protein, 82 aa, Glycine max
  unsure (1)..(82): unsure at all Xaa locations
  Clone ID: PAT_MRT3847_48474C.1.pep
MALRXLVMSLSVLPHLGLARESHARDEDFRHAVWPNTPIPSSLRALLKPGPASVEIADHPMAIEXTQYPKTFFYTDDFIQAN

SEQ ID NO: 228624 - protein, 37 aa, Glycine max
  unsure (1)..(37): unsure at all Xaa locations
  Clone ID: PAT_MRT3847_48475C.1.pep
MXRIHSPRTFLHCSXLVDRKXDLNPDXSRPLAGVTQL

SEQ ID NO: 228625 - protein, 182 aa, Glycine max
  unsure (1)..(182): unsure at all Xaa locations
  Clone ID: PAT_MRT3847_48476C.1.pep
MEVQSDKIWMDNGPSRRAKWWYSTFHTVTAMIGAGVLSLPNAMAYLRWGPGILMLLLSWCLTLNTMWQMIQLHECVPGTRFDRYLDLGRHAFGPKLGPWIVLPQQLIVQVGCDIVYMVTGGKCLKKFMEIACTDCTQLKQSYWILIFGAIHFFLSQLPNFNSVAXVSLAAAVMSLSYSTIAW

SEQ ID NO: 228626 - protein, 107 aa, Glycine max
  Clone ID: PAT_MRT3847_48477C.1.pep
EATFVTLAPPHQHASLRHFQQRRRRHVENSPIQHLSLSSHPIHRSPPFSPQHPRFQDPLCPPRTPPLIATNQTRSTLFQWRAEYGDATGWWRRRRRRRRRRRSRRRR

SEQ ID NO: 228627 - protein, 99 aa, Glycine max
  Clone ID: PAT_MRT3847_48478C.1.pep
THISSPEMYTSGSRKKYRRLRRAMMPATSRRLSAKSFAGRTRLRHRGPPECRCGDGGLVCESESETVSASFGFHDEIISLKRERENDLMEVKNDVFYCV

SEQ ID NO: 228628 - protein, 110 aa, Glycine max
  Clone ID: PAT_MRT3847_48479C.1.pep
LQFIAPNNTLVHFGTNSAGKEESGLLKLLLKYTFNHIIIHETVQCKVTNLPELFTEGLRGFFLFNFGVIFFEKQTGDLWNPILTLVFFINKRGSGVNFTLGPILGPAMIL

SEQ ID NO: 228629 - protein, 66 aa, Glycine max
  Clone ID: PAT_MRT3847_4847C.1.pep
SHAFIFYDGNEVAMPMPNHFFFNQQFIYIYRSAQWVLTSRIQRIDVQLSISNGYRILIYHNQSTLH

SEQ ID NO: 228630 - protein, 128 aa, Glycine max
  unsure (1)..(128): unsure at all Xaa locations
  Clone ID: PAT_MRT3847_48480C.1.pep
PFSSSEYLKITGGNSVKEQETSNSIVPGSNNYVTYLITTKTNISEFGAXGADFAVRRRFPDLVTLSDRMAEAYRGFFIPPRPDKSVVESQVMQKQEFVEQRRMALEKYLRRLAAHSVIRKSDQFRVFC

SEQ ID NO: 228631 - protein, 91 aa, Glycine max
  Clone ID: PAT_MRT3847_48481C.1.pep
LVGLVQFGEGILLSESVDGVERGPHDSGVRVIDFPGLYQSDKGRAAAVPVAVRILPWCRSTSACPGRCLSVSASIHSVEIRREFRVVGIAL

SEQ ID NO: 228632 - protein, 61 aa, Glycine max
  Clone ID: PAT_MRT3847_48482C.1.pep
PAIFGVFFQQGRTKKVDMPDFFVKIFHKKKPKNFSAKKFPKKRKLKNAPVGKKIKTPKGFF

SEQ ID NO: 228633 - protein, 58 aa, Glycine max
  Clone ID: PAT_MRT3847_48483C.1.pep
SETMRQIVRNKNKKEVGIYYYYLKNIPNTFTFYLFKFYFIFPFLFSFYHIIFLLVSNL

SEQ ID NO: 228634 - protein, 80 aa, Glycine max
  Clone ID: PAT_MRT3847_48484C.1.pep
TDQPGAALESNRSLREQSMHNRAINLIKGTSARLEIYKNEKPGENHKQKERRKAEKGRGEETRLNTSHWTRGAPNPATHS

SEQ ID NO: 228635 - protein, 57 aa, Glycine max
  Clone ID: PAT_MRT3847_48485C.1.pep
MSCKSLNSVFDSHIKKNNNIYLIICVYFYPISSLTKYAYLILHKIIIIKVGIKILII

SEQ ID NO: 228636 - protein, 82 aa, Glycine max
  Clone ID: PAT_MRT3847_48486C.1.pep
IGLVDPRFFSAARRRQEGAVIVNHWRFTTQRKHSAPLLLPNHRVPTAHETVKDADREEEGGGCSSQTSGPILRSGEASRNQA

SEQ ID NO: 228637 - protein, 129 aa, Glycine max
  Clone ID: PAT_MRT3847_48487C.1.pep
DHNNLNASTGGWQLPETLQESTQLTNFSCMGCNLTGPIPQFLGSMNSLSFLKLSNNYLTGDIPRSLNDSALQVLWLNNQQGERLSGGIDVVASMVSLTSLWLHGNAFTGTIPENIGALSSLKELNLNGN

SEQ ID NO: 228638 - protein, 127 aa, Glycine max
  Clone ID: PAT_MRT3847_48488C.1.pep
PGSFPTTIQKHEYAVVVSTSSSSLRAQRQRSFTYQSVTTFDLFLLCSWNGGNKHLLSYSIVVHALDYEMIVCPLYLAHASDQCAVAFRTPSLGSFPSRCFGLRATKDVRYSLIFAWAVLNYAQAFYD

SEQ ID NO: 228639 - protein, 77 aa, Glycine max
  unsure (1)..(77): unsure at all Xaa locations
  Clone ID: PAT_MRT3847_48489C.1.pep
MEVFMYDEIGFNGEKXRFGVMIKKGDGGDVYKGVXKDXRGEDVNVDKFFAGLVGNKXALSGGSGKVVESGDDDDIFV

SEQ ID NO: 228640 - protein, 69 aa, Glycine max
  unsure (1)..(69): unsure at all Xaa locations
  Clone ID: PAT_MRT3847_4848C.1.pep
GDAEGVAALRVRIVVRTLTGWTIILDDVSSGTIDNVTAKIRDKVRIPPDQQRLXIFAGKQLEDGRILAA

SEQ ID NO: 228641 - protein, 73 aa, Glycine max
  unsure (1)..(73): unsure at all Xaa locations
  Clone ID: PAT_MRT3847_48490C.1.pep
YXWWGNNLRGVFTNSIFCSLGILCSRIKIQSLVHLTLVYKIFMQTSFDSSVISISYFKDIGGLHPTLDHVSHN

SEQ ID NO: 228642 - protein, 164 aa, Glycine max
  Clone ID: PAT_MRT3847_48491C.1.pep
MMNFDGFQKAIEERLEGIPVASEDKDDAEALLSQVTLIDPHARQGSKVVPVALNKVFQLKVNSVAFRLIPEFSQVKNALKEREKSGFASSGFSGVPVFQEDLENTLKSAAREQNKLNSTMRKGDIQVATLEDVIKEMKENSTSNWDDVIFIPPGFDVSDDSNEQ

SEQ ID NO: 228643 - protein, 194 aa, Glycine max
  unsure (1)..(194): unsure at all Xaa locations
  Clone ID: PAT_MRT3847_48492C.1.pep
AIEERLEGIPVASEEFLLVSGSSSSASXKDDAEALLSQVTLIDPHARQGSKVVPVALNKVFQLKVXNSVAFRLIPEFSQVKNALKVSLFLIIEREKSGFASSGFSGVPVFQSRNLILKSQSKRFRPLFSRKEDLENTLKSAAREQNKLNSTMRKGDIQVATLEDVIKEMKENSTSNWDDVIFIPPGFDVSDDLK

SEQ ID NO: 228644 - protein, 253 aa, Glycine max
  Clone ID: PAT_MRT3847_48493C.1.pep
MMNFDGFQKALAEFQGRCSTLLGSLTRLQPNRARPPWARIAQPWGGRPMAMTVEAIEERLEGIPVYALSNASEEFLLVSGSSSGKNLGLFCFNKDDAEALLNQVTLIDPHARQGSKVVPVALNKVFQLKVNGVAFRLIPEFSQVKNALQEREKSGFASSGFSGVPVFQSRSLILKSQNKRFRPLFFRKEDLENTLKSAAREQNKLNPTMRKGDIQVATLEDVIKEMKENSTSNWDDVIFIPPGFDVSDDSNEQ

SEQ ID NO: 228645 - protein, 58 aa, Glycine max
  Clone ID: PAT_MRT3847_48494C.1.pep
HQPVDRNGRTSCRCKKTCDCLCNTPIHLPSFLRRIRQNSFHADNFAPALTYSGPSSFE

SEQ ID NO: 228646 - protein, 57 aa, Glycine max
  Clone ID: PAT_MRT3847_48495C.1.pep
SVYELGVIFVKISICKSFVSKLGLTHYLDLCLIFGGFLLAESNAVTAFETQQDILFA

SEQ ID NO: 228647 - protein, 159 aa, Glycine max
  Clone ID: PAT_MRT3847_48496C.1.pep
MSLIPSFFGTGRRTNVFDPFSLDVWDPFHGFPGTTALSAPRSETAAFANTRIDWKETAEAHVFKADLPGLKKEEVKVEIEEEGRVLQISGQRTKEKEDKNDTWHRLERSSGSFLRRFRLPENAKLDQVKAGMENGVLTVTVPKVDVKKPDVKPVQITEG

SEQ ID NO: 228648 - protein, 38 aa, Glycine max
  Clone ID: PAT_MRT3847_48497C.1.pep
FNMEIFLKLKPSITDHDAKALCVIVPPKHNVPNLLMKP

SEQ ID NO: 228649 - protein, 48 aa, Glycine max
  Clone ID: PAT_MRT3847_48498C.1.pep
LLLSLTARSIGRGRDTTRRELNVPSKYPSLSFSQTHFPTPFCRLLAAV

SEQ ID NO: 228650 - protein, 64 aa, Glycine max
  Clone ID: PAT_MRT3847_48499C.1.pep
RDTTHLMFACCPRIGICHKDVWRLQCGIPSAFPLTVICNSIFNEMLTRHSYEKLLRQAKAHSTF

SEQ ID NO: 228651 - protein, 65 aa, Glycine max
  unsure (1)..(65): unsure at all Xaa locations
  Clone ID: PAT_MRT3847_4849C.1.pep
IQPQLDKKKKFFERSLPRHSARKSTGGKAPRXQLATRAERKSAANCGDLRTQIVXRPGTVALREI

SEQ ID NO: 228652 - protein, 94 aa, Glycine max
  Clone ID: PAT_MRT3847_484C.1.pep
METMLPPNQAQEAIVTTSLNETESEVGMREEEKELQQQDHSMFNIKSFLWHGGSVRDAWFSCASNQVAQVLLTLPYSFSQLGMLSGILLQIFYG

SEQ ID NO: 228653 - protein, 161 aa, Glycine max
  Clone ID: PAT_MRT3847_48500C.1.pep
MDHNRGRNNDVNNSVGGRNVRPLGLSASAWPPLQHAKQQNQNYGSGMRAVFLGNPSGRRECAGTGVFLPRRVDTPEPRKKQACSTVLVPTRVAQALNLNLDDMMAGQPQHLQRFNASSNMENGAAVSRQRSNYVLSQQQKRNLKSQPAVYHEIRLPQEWTY

SEQ ID NO: 228654 - protein, 60 aa, Glycine max
  unsure (1)..(60): unsure at all Xaa locations
  Clone ID: PAT_MRT3847_48501C.1.pep
ALDGFSLSGPAFAALAACCSFSDPVLRISPDGWSAWGASSPFLMWSASSSRSGANXNXAF

SEQ ID NO: 228655 - protein, 148 aa, Glycine max
  Clone ID: PAT_MRT3847_48502C.1.pep
MIQEKDEWNFTQEDFLTAGSTEVRPATTLSGAGCAYMNAMVHESSVSTIPGDFVIGVKLTTINNMCAYGLNPGISRPRLMGTIPQSISQQTVWNQMATVRTPLNSDSSKQSSMQDHIDLVGGGILVDQTGDGITLIHNAALHNLARAA

SEQ ID NO: 228656 - protein, 44 aa, Glycine max
  Clone ID: PAT_MRT3847_48503C.1.pep
YTYYRQMLINLAGSKRCLNIFGWIRRSMYPYQAEPNPNNFTGHF

SEQ ID NO: 228657 - protein, 146 aa, Glycine max
  unsure (1)..(146): unsure at all Xaa locations
  Clone ID: PAT_MRT3847_48504C.1.pep
SSRPTTRPGIRVFLVWFPVLIPSLPRWGDRVMHVLASCAWWSIQHLQVXWNHFSADVFEGPPPGXDWFEKQTGGTXDISCCSWMDXVFGGLQFQLEHHLIPMLSRAHLEXISPMEIDSCKMHNVPYRSVTSVEATLWALKTLTTAA

SEQ ID NO: 228658 - protein, 104 aa, Glycine max
  unsure (1)..(104): unsure at all Xaa locations
  Clone ID: PAT_MRT3847_48505C.1.pep
MALRGNPIPTQTFSLPQMPSLISPRLXMVFTLRSRSQHVQNIKNPFTPPTEVHVEITHSIPPHKTDILKSLQDSDDPNTLTHLKPDTKCPRPQDFLPDPLSHPF

SEQ ID NO: 228659 - protein, 56 aa, Glycine max
  Clone ID: PAT_MRT3847_48506C.1.pep
PATSQRGGCMMVNGIPLMSYTEAGRCGPHIRNKVKIPNNTESGYIERTKISSSSEG

SEQ ID NO: 228660 - protein, 139 aa, Glycine max
  unsure (1)..(139): unsure at all Xaa locations
  Clone ID: PAT_MRT3847_48507C.1.pep
GTINNMGVYGLHPGISGSRLLGTIPQSISQQTVWNQMATVRTPLDFDSSMQSFXQFSIDLLGGGILVDKTGDWITLIHNSPISNLLRVXAWYKGCLMDDIDMSDNAATKMSDCASLVQAFITHSNSTEHSDACKWTKSE

SEQ ID NO: 228661 - protein, 157 aa, Glycine max
  Clone ID: PAT_MRT3847_48508C.1.pep
MSIIPNLFGGRRSNVFDPFSLDVWDPFEGFPFSTGHVPSSGGESSAIANTRVDWKETPAAHVFNVDLPGLKKEEVKVEVEDGRVLQISGERTKEQEQKDDRWHRVERSTGKFMRRFRLPENAKMDQVKAAMENGVLTVTVPKEEDKKPQVKSIQISA

SEQ ID NO: 228662 - protein, 114 aa, Glycine max
  unsure (1)..(114): unsure at all Xaa locations
  Clone ID: PAT_MRT3847_48509C.1.pep
MKIRAMNNMVVLKVCLLLLFLVGRYXAARMELSLFKSDHSSSSDDDEYSISCCYLCMCTRLMPYQCCCEDIMLNSCLSDCKSCMCTRSQPGQCRCLYTNYYCYKPCMSRYDYKH

SEQ ID NO: 228663 - protein, 78 aa, Glycine max
  unsure (1)..(78): unsure at all Xaa locations
  Clone ID: PAT_MRT3847_4850C.1.pep
MLFSVLSSCKSAAPSVMGDDMIDTCXTIAEGAALXNEEGAREGNASCTNAIISPTAIERMSRDLFHEAIITNTPPDAQ

SEQ ID NO: 228664 - protein, 70 aa, Glycine max
  unsure (1)..(70): unsure at all Xaa locations
  Clone ID: PAT_MRT3847_48510C.1.pep
XXSYRGNVKASXKFRASEGXXXKQXXXETPXAXLPTXGQEREWXSAVKXLXLKGYFPXXPARXLLPPLXG

SEQ ID NO: 228665 - protein, 48 aa, Glycine max
  Clone ID: PAT_MRT3847_48511C.1.pep
DLDPPREGAPLFFFFFFLKVRKCIWLNSRDRCRESKDLGHEEQTYLRQ

SEQ ID NO: 228666 - protein, 80 aa, Glycine max
  Clone ID: PAT_MRT3847_48512C.1.pep
MMMKKSGFEKMVMLQKNNKNKGSYDDEKPRSKRFLVNINIMGSAWPITFVVNEKELVSGVIDTALKSYSREGKLSFLGFD

SEQ ID NO: 228667 - protein, 66 aa, Glycine max
  Clone ID: PAT_MRT3847_48513C.1.pep
RSFNYMNMRAQIYVSASHSNASTAYTIALSATVCRWTSCSPSTTSVSASAKAECIPAAFAESDAVL

SEQ ID NO: 228668 - protein, 47 aa, Glycine max
  unsure (1)..(47): unsure at all Xaa locations
  Clone ID: PAT_MRT3847_48514C.1.pep
XEXGLMDXLLXQQMVNEVLQXEQTXXXTETXVEXLTGRCXHHPXFFL

SEQ ID NO: 228669 - protein, 57 aa, Glycine max
  unsure (1)..(57): unsure at all Xaa locations
  Clone ID: PAT_MRT3847_48515C.1.pep
MAQETFLFTWESVYEGHLDXLCDHISDAVLNACLEQDPRLXVAWQTCSNTNMVMGFG

SEQ ID NO: 228670 - protein, 76 aa, Glycine max
  unsure (1)..(76): unsure at all Xaa locations
  Clone ID: PAT_MRT3847_48516C.1.pep
EFGSRCWQQLSQVEPQPRCQAXIFGVVLQSILQQQLQSGQVAGLLAAQKAQQLSAMSGLQQPAPCPYXAAAGGVPH

SEQ ID NO: 228671 - protein, 28 aa, Glycine max
  Clone ID: PAT_MRT3847_48517C.1.pep
TRPDEAEKMCTHVAHNTSTLLLRFLTLH

SEQ ID NO: 228672 - protein, 278 aa, Glycine max
  unsure (1)..(278): unsure at all Xaa locations
  Clone ID: PAT_MRT3847_48518C.1.pep
MAESVELPSRLAILPFRNKVLLPGAIIRIRCTSPTSVKLVEQELWQREEKGLIGILPVRDVVEIKPVGPTVSEGADSTNQNSKVQGGSLDSRKLDTKKQNDVVHWHNRGVAARPLHLSRGVEKPSGRVTYTVVLEGLCRFSVQELSTRGIYHTARITSLEMTKTELEQVEQDPDFIMLSRQFKATAMELISVLELKQKTGGRTKVLLDNVPVHKLADIFVASFEISFEEQLSMLDLIDPTVRLSKATELXDRHLQSIRVAEKITQKVEGXLSKSQKDF

SEQ ID NO: 228673 - protein, 117 aa, Glycine max
  unsure (1)..(117): unsure at all Xaa locations
  Clone ID: PAT_MRT3847_48519C.1.pep
LCRVRWDWSWEVMLTSEETCSSMIVDWXSTELLHDIRSYYLWLLLHDXCKETCSCGTAPYVGLTDFRKLYTDVDAQTNRLQGYLEYXDFNHRDDRXDIVSLLSGDDKDEDIAVMMDP

SEQ ID NO: 228674 - protein, 95 aa, Glycine max
  Clone ID: PAT_MRT3847_4851C.1.pep
GPESKNKVKLVSLGLQAGKGYSKKAPFTKSKTNPSCLKKRSRSRNQNRAGRQEKRWWLWGESLFLLRQKGIWYPTWLFASKKIFEGIAFGLGEIH

SEQ ID NO: 228675 - protein, 83 aa, Glycine max
  unsure (1)..(83): unsure at all Xaa locations
  Clone ID: PAT_MRT3847_48520C.1.pep
MYMMILTHLFKVNLSVLSISHASVVDYCVAYYTCPVGLATCSCMSTAKVTDDHFIYLGLGTAGNTXYIIKADETDSFDAQFNG

SEQ ID NO: 228676 - protein, 107 aa, Glycine max
  unsure (1)..(107): unsure at all Xaa locations
  Clone ID: PAT_MRT3847_48521C.1.pep
MYIFKLILLVDININKGNGKKEEIKRIIYYLVDVDHDSNLDYINCSECGNACEYRCSETHHRKPCLFFCNKCCKTSLCVPSGTYGHKEECPCYXNNWNTKEGKPKFP

SEQ ID NO: 228677 - protein, 60 aa, Glycine max
  Clone ID: PAT_MRT3847_48522C.1.pep
KAQIPLLPKLQILHQGRALLFRPLRHFKQIPTPPKRGAPLVPQGKKDPPQGVGPPPGGDF

SEQ ID NO: 228678 - protein, 66 aa, Glycine max
  Clone ID: PAT_MRT3847_48523C.1.pep
KLTTLKSFVFFLAKFGKIYFFPPGKNWSGWFFFFLRGEAPKFFSMKNSGGFKTPPLIGKKPLSLFL

SEQ ID NO: 228679 - protein, 46 aa, Glycine max
  Clone ID: PAT_MRT3847_48524C.1.pep
FSRVRPRVLKRRCEWNKWYALQGNQWGIADLIGDTDQRCWDLRLIL

SEQ ID NO: 228680 - protein, 44 aa, Glycine max
  Clone ID: PAT_MRT3847_48525C.1.pep
MKNAIGQTVRDLNRGVNQQVLAVPGLEPKVLDATSYEPWGPHGS

SEQ ID NO: 228681 - protein, 33 aa, Glycine max
  Clone ID: PAT_MRT3847_48526C.1.pep
FGSSCFFSHILARSITGHWYLSLYNTPRRPNLT

SEQ ID NO: 228682 - protein, 93 aa, Glycine max
  Clone ID: PAT_MRT3847_48527C.1.pep
KLKKKKKIKKKKKKGTKMSPLFLIKKKKNQISEGGGLKGIKVNVPLKATKFFFYGAPKINCLARGLTPSHGEKPWLSQIKPLWETCPFSPSGA

SEQ ID NO: 228683 - protein, 35 aa, Glycine max
  Clone ID: PAT_MRT3847_48528C.1.pep
PVLNLEIRLEENSFSKVHHQPPRTLSWLDVQIKNF

SEQ ID NO: 228684 - protein, 425 aa, Glycine max
  Clone ID: PAT_MRT3847_48529C.1.pep
MVKGLHGQNLPAHVAQLVDQLERHCFAPDGSLISKPLFNDLQLAREEMCRERLRYLEAMAIYSEAIAMVEEYQQAISVSNLGGIRDTGNLYPQLGLKNSPQVYQTLEHQMVVAEAAQRLRLPLISKDGEVHDEDIEKLSVVSRSSLDSTVSGANSSNYNTPSSSVSGANTALAASDPVEVGVGGVANRFLGITPSYLWQTQHQKAPLSVDMTEYRLSVSREVEARLKMKCEKLSDAFVLDDNDSSSSGSHSSSSRLPERVKLLIEEIEREETALRDDLYSADRKFAEYYNVLEQILAVLIKLVKDLKLEHQHKYDEMQKTWLCKRCETMSAKLSVLEHVLLLETYTKDSIPALHKIRKYLVEATEEASIAYNKAVTRLREYQGVDPHFDNIARQYHDIVQKLENMQWTIHQVEMDLKRLPDKPST

SEQ ID NO: 228685 - protein, 43 aa, Glycine max
  Clone ID: PAT_MRT3847_4852C.1.pep
GLNLDQKKKGIYTFIGLLAKIKCSFECWGIVFSSNRVRVVVYI

SEQ ID NO: 228686 - protein, 46 aa, Glycine max
  Clone ID: PAT_MRT3847_48530C.1.pep
QRLNAKKKKKKKKEKKKKKKKKKKKKKKKKKKKKKKKKNKKNIIRT

SEQ ID NO: 228687 - protein, 106 aa, Glycine max
  unsure (1)..(106): unsure at all Xaa locations
  Clone ID: PAT_MRT3847_48531C.1.pep
KGNNFAGGPMGEVTTPIHSGGSFDPMGFXEDTKASAGVKVQSLKKGXPALSSTDGFFVQGVLTTQGPTQEPRSSLADPVQSNVWAFPPQYGPGLVSIKPKVFSVFS

SEQ ID NO: 228688 - protein, 709 aa, Glycine max
  Clone ID: PAT_MRT3847_48532C.1.pep
MLPKNPIFRCRDTPSANAFKKPRPTRKQKSKNKENNPPPFKSLLPPKPPSSTPNPNPLKRKHSDHSVPAASNSGVKVIVRMRPSCSDGDEGDSIAQRISSDSLSINGQNFTFDSVAHSNATQARFQLDIFELVGAPLVENCLAGFNSSVFAYGQTGSGKTYTMWGPADALSDDNSASDQQGLAPRVFERLFSLINEEQIKHSDKQLKYQCHCSFLEIYNEQIADLLDPNQRNLQIREDVKSGVYVENLTEEQVCTKKDVAQLLIKSTADGVSRFRTSKINLVDLAGSERQKLTGAAGDRLKEAGNINRSLSQLGNLINILAEVSQTGKLRHIPYRDSRLTFLLQESLGGNAKLALVCAISPALSCKSETLSTLRFAQRVKAIKNKAVVNEVMHDDVNQLRDVICQLRDELHRIKENGYSPSDGSRGHSAALIRRNGDEEMEIDEEALSSQTAPNFLTKTENLAVSICHGLEIIDSHHHAEKVLAGSIRREMALEEFCAKQTSDIMQLNCLLQKYRQERECNATIAQIREDKILRLQSHIDGVLSTKEFMDEEPVSLAHENKNFYQFGEREVLMEEICSLRNQLHFYVDSSSKSTRKQYPPLQFTYSSEPKEKHIQLLERHRKIQDGIDDVKEAASGAGVRGADSKFINDLAAEISALKAETEKEKEMKILRDENRGLRAQLKDTAEAVQAAGELLVRLNEAEEGVITAQ

SEQ ID NO: 228689 - protein, 86 aa, Glycine max
  Clone ID: PAT_MRT3847_48533C.1.pep
VLANLGEYMAQFIRTNRSIVMRGALPLTFGQIQSLDSVFLHGSFLVEKLSARLVSAATTVSVSLEINCLHVCSGWSSCSPQCRVLL

SEQ ID NO: 228690 - protein, 1123 aa, Glycine max
  Clone ID: PAT_MRT3847_48534C.1.pep
MLPKNPIFRCRDTPSANAFKKPRPTRKQKSKNKENNPPPFKSLLPPKPPSSTPNPNPLKRKHSDHSVPAASNSGVKVIVRMRPSCSDGDEGDSIAQRISSDSLSINGQNFTFDSVAHSNATQARLQLDIFELVGAPLVENCLAGFNSSVFAYGQTGSGKTYTMWGPADALSDDNSASDQQGLAPRVFERLFSLMNEEQIKHSDKQLKYQCHCSFLEIYNEQIADLLDPNQRNLQIREDVKSGVYVENLTEEQVCTKKDVAQLLIKGLLNRRIGATSINSESSRSHTVFTCVVESRCKSTADGVSRFRTSKINLVDLAGSERQKLTGAAGDRLKEAGNINRSLSQLGNLINILAEVSQTGKLRHIPYRDSRLTFLLQESLGGNAKLALVCAISPALSCKSETLSTLRFAQRVKAIKNKAVVNEVMHDDVNQLRDVICQLRDELHRIKENGYSPSDGSRGHSAALIRRSLILLKPALNHPLSLPHVDEDGDEEMEIDEEGVEDHAVVLHNSNGGFAGFSAPNGSIGSPSAAMNGDSPAGGMVKCKTSPILKFRPSSLSPTIRSSRKSLRTSLKQSPSENNIHGESDLVDGSRSRLFLMIMPKRKDYAMLTCNNCKSRMQLDANEIANSSNVQLVLIDRPESTDKPKKQILKAAEKVLAGSIRREMALEEFCAKQTSDIMQLNCLLQKYRQERECNATIAQIREDKILRLQSLIDGVLSTKEFMDEEPVSLAHENKDLPAIKIQQLLKENHEHHLEVLKMKIELKRVQDELQEYQNFYQFGEREVLMEEICSLRNQLHFYVDSSSKSTTKQYPPLQLTYSSEPSLAANLTAISDLTEASTEANANPESTEDSAKVKIKQEKSQWTEAESRWISLTEKLRAELEASRSLAEKRKQELDTERKCAEELNKTMQMAIEGHTRTLEQYADLEEKHIQLLERHRKIQDGIDDVKEAASGAGVRGADSKFINDLAAEISALKAETEKEKEMKILRDENRGLRAQLKDTAEAVQAAGELLVRLNEAEEGVITAQKRAMDAEQEAAKAYKQIDKLKKKHDKDISTHNKLLAKTRLPNEEIQPTLDDLLVMPICDDTKVLKNVNGQFELFCNEEDSELANLADQSWFSAYDTCNI

SEQ ID NO: 228691 - protein, 51 aa, Glycine max
  Clone ID: PAT_MRT3847_48535C.1.pep
SIQSLSLIAHLNGGYFLLWVIRNFPHALAVYVPSKKRKGSGGSCSVLVPSS

SEQ ID NO: 228692 - protein, 104 aa, Glycine max
  Clone ID: PAT_MRT3847_48536C.1.pep
DLVGGLVYRFPYFHSLLHTDPHCRPKWRYLKNTWALAQTFASIIVSGDNRVTDKTTVTCRDTGIVVDYYTVASSFRKFLPHYITWHLDTLVNYMLPSFLTAEIK

SEQ ID NO: 228693 - protein, 57 aa, Glycine max
  Clone ID: PAT_MRT3847_48537C.1.pep
LRQSHALSKLANPLGLSILRLCQSFLVGRSRKRSHASCAGGKQAAFKSEGIRGYGIS

SEQ ID NO: 228694 - protein, 66 aa, Glycine max
  Clone ID: PAT_MRT3847_48538C.1.pep
SPSWEPFFLITLSLHSSLGGRQAHEFSWLSLSSPSQILSFAPAPLIQVSTRSILHLVQLHRAQVGW

SEQ ID NO: 228695 - protein, 95 aa, Glycine max
  Clone ID: PAT_MRT3847_48539C.1.pep
VQMAFMSMQGVAMHWFYIWNQKNPNSDWDSFSIALIKRFRDRYGNHFFERLSILKQDKTETKTCIEERETSIVFLKERTNNVPKLKKMLQQLAKK

SEQ ID NO: 228696 - protein, 76 aa, Glycine max
  unsure (1)..(76): unsure at all Xaa locations
  Clone ID: PAT_MRT3847_4853C.1.pep
PQYKPKFDALLFGVKKAKGKSFKGFGGLEKEIFXVQGLKKKVCSLAAGXFFKSLLXLRKKFFFEVRNDNWGFWFFN

SEQ ID NO: 228697 - protein, 34 aa, Glycine max
  Clone ID: PAT_MRT3847_48540C.1.pep
LQAPRPSYSPRRLSASAHFYTTLSIFYYTQLTFF

SEQ ID NO: 228698 - protein, 149 aa, Glycine max
  Clone ID: PAT_MRT3847_48541C.1.pep
MAAAISSPMAQSVAAAATPVIAPGVALGGGPFANASLYVGDLEGNVNEEQLYDLFSQVAQIASIRVCRDQTKRSSLGYAYVNFANAQDASNAMELLNFTPLNGKPIRIMFSQRDPSIRKSGHGNVFIKNLDTSIDNKALHDTFAVFGTV

SEQ ID NO: 228699 - protein, 58 aa, Glycine max
  Clone ID: PAT_MRT3847_48542C.1.pep
PTLTDTPGAISMDLMRRGQLLRSTIDLAAFHSRVSYCYLWLFPIWRQNLPLIQRLFNR

SEQ ID NO: 228700 - protein, 67 aa, Glycine max
  Clone ID: PAT_MRT3847_48543C.1.pep
NCHVNYAIFAPTKDISNSEALCSNQTDCNERKKKKKHCKPHEMLIRKFKITFHSTTQAQIYQLFQPP

SEQ ID NO: 228701 - protein, 87 aa, Glycine max
  Clone ID: PAT_MRT3847_48544C.1.pep
TRKDTHLHLGKQEWAKIRGEGLRKNKLLTEHGQTRNSSTHSCLKQPNIQQNSYFDSFITYKSHNTNDIEKHSTHFITISLWQVSNKN

SEQ ID NO: 228702 - protein, 91 aa, Glycine max
  unsure (1)..(91): unsure at all Xaa locations
  Clone ID: PAT_MRT3847_48545C.1.pep
LYPILRALSSLLTLRGVVARPLVTGQALYGDMVTEVYSTAPIRVVKMDYFRPDMVNFVHXNIFNNRRHPYADSRCAGYQTCGXSWGTGRAV

SEQ ID NO: 228703 - protein, 169 aa, Glycine max
  unsure (1)..(169): unsure at all Xaa locations
  Clone ID: PAT_MRT3847_48546C.1.pep
MAVADSISFQEQLLQRVASAQFRKPLLHLVSTQEDKGRYLTQCVPLHKASLKGDWKEARKLLDQDGSLLKTAITKGGWATLLHIAVGANRVHFVEELLKLMQPEELELQDHKGNTAFCFAAAVGNVQIAEMMERINASLPTIRGXRRTXTPLHLAVLQGKKRNGMASVP

SEQ ID NO: 228704 - protein, 168 aa, Glycine max
  Clone ID: PAT_MRT3847_48547C.1.pep
MLDMISQNISSLVVGDEVLTPEIEEDDLISLEGDPIIDSSSLSVASEHSSICGDEFISSEVSSDLGTTSSKDIGKSISTVKIAARATDLSMSNVEADVAVSLEETGVRSGSKPTTGVFHQLTLERSVSGTVSRSVFELDCTPLWGFTSVCGKRPEMEDAVATVPRFLK

SEQ ID NO: 228705 - protein, 103 aa, Glycine max
  Clone ID: PAT_MRT3847_48548C.1.pep
KSSLVCTIRIYNSLLHKQNIITKVLDINLSHHLHRPLPPHHPLPPLLLLQIPHCPKTKLTPFSYLSPERSLLFNETLLFQGHPLRFRFMGFQQKEERITSFFL

SEQ ID NO: 228706 - protein, 66 aa, Glycine max
  Clone ID: PAT_MRT3847_48549C.1.pep
TRNYNLLCFMIFYTYIHTYIYIYIYIYIYIYIYINYTYCILYIFRIIVAPHWICIISDTHIVSAHH

SEQ ID NO: 228707 - protein, 134 aa, Glycine max
  unsure (1)..(134): unsure at all Xaa locations
  Clone ID: PAT_MRT3847_4854C.1.pep
TRAGHSVVGSLVLLVNLMLLIRHEVPISSLLPVITFGSPSIMCGGDSLLEKLGLPKSHVQAITMHRDIVPRAFSCNYPNHVAELLKAVNGNFRSHPCLNKQKLLYAPMGNLLILQPDEKFSPSHXLLPSGRGLY

SEQ ID NO: 228708 - protein, 180 aa, Glycine max
  unsure (1)..(180): unsure at all Xaa locations
  Clone ID: PAT_MRT3847_48550C.1.pep
VVETNSNNNSLLKQVREHEEEIILLRKRLADYSVKEGQIRNEKYVLEKRIAYMRLAFDQQQQDLVDAASKALSYRQDIIEENIRLTYALQDAQQERSTFVSXLQPLLAEYSLQPPVPDAQSIVSNVKLLFKXLQEKLLLTESKLKESQYQLTPWRSDMNHANVATQSQPHFDWCTFDNFK

SEQ ID NO: 228709 - protein, 71 aa, Glycine max
  Clone ID: PAT_MRT3847_48551C.1.pep
GDPRAEWSGIDADLAHGCLCFSILCLHCLLNEVVVCLDCYLKMSQASMQEGCRVTWVEMIAPNAGMDWSLI

SEQ ID NO: 228710 - protein, 247 aa, Glycine max
  unsure (1)..(247): unsure at all Xaa locations
  Clone ID: PAT_MRT3847_48552C.1.pep
ANWSSGNPPYTTTVDDPSSSYSPYLPAVLEEPSSSFSEDEDPLPAIEGLQISGEAFPGRELKAGGYSINGTTSCNFEGXKQPIYLVNADDVGTLLAIEVQPLDNRKRKGEPVKVFANDNKKIACDPEMQNHIEKAFNSGHASYRVSHSTRYLDIWEPATLAITREGYSIKCSGQSGVVITEKFSPSTTVMIPYGHTSEFIIIGSSGDEHLLKTDFSGARDTIVLTLRLFILRRPGEKRRVKKKGLFF

SEQ ID NO: 228711 - protein, 83 aa, Glycine max
  Clone ID: PAT_MRT3847_48553C.1.pep
IPIHSVHSSSLHLTRLTCLQEVKISPNHQHQHLLPHHHSSHSGGDPIDPVQCLPEHQQRPEALLESTYAEVPVQGHFYLKLSK

SEQ ID NO: 228712 - protein, 34 aa, Glycine max
  Clone ID: PAT_MRT3847_48554C.1.pep
LHKFTITAQANSALLWNVKRNKVCIGRRALLPIP

SEQ ID NO: 228713 - protein, 39 aa, Glycine max
  Clone ID: PAT_MRT3847_48555C.1.pep
RFFTKREQSTFIIGSKFLLSQNLKFNITFYLFHQFLNTT

SEQ ID NO: 228714 - protein, 81 aa, Glycine max
  unsure (1)..(81): unsure at all Xaa locations
  Clone ID: PAT_MRT3847_48556C.1.pep
DPDSKVACFTCTKTNFGLAFXITTKANVYYYNIILYNFMNIIFLLNDLLLDSHNFKVLHNIYHHNPYIAXGLHFHLTKKPE

SEQ ID NO: 228715 - protein, 70 aa, Glycine max
  Clone ID: PAT_MRT3847_48557C.1.pep
EKFSPSTTVMIPYGHTSEFIIIGSSGAEHLLKAENNTDFSGARDTIVLTLRLFIRRRPGKRRVKKKGLFF

SEQ ID NO: 228716 - protein, 41 aa, Glycine max
  Clone ID: PAT_MRT3847_48558C.1.pep
KALLKHATNLIPVSLSVPDKTFFQQLPSFFIERGTKRGETL

SEQ ID NO: 228717 - protein, 53 aa, Glycine max
  Clone ID: PAT_MRT3847_48559C.1.pep
GTGMGADAVFRSGGCDDEESNDGKVDDLLLTKEASLKKLLNTHKSGSSNKRSQ

SEQ ID NO: 228718 - protein, 353 aa, Glycine max
  Clone ID: PAT_MRT3847_4855C.1.pep
ATRFFVIQGSETLASWQANLLFEPIKFEGLDVLVHRGIYEAAKGIYQQMLPEVRAHLKSRGSRATFRFTGHSLGGSLALLVNLMLLIRNEVPVSSLLPVITFGSPSIMCGGDSLLKKLGLPRSHVQAITMHRDIVPRAFSCNYPNHVAELLKAVNGNFRSHPCLNKQKLLYAPMGNLLILQPDEKFSPSHHLLPSGSGLYILSCPLSESSDTLKQLYAAQMVFLNSPHPLEILSDRSAYGSGGTIQRDHDMNSYLKCVRTVIRQELNQIRKARREQRQKVWWPLVLPRGSDTNIVGGSMIQDQPSFSGIIQIGRESLKRFSRLVRSQHMQLFVALLFPARLLLVGACNLISLR

SEQ ID NO: 228719 - protein, 291 aa, Glycine max
  Clone ID: PAT_MRT3847_48560C.1.pep
MGILKVKHHIPTLLFLSISFPLFLLTPTSSDNTNLIYKGCADQKLQAQYSQNLKPLLDSLVSASAQKGFAATTQNALTGAYQCRGDLSNSDCYTCVSKIPGMVKRLCGGDDVAAARVQLSGCYLRYEVVGFKVVSATQLLYKVCGARKVVDGGGFEARRDAAFGMAENGVQSSGNLFYTGSYQSLYVLGQCEGSLGNEDCGGCIKSGAEQARDQCGDSISAQVYLQSCFLSYSFYPNGVPTASSSSSGGGGGHPHTERTVALAVGGVAALGFLIVCLLFLKSVRKKRGGKR

SEQ ID NO: 228720 - protein, 70 aa, Glycine max
  Clone ID: PAT_MRT3847_48561C.1.pep
FCVDSVPKRSLGSRGVTSKIYFLVQGTIFSFNSTLGGHTPPFFALVVSRSFFLFPLRIQVVSPRCTKKKM

SEQ ID NO: 228721 - protein, 129 aa, Glycine max
  unsure (1)..(129): unsure at all Xaa locations
  Clone ID: PAT_MRT3847_48562C.1.pep
SFKDKNLXGGVFFLELLSAVEPRVVNWSLVSKGETDEDKKLNPTYIISVARKLGCSIFLLPEDIIEVNQKMILILPASIMYWSLKKPEENITPEASPKASVDGESETDVVDEVSNLAIDDTTSENASSS

SEQ ID NO: 228722 - protein, 120 aa, Glycine max
  Clone ID: PAT_MRT3847_48563C.1.pep
QFWGAVLKGPIALLGTGLSPPGPELKVLGGGGFLKAWGGISFLRFNFPGAWSYGKKYGLFLGPLFFLWGKKPAPLGGLESKGALAVGTPADFVVWPPELGFALGDDYPVFPHPFVCFPCF

SEQ ID NO: 228723 - protein, 274 aa, Glycine max
  Clone ID: PAT_MRT3847_48564C.1.pep
LVHLVRISTYVNNVFEDVRNGWVLLEVLDKVSPASVNWKLATKPPIKMPFRKVENCNQVIKIGKELNFSLVNVAGNDIVQGNKKLLLAFLWQLMRFTMLQLLRNLRSHSQGKEITDADILNWANNKVKRAGRTSQMDSFKDKNLSGGVFFLELLSAVEPRVVNWSLVTKGETDEDKKLNATYIISVARKLGCSIFLLPEDIIEVNQKMILILAASIMYWSLKKPEENITPEASPKASVDGESETDLVDEVSHLAIDEVSNLAIDETTSENASSS

SEQ ID NO: 228724 - protein, 67 aa, Glycine max
  Clone ID: PAT_MRT3847_48565C.1.pep
QCARVLSLVGFFAGCRNVGYQWSDQEEKRKVVRQVGASAVSPIASVVGLPGHKHGALTITARFGAFA

SEQ ID NO: 228725 - protein, 432 aa, Glycine max
  unsure (1)..(432): unsure at all Xaa locations
  Clone ID: PAT_MRT3847_48566C.1.pep
MYVVPPPQRSDPGSGSGDLRVYQAWKGSNKFFLQGRFIFGPXSLALTIFLIAAPVAVFCVYVARKLIDDFSDHLGITIMAIAVIFTIYVLVLLLLTSGRDPGIIPRNAHPPEPEGFEGSLDVGAGQTPQLRLPRIKEVEVNGITVKVKYCDTCMLYRPPRCSHCSICNNCVERFDHHCPWVGQCIGLRNYRFPTRPVFSTTLLCIYVFAFCWVYIVRIMASEETTIWKAMIKTPASIVLIIYTFISMWFVGGLTAFHLYLISTNQTTYENFRYRYDRRANPYNEGVLNNIKEIFCISIXPFIEQFWGNGALNTSITYSMDVGTHEITGXSKLMWSXNLPLSLGLNLGGVFGRETYLDGLALXKSLLAIPSAEIASSVDDSDRAGMHPRRSSWGRKSGSWEMSPEVLALAARVGEPNRVGGGSSSLTHENSHV

SEQ ID NO: 228726 - protein, 67 aa, Glycine max
  Clone ID: PAT_MRT3847_48567C.1.pep
QTKDTWRRLVRINSGCQSRTIGYEKGSLWASRAQHRRSDELCVSRFQCYYMMRTSTGTRAICWSWFK

SEQ ID NO: 228727 - protein, 57 aa, Glycine max
  Clone ID: PAT_MRT3847_48568C.1.pep
RSREWVQSVIGVHLLLRKVLVISIIITPWLETMLMTDVAIGTPEDATHPDTSERGVG

SEQ ID NO: 228728 - protein, 220 aa, Glycine max
  Clone ID: PAT_MRT3847_48569C.1.pep
MHSFSHSIPFPGFAFAYIHLPLWSLAIAQDMGSSYFGEPNFGNERASCSSSSRKGKKSHNSDKPKQPQRGLGVAQLEKIRLHGYHPSLHAPYPSNFSNEDPRVQIAYSSVPSSSFSYSSSYAASYGFQPNIMMGLSEYQKTNIRYGDSQPTNTARWETTSVILESQYSAPSNIARPFLNLNDTHQDIDTRKHRNGSVGSSSQNSESSDTQELDLELRLSL

SEQ ID NO: 228729 - protein, 364 aa, Glycine max
  Clone ID: PAT_MRT3847_4856C.1.pep
MIRQSLYTPPSITFSTPSPKRHRFAPPSWRIRCDASSVSVEQKVVGPYPGGLGPHTGRDPNAKKPEWLRQKAPQGERFQEIKESLSHLKLNTVCEEAQCPNIGECWNGGGDGIATATIMLLGDTCTRGCRFCAVKTSRNPPPADPMELENTAKAIASWGVDYIVLTSVDRDDLPDGGSGHFAQTVKAMKNLKPEIMVECLTSDFRGDLKAVETLVHSGLDVFAHNIETVKRLQRIVRDPRAGYEQSLSVLKHAKHSKEGMITKTSIMLGLGESDDEVKEAMADLRAIDVDILTLGQYLQPTPLHLTVKEYVTPEKFDFWKEYGESIGFRYVASGPLVRSSYRAGELFVKTMVREKTKNVADSLL

SEQ ID NO: 228730 - protein, 71 aa, Glycine max
  unsure (1)..(71): unsure at all Xaa locations
  Clone ID: PAT_MRT3847_48570C.1.pep
KCALGFTFEGSPFWKFFTQEMTXSVPXHLXRTXPXPFSQKRXLKKLGARVKGVSRGRGXTRTXKYLHXRIS

SEQ ID NO: 228731 - protein, 51 aa, Glycine max
  unsure (1)..(51): unsure at all Xaa locations
  Clone ID: PAT_MRT3847_48571C.1.pep
LIIKIPRMLILNLIILVGCLIILKKXSFHTLQKLLFCQVSTNEKLSQLPFQ

SEQ ID NO: 228732 - protein, 261 aa, Glycine max
  Clone ID: PAT_MRT3847_48572C.1.pep
LEREFMAEMETLGKIKHRNLVPLLGYCKVGEERLLVYEYMEYGSLEEMLHGRIKTRDRRILTWEERKKIARGAAKGLCFLHHNCIPHIIHRDMKSSNVLLDHEMESRVSDFGMARLISALDTHLSVSTLAGTPGYVPPEYYQSFRCTVKGDVYSFGVVMLELLSGKRPTDKEDFGDTNLVGWAKIKVREGKQMEVIDNDLLLATQGTDEAEAKEVKEMIRYLEITLQCVDDLPSRSPNMLQVVAMLRELMPGSTDGSSNSA

SEQ ID NO: 228733 - protein, 54 aa, Glycine max
  Clone ID: PAT_MRT3847_48573C.1.pep
VFRILLFFILNFKNRIWKIKYKVILFQIKWPLELSLFFFYLKRTIEKVTGIIFH

SEQ ID NO: 228734 - protein, 70 aa, Glycine max
  Clone ID: PAT_MRT3847_48574C.1.pep
QASNAISLITLTDAGCRGGLMAEGFSLPNATLDEGIHSKGSTYNCLLAGMCRYHNVRAAKKLLNEKDNYQ

SEQ ID NO: 228735 - protein, 59 aa, Glycine max
  Clone ID: PAT_MRT3847_48575C.1.pep
GYESLPNEKVLSKVCFEGEINVVPLPCRPGVLCSPCSKKCKKGPISRAPNAERPPVKDV

SEQ ID NO: 228736 - protein, 69 aa, Glycine max
  unsure (1)..(69): unsure at all Xaa locations
  Clone ID: PAT_MRT3847_48576C.1.pep
KQNCKKKKLISQTFLGWNCQYSRKALAPKKGKEKISQRQPGQCISQQLFFDPKKQTKKKKQHKEXXXXL

SEQ ID NO: 228737 - protein, 83 aa, Glycine max
  Clone ID: PAT_MRT3847_48577C.1.pep
APQDLALQKGVFLGPFNGVPGPRAIVENKLFLGKYPDVFVPFFGGGNALLGGKSFAPRPIFFLIPRGPSKPFVIKLTPGPSFG

SEQ ID NO: 228738 - protein, 78 aa, Glycine max
  unsure (1)..(78): unsure at all Xaa locations
  Clone ID: PAT_MRT3847_48578C.1.pep
TLGIXKLDXTXSLXIXXXSIAGXXXTXILFRXXEXFVMCGCCLVXSLLVXCDGAVXXXCNRXGXCSXNFSRFXFVKLG

SEQ ID NO: 228739 - protein, 90 aa, Glycine max
  Clone ID: PAT_MRT3847_48579C.1.pep
LIIRLCWAKPHLRWRLIIGLGWMLYFKSADECLQLYPISPHTLILCNLLAINSLLGHLYNHYGLKQLVLLTGCSFWFLICLLNIISKLMT

SEQ ID NO: 228740 - protein, 46 aa, Glycine max
  Clone ID: PAT_MRT3847_4857C.1.pep
DPSNTIFKPIPKPIQLESLLITNDICNYCNQINGVSGQSFNKLYYT

SEQ ID NO: 228741 - protein, 61 aa, Glycine max
  Clone ID: PAT_MRT3847_48580C.1.pep
NEPQPCILYILVYHACRVVPKRNVRVLHQSMGLNSPLICRRSWRSFPHVFLETPIKLTHVP

SEQ ID NO: 228742 - protein, 128 aa, Glycine max
  unsure (1)..(128): unsure at all Xaa locations
  Clone ID: PAT_MRT3847_48581C.1.pep
TGVPRYALISETFRETLSAGFIAFIGIGEAVDWTFASCFDHQSAKNTTIHSYTLHDILTLSVDYPFSVNEMVALRELFMKVRSCIIADGLIHKEELTLATXKTTTGENLLLDRVXDVFDGKINVVIEF

SEQ ID NO: 228743 - protein, 70 aa, Glycine max
  Clone ID: PAT_MRT3847_48582C.1.pep
NSYAGQDSRDKVHDLKNYAGLFSMPDRKAQEIKTSPGIMWLMNAKARSPVPLKILSIEDGTGSEACSTTP

SEQ ID NO: 228744 - protein, 160 aa, Glycine max
  unsure (1)..(160): unsure at all Xaa locations
  Clone ID: PAT_MRT3847_48583C.1.pep
CQMKRYSYTLGLGEPNXSGKSSLLYDLCKLNEIHVLKMTSYDERMENHENHVLHATHQIAESWIHASRKVLERIANAVLSRTFEKVAEDYYVVEMIWKLLAEAEESALDLRHKVPEILEVEVDPKGAPRIQEAIMKLYVSKSAFEKIHLLQAMHLRISSL

SEQ ID NO: 228745 - protein, 63 aa, Glycine max
  unsure (1)..(63): unsure at all Xaa locations
  Clone ID: PAT_MRT3847_48584C.1.pep
FLKPNXXALKSGTNXSSPLTNFTXIKSXXVHYHSSPFFSPSFSLQQKAPEFLKPIIXXILKXX

SEQ ID NO: 228746 - protein, 70 aa, Glycine max
  Clone ID: PAT_MRT3847_48585C.1.pep
SGNTHHLDLNVVTNDGVKASSLKHIICDRGVPSLNLNQNKCQKSEHTPCNTFTILRNVVLTEMKQFLKVK

SEQ ID NO: 228747 - protein, 79 aa, Glycine max
  Clone ID: PAT_MRT3847_48586C.1.pep
DLPVCVRGSSSNKEESGVNSGPARPCDARSGNGVRRGRRYALQLCSVRPPDYAKEWRPGGLAHSGSPPPLVLDQTKRPR

SEQ ID NO: 228748 - protein, 54 aa, Glycine max
  Clone ID: PAT_MRT3847_48587C.1.pep
MMAMQNMPRPTGADAAGHPLCELDLHPRVEEWDRRKMFGGPWSDPDVLDSANDA

SEQ ID NO: 228749 - protein, 127 aa, Glycine max
  unsure (1)..(127): unsure at all Xaa locations
  Clone ID: PAT_MRT3847_48588C.1.pep
IGIVVIVHPYQMSFPKKKKPIYFYDSICNPYYHSHIAHVKCPTTLTMLPLMFMWSLRKHVFICSLLHTTAPSKSPPPQGKSKKSLPGYLTTLHPSKKNLVSIGFARLCVHRWCLCPSGXXXXPPPPP

SEQ ID NO: 228750 - protein, 112 aa, Glycine max
  Clone ID: PAT_MRT3847_48589C.1.pep
KCTHPIREKKTCLRKKCFKVFQRGMAIFLKLVCPSWLNKSCVKFLRNSHKNFPLHGEVIVIKYNNSERSGIQAKFICKLVLMIVSVLSFPLVSKNMRELAARVFSGKWKGKK

SEQ ID NO: 228751 - protein, 54 aa, Glycine max
  Clone ID: PAT_MRT3847_4858C.1.pep
PQTHILISLGYSVHKPEITVLKGWQTELSLITRTDFIWKIFHLFQKTGLQRKPN

SEQ ID NO: 228752 - protein, 129 aa, Glycine max
  unsure (1)..(129): unsure at all Xaa locations
  Clone ID: PAT_MRT3847_48590C.1.pep
ENSFSNPSPPSLYNINVFFNLEIIFFWRNCCVKESKSKRVSLKKKYKVIRKVREHNRKKTKEEQKLRLSGERKGKKDLGIPNDXDFKEQELKGLEARRAKAIEGGEQKKXERGGRARKRKLGLLEDERY

SEQ ID NO: 228753 - protein, 264 aa, Glycine max
  Clone ID: PAT_MRT3847_48591C.1.pep
MAETKWVMKDKRWSLHGMTALVTGGTRGIGHAIVEELAEFGATVHICARNQDDIDKCLEEWKNKGLNVTGSVCDLLCSDQRKRLMEIVGSIFHGKLNILVNNAATNITKKITDYTAEDISAIMGTNFESVYHLCQVAHPLLKDSGNGSIVFISSVAGLKALPVFSVYAASKGAMNQFTKNLALEWAKDNIRANAVAPGPVKTKLLECIVNSSEGNESINGIVSQTFVGRMGETKEISALVAFLCLPAASYITGQVICVDGGFTT

SEQ ID NO: 228754 - protein, 55 aa, Glycine max
  Clone ID: PAT_MRT3847_48592C.1.pep
FSAARRLQKGTVCRRRSVVCLRKRKSKNGGRRARIVDDGILYCLPVTYQAVLHTN

SEQ ID NO: 228755 - protein, 342 aa, Glycine max
  Clone ID: PAT_MRT3847_48593C.1.pep
EEEEVEEVEEEDAMQNHSSDETKVEDEDEKKKHAELLSIPPHGSEVYIGGIPHASDEDLKSLCERIGEVAEVRIMKGKDSSENKGFGFVTFRSVELASKAIEELNNTEFMGKKIKCSKSQAKHRLFIGNVPRSWGVEDLKKIVTEIGPGVTGVELVKDMKNTNNNRGFAFIDYYNHACAEYSRQKMMSPTFKLGENAPTVSWADPKNAESSAASQVKAVYVKNLPKNVTQEQLKKLFERHGKITKVVLPPAKSGQEKNRIGFVHFAERSNAMKALKNTERYELEGQLLQCSLAKPQADQKSGGSNTQKPGPGLLPSYPPHVGYGLVGGAYGGLGARYAAILL

SEQ ID NO: 228756 - protein, 334 aa, Glycine max
  unsure (1)..(334): unsure at all Xaa locations
  Clone ID: PAT_MRT3847_48594C.1.pep
NIGSDDVETTLYSIGSRLKAFSDWLLKYMVSGNLDTIFPAATREYGPMVEGLWKDXEIIWPCITSINNRFSSKSXFISHMQAVEISKTDYEPSDTDILYAEGISLSNSLTSMEFCFPKSNSEDSLFPEYQHESSLRYQLIRVHPKSLGENCKWLEMFEETDVVMFSVALSDYDEYTTDSKGVSTNKMLVAKNLFENIISHRSFHNKKFLLVLTKFDLLEEKIEHIPLAQCEWFSDFQPFISPNQKKGCSNGNNNSSLAQCAFQYIAVKFKRLFLSITGRILFVSLVNGLEPDTIDEALRYGREVMEWEKWDPSIVTDPKSENTSTSIDEQSYLC

SEQ ID NO: 228757 - protein, 95 aa, Glycine max
  Clone ID: PAT_MRT3847_48595C.1.pep
QFLNPKVQASIAANTWVVSGSPQTKKPQDILPSIIHHLGPDNSENLNNLPQPFPKHAPEGALDPTTPQQDNHDSLPQIVPTQHPHTPREDPNAPP

SEQ ID NO: 228758 - protein, 66 aa, Glycine max
  Clone ID: PAT_MRT3847_48596C.1.pep
LDTSPTFFNLSKLLSSHKSLQEWAVYLAPQARFCCPPMILRRPCPPAGVDHRVLKPILEHHPHTCF

SEQ ID NO: 228759 - protein, 67 aa, Glycine max
  Clone ID: PAT_MRT3847_48597C.1.pep
LALHLRAISDNIYTFFHRTQRFIGSFFMPKQVNRGISKRCNSSLLCLKNIYAHCIHLDIYIFKKLWK

SEQ ID NO: 228760 - protein, 58 aa, Glycine max
  unsure (1)..(58): unsure at all Xaa locations
  Clone ID: PAT_MRT3847_48598C.1.pep
NPFYPKXNPNFVFQMFLSXNHLTSDLLENFILNNLNSSICTPEXINYFISISKFHDYY

SEQ ID NO: 228761 - protein, 119 aa, Glycine max
  unsure (1)..(119): unsure at all Xaa locations
  Clone ID: PAT_MRT3847_48599C.1.pep
GLAVLTVPFTMEFPKAIFYYXVTSNLFSLIYKLILKIPNIKKTLNIPEIPITPPTTTITPQSPFSIFPALKQATSSTTNKQSSIPEXASEHSNKKISSSSIISRKLRSLEKRXKEKKKN

SEQ ID NO: 228762 - protein, 129 aa, Glycine max
  Clone ID: PAT_MRT3847_4859C.1.pep
ASTRILKELKDLHKDPPTICSAGPVAEDLFHRQASIMGPADSTYAGRVFLGTIHFSPEYPYKPPKVRYTTNVFHPNINSNGSACLDILMEHCSPALTISEVLLAICSLLTEPYPVDPLVSEITHMYITD

SEQ ID NO: 228763 - protein, 68 aa, Glycine max
  Clone ID: PAT_MRT3847_485C.1.pep
TISLELQIPKGLVAPLVMFFLRGPIIFFFFPPPIGSNGGIKNHVIPPRVFFYLWGQKGGLKKKDYLKF

SEQ ID NO: 228764 - protein, 54 aa, Glycine max
  Clone ID: PAT_MRT3847_48600C.1.pep
RVVWAYLKNISGHGTKPSALCKPDWINNRARVAWTENPQLSMRRRQLRGMRRQG

SEQ ID NO: 228765 - protein, 117 aa, Glycine max
  Clone ID: PAT_MRT3847_48601C.1.pep
KKQNAVVSQVVRTFGGTHSSSYDIRSKKKTTVLQSTFADDKKGINSVGAKIDTKTLGHKFTISKEVGDPKVSKVPSVTNARYLPFLQDNVLADVSSDSSSTSMSSDSEDEDVQVANG

SEQ ID NO: 228766 - protein, 162 aa, Glycine max
  unsure (1)..(162): unsure at all Xaa locations
  Clone ID: PAT_MRT3847_48602C.1.pep
QYATPGGGITHFSVGGAPFYFRKKREEKVPTRRTFGELSNKKNQPRLLKSGLPTPAGKKTPGPPWGKKRTPPPXKKKKPPPPQPGKTYPRKTGGGPPPGPKGSFKKLMAPGPKKKEGRGPKTPTKALGPLGVPGPPPPKQMRARIPPGPPQNSQPRTNPKRA

SEQ ID NO: 228767 - protein, 89 aa, Glycine max
  Clone ID: PAT_MRT3847_48603C.1.pep
WSAGVIIYILLCGTPPFWGESEQEIFEEVLHGDLDFSSDPWLNISESAKDLVRKMLVRDPRKRMTAHEVLRHPWIQVDGVAPDKPLDSA

SEQ ID NO: 228768 - protein, 30 aa, Glycine max
  Clone ID: PAT_MRT3847_48604C.1.pep
GVGLQIKMGLRLVGSKKAFGLKKLANQKIG

SEQ ID NO: 228769 - protein, 94 aa, Glycine max
  unsure (1)..(94): unsure at all Xaa locations
  Clone ID: PAT_MRT3847_48605C.1.pep
EVQEPRDDGDSCHCEDGFYVKIVGLXGPKCRKEVLRLDGWINHFMNGGGEEKQEPLRLAHLLLGKAAFNSDGAFGELDFPSGIQEFLHTDPPCN

SEQ ID NO: 228770 - protein, 40 aa, Glycine max
  Clone ID: PAT_MRT3847_48606C.1.pep
KVGKNDGSERRSYRGAALVGSCRGEFVNLNCEIDHVEMTN

SEQ ID NO: 228771 - protein, 109 aa, Glycine max
  Clone ID: PAT_MRT3847_48607C.1.pep
HNMSNHHHSSNPFASCSCTHSDSDSDSVSCFVTDLFETRLCSCDDDTDINPFSDVVCDLHRTEHVLGLGFGVEIDPHSQTNGDNHHRDRVFDADRVFNFTVGDGSSGVR

SEQ ID NO: 228772 - protein, 112 aa, Glycine max
  Clone ID: PAT_MRT3847_48608C.1.pep
LDGHYVNHPFFSPSTAKTALPPLFPLYYHHMWWHPALQIRPGTLISTLCEPHILGLLTLHRTLPHNNFGIAEARHSLICLLCAKEPAFSDPGIHWGWHRSVFADTTGSTNRI

SEQ ID NO: 228773 - protein, 64 aa, Glycine max
  unsure (1)..(64): unsure at all Xaa locations
  Clone ID: PAT_MRT3847_48609C.1.pep
DTVAQSDVDXALRLMHMSKFSGDSEDRRKSFLDSISGIYSILLDLSARGILLDFIYTQSLILDI

SEQ ID NO: 228774 - protein, 102 aa, Glycine max
  unsure (1)..(102): unsure at all Xaa locations
  Clone ID: PAT_MRT3847_4860C.1.pep
ALEGFSTKXXXCTYDXXRAIXASXXRLXLXSPVIXXGXVLXLXSYXXSLGXXLXACANXRXNLSSQXGSWIGFXTAFRXGAVMGFXXXGNGLXXXYIHQSLQ

SEQ ID NO: 228775 - protein, 60 aa, Glycine max
  Clone ID: PAT_MRT3847_48610C.1.pep
SVSNQEPVFILLPGLRTVHFVNQQTFYFLFIFLNARICFCHKAKPSKFNLNVDPFFNELT

SEQ ID NO: 228776 - protein, 47 aa, Glycine max
  Clone ID: PAT_MRT3847_48611C.1.pep
EKHWLLLMAEGKEESKSSEESVKLVVSQAPKRMSADETLAMFKELAL

SEQ ID NO: 228777 - protein, 97 aa, Glycine max
  Clone ID: PAT_MRT3847_48612C.1.pep
SAASCYFLLTELALYHFLIKPPRRLYTTPLTSAADPYRPVLLRTHSHNVHGLLLELPRDATVFLRRALTHAELLAAVHYPYTAVALVATRDAPARVS

SEQ ID NO: 228778 - protein, 61 aa, Glycine max
  Clone ID: PAT_MRT3847_48613C.1.pep
MYYSQVLPHGIVVHVLTEIVKKMPKKELAEEVRRLQAAIGEQTEITKFSQQEYERLQNEKV

SEQ ID NO: 228779 - protein, 89 aa, Glycine max
  unsure (1)..(89): unsure at all Xaa locations
  Clone ID: PAT_MRT3847_48614C.1.pep
RLREDDKRASHYHRDLHKEXQTLTQGSTSMEDYYKKMEIXLIRVNVEEDRETTMVRFIGGVKKEITYVVELQHYVEMEDLLHKSIQVGR

SEQ ID NO: 228780 - protein, 43 aa, Glycine max
  Clone ID: PAT_MRT3847_48615C.1.pep
INVMRSGFLMRPRGRHYGQSTIASPSNSHGLRRGIRSSTTEHV

SEQ ID NO: 228781 - protein, 66 aa, Glycine max
  Clone ID: PAT_MRT3847_48616C.1.pep
VKLCVSIFFTNRWWEPCAFRCPLILWLPAHSTKSRSYIRAVLVLPHKFIVKDCFTNSYVPPIEIVT

SEQ ID NO: 228782 - protein, 159 aa, Glycine max
  unsure (1)..(159): unsure at all Xaa locations
  Clone ID: PAT_MRT3847_48617C.1.pep
MAENKDEIYSECSPGSNSPMGSKCRYLFHRLCGCDTSWNKNSSPKSRRIFHRDVEKEEFQYASSHCLSSYYSVFVVRLAIMVMLAILIGLLTILTWHFTKIYTAKSLRSLAYGLRYELLQRPVLRMWNXLNSTSEITTAQVKLSQYVIRRHSNPATQQS

SEQ ID NO: 228783 - protein, 281 aa, Glycine max
  Clone ID: PAT_MRT3847_48618C.1.pep
MEIKPGLSALVTGGASGIGKGLALALAEKGVFITIVDFSEEKGRQAAILVEKINSNFHSKLGFPSAIFVKCDVSNARDLAAAFEKHFLTYGGLDIYICINSAGISSSVPFRDDQTDGTRTWRYTVNVNFTAVIDSTRLAIKIMEASKRPGVIINLGSASGLYPMVADPIYSGSKGGVVMFSRSLRLYKRQGIRVNVLCPEFVETEMGNKIDPKIINLSGGFVPMEMVVKGAFELIMDESKAGHCLWITNRQGMEYWPSPSEEAKYLIRSSRFRRRSDFKAP

SEQ ID NO: 228784 - protein, 32 aa, Glycine max
  Clone ID: PAT_MRT3847_48619C.1.pep
KNTDSDSRNILKFSLPFNNSYCKRMIYRKLFV

SEQ ID NO: 228785 - protein, 123 aa, Glycine max
  unsure (1)..(123): unsure at all Xaa locations
  Clone ID: PAT_MRT3847_4861C.1.pep
TPNSYFPRGGLTLELVCESLAFKGKGLCXVTQTGFVVLCDRRVTRKKGNXSPYCGGCKTQNLSYEAQLRAKEEQVRDLLIHVGRFSREQLQLHGAIKPIVPFDIQFHYRNXMEFSLGPRRWLP

SEQ ID NO: 228786 - protein, 48 aa, Glycine max
  Clone ID: PAT_MRT3847_48620C.1.pep
FIEINPKRKLKEIFKEYLWEAAMAKMVVLFSMVSSIPLNCTLDFSFSQ

SEQ ID NO: 228787 - protein, 242 aa, Glycine max
  unsure (1)..(242): unsure at all Xaa locations
  Clone ID: PAT_MRT3847_48621C.1.pep
TAARRRQKGIRRATVNTFGYIAKAXIGPQGVVGTLLNNLKVQERQNRVCTTVAIAIVAETCSPFTVLPALMNEYRVPELNVQNGVLKSLSFLFEYIGEMGKDYIYAVTPLLEDALMDRDLVHRQTAASAVKHMALGVAGLGCEDALVHLLKYVWPNIFETSPHVINAVMEAIEGMRVALGAAVVLKYCLQGLFHPARKVREVYWKIYNSLYIGAQDALVASYPALEDEQNNVYSRPELMMFI

SEQ ID NO: 228788 - protein, 291 aa, Glycine max
  unsure (1)..(291): unsure at all Xaa locations
  Clone ID: PAT_MRT3847_48622C.1.pep
KDLLPRLTPILKNRHEKVQENCIDLVGRIADRGAEFVPAREWMRICFELLEMLKAHKKGIRRATVNTFGYIAKAIGPQDVLATLLNNLKVQERQNRVCTTVAIAIVAETCSPFTVLPALMNEYRVPELNVQNGVLKSLSFLFEYIGEMGKDYIYAVTPLLEDALMDRDLVHRQTAAFAVKHMALGALKCVMKTXLVHMLKYVXTNIFGTSPHVINAVMEAIEGMRVALGAAVVLNYCLQGLFHPARKVREVYWKIYNSLYIGAQDALVAAYPALEDEHSNVYSRPELMMFI

SEQ ID NO: 228789 - protein, 51 aa, Glycine max
  Clone ID: PAT_MRT3847_48623C.1.pep
RFKSTWGCNMTGQGINKWKKQAGVKLPLNHDMLKAKPYWDLLKEDCFNLVS

SEQ ID NO: 228790 - protein, 317 aa, Glycine max
  unsure (1)..(317): unsure at all Xaa locations
  Clone ID: PAT_MRT3847_48624C.1.pep
MLYSIARVPRLSSTEFPVTHRWPVENRFVEYYYEESEQGQGLQQEQEQQWIRSPRVRDRIDLMLWACFDRLELSPSSFKHVLLXRYSNGFQVLDVEDASNVRELVSKRDDPVSFLQMQPIPAISEGCEGFRASHPLLLVVACDKSKIPGKMLNVRDGHNEAQAENIVSSATAVRFYSLRSHTYVHALRFRSTVYMVRCSPRIVAVGLATQIYCFDALTLENKFSVLTYPVPQLGGQGMIGVNIGYGPMAVGXRWLAYASXSPLLSNTGRLSPQSLTPPAVSPSTSPSSGNLVARYAMXSXQHLAAGLINLSDMGYKT

SEQ ID NO: 228791 - protein, 189 aa, Glycine max
  unsure (1)..(189): unsure at all Xaa locations
  Clone ID: PAT_MRT3847_48625C.1.pep
MDKKQQCKTSQDPEVRKGPWTMEEDLILMNYIANHGEGVWNSLAKAAGLKRNGKSCRLRWLNYLRPDVRRGNITPEEQLLIMELHAKWGNRWSKIAKHLPGRTDNEIKNYWRTRIQKHIKQAENXSATKVSTMAQPMETYSPPSYQGMLDPFSIQFPTNPHHSSCCTNDDDNNNYWSMEDIWSMQLANY

SEQ ID NO: 228792 - protein, 48 aa, Glycine max
  unsure (1)..(48): unsure at all Xaa locations
  Clone ID: PAT_MRT3847_48626C.1.pep
IEXXANXILQSTISLPVPSFTLNNNNNNLFEFRKNYHYSLSGYRNCDS

SEQ ID NO: 228793 - protein, 127 aa, Glycine max
  unsure (1)..(127): unsure at all Xaa locations
  Clone ID: PAT_MRT3847_48627C.1.pep
MKNLSKDKDCSRSKSSNGFVPSSFKFISSCIKTASSGVRSAGASVAASISGDGHDRRDQXLDVEDASNVRELVSKRDDPVSFLQMQPIPAISEGCEGFRASHPLLLVVACDKSKIPGKMLNVRDGHN

SEQ ID NO: 228794 - protein, 61 aa, Glycine max
  unsure (1)..(61): unsure at all Xaa locations
  Clone ID: PAT_MRT3847_48628C.1.pep
MVCFSCLLPLFLGPVFNILRXVFHFIMGKIYRLFAWXYRKPDRAPPACPFMPPAYMADADC

SEQ ID NO: 228795 - protein, 49 aa, Glycine max
  Clone ID: PAT_MRT3847_48629C.1.pep
YGVYLYRGGFILFINTYTITSLSHFKNFILTFYYILIYFNSFKNRSHMT

SEQ ID NO: 228796 - protein, 42 aa, Glycine max
  Clone ID: PAT_MRT3847_4862C.1.pep
WDEIDYEFVGNVSGDRYMVHTNVYRKGKGDREQQFYLWFDPT

SEQ ID NO: 228797 - protein, 70 aa, Glycine max
  Clone ID: PAT_MRT3847_48630C.1.pep
FGIVELGSLPSTCFTATHRPEANRIRQSNLSPDRAKAESGDFYNDKRAVVEGCQKGSEPQRNLYAINLAC

SEQ ID NO: 228798 - protein, 58 aa, Glycine max
  unsure (1)..(58): unsure at all Xaa locations
  Clone ID: PAT_MRT3847_48631C.1.pep
PXLSNXAXXXXXXTXWHAXQDYPXXCPKIXDDFSAIXXANXPTGTSXFVMXRLRCSXG

SEQ ID NO: 228799 - protein, 72 aa, Glycine max
  unsure (1)..(72): unsure at all Xaa locations
  Clone ID: PAT_MRT3847_48632C.1.pep
NALVYGYYTCDFVIANCNIFNDFCSLSNLAILLDFGLNCLSEECSAYNRVWLPFDRYDAXTYLKYLDTLRVS

SEQ ID NO: 228800 - protein, 86 aa, Glycine max
  Clone ID: PAT_MRT3847_48633C.1.pep
QPSRALTQFVQETDQLAQFFQKILMVLCAYNKRGATQATFELDPQSNKFVEHTSCKKVRYVLSHEASHPLRHMPSQNIVIQTLSIS

SEQ ID NO: 228801 - protein, 65 aa, Glycine max
  Clone ID: PAT_MRT3847_48634C.1.pep
GWGNYDLVHLSRSGEWCPFISASLQLGCMLFVSSHTVWAFVMSMCVAPRSPWNALLLLIDTWVRP

SEQ ID NO: 228802 - protein, 77 aa, Glycine max
  Clone ID: PAT_MRT3847_48635C.1.pep
QKPGHGQYLKRALHKIPPPRLHRGHKGAFFAKNQNRGEKNLDPTGSPGPRVPGGTKNGCEPQQQKLFGRIPQPWGGP

SEQ ID NO: 228803 - protein, 92 aa, Glycine max
  Clone ID: PAT_MRT3847_48636C.1.pep
NIGLWDSFPSRTFGTVPGVNSFFLLLKALSFFVGGTFRWYRLASLSRLGPVIFRAKLLPLCISGFRHRYDPLASGSHYWDLLPDHVLQVVFV

SEQ ID NO: 228804 - protein, 69 aa, Glycine max
  unsure (1)..(69): unsure at all Xaa locations
  Clone ID: PAT_MRT3847_48637C.1.pep
SAQAPSSDFFGTSXKNVIASRVPNSKVSGGSFKIVAVXQNKEIEETHRTDTTNREGLAYDISDDQQDIT

SEQ ID NO: 228805 - protein, 98 aa, Glycine max
  Clone ID: PAT_MRT3847_48638C.1.pep
MDVDFQIDGSIQKESKALKFFRAALVDHVKELLKPAWHEGHLSKDAHIMIVKKSVDKVVSTLEPHQIPIMDTAKQYVSSSQVKIAKLVNGYVNKYGKY

SEQ ID NO: 228806 - protein, 52 aa, Glycine max
  unsure (1)..(52): unsure at all Xaa locations
  Clone ID: PAT_MRT3847_48639C.1.pep
MAKDVEQVTKQGESSGKDYNNPPPEPXIDPNDLTKWSLTKAALLKLIPPFLF

SEQ ID NO: 228807 - protein, 297 aa, Glycine max
  Clone ID: PAT_MRT3847_4863C.1.pep
VGRDVATCLQEALARKGLDVRVAALVNDTVGTLAVGHYHDPDTVAAIIIGTGTNACYLERVDAIIKCQGLLMTSGRMVVNMEWGNFWSSHLPRTSYDIDLDAESPNPNDQGFEKMISGMYLGDIVRRVILKMSLESDMFGPISPKLSMPFILWTPLMAAMHEDNAPVGREVARILNDIFEIPDVPLKARKIVVKVCDVVTRRAARLAAAGIVGILKKIGRDGSGGITGGRSRSDMKMRRTVVAIEGGLYSKYTLFREYLREALNEILGQDIAKHVILKVTEDGSGIGAALLAASYSS

SEQ ID NO: 228808 - protein, 45 aa, Glycine max
  unsure (1)..(45): unsure at all Xaa locations
  Clone ID: PAT_MRT3847_48640C.1.pep
VMNGGTNHTKLTFKIVCVTXIXVASWFKCGFSKDYRVDLVVKEEG

SEQ ID NO: 228809 - protein, 100 aa, Glycine max
  unsure (1)..(100): unsure at all Xaa locations
  Clone ID: PAT_MRT3847_48641C.1.pep
ATVTVSQRRPAPRYDYIQGANVEPPTFYNIGDLEGQDNLARIRVDNGTGEPMLLKGXIKALTQISSDFVGIKQVMFGGSEFENWNENLKSEDAGYGVPKI

SEQ ID NO: 228810 - protein, 94 aa, Glycine max
  Clone ID: PAT_MRT3847_48642C.1.pep
GPPLEPIFLKVKVFSGAVLRPKLFPSPTPLTWGNHKMDKNSPQRPLWGKEGALWLFHRKKIFFWVTPPLEKKKTPPLFVPIFSFWEKAQFLSPT

SEQ ID NO: 228811 - protein, 73 aa, Glycine max
  Clone ID: PAT_MRT3847_48643C.1.pep
LSNIIREHHMVYPVFNYMGKKRLIITKKGVQNAVLHTMYASPNQPNKRGFIPDKKYPIPEVIIKHSDPLKLIL

SEQ ID NO: 228812 - protein, 132 aa, Glycine max
  Clone ID: PAT_MRT3847_48644C.1.pep
MASFEEIIETTKWKDGQKIPYLALAKTLERIEATSSRLKNIRILSGFFAAAIRLSPSDLSPAVHLCLNKLGPSYEGLELGIAEAYLIKALAGATGRTVDMIKKDLKVKGDLGIVGQHSRSTQRMLAKPPPLT

SEQ ID NO: 228813 - protein, 70 aa, Glycine max
  Clone ID: PAT_MRT3847_48645C.1.pep
ALFFFFFFSFFFFFLVFLLVYLFVLCLYLTLVFVFSKCIYSLFGTAAKTLKLKRHSRKSAPNKRPHQPQK

SEQ ID NO: 228814 - protein, 48 aa, Glycine max
  Clone ID: PAT_MRT3847_48646C.1.pep
SLLGRPCRQGVPMARSTILLLERSSPSSHHGIKIYDSVCLEGTNVSHV

SEQ ID NO: 228815 - protein, 112 aa, Glycine max
  Clone ID: PAT_MRT3847_48647C.1.pep
MNFRSLEEFWAFYVNQHSKPSTRRWHFVGTLFSIFFLFCSVFFSWWFLFLVPFSGYGCAWYSHFFVEGNVPATFGHPFWSLLCDLKMFGLMLTGKMDREIKRLGKRPVLQVF

SEQ ID NO: 228816 - protein, 99 aa, Glycine max
  unsure (1)..(99): unsure at all Xaa locations
  Clone ID: PAT_MRT3847_48648C.1.pep
LSSPRPTSLSRSLALASTPSSSASTARSTSRLCLSTTLSLTTPSTQMPFTARIARARKVCPKDTFTLTFLPCSKTAASALTSXATVASSASRSMDLVAS

SEQ ID NO: 228817 - protein, 37 aa, Glycine max
  Clone ID: PAT_MRT3847_48649C.1.pep
SNQGGHVIPSHTPSVLLIEKNSPPLGTLTEFRGSSVI

SEQ ID NO: 228818 - protein, 65 aa, Glycine max
  Clone ID: PAT_MRT3847_4864C.1.pep
FISRFQALKMLQKNSTLDYVKNLQMFSNIRLLGGNQVSYRKKGLGFGLVKENDIWREYVRRFDQI

SEQ ID NO: 228819 - protein, 520 aa, Glycine max
  Clone ID: PAT_MRT3847_48650C.1.pep
MEPLFSSAAAICVVTVLVAVIPIWALKMLNSLWLRPKRFERLLRAQGFHGDPYSLSHHNSNQTLLQQHQLNSQPFPLSDDVAPRVSSLLHHTIDKYGKKSFFWEGRTPKVIITDPNQLKEVFNNIHDFQKPKFSDNVKFLFAGLLNYEGDKWAKHRRIMNPAFHSEKLKNMLPAFSQSCHDMISMWKGMLSSDGKCEIDIWPFLQNLTRDVISQTAFGSSYAEGEKFFRNLRMQGYLLMAGKYKNIPILRHLRTTTTKRMEAIEREIRDSIEGIIKKREKAMENGETSNEDLLSILLESNHKEIQGHGNSRAVGMTKQEVIEECKLFYLAGQETTSSLLVWTMVLLARYPEWQARARDEVFQVFGNQNPNIDGLSKLKIVTMILYEVLRLYPPTTFFSRAPQKDVKLGNLSLPAGIRITMPILFIHHDGDIWGDDAKEFKPERFSEGIAKATKGQISFYPFGWGPRICIGQNFALMEAKIVLSLLLQHFSFELSPVYEHAPTVVLSLQPKRGAHIVLHKL

SEQ ID NO: 228820 - protein, 207 aa, Glycine max
  unsure (1)..(207): unsure at all Xaa locations
  Clone ID: PAT_MRT3847_48651C.1.pep
NWVWDESXPLYQSKDCSFLDGGFRCSENGRPDLFYTKWRWQPKACNLPRFNATIMLETLRNKRLVFAGDSIGRNQWESLLCMLSSGVPNKEXIYEVNGRPITKHKGFLVFIFKDYNCTLEYYRAPFLVLQSRPPPRTDRKIRTTLKLDQMDWYSLKWTDADVLSLNTGHWWNYEKTITWGCYLQEGAEVNLEMMVEEAYNMCIKTGL

SEQ ID NO: 228821 - protein, 60 aa, Glycine max
  Clone ID: PAT_MRT3847_48652C.1.pep
FQCSHAYPPPCLMKLFCNQTRSVSYLYFKPFCFNQFIFVLRRHITYTDDGKTNGNFAPAI

SEQ ID NO: 228822 - protein, 473 aa, Glycine max
  unsure (1)..(473): unsure at all Xaa locations
  Clone ID: PAT_MRT3847_48653C.1.pep
MNMMRRLKSIASGRTSISSDPGGDSNSKRAKFEPETEGKADEKTNTIETICTDQEQPIDTSKETSNVGTSDVSTVARTEKSGFDELPKELNEMKIRDEKSKNNNEKDIEATVVSGNGTETGQIITTAIGGRDGQPKQTISYMAERVVGTGSFGIVFQAKCLETGESVAIKKVLQDRRYKNRELQVMRTVDHPNVVKLKHYFXSTTDKDELYLNLVLEYVPETVYKVSKHYVRMHQHMPIIYVXQLYTYQICRALNYLHQVIGLXGRDIKPQNLLVNPQTHQLKICDFGSAKVLVPGEPNISFICSRXYRAPELIFGATEYTTAIDMWSXVGCVLAEXLLLGQPLFPGESGIDQLVEIIKILGTPTREEIRCMNPNYNEFKFPQIKAHPWHKVFHKRMPPEAVDLVSRLLQYSPNLRCTALAACAHPFFDDLRDPNACLPNGRPLPPLFNFTSQELANAPEELRQRLIPEYARS

SEQ ID NO: 228823 - protein, 174 aa, Glycine max
  Clone ID: PAT_MRT3847_48654C.1.pep
SPDFGWRDMQLKVMARDSGDPPLSSNVSLSLFLLDQNDNAPEILYPALPTDGSTGVELAPLSAEPGYLVTKVVAVDRDSGQNAWLSYRLLKASEPGLFSVGLHTGEVRTARALLDRDALKQSLVVAVQDHGQPPLFATVTLTVAVADRISDILADLGSLEPSAKPNDSDLTLYL

SEQ ID NO: 228824 - protein, 49 aa, Glycine max
  Clone ID: PAT_MRT3847_48655C.1.pep
HPFFNDLRDPNACLPNGRPLPPLFNFTSQELANAPEELRQRLIPEHARS

SEQ ID NO: 228825 - protein, 222 aa, Glycine max
  unsure (1)..(222): unsure at all Xaa locations
  Clone ID: PAT_MRT3847_48656C.1.pep
GTVEIKVSGEGSNIEHDVKCDESHDEFCDAIHSQDIQPIEPLQIVMLIVGTRGDVQPFVAMGKRLQEDGHRVRLATHKNFEDFVMNAGLEFYPLGGDPKVLAGYMVKNKGFLPSGPSEIHTQRNQIKDIINTLLKACNSRYPESNAPFKAEAIIANPPAYGHTHVAEYLKVPLHIFFTMPWTPTSEFPHPLSRVKQPIGYRLSYXIVDALIWLGIRDLINEF

SEQ ID NO: 228826 - protein, 60 aa, Glycine max
  Clone ID: PAT_MRT3847_48657C.1.pep
CSMASPLPWSTCFKMPLFLKPLSFTEAWLINERLFLQFGICLQPEKEFGIPFDQSPRFKL

SEQ ID NO: 228827 - protein, 70 aa, Glycine max
  Clone ID: PAT_MRT3847_48658C.1.pep
HDNLDFKYSADQYFAFQTYFVIFLSLYPHSSIRPPYQQKLPWIAVSDKDKKSFKNAKLSPKDGEVGTGDK

SEQ ID NO: 228828 - protein, 119 aa, Glycine max
  unsure (1)..(119): unsure at all Xaa locations
  Clone ID: PAT_MRT3847_48659C.1.pep
QGFFCSNHGSQSKPXKCVGDKAANLAGDVSADNNSSVEAPKLKKIVDINEAQVCKNKGCGQTFKEKDNHDTACNYHPGPAVFHDRMRGWKCCDIHVKEFDEFMSIPPCAKGWHNADPES

SEQ ID NO: 228829 - protein, 153 aa, Glycine max
  Clone ID: PAT_MRT3847_4865C.1.pep
KLSMPFIMRTPLMSAMHEDNSPDLREVARILNDIFEIPDIPLKARKFVVKVCDVVTRRAARLAAAGIVGILKKIGRDGSGGITGGRSRSDMKMRRTVVAIEGGLYSKYALFREYLREALNEILGEDIAKHVILKVTEDGSGIGAALLAASYSS

SEQ ID NO: 228830 - protein, 224 aa, Glycine max
  Clone ID: PAT_MRT3847_48660C.1.pep
MEKTAVKVRCQRIGCDAMFSEADNPDGSCRYHDSGPIFHDGTKEWSCCKKRSHDFSLFLEIPGCKTGKHTTVKQVITPVKKNTMPSPTAVSSTNASSKESCPRCQQGFFCSNHGSQSKPVNIIGDKAANLAGDASADNNSSVEAPKPKKIVDINEPQVCKNKGCGQTFKEKDNHDTACNYHPGPAVFHDRMRGWKCCDIHVKEFDEFMSIPPCAKGWHNADPES

SEQ ID NO: 228831 - protein, 60 aa, Glycine max
  Clone ID: PAT_MRT3847_48661C.1.pep
SVSLCFSSHLKRVDAVQMIWKAVARKVPFMKLKTNRSRRFLRSLYGNHNFWRMLISLDRI

SEQ ID NO: 228832 - protein, 130 aa, Glycine max
  Clone ID: PAT_MRT3847_48662C.1.pep
SPIVDVDSALDNIDTIRIPEPHGTYLQTRGARAARRIYKAMGVWPWDIVPEAPPKMWAINLLEDLALVADHVGRNPGDTLQDLQSELWKSLARDRKPSYAGKLMAQDVHAAKKRFVRTMPQSPDAQDDTG

SEQ ID NO: 228833 - protein, 146 aa, Glycine max
  Clone ID: PAT_MRT3847_48663C.1.pep
NDPTSARYAMCFHLDPKISSSLAFVQFPQKFHNISKNDIYDSQLRSIFTLQWQGMDGLMGPVISGTGFYIKRVSLFGNFARKGTDLLQLKEYFGSSNEFIRSLNQNYTSDLVSGQKYALLEEPHFLASCNYEIGTKWGQEVNRLVS

SEQ ID NO: 228834 - protein, 526 aa, Glycine max
  unsure (1)..(526): unsure at all Xaa locations
  Clone ID: PAT_MRT3847_48664C.1.pep
MTVDLDNASTASGEAASVSSSGNQTKPAAPKKKRNLPGMPDPEAEVIALSPKTLLATNRFVCEICNKGFQRDQNLQLHRRGHNLPWKLRQRSSKEVRKRVYVCPEPTCVHHDPSRALGDLTGIKKHFCRKHGEKKWKCDKCSKKYAVQSDWKAHSKVCGTREYKCDCGTVFSRRDSFITHRAFCDALAEENARSHTVVKDISENDSKVLIGDSPPPQPVAATVAATTAAATTTTTTTITSTTQANSVMSSCLQTHNLVXDLPENNPPQVIEEPQAATATAISGSCGSSSSCSTSNGGATCNSNSSSSVFASLFASSTASVTLQSQTPAFSDLIRAMGPPEHPADQISGPSSEAISLCLSTTSASPIFATGGRQYASSSPHPAMSATALLQKAAQMGAAATNASLLRGLGIVSSSPLDSTSSGQQNVLQWGHQQQLEPESGSVAAAGLGLGLPCEDGGSGLKELMMGTSSMFGPKHTTLDFLGLGMAAGGTAGGGLSALITSIGGGLDVTAAFGNGDFSGKDIGSSS

SEQ ID NO: 228835 - protein, 268 aa, Glycine max
  Clone ID: PAT_MRT3847_48665C.1.pep
MTVDLDNASTASGEAASVSSSGNQTKPAAPKKKRNLPGMPDPEAEVIALSPKTLLATNRFVCEICNKGFQRDQNLQLHRRGHNLPWKLRQRSSKEVRKRVYVCPEPTCVHHDPSRALGDLTGIKKHFCRKHGEKKWKCDKCSKKYAVQSDWKAHSKVCGTREYKCDCGTVFSRRDSFITHRAFCDALAEENARSHTVVKDISENDSKVLIGDSPPPQPVAATVAATTAAATTTTTTPRVRGRVANSVMSFGLHTHNLYLPDNNSPQVI

SEQ ID NO: 228836 - protein, 112 aa, Glycine max
  unsure (1)..(112): unsure at all Xaa locations
  Clone ID: PAT_MRT3847_48666C.1.pep
FLASTTSASPIFATGGRQYASSSPHPAMSAAAIXLRRQHQMGAAATNASLLRGLGIVSSSPVDSSSSGQQNVLQWGHQQQLEPESGSVAAAGLGLGLPCEDGGSGLKELMMG

SEQ ID NO: 228837 - protein, 313 aa, Glycine max
  Clone ID: PAT_MRT3847_48667C.1.pep
TRPPISAPQLAGGKMIVSGNCRRMGAIGKWLHQKQYGNTNVSVKKKDRARVENARVHSALSIAGLASAVAAVAATEDPRGGSRSKLDVALASATQLLASYCVEMAEVAGADRERVASTVRSAVDIQTPGDLMTLTAAAATALRGEAALTARMPKEAKKNASISPYDKVIAETQWLRAFDGQVLERYPPCLGDLLQLTEKGALRWRHVHVYIKKCQVKVKIKSKHVGGAFSKKNKCVVYGVCDKDNAWPYRKEREASEELYFGLKTAQGLLEFKCQNKLHKQKWVDGVEFLLRRVNSVEATEHSLEFLSISTST

SEQ ID NO: 228838 - protein, 428 aa, Glycine max
  Clone ID: PAT_MRT3847_48668C.1.pep
MVSAEKDSNETTNTHPTIIGKSMRTVRSKLFQHDRAACVSDNLTGSLMELASRNNKSVKSSITEEQLLELSQALSDFSACSSDISGELQRLATVSSSQPPPAAPHVDGQPQPEHEPCLGFLQRESFSTEIIESISPEDLQPTVKICVDGLHSPSVAVKRSAAAKLRLLAKNRADNRALIGESGAVAALVPLLRCSDPWTQEHAVTALLNLSLLEENKALITNAGAVKALIYVLKTGTETSKQNAACALMSLALVEENKSSIGACGAIPPLVALLLSGSQRGKKDALTTLYKLCSVRQNKERAVSAGAVRPLVELVAEEGSGMAEKAMVVLNSLAGIEEGKEAIVEEGGIGALLEAIEDGSVKGKEFAVLTLVQLCAHSVANRALLVREGGIPPLVALSQNASVRAKLKAETLLGYLRESRHEASCSSP

SEQ ID NO: 228839 - protein, 233 aa, Glycine max
  Clone ID: PAT_MRT3847_48669C.1.pep
NSRVVLFISKTVADAFNANIYDIIMKAKGLPYLETHAEPYMRQLSVGDVVTGPLQTFNGVEKVCNIVFILRTTGHNGFPVIDEPPISQAPVLFGIILRDHLLTLLKKKAFMSSPMATSGDVINEFSADDFAKKGSSKGRLKIEDIQLSEEEMDMFIDLHPFTNASPYTVVETMSLGKALTLFRELGLRHLLVVPKFSGRSPVVGILTRHDFMSEHILGLHPFLVRNTGKSLRF

SEQ ID NO: 228840 - protein, 37 aa, Glycine max
  Clone ID: PAT_MRT3847_4866C.1.pep
SLLKQRRHLLVIWPYPCKLKIGFFAGKELVVKLILTL

SEQ ID NO: 228841 - protein, 136 aa, Glycine max
  Clone ID: PAT_MRT3847_48670C.1.pep
WKQGKSGNVPRVVLVVTKIDLLPSSLSPTRLEHWIRQRAREGGINKVSSLHMVSALRDWGLKNLVDNIVDLAGPRGNVWAVGAQNAGKSTLINSIGKYAGGKITHLTEAPVPGTTLGIVRVEGVFSSQAKLFDTPG

SEQ ID NO: 228842 - protein, 161 aa, Glycine max
  unsure (1)..(161): unsure at all Xaa locations
  Clone ID: PAT_MRT3847_48671C.1.pep
SLIIKPQFVLSDTSLPKEAERMVPFSNILGHEKCESYLIFGGETTLGDNFRAFFYFLCLAYCFIGLSAITARFFQSMENVVKHTRKVXGGLGPGTLVGSAAFDLFPIHAVCVVVPKAGELKKIADLGVWLGELFWSFWAYIWLYIILEVWTPNVVTLWEAX

SEQ ID NO: 228843 - protein, 68 aa, Glycine max
  Clone ID: PAT_MRT3847_48672C.1.pep
SLFKNLFTIKSLFCSGGKWEVSGHCLHFQAIGNQTNRIRRKKQRIVLIQMSNFQQMETSNQEAWWPVA

SEQ ID NO: 228844 - protein, 97 aa, Glycine max
  Clone ID: PAT_MRT3847_48673C.1.pep
RRLTLRSLDQPRPIVNVDPATGRASGPEKQKFHSFLGVVAREKIPIVHSNWKNVPETLKDMVWGDILVSHINNLMYSNIEFIFKKMFTCTKIDMMNM

SEQ ID NO: 228845 - protein, 76 aa, Glycine max
  unsure (1)..(76): unsure at all Xaa locations
  Clone ID: PAT_MRT3847_48674C.1.pep
WPCRVSEVTILEFCISPYFFLVSPIGVLGFTVWLAFPCRVLGCVWLFGRLRFLRCPARFAVLSPPWFCSPXGGLTN

SEQ ID NO: 228846 - protein, 81 aa, Glycine max
  Clone ID: PAT_MRT3847_48675C.1.pep
VEVVKHCTSEPLKSSCGSCSTRDEGCGNIFRLKARRSLNVRAIIVDVWITCVVLIFFFPVPHVNVLPEGDCLRHNNQLVVL

SEQ ID NO: 228847 - protein, 80 aa, Glycine max
  Clone ID: PAT_MRT3847_48676C.1.pep
TPAIEVLLWTGGERIIVSHDASLLGSFHTNFHPQRRLLPLRASSDWAWLPPLRLYPLAPLYNVLERLGAQYCPHQLGGEY

SEQ ID NO: 228848 - protein, 100 aa, Glycine max
  unsure (1)..(100): unsure at all Xaa locations
  Clone ID: PAT_MRT3847_48677C.1.pep
LFLRGGSPQGGRGAPTLVRNVGGIKRFPTQNKPPPRWGEKKGVPFFLEPKRPILKIFFPRPFCILKKNLPPLFVLGPGQGKGESSLVFFXXXXKKKKTKT

SEQ ID NO: 228849 - protein, 66 aa, Glycine max
  Clone ID: PAT_MRT3847_48678C.1.pep
LGTYRCSMGLTQDPSAYNQFGFRVVAPESAFKDSVVRDLLLHLVIIGIIGHSACVARLMIKISPLD

SEQ ID NO: 228850 - protein, 77 aa, Glycine max
  unsure (1)..(77): unsure at all Xaa locations
  Clone ID: PAT_MRT3847_48679C.1.pep
QXIQHXCSGATSMLXLDTSDLKLLYSNTRRVEEXXRERXLRRLXRWMKLIEQLVXXSXNXLDTXGEGKXLLXILSLS

SEQ ID NO: 228851 - protein, 74 aa, Glycine max
  Clone ID: PAT_MRT3847_4867C.1.pep
MVQSESLSCAFDSASELASLLVQLYWQQSWTHRPSVSPSGIPTHIYHPVCVPSRVPCLDPAIHHASIHQWYYRW

SEQ ID NO: 228852 - protein, 72 aa, Glycine max
  Clone ID: PAT_MRT3847_48680C.1.pep
RKNVYNVDKSDGIVVGIIGLLGAIAATRHLRFGSRAGPDTTSNLFGVGLHDTRGTMFEDTVSLLLYALQNAF

SEQ ID NO: 228853 - protein, 72 aa, Glycine max
  Clone ID: PAT_MRT3847_48681C.1.pep
LNLTNILREINQRQRYFFFYIYKKNHIGTEFSKLSAKLVSCLFFFFSIVLIFINYDTDWLKDSPYNVILQFI

SEQ ID NO: 228854 - protein, 87 aa, Glycine max
  Clone ID: PAT_MRT3847_48682C.1.pep
KDTMPTTILSGKALSEIGICSESPPGVFNAYLYLPSVKAGAPLSESMGQSHEPRHCVVDLRPYIFGDVLQYRCSYLTTGKCIISALS

SEQ ID NO: 228855 - protein, 162 aa, Glycine max
  unsure (1)..(162): unsure at all Xaa locations
  Clone ID: PAT_MRT3847_48683C.1.pep
VVHSILIDRWTKSSTPLHCLAHSLNPRYYSHEWLSEDSNRVPPHQDXELTRERLKCFKRFFLDVDVRRKVNIEFANFSDGREGFDDLDSLNDRGQMDPKAWWLVHGINAPILQKVALKLLAQPCSSSCCERNWCTYSFIHSLKRNKMTPHRAKDLVFVHSNL

SEQ ID NO: 228856 - protein, 99 aa, Glycine max
  unsure (1)..(99): unsure at all Xaa locations
  Clone ID: PAT_MRT3847_48684C.1.pep
KERFMPATRLSFEEGYPLRTRYCEQARRTNPCRTTXVYGNSSDGCMLRLLTSFQASTYGLRNPRPSLXGLDRTYLKSQDLGTXCLATGMAGHETLFALA

SEQ ID NO: 228857 - protein, 416 aa, Glycine max
  Clone ID: PAT_MRT3847_48685C.1.pep
MTMLSKISSSLLLSLSSKPKPKPICNPFLLSRSAATKHQKNKKENAKAALAKEKRRTRSDKQFNRDAIIERCSINDIDTDTKFSHVPVMLGEVLDVFSSTLTSFVDCTLGAAGHSTAVIKGHQELKYLVGMDVDSVAHDIAQPRLDAVLNAGVKAITVLRNFRDVKSVLREFAELHLGVDGILMDLGISSMQVDDPVRGFSVLGDGPLDMRMDPQASLKAEDILNSWPDSEVGRILREYGEESNWRTLQKKIVNARLHGGLHSTSDLLDLIRRVAPPMRGGRQGWIKTATRVFQALRIAVNDELKTLEDSLYYCFDCLAPGGRLAVISFHSLEDRIVKQTFLNIIKGSKDVEERESLNSDLRKTSDEIKEKEAWIKQVIYGSNGTILTKRPITPSGEEEKLNRRSRSAKLRVIQKH

SEQ ID NO: 228858 - protein, 163 aa, Glycine max
  unsure (1)..(163): unsure at all Xaa locations
  Clone ID: PAT_MRT3847_48686C.1.pep
NARLYXGLHSTSDLLDLIRRVTPPMKGGRQGWIKTATRVFQALRIAVNDELKTLEDSLYSCFDCLAPGGRLAVISFHSLEDRIVKQTFLNIIKGREDVEERESLNSVLRNTSDEIKEKEAWIKQVIYGSNGTILTKRPITPSGEEEKLNRRSRSAKLRVIQKH

SEQ ID NO: 228859 - protein, 138 aa, Glycine max
  Clone ID: PAT_MRT3847_48687C.1.pep
SIGMSDEVNLPVNVLSATFPGHGHGQAFNAPDDLPKTAMRSLNQGSSPMSMDFHPVQQTLLLVGTNVGDIALWEVGSRERLLMRNFKVWDLSACSMPFQAALVKDPGVSVNRVIWSPDGALFGVAYSRHIIPAMVRGE

SEQ ID NO: 228860 - protein, 46 aa, Glycine max
  Clone ID: PAT_MRT3847_48688C.1.pep
GKIINQKEWTFDLHRDMIKVKWYRLLTRCKSVLTHAALLLFNYLIV

SEQ ID NO: 228861 - protein, 41 aa, Glycine max
  Clone ID: PAT_MRT3847_48689C.1.pep
KPEQLKVNFKSLYTQYILLQWFHDPMRLRYSSVTVSSCLLI

SEQ ID NO: 228862 - protein, 77 aa, Glycine max
  Clone ID: PAT_MRT3847_4868C.1.pep
TTEGGGPGSFAGSGWPGSSGSSSASMTVRRSAAADSISEAPPKNKVVLKDVFQVFAEKVTSHNELVSSLAVRTRYAC

SEQ ID NO: 228863 - protein, 77 aa, Glycine max
  Clone ID: PAT_MRT3847_48690C.1.pep
MSETPQRKKASLPPKRGQIKAQIFTSLVNSVASTISKTGESLRNVIGNGVNSGSGYASSTPPPSSGYNSETNSSDVT

SEQ ID NO: 228864 - protein, 72 aa, Glycine max
  Clone ID: PAT_MRT3847_48691C.1.pep
MSTPARKRLMRDFKRLQHDPPAWINGAPHDNNIMLRNAVIFGPDDTPLYGGTFKLTLQFTEDYSNIPPTVRI

SEQ ID NO: 228865 - protein, 70 aa, Glycine max
  Clone ID: PAT_MRT3847_48692C.1.pep
LLSSLYSPSRSLSRHLHHSPTTTVVVGDLSSTNGVGPPSSNPPSRSVRNYRTTTKICHRHHEICQNPSYH

SEQ ID NO: 228866 - protein, 75 aa, Glycine max
  Clone ID: PAT_MRT3847_48693C.1.pep
MSETPQRKKASLPPKRGQIKAQIFTSLVNSVASTISKTGESLRNVIGNGGGSGSASSTPPPSSGYNSEANSSDVT

SEQ ID NO: 228867 - protein, 67 aa, Glycine max
  Clone ID: PAT_MRT3847_48694C.1.pep
TDYATLKGPDYDSSDDQHDVARRNDSRYTLLSAPQVAGTHYAVMSFYEYLETVFRQYLYDDMERFYI

SEQ ID NO: 228868 - protein, 67 aa, Glycine max
  Clone ID: PAT_MRT3847_48695C.1.pep
YRKLCSPKQFLLNLGKLIYITIYLFTLQVNLNYANLFWNIKLYILQKKILKSREEVHSSYNEHYFTI

SEQ ID NO: 228869 - protein, 382 aa, Glycine max
  unsure (1)..(382): unsure at all Xaa locations
  Clone ID: PAT_MRT3847_48696C.1.pep
MSSSTVGQVIKCKAAVSWEAGKPLVIEEVEVAPPQAGEVRLKILYTSLCHTDVYFWEAKGQTPLFPRIFGHEAGGIVESVGEGVTHLKPGDHALPVFTGECGECPHCKSEESNMCDLLRINTDRGVMIHDSQTRFSIKGQPIYHFVGTSTFSEYTVVHAGCVAKVNPAAPLDKICVLSCGICTGLGATINVAKPKPGSSVAIFGLGAVGLAAAEGARISGASRIIGVDLVSSRFEEAKKFGVNEFVNPKDHDKPXQEVIAAMTNGGADRAVECTGSIQEPXSVVFECAQERWGVAVLVGVPPKDDAFKTHPVNFLNERTLKGTFYGNYKPRTDLPSVVEKYMNGELELEKFITHTVPFSEINKAFDYMLKGESIRCIIRMGE

SEQ ID NO: 228870 - protein, 132 aa, Glycine max
  Clone ID: PAT_MRT3847_48697C.1.pep
MADQSAAWPIADAALSQEILDLVQQASHARQLKKGANEATKTLNRGISEIIILAADTTPLAILLHLPLLCEDKNTPYVYVPSKMALGRACGVSRAVISCSITTNEASDLMGQIRALKDKVERLMIVAIFDEI

SEQ ID NO: 228871 - protein, 101 aa, Glycine max
  unsure (1)..(101): unsure at all Xaa locations
  Clone ID: PAT_MRT3847_48698C.1.pep
LLIGAVEKPKAYRGSEDTWTTATIQRYARAYMRMHTVSAVMETXMXLREVLTAYQPGGTLWLHTGSGYCEPVPIMQMHIHIVKAHGGASQLGMMSEPSREG

SEQ ID NO: 228872 - protein, 104 aa, Glycine max
  Clone ID: PAT_MRT3847_48699C.1.pep
MGTIGEAEDTYAKILGRWPAFYYGMGHMLNDITAAWRCTYIGLILTDIGLSPSRQKLQRKGQRAKNAAAVMLSSQVADGYATILDGELIDTCGHFKIWHGAGSL

SEQ ID NO: 228873 - protein, 106 aa, Glycine max
  Clone ID: PAT_MRT3847_4869C.1.pep
DKFEYNGATELVFDVQFMLKSAMHFYGFSHEVRTEARKVHDLFFDILKIAFPDTDFRDARSALSFSSQATASTVTSPRQVAVGQSKRHRLINEMETESYALQRSLQ

SEQ ID NO: 228874 - protein, 210 aa, Glycine max
  Clone ID: PAT_MRT3847_486C.1.pep
TRPEASHQDGHVLNWPMRHLIALGIARGLAFLHQSSIVHGDVKPQNVLFDADFEAHLSDFGLDKLTRATPGEASTSTSVGTLGYVSPEAVLTGEASKESDVYSFGIVLLELLTGKRPVMFTQDEDIVKWVKKQLQRGQITELLEPGLLELDPESSEWEEFLLGVKVGLLCTAPDPLDRPTMSDIVFMLEGCRVGPDIPSSADPTSQPSPA

SEQ ID NO: 228875 - protein, 53 aa, Glycine max
  Clone ID: PAT_MRT3847_48700C.1.pep
GGLNFLACERAFGGNHGPLGFEKIFNGGWGGKLILGFLAPDCPILTHTTIKVI

SEQ ID NO: 228876 - protein, 113 aa, Glycine max
  unsure (1)..(113): unsure at all Xaa locations
  Clone ID: PAT_MRT3847_48701C.1.pep
NIPGVDIHNPLYSHPSILEAPVVARANEKWGESPGPFFPLNPGVVEIICQGIIGAILKFTRANKPAYWVSKSVVFGTLLKPXTGKIPGHIVWAXAKKMGPVKLHQLFSIFKCS

SEQ ID NO: 228877 - protein, 49 aa, Glycine max
  Clone ID: PAT_MRT3847_48702C.1.pep
WIGSTVMIPWLRNYNPYLLDQCDKIINDGHKDLVKEIMKTMLIWGEIHR

SEQ ID NO: 228878 - protein, 346 aa, Glycine max
  Clone ID: PAT_MRT3847_48703C.1.pep
MAQSVEIPRVKLGTQGLEVSKLGYGCMGLTGAYNDPLPEEEGISIIKHAFSKGITFFDTSDIYGPDHANEIVVGKALKQLPREKIQIATKFGITKIDSSGMFVKGTPEYARSCCEASLKRLGVEYIDLYYQHRVDLSVPIEETIGELKKLVEEGKVRYIGLSEASPDTIRRAHAVHPITAVQMEWSLWTRDIEDEIIPLCKELGIGIVPYSPLGRGFFGGKGVLETVSTVSSLITHPRFRAENLDKNKKLYGKIESLATKQQCTPSQLALAWVLHQGNDVVPIPGTTKVKNLDQNIGAVSLKLTESDLREISEAVPIDEVAGTRHYYGSANFSWTVANTPPKDPRV

SEQ ID NO: 228879 - protein, 130 aa, Glycine max
  unsure (1)..(130): unsure at all Xaa locations
  Clone ID: PAT_MRT3847_48704C.1.pep
KMYQTYKGHMFFIKPKLXGGDFTINRYAGDVTYQADYFLDKNKDYVGAEHXALSCAYKCAFDANIFPPLPEETSQQSKLSDIASQFKQQLQSLMETLNTTEPHYIRCVKPNTVLHPGIFENFNVLNQLIC

SEQ ID NO: 228880 - protein, 61 aa, Glycine max
  unsure (1)..(61): unsure at all Xaa locations
  Clone ID: PAT_MRT3847_48705C.1.pep
MRRCGLFTNESNIISLPNSIQNITKPVNDGFIIRXPINIYSGLLTHLLKEAKSHGSYSGYG

SEQ ID NO: 228881 - protein, 106 aa, Glycine max
  Clone ID: PAT_MRT3847_48706C.1.pep
YSFFFIYFFFFFFFFFFITLSLFFGSLGNKKKRMTTAIQKTQGPFSVVPRKRKKKGGGPHFYGGGGEKTYDPGYGKTKDFSGLKRFPVKKKRPPGAGGKARILPGD

SEQ ID NO: 228882 - protein, 209 aa, Glycine max
  Clone ID: PAT_MRT3847_48707C.1.pep
MCCRNRFIACTCCIIITLFFMFIISIILFWIIISPSNVKFHVTDASLTEFNLTSNNTLYYNLKVNVTVRNPNNKIVVYYRRIKAIAWYKDNDFGWVSLTPFDQGHKNTTFLQAVFEGQRVIKLKPKQLGEYKDETSVGIYEDLAVDFDLRIKANFGRFKSSRFDPPVVQCRRLRVPLISNGKTAPPFSVTKCKIDGSFFADRDSQAEAR

SEQ ID NO: 228883 - protein, 66 aa, Glycine max
  Clone ID: PAT_MRT3847_48708C.1.pep
LSRVHELGYVRDIAPSSRGCLSHSESPTITSTNVQLPSLYQFSGETVRKILEADFEVPPSVVFSQP

SEQ ID NO: 228884 - protein, 117 aa, Glycine max
  unsure (1)..(117): unsure at all Xaa locations
  Clone ID: PAT_MRT3847_48709C.1.pep
MHLKYVSRSFKKSLVRQMYEEHPEYLKRKKERESERKRSPERAPRRKHSXSPRKRSRRSKSRSRDRDRRDHGDRDRDRRDRDRDRDDRRDRDRDRDRKHKKRSDRSRSGSSPKTVVP

SEQ ID NO: 228885 - protein, 76 aa, Glycine max
  unsure (1)..(76): unsure at all Xaa locations
  Clone ID: PAT_MRT3847_4870C.1.pep
NCMIWKIRGELYVWVXFFLYVSXKDSKSLHQKAERTKNVRSFGSHGGQELDESFEGEERFFFILVLFSSRFGHLCL

SEQ ID NO: 228886 - protein, 58 aa, Glycine max
  unsure (1)..(58): unsure at all Xaa locations
  Clone ID: PAT_MRT3847_48710C.1.pep
PKLYRLWVVLSKIMGSXAFWMVECRGXPCPIXVSNYALDQTKNEDKVELRGSPEWPLV

SEQ ID NO: 228887 - protein, 107 aa, Glycine max
  unsure (1)..(107): unsure at all Xaa locations
  Clone ID: PAT_MRT3847_48711C.1.pep
MAHAVKRQDPFIDNPHYTDDLDLCEFSSLKHLSXEFTLWNSRTPYETVLITDDPEYAKYILYETCGTHKXDLTRXAFEEAHETTVDEALNDDPVDYDADVEQDDADE

SEQ ID NO: 228888 - protein, 75 aa, Glycine max
  unsure (1)..(75): unsure at all Xaa locations
  Clone ID: PAT_MRT3847_48712C.1.pep
LNPHPFILFLHFFSFSIYYIXHLLLPFPSPKLIXIIFPLISNPSXIIFPKIKSKILPQIFFPSNFPTYYINPXPQ

SEQ ID NO: 228889 - protein, 85 aa, Glycine max
  unsure (1)..(85): unsure at all Xaa locations
  Clone ID: PAT_MRT3847_48713C.1.pep
MLNINGGMQPLSLGGHNAKNAMGIGGHTPSISSGTASDPPSLSGXSANVPGNNGSKSWRNSINSASNSDSSAVGGNNRFNQRTSD

SEQ ID NO: 228890 - protein, 95 aa, Glycine max
  Clone ID: PAT_MRT3847_48714C.1.pep
CFSPIQQSRTSIEQEGASFPNYAFNNAYFRNEDNVMRNPFETTKEDEFLNSILAGESIVINEENKHNFVHSSTQSESLKTILLKTRQLRMMGTKI

SEQ ID NO: 228891 - protein, 126 aa, Glycine max
  unsure (1)..(126): unsure at all Xaa locations
  Clone ID: PAT_MRT3847_48715C.1.pep
VNLLCNLTRTPTAAKYSKRMAQLYXEGQQNTKQALVYYVEXNDLSQNXHMPTSANQCIQIVPLIAAKIEQSQKHTDIHXEHHANILSVIXLQYRVQAHLINACIYALCNEALVAITNAVEPYQELD

SEQ ID NO: 228892 - protein, 125 aa, Glycine max
  Clone ID: PAT_MRT3847_48716C.1.pep
HPYLSPLGGTKIFPLGGAFSACFLGGGGSFIKRGRWAGFPASERAAISPQLGRGFSLFAPACFFFFAVGLFCVRHSECHFFSHTPYVHPFFKLVLFPLPVAVFWSLPRFLCYSLVLPSVPIIQTF

SEQ ID NO: 228893 - protein, 218 aa, Glycine max
  unsure (1)..(218): unsure at all Xaa locations
  Clone ID: PAT_MRT3847_48717C.1.pep
MVSNPVPNTDRSRDAKRRKKKAQLRQQLRQEDQSNPKWKSQAQQQIYSSKLRQALARVNLGTPPSCAXALARVNLGLTPPPRRGKAVRDAADRVLAVTAKGMTRWSRAILTNRLKLKFTKHKRQRLTTPPTRSKKPRVSVYRLKGKGSPGVQRKVRFLARLVPGCRKEPLPVILEEAIDYIPALEMQVRAMSALFNLLSGSSSSSGAAASPSAPPSSS

SEQ ID NO: 228894 - protein, 57 aa, Glycine max
  Clone ID: PAT_MRT3847_48718C.1.pep
LAKTTWTCHKITLEGPLMLSHFSFPQGHDFFFSLWLKPSYTVSYVQNCIFFLMLVGL

SEQ ID NO: 228895 - protein, 44 aa, Glycine max
  Clone ID: PAT_MRT3847_48719C.1.pep
ATTPLTFKGLHGVWWAYIFLCRITTSLAKGSHHFVTAFTSAILY

SEQ ID NO: 228896 - protein, 79 aa, Glycine max
  Clone ID: PAT_MRT3847_4871C.1.pep
QFVHLRLAPTLQNSDAQSHPQHIQPPLNHFQCFRCMDTTVPYAQVYIHSQVHLDLRLALGASASINILKQRLSANLKVE

SEQ ID NO: 228897 - protein, 58 aa, Glycine max
  unsure (1)..(58): unsure at all Xaa locations
  Clone ID: PAT_MRT3847_48720C.1.pep
SIXQPLLSLYSHYXNLSHISLNIYNSISHTLLLSLYHLIYYTTSSFHPLFNYISILSH

SEQ ID NO: 228898 - protein, 53 aa, Glycine max
  Clone ID: PAT_MRT3847_48721C.1.pep
GEPAAKNFSCPRVRLTTTTTTMMFTISTSSGQLYYIFPMNGPILIKNPNTIIK

SEQ ID NO: 228899 - protein, 302 aa, Glycine max
  unsure (1)..(302): unsure at all Xaa locations
  Clone ID: PAT_MRT3847_48722C.1.pep
LVDLFEDVSEDLEKQYHEDKTLIKDTVKSGKITVVTTSVFEEFKVAVLEGAACQTISEINLKLIFEELLERAKEKEEKEAKKRQRLADDFTNLLYTFKDITTSSKWEDCKSLFEETQEYRSIGDESYSREIFEEYITYLRQKSPPPQREGXVKSTAKGLEKRKKEDRTRRKKKKKEREREREKDKSKERNKKDETDSDNQDMADSHGYKEEKKKEKDKERKHRKRHQSSIDDVDSEKEEKEESKKSRRHGSERKKSRKHANSPESDNENRHRRHKRDHWDGSRKTGGHEELEDGELGDDAEN

SEQ ID NO: 228900 - protein, 196 aa, Glycine max
  Clone ID: PAT_MRT3847_48723C.1.pep
MNQTSEMSVNNSFPIGTTPGISSITTKGSFQEEVTSGIKGSSGFPSYDIFNELHHQKSHDLEITNPGLTYNASHHVNPLQGNIDVAPSVLVHQGFSSTQQTGQSRDGALIGKAMFSMGEGLEQNNLQNANFNPLLVDNSIRIKAERIPDASSQTNLFPEHYGQEDLMTALLKQQEGMGPAENEFEFDGYSLDNIPV

SEQ ID NO: 228901 - protein, 42 aa, Glycine max
  Clone ID: PAT_MRT3847_48724C.1.pep
RLREDDRREPLLCYCLLVCIHISITFIVRNVFVLLNPVVDDM

SEQ ID NO: 228902 - protein, 56 aa, Glycine max
  Clone ID: PAT_MRT3847_48725C.1.pep
EFLQFIPHEESSEPDNSPNDNMNDYTLLLSSNESDENVKLPISTKIKQQFVNLLIN

SEQ ID NO: 228903 - protein, 291 aa, Glycine max
  Clone ID: PAT_MRT3847_48726C.1.pep
VLRNSFLSPQEATFGTISSINGIDLQTLAVAGQLPAQSLATLQAAGLGRPTGKAGVPMPLMDQRNLFSFENPRLRFGEGQQQHLSTSKPMNLLHGIPTNMEPKQLANLHQSTQSIGGLNMRVNASATQGNPLLMQMAQSQPRGQMLSENIGPRVPRLPSSLGQPTVSNGISNGLLGRNGIAGNNRGPAYNPVPPSSSLLSFPMNQTSEMSVNNSFPLGSTPGISSITTKGSFQEEVTSGIKGSGGFPSYDIFNELHHQKPHDWEITNPNLTYNASQHANPLQVILMSHHQF

SEQ ID NO: 228904 - protein, 200 aa, Glycine max
  Clone ID: PAT_MRT3847_48727C.1.pep
QTQVQCYAVPEDLNDPLLRKWVKPDKFNPILVANKGVNGSAFRDPTTAWWSKDGHWKILVGSRRKRRGIAYLYRSKDFMTWVQAKHPIHSKGETGMWECPDFYPVLVNGNQGLETSEGGNHVKHVFKNSLDMTRFDYYTVGTYFEDKDRYVPDNTSVDGWGGLRYDHGNFYASKSFFDPSKNRRILWGWANESDTKEDDV

SEQ ID NO: 228905 - protein, 118 aa, Glycine max
  unsure (1)..(118): unsure at all Xaa locations
  Clone ID: PAT_MRT3847_48728C.1.pep
PLQIXDKXTQNQLARGQXRLRELLKXSXSAPXTVEXQIITTYXTGTNGXVDXSLEXXQVRKXLVXXXAYLXTXKPQXKEIISSTKTFTGEAEVLLKEAXQEQMELXLLQXQVEKNLII

SEQ ID NO: 228906 - protein, 71 aa, Glycine max
  unsure (1)..(71): unsure at all Xaa locations
  Clone ID: PAT_MRT3847_48729C.1.pep
KPSYVGFFFLKAWPLFNPLFKREFLIFFFFFFFFFFFFFFFFFFIENFPSSFDFLKISVNKVSEXTCGRTA

SEQ ID NO: 228907 - protein, 229 aa, Glycine max
  unsure (1)..(229): unsure at all Xaa locations
  Clone ID: PAT_MRT3847_4872C.1.pep
SEIPASREPRAPEFYLSWKLDYLKDKMHPTFVKDRRAMKREHEEFKVKINELAAKAKKXQEEEWVMQDGNPWPGKNMDDHPGMIQVCLGSAGALDIEGKELPRLVYVSXEKRPGYQHHSKAGAMXNALVRVSAVLSNAPFALNLDCDQYIXNSKVLREAMCFLMDPQIGKKFCYVQFPXRFDGIDCNDRYANHNTVFFDINMKCLDGNQGPMHVGTGXCVFNRQALYWL

SEQ ID NO: 228908 - protein, 50 aa, Glycine max
  Clone ID: PAT_MRT3847_48730C.1.pep
LGVFFFFFFLASLKSLISFINCLKIWINTTLNINKVSVDSILELLFYFIT

SEQ ID NO: 228909 - protein, 173 aa, Glycine max
  Clone ID: PAT_MRT3847_48731C.1.pep
MNFNLDGEFNKISSFKLDMSDLDFTCPAKKNSQSKDKKGEVSGSQEGKQDGFNFSFDFNDYWHRLGSFNFDSSFMKVVTTSNSSPRKKGVTTEGSDKEGGEMLKTNDDEGARASNDSTTVKSHASVRLETSKVETVVGSPGNLVSKQDGSVSKISSSGNLDMPMENQTLDINK

SEQ ID NO: 228910 - protein, 60 aa, Glycine max
  Clone ID: PAT_MRT3847_48732C.1.pep
NDPSHIFFMASIKLFKIYLAGIFCNVSRYILYPTSKHSLHFDTTMSRDLISFFFLDRPGI

SEQ ID NO: 228911 - protein, 51 aa, Glycine max
  Clone ID: PAT_MRT3847_48733C.1.pep
IIKASPFSSLSNSLGILVNKILKSHCISIWVTQKSKGKLDQQWQRACSYTK

SEQ ID NO: 228912 - protein, 88 aa, Glycine max
  unsure (1)..(88): unsure at all Xaa locations
  Clone ID: PAT_MRT3847_48734C.1.pep
ALIQFFQLFAVAINTHLXNPCHPECPNSPVIIPTRSHPKKNSTCNNHQEPQPKCNCKSLDMQLKENSKNLYNYTSKTNKCPDHISTAL

SEQ ID NO: 228913 - protein, 74 aa, Glycine max
  Clone ID: PAT_MRT3847_48735C.1.pep
SSNIIPAATTDSNRVVIFWSYNQSCQGSEGHFRSLHSHLLQGQDVWSFALKVLCSKISLLYCFLFSPQLLCPIT

SEQ ID NO: 228914 - protein, 88 aa, Glycine max
  Clone ID: PAT_MRT3847_48736C.1.pep
MLGGTSVALCDYSRPPNPQQTLRATQSILSKTTTILVTQPSLQTGTSMRYDELGPYTARTFVHNRSTTLITLIGEKLPGEPSEPTTPI

SEQ ID NO: 228915 - protein, 170 aa, Glycine max
  Clone ID: PAT_MRT3847_48737C.1.pep
MKDPVEDQVKSRRAVQKPKDFRRRDRRRNQCKQEKLQDTQLVSSACKSLVFPARPGYGQLGTKCLVKANHFLADISASDLSHYNVKITPEVTSRKTSKAIIAELVRLHRNTDLAMKLPVYDGGRNLYTAGLLSFAYKEFTILLREDDEGTGSTREREFEVVIRFAARVSM

SEQ ID NO: 228916 - protein, 89 aa, Glycine max
  Clone ID: PAT_MRT3847_48738C.1.pep
GTLSPSVAKLDSLVEIRLGGNDISGGIPSNWTSLRSLTLLDLSGNNISGPLPSFRKGLKLVIDENPHVSAPDSSLPSPVSSSGSGSGSW

SEQ ID NO: 228917 - protein, 43 aa, Glycine max
  Clone ID: PAT_MRT3847_48739C.1.pep
KSFPLAYGFTHNTFFRSPLISFSLLFHKTIVIFRLIIIINRHE

SEQ ID NO: 228918 - protein, 98 aa, Glycine max
  Clone ID: PAT_MRT3847_4873C.1.pep
INSRSINPYNAIGVSRDHYAFGCPYQRMYISLRPRCNTFVDDECQYVLKPHSLYDPSYSGYLSSKGVSYLYGPLTAGSLISQILVHLAGASNAWSRAE

SEQ ID NO: 228919 - protein, 113 aa, Glycine max
  Clone ID: PAT_MRT3847_48740C.1.pep
MVAEAWIVKMGNQVSSNLKHALLLETLTKRKQSHKRSDTKETIGILSFEVANVMSKTVHLHRSLSESEISKLRNEILGSEGVRNLVSSDEGYLLELALAEKLEELNRVASVVS

SEQ ID NO: 228920 - protein, 48 aa, Glycine max
  Clone ID: PAT_MRT3847_48741C.1.pep
LSCLGKERRDNLWGRELIQGQWRDWPVKRDAQNITIAEAQEQMHESKA

SEQ ID NO: 228921 - protein, 88 aa, Glycine max
  unsure (1)..(88): unsure at all Xaa locations
  Clone ID: PAT_MRT3847_48742C.1.pep
FFFFFFFFFFFLGGFFIRKGWTRDXRIGIFRGTRGGKRKPIKGRRKHPNKSLSGQIVSREKNRKNKTTKQKGQTTKIKNRGRNEINGG

SEQ ID NO: 228922 - protein, 113 aa, Glycine max
  unsure (1)..(113): unsure at all Xaa locations
  Clone ID: PAT_MRT3847_48743C.1.pep
LSNQKKMLRLKAFRPTSDKIVKIQLHPTHPWMVTADDSDRVSVWNWEHRQVVYELKAGGVDERRLVGAKLEKLAEGETESKGKPTEAIRGGSVKQVNFYDDDVRXWQLWHNRS

SEQ ID NO: 228923 - protein, 146 aa, Glycine max
  unsure (1)..(146): unsure at all Xaa locations
  Clone ID: PAT_MRT3847_48744C.1.pep
HAMGVSLKLSLLLGLCLFWHLQFGHNIWIQMFSDSSKIKEELASLTXFLSISILLDSVQGVLSGVXEGCGWQHLAAYVNLATFYLIGLPISGLLGFKFNLQVKGLWIGLICGLACQTGTLSFLAWRAKWTKLNVSLDRDEIQPPSA

SEQ ID NO: 228924 - protein, 58 aa, Glycine max
  Clone ID: PAT_MRT3847_48745C.1.pep
QVLPHCLVGTIDQERSEYHSMSAVYVYPMQAPLCIVLPGGQLYVSFGPESISSQMWGL

SEQ ID NO: 228925 - protein, 54 aa, Glycine max
  Clone ID: PAT_MRT3847_48746C.1.pep
TGATLLGLEFLFVFQKKKKKNHLVLCVTPLFKATASKMGYFRGQCFNVLKSPSC

SEQ ID NO: 228926 - protein, 66 aa, Glycine max
  Clone ID: PAT_MRT3847_48747C.1.pep
SKPTLFLGLLPHRKTSPTQVNDASAIIYKRPLITFISHPTLQCECTALDAYSWRQRPTTCACGRTS

SEQ ID NO: 228927 - protein, 104 aa, Glycine max
  unsure (1)..(104): unsure at all Xaa locations
  Clone ID: PAT_MRT3847_48748C.1.pep
TRVSLSASSLSLVSFETKTKSWAENVTIGGNWKCNGTTEEVKKIDTTLNEAKVPGEDVLEVVESPTYVVLPVDKSLLRPDFHVTAQNXRSRKGGAYTGEVSAEM

SEQ ID NO: 228928 - protein, 384 aa, Glycine max
  unsure (1)..(384): unsure at all Xaa locations
  Clone ID: PAT_MRT3847_48749C.1.pep
IAFCFWNEDENFASSLLEEFKRNKTKKSAVSVVLMHLMPTEEDFKXKFLVMFFYAEFSADQYGRRFIQQKLETATNEEKNMFXQEIMPYALALIYVVQKSFLAEFXEHALASQRRELANKLLGHVLTLSLQMYGCRVIQKAIEVVDLDQKIEMVQELDGNVMRCVRDQNGNHVIQKCIECVPEDAIDFIVSTFFDQVVTLSTHPYGCRVIQRVLEHCKDPTTQQKVMDEILGAVSMLAQDQYGNYVVQHVLEHGKPHERSSIIKELAGKIVQMSQQKFASNVVEKCLTFGGPSERQLLVSEMLGTTDENEPLQAMMKDQFANYVVQKVLETCDDQQRELILSRIKVHLNALKKYTYGKHIVTRVEKLVAAGERRIAAQAPPQPA

SEQ ID NO: 228929 - protein, 48 aa, Glycine max
  Clone ID: PAT_MRT3847_4874C.1.pep
GVSTISATLARSSYYTSGIGDIGSLSGLHTSHVNGPPIVHGSFAQITA

SEQ ID NO: 228930 - protein, 38 aa, Glycine max
  Clone ID: PAT_MRT3847_48750C.1.pep
ENILGFEVLEKKREVYGMGALLPKALKEETIGFRMSLL

SEQ ID NO: 228931 - protein, 228 aa, Glycine max
  unsure (1)..(228): unsure at all Xaa locations
  Clone ID: PAT_MRT3847_48751C.1.pep
NLSTRNLLFFACLLLLNDPSVDRNYLGXYMNLLELQKAYLGSVLSPQKSQYNVPPGGKSGSFTPHGYYGNPAYGAGLSYPGSPMANSVVSTSPVGSGSPVRHNELNMHFASGMRNLAGVMGPWHVDNENIDESFASSLLEEFKSNKTKCFELSEIAGHVVEFSADQYGSRFIQQKLETATTEEKNMVYQEIMPHALALMTDVFGNYVVQLIITLSTEFIVFFGTCNLA

SEQ ID NO: 228932 - protein, 688 aa, Glycine max
  unsure (1)..(688): unsure at all Xaa locations
  Clone ID: PAT_MRT3847_48752C.1.pep
VLDGENHLPSQIESGVDNHQRYLFGKQDHGKQHAFSKKSESAHLQNSSKKSRSGSDLNNPSLDRQVELQKSTVPSNNSYFKGSPTSHFSRGGSMPPQYQPLDSTNSSFGNYGLSGYAGNPALASLMTNQLGTGNLPPLFENVAAASAMAAPGMDSRILGGGLASGAAAPSDVHNLGRMGNQIPGSALQAPFVDPMYLQYLRTSEFAAAQLAALNDPAVDRNYLGNSYMNLLELQKAYLGSILSPQKSQYNVPLGGKSGSSTPHGYYGNPAYGVGLSYPGSPMANSVVSTSPVGSGSPVRHNDXNMHFASGMRNLAGAMGPWHVDTGNIDESFASSLLEEFKTNKTKCFELSEIAGHVVEFSADQYGSRFIQQKLETATTEEKNMVYQEIMPHSLALMTDVFGNYVVQKFFEHGLASQRRELANKLLGHVLTLSLQMYGCRVIQKAIEVVDLDQKIEMVQELDGNVMRCVRDQNGNHVIQKCIECVPEDAIHFIVSTFFDQVVTLSTHPYGCRVIQRVLEHCKDPTTQQKVMDEILGAVSMLAQDQYGNYVVQHVLEHGKPHERSCIIKELAGKIVQMSQQKFASNVVEKCLTFGGPSERQLLVSEMLGTTDENEPLQAMMKDQFANYVVQKVLETCDDQQRELILSRIKVHLNALKKYTYGKHIVTRVEKLVAAGERRIAAQAPPQPA

SEQ ID NO: 228933 - protein, 100 aa, Glycine max
  Clone ID: PAT_MRT3847_48753C.1.pep
KCLTFGGPSERQLLVSQMLGTTDENEPLQAMMKDQFANYVVQKVLETCDDQQRELILSRIKVHLNALKKYTYGKHIVSRVEKLVAAGERRIAAQAPPQPA

SEQ ID NO: 228934 - protein, 75 aa, Glycine max
  Clone ID: PAT_MRT3847_48754C.1.pep
KCRLYISLIAGLFRRSCWLSLTTRFFKSLMIDMTIIKAAVLTTSYMHSMLTPSQVSAFVVLEMVGLMLVLCENHE

SEQ ID NO: 228935 - protein, 72 aa, Glycine max
  Clone ID: PAT_MRT3847_48755C.1.pep
EKKNMVCSLIRTRSNLTNYYKSLSKLSPMNFPDRPPIIFILHMIFTMDALVDAHGKMHSKYANNVKVTRTAW

SEQ ID NO: 228936 - protein, 35 aa, Glycine max
  Clone ID: PAT_MRT3847_48756C.1.pep
KLKISFTKSSGVHFLISRTNSSTSSHLLKYETNYF

SEQ ID NO: 228937 - protein, 92 aa, Glycine max
  Clone ID: PAT_MRT3847_48757C.1.pep
SSSLFFLSPITKHDTQTNAPDQTLYIYIYNKQQHSCFSSDIYAPTTLILLHSVRSIPHSTDGGCTLPQTITPPPTTTLFALLLLLTVLPLTL

SEQ ID NO: 228938 - protein, 80 aa, Glycine max
  unsure (1)..(80): unsure at all Xaa locations
  Clone ID: PAT_MRT3847_48758C.1.pep
VLIKNVDTNTQKIAVAIALDPPGTPTNIDSPSSSIXRIMLVFPSCDFPSNGSVLDDQVAYISPLLAFNLNLHVTCLKSIF

SEQ ID NO: 228939 - protein, 68 aa, Glycine max
  Clone ID: PAT_MRT3847_48759C.1.pep
CAYPPHKKYKLVVLDGRENTTSLLGGWLNNKNHRGGRPPSPSYFICLQPHISRSSFLLKGGFRWKKVA

SEQ ID NO: 228940 - protein, 102 aa, Glycine max
  unsure (1)..(102): unsure at all Xaa locations
  Clone ID: PAT_MRT3847_4875C.1.pep
LSGGQKQRIAIARAIIRNPXILLLDEATSALDVQSEQVVQEALDRTMVGRTTXVVAHRLNTIKELDSIAYVSEGKVLEQGTYAQLRHKRGAFFNLASHQIQT

SEQ ID NO: 228941 - protein, 98 aa, Glycine max
  unsure (1)..(98): unsure at all Xaa locations
  Clone ID: PAT_MRT3847_48760C.1.pep
GNDLYPGGQYFDPLGLADDPVTFGSSSKFKEIQEWKGWAMFSMFGFFVSRLLXTGKRAHLEETSEPPLNKPWWAKQLWGLMPTKVLAPRDSLKWYGLS

SEQ ID NO: 228942 - protein, 124 aa, Glycine max
  unsure (1)..(124): unsure at all Xaa locations
  Clone ID: PAT_MRT3847_48761C.1.pep
AFHALAEGLALGVAAPXAYGLGRRMVLPVSLHGLPRGAATASCIXGATDSWLGSLATAAIIGFMGPTSATCALXRGIHLGGDDHIMALACGGLSPCFRSLSRCAGYLCEYFHVANCCVVIGFAS

SEQ ID NO: 228943 - protein, 62 aa, Glycine max
  Clone ID: PAT_MRT3847_48762C.1.pep
MGCFGFCKGDDSVTVADRGPFMQSTPTGNPSYHGRHAAVTAPRTINVQPIAVPSITVDEVEP

SEQ ID NO: 228944 - protein, 54 aa, Glycine max
  unsure (1)..(54): unsure at all Xaa locations
  Clone ID: PAT_MRT3847_48763C.1.pep
APKFQTQPRFKIFFFILSFFFFGCCIFCSDHSCCCYYXSLIVKSNLNNMEIQFP

SEQ ID NO: 228945 - protein, 56 aa, Glycine max
  Clone ID: PAT_MRT3847_48764C.1.pep
GQNWQSNFFLNGQSLFFQVPPNDGKTFPSFNVAPPHWQFGPPFQGGPFLSPFFNEG

SEQ ID NO: 228946 - protein, 205 aa, Glycine max
  unsure (1)..(205): unsure at all Xaa locations
  Clone ID: PAT_MRT3847_48765C.1.pep
MAMQGCYCHYTKLATQRRTLENLSFSGSISVNKLSKNERTRTCDPLSAGNNQFHRLLVKMRQTEMPASKYGTNGKAVRMVGTNELVKRKRMLENKVLNGSATSKVVRKNGITGLNKTVKSRRSLEELKVLATDEGFSWANENYSSWQRSIDVWSFVASLRIRIMLDNAQWTYFGGFTEAKQRSRXRKTASWLRKCVLHLGPTIIK

SEQ ID NO: 228947 - protein, 91 aa, Glycine max
  Clone ID: PAT_MRT3847_48766C.1.pep
RRPPFFFFFFFFFFFFFLNSLIYLGLGLNFNLIPYNPSITLKTSKYSSLLYYHYIQKFTNSSKKNHFPLLLKPHNNNNFPPTFTNSLIYPT

SEQ ID NO: 228948 - protein, 50 aa, Glycine max
  unsure (1)..(50): unsure at all Xaa locations
  Clone ID: PAT_MRT3847_48767C.1.pep
GHLTWRRCRVSGPCLCEYISELVKVKRSKIQKFIEKTPPGXIGRPPTRKL

SEQ ID NO: 228949 - protein, 45 aa, Glycine max
  Clone ID: PAT_MRT3847_48768C.1.pep
VQVIMRGTISHLNPSSEVETMNRRIHSNINPKILKNGLGGGQGEL

SEQ ID NO: 228950 - protein, 46 aa, Glycine max
  Clone ID: PAT_MRT3847_48769C.1.pep
RDRPTRADTHHFIYAHEESEALLLVHRISSLISALLTAMTGVETKD

SEQ ID NO: 228951 - protein, 59 aa, Glycine max
  unsure (1)..(59): unsure at all Xaa locations
  Clone ID: PAT_MRT3847_4876C.1.pep
PRHIMSLRYTLDVYVKDAVTSIVLQAKNMKVPALKQTKSCLXQRIKTGKHRWXFSQLRF

SEQ ID NO: 228952 - protein, 152 aa, Glycine max
  Clone ID: PAT_MRT3847_48770C.1.pep
FGSSNTKKRDKKKKQKKNSLQNQLIKISNSISENRGNMSLFAPLLLNQSDPFDHFRALLGGNSESLDLGAYTQMDWKETLDAHVFEIDLPGFAKEDVKLGVKENRVLCIKAEKKAEQEEQEEKTKLKWHCRERRSSGVVSREFRLPENSKVD

SEQ ID NO: 228953 - protein, 102 aa, Glycine max
  unsure (1)..(102): unsure at all Xaa locations
  Clone ID: PAT_MRT3847_48771C.1.pep
MGNFKSERKLTGGIGPLYFSKFYPTFXLHFSPNIILSAYIRFXLLHKSVSLDFVXTETYLVGDCCCCTVTLQVVSEVVSSSRNTLLSFIYSLFPFPSLCIFM

SEQ ID NO: 228954 - protein, 491 aa, Glycine max
  Clone ID: PAT_MRT3847_48772C.1.pep
MAPSICFLLLSLLFLSSSTSGDEEGFISVIISDKGLDFAKDILIDQAVASIVQSQLPQIEKTVQVPLVGKAKVVLSDITINDIQVNSSSVNTGETGIALVVSGATADLSLKWRYSVSSWLVPIGISDSGTATVKVNDLQVGLTVNLRNQEGTLKLILLDSGCHVRDLSIKLHGGAAWLYQVLVDAFAGNIASAVEEAISKKINEGISTLDLLLQSLPKTIPLDETAALNVSFVDNPVLSDSAIELEINGLFTGRNEVLVPQAYRRGSDLSASCGDSSPKMITISLHESVFKSGSLVYFTADSMQWIVDELPDQALLNTAEWRFLIPQLYKKYPNDDMNLNMSVSSPPDIQVTNKDVGVNIFIDITIDVLEDGEVIPVACISVDFSASCAVEIVGNNLAGWLKLRKFSTYLKWSKIGKLHMNLIQSVTSTVLKTVLIPYLNSQLLRGIPLPILNGFSIKNARILYAPPWITVCSDVSFSGDYYLQQLPAYVS

SEQ ID NO: 228955 - protein, 48 aa, Glycine max
  Clone ID: PAT_MRT3847_48773C.1.pep
VLAATVCRIIYEILKVSQNTIILRTINPFNIIFYFGVTSSSAFEKCKQ

SEQ ID NO: 228956 - protein, 52 aa, Glycine max
  Clone ID: PAT_MRT3847_48774C.1.pep
VLQKLKINIQLKQTLHFLKKCLKYFDIIVHKILWMNIILKNKEQHPVLSYQN

SEQ ID NO: 228957 - protein, 119 aa, Glycine max
  Clone ID: PAT_MRT3847_48775C.1.pep
TQFSACLCPCSNCLSNVPIISMTSLQKIGILQPVVDDIQSPSSSIKRSSPSILCVAAIVQRTAGLCHVASAAVLTSHSGSFFSPATNSCPSEGTVRPSSCSHVRNLLESFWSDNLSGRV

SEQ ID NO: 228958 - protein, 64 aa, Glycine max
  Clone ID: PAT_MRT3847_48776C.1.pep
PGSRLLALFTSLWVDSRKPATLSDAYLHVYQSWNLNLPTLCIVSSGEDRYRLTINLPAYTPTCA

SEQ ID NO: 228959 - protein, 74 aa, Glycine max
  Clone ID: PAT_MRT3847_48777C.1.pep
WSEASVPYSLLLLFWSWWGFIDNSTGRIKTEISVLYDEYCDNVIIVCVASACKRLCTFCVAFCSTTRRYSPQSS

SEQ ID NO: 228960 - protein, 288 aa, Glycine max
  Clone ID: PAT_MRT3847_48778C.1.pep
MEAVCAFSVGTLHIPTAHETSNSFRKSIFLSNQVASPVSLVFLRGSSKSKLLTALSPPPLTESSNQPEAEPEFESHAEKFDWYSQWYPLMPICDLDKRKPHGKRVLGIDVVVWWDRNEGAWLVHDDANLILDSDLYHRRVEEHKLKDIGPNNWHKACFVPTKSDALVIGYRTWLRKYAGGQVDWRGKYSGALPPTPPREQLLDRYWSHVVNCKSCNSAYKSLNAVEVMLQIISVASIGIVAVMKHGTMSVAKRNSMVALAVLSFALSRWLAHFIYKNFRYHDYEHAFR

SEQ ID NO: 228961 - protein, 487 aa, Glycine max
  Clone ID: PAT_MRT3847_48779C.1.pep
MEAVCAFSVGTLHIPTAHETSNSFRKSIFLSNQVASPVSLVFLRGSSKSKLLTALSPPPLTESSNQPEAEPEFESHAEKFDWYSQWYPLMPICDLDKRKPHGKRVLGIDVVVWWDRNEGAWQVHDDACPHRLAPLSDGRIDQWGRLQCVYHGWCFNGKGECQLIPQALPDGPPVHTSKKACVAAYPSTVQNDILWFWPNTDPQYKDIITRKRPPFIPEIDDPSYTKSMGNRDIPYGYEVLIENLMDPAHVPYAHYGLMRTPQPKVKADREGGRPLDMSIEKLDINGFSANQAWGKSKFMPPCIFYAYTPDQPASSGETKKSSAKKKMCLIFVCVPVSPGKSRLIWCFPRNFGLWMDKIVPRWIFHVGQNLILDSDLYLLHVEEHKLKDIGPNNWHKACFVPTKSDALVIGYRTWLRKYAGGQVDWRGKYSGALPPTPPREQLLDRYSFKIALEHGSFNLVINRLAISFNSGKSWYTFWSLEVATCVA

SEQ ID NO: 228962 - protein, 76 aa, Glycine max
  Clone ID: PAT_MRT3847_4877C.1.pep
GQAQAHGIAADCIGAKANAPPTKRREGLIVATDTWRLPSGMLADTNAGRARGVSCRMVTTVSQAKSSINGGSNSDK

SEQ ID NO: 228963 - protein, 57 aa, Glycine max
  unsure (1)..(57): unsure at all Xaa locations
  Clone ID: PAT_MRT3847_48780C.1.pep
XXXXXFXXXLXXXXXXXXXXXLXXXXXXXXLXXXXRXXGIPXGXLXPNSVLXXXCLR

SEQ ID NO: 228964 - protein, 72 aa, Glycine max
  Clone ID: PAT_MRT3847_48781C.1.pep
SFPRFVGRFVVLSRVLGGWFFRVGLSFALLVFAAPPARLGCGGPGLYCALRSGRVCLVLTVSGRVGSSRVFR

SEQ ID NO: 228965 - protein, 62 aa, Glycine max
  Clone ID: PAT_MRT3847_48782C.1.pep
PTLPLFFNYWQATSGEFSNSRAIISGGESYGFFMGKKYKIAQVFNLTSQTHDFHFLPLCESL

SEQ ID NO: 228966 - protein, 67 aa, Glycine max
  Clone ID: PAT_MRT3847_48783C.1.pep
RTVRYLALQVLQKQLLISRVKSKHRRQYKLSILHKNSPSHMLIHIFLCRAGGEARGNNAVIIIARAE

SEQ ID NO: 228967 - protein, 128 aa, Glycine max
  Clone ID: PAT_MRT3847_48784C.1.pep
KSHSPPNSFPSHKPPKKPPRTSWFKRGALVSLPFLPKTKHGTRPFGSLKPCPPPKGHPGGGVPGGKNPLNGPPRGDPPKENKKTNFPPPVAERNPHRGPPPIGRPGDPIGGGNAPSPRQNLARGFGGG

SEQ ID NO: 228968 - protein, 87 aa, Glycine max
  unsure (1)..(87): unsure at all Xaa locations
  Clone ID: PAT_MRT3847_48785C.1.pep
MNSLWTDVLIDMVVLQYRAKSGIRDAGTIDLSNQCLATLAFYGVGVNLALRLTTSDGARLCXAADRVSKWTGTVHIFCIGGAFLSDS

SEQ ID NO: 228969 - protein, 112 aa, Glycine max
  Clone ID: PAT_MRT3847_48786C.1.pep
MEVKIQKTLSMCKNLMKEVKTWGCLKQTGLSLRYMMEFGSNPTPKNLLISAQFLHKELPIRIARRAIELHTLPHGLSHRPPVLKVPLLHCWFCYSGYSVLSLGFKKACFGYF

SEQ ID NO: 228970 - protein, 157 aa, Glycine max
  unsure (1)..(157): unsure at all Xaa locations
  Clone ID: PAT_MRT3847_48787C.1.pep
VGVFPCFPGFXSXPCPVLSXXXXRFSXPXVSPLFPXFFVGPGLAVPXFXXFAGRGXCLVRWVGXXXSLPXWGWGCLXAPPPGXFXXXRXXXEKKNFFCSPLRXPLLPLGRFVPXPLVVXXFVFFPSPLXFWXXXCPLGALPXWFRALVCSPPPPXAA

SEQ ID NO: 228971 - protein, 353 aa, Glycine max
  Clone ID: PAT_MRT3847_48788C.1.pep
RRRGAVLINGGPSGTTFTVEQGKTYRLRISNVGLQNTLNFRIQGHDMKLVEVEGTHTIQTTYSSLDVHVGQSYSVLITVDQAPKDYYIVVSTRFTNKILTSTAILHYSNSQQSVSGPIPSGPTTQIDWSIKQARSIRTNLTASGPRPNPQGSYHYGLINISRTITLVSSTAQVNKKQRYAVNSVSFTPADTPLKLADYFNIGGIFQVGSIPDSPSGRPMYLDTSVMGADFRAFVEVVFQNHENIIQSWHIDGYSFWVVGMDGGVWTPNSRNQYNLRDAVSRSTTQVYPKSWTAIYMALDNVGMWNMRSEFWARQYLGQQFYLRVYSPVGSIRDEYPIPKNALLCGKAAGRTTR

SEQ ID NO: 228972 - protein, 68 aa, Glycine max
  Clone ID: PAT_MRT3847_48789C.1.pep
YPSTHSLFSPFSSSDPQARVRLPGFLSKEPFSLEDMLAFGEGNTPPAISVLISSTIDALLFIMSPFSS

SEQ ID NO: 228973 - protein, 55 aa, Glycine max
  Clone ID: PAT_MRT3847_4878C.1.pep
ESSTRTIESAYQSNTALHRFTVGIFMIYRFNVSTDTNHRVGSRYLKSLYTLCMSV

SEQ ID NO: 228974 - protein, 101 aa, Glycine max
  Clone ID: PAT_MRT3847_48790C.1.pep
FTAEHMNRIKWYATTNIYWIAHKHMEDQAWISPHNHNLRDSSQHSAHAYYIHISFPPIFILLNCLGPQTPTKHPFGTQSPTKTSLLKFSTNFHSNKVLTSI

SEQ ID NO: 228975 - protein, 164 aa, Glycine max
  Clone ID: PAT_MRT3847_48791C.1.pep
MLAMEGNKKTKQYGLDSATSWFGSCISSCSSSEKVSTHRKLPRTASESSVTNPMKKRGGWKAIIFILGNETFERLAVFGLFANFMVYLTREFHLDQVYASNIISLWFGISNFTPLLGAFISDAYVGRFRTIAFASFGTLSVRSYLCGCLSHILRLHFQYKRKIN

SEQ ID NO: 228976 - protein, 68 aa, Glycine max
  Clone ID: PAT_MRT3847_48792C.1.pep
LKRKLEEHKPSNQISTATGSTGKITQGKENPTQKKIPEKFNSPHLMFLSAHLTPLANTAGKLLMGMAD

SEQ ID NO: 228977 - protein, 51 aa, Glycine max
  Clone ID: PAT_MRT3847_48793C.1.pep
RLREDDRRDVCSYMILVFSSTKQKQKKGSMKIHDAFLVACVRYREPTMLGS

SEQ ID NO: 228978 - protein, 81 aa, Glycine max
  Clone ID: PAT_MRT3847_48794C.1.pep
SEFEARLKHLLSCHSNNPNLITPEEAVEASKVAAISATKAADAARAAAEEKAARAAKAVAAAKRALDLVASFSEEVAGKER

SEQ ID NO: 228979 - protein, 116 aa, Glycine max
  unsure (1)..(116): unsure at all Xaa locations
  Clone ID: PAT_MRT3847_48795C.1.pep
THTPVWKIMRCTYHCRVSGRIAWDLMRQYHYECYWSSXLKLLPESISXTMLTVVARSWKNDYALPYQASFHPSYDSHVYQYHRKIIRRMRTYLLTFTGAPLPVLVCSIRCKIIYRC

SEQ ID NO: 228980 - protein, 84 aa, Glycine max
  unsure (1)..(84): unsure at all Xaa locations
  Clone ID: PAT_MRT3847_48796C.1.pep
ARQPLHHTSRSRYPFLLFFYLSFSIKXAEXFXFXSESVNEGHPDKLCDQISDAVLDACVEXGXRXQVAWETCTRTNLVMVSGKS

SEQ ID NO: 228981 - protein, 57 aa, Glycine max
  Clone ID: PAT_MRT3847_48797C.1.pep
GYHQGWMHTLEYVANCPRKMNAFCLKIFNNLIGCCPYKTVFFGSMIALSEMKERINR

SEQ ID NO: 228982 - protein, 43 aa, Glycine max
  Clone ID: PAT_MRT3847_48798C.1.pep
SFGSRILTLGNNRLRYEIAQTAYIKFILHSLKHPTFGVNGVLI

SEQ ID NO: 228983 - protein, 59 aa, Glycine max
  Clone ID: PAT_MRT3847_48799C.1.pep
FSEYHFLRDRKHLFGLVTILEMEFLLQCKKGCCTLRHLGWDSMAELETPSHFRSSMFID

SEQ ID NO: 228984 - protein, 193 aa, Glycine max
  Clone ID: PAT_MRT3847_4879C.1.pep
MLAKRLSSFFKLSPKPQISTSMKKVDEETGKYYGRKAVSFVLITITGGVALSALDDLAIYHGCSSKAMEKVSKNQAIIDSIGEPIVKGPWYNASLAVAHERRSVSCSFPVSGPQGNGVLQLKAVRNGDDTWSFLFLPRDWDILIMDALLHIPENEKHRTLRINLADKPLSCTACTDSTPHPSENSKAKLSANQ

SEQ ID NO: 228985 - protein, 95 aa, Glycine max
  unsure (1)..(95): unsure at all Xaa locations
  Clone ID: PAT_MRT3847_487C.1.pep
METMLPPNQAEEAIVTTSLNETESEVGMREEEKELQQQDHSMFNIKSXLWHGGSVWDAWFSCAXNQVAQVLLTLPYSFSXLGMLSGNLLSDFYGI

SEQ ID NO: 228986 - protein, 96 aa, Glycine max
  Clone ID: PAT_MRT3847_48800C.1.pep
GLTAWNRHRRINWLKKKKKIEFWKCRVWLKVNRAKSIVFERRSNALAFMINLKRYNALFFDSSSMEMEPRDNFSGIVAHQFLLCDIIRLSSLMELP

SEQ ID NO: 228987 - protein, 93 aa, Glycine max
  Clone ID: PAT_MRT3847_48801C.1.pep
IQTNPLFLKKYAQFLLQSKRDLQVAEDYYSRAIVADPSDGEMISEYAKLVWELHHDQEKASFLFEQAVQATPGDSNVLAAYTCFLWEKDDGES

SEQ ID NO: 228988 - protein, 184 aa, Glycine max
  Clone ID: PAT_MRT3847_48802C.1.pep
MYSQIRTKRKRKGKTYVTKGYFDEPCNIGFSADCHNHPQFSLPSNYFGNCLIPLLTTLKRGELVGQNGIVAAANAIERKIRDFKSDALRLAETTMSDIRGLGKCGQSLVVIVGSPKLTAYNTDFGWGKPIKSEVVNLDSVRTVSLTDCRDQEGGIQVGIVLERIQMNNFTNILEEHLSHIAVLD

SEQ ID NO: 228989 - protein, 91 aa, Glycine max
  Clone ID: PAT_MRT3847_48803C.1.pep
DTPSIHDSFSLHTLNTLLPLSCPQIEMACRVDERISLRNQHHIVRLRTCSSSSCSVSLDISSVSRLHIHFLAMGIDSIHYWQLFATISQFI

SEQ ID NO: 228990 - protein, 65 aa, Glycine max
  Clone ID: PAT_MRT3847_48804C.1.pep
MKYRFQKLWFRGLKSSCVDSGRSNRPLVDLLFEDLDLVLTCTKHIRIYLTTLCVSGRNSCFILQT

SEQ ID NO: 228991 - protein, 82 aa, Glycine max
  unsure (1)..(82): unsure at all Xaa locations
  Clone ID: PAT_MRT3847_48805C.1.pep
FFGRWAPFLLCFRLAFFGCALARGFCCFGFVRRSLSGLAREVLSCCLASPLCLAACFCLSYGFRLWGGGPFCFLHCARCXLR

SEQ ID NO: 228992 - protein, 80 aa, Glycine max
  Clone ID: PAT_MRT3847_48806C.1.pep
TSLDRRLPGDANWLGGSSTPTITTHLDNTIDITLLFMSLLSENPLTLDNSTMITTSLPLHIDLTASLCSNIELYDTNAAS

SEQ ID NO: 228993 - protein, 117 aa, Glycine max
  unsure (1)..(117): unsure at all Xaa locations
  Clone ID: PAT_MRT3847_48807C.1.pep
PHPPPPPLPPPPHPPPGSPTPPTLVTPPPPAAPAXPPPLCPIPPPACPPPPPRISPPPTTHPPSASFSSWLETYRRFVPPGRCFCFPDSFFYPIDRVVREGRFSPGSRINWDIGKSC

SEQ ID NO: 228994 - protein, 83 aa, Glycine max
  Clone ID: PAT_MRT3847_48808C.1.pep
FNVAKKGPVYLMELKLKKLRDTVSSIQEEKFYFCEKKKKKQGLNRTTPTKMFWGRWPSLFGCLTGAGKQLWPLKTFFEKKKLI

SEQ ID NO: 228995 - protein, 77 aa, Glycine max
  Clone ID: PAT_MRT3847_48809C.1.pep
GTLARPQAPILYSRRHPCVRTILCMETMYFPNSVSIKAYAKVIDVEGPTGKLVRDSHHVNLYFHLITDKGCKQEAHE

SEQ ID NO: 228996 - protein, 124 aa, Glycine max
  Clone ID: PAT_MRT3847_4880C.1.pep
LFFFRERFFFFVCGGFVPPPCWGGFPPFMPPGCPLLFLGVFFFFNLAGVSVFSLRHGFSFFTASVFSIFLLREIWPPLGPGLNFPVLGPGAVFFFGGGPSRFHFFFPIEVPRGVFPGVARGFIS

SEQ ID NO: 228997 - protein, 37 aa, Glycine max
  Clone ID: PAT_MRT3847_48810C.1.pep
GYNPHDNIPPFKLLSKAQEENLSKVYKKAYFDKLKYR

SEQ ID NO: 228998 - protein, 43 aa, Glycine max
  Clone ID: PAT_MRT3847_48811C.1.pep
DHLMLYFESFFECSLKAFVNFSFFLILKSDEHIAIDTFGQCNC

SEQ ID NO: 228999 - protein, 113 aa, Glycine max
  Clone ID: PAT_MRT3847_48812C.1.pep
NDFKPVNIKKCYIWTTNIKYNICFFSSYKQFSLLAEAISQEHQELKAREKSQAQVIIKIEAKSCTAWQCFFQQGTSYIGGWSNRLYHIAPVCSGLYSLGLCKYTDILHNNKII

SEQ ID NO: 229000 - protein, 499 aa, Glycine max
  unsure (1)..(499): unsure at all Xaa locations
  Clone ID: PAT_MRT3847_48813C.1.pep
MEILKVGRTCSTTSLVQKEVQRRTQLCSLITQLPGFNANFPSKHYSGYISIDGNAESGKNLFYYFVSSESSPEKDPVVLWLNGGPGCSSFDGFVYEHGPFNFEAANSKGNLPTLHINPYGWSKVSNIIYLDSPAGVGLSYSKNTSKYATGGLGKWPXSHVILLKWFQQFPEFQANPFYIAGESYAGVYVPTLAFEVAKGIRSGTKPVINFKGYMVGNGVTDEIFDGNALIPFVHGMGLISDSIYENLQSSCKGNYYDAYSLDENDVCYKTIEKVDRAIDGLNVYNILEPCYHFPDAATAKENGTLPRSFKQLGVTERPLPVRKRMFGRAWPFRAPVKPGLVPLWPQLAQTRHVACVSDEVASSWLNNVAVRKAIHAESEKVAGPWELCSSRIEYHHNAGSMIPYHKNLTRLGYRALIFSGDHDMCVPFTGSEAWTRSLGYKIVDEWRPWNSNNQVAGYLQAYENNLTFLTIKGAGHTVPEYKPREALDFYSRWLEGKLI

SEQ ID NO: 229001 - protein, 257 aa, Glycine max
  Clone ID: PAT_MRT3847_48814C.1.pep
AVPELVQLCENENLNLRASAVKLFSCLVESCDEGIIQEHVNQKCINTLLQIIKSPSDEEEILSAMGIICYLPEVDQITQWLLDAGALPIIKTYVQNGENRDHQRNNLVENAIGALCRFTVPTNLEWQKSAAETGIMTLLVQLLENGTNLTKQRVAQSLAQFSKSSFKLSRPISKRKGLWCFSAPADIGCMVHEGICSVKSSFCLLEANAVGPLTRTLGEPDPGVCEASLDALLTLIEGERLQSGSKVLSEANAIPLI

SEQ ID NO: 229002 - protein, 139 aa, Glycine max
  unsure (1)..(139): unsure at all Xaa locations
  Clone ID: PAT_MRT3847_48815C.1.pep
ELTRASEAESEGHASWHACPYCYVMYEYPKVYEDCTLRCQNCRRGFHAMVVRSPPKDGTFGSFCSWXFFPVGFSGDFNDINGSSSKWNPFSPLFPCALKGAEQNSTYQKGPWVFYDDDASAEFVEAGFRHRKMILDDDD

SEQ ID NO: 229003 - protein, 75 aa, Glycine max
  Clone ID: PAT_MRT3847_48816C.1.pep
PPLRFLSFLGQWWLFCKIGRYRNFCDLEECEVSVSFWEFFSLLFIRDSPQLSVYALLGFFLRFVLAFGVQLLVVL

SEQ ID NO: 229004 - protein, 109 aa, Glycine max
  unsure (1)..(109): unsure at all Xaa locations
  Clone ID: PAT_MRT3847_48817C.1.pep
TPTPLLXRGLFKSIWGFISAPFGRMSYVAHNVNQPQEKDSSEGNSSFDFKTCSRLEKVSSTKAQLVSGKTYKYDIFGAGSXSSEAFPEKEYQEXKPIMIDARLXQRIDP

SEQ ID NO: 229005 - protein, 57 aa, Glycine max
  Clone ID: PAT_MRT3847_48818C.1.pep
RDPIKLKRKDRIVCTILHPVTQPYCVNLPKAAETHLKQTSHYSRNLRERPNTQPNKS

SEQ ID NO: 229006 - protein, 52 aa, Glycine max
  Clone ID: PAT_MRT3847_48819C.1.pep
IHTQKIIKYFLRSSMPPYVKFQPYPNSSFILIGKASQSHKFTSLAKHSEIHS

SEQ ID NO: 229007 - protein, 54 aa, Glycine max
  Clone ID: PAT_MRT3847_4881C.1.pep
YKPSTAFDLVNHRLNQCSYTKLILPPSYQIWFQAFVNTNFFFLYIIALIVSMSC

SEQ ID NO: 229008 - protein, 54 aa, Glycine max
  Clone ID: PAT_MRT3847_48820C.1.pep
GNVFAYESSVQSGWPVSIVKWAFRGTIFEHGHPLRCLEDRFQNGIRDSLHSLLL

SEQ ID NO: 229009 - protein, 76 aa, Glycine max
  unsure (1)..(76): unsure at all Xaa locations
  Clone ID: PAT_MRT3847_48821C.1.pep
LYPDACGGGGPGWIIQGIVSYGRXGHGTXEAGALDTGRLXCDTLVDFWSRLGDXMRLCLLRVRGEDFTGRLMGRFD

SEQ ID NO: 229010 - protein, 59 aa, Glycine max
  Clone ID: PAT_MRT3847_48822C.1.pep
PCTYMQPCIAPTFPMLMSYLHFSASLILDRRSLVLVLLLLPCHPLASFHPTPPPPPPPP

SEQ ID NO: 229011 - protein, 88 aa, Glycine max
  unsure (1)..(88): unsure at all Xaa locations
  Clone ID: PAT_MRT3847_48823C.1.pep
NWHCNTSAIMALQGVNKIFLQSAYPAWVKEHYARLDTLRTGKTVMXTTVGKSLVIADKFFKKFHVAIGRAMLQEVSGVCFTPSNFSMV

SEQ ID NO: 229012 - protein, 41 aa, Glycine max
  Clone ID: PAT_MRT3847_48824C.1.pep
FYFPTTINYDVGSPTWGDLRWAPIPSAMEVTNLGHRPSCSC

SEQ ID NO: 229013 - protein, 55 aa, Glycine max
  Clone ID: PAT_MRT3847_48825C.1.pep
TIKNMQASTGARIQVIPLHLPPGDTSTERTLKIEGTPEQIESAKQMVNQVISGEG

SEQ ID NO: 229014 - protein, 73 aa, Glycine max
  Clone ID: PAT_MRT3847_48826C.1.pep
QNWFGKKKNGFWQKKRGGPRKKKGGENIPPKKGQKTLLGFKLFFWGKKKKKLIKLEIPLRGALIMGGFFYGRS

SEQ ID NO: 229015 - protein, 102 aa, Glycine max
  Clone ID: PAT_MRT3847_48827C.1.pep
GSRLHPLVEATSARRAVHGLWWRVQTMPTNMSRNTRDFYSGKSPTRLSSSRPCWFQLWQQTRAGTPERSMNRSVTSKAPSRRFVASRSLVAVFGEEAEGLGE

SEQ ID NO: 229016 - protein, 63 aa, Glycine max
  unsure (1)..(63): unsure at all Xaa locations
  Clone ID: PAT_MRT3847_48828C.1.pep
RKGCEKRCDDDTIGDLKKLXAFQTGTRLERIRILKWKTFYEEHITLQDYKIXHDCMRLELYYY

SEQ ID NO: 229017 - protein, 251 aa, Glycine max
  Clone ID: PAT_MRT3847_48829C.1.pep
MLARLAASRFNEIRQIFRQPSRAFSTALNYHLDTPDNNPKLPWEFTEANQAKVKEILSHYPSNYKQSATIPLLDLAQQQHGGWLPVSAMDAVAKIVEVPPIRVYEVATFYSMFNRAKVGKYHLLVCGTTPCMIRGSRGIEEALLKHLGVKRNEVTPDGLFSVGEMECMGCCVNAPMITVADYSNGSEGYTYNYFEDVTPEKVVEIVEKLRKGEKPPHGTQNPRRIKSGPEGGNTTLLSEPKPPPCRDLDSC

SEQ ID NO: 229018 - protein, 118 aa, Glycine max
  unsure (1)..(118): unsure at all Xaa locations
  Clone ID: PAT_MRT3847_4882C.1.pep
NLRAATQHTRGTTTHQXRPXTTRRSTPASPNQREQRDTPXXRTPTANQTXPTAAPATTQARXTTTPTSTPPTTPKTTPTQTQTTHQRGPNKRPGRRATAQQAAQGAPAADAKEERPAK

SEQ ID NO: 229019 - protein, 110 aa, Glycine max
  Clone ID: PAT_MRT3847_48830C.1.pep
RTEVKIKGKNISDIQIKQVEFGCSEKNYCNHCKTPILDLHRSCPSCSYSLCSSCCQELSQGKASGAMNSSVFKRPDKMKPCSASENHTLEERATSIGDLTDTSVLPEGTN

SEQ ID NO: 229020 - protein, 96 aa, Glycine max
  unsure (1)..(96): unsure at all Xaa locations
  Clone ID: PAT_MRT3847_48831C.1.pep
LHVFLLFVDKGITGYREDFLETGHRNHIQYRLTLEVVSDIDLYXWTLDEILIVMGLKSNGTVCDVLIXRAVDRCASLLQVDIVVTRHNADDIAETV

SEQ ID NO: 229021 - protein, 43 aa, Glycine max
  Clone ID: PAT_MRT3847_48832C.1.pep
IHYQKRKIKQMKIKSQMHFDVNLIDDNYKIDHDRISILIMIMI

SEQ ID NO: 229022 - protein, 84 aa, Glycine max
  Clone ID: PAT_MRT3847_48833C.1.pep
REKEGGNVKGVTLYPQQEPLTGRGTEEPAGTTRMDTGWAQRKAPGRDQEEATPPGEEGKGVKLGTPNNKGAEEPTTGMEEERKR

SEQ ID NO: 229023 - protein, 108 aa, Glycine max
  Clone ID: PAT_MRT3847_48834C.1.pep
KGFSGGGFFVICRLAKRFCCAKIFCLATAFFSVSRFCFAGPREFNWGANKKKIRLSIQELPTFYFFITPPLFFFFFFFFFFFFFFFFFFDFSTIKKIIKKRKNINRDI

SEQ ID NO: 229024 - protein, 147 aa, Glycine max
  unsure (1)..(147): unsure at all Xaa locations
  Clone ID: PAT_MRT3847_48835C.1.pep
MTRGRYDGSPKKHLVASVCGVAVFLGLLYVFQRSIFGSQNSGSSALEYGSKSLKRLGASYLGSDDDADSKQDESSSSIAQGDGEADIVPKSFPVCDDRHSELIPCLDRHLIYQMRLKLDLSLMEHYERHCXPAERRFNCLISSPAGY

SEQ ID NO: 229025 - protein, 60 aa, Glycine max
  Clone ID: PAT_MRT3847_48836C.1.pep
GISDCSSQTAKKIPKLVFRVLPDYYSKEIGNWAPLKVQPSRVIPKYLSVKQYIDGPRFLE

SEQ ID NO: 229026 - protein, 59 aa, Glycine max
  unsure (1)..(59): unsure at all Xaa locations
  Clone ID: PAT_MRT3847_48837C.1.pep
LLXCLXLXXPLLLPSXFXXLFLFRLVLPXFPPFLPFLFRPLIVCSXPWVXXWYLCHNRA

SEQ ID NO: 229027 - protein, 73 aa, Glycine max
  Clone ID: PAT_MRT3847_48838C.1.pep
CNTLFKHLFLPVPEGISSLQINQVWKALLAFGSTFVENQEYAKVADRGKLIWTKGREDTCYLCYNGQGFTLWW

SEQ ID NO: 229028 - protein, 73 aa, Glycine max
  Clone ID: PAT_MRT3847_48839C.1.pep
LHKGICQIRGPLIEMCIKIFFHCFKPRPYKKKCFIHQLGCIKNLIIKYQLVSVLPYGPCEGYPPAAPSHRTRG

SEQ ID NO: 229029 - protein, 74 aa, Glycine max
  Clone ID: PAT_MRT3847_4883C.1.pep
GFRLKLAPEDLPVNCAAPGFIITDCSKEFPGTESLWMNFMEHPQLQTLGESEDCAGILYFLCSPYASYFIGENI

SEQ ID NO: 229030 - protein, 464 aa, Glycine max
  Clone ID: PAT_MRT3847_48840C.1.pep
MNSASKTNSPQKLNEVENNHLSEPSQLPSPSPNDSLRPSSSSVSQSPLANTTEVSTSEACVQSSAELRQHVTFPNHFQVSKALKSGLTFGSFDTLGPSEKSNSETDGDNNASPALELSDEAATSSNQSASLTAQGDHLDYPHSSSYLIEKAPATNGNPITGTDTKVDQSKKEVLLAPEGQQIPTVQTAQNYGLNFISSMLGTQQVQFEGTEPQSQDASRFPNFVNASSQAVSPSPTPPLQSSIPVTPQSVSIFRPPYPANFFPYGHYYPPIYVSPIHQFLNHNGFPQQPSAGNMYLPAAAGIKFPVPQFKAGANTGNTAHIGIPSGSFITPPVGYAPGQTVNTGSSTGNQDLAVSQLKESQIYTTGQLSEGSAVWIPAPGQDMSSLQVNSLYNLTPQGQHLTFPPTQAAHGAFAGIFQAGQTVASPSTLLQQSQAVAGPVENVGPPSGSYQPPQPAQINWNSNF

SEQ ID NO: 229031 - protein, 71 aa, Glycine max
  Clone ID: PAT_MRT3847_48841C.1.pep
STNSGLRLRSPASPAPSAYPGTTPVPSVPSVIQNLVIVVLSVTSHGNNSKSVLTVRRALCTSCGLLVRVIY

SEQ ID NO: 229032 - protein, 84 aa, Glycine max
  unsure (1)..(84): unsure at all Xaa locations
  Clone ID: PAT_MRT3847_48842C.1.pep
XRXXXHTHXRFDHKRRPSXXRFXXEXKMGVAVXSVKERXQNGXWXRRFREAMXXXVXXXSXXXWNXEXIFWRKEEVEFXXLRFN

SEQ ID NO: 229033 - protein, 73 aa, Glycine max
  Clone ID: PAT_MRT3847_48843C.1.pep
KVTSRYELMRSVNDDKKKRVFSNDIGLNILMPNRRTKSRSRFRTNYVTLSCILNKVISMPMYVLIKDSIALRD

SEQ ID NO: 229034 - protein, 150 aa, Glycine max
  Clone ID: PAT_MRT3847_48844C.1.pep
QHQQQQQQKRNMQKQPQQTGIKRPRASAPVGSAAVLKNVNNVNSTIHHYQQHLVHPSGLFTEHPNPYMSSPAMPFGMVAPTPNVPPYAGPSAGPYGHDGVPMGPSGNPSLGGSHLSSSEPHVQTVGYYDRASTYGGIGLQHYYQASYYPQ

SEQ ID NO: 229035 - protein, 70 aa, Glycine max
  Clone ID: PAT_MRT3847_48845C.1.pep
GLLQTLFDLPDPIKLVLNYNIIPIHGSYTTRTFNTLWRTGLKEYIAPKKIPCAKLKAKDQQKSFWIKTEP

SEQ ID NO: 229036 - protein, 67 aa, Glycine max
  Clone ID: PAT_MRT3847_48846C.1.pep
SSRAARLCFFFFLQNCKESRFFIITIIFIIHQLTYMGGPWQNERKKIPEPAIAAPRKANPKIESASF

SEQ ID NO: 229037 - protein, 118 aa, Glycine max
  Clone ID: PAT_MRT3847_48847C.1.pep
GCHLPLRRGCINNNDYAIKHNINDDFDACTTSSKVLGVGPQRRKHIGPLRPTRSSSGTYGLCTINFDLIINLFTYIIFYETYIYVNKLIIRSKLIVTKFIMYIKNFNVIYKDINCFIT

SEQ ID NO: 229038 - protein, 74 aa, Glycine max
  Clone ID: PAT_MRT3847_48848C.1.pep
VCHWSAEKGWNEDDNAHILAVRSCLDGMDTPLHFGHNGAIYYVVGRHTHNSHPMDYRFDAGDRLNFLYLKIPKK

SEQ ID NO: 229039 - protein, 273 aa, Glycine max
  unsure (1)..(273): unsure at all Xaa locations
  Clone ID: PAT_MRT3847_48849C.1.pep
RPSVRSVVDLSESMRRXRVCDPSHXSGTTSYVLSMLQTLTLIGDQTPPVPQLRSLQTVDYRTCNEEMCSAGKCLMLTLLPENLXPNTVELEPYFTDSLGNSSRIDSGTGHDTNFAAWLYXLVRIGVIGVGDYPGVRARVFVKYLDLMRKLQLQYCLEPAGSHGVWGLDDYHFLPFIFGSSQLIDHKYMKPKSIHNEDILENFSNEYLYLACIAFVKKVKKGVFAEHSPMLDDISGVPNWNKVNTGLLKMYKAEVLEKVPIMQHFLFGSIIKWE

SEQ ID NO: 229040 - protein, 114 aa, Glycine max
  unsure (1)..(114): unsure at all Xaa locations
  Clone ID: PAT_MRT3847_4884C.1.pep
NSRGHHPSGGGVLRQKPGVGRGDHPSLHLFTSPTHTTTPHFFFFLXQLXSGHLTILILLYLIFLSLSSMGGGLVXXLSXKKLELEVWSQSCKTGGAIRKIRGVLPAWGRACNDY

SEQ ID NO: 229041 - protein, 76 aa, Glycine max
  unsure (1)..(76): unsure at all Xaa locations
  Clone ID: PAT_MRT3847_48850C.1.pep
IERSSGRRLEGEFRGDYGWDTDGLSAXDPEPFARNRELEVIHSRWAMLGGLGCTFPEILEKNGVKIREAVLVQAGG

SEQ ID NO: 229042 - protein, 81 aa, Glycine max
  Clone ID: PAT_MRT3847_48851C.1.pep
FFFCPGQARIFSKRGILSRIRNMSFLSFVCLFPSRKEISARPSRWVGAVNFKNSTPLLIAVSMCEGCDVFTKKGKTPIKRR

SEQ ID NO: 229043 - protein, 73 aa, Glycine max
  unsure (1)..(73): unsure at all Xaa locations
  Clone ID: PAT_MRT3847_48852C.1.pep
TPPYTAVNSLIHLYTHSMKHQKLSSQCXAERHALDKIYQWIFRQLEGGSRVGTVDALNYIQNDFDYCGEEPSM

SEQ ID NO: 229044 - protein, 185 aa, Glycine max
  unsure (1)..(185): unsure at all Xaa locations
  Clone ID: PAT_MRT3847_48853C.1.pep
PGLARVSSGFLPGWCLLGFPFFFLSGGALAGRAVPGALLWGAGSPPWXXFVLGVPXGPSPPVAVSSLPAAGGSLFGRGSPLVGVLGGPWGVLLGGPGGXXGPFXLPXPCXPFGGSFPSXPSGLXPLSLSXLXCVXXGALASLXVVSAVCPPVLWGASVCCFFFPGFPFFCALVPYKILKIGGRSV

SEQ ID NO: 229045 - protein, 86 aa, Glycine max
  unsure (1)..(86): unsure at all Xaa locations
  Clone ID: PAT_MRT3847_48854C.1.pep
LLSELLSGDNGLTEKTFRTRKDLDIEFFYHALAPQSIKGLPHHIRQALYTLLILHSPIXLTAEIKXSAECENIHTSGLLYHGRYEF

SEQ ID NO: 229046 - protein, 504 aa, Glycine max
  Clone ID: PAT_MRT3847_48855C.1.pep
DRMAHINGKFMDKNIRFTLVNISSNRWLTIRLETLGGLMIWLIATSAVLQNARAANQAMFASTMGLLLSYTLNITNLLSGVLRQASRAENSLNSVERVDTYINLETEAPGVIETHRPPPGWPTSGSIEFEDVVLRYRPELPPVLHGLSFTVPPTEKIGIVGRTGAGKSSMLNALFRIVELQKGKIIIDGCDISTFGLEDVRKVLTIIPQSPVLFSGTVRFNLDPFNEHNDADLWQALERAHLKDVIRRNTFGLDAKVSEGGDNFSVGQRQLLSLARALLRRSKVLVLDEATAAVDVRTDALIQKTIRQEFQSCTMLIIAHRLNTIIDCNQILLLDAGRVLEYSSPEELLQNEGTAFYKMVQSTGPENAQYLCSLVFGKTENNSNEYNKELEHHVRQLASSHWTSSTQFAIASTLSSLHQHLQEPSSEENKDILHKTTAAVTTLQEVLVGKHDEDIEETLYKYHIPTDRWWSTLYKVIEGLSLLKRLPLDNIQQLELDFEGRSFD

SEQ ID NO: 229047 - protein, 55 aa, Glycine max
  Clone ID: PAT_MRT3847_48856C.1.pep
RFIADLGTLCCPIWGLLLTDPLLIYEWDSQVMALFAGIKSNFPSAKPLPFGSLRE

SEQ ID NO: 229048 - protein, 119 aa, Glycine max
  Clone ID: PAT_MRT3847_48857C.1.pep
GRNLLVAAVGGGPAGRAAADTLVNGGGETVLIYRHMDYCMTCGRSIPLCLVGELHLPLDIIDRCLTKMKMISPTYETVDMLRTLNPPNYILIVTSEALNTYLEDRCNENRFNCVDGLFL

SEQ ID NO: 229049 - protein, 226 aa, Glycine max
  unsure (1)..(226): unsure at all Xaa locations
  Clone ID: PAT_MRT3847_48858C.1.pep
MSSSKDADPSLGYLTRKDTEVKLPRPTRVKNKTPAPIQITAEQILREARERQEAEIRPPKQKITDPTELGEYRLRKRKEFEDLIRRVRWNIGVWIKYAQWEESQKDFKRARSVWERALEVDYKNHTLWLKYAEVEMKNKFINHARNVWDRAVTLLPRVDQLWYKYIHMEEMLGNVAGARQVFERWMKWTPDQQXGWLSYIKFELRYNENERARGIFERFVECHPRV

SEQ ID NO: 229050 - protein, 52 aa, Glycine max
  Clone ID: PAT_MRT3847_48859C.1.pep
PTSTVILFDQYRSIIFFCRGGLMFSRTNKHASFGRNKTSVELAQKNLADLHC

SEQ ID NO: 229051 - protein, 37 aa, Glycine max
  Clone ID: PAT_MRT3847_4885C.1.pep
GFFRCFNLLKKVDLNTTLRYQLGTIFRDILVVNNFIY

SEQ ID NO: 229052 - protein, 239 aa, Glycine max
  Clone ID: PAT_MRT3847_48860C.1.pep
QKHSECPKDSKAINREVLQRELKEVLAKQAELGVEVAEIPSYYLKNSDNQALQSEGKNKFTDKRKFQNKFNKKSDRKGRFAKRQKFDDKDFSESPSLKKRKPTLLQKLLSSDVKRDKSHLIQVFRFMVMNSFFKHCLDKPLRYPLVVVKEKGSEVDGEEKYLHTGKDVLKGGNEETVQKIVTFNNDNSHDCEDEDSDDDENDSIVDNNLHKDPSSLVKRQCDSGEGIGKFDEEEGEIIE

SEQ ID NO: 229053 - protein, 89 aa, Glycine max
  unsure (1)..(89): unsure at all Xaa locations
  Clone ID: PAT_MRT3847_48861C.1.pep
RPAFSGRAPMDQFFSFVGFKKRFPPRGRRPFGLFFFPRQFFSHVSPLGKISGIKLPFCVPHPRRXLFSVSGFFFLGISCFPALCWGEKK

SEQ ID NO: 229054 - protein, 87 aa, Glycine max
  Clone ID: PAT_MRT3847_48862C.1.pep
GTGARNLASEWIQLGVSTSPAARDGGPQAASPSPFMQSYSGGGLLVLGPTTSKAASIKGIYCQQPQLGNGRVFSNPAGVGLRPGDSI

SEQ ID NO: 229055 - protein, 58 aa, Glycine max
  Clone ID: PAT_MRT3847_48863C.1.pep
LYYIEFGGVLTINKLSFLHPMMQNDGAKNMGCRNKALPYYYEPFSTRGLMVSGGLYMD

SEQ ID NO: 229056 - protein, 289 aa, Glycine max
  unsure (1)..(289): unsure at all Xaa locations
  Clone ID: PAT_MRT3847_48864C.1.pep
MEDLEEEENGAEEVLGSSLTMEKVAAAKKFIENHYRAQMKNIQERKERRWVLERKLASSDVPNEERINLIKDLERKETEYMRLKRHKICVNDFELLTIIGRGAFGEVRLCREKKSGNIYAMKKLKKSEMLRRGQVEHVRAERNLLAEVASHCIVKLYYSFQDAEYLYLIMEYLPGGDVMTLLMREDTLSENVARFYIAQSVLAIESIHKHNYIHRDIKPDNLLLDKNGHMKLSDFGLCKPLDCIALSTLHENQTIDDETLXEPMDVDDAXXRSSWRXPREXFQXGQXXR

SEQ ID NO: 229057 - protein, 132 aa, Glycine max
  Clone ID: PAT_MRT3847_48865C.1.pep
MAGFFSLGAGRQNKAEQEEDQREENVNNAGGNNNSQFLFRNNVSEEIYNKGFEIWPQSSYHHHQNLTNFYSFGVGPSRRNNHNNSSSNNVNDDVSVSFSHESNRFGFTVMSSGGGGGGGMNCQDCGNQAKKD

SEQ ID NO: 229058 - protein, 99 aa, Glycine max
  Clone ID: PAT_MRT3847_48866C.1.pep
MEDLEEEENGAEEVLGSSLTMEKVAAAKKFIENHYRAQMKNIQERKERRWVLERKLASSDVPNEERINLIKDLERKETEYMRLKRHKICVNDFELLTII

SEQ ID NO: 229059 - protein, 73 aa, Glycine max
  Clone ID: PAT_MRT3847_48867C.1.pep
MSKGAPHPPSVLMGDAWTKPYSREYAAFPASWLRVSKFWPSTGRIDNVYGDRNLVCTLLPTSQVVEEQAAATA

SEQ ID NO: 229060 - protein, 55 aa, Glycine max
  Clone ID: PAT_MRT3847_48868C.1.pep
FFIFFFSQNTPRGFFENHLGTFHNLSLLQCYSSPKTPDTTLRLQHRPGHATKNNI

SEQ ID NO: 229061 - protein, 132 aa, Glycine max
  Clone ID: PAT_MRT3847_48869C.1.pep
ERRAHANVLTSNWSPSADIRHADAAVIFNWPSMLATIGIELRMRNCTPTEVGILASFSFRFCKMTMFSCFPWPSRSAQSAFSWPFRMRRVCSPIKCSSRAMNALSTLFDRSASMANGCTFCWYLPISLLSST

SEQ ID NO: 229062 - protein, 112 aa, Glycine max
  Clone ID: PAT_MRT3847_4886C.1.pep
LARALPALVAVLRLPIPVSIMEQGMACLLETMSFVDALPAFRTKQWQVVALLFIDALSVCRLPALISYMTDRRASFHRVLSGSQIRMEEYEVLKDLVVPLGRAPHISSQSGA

SEQ ID NO: 229063 - protein, 50 aa, Glycine max
  Clone ID: PAT_MRT3847_48870C.1.pep
SLAMKKKSPLELEAVWIIIKATVEVYHHITEHLFLMCMLSLIFMFRLSKS

SEQ ID NO: 229064 - protein, 135 aa, Glycine max
  Clone ID: PAT_MRT3847_48871C.1.pep
MQQKAKSRRWSQLSLRSFFQKSANLDNGSSVKVVNDSCTDYSNNQAEPSQPSPRLQETPTVFAHSSSPKKYGLDTDTCDQDLAGPNGSSTKEEMSNVASLEWQRIQQLMQNSLPICKGYKEPCIARVVKKQGPNF

SEQ ID NO: 229065 - protein, 56 aa, Glycine max
  Clone ID: PAT_MRT3847_48872C.1.pep
PPPTPTPVLPPTPLPAPLNPPLPAPFSPPPLPPLSPPPYTSPWPQLSSPLGIPNRV

SEQ ID NO: 229066 - protein, 72 aa, Glycine max
  Clone ID: PAT_MRT3847_48873C.1.pep
RKSKYYSSGIEDVCINATVVRCKSTNKQGDPCDRCPKAANTGRYGRRHWTLGLIQLTCVYSVAHVRLRCGDT

SEQ ID NO: 229067 - protein, 297 aa, Glycine max
  Clone ID: PAT_MRT3847_48874C.1.pep
MADQLSKGEEFEKKAEKKLSGWGLFGSKYEDAADLFDKAANCFKLAKSWDKAGATYLKLASCHLKLESKHEAAQAHVDAAHCYKKTNINESVSCLDRAVNLFCDIGRLSMAARYLKEIAELYEGEQNIEQALVYYEKSADFFQNEEVTTSANRCNQIHANQCKQKVAQFAAQLEQYQKSIEIYEEIARQSLNNNLLKYGVKGHLLNAGICQLCKGDVIAVTNALERYQELDPTFSGTREYRFLADIAAAIDEEDVAKFTDVVKEFDSMTPLDSWKTTLLLRVKEKLKAKELEEDDLT

SEQ ID NO: 229068 - protein, 70 aa, Glycine max
  Clone ID: PAT_MRT3847_48875C.1.pep
YLSQCNPSKGPLSNDSRQSRTLRRETVERACVGLRFKACAADLHAKFSNRLEIVIKKCTIHHRKKHPVQC

SEQ ID NO: 229069 - protein, 118 aa, Glycine max
  Clone ID: PAT_MRT3847_48876C.1.pep
MRPILLSGHERALTQVKFSKEGDLIFSVSKDHTVCAWYSANGERFGTYKGHQGALWTVDVDPYTRLLATGGADNTMRLWEVETGKLLKTWDFLTSIKRVEFSEDGKQLLGVTEKRTGQ

SEQ ID NO: 229070 - protein, 53 aa, Glycine max
  Clone ID: PAT_MRT3847_48877C.1.pep
PPHPTPPPGHPSPSQGPLSVTHKVFQGAPPLQMGEPPNPGGPTLKFHKFHKNF

SEQ ID NO: 229071 - protein, 61 aa, Glycine max
  unsure (1)..(61): unsure at all Xaa locations
  Clone ID: PAT_MRT3847_48878C.1.pep
SXRRSRRVCSPNGLVKKKNRXKTASGEASFHXLCVRQPLEIRAYVEXTXQTGRALXECXXS

SEQ ID NO: 229072 - protein, 117 aa, Glycine max
  Clone ID: PAT_MRT3847_48879C.1.pep
SLERVCVCYCVSPWCIQHKMEDQNGSGKLNHWLLKVKPYLAILISSLMSGWMYLITIAAGANVGNPSLLVSGDGVISHAIEHTGADCYIRECSCRTCAAIVKLQTEEGALNARNTSN

SEQ ID NO: 229073 - protein, 69 aa, Glycine max
  Clone ID: PAT_MRT3847_4887C.1.pep
MEKKVPFFFSILLFIALLFHGGKVLALNCQDGSEEWGYVQVRPKAHMFWWLYKSPYRVEDPSKPWPIVL

SEQ ID NO: 229074 - protein, 68 aa, Glycine max
  Clone ID: PAT_MRT3847_48880C.1.pep
RFNQTLYLYPHPGKDFFLPCSSGKYLFEQASPPTIHWGPSQNPYVNPGFFWKRIGISLFFGSCSGNAF

SEQ ID NO: 229075 - protein, 87 aa, Glycine max
  Clone ID: PAT_MRT3847_48881C.1.pep
NTLMNFLFSNTATTRCTMLYWEGDGHAKEWAFSGETYDTAICALKESCKKIPFTKIRVAKDTPPTHPPMGTCISRQKFFNLTNRNLP

SEQ ID NO: 229076 - protein, 81 aa, Glycine max
  unsure (1)..(81): unsure at all Xaa locations
  Clone ID: PAT_MRT3847_48882C.1.pep
QINSNSILVALXDXDYYELPELVNQVVLLQXLDAAVGNHHITIVAPRNQALATDXXPEFKRFLLXLAYLRIVQTLLMSHLL

SEQ ID NO: 229077 - protein, 475 aa, Glycine max
  Clone ID: PAT_MRT3847_48883C.1.pep
MVLKTDSVKMFFFPFVGGGHQIPMIDAARVFASHGAKSTILATPSNALHFQNSITRDQQTGLPVAIHTFSADIPDTDMSAVGPFIDSSALLEPLRQLLLRHPPDCIVVDMFHRWAPDIVDELGIARIVFTGHGCFPRCVTENIINHVTLENLSSDLEPFVVPNLPHHIEMTRSQVPIFLRSPSPFPDRMRQLEEKSFGIVTNSFYDLEPDYADYLKKGTKAWIIGPVSLCNRTAEDKTERGKTPTIDEQKCLNWLNSKKPNSVLYVSFGSLARLPSEQLKEIAYGLEASEQSFIWVVRNIHNNPSENKENGSGNFLPEGFEQRMKEKDKGLVLRGWAPQLLILEHVAIKGFMTHCGWNSTLESVCAGVPMITWPLSAEQFSNEKLITDVLKIGVQVGSREWWSWNSEWKDLVGREKVESAVRKLMVESEEAEEMTTRAKEIADKARRAVEKGGTSYADAEALIQELIARRLARQD

SEQ ID NO: 229078 - protein, 63 aa, Glycine max
  Clone ID: PAT_MRT3847_48884C.1.pep
MTSIGVPMFWDHLDSFFFEVLLIYLQFSNHGSLEHHGFARNKVWNLDPNPPAFPTNSTNKVFK

SEQ ID NO: 229079 - protein, 69 aa, Glycine max
  Clone ID: PAT_MRT3847_48885C.1.pep
TSLGLIQNWGRTPGLFLKGWGPAPPLKDPAPNQLTIIWYCQKGLKKKTFTRPGFLTQGPPFSLIPEPLY

SEQ ID NO: 229080 - protein, 128 aa, Glycine max
  Clone ID: PAT_MRT3847_48886C.1.pep
ESNILWRCLITGFLRSVFFYYTPPTIPSIFVFFFVALSQKVFFFFPPKTGVGVYTTPPHFKGPPGFFFSFRGKKLFGGAPSGPPPLCQGPFLPPRFFLALKTTISIKALTPGKKNPLPHYFNKKKLKT

SEQ ID NO: 229081 - protein, 98 aa, Glycine max
  Clone ID: PAT_MRT3847_48887C.1.pep
YGCEKTTEGTHHYNNPNFPPHKWKNDKTHPLHSLLARKRYELASGYNNNNVKKLNNHSNQCSMAPDTVDEFLIHFLAFRTWFIESTLVNEVGYFFARF

SEQ ID NO: 229082 - protein, 77 aa, Glycine max
  Clone ID: PAT_MRT3847_48888C.1.pep
TEFRIEGSHFLGALKQKFLALWGFQQQRWPNDQTPFLTSNFNRRQVIICGLRSSYKARRRTRILSKESIEVIHALKL

SEQ ID NO: 229083 - protein, 54 aa, Glycine max
  unsure (1)..(54): unsure at all Xaa locations
  Clone ID: PAT_MRT3847_48889C.1.pep
NLIQCALRTYCKQNRQTRCVGNXLMGRLIILYGTRCTVTSILLDIGGGAQAKNA

SEQ ID NO: 229084 - protein, 218 aa, Glycine max
  Clone ID: PAT_MRT3847_4888C.1.pep
PENVLQNYPVILKWPRKTGISEAYIFGSDDSWIHAPLEGFSLTLSPFTTMWNTLFSWTTSSSLAYIYGRDESFHEEYLSVNGREYPCKVVLADGRSSEIKQTLASCLARALPALVAVLRLPIPVSIMEQGMACLLETMSFVDALPAFRTKQWQVVALLFIDALSVCRLPALISYMTDRRASFHRVLSGSQIRMEEYEVLKDLVVPLGRAPHISSQSGA

SEQ ID NO: 229085 - protein, 400 aa, Glycine max
  unsure (1)..(400): unsure at all Xaa locations
  Clone ID: PAT_MRT3847_48890C.1.pep
THWQTPPNSRRPTRPRTRGGRTIDVGNLKIHVIKAIAEGGFSCVYLARDAVHMSKQYALKHMICNDEESLGLVKKEISVMKVLAGHPNVVTLHAHAIFDMGRTKEAFLVMEFCERSLVNVLESRGAGYFDEKQVLLIFRDVCNAVLAMHCQSPPIAHRDLKAENLLLGSDGLWKLCDFGSTXTNHKPRVRPEEMGIEEDNIRKYTTPAYRAPEMWDLFLREVINEKVDIWALGCLLFRICYFKSAFDGESKLQVLNGNYRIPELPKYNSPVTDLIRDMLQARPDNRPDITQVWFRVNEQLPINLQKSLPDRPPELPSSNDHEGVSMPSNRSPPMPRRNPPPPPSSGEPKTSPQPSPASRGGGSGGALGAFWSTQHAKESLVAEDKSKPILDEEPSSPIFP

SEQ ID NO: 229086 - protein, 246 aa, Glycine max
  Clone ID: PAT_MRT3847_48891C.1.pep
MILRVSQSTALWGFQQQRWPNDQTPFLTSNFNRRQVIICGLRSSYKARRRTRILSKESIEVIHALKLARSPDHVLNAKLSRLLKPDALNLLDELQRQNQLHLSLKVFHFIREELGHDTLLQLYADMILLLGRNKRIDMAEELFSEALEKGLKPDTRLCSEMIGAYLQLGMADKAMQIYASMKEDWACSSSPDKFTFTILIRYLQKNGQHELAETLKQDCLHYVDSPDKFLQQLQQKQARTRHVDFV

SEQ ID NO: 229087 - protein, 480 aa, Glycine max
  unsure (1)..(480): unsure at all Xaa locations
  Clone ID: PAT_MRT3847_48892C.1.pep
MWRFKPFSHKEQTGLEGRTIDVGNLKIHVIKAIAEGGFSCVYLARDAVHMSKQYALKHMICNDEESLGLVKKEISVMKVLAGHPNVVTLHAHAIFDMGRTKEAFLVMEFCERSLVNVLESRGAGYFDEKQVLLIFRDVCNAVLAMHCQSPPIAHRDLKAENLLLGSDGLWKLCDFGSTSTNHKRFEKPEEMGIEEDNIRKYTTPAYRAPEMWDLFLREVINEKVDIWALGCLLFRICYFKSAFDGESKLQVLNGNYRIPELPKYNSPVTDLIRDMLQARPDNRPDITQASALLDWPDHSSPSVXVWFRVNEQLPINLQKSLPDRPPESPSSNNHEGVSMPSNRSPPMPRRNPPPPPSSGEPKTSPQPPPASRGGGSGGALGAFWSTQHAKESLVAEDKSKPIFDEEPSSHHISPKHDRILPENEQLPKNVGPNKVVNTQTHTVKSRTHGKLHKPDTVPLKDFDMNLLMDEDRVRERATDW

SEQ ID NO: 229088 - protein, 75 aa, Glycine max
  unsure (1)..(75): unsure at all Xaa locations
  Clone ID: PAT_MRT3847_48893C.1.pep
KNHDAEFFFLSSFNKNIFILKLYPVLGPNNPVIPYHVPCCLPHLPPKIYSLQNKQLFSITPPSIKHDPNSXIILK

SEQ ID NO: 229089 - protein, 108 aa, Glycine max
  Clone ID: PAT_MRT3847_48894C.1.pep
MRRIYDELKEIVKIQKFRRLVSYTGFYCFATLISYFYVNNTTRAGFSRADQFYASYPAGTELLTDTTKLYKAALGNCFEAEEWGPFEFCVMAKHFERQGKSPYAYHAV

SEQ ID NO: 229090 - protein, 52 aa, Glycine max
  Clone ID: PAT_MRT3847_48895C.1.pep
RASVRVPCASIHSGSSFRILQRLYLSWMDPSASELHHRQIPCPLPATMIRLT

SEQ ID NO: 229091 - protein, 93 aa, Glycine max
  Clone ID: PAT_MRT3847_48896C.1.pep
AITSRNPLKFPWKKKGPITRLETKDFLNPKEGPCRNPWGQNPNWPTLGEPKFPYFGFPRLKGTQKPGVSQMPNLTQRAPLREGPTPLKKKGAL

SEQ ID NO: 229092 - protein, 114 aa, Glycine max
  Clone ID: PAT_MRT3847_48897C.1.pep
VTPLPSFFCHSASFISSTITPASFFSSVTSASFFSAAPSPSFFSSFTRAALISSVTSISVFSTVPAASLLRISKYLIRLLFSNYVFFILFSKGHILHSVTAGFAPAPFCRLLAE

SEQ ID NO: 229093 - protein, 40 aa, Glycine max
  Clone ID: PAT_MRT3847_48898C.1.pep
RGFLVRSLGSLFLSPLQSTARPTVMTGERLNLNAYPLADS

SEQ ID NO: 229094 - protein, 162 aa, Glycine max
  Clone ID: PAT_MRT3847_48899C.1.pep
ERTNLKFSALIGVDPVDGMDKGKQTPPPVLTYVPNSFDFDMAVMVIGSGLGEVKRNPLFPPRVRKGVNHENFFNECKKPAWYFVAKDYGHSDMLDDDTKGIRGKATNCLCKNGESRKPMRRFVGGVIVAFLKAYLHDDNEDLLTIRDRHVSLPVEIKFDSFL

SEQ ID NO: 229095 - protein, 109 aa, Glycine max
  unsure (1)..(109): unsure at all Xaa locations
  Clone ID: PAT_MRT3847_4889C.1.pep
FNFIYYCRXKKGTKKIKKRGKTKTKTIKQDVPRIYNPLPPAINISTITWGGRPLTGSCTPTIIFLPGAVGDPLFPIGGRYQPWANSGPSLFPGKNCFPSKFPQNIQPEK

SEQ ID NO: 229096 - protein, 174 aa, Glycine max
  unsure (1)..(174): unsure at all Xaa locations
  Clone ID: PAT_MRT3847_488C.1.pep
VLWVAPEDKATLWSQLTYASCNNVETQEASLVNLVNVVQELTSHSPKEARQLTKKALSLIESMQKADVPTIAHIEEFHSMQQMMNAPDSNDHIDLLMSIDLVGSQGARKAFPNKIVLDDKLVLANTHQFFDGHHPLDSRLPIVANWLYPVTXLPSYTAVVNVTCGRRRGASPTT

SEQ ID NO: 229097 - protein, 64 aa, Glycine max
  Clone ID: PAT_MRT3847_48900C.1.pep
YEHHNIGLSICNIVSHEVVCLGISTVFQTHVCDFKFWPNFCINHQIICRTYKLLYQSSNNMQNL

SEQ ID NO: 229098 - protein, 77 aa, Glycine max
  Clone ID: PAT_MRT3847_48901C.1.pep
FLCLILAELPERSYGADCRIYLPENPASRFKNVYETLFDEFVLAHVIGWWGKAILIRNQPLLWVLSIGFELVEYTFR

SEQ ID NO: 229099 - protein, 460 aa, Glycine max
  unsure (1)..(460): unsure at all Xaa locations
  Clone ID: PAT_MRT3847_48902C.1.pep
MHSCIPQHLHLASSLNPKACNSPLRNLRIRAVSTTHNHIPVAPVFLPEGPWNQIPGGVTAEXGFKAMVMFQXLRVKGKRTNIALMTCVVDAVSAGVFITNVGAPQAIKYCMGXLLALKHCSCLLXDVAQRNVFNGEELGEVLIXIVGNLNNLMSPSSIHGXFESTCELVQNNKNXALLYSLHTLVKSLFXLLQGADSVALAITTTDLVSKSVAIESLFGGTKVSFGAMAIVSGMIQSNMAPMLGGIAADARLTGVSCHQVLLMVELGDILLMYGGEPQFFDRTGLPLAXGEIGSGARCSPGMDTFSXFQECLVEVMHGQAKSIAWDGEGATCLVEVCVSGENNDAEAAKVARSVASSSLVKAAIYGRDPNWGRIAAAAGYSGVSFHQDLLRVELGDILLMDGGEPQLFDRHAASSYLRKAGETHDTVKIQISVGNGPGRGQAWGCDLSYDYVKINAEYTT

SEQ ID NO: 229100 - protein, 52 aa, Glycine max
  Clone ID: PAT_MRT3847_48903C.1.pep
VFNNPIKRGTFCGYELNDGFPSINQLVMNIHAMQKLTNKVSSLHIKMEGCLL

SEQ ID NO: 229101 - protein, 121 aa, Glycine max
  Clone ID: PAT_MRT3847_48904C.1.pep
PSPLLIKIKPRKPENTTFEKRKKNAFVHSSAPSLGFFPKPQGHSLSFSLVLLIINACNSPLRNLRIRAVSTTHNHIPAAPVFLPEGPWNQIPGGVTAAEGFKAAGMYGGLRAKGEKPDLAL

SEQ ID NO: 229102 - protein, 74 aa, Glycine max
  Clone ID: PAT_MRT3847_48905C.1.pep
IRLRVPIGYFLGFKQHLGVKGLWGGTMCGSVLQILILLLIIRKTNWTKEVEQTAHRMRIWNVNNFRSDLAENVT

SEQ ID NO: 229103 - protein, 76 aa, Glycine max
  unsure (1)..(76): unsure at all Xaa locations
  Clone ID: PAT_MRT3847_48906C.1.pep
RAGNVPGVGESFLNLTEGPLYGLLDVYNNSNYFFVLALLFLRILPIAKKKYSPYLLIVFLPIYIXPGFMSFQSHKE

SEQ ID NO: 229104 - protein, 61 aa, Glycine max
  Clone ID: PAT_MRT3847_48907C.1.pep
VCTSLLLPQNDINMLRLRPIMVSLAVHYLWEHGHSREQGTYSFPPGSRIAQGNVIPQVKCE

SEQ ID NO: 229105 - protein, 80 aa, Glycine max
  unsure (1)..(80): unsure at all Xaa locations
  Clone ID: PAT_MRT3847_48908C.1.pep
PREFGPWSVSVNFVVRILCNDHLLVEDVLTHSTEYVLCYLNTHNKKRTTKICQIITPFEAYTCKCLVQRQKSXMENNRLP

SEQ ID NO: 229106 - protein, 108 aa, Glycine max
  Clone ID: PAT_MRT3847_48909C.1.pep
FPTWQVSLSVCVIMNLSKFHNFNATTTFGPIQPIVNQRLSYSTSHHTPAKSSPPPPYVYTSMSSVSSQISLISRRQNFRSQFIDSPSSFCLCACVCLSSPPAVCVCVS

SEQ ID NO: 229107 - protein, 82 aa, Glycine max
  unsure (1)..(82): unsure at all Xaa locations
  Clone ID: PAT_MRT3847_4890C.1.pep
MLDQVQHSTIMVNANGQVHLRXGVSGIRTYEGGYCHPTLCQGYSFGSYSNAALQYXCMTSCQATMDXSAAARTASPVYDAAP

SEQ ID NO: 229108 - protein, 101 aa, Glycine max
  Clone ID: PAT_MRT3847_48910C.1.pep
LAVLSRFVLFRISLLYRRSPSLSACGAPFFRLVCSSLAAGSCCLEAAVFHIWPLCLFCVLLLVLFWPQGSPRSRGAPSLLLQVLQLEEGLVVARSRGSSRV

SEQ ID NO: 229109 - protein, 93 aa, Glycine max
  Clone ID: PAT_MRT3847_48911C.1.pep
PRKDLEQFKDLEETHLTQLTKKHFPTSKSEKRSKLWMGRTSLRKVNVFSTTVIWRDQWKQTLRRGKKLKWEENQEIVRRESQCKEWKFIFSRK

SEQ ID NO: 229110 - protein, 211 aa, Glycine max
  unsure (1)..(211): unsure at all Xaa locations
  Clone ID: PAT_MRT3847_48912C.1.pep
TRPILRFLKDFCRHGVFPRGTNSSFIALIVKCDNTXGLNNLKPISLVGCLYKILAKLLANRMIMVLGKVIDNCQSAFLGERKLLYRVRVANAVMEXCKEKEKILLFKVDFEKVYDSISREFLLYMLHGLGFXTDGLSRSNXCLEFTWTSVLVNGSPSQEFKCHKGLRQGYPLAPFLFLVVTEGLSAFMRNSISKGLFDGYKVEYKDCVSLL

SEQ ID NO: 229111 - protein, 226 aa, Glycine max
  Clone ID: PAT_MRT3847_48913C.1.pep
MAQDKKERKRSMKKKQNQSLTTLPQELIREILLRLPVKSLLRFKCVCKSFLSLISDPQFVISHYALAASPTHRLILRSHDFYAQSIATESVFKTCSRDVVYFPLPLPSIPCLRLDDFGIRPKILGSCRGLVLLYYDDSANLILWNPSLGRHKRLPNYRDDITSFPYGFGYDESKDEYLLILIGLPKFGPETGADIYSFKTESWKTQTMVYDPLDRYKAGVTPLWND

SEQ ID NO: 229112 - protein, 48 aa, Glycine max
  Clone ID: PAT_MRT3847_48914C.1.pep
INGIEAPENMPKCINNCHNLEGFWKNWHASFNKWLGRYIYISLGGSKK

SEQ ID NO: 229113 - protein, 179 aa, Glycine max
  unsure (1)..(179): unsure at all Xaa locations
  Clone ID: PAT_MRT3847_48915C.1.pep
FFFFFFFFFFFFFFFFFFFFFFFFFFFKKIFINYKKKKKNVKILEEDKKEPPKGPMKKKRFXSKKWGKQRADPRVKPKNRDRKKKKKIFPKNEGKKRLAQKRAKQYPGEKRKREKNXKKKRAENKKGKRGGTKRGKKQKKMGKTKKNKFPKGKTRGHGRKKKQTTPRKRGFENYPPRGV

SEQ ID NO: 229114 - protein, 121 aa, Glycine max
  unsure (1)..(121): unsure at all Xaa locations
  Clone ID: PAT_MRT3847_48916C.1.pep
GPITKSDKLSPQLCHKGSARSWEYKDFSSRDGQTKLKTNVFFASFDQMSERASGESACTVLVALIAHWLHTNHGMPXTRAQFERLITQGSSEWRKLCNGDYYSKLFPDKHFDLETIIEANL

SEQ ID NO: 229115 - protein, 52 aa, Glycine max
  Clone ID: PAT_MRT3847_48917C.1.pep
TSHFFVKIVSVIHFSPSLYETFPLVPDSIKCCKISFISIPNASEKGQKRNKF

SEQ ID NO: 229116 - protein, 61 aa, Glycine max
  unsure (1)..(61): unsure at all Xaa locations
  Clone ID: PAT_MRT3847_48918C.1.pep
VGIADTIYPQRPGQIECDVSKHLSYVPDLSDFYSQYXFGMVCTCHIYLLNHXSXKLXNAGG

SEQ ID NO: 229117 - protein, 196 aa, Glycine max
  Clone ID: PAT_MRT3847_48919C.1.pep
RPRVREVTSKDQVLVSSTLKNSISADETQEQQEILENSTSDSSKCSSANDLKQLNSCPTDFRSKPGKSDSIGLAAGKPVVRDLSDKAVTMSSVPLKMLAFPEYEYTWQGVFEVHRNGKPPDLYTGFQAHLSSCASPKVLGVVNKFLPKVSLSEVSRLSMWPLQFLHGGVSDDNIALYFFARDVEGYERHYKGLLDH

SEQ ID NO: 229118 - protein, 152 aa, Glycine max
  Clone ID: PAT_MRT3847_4891C.1.pep
YNNENKTPRDILSETHKDLVRSGGEWLKKTAGSCSLVAALIATVAFSTSTTIPGNFKDDTGAPTLEDRPEFKAFAIASLIARCCSVTSLVLFLSILTSRYQEHDFDSSLPRKLILGLTSLFMSMDATVVCFCAGHFFVLGQLKSVAFPVYMP

SEQ ID NO: 229119 - protein, 809 aa, Glycine max
  unsure (1)..(809): unsure at all Xaa locations
  Clone ID: PAT_MRT3847_48920C.1.pep
MKLNRMCCLDHERQQIRLRKAEIVLVIVEGQLFRLQKNQFCQKCKEFGHALECCTAVSTQESGAEISVTASSSSKEEMHKDNILKVAIQAALLRRPEIYKKKEVSYQTDEVSTSGTELNCEVTSKDQVLVSSTLKNSISADETQEQQEILENSTSDSSKCSSAHASEQLNSCPTDFRSQPGKSDSIGLATGKPVVRDLSNKALTMSSVPLKMLAFPEYEYTWQGVFEVHRNGKPPDIYTGLQAHLSSCASPKVLGVVNKFLPKVSLSEISRLSMWPSQFHHGGVSDDNIALYFFAXDVESYERHYKGLLDHMIRNDLALKGDFDGVELLIFPSNQLPENSQRWNMHFLGGEKTSYKTWGIFRGRRINHLDSTKKICIPSLNVMPNEKDFPTAVMTLSETRCSPKRMDEEFIDQDHNMVSRNFDGKETIFDQTHLGLLVNLERQDARINTKSTSGIPTIRTQLCQQMNSTGSSLRDSVPEHRQYIESKPPEAMETSVSSRIVETKTNHDISVKQENSLSSGIPSVGYQEIDTASNINRDKILDRTNNDENQQRPKRKQMEDDLDINVEATFLGDLTVKAVNCQLPNDKKVKHIDLSDTAVEASAVSCQKMPWNEVNGKFENGESYSKKLQTGFGGIHGCYDSGARESFNGSFASLVNDLGSCSSGENKRCKKPCDEKIIHEDLGAMERTFFPVDTRKKKDSGMVLNEPRAYVDQFQVGIPNLELGLGGETKPSHKGMLPFFVGAVDKKNSQEKTPDILTDEREDENVAASLSLSLSFPSSNKEHVKPVTKAEDGHNVNSPYLLFGRFTDK

SEQ ID NO: 229120 - protein, 301 aa, Glycine max
  unsure (1)..(301): unsure at all Xaa locations
  Clone ID: PAT_MRT3847_48921C.1.pep
LEAGVGCGCSPGLGHASVVQLLVFNASGILPSVMCYCLMLALYAKNDRLNDAYNLIDEMITMRVSDIHQGIGQMIKGDFDDESNWQIVEYVFDKLNSEGCGLGMRFYNALLEALWWMFQRERAARVLNEASKRGLFPELFRKSKLVWSVDVHRMSEGGALTALSVWLNNMHEMSRTGNDLPELATVVLLXRGHMEKTTDAQDFPIAKAAISFLQDNVPSSFAFPGWNKGRIVCQQSQLRRILSGTESSSSRKKMDKLISLSNTPLTTAGAITSKSDAQSGKANGVDSRTDSTRTELLTSAI

SEQ ID NO: 229121 - protein, 210 aa, Glycine max
  Clone ID: PAT_MRT3847_48922C.1.pep
MYYLFSFQFKLVYSFCLRRAVAEGWSETTYLPSSGNLRISRGNKGTTFVLQKQTEPRQRLLTAISSGKGIKEAIDELISLKQNTGQEDPELEEGEWQMMWNSQTVTDSWIENAVNGLMGKQIIRKNGRIKFLVDILLGLKFSMSGNFVKTGSGVYGVTMDDAAIIGGPFGYPLELKNNFILELLYSDEKLRVSRGNNSILFVHVRTDALR

SEQ ID NO: 229122 - protein, 405 aa, Glycine max
  Clone ID: PAT_MRT3847_48923C.1.pep
IRLEATQNKIRRVFAFTDSELLHDQITFGKKLEMPLLTALRERILELANNFEDFVLNLIPSTDLEQPLHLAKVAIGLVTFPVNGEILLKNCSICCDDKPVPIMITLKCLHTFCSHCLRAYADGKVQSCQFPIRCPQPRCKYCMSVTECRSFLPFISFGSLEKALSEENIDHSDRIYCPFPNCSVLLDPHECSSARASSSSQSDNSCIECPVCRRFICVDCKVPWHSSMSCLEYQNLPEKERDVSDITLHRLAQNKRWKRCQQCRRMIELTQGCYHMTCWCGYEFCYSCGAEYREGQQTCQCAYWDEDNSEDSVAHSLQESEQWAWETFNSLSMIVDAYSDQERSQLALIQRFLAGGFSLSDHNPYQSPPRCTDSYVDPMKDLHQLPWLERFVSVISDNYYDDYIQ

SEQ ID NO: 229123 - protein, 191 aa, Glycine max
  Clone ID: PAT_MRT3847_48924C.1.pep
ARDDIQGVITLRMYTPESEIKRNFSSRWNKLSQKKDPEEGPFALNTFGLYAYDTVWLLASALDAFFKSGGTLSFSNDSSLNMLKGDTLKLDTMGVFVDGVMLLEKILKVNITGLTGQMMFSPDGNLVHPSYEVINVIGTGIRRIGYWSQTFGLHTGETSNHSNFSEGLFGVIWPCQTTQTPRGWFLPEWKT

SEQ ID NO: 229124 - protein, 93 aa, Glycine max
  Clone ID: PAT_MRT3847_48925C.1.pep
PSHLCALAVNFADHCSWGFCPKGICRVCFNSLPIVFFLLLLKQGALLFFCPCLLLCLIFPFRPGHPWFFGFSLFFLPLSWSWAPPFFKINVSH

SEQ ID NO: 229125 - protein, 70 aa, Glycine max
  Clone ID: PAT_MRT3847_48926C.1.pep
SVSIFHWQVGPRLKMDTKFFPPYLNNTSNHTFNESELLRIKSKFTGWLIPDNDTSTPHELIGFNLFGSYQ

SEQ ID NO: 229126 - protein, 86 aa, Glycine max
  Clone ID: PAT_MRT3847_48927C.1.pep
SLAEEIFISEFRKATYGENTSDPHASNIGVAKIRTNAMPNHFMFLFVFSISHICLNFEFLSGKCFKTSSYFYGDLSDTYDEIVFDR

SEQ ID NO: 229127 - protein, 115 aa, Glycine max
  unsure (1)..(115): unsure at all Xaa locations
  Clone ID: PAT_MRT3847_48928C.1.pep
MGRRPARWYRQIKNKPYPRARSCRGVPESTIRIYDVGMKKKGVDELPLCVHLVRCEKENDIREALEADHIACNKYMAKLAGKDAFHLXVWERSFHVLRNNKMLPRAGADRLQTGM

SEQ ID NO: 229128 - protein, 338 aa, Glycine max
  Clone ID: PAT_MRT3847_48929C.1.pep
GRVGEIFRPKILDGSAENTLKGKIRITTRCLWLDKGKLMDALYKAARAALSSCPVKSPLAHIERIVSEVLRKMVRKYSGKRPEVIAIAIEKPAAILADEINTKLSGKSHVGLGMSTLSKAVDGHGKGNQSTALQVKDDSIDNASGAEGDLSEEDNTASGPEGYLSEEDNTASGAEGDLSESEDSDEFWKPFITSLPVEKSINADNGYVSPKEQKSNLKKDESEDIDEAKSEETSNSEAKSSKSVKRNKWKTEEVKKLIGMREELSERFQVVKGRMALWEEISQKLLADGICRSPGQCKSLWTSLVVKYEGIKNEDRKKSWPYIEDMERIMSDKEAPAK

SEQ ID NO: 229129 - protein, 58 aa, Glycine max
  Clone ID: PAT_MRT3847_4892C.1.pep
GSASLPIVVTVVSLLCLLVLLERADAATYTVGGPGGWTFNTNAWPKGKRFRAGDILSK

SEQ ID NO: 229130 - protein, 87 aa, Glycine max
  Clone ID: PAT_MRT3847_48930C.1.pep
IPINTHNFIRVGLQNIFYDFYLSFRCTRILINVSNVEISRLVYVRINKFSCLRLNRVIIAFFAASSNSSLLRIHSRTCSSHCFFSTE

SEQ ID NO: 229131 - protein, 120 aa, Glycine max
  Clone ID: PAT_MRT3847_48931C.1.pep
MGEFKETGWEWDFKWRRPLFDNEIDQAVAFIQEVEGIRIQNVIDDQWVWEADISGRYSVKSAYSVLRKDILQEAPAEAFKELWKLKVPSKVTTFAWRLLNDRLATKDNLRRKHVELNDHL

SEQ ID NO: 229132 - protein, 58 aa, Glycine max
  Clone ID: PAT_MRT3847_48932C.1.pep
VCQKSLIFCMHHSCDTHIYYNIQPYAIVECHVKCQQIANMVLLHAMPSFRKSQNMNLQ

SEQ ID NO: 229133 - protein, 215 aa, Glycine max
  unsure (1)..(215): unsure at all Xaa locations
  Clone ID: PAT_MRT3847_48933C.1.pep
MDPCPSSNTNTVNGFYTFVSRGMEELERAFLANNNFISVQFLQKVVSLLRSLHTQLTLLVHKLHLPLGDKWLDEYMDETSKLWETSHLLKSAISNFEPFYSQGFNLLSSLDSSHPQVVRAISGCRREALGLEEQNRALMETRVHTLCLRLDERVSVESKLNGFNGFRGVLYAMRXVSSMLLMILLHGLVYCWPGTSELVSGGYEGGRMFLGVAVM

SEQ ID NO: 229134 - protein, 66 aa, Glycine max
  Clone ID: PAT_MRT3847_48934C.1.pep
MYWYKRINPTTSGPEVSALEKKELGRVGQIRGPVLHVALPAGKRPNIYNALIAKVRDTVGQHIQET

SEQ ID NO: 229135 - protein, 114 aa, Glycine max
  Clone ID: PAT_MRT3847_48935C.1.pep
GKSGGGRVKKKTSYKCGVKFLPVPLYERERLSPTHPEYSYWLIQKISACSSTTVKASSQFTGKKLVISSHCLFPVPAQSISWNRRKLTLTILAIKHKSNQLQNLILMRDRLGRR

SEQ ID NO: 229136 - protein, 82 aa, Glycine max
  unsure (1)..(82): unsure at all Xaa locations
  Clone ID: PAT_MRT3847_48936C.1.pep
SKXXVXLXATRFXDXXXTXXAXWGQXWXWTEXLGLSXXQWGTSXAVQMVLXXKMQXXLQXRLIXXVXXQXQHQXLHLQQQQH

SEQ ID NO: 229137 - protein, 54 aa, Glycine max
  Clone ID: PAT_MRT3847_48937C.1.pep
GIQSYTRLRLVMLINNLEKSGESGGFLGVARDREVIGKGESLAHGPTAGNSLIY

SEQ ID NO: 229138 - protein, 96 aa, Glycine max
  unsure (1)..(96): unsure at all Xaa locations
  Clone ID: PAT_MRT3847_48938C.1.pep
XERAHQKXXQGXXXQKKKXGGXQGEXXPERTHXXXKKPKPXXXHXHTPPKXXXQKKKXXKSRQRRRXXXAPXDXXRXKXKQEPXQREKXRDXEHTP

SEQ ID NO: 229139 - protein, 50 aa, Glycine max
  Clone ID: PAT_MRT3847_48939C.1.pep
MEGGVPEADMAAFREWLALSWKNPYGLRLAFFAWIGGPLFGYDTGLISRG

SEQ ID NO: 229140 - protein, 130 aa, Glycine max
  Clone ID: PAT_MRT3847_4893C.1.pep
MAALIRSPAVILAILTISACIACTASYGGLVGGRSKIPDVKANKKVQDLGRFSVEEHNRMLRQAQKEEEQVTFVEVVEAQQQVVSGIKYYMKISATQGGDGGDSRIFESVVVVKPWLRSKQLLNFAPSTQ

SEQ ID NO: 229141 - protein, 232 aa, Glycine max
  unsure (1)..(232): unsure at all Xaa locations
  Clone ID: PAT_MRT3847_48940C.1.pep
MASLTQHQPKGVNGGSSRIAAVNVTPSNNLSTPSHHDASSNHQKPGWKKFLSYVGPGFLVSLAYLDPGNMETDLQAGADHKYELLWVILIGLVFALIIQSLAANLGVTTGKHLSELCKAEYPLLVKYCLWLLAELAVIAADIPEVIGTVFALNILFHIPVWAGVLITGCSTLLFLGLHRFGARKLELMIXILVFAMAGCLFDEMSYVXPAASGVLKGMFEPQLNGQRATGDA

SEQ ID NO: 229142 - protein, 149 aa, Glycine max
  unsure (1)..(149): unsure at all Xaa locations
  Clone ID: PAT_MRT3847_48941C.1.pep
MASNPETYKPYGKQPVKGQWTTGLYDCXDDPSHCCFTWFCPCITFGQIAEIVDGGTISKNAACCIYVDSHGTKWLYGATYRSKLRRLFSLSQEPYSDPFLHGCCCICALTQEYKELKNRGIDPSIGWEGNVEKWKREGVDPPIVPTMSR

SEQ ID NO: 229143 - protein, 78 aa, Glycine max
  Clone ID: PAT_MRT3847_48942C.1.pep
SSRIGSRSCMHFMHLLLCMHTHSLFPVSLFLSHGFLSLQTHTPRFLSLKPQVKFPLPYADLSDFSLFFFVALLLFFFS

SEQ ID NO: 229144 - protein, 91 aa, Glycine max
  unsure (1)..(91): unsure at all Xaa locations
  Clone ID: PAT_MRT3847_48943C.1.pep
TSNFSIVLSVSLAFFLVLLTKAHSTDTVSXTCNXFNPXQPXXXYXXXDASISSSGVLQLTKVGSNGVPXSGSLGRGLYASPNPDGQRRQGQ

SEQ ID NO: 229145 - protein, 44 aa, Glycine max
  Clone ID: PAT_MRT3847_48944C.1.pep
MCSFTFFGVLGNYSVSFSYLTFDTALPRHPECLTLGALKALKKA

SEQ ID NO: 229146 - protein, 111 aa, Glycine max
  unsure (1)..(111): unsure at all Xaa locations
  Clone ID: PAT_MRT3847_48945C.1.pep
TNGIRLCFVSSQFQGEHLTKADIRDSRXILQTTSEDGTLTPLQLTTDLKPTIXCRNLNVVFVSLMEAEHIMQCRGRVFCLKNEPGVYRVWMPNVCTFQGTNLNVNPISIGH

SEQ ID NO: 229147 - protein, 927 aa, Glycine max
  unsure (1)..(927): unsure at all Xaa locations
  Clone ID: PAT_MRT3847_48946C.1.pep
PISQCAALIMDKKSRRKEESNVEMRRNPSMLRKLQENKLREALEEASEDGSLSKSQXIDQPDSAANQDDGIGRSRSLTRLHAQREFLRATALAADRIFESEEEIPSPQEEFAKFLTMYPKYQSSETDVWWXSDEYSHLSLKVCLDYXGFGLFSFDQSIHYGESSTVILCVVNAHLCTHALYGCAERGTVEYDIKARIMDYLNIPENEYGLVFTVSRGSAFKLLADSYPFHTNKKLLTXFDHESQSIAWMAQSAREKGAKVHSAWFKWPTLKLCSTDLRKQISNKKKRKKDSATGLFVFPVQSRVTGAKYSYQWMALAQQNNWHVLLDAGSLGPKDMDSLGLSLFRPDFIVTSFYRVFGYDPTGFGCLLIKKSVMQSLQNQSGCTGSGMVKITPEFPMYLSDSVDGLDKFVGIEDDDEITGIGDKTSETRQGTQLPAFSGAFTSAQVRDVFETEMDQDSSERDGTSTIFEETESISVGEVIKSPVFSEDESSDNSFWIDLGQSPLGSDSAGQSNKHKTASPLLHFWFNGRRNQKQHSPKPTSKMYGSPMYDDREVNLGAHEDRRVLSFDAAVLMSQELDRVKEVPEEEHVEEVDHYSRNGNGSDHLHVDEIVEEPGTSEAVNNGSWLNSTSLARHQSLENGSTSEICPDVKESAIRRETEGEFRLLGRREGNRYGGDRFFGLEENEATSRGRRVSFNMEDNRKEYLSQTLEPGDISATSFDDEEITSDGEYGDGQDWGRREPEIICRHIDHVNMLXGLNKTTLRLRFLINWLVTSLLQLKLPASDGGEKASLVQIYGPKIKYERGAAVAFNVRDRSRGLINPEIVQKLAEKEGISLGLGFLSHIQILDNSRQHRGAPNLEDTTLCRPMENGWRDGKGSFVRLEVVTASLGFLTNFEDVYKLWAFVAKFLNPTFIREGGLPTVQEGSEA

SEQ ID NO: 229148 - protein, 81 aa, Glycine max
  Clone ID: PAT_MRT3847_48947C.1.pep
PFIFFATTTKRGPITPTLINRPIHSTHIFPSRCFGLPNRILIIPWKDALLMTWGFRGFPPWYMFLRASFTPLPLTIVKTIF

SEQ ID NO: 229149 - protein, 90 aa, Glycine max
  Clone ID: PAT_MRT3847_48948C.1.pep
TPLSPKTHLDSSLFTIPDEEVRPRCLRRRRRFSHRGISLLFFPSGSPLARLAIFRFKLGKNFSNFNTQLRISMYKNNKKRRICCFGNKSS

SEQ ID NO: 229150 - protein, 75 aa, Glycine max
  Clone ID: PAT_MRT3847_48949C.1.pep
IAVHPGKIQCSARFSVMNSQSPNPNILIRAIVNKPDQHNRFPDQQSYYKQSKPSTYINSPLIEALTYLTHSFSQL

SEQ ID NO: 229151 - protein, 236 aa, Glycine max
  Clone ID: PAT_MRT3847_4894C.1.pep
LHQSPSVLIPALRTVGNIVTGDDMQTQCIINHGALPCLLNLLTNNHKKSIKKEACWTISNITAGNKEQIQTVIEAGLVAPLVNLLQNAEFDIKKEAAWAISNATSGGTHEQIKYLVSQGCIKPLCDLLVCPDPRIVTVCLEGLENILKVGEAEKSMGNTGDVNLYAQMIDEAEGLEKIENLQSHDNNEIYEKAVKILETYWLEDDDETLPAGNGAQPGFNFGNNDLPVPSGGFNFS

SEQ ID NO: 229152 - protein, 48 aa, Glycine max
  Clone ID: PAT_MRT3847_48950C.1.pep
LILECNRCYNTYTLCVYNSPSPSLLSDRGYFQFAHNPLLHRYIKHVSI

SEQ ID NO: 229153 - protein, 128 aa, Glycine max
  unsure (1)..(128): unsure at all Xaa locations
  Clone ID: PAT_MRT3847_48951C.1.pep
LEGIVFDYVPEALKKWPPLGLKGYIYFSGSRLAQRLIFGKTPPGGLRKYLFGFFAPPMGDKKKPPRFVXIFGSPGVEKPPDIFFVPDVYQKAPPSTAAGLEVIIFIRPGNGPPPAHHGFKTIKSFLGI

SEQ ID NO: 229154 - protein, 62 aa, Glycine max
  Clone ID: PAT_MRT3847_48952C.1.pep
RGEGCPSAAATPRRGACPATTSVASGVTAATAAALRGGDVTYNDGEWRFYGSPQIRVDWLIS

SEQ ID NO: 229155 - protein, 29 aa, Glycine max
  Clone ID: PAT_MRT3847_48953C.1.pep
PHYFMCFRNKPNPTKTFLTSLASHRHSCS

SEQ ID NO: 229156 - protein, 102 aa, Glycine max
  unsure (1)..(102): unsure at all Xaa locations
  Clone ID: PAT_MRT3847_48954C.1.pep
MKMKVLDFVVATILGAWECHAXEMFPHRMNTGYGGRNSEVICATWGLAVEAQTSLALGTIPGKCVGATDEYVHGKKCQXESRTVNQQAYFXARDLEVNPKDT

SEQ ID NO: 229157 - protein, 42 aa, Glycine max
  Clone ID: PAT_MRT3847_48955C.1.pep
SQLFWRKIDLIVVHQLAFNDYCVMSCIHIHKKSFLCNKGSEI

SEQ ID NO: 229158 - protein, 217 aa, Glycine max
  Clone ID: PAT_MRT3847_48956C.1.pep
MGFNSVYRSLQEIFPQVDPRLLRAVAIEHPKDADLAAGIVIAEVIPFMSKKLPAAIPPQHNNYVASLNVEVESEEEGNRLRHRQLVDDVTVGPSSAPHSISVEVIKTADYSFVPDLNEALDKSTMSNDGTDKFLEMNDIKELDIYQNAEDNFSGETLNEIAQEMSNGFSQEDNENFERRFVDVDCENLISSGICQEMEPKHNNLYKEAACNNGGWHR

SEQ ID NO: 229159 - protein, 148 aa, Glycine max
  Clone ID: PAT_MRT3847_48957C.1.pep
MGFNSVYRSLQEIFPQVDPRLLRAVAIEHPKDADLAAGIVIAEVIPFMSKKLPAAIPPQHNNYVASLNVEVESEEEGNRLRHRQLVDDVTVGPSSAPHSISVEVIKTADYSFVPDLNEALDKSTMSNDTDKFLEMNDIELIYQNAENF

SEQ ID NO: 229160 - protein, 418 aa, Glycine max
  unsure (1)..(418): unsure at all Xaa locations
  Clone ID: PAT_MRT3847_48958C.1.pep
LVSEQGGESKIVSLLSSTKLQLEDISDTLYSRPSLVSEVSRLTITELKRLKLEDPVLQSKRGTNSRCSTFTVNTTIVEMLQGKIARHLTHPIPRWSDCDCKLCTSWTGSSSSPHNDNTNAKATLFLKSQCPTTDEAGEDVVFLHGVISSAXFWSETVFPHLAKSCSRCLAVELPGFGRSPKPNASLYTLREHLEMIERSVLEAHKVKSFHIVAHSLGCILALALAVKHPQSVKSLTLLAPPFYPVPKGETQATQYVMRKVAPRRVWPPMAFGASLACWYEHITRVICLLICKNHRLWEFLAKLITRNRVRTFLLEGFFCHTHNVAWHTLHNIICGTAGKIGSYLEAVRENRNCKVTIFHGKNDEVIPVECSYEVQKRIPRAQVRVIDNKDHITIVVGRQKAFARELEEIWGTTTTNHN

SEQ ID NO: 229161 - protein, 122 aa, Glycine max
  Clone ID: PAT_MRT3847_48959C.1.pep
FLIDRGRVVDMLQGKFSVICQDIKLLKKKFDANLPLSKSFTSSQTSCKLASSGSSHKTLASDAGSDHSESSGIRKTTRPPTSETLSPKTGQDEEKSKADHNALLDDGWDIFEKDAELNSGVC

SEQ ID NO: 229162 - protein, 194 aa, Glycine max
  Clone ID: PAT_MRT3847_4895C.1.pep
ARAGYIHVRARRGQATDSHSLAERVRREKISKRMTTLQRLVPGCDKVTGKALVLDEIINYVQSLQNQVEFLSMKLASVNPMFFDSAMDLDTLMVRPDQKLSNIASPSPLPCVAQFRPHQAIAFADTITTPTTTTNSFPTANNDGYLLDYSSSLFLQGHRPNIFEDNGGQFWDVEDQRQKFLHPYRFGNNSGSFN

SEQ ID NO: 229163 - protein, 71 aa, Glycine max
  Clone ID: PAT_MRT3847_48960C.1.pep
DIKHYQEGKIKKKAGESGRSRVIQAYFRFHATSYLFYISHFNVIHLSSFYNVITGNTFSLSILITIDFILF

SEQ ID NO: 229164 - protein, 65 aa, Glycine max
  Clone ID: PAT_MRT3847_48961C.1.pep
PFCFFPYLITFSFGCFYSLFAMCPSNFNIYGLPKPNQDKQPFTETKMDRYQLEVNSVPDNGDLTD

SEQ ID NO: 229165 - protein, 106 aa, Glycine max
  Clone ID: PAT_MRT3847_48962C.1.pep
MLVLLLLVAILVMLKMILVQRVQVANIVKYPGLICLRKSLMRQTNKKTLFSSMESLINLMREVEVQEKAAEQANMEAATGGSNILARIEEYKTMLVHAKEANDMHA

SEQ ID NO: 229166 - protein, 407 aa, Glycine max
  Clone ID: PAT_MRT3847_48963C.1.pep
MEPKHNNLSKEAASNNGDGNRIGNDSNEMGWLEVVSSLVDDYDATTSHRLEECETYLIELETSEAPKVCHVQGDALNYKDSLQSELVAGSSSTGDNTSDVEDDIGAKNAGSQYSHVCRIDLLEEIIDEAKTNKKMLFSSMESLINLMREVELQEKAAEQANMEAATGGSNILARIEEYKTMVVQANEANDMHSGEVYGEKAILTTELKELQSRLLGLSDERDRSLAILDEIRHILEVRLAAAEELRKAAEQLKLEKEESARKALVEQERLVEKVVHESQRLQQEAEENSKLQEFLIDRGRVVDMLQGEISVICQDIKLLKEKFDANLPLSKSFTSSQTSCKLASSGSSHKTLASDAGSEHSESSEIRKTSRTASIESLSSKSGHDEEEKSKADHNALLDDGWYILSD

SEQ ID NO: 229167 - protein, 71 aa, Glycine max
  unsure (1)..(71): unsure at all Xaa locations
  Clone ID: PAT_MRT3847_48964C.1.pep
LSKIEYTPCLIIDLCNPCNKYHVTIHNVXFEIIHSLSPAQRIHMNTIHSKSLIRICPIFQKPIFPSISPNI

SEQ ID NO: 229168 - protein, 145 aa, Glycine max
  Clone ID: PAT_MRT3847_48965C.1.pep
KLKKIKMQGIKLNMMRKNKNARHKINMVRKKKKNKEKEKGAVRKKGGESRNRKRRKREKKKNGPEVSPAGQKRENRTGLVQGKKTEPVRPLYKGSGPVFSHFLKAFLSLLFSLFPFSLFSFLLSEVLCGQEYPPARRPSVVFSQP

SEQ ID NO: 229169 - protein, 82 aa, Glycine max
  unsure (1)..(82): unsure at all Xaa locations
  Clone ID: PAT_MRT3847_48966C.1.pep
ETPRGGRWGCFPRPTFPRVKIIPSVWSEASFLIFLXNTRKETRGPPPPQLVPQQIRGFYKIYIYIYIYKYINIYIYKNKNIK

SEQ ID NO: 229170 - protein, 99 aa, Glycine max
  Clone ID: PAT_MRT3847_48967C.1.pep
PRGALWGIFRSRFLPPGTYPWVGSFFRPKVVPLLQKKFFFPSALVHSGSRLFVRRRHFCVRGLVPGHLMLCLIFGNLLPHWRVIKGASAHVTSPNQTSY

SEQ ID NO: 229171 - protein, 49 aa, Glycine max
  Clone ID: PAT_MRT3847_48968C.1.pep
MNAYDILFHSLKEKKNNLKKKKKKKIKKKKKKKKKKKKKKKKKKTWGGG

SEQ ID NO: 229172 - protein, 124 aa, Glycine max
  Clone ID: PAT_MRT3847_48969C.1.pep
RPGGPFRVFKLFLPWGPLWIFKLFLPFLSLLFPRPIFFFRGFLGTHNGAPGAPKRNRGFPGGGYLNFHYIIFLSHRFTNLWNRFIHFHGLTTRLIRQSNRTNTFSPLLFTLKIFGVNHSNIFHF

SEQ ID NO: 229173 - protein, 96 aa, Glycine max
  Clone ID: PAT_MRT3847_4896C.1.pep
RDSISICLFLCPLFLSLESSGLRGEMMQQARPGMGPSTMGQQPPQQYQQAPPQYQQPYAMMPTKVQAPQAMWAPSAKTRPKKKPPWPIKAQTLWTG

SEQ ID NO: 229174 - protein, 102 aa, Glycine max
  Clone ID: PAT_MRT3847_48970C.1.pep
GSRKKKKKKKKKKKKKKKKKKKKRKKKKKKKKKKKKKKKNNRGRPPFMGLFPPEFISGPVLGGFPFFLFGGRFKPGRNLGHSCPLGKMVFPSHFPPTYGPEP

SEQ ID NO: 229175 - protein, 60 aa, Glycine max
  Clone ID: PAT_MRT3847_48971C.1.pep
ELSKPSRSPLLTLHTLATELEWADGEVSEEAEASDDWNLTVESSKCLSRNRQHMKSSQAD

SEQ ID NO: 229176 - protein, 111 aa, Glycine max
  Clone ID: PAT_MRT3847_48972C.1.pep
RVKRSPSSSFWLALSVRTRSYFVVFDQLVQFLLVGISSCSRVCKFWKFGLFFCLMGGVGISLVWFGLDWFTSFYELVFNGCWLVILCCSIASVGKKRRIRYKAPPDRRAAS

SEQ ID NO: 229177 - protein, 64 aa, Glycine max
  Clone ID: PAT_MRT3847_48973C.1.pep
SAAALGRPFFFFFFFFFFAPIHFFWVIWYFFFKWVFLNNYWGLKNPPLGANLGVHTPLKIYPSV

SEQ ID NO: 229178 - protein, 83 aa, Glycine max
  Clone ID: PAT_MRT3847_48974C.1.pep
YGGFKMLTVLDKPNFFFDFPLLFNFPGIDHETHGLNCEPVFCSVVFGIVSCNVLRSVKPPRQWFGGVDLLNILGFVSLFQCFT

SEQ ID NO: 229179 - protein, 130 aa, Glycine max
  unsure (1)..(130): unsure at all Xaa locations
  Clone ID: PAT_MRT3847_48975C.1.pep
YGCEKTTEGDVRIAQQHADTFAAALACEGLKSFCAMYSSFMQRAYDQLVHDVDLQNLPVRFALYRAXLAGAHGPTHXAVQFDVTFMACLRNMVXMAPSDESXLFHLDATGLAIDDRPSWFLYRSGNGFRC

SEQ ID NO: 229180 - protein, 125 aa, Glycine max
  Clone ID: PAT_MRT3847_48976C.1.pep
MEITPPPLLLLFLLLFFLCYLVLCASATDVDFDNCNCDDGEGIWSIHSILVGQKVSDFFIAVAYFSIPIELLYFVSRSNVPFKLLFLQFIAFIVLCGMTHLLNAYSYHGPPSFQLLLSLTVAKFL

SEQ ID NO: 229181 - protein, 60 aa, Glycine max
  Clone ID: PAT_MRT3847_48977C.1.pep
SKNLRDPDPPANLVVCGTRLGQPSIESSSQLKLSPPQHVWVQRVSSAKRSCDRALQSAPS

SEQ ID NO: 229182 - protein, 72 aa, Glycine max
  Clone ID: PAT_MRT3847_48978C.1.pep
KKFFFPSAGGSKKNIRQRFFYFFSRGRGGEENHLFPPLFKKKKKPPLPPKTTPPPPPGGQLFLINSVTRFSF

SEQ ID NO: 229183 - protein, 68 aa, Glycine max
  Clone ID: PAT_MRT3847_48979C.1.pep
AINLILLWDNVKLPLFLANLKYKFSLFFISHLLNSPHNQLSTIMFVIILLNLKINIILCMWINSPFVL

SEQ ID NO: 229184 - protein, 85 aa, Glycine max
  Clone ID: PAT_MRT3847_4897C.1.pep
YFEIWHQMAFILSFSLFLCVYTYMLSVSSLSCISLYEVFLVFMVSSSNDSSHTSLRLLVVVPDHIVTDSYCQFYLLANLIFLSFC

SEQ ID NO: 229185 - protein, 131 aa, Glycine max
  unsure (1)..(131): unsure at all Xaa locations
  Clone ID: PAT_MRT3847_48980C.1.pep
VEKGKKMGFPGGETHFLYGAANFFAXMANLLTFPTMGINMKGKLPIVFEVGWGVQSLEGFLLSSEVMAMASAPMDVFETQFRFVLKGAIPAYLGALGTLXLSYLSRSLELAHCSRCQFHWLRRDAIFLLEL

SEQ ID NO: 229186 - protein, 57 aa, Glycine max
  Clone ID: PAT_MRT3847_48981C.1.pep
ETEGFPVDTNAQSGEVFVCVTEKRKRSRIFCCLSLISQLTPLFCLKYSRVRIYLHCC

SEQ ID NO: 229187 - protein, 77 aa, Glycine max
  Clone ID: PAT_MRT3847_48982C.1.pep
VGPASKGGIDHKPGTKDFTEDWRHECKYILVTYIIEVYNISIKINSKEEGKRSSFCASKKKKNGKERSECRGLLTQN

SEQ ID NO: 229188 - protein, 104 aa, Glycine max
  unsure (1)..(104): unsure at all Xaa locations
  Clone ID: PAT_MRT3847_48983C.1.pep
PSTSRKIGSASKTVGASLPLXNPSPNYWRRPYLCLRLSAKHRYSYSGDVNSNGVSSTTFTRRSWTLAPSSSIKCRPLPARAAKSAVPESAPVENPLFKTLELGA

SEQ ID NO: 229189 - protein, 67 aa, Glycine max
  Clone ID: PAT_MRT3847_48984C.1.pep
LFKLLIFIHFIITSTKFISQILIILPTLLKLNRLRNRILKNLMKTHNCELVFTCFNSTITHVYFSRS

SEQ ID NO: 229190 - protein, 108 aa, Glycine max
  Clone ID: PAT_MRT3847_48985C.1.pep
MVKQGVIGGLAMVILLMSGLNLGSNNNLNPFVSTTPIMDAQKIRSLTLLNITERDQLSRKYSTNGEYTVKSAYHAIMDHLLDNSHLKVKGNWKTIWNLVVPQRIKHFT

SEQ ID NO: 229191 - protein, 154 aa, Glycine max
  unsure (1)..(154): unsure at all Xaa locations
  Clone ID: PAT_MRT3847_48986C.1.pep
MASPSIDIGLLVLRGNEELIRQKLKRLLAITMPKVRQKLYVHLEQMDVIRALLPAIYINAASIAPKIDLRVLLNRTTSVPVDRVFYDEMDSFATSHHILPEKPYDHVVLGGTFDRLHNGHKLLLSEAAMMARTRITLRVXDGKMNEKKILYELM

SEQ ID NO: 229192 - protein, 52 aa, Glycine max
  Clone ID: PAT_MRT3847_48987C.1.pep
DRDSREAPTYCRYRQRTLTHQGLEQNFLSRYQQNGPRLQILYPPGGGKLYLD

SEQ ID NO: 229193 - protein, 635 aa, Glycine max
  unsure (1)..(635): unsure at all Xaa locations
  Clone ID: PAT_MRT3847_48988C.1.pep
PTGLKPTFLKKFWHLCGSELFNSRVSWLETSQFPPQVNKTTIFLIPKILANGLKLILPKCISPKHSAFIQDRSILDNVLIVSEIIHHIRCKQKGKXEKLLSKLISAKKFIXVDSNYLFGIMGKMGFNKKWINXMRICFPSIQFXVVVNGDNVGEIFRGRRRKXNDSLPSYLFIICTGVFQLFLKHGEVRGDIHGVKVCKGTPLPPXLIIANDCFLFCRPKNNEIFTLXEILDTYGKVSRQLINFQKSEIXFEFDYSTTTKTQNLFLGVTKSIGSNKYLGLPSIIGKREKXIFGFIKDRLWNWLNHWTSKQLSKAGKEIXIKYAAQSIPFCCMSAFLLHSTLKDXLKKMMKCFWWGNNNKGNXINWLSWIKLLXKKEFGGMKLRHLYAFNLTMLGKQGXKFTTNQDTIMFKIFNAKYFSSMDFLDVHLGHNPIFVXFSIHASQVMVKQGVIXRIGNGDSTHVWTQPWLXNNLNPFVSTTPIMVSLLLKFLTLLIMLIAFXRNDILDSNFNQEDAQKIRSLTLLNITERDQLSRKYSTNGEYTVKSAYHAIMDHLLDNSHLKVKGNWKTIWNLVVPQRIKHFTXRLLRKCIPTRSNLRKKNILYPLHCVCCDSNIENEWHLFLACDHARLIWQAADL

SEQ ID NO: 229194 - protein, 65 aa, Glycine max
  Clone ID: PAT_MRT3847_48989C.1.pep
GNKGFLNSLKEKVFHLRKVGTESGCMREDSYWAYVGRQDREMILVFRTTLQETRNSVRHPWEHTA

SEQ ID NO: 229195 - protein, 211 aa, Glycine max
  Clone ID: PAT_MRT3847_4898C.1.pep
APSYNPPAYKSPSYNPPGYKAPSYNPPAYESPSYNPPGYKAPSYNPPAYKSPSYNPPGYKAPSYNPPGYQPPSYNPPGYKAPAYNPPAYKSPSYNPPIYKPPSYNPPGYKAPSYNPPSYKSPSYNPPVYKAPVYKSPSYNPPGYKAPSYNPPVYKPPSYNSPDYKPPSYNPPVYKSPSYNSPDYKTPDYKPPSYNPPYGKSPYPKYPPGSN

SEQ ID NO: 229196 - protein, 170 aa, Glycine max
  Clone ID: PAT_MRT3847_48990C.1.pep
MGFYAEDTLSGLTIGQAIYEVALMIAVLRWVLCLIFRVMNDRRRTESDETPAAEACCQKEYNNTLVLTTFGEIKERLPQTEETCAVCLSQLSVEDEVRELMNCYHVFHRECIERWLEHEHENHIPTCPLCRAPLLSSCCHHSSTTCVPPPQPSWAVERLLYLFGDDLLPC

SEQ ID NO: 229197 - protein, 59 aa, Glycine max
  Clone ID: PAT_MRT3847_48991C.1.pep
NHSHGLLMTNWTPLPTWSFEIKTTNSQWFREGATRKRNIILKSYIQGGAHKQFQMKFTV

SEQ ID NO: 229198 - protein, 48 aa, Glycine max
  Clone ID: PAT_MRT3847_48992C.1.pep
AFYVISLCMLLETINIKVEESCLGFKAMVVWCLIILNFELAFLLHFVY

SEQ ID NO: 229199 - protein, 41 aa, Glycine max
  Clone ID: PAT_MRT3847_48993C.1.pep
GRNDVEGVSQDLYNGMHVRSKVPHDRCSFVGKMLQPGGYLT

SEQ ID NO: 229200 - protein, 35 aa, Glycine max
  Clone ID: PAT_MRT3847_48994C.1.pep
KYHVKEHHSAWVDRTPYRFSGRSNTQFNPRRSTTS

SEQ ID NO: 229201 - protein, 73 aa, Glycine max
  Clone ID: PAT_MRT3847_48995C.1.pep
CVALWAQCQDFQGQTPAHLYQKERLISFIYQKRSSPKTLSTIGLTNFCPKPLAGIPSDSSLVSNFIDARCGTI

SEQ ID NO: 229202 - protein, 60 aa, Glycine max
  Clone ID: PAT_MRT3847_48996C.1.pep
NDKSAIYEKYVAKQTEIIVEQLKGISQLRLSSTPLKKLQIDNAVSENHHRSPSVVFSQPV

SEQ ID NO: 229203 - protein, 59 aa, Glycine max
  Clone ID: PAT_MRT3847_48997C.1.pep
SLSHSTWFVLHKHFFEFKVCFFFPNICMYASRGRCPIRPLHLSLNGQKLNNGIFCMLMN

SEQ ID NO: 229204 - protein, 43 aa, Glycine max
  Clone ID: PAT_MRT3847_48998C.1.pep
WNIYEKVTVMSVLTQGLADADSITCIAWVIFYLNPKLELVSLA

SEQ ID NO: 229205 - protein, 80 aa, Glycine max
  unsure (1)..(80): unsure at all Xaa locations
  Clone ID: PAT_MRT3847_48999C.1.pep
DDGYTKDRPVEHCVHPASSXEPGTWNACPSILRYECCDRFAYDGMSTNLVXLIXNRLIQHSATASMNVANWSRTCSITPL

SEQ ID NO: 229206 - protein, 116 aa, Glycine max
  unsure (1)..(116): unsure at all Xaa locations
  Clone ID: PAT_MRT3847_4899C.1.pep
RSRRRHRLVELVVEEEDLDGIACAGVGQSRRMDLYDLMYSELDVTSCQLLENDGFFRDTVFKKQLSDTVSWLLDXKVIPIVNEHDAVGTRKAPYEGKNCLEDSSGIFWDNDSLASL

SEQ ID NO: 229207 - protein, 263 aa, Glycine max
  unsure (1)..(263): unsure at all Xaa locations
  Clone ID: PAT_MRT3847_489C.1.pep
MTKPNTFFHNLIKPFKFSSSKEGQTEENEIQNLAAQEQKIFPYETLVAATNKFHILNKLGEGGFGPVYKGKLNDGREIAVKKLSHRSNQGKTQFVNEAKLLARVQHRNVVNLFGYCTHGSEKLLVYEYVRRESLDKLLLKSHKKDLFTXFNLILSPNLCTNIYIYLHEDSHNCIIHHXIKASNILLDENWVPKIADFGVARLFPESQTHVNTRVAGTNGYLAPEYLMHGHLTVKADVFSYGVLVLELVRIKSSVELYMDVSAS

SEQ ID NO: 229208 - protein, 52 aa, Glycine max
  Clone ID: PAT_MRT3847_48C.1.pep
TTSHATLTNKLCSLKTLISLLLSSSLSLLSTSIYASQNHTFHLNPHHPLHYS

SEQ ID NO: 229209 - protein, 110 aa, Glycine max
  unsure (1)..(110): unsure at all Xaa locations
  Clone ID: PAT_MRT3847_49000C.1.pep
LTYAVVSIGGYNKGVTEAKLKVAINGFRMIGRNFLMCXHCLKHSPLDVISINDTICLKQSSHLVKYYSILITFDTNIKPIDIDISLFDYRKIKIMSYRDPTDLSVKDVII

SEQ ID NO: 229210 - protein, 75 aa, Glycine max
  Clone ID: PAT_MRT3847_49001C.1.pep
CFSMNISRLYLTTDVAYGCFPQSLKINRLGTIRLTPSCDSCWETWTGHLSLQHFFRSISHQAYFFAKVWQCFLSR

SEQ ID NO: 229211 - protein, 167 aa, Glycine max
  Clone ID: PAT_MRT3847_49002C.1.pep
MRTHQQPKLKTQLFSCAFFRHCAQTLLSPTATTPPPFQCESSTSSSSATSQSFTQWRFSPPTPNTTTNNNNNNLIQTNTNPPSPPPPPQIHNLQELFHISEFQLSTDPTSALNLLERSLVPNPPQEQPPCPPNLMRALTANLAQAKPATKILFALCLSDANRRVAVE

SEQ ID NO: 229212 - protein, 99 aa, Glycine max
  unsure (1)..(99): unsure at all Xaa locations
  Clone ID: PAT_MRT3847_49003C.1.pep
EFVVTNTPSDREDNINLSVITVAPSVLLAQPHSHARYHTFTHXVKTGYDDLTANVICTCPKPAVKALTIRFIITTHDHYVDPSEDLINDDSYTSDSAPV

SEQ ID NO: 229213 - protein, 146 aa, Glycine max
  unsure (1)..(146): unsure at all Xaa locations
  Clone ID: PAT_MRT3847_49004C.1.pep
PEFPVDPRVRPNGVQALQTLTMTNSSSAQQGAILQYAQTSDGQQILXPSNQVVVQTASGDMQTYQIRTTPSATSLPQTMVMTSPVTLTSQTTKTDDPQLKREIRLMKNREAARECRRKXKKEYVKCLENRVAVLENQNKTLIEELK

SEQ ID NO: 229214 - protein, 151 aa, Glycine max
  unsure (1)..(151): unsure at all Xaa locations
  Clone ID: PAT_MRT3847_49005C.1.pep
TLPLPIIMGGFFPLMGALAKIWFPPLGEFMAQRGPAFREKFTSVKDPSEEVNPLEEKANSFMGAFWAEITAALTPIKKETXLRWNKKFFRGGKKWGFXLPEALAPLGNPKEETLQSLFFPIPALNPEIVYKVFPPPPHVWVIFFSFPPPER

SEQ ID NO: 229215 - protein, 77 aa, Glycine max
  Clone ID: PAT_MRT3847_49006C.1.pep
ADWRGSTKWKSRFRDGGPQWTGALPIGNGRLGGMVCSHVHAETINPHQATLWTRTPVDYTNSNAPPATTHVRPLFTD

SEQ ID NO: 229216 - protein, 71 aa, Glycine max
  unsure (1)..(71): unsure at all Xaa locations
  Clone ID: PAT_MRT3847_49007C.1.pep
ANANHSRTWSGDTYPYRRGHTHTLMGLGTIVRAVLPTPLNKARVGSEARLKNHTYTAHWSKTRRXGSLSLR

SEQ ID NO: 229217 - protein, 84 aa, Glycine max
  Clone ID: PAT_MRT3847_49008C.1.pep
HLNLESKKNIKNFQTLQSHITIKGNQCTALSTTIFIPVLTPKFKPKQIFTICPILYRNTRVFNKIPLSLHFNYQNYIYLNFTPF

SEQ ID NO: 229218 - protein, 112 aa, Glycine max
  Clone ID: PAT_MRT3847_49009C.1.pep
ASYVLNLSNIIIIFTTKYVCHLKKYNKTKACITNPQGWQMLDTMKLQEIAFQIASIQEVIFADSCKYKGKWENDKYAESYCICQFKIVYRAGYMSSEITPPPPPRLVQEVDL

SEQ ID NO: 229219 - protein, 50 aa, Glycine max
  Clone ID: PAT_MRT3847_4900C.1.pep
LFITLTLIGSYGLRNHATISHLTKINLLILIQHIIFLQVTLSTKSHFYNL

SEQ ID NO: 229220 - protein, 81 aa, Glycine max
  Clone ID: PAT_MRT3847_49010C.1.pep
MREEVMSYGGTVDATPAASSAGASSPAVPMNVGSIDGSSHGQVSKAASLSSSCRPWERGDLLRRLATFIPSNWLGKPQRTG

SEQ ID NO: 229221 - protein, 524 aa, Glycine max
  unsure (1)..(524): unsure at all Xaa locations
  Clone ID: PAT_MRT3847_49011C.1.pep
IRFFLSLCGATVRISDFLGFPPVRTEKDQTEDVREVATTNEGKLLANTDLDLNLTMAGGFPFTPLSRTATSEYTHDDMGRDLMIGQPSGSEIGDRAASYESRGPSCRKRNLEKGGCSDNRPVLRLQQQADSVEGTVIDRDGDEVTDGGQYSAGPSKRARDSDIFDTYCSPLRRDSSGAGPSHSIGLEAYATGNRISSXSDPIRPFDKYVIRDANSARAQQSTCLQTATEVARGDVGVSSTNYGEELFNAETVTAQARDGISLGISGGSVGMCASHEAEIHGADIYVHRADSVVGEMEQRVEDAENQGQTGESVPDPGLMDEIIPDMNREDPIGDSQEMMSHSAGRTDSGSKIGCSTESVESGEKISQNCNLLPANSSHPSRSCNANIYSGCENTKEEIMKRDKSSFANNSALPESDFAIANGIGPPKGESNYEAAEFDPIVHHNQCCPWVNGNVAAAGCASSVPSTSSDAIALCGWQLTLDALDALSLGHNAIPTVPSESAASLYKQNDQQAPGQKLFRNHSMS

SEQ ID NO: 229222 - protein, 440 aa, Glycine max
  unsure (1)..(440): unsure at all Xaa locations
  Clone ID: PAT_MRT3847_49012C.1.pep
MGGKSSKGSGRRYDFGASSSSRDNSYGGYPPQSPYTSYQTPQHPCASASASAPFYDYAQPKRKLDKKYSRIADNYRSLDEVTAALANAGLESSNLIVGIDFTKSNEWTGKRSFNRKSLHDIRSGQNPYEQAISIIGKTLSAFDEDNLIPCFGFGDASTHDQDVFSFYSEERFCNGFEEVLTRYRQIIPSLKLAGPTSFAPIIEMAMTIVEQSGGQYHVLLIIADGQVTRSVDTQNGNLSPYQMDXQEQNTKDNSLXQSVHCQSIVLVGVGXWEMMREFDDNIPSRAFDNFQFVNFTEIMTRNVDSTRKETDFALSALMEIPSQYKATLELGILGSRRGHSPDRVALPPPLYSRTSSSISTKSTRSNSFQQRTPTHTSYDSSVHTETSSSSLYDNKVCPICLTNAKDMAFGCGHQTCCECGEDLQFCPICRSTIHTRIRLY

SEQ ID NO: 229223 - protein, 95 aa, Glycine max
  Clone ID: PAT_MRT3847_49013C.1.pep
NPSLTLCLNHNILKSELVLSVIIDTKKNGSRKRQCCNNAIVMLVLYSDQGSKLLHLRFSWSLPAEWDENCSQCCIIYMIIYVFCYAFSYHIFIHT

SEQ ID NO: 229224 - protein, 182 aa, Glycine max
  Clone ID: PAT_MRT3847_49014C.1.pep
GVWGKRSSEWDLNDWRWDGDLFIASRLNPVPADGVGVGQQFFPIGSAGIPVAGGPSNSSSTSEEVDPRDPKGNKEGDKKRRVIVLEDDGLNEEGGTLSLKLGGHASAVVDREVGSWDGTNGKKSRVSGSTSNRAVCQVEDCSADLSKAKDYHRRHKVCEMHSKASRALVGNAMQRFCQQCSR

SEQ ID NO: 229225 - protein, 133 aa, Glycine max
  Clone ID: PAT_MRT3847_49015C.1.pep
LELKAGPPSATNKPAKPLCWAVGPDNAESSEPDAPGPVPNGPVDPVKLAFSKAEAYKESIKPNSGLGTTQSAADNNDDNEAQKDLPDSVKIATEKAKKYKQNKGVAAVSETTQGYLGVSDRSSGKNVMDNKAG

SEQ ID NO: 229226 - protein, 507 aa, Glycine max
  Clone ID: PAT_MRT3847_49016C.1.pep
MHLELETWTILVAIVCILVFVLKEIVMGGKSSKGSGRRYDFGASSSSRDNNYGGYHPQSPYPSYQTPQHPRASAPFYDYAQPKRKLDKKYSRIADNYRSLDEVTAALANAGLESSNLIVGIDFTKSNEWTGKRSFNRKSLHDIRSGQNPYEQAISIIGKTLSAFDEDNLIPCFGFGDASTHDQDVFSFYSEERFCNGFEEVLTRYRQIIPSLKLAGPTSFAPIIEMAMTIVEQSGGQYHVLLIIADGQIFIVFFPVLGLQKLILSLLSQVTRSVDTQNGNLSPQEQNTIDAIVKASEYPLSIVLVGVGDGPWEMMREFDDNIPSRAFDNFQFVNFTEIMTRNVDSTRKETDFALSALMEIPSQYKATLELGILGSRRGHSPDRVALPPPLYSRTSSSISTKSTRSNSFQQRTPTHTSYDSSVHTETSSSSLYDNKVCPICLTNAKDMAFGCGHQGLQKDVQSWSGSFHRWFLVHKNCICNFQAKLVFPVTLRKSSLQKELAFPVVYM

SEQ ID NO: 229227 - protein, 68 aa, Glycine max
  Clone ID: PAT_MRT3847_49017C.1.pep
HNNYTSKLFYFFLQPHHSINHLPTIPHEERGQTKTLPLNQQIYPSLLYKHPYPKEQGCYQHRIYLFKM

SEQ ID NO: 229228 - protein, 101 aa, Glycine max
  Clone ID: PAT_MRT3847_49018C.1.pep
LNELKLLQTKLSIMEKYASILHGSIFGKPFDEQDIPVSLRNSGSFDIAKEWESMLEAADQRKLIRLEMFYRDMLTGVKDELMKRRIKEIVQECLQSSEVKK

SEQ ID NO: 229229 - protein, 99 aa, Glycine max
  unsure (1)..(99): unsure at all Xaa locations
  Clone ID: PAT_MRT3847_49019C.1.pep
XQYXXADMXXXXEYCVFXSXIQXXXLXXQHXHFIXYTLIXDLXIFXNPQTXXAXLXXXALXXXXPPXGCXXSWVLRXXDGXRXXEXAAXGNTSKXWPNX

SEQ ID NO: 229230 - protein, 96 aa, Glycine max
  Clone ID: PAT_MRT3847_4901C.1.pep
GNPGAKKKGERPPGLVFGYRGGHSKFLMQGKLVPPFLQKRASGGGSPSAGFLRNQNMCFFGGLVNHGNKRSPPPFKFFGAKGGGGNKNKGWFPPFV

SEQ ID NO: 229231 - protein, 156 aa, Glycine max
  Clone ID: PAT_MRT3847_49020C.1.pep
LGLSLMNTDSANHDRIPGVRHQNDTTVPLPLVSPSPFPHWHLHETSQYYNNEPAGVNSMIDSSQFRSYQNFQMDHNYYHRAEHNFLPCETDSRFPCPEGYIGWPYQYDRHNNLAIPSNVRDASFNLNNFEKPDNGGMCVTPIYGSASRLQMGSHTS

SEQ ID NO: 229232 - protein, 64 aa, Glycine max
  Clone ID: PAT_MRT3847_49021C.1.pep
LRVTSHDLVTVPWASSDRCVLQSINYRCWVSVPIEFVNHVLVRPLVSRCIIFPNSPVLVLFKIQ

SEQ ID NO: 229233 - protein, 75 aa, Glycine max
  Clone ID: PAT_MRT3847_49022C.1.pep
TRIYKGTTKKMKISREIADASGLRFSLMLIAWPEKLHLRTCSSAVLCECYFSYPVTCFIFWCIYSIFCVQCSSLH

SEQ ID NO: 229234 - protein, 128 aa, Glycine max
  Clone ID: PAT_MRT3847_49023C.1.pep
KNFTVFSLPAFSAYWDENASSMQLSRHDQAGLPAGISTSCEGYIGLSIIQFSHPKMLWNVVDCSISSSIQYDMDFRGEANTRSKSRQCFLEFQLERVCINSMPFVPKFNVSHGVAYLHHLFDCDVTKA

SEQ ID NO: 229235 - protein, 82 aa, Glycine max
  Clone ID: PAT_MRT3847_49024C.1.pep
PFKKYIKIKKVTQINYGKEYNKLIIIINIINQNRALINTPNIIRSQVNFKKLSLTNIKINIKKVPKKKNLIKAIKNTNIKNK

SEQ ID NO: 229236 - protein, 90 aa, Glycine max
  Clone ID: PAT_MRT3847_49025C.1.pep
KIFMHSAQSIMLNVVVTDSSHRVTHISHARNLVLTSTNPSCYTNCCETVVAWISSMIVLILILIVESCMHLHLSAFKTHSCLSVRKQLLI

SEQ ID NO: 229237 - protein, 90 aa, Glycine max
  unsure (1)..(90): unsure at all Xaa locations
  Clone ID: PAT_MRT3847_49026C.1.pep
RQQAHPSVVKTVADSSMGLSSPSLAGKAVKLGPSGPEVGKVSMTKTVTKQDSXGSPWYGPDRVKYLGPFSGEPPYLVTGEFQVXLGWDTA

SEQ ID NO: 229238 - protein, 179 aa, Glycine max
  Clone ID: PAT_MRT3847_49027C.1.pep
MSEAKDPAIKLFGKTIPVPEILPGSNGAPASSSGDVVVDDSVDASSTNSSRESHTNTDAQEKDFDKDTLGEKPTDDKKEDGAPAQSSEEVTNLDTASGTCEESITLSTEREATTLKTTKTEEEQGETSYSQDKNLKKPDKILPWPRCNSMDTKFWYYNNYNVNQPRHFCKNCQRYWTAG

SEQ ID NO: 229239 - protein, 46 aa, Glycine max
  unsure (1)..(46): unsure at all Xaa locations
  Clone ID: PAT_MRT3847_49028C.1.pep
FFFFFFFFFFFFFFFFXGGKARYKTFILGKQSIINLTPILALHFLE

SEQ ID NO: 229240 - protein, 61 aa, Glycine max
  Clone ID: PAT_MRT3847_49029C.1.pep
ECHGMRVLFMLARVSNDSRSSVSLWNRLSCLNGPALTVRYNGGIVLSPQYAEFPESSSTLC

SEQ ID NO: 229241 - protein, 117 aa, Glycine max
  Clone ID: PAT_MRT3847_4902C.1.pep
GKSTMASLRDKEPAPSHNPTIFSEQHLSIRPYHTDPNTLAEGGSAGYFKPAELHRDPPPDYSTSDRYPDEPGYIIRAGSSSAVHHTDANRRIAADNNNSSQISAYSEGRDPGIYLDP

SEQ ID NO: 229242 - protein, 90 aa, Glycine max
  unsure (1)..(90): unsure at all Xaa locations
  Clone ID: PAT_MRT3847_49030C.1.pep
MGFPTNHTSTDHPLNFLIYRRSDCIGDLLHSLCQSHSISFHYCSGRLENRTYLKTNIXSSCPQHILNALCITCLPNADWFQSHKFLTIRT

SEQ ID NO: 229243 - protein, 91 aa, Glycine max
  unsure (1)..(91): unsure at all Xaa locations
  Clone ID: PAT_MRT3847_49031C.1.pep
LATILVARVTDGRKNGTCAXLKPDGLTQVTDECYNDTGAMVTILDHTALTATQHDETVSTDQIAADLREHVIKPVITEKCLYEKTIVQLNH

SEQ ID NO: 229244 - protein, 244 aa, Glycine max
  Clone ID: PAT_MRT3847_49032C.1.pep
MGSKRYALLMCGEDSEYLVKMHGGTYGVFMKLLQEQEEKWDLYKLVQGEFPEQHDLPLYDGFVISGSCYDAHANDPWILDLIALVIKLDSMHKKILGICFGHQIIGRALGGKVGRSPNGWDIGVKAINVSSSLPLAFSSLKLPSKLSIYKCHRDEILELPPKAEVIAWSEMTGVEMFSYGDHMFGIQGHPEFTYDLLLFFIDRIIQRNLVQEAFAVDAKVKAASQEPDKEILKRLCVDFLKGRL

SEQ ID NO: 229245 - protein, 187 aa, Glycine max
  Clone ID: PAT_MRT3847_49033C.1.pep
ISSVPTYYWAQSEAYVFTYEHLDTLRDSFGHPRKKFLSLDFAQSLCSQLGASQNLLRASVINYEQLVILHDSIGHPRKRLSSPEFAQSLRVHIRASRYITGFIRTSEKKVLFAGLCSEPLFSIRNFSVYYGTQSDIRVKGYCRLNLLRASVLNVESLDIPQHTIGHPSKKLLSLEFAQSFRFQLRAS

SEQ ID NO: 229246 - protein, 114 aa, Glycine max
  unsure (1)..(114): unsure at all Xaa locations
  Clone ID: PAT_MRT3847_49034C.1.pep
RLGKGVKPTAEELRRIMXLXHNTRNMSVTAHGDHGKPTLTDTXVAAAGIIAKEVAGDGRMTDTRTDEPARGITIRCTGISLYSEMTDDSXKRCRGQRNAKEXHINIIDLPGHDD

SEQ ID NO: 229247 - protein, 40 aa, Glycine max
  unsure (1)..(40): unsure at all Xaa locations
  Clone ID: PAT_MRT3847_49035C.1.pep
FFFFFFFFFFFFFFFFFFFFFFFFFFXAKNLCLFLSLIRR

SEQ ID NO: 229248 - protein, 71 aa, Glycine max
  unsure (1)..(71): unsure at all Xaa locations
  Clone ID: PAT_MRT3847_49036C.1.pep
REESTVGIPENTGTPLAWAMNSSSKGRACCDIYTHRSKDMEXRNTCCTRATTMSSSPKPRGEAWSLQFLKR

SEQ ID NO: 229249 - protein, 57 aa, Glycine max
  unsure (1)..(57): unsure at all Xaa locations
  Clone ID: PAT_MRT3847_49037C.1.pep
NRASSSSTIINNLFPIPMGPTXXRERGAERGQQQRLFXPPQXLPLGGAGSVIXRRSP

SEQ ID NO: 229250 - protein, 60 aa, Glycine max
  Clone ID: PAT_MRT3847_49038C.1.pep
TQILNIQYIFPFSFITLPIFFIFSSHDLLYLLFPLSLHFHRCKFITLFIAALNVKETRKV

SEQ ID NO: 229251 - protein, 58 aa, Glycine max
  Clone ID: PAT_MRT3847_49039C.1.pep
HASTKLMLLLLLFRRTFFHYTITWFNSLGLSYLGWQHTTHPYFGHFTYLQTLFSMLTP

SEQ ID NO: 229252 - protein, 60 aa, Glycine max
  Clone ID: PAT_MRT3847_4903C.1.pep
TYIPCHFSLLPSLFSLSLSLSFSLPSSLNLKSLLCNYSKLIECSKLHPHTPSKLLLITLT

SEQ ID NO: 229253 - protein, 52 aa, Glycine max
  Clone ID: PAT_MRT3847_49040C.1.pep
KLMHGGSALLLVLFKALNQSSRSCHFKRCFQADNLRARRGCSHTQTPSYSYI

SEQ ID NO: 229254 - protein, 52 aa, Glycine max
  Clone ID: PAT_MRT3847_49041C.1.pep
YAPSSQRLLLITKVRYQLDGPPRLGVQHCKHESSFRSPYGSCMLQRWVRICI

SEQ ID NO: 229255 - protein, 69 aa, Glycine max
  unsure (1)..(69): unsure at all Xaa locations
  Clone ID: PAT_MRT3847_49042C.1.pep
SVSRPPQXVVPGEGYKDSAQKVKAIKLAKKSVKKRNKDARRGEADRVIPNLKPKHLFSGKRSNGKTERR

SEQ ID NO: 229256 - protein, 196 aa, Glycine max
  unsure (1)..(196): unsure at all Xaa locations
  Clone ID: PAT_MRT3847_49043C.1.pep
MVQYNFKKITVVPNGKDVVDIILSRTQRQTPTVVHKGYAISRLRQFYMRKVKYTQQNFHDKLSTIIDEFPRLDDIHPFYGDLLHVLYNKDHYKLALGQINTARNLIGKIAKDYVKLLKYGDSLYRCKCLKVAALGRMCTVIKRVGPSFAYLEQVRQHMAXRLPSIDPNTRTILXSVDYPMLARASFINKITRADGG

SEQ ID NO: 229257 - protein, 675 aa, Glycine max
  unsure (1)..(675): unsure at all Xaa locations
  Clone ID: PAT_MRT3847_49044C.1.pep
MVQYNFKKITVVPNGKDVVDIILSRTQRQTPTVVHKGYAISRLRQFYMRKVKYTQQNFHDKLSTIIDEFPRLDDIHPFYGDLLHVLYNKDHYKLALGQINTARNLIGKIAKDYVKLLKYGDSLYRCKCLKVAALGRMCTVIKXRVGPSLAYLEQVRQHMARLPSIDPNTRTVLICGYPNVGKSSFINKITRADVDVQPYAFTTKSLFVGHTDYKYLRYQVIDTPGILDRPFEDRNIIEMCSITALAHLRAAILFFLDVSGSCGYSIAQQAALFHSIKSLFMNKPLIIVCNKTDLQPLEGISEEDMKLVNEMKAEALKTLVGQGGEPTDNNSVLLTMSTLTEEGVIAVKNAACERLLDQRVEIKMKSKKINDCLNRFHVAVPKPRDQKERPPCIPQAVLEAKAKQAAEKEKRKTEKDLEDENGGAGVYSMNLRKNYILADDEWKEDVLPEILDGHNVYDFIDPDILHRVEELEREEGMRQEEAEDDDFEIDGTELTPEQQAALAEIRKKKSLLIQQHRIKKSNAENRPTVPRKFDKDKQFTSERMGRQLSSLGLDPSLAIKRMHSRSVSRGRKRDRSPETRSADGMDTDGDTPSKKQRLSRSLSRSRSVSRPPHEVVPGEGFKDSAQKVKAIKLAKKSVKKRNKDARRGEADRVIPNLKPKHLFSGKRSNGKTERR

SEQ ID NO: 229258 - protein, 79 aa, Glycine max
  Clone ID: PAT_MRT3847_49045C.1.pep
LIGLVGATTYIGAGLCADVDSCTCPNWLPIVKKGVVNAIHKEPRMAAFFLRLHLHDCSVNSCDASILVDESSILIGEQT

SEQ ID NO: 229259 - protein, 101 aa, Glycine max
  Clone ID: PAT_MRT3847_49046C.1.pep
LVGIGASIFNLLHKQAQSTTPLVATAQCIICRGEHSAFLTETTVADCSRTNMPNWPLRFKHVLTHELLSKQPHYLRSRRLWLLRLNSRGNIWPPFKIEPFT

SEQ ID NO: 229260 - protein, 71 aa, Glycine max
  Clone ID: PAT_MRT3847_49047C.1.pep
MTLRHTPRQRCIQVSQQTNCRAYTPHTCYTLLKQQKPCLYGYLKNASLNQDANYTNARKTAASCKMASPTS

SEQ ID NO: 229261 - protein, 59 aa, Glycine max
  Clone ID: PAT_MRT3847_49048C.1.pep
NNSSSMKTFARLQHGEQQHKNCLLCINNHVMYYASKISKKLPTTLCISYVYPLFKNPPK

SEQ ID NO: 229262 - protein, 68 aa, Glycine max
  Clone ID: PAT_MRT3847_49049C.1.pep
NLICNSAVWSTLIMHNSIAFQGHTFNFHRALDLIKVRSWTWFKAKMNNVECSFFNWCNKPLVCFSLSL

SEQ ID NO: 229263 - protein, 119 aa, Glycine max
  unsure (1)..(119): unsure at all Xaa locations
  Clone ID: PAT_MRT3847_4904C.1.pep
MKPYTSSPSSSKSKKKPTTTQQDHETAWGGRYLGVRRRPWGRYAAEIRDPSTKERHWLGTFDTAEEAALAYDKAARSMRXSRARTNFIYPDTPPGSSVTSILSPDEQXPNPNPPGPRRA

SEQ ID NO: 229264 - protein, 126 aa, Glycine max
  Clone ID: PAT_MRT3847_49050C.1.pep
VFASLTVLVLNTQKRVLTSCLLGATGKRKETTCSKRHLVNSKLMFAVISRHYDIQHIIHAPGCSSKFRSLRINISARWQLTKRRDAFKIHALKIHPAHSFYKGQEFHLHDVIYAPQFLYKKSQGHS

SEQ ID NO: 229265 - protein, 56 aa, Glycine max
  Clone ID: PAT_MRT3847_49051C.1.pep
RPAKCKLGCGQPTQRWYHVPRSWLKPTKNLIVVFEELGGNPWKIALVKRTIHTPAN

SEQ ID NO: 229266 - protein, 50 aa, Glycine max
  Clone ID: PAT_MRT3847_49052C.1.pep
LSPLASAPASTTQYLFVFNGVVFKTHIRQQQLWLRVGVDSMIISICSFDE

SEQ ID NO: 229267 - protein, 114 aa, Glycine max
  Clone ID: PAT_MRT3847_49053C.1.pep
GLNFNPPRNPPVGTPLVKLVEKFPCPNLPFNPKGLLNGANPLEKLVATFPPGFFEGGEPFPPLWGRRPSPFFYKCLWFKKPLFSPPVCFFIQFPPKTRSGNLVSCSTPPFSFGP

SEQ ID NO: 229268 - protein, 67 aa, Glycine max
  Clone ID: PAT_MRT3847_49054C.1.pep
GPVLPVQQEQNMAQAPLSLIESAFFQVASHPIYDVSAVIYIMVCIHIPHIAKSQDPLVSVNDVSRPI

SEQ ID NO: 229269 - protein, 90 aa, Glycine max
  unsure (1)..(90): unsure at all Xaa locations
  Clone ID: PAT_MRT3847_49055C.1.pep
SRTIYCTNIDFNLTQXXIKHGFLSISKHPQHFKLLLYYHHSTLIAFIXFTLSHISITSLICIIIILRSLPIILIPSNTPLLSHTSSPTMH

SEQ ID NO: 229270 - protein, 100 aa, Glycine max
  Clone ID: PAT_MRT3847_49056C.1.pep
HIFLQSVNSWIFTSWDRWGQQQKKPNKRGPNRGKISTGGTPYHLGKGDPPRGAFRPGGPKKIDNRQKGGGAQLGRGGGGFSPEAKTGNTLISPKRGKNTS

SEQ ID NO: 229271 - protein, 83 aa, Glycine max
  Clone ID: PAT_MRT3847_49057C.1.pep
PNKKDPFKKKKSAKGLGPPLQSQGKSQGGFKNHSRVLALFFREGKASGVAKAFWATGNGNIDLGKLQQSAPLSAHVKHCAEKG

SEQ ID NO: 229272 - protein, 77 aa, Glycine max
  Clone ID: PAT_MRT3847_49058C.1.pep
QKALPLVMLYYKPHYCCSCHRSLLALARQPRSFRLKGKFHGILNPISSFIESKPGDGLFHIFTAIKTHLQRSDELKD

SEQ ID NO: 229273 - protein, 58 aa, Glycine max
  Clone ID: PAT_MRT3847_49059C.1.pep
SGKNPTDSTVCADKDKKLPRCRMTDTRAYEAEPGFTMKCTGLGLYYETTDEPLKSFKG

SEQ ID NO: 229274 - protein, 53 aa, Glycine max
  Clone ID: PAT_MRT3847_4905C.1.pep
ARSGDSPVNLCHLFVMPIERFNYGWKVWLRKDHSCTWPQKCGKVGGIPFNCWA

SEQ ID NO: 229275 - protein, 65 aa, Glycine max
  Clone ID: PAT_MRT3847_49060C.1.pep
EVFAFRRVSLLVVADHAFSTSEFVVEGSCLRPFPLGSGISTSIHQGAKDHHAIPMSLGWRHVTDF

SEQ ID NO: 229276 - protein, 275 aa, Glycine max
  Clone ID: PAT_MRT3847_49061C.1.pep
PMAGDDVIVVHSEERARMLSSGRQRKYEENRLRNKMIQDKPTTSDDSKEVPQWVEMPVIVKADVQGTVQAVTDALKTLNSAQVFVNVVHVGAGPISQSDLDLAQACGACIVGFNVKSPPTALSQEAARAGIKIVLHRVIYHLLEDIGNLIIERAPGTSETHVAGQAEVLNIFEIKGSKSKGPDVKIAGCRVIDGSVTRSATLRLLRSGEVVFEGLCTSLKREKQDVDSVKKGTECGVVINNWCDFQIGDVIQCLEQVIRKPKFIKSESGAVRIEC

SEQ ID NO: 229277 - protein, 48 aa, Glycine max
  Clone ID: PAT_MRT3847_49062C.1.pep
TVKKGTECGVVISNWYDFQIGDVIQCLEQVIRKPQFIKSESGAVRIEC

SEQ ID NO: 229278 - protein, 81 aa, Glycine max
  Clone ID: PAT_MRT3847_49063C.1.pep
RHADLICSMLLRTLRPEYIEELADMETNPGKVSLGDDMVLLVLCYQMSCHCTKCILMMHMVLTPVFELIHSRFFLHREMWQ

SEQ ID NO: 229279 - protein, 80 aa, Glycine max
  unsure (1)..(80): unsure at all Xaa locations
  Clone ID: PAT_MRT3847_49064C.1.pep
RGVGDPGVKARKKFRGAHQMQKNSCLKIRKSCNENSKEQTXILLNNGVEKTIRKPKPPHPNCKDAATNALRDLGLKNSNL

SEQ ID NO: 229280 - protein, 88 aa, Glycine max
  Clone ID: PAT_MRT3847_49065C.1.pep
FIFQSYIRQLHVLSILRDSMLLVSNTSSQCSCRLQLHLPSGSIYIVWHYQLSAFLILSFVCQYCLALTILYRYSLQFSPVTYEGHICF

SEQ ID NO: 229281 - protein, 98 aa, Glycine max
  unsure (1)..(98): unsure at all Xaa locations
  Clone ID: PAT_MRT3847_49066C.1.pep
MSTFALGFIKSPPYLTLQSSGTPDSVPLSSLATKSLFTLKHYNVTRDELLEAAXEVFAKVASGVLKVWANRTYPLSEAAKAHEDLENQKTMGSVVLLP

SEQ ID NO: 229282 - protein, 50 aa, Glycine max
  unsure (1)..(50): unsure at all Xaa locations
  Clone ID: PAT_MRT3847_49067C.1.pep
LRVAVLIAQLADVNTRGKQLLDRFILISDVQLVITNAELCYCNXYRLVIR

SEQ ID NO: 229283 - protein, 64 aa, Glycine max
  Clone ID: PAT_MRT3847_49068C.1.pep
VGFLSIFPDSRSKTQPMILTMTSLFCSCARRRVQNSYSVLSVQEILYLSFVDLRVTYMGEMTLL

SEQ ID NO: 229284 - protein, 390 aa, Glycine max
  Clone ID: PAT_MRT3847_49069C.1.pep
MVFAFNLRKSPKTTQSIQRKFPLTRGTSVGKQVVVAEEGGKSKMGEEREDPQKLKRLAADSYDYDNDSRWPDYWNNVLIPPHMASRDDVVSHFKRKFYQRYVDPDFVVEPMSVGGSSSQPVRSSTTSSSSPLTNNQPRARSSGSTNRTSGTSTTAGPGPSPTPLRWDRQTVLFSVNAWVFVVAFLAAIPLVPKHLSHRAYRLCFLGTLCSSLYSLYSQYGKPRAWNWQALQVYFQSIIASKDFLYFIYCLTFVTSHLCLKFALIPILCWSFEHVAKFLCRNFSRSTLYRKYLEEPCVWVESNSSTLNIVTSHAEIGLGFLLIISLFSWQRNIIQAFMYWQLLKLMYHIPVTAPYHQSVWAQIGRSVNPLIQRHAPFFKTPISTIQRWWLR

SEQ ID NO: 229285 - protein, 200 aa, Glycine max
  Clone ID: PAT_MRT3847_4906C.1.pep
VVDYDEGCDEALLETGIVEVKDLGRGGRHSHSHDGDDVESSVRHVVVSQVLELGIVSHSMIIGLSLGVSQSPCTMKPLIVALSFHQFFEGFALGGCISQAQFKTLSATIMSCFFALTTPRGEATGAGVASIFNPYSPVALITEGILDALSAGILVYMALVDLIAADFLSKKMRCNFRFQIICYCLLFLGAGLMSSLAIWA

SEQ ID NO: 229286 - protein, 61 aa, Glycine max
  Clone ID: PAT_MRT3847_49070C.1.pep
RNIIQAFMYWQLLKLMYHIPVTAPYHQSVWAQIGRSVNPLIQRHAPFLKTPISTIQRWWLR

SEQ ID NO: 229287 - protein, 103 aa, Glycine max
  Clone ID: PAT_MRT3847_49071C.1.pep
SGVSQKHLALFPKPGGGSFLVWWNHFFTVRFWVYLFHFFFLTQGGGKLSLFTRALKFPFLGVPVFCPSCVGGWGFSLSTDFFCLKKFSPPPPLKGFFSPTGLF

SEQ ID NO: 229288 - protein, 68 aa, Glycine max
  Clone ID: PAT_MRT3847_49072C.1.pep
QVVYCRPLSGTGQDDQGTRRWIRQLLTWKEEHWDHGGYPENYCHLSGNERFRRCYKCRGHRGRTTVCI

SEQ ID NO: 229289 - protein, 92 aa, Glycine max
  Clone ID: PAT_MRT3847_49073C.1.pep
YDMVHLLCRARHISCVLYIPSIRPQKSTNVPLVLRSISLSVYQLPPNVVSHSQLFIGFIVYMEDPLSAPSAHWSLSSIAGVFSLRRSTVCSA

SEQ ID NO: 229290 - protein, 199 aa, Glycine max
  Clone ID: PAT_MRT3847_49074C.1.pep
GLLQFFTQCRCNVRKIDLRLPLDLNNHHLSEMARNFEGLTSVRLQSCCLVSGEGLKALAAALKGLEELALVNCDVVETEPGLLATLGQHLKKLTMLDLSYREMMNVKEFVSMIVSCVHLIDLKVRGCKGLTSFAMASILRSCKQLQNVDVVNCSGIHSEAVELFVKNCCRLRRMEVEGSKLSDAAKMWAASKFIEVVVV

SEQ ID NO: 229291 - protein, 87 aa, Glycine max
  Clone ID: PAT_MRT3847_49075C.1.pep
ARAGDHHGCPYRHFSEENLRAALSGMGVNSQAMEDVMDKVRNRHYQLACTLTFEALHGMPCDAGINHPNQYFSDSQKILKPKKDSSA

SEQ ID NO: 229292 - protein, 127 aa, Glycine max
  Clone ID: PAT_MRT3847_49076C.1.pep
FNFFFFFFFFFFFLKKYFFFFFYKKKTPTGWENPGKKKVGILLNKKQKLPPLKGAATKKSFFKVQTPPHDRGEGPPVPIERTCRFRGGDQGNLKYPMVGIKEGKRAETPGFETPPKTGGGDILGDRT

SEQ ID NO: 229293 - protein, 86 aa, Glycine max
  Clone ID: PAT_MRT3847_49077C.1.pep
RVNGSLRLLDVCTAAKDSLLHTKECMRELQSVMRRRKGGEVELKAEVKKFLISRKVVKKAISKALANLKGTRKNCNISSANKDNIG

SEQ ID NO: 229294 - protein, 88 aa, Glycine max
  unsure (1)..(88): unsure at all Xaa locations
  Clone ID: PAT_MRT3847_49078C.1.pep
SFEFRERHLAPNLRLSRSPLQRIEDKPHRPVDNLDDMYGSIPCSLSWPQDXRLKLEEPDDQLIKRIMLKLMLDYSKHSKSIRVANVVY

SEQ ID NO: 229295 - protein, 71 aa, Glycine max
  Clone ID: PAT_MRT3847_49079C.1.pep
FMALAIRITHELLESHPAHESCDSGTNQSDAGRPTVSSLFHSLSSPLHLFTCSLFLLELTSDPNNPIAVCT

SEQ ID NO: 229296 - protein, 86 aa, Glycine max
  Clone ID: PAT_MRT3847_4907C.1.pep
INLEIHWWAPYMFLENVVCNMVGLKPPLALNAVARKLVVHCFNLLKAMWHLNTQDYTCLGTLMLPFFFLLRLRQKQQAPLSRCYLL

SEQ ID NO: 229297 - protein, 101 aa, Glycine max
  Clone ID: PAT_MRT3847_49080C.1.pep
QDIVNAICDDDDIKAISFVGSNVAGMHIYARAAAKGKRVQANMGAKNHAVVMPDASVDATVNALVAAGFGAAGQRCMALSTVVFCGDSKLWYPSLPYCYSI

SEQ ID NO: 229298 - protein, 62 aa, Glycine max
  Clone ID: PAT_MRT3847_49081C.1.pep
RTTSPCLSFTTPSRASHYALCESDDPRTVPTGIIVLVMIRADSVGRSDDAYPHRVGRQALIR

SEQ ID NO: 229299 - protein, 33 aa, Glycine max
  Clone ID: PAT_MRT3847_49082C.1.pep
MQCVYSTVILSTTDELLVVGCRTTSSKTTAEEL

SEQ ID NO: 229300 - protein, 90 aa, Glycine max
  unsure (1)..(90): unsure at all Xaa locations
  Clone ID: PAT_MRT3847_49083C.1.pep
GVSEVRSNGEDNSGYFDDSFGVASXKXYLAEFHATLIXVVAGVXSAIAYNELXXDAALDPTGLVAVAVAHAFALFVCVSGAANISGWPFE

SEQ ID NO: 229301 - protein, 85 aa, Glycine max
  Clone ID: PAT_MRT3847_49084C.1.pep
FLNALTGEKKKKKKKKKKKKKKKKKKKKKKKKKKKKGRPPPRDLATPELNSGPDPGGDPFFLIGSRLKPGGNKGQSCSLGKIVTR

SEQ ID NO: 229302 - protein, 53 aa, Glycine max
  Clone ID: PAT_MRT3847_49085C.1.pep
YAGAIKQITGQISHPKDIFFTIKFLCFVKLLPLPLVGAPHYKFIKVCCSYNPK

SEQ ID NO: 229303 - protein, 45 aa, Glycine max
  unsure (1)..(45): unsure at all Xaa locations
  Clone ID: PAT_MRT3847_49086C.1.pep
VIILYKXASVVYSNTQFTLKYPSIXSLILHCXRARLRESRKPSPF

SEQ ID NO: 229304 - protein, 52 aa, Glycine max
  Clone ID: PAT_MRT3847_49087C.1.pep
LPIFTLLNIALVATHAGLPPEAYWKSVLSTTLMPQAITDILYSDCEVEQSSL

SEQ ID NO: 229305 - protein, 63 aa, Glycine max
  Clone ID: PAT_MRT3847_49088C.1.pep
KKKPKIGFAFSQGPLAPSRFLNKKSFIYLKGRGGPEKEESPREAGSLFFCTPEETLLPPWLSQ

SEQ ID NO: 229306 - protein, 137 aa, Glycine max
  unsure (1)..(137): unsure at all Xaa locations
  Clone ID: PAT_MRT3847_49089C.1.pep
MQHPSSHITDCPNQLSTNFLEIAKKPEVFDWMAKIRRKIHENPELGYEEFETSKLIXEELDKLGVPYKHPVAXLGIIGFIGTGKSPFVAIRTDLGAPSIHEMVEWEHKNKVPXKMHAWGHEAQVPMPFGGTKDSQTT

SEQ ID NO: 229307 - protein, 94 aa, Glycine max
  Clone ID: PAT_MRT3847_4908C.1.pep
SCKSAFKEPLDLIRFSLDERIYVKLRSDRELRGKLHAYDQHLNMILGDVEEIITTVEIDDETYEEIVRTTKRTVPFLFVRGDGVILVSPPLRTA

SEQ ID NO: 229308 - protein, 166 aa, Glycine max
  Clone ID: PAT_MRT3847_49090C.1.pep
MCGGAIISDFIDVNLNSGRKLTTHNTHHQLHTFSDFHATSSSKHQPSYQDPNLPRPPPLPNNQGVKLKALTLNTGRVRKNVYRGIRQRPWGKWAAEIRDPRKGVRVWLGTFNTAEEAARAYDNAAKRIRGDKAKLNFPDSKNPCLNPFQLKHLFSNLESFLGLDSL

SEQ ID NO: 229309 - protein, 45 aa, Glycine max
  Clone ID: PAT_MRT3847_49091C.1.pep
VYVVFNKFLLIIENIVLKKCVNKCFREYFANISQKPHVRNSLRHT

SEQ ID NO: 229310 - protein, 189 aa, Glycine max
  Clone ID: PAT_MRT3847_49092C.1.pep
LGGKAPFVFAPPCLVSLLGALLFLGSGLLAVGPPRIGFNVVIVGKFPSFPPVAPLPRCLPRAPLVPRGSPVAEALAKRGPMGAPLMRAFVGLAPGLTIIFGARVGRGPKNNMVGGAQLSVFFYYFFCLVFCRGAPPPPFLCCFWAGRFLFPGLLFGWGPGLGKKKKKKKKKKKKKKTPKKKKKKNPKNP

SEQ ID NO: 229311 - protein, 66 aa, Glycine max
  Clone ID: PAT_MRT3847_49093C.1.pep
MQKHQYNSMEPNNEEFHSAPQLVPQDLRDGMHINARPPAFNMAENKPVLNYSIQTGEEFALEFMRD

SEQ ID NO: 229312 - protein, 440 aa, Glycine max
  Clone ID: PAT_MRT3847_49094C.1.pep
MKRHAEKIKDHSNADVTVDEYHRYKEDIGIMKYVNLDPYRFSIAWSRVLPKGKLSAGVNKEGINYYNNLINELLANGLQPYVTLFYWDVPQALEDEYGGLLSPHIVDDFRDYAELCFKEFGDRVKHWITLNEPSTVSMNGYAVGSHAPGRCSDWLKMNCTGGDSGTEPYLSSHYQLLSHAAAANLYKTTYQTSQKGIIGITLNTDWFLSASEKITDRDAARRALDFRFGWYMDPITFGDYPKSMRSLVGNRLPKFSKEETRQLKGSFDFLGLNHYATVYAGHAPHLRGPRPTLLTDPLIYVTNQRDGRVLCPYAASNWLCVYPRGLRQLLLYIKKQYNSPVIYITESGYDELNDPTLSLEESMIDTYRVDYFYRYLYYLQMAIRDGVNVKGYFVWSLLDNMEWSAGYTVRFGLVFVDYKDGLKRYLKLSAQWFKNFLNKS

SEQ ID NO: 229313 - protein, 87 aa, Glycine max
  Clone ID: PAT_MRT3847_49095C.1.pep
MVMALKMFPLLCVLSLFATSSIITITHSKTVPPILDVTNFNRTSFPQGFVFGTASAAYQYEGAAREGGKGPSIWDTFTHKYPEKIKY

SEQ ID NO: 229314 - protein, 222 aa, Glycine max
  Clone ID: PAT_MRT3847_49096C.1.pep
FSQDSQLKSGGRQDSFEDEPSQNGSSAYTPQNGGLNIPHTVVNQTMSIIPISAGGAPGAVPGPTTNLNIGMDYWGTPGSSNIPGLGRKVPSTAVAGGMVTVGSRDSAQSQLWLQDERELKRQRRKQSNRESARRSRLRKQAECDELAQRAEALKEENASLRSEVNRIRSDYEQLLSENAALKERLGELPPNDDHHHRSGRNDQHVGNDTQQSGQTEAVQGGH

SEQ ID NO: 229315 - protein, 200 aa, Glycine max
  Clone ID: PAT_MRT3847_49097C.1.pep
HASVKSGGWQDSFEDEPSQNGSLAYTAQNGGLNTPHTVVNQTMSIIPISAGGPTRPYGCEKTTEGIGMDYWGTPASSNIPALGRKVPSTAVAGGMVTVGSRDSAQSQLWLQDEREPKRQRRKQSNRESARRSRLRKQAECDELAQRAEALNEENASLRSEVNRIRSDYEQLVSENSPLKERLGELPANDDHHRSCRNDQH

SEQ ID NO: 229316 - protein, 49 aa, Glycine max
  Clone ID: PAT_MRT3847_49098C.1.pep
GTTTVFKEQAIFSFHKGKVIFARPQQLGIMSQWNPPPNAKLLNLPLKIQ

SEQ ID NO: 229317 - protein, 73 aa, Glycine max
  Clone ID: PAT_MRT3847_49099C.1.pep
GWVTFSSPLGFGQILMKPPKGQAAFKEGPAYSSPKAYVARNPLTKGGLDNGRPKPCCSAPVRRLWFTVSFFSL

SEQ ID NO: 229318 - protein, 278 aa, Glycine max
  Clone ID: PAT_MRT3847_4909C.1.pep
MELSAPSSPSLLRCPSSLLLNSRVRVFHTIPNPTRPPFQASIFSLNQRNLTPMDLPRNVSSAALVGDNASATTTLPIDSDARIGEVKRVTKETNVSVKINLDGSGVADSSTGIPFLDHMLDQLASHGLLDVHVKATGDIHIDDHHTNEDVALAIGTALLHALGDRKGINRFGNFSAPLDEALIHVSLDLSGRPHLSYNLDIPTQRVGTYDTQLVEHFFQSLVNTSGMTLHIQQLAGKNSHHIIEATFKAFARALRQATEYDPRRRGTIPSSKGVLSRS

SEQ ID NO: 229319 - protein, 134 aa, Glycine max
  unsure (1)..(134): unsure at all Xaa locations
  Clone ID: PAT_MRT3847_490C.1.pep
MLSXKQAEEAIVTNETEHEVSSTREEEKEQDQSMFSLKSILWHGGSVWDAWFSCASNQVAQVLLTLPYSFSQLGMLSGIIFQVFYGIVGSWTAYLISVLYIEYRTRKEKENVSFKNHVIQWFEVLDGLLGPYWK

SEQ ID NO: 229320 - protein, 40 aa, Glycine max
  Clone ID: PAT_MRT3847_49100C.1.pep
YHVFDVRSTSSISSLISGQPFFFFFFFFFFFFFFFIYCDL

SEQ ID NO: 229321 - protein, 110 aa, Glycine max
  Clone ID: PAT_MRT3847_49101C.1.pep
MDSGVQGCILATLILHDEEIPVTAEKINALLKASNVSAESYWPSLFAKLAQNKNIEDLILNAGGGGAAVAVAAPAGGGGGAAAAAAPAAEEKKEEVKEESDDDMGFGLFD

SEQ ID NO: 229322 - protein, 161 aa, Glycine max
  Clone ID: PAT_MRT3847_49102C.1.pep
TRHCICKWHILREGQERLAHIYLAHPSFYGELYSCINFSETTEDFESTWKSLLDKYDLQKNDWLQAVYNARKQWAPVYFHDTFFAAITSNHGVSSFFDGYVNQQTTISLFFRQYERSLEHSLEKEIEADYETVCNTPVLKTPSPMEQQAAYMYTKKIFAKF

SEQ ID NO: 229323 - protein, 83 aa, Glycine max
  Clone ID: PAT_MRT3847_49103C.1.pep
DGPILACNNEGSNQQGKISHKCLSVRHMPCHDRARNYRLCCAHHDLRLYSSVVQDITISYPASSAATGITINPRGMQCPEKKR

SEQ ID NO: 229324 - protein, 84 aa, Glycine max
  Clone ID: PAT_MRT3847_49104C.1.pep
ETLCSLQFILLREPRPSLPSMLHPELAARPSHNSPPNLTRANSNSPDDKEKLQRLKHRRAVVASPECMVCSQLSLPSLGDHRIL

SEQ ID NO: 229325 - protein, 122 aa, Glycine max
  unsure (1)..(122): unsure at all Xaa locations
  Clone ID: PAT_MRT3847_49105C.1.pep
VNPTVFLYAKERQSHHHDIIYISLYNTGPSKTQYYEDYDIGRTKLMIPDVRKWGNKGHAPASPETXKNYNKLVFPGLKSVFLARRYLXDKMAGTKANLKEAGFHPWGASKSLRIHMLMTPHG

SEQ ID NO: 229326 - protein, 52 aa, Glycine max
  Clone ID: PAT_MRT3847_49106C.1.pep
RTVRLGCGSLFFMGFPISPLLSTIMLPYEHIIIMMLSLGLRLIALHKPSIGG

SEQ ID NO: 229327 - protein, 59 aa, Glycine max
  unsure (1)..(59): unsure at all Xaa locations
  Clone ID: PAT_MRT3847_49107C.1.pep
NPPLRGKFEPPRVPAGNKSPGQERNNWGPPFFLVFFFFXKSPPSVIFSQPYSSRRPIRS

SEQ ID NO: 229328 - protein, 110 aa, Glycine max
  unsure (1)..(110): unsure at all Xaa locations
  Clone ID: PAT_MRT3847_49108C.1.pep
SYSFSGKFLVPSYGVASFLDPQARCASLSYNNAFALPAGGHANFEALARANNFSASSSLGIITFSVSESXRHFGVVFGVFYSVQRSDNCLGVKAPXMSNIQGIWYAQFDS

SEQ ID NO: 229329 - protein, 55 aa, Glycine max
  Clone ID: PAT_MRT3847_49109C.1.pep
LTRVDPFPVALKGVFFGVKNEILSSNPPNPILTRLFENCKSLKNLVNEGPFPFVN

SEQ ID NO: 229330 - protein, 42 aa, Glycine max
  Clone ID: PAT_MRT3847_4910C.1.pep
GLTVISHKWQVQEDEDEYEDEEYEQSPSYPSRRPSHGMHEYD

SEQ ID NO: 229331 - protein, 43 aa, Glycine max
  Clone ID: PAT_MRT3847_49110C.1.pep
TTLPVIMHPFRCMTGSRARRIKCRACFEALATLIRSQLQHPTF

SEQ ID NO: 229332 - protein, 47 aa, Glycine max
  Clone ID: PAT_MRT3847_49111C.1.pep
STSLSVEPAINFHSLYGRQISIFLIISLNCTFGSSISVEIEFCAPDF

SEQ ID NO: 229333 - protein, 145 aa, Glycine max
  unsure (1)..(145): unsure at all Xaa locations
  Clone ID: PAT_MRT3847_49112C.1.pep
IRDLKNKDLDLDLKIIRXLGKRLCKAGRITYALEIVDIMKRRDMDDGRVHGIVINGYLGRNDADRALEVFQCMKESGCVPTISTYTDLIQHLFRLNRYEETCMLYDEMLGKGIKPDIMAITTMVEGHVSQNRISGAWKMFNYVFG

SEQ ID NO: 229334 - protein, 113 aa, Glycine max
  unsure (1)..(113): unsure at all Xaa locations
  Clone ID: PAT_MRT3847_49113C.1.pep
LXSXVRXAXXFXXXXVLXHMLXYSXXXVPXXXAXEIDXXXAXXXXXRSXDLSXARXSAXASYXXXXHRXXRYWXXVXAXXXXXRXXSFHGXYXXXQRXRXXXXCXSFHXXPXK

SEQ ID NO: 229335 - protein, 63 aa, Glycine max
  Clone ID: PAT_MRT3847_49114C.1.pep
RLYLNMFKNLKITSFSCILTHMEDPLQVGMNSEFYHPYTASLASSLEYKCSQPSIFSPSASSI

SEQ ID NO: 229336 - protein, 48 aa, Glycine max
  Clone ID: PAT_MRT3847_49115C.1.pep
FARFGAPLGGSLFASKSSPGVLSFSSPPEEKMRYAITGELVYPRNFKM

SEQ ID NO: 229337 - protein, 84 aa, Glycine max
  unsure (1)..(84): unsure at all Xaa locations
  Clone ID: PAT_MRT3847_49116C.1.pep
MASLIVAFLAAVLCMVVVSAPMAHATITCGQVTNSLINCICYLQNGGTXTSGCCNGLNSLNAAATDIADRQTACKCLKSAAIQI

SEQ ID NO: 229338 - protein, 91 aa, Glycine max
  Clone ID: PAT_MRT3847_49117C.1.pep
DSTLCMQIASKYDLRDLIAANESDTHYGRKVCIDGYTDIFDQYTRHERIQLQLLIHKKPKSYAHSTVVLNNRPLELTGSVASSKLSIILLH

SEQ ID NO: 229339 - protein, 151 aa, Glycine max
  unsure (1)..(151): unsure at all Xaa locations
  Clone ID: PAT_MRT3847_49118C.1.pep
RVRRNLLTLIMESLALSFLLITLFLFTIISLNSFSSYASQLTYTDHCASMVPNSNPNESKFKDFPHGRFQVGYYLGGDKIVGADTFQKLRQKQVTLRIKSVYETDVFGIHKVGATLLVTTASSYYRVGNFTRGKRLKNRKRXPSSIMFSLD

SEQ ID NO: 229340 - protein, 115 aa, Glycine max
  Clone ID: PAT_MRT3847_49119C.1.pep
GFCKYAFGLEIGGKMGGVTIFPREKLLPWFRPGLKRLPKRKSGKPPGTGQKKKNGGRRVKRGGRPQVWFSYFFIVYIFFCFFLFFFFVFNCDRPFFKVFLYYAHKIFFSRGEIRV

SEQ ID NO: 229341 - protein, 66 aa, Glycine max
  Clone ID: PAT_MRT3847_4911C.1.pep
HAFTTLKRLSYRVELIQKRISESAVQVSRIHDPNVGRHFLHALSFLLHHHLDSMITGLSQTIRVRT

SEQ ID NO: 229342 - protein, 53 aa, Glycine max
  Clone ID: PAT_MRT3847_49120C.1.pep
LQSFLSLLSSDFNFPSSHGDIVFTVLKSRACFFLIIAPLVSVFRFLQNKINYP

SEQ ID NO: 229343 - protein, 62 aa, Glycine max
  unsure (1)..(62): unsure at all Xaa locations
  Clone ID: PAT_MRT3847_49121C.1.pep
LRRYEHLLRYFWEANMANPVGENATTSLCTDGNLLWAYADGKDXWQTNTDNKGVADFMLLSN

SEQ ID NO: 229344 - protein, 51 aa, Glycine max
  unsure (1)..(51): unsure at all Xaa locations
  Clone ID: PAT_MRT3847_49122C.1.pep
IMSIAASSDITKSFIYDHNKHLXXSPQNGTPPCVLSSVPFWWLLAAVRTXG

SEQ ID NO: 229345 - protein, 82 aa, Glycine max
  Clone ID: PAT_MRT3847_49123C.1.pep
MWGVPLDMDMIRMANRQYSFCLRTIHRLAPCKPTVNGDYPADPSTACYSAIATADHTCICRFTDSGLLSMYDVDPNKCMKLP

SEQ ID NO: 229346 - protein, 116 aa, Glycine max
  Clone ID: PAT_MRT3847_49124C.1.pep
RRGNDGNSKRFEQEQRTLVWRRRRRQWVESRAKKAKKAPVPCGATARRHSQLLLQQRERGCMKRRGLHSSMESQPRLLPTFCSASIHTVCSAATNVVPALITSFTLIHAPYYFHFT

SEQ ID NO: 229347 - protein, 84 aa, Glycine max
  Clone ID: PAT_MRT3847_49125C.1.pep
SATSISSEWFESVVLFLVLRGEQAPPSLVVCLRRAASSLRTRVGLVPVVESPRWRSSVRSSSTLILLDAILEGNGMGCVTLLLS

SEQ ID NO: 229348 - protein, 55 aa, Glycine max
  Clone ID: PAT_MRT3847_49126C.1.pep
MSTPALSGGTGLFSGFTRLCKGLAVVLVCGHIAVQFIPSAVNYLALIPARYPALT

SEQ ID NO: 229349 - protein, 70 aa, Glycine max
  Clone ID: PAT_MRT3847_49127C.1.pep
VLNLRITLEIISKIICSKTTYSYQFFLPQPYHEVIYYHSYEKPRTIKHIITITYHLNIIAPFHLYQDNQY

SEQ ID NO: 229350 - protein, 54 aa, Glycine max
  unsure (1)..(54): unsure at all Xaa locations
  Clone ID: PAT_MRT3847_49128C.1.pep
FTIAXSXGWTLEPXAXTPMSXXRXTXQKXWAXINXLXWCLXFXCLANXLVRXXC

SEQ ID NO: 229351 - protein, 86 aa, Glycine max
  unsure (1)..(86): unsure at all Xaa locations
  Clone ID: PAT_MRT3847_49129C.1.pep
GXXXLXXXXXXXLLXXXLAXXHXXXXXSXIXGLPLLXXXXPXXPXXXFXXXXXXSAXRXIRXXXRFTLMXQXXLXPXXEXXVPXPX

SEQ ID NO: 229352 - protein, 54 aa, Glycine max
  Clone ID: PAT_MRT3847_4912C.1.pep
NVQVQGSQVQHLILYYACSEEEHEKTLRVNSDELPDRTVTCSDSVLFFAFRNHR

SEQ ID NO: 229353 - protein, 119 aa, Glycine max
  Clone ID: PAT_MRT3847_49130C.1.pep
GSLNFLADDMFLLVQGPNPTRPQEILNQGPPEPIVGETEENKRGGENTPRGERQEEGAPVGEQKRTGAFPRLKKKEKKKDQARRAPTVLFLKREKEKGATHKGGAPAEAQAKQKALGGP

SEQ ID NO: 229354 - protein, 87 aa, Glycine max
  unsure (1)..(87): unsure at all Xaa locations
  Clone ID: PAT_MRT3847_49131C.1.pep
GVFFKNSFLGLSHSCVETPPPRAPPSPRVRTVSKKWGFYMGKMGFIFCLSPGENLAGVFSPPLDSPILGGXGCNFLPFNLGVLKKKT

SEQ ID NO: 229355 - protein, 67 aa, Glycine max
  Clone ID: PAT_MRT3847_49132C.1.pep
FSSFAWLLSRSLSKQEIQESMSDAYRFLKLSSHHQSTANNINNGHRNASYNLIINWGGGEDKRKKIK

SEQ ID NO: 229356 - protein, 132 aa, Glycine max
  unsure (1)..(132): unsure at all Xaa locations
  Clone ID: PAT_MRT3847_49133C.1.pep
CEVILTRGFPVGFMGAWSINNLCKSERTFQVAIXLGRLXYFLTVKPNSLGKAVIIGVGALEFAGVSGRLVXRKLPYMFLRSIWDFNFVTSMVXYMFLRAKMAFIKLTGKYSMTGIVGHKSTGDRTSILKLLW

SEQ ID NO: 229357 - protein, 39 aa, Glycine max
  Clone ID: PAT_MRT3847_49134C.1.pep
FKQVVLILLVFPCLIMVLCLYVHILWLTVVGNSSTWKTK

SEQ ID NO: 229358 - protein, 70 aa, Glycine max
  Clone ID: PAT_MRT3847_49135C.1.pep
YISSYFPSHAPKLSLMELSVPTLNDKKYRTSSISKLNTKNCKSKINFALTIKHYLHLLATGGIKTNAYFH

SEQ ID NO: 229359 - protein, 44 aa, Glycine max
  Clone ID: PAT_MRT3847_49136C.1.pep
LKTFRTRTSYTAKSLDQLLGRNLIALGMYKQGTSIYPRTIRERL

SEQ ID NO: 229360 - protein, 415 aa, Glycine max
  Clone ID: PAT_MRT3847_49137C.1.pep
ALQIAKDFNLMTYFFSASGATSLSFCLTLPQLDKSVTSEFIIDATKRVSFPGCGVPFHVKDLPDPVVLCGRSSETYKAFLRVCQRLSLVDGVIINTFADLEEDALRAMEENGRELDLTEEISFSQHIHNGLQSESLSKEMSIFNTPPSIKQNDHEKVIDIEEREKAQAKANTPCVYYYPVGPIIQSESRSKQNESKCFAWLENQPPKAVLFVSFGSGGTLSLDQLNEIAFGLELSGHKFLWVVRVPNDVCSAYFVRQKDDPLGYMPCGFLERVKAKGQGLVVPSWAPQVEVLRHESTGGFLTHCGWSSVLEGVVHGVPMIAWPLYAEQRMNATTISDLLKVAVRPKVDCESGIVKREEVARVIKVVMKGDDESLQMRKRIEGFSVAAANAISEHGSSTMALSSLAFKWQSCSRKS

SEQ ID NO: 229361 - protein, 114 aa, Glycine max
  unsure (1)..(114): unsure at all Xaa locations
  Clone ID: PAT_MRT3847_49138C.1.pep
MADDKDEEGGFAAQKITIGVCVMEKKLFSAPMEQILQRLQAFGEFEVVHFGDKVILEEPIESWPVCDCLIAFHSSGYPMEKAEAYAAXRKPFLVNELEPXHLLHDRRXVYECLE

SEQ ID NO: 229362 - protein, 72 aa, Glycine max
  Clone ID: PAT_MRT3847_49139C.1.pep
HNCGGDGARAKIDAARTLGLPVIMIARPELPERQRVESVAEIEAEAWSSHLPRRIDPAADTAECELPTIPLG

SEQ ID NO: 229363 - protein, 42 aa, Glycine max
  Clone ID: PAT_MRT3847_4913C.1.pep
KDNRRGSPNKFYMLYFSMKIGRMKIFWYEIKYTLKNFTHEVT

SEQ ID NO: 229364 - protein, 50 aa, Glycine max
  Clone ID: PAT_MRT3847_49140C.1.pep
ELQLCRYVTRVQNDNTSRADSSTHLATVQSVHHSDGASGSTCQVPGKNQT

SEQ ID NO: 229365 - protein, 80 aa, Glycine max
  Clone ID: PAT_MRT3847_49141C.1.pep
MSIWKCCCDFVCSNSARFLWKSIPSSIKESQPEVTAVWKIGQKLWLRDYAGVHEAIRGFDWTQELQTLVAAFSGKTLTVF

SEQ ID NO: 229366 - protein, 55 aa, Glycine max
  Clone ID: PAT_MRT3847_49142C.1.pep
TKTLFWLILIKIYEHYLINIFSPFFFTFANISIIPNFTLGLLDVAILHIFHAVIV

SEQ ID NO: 229367 - protein, 94 aa, Glycine max
  unsure (1)..(94): unsure at all Xaa locations
  Clone ID: PAT_MRT3847_49143C.1.pep
RPHSRRVTTMPSKMASELLDFDMDRYVNPWLPHNRVGYLPAPISRFLGYRKGTYKEPPALVQWFSAFVGAFRGILLIGAIFKYAPGXVDKHPPI

SEQ ID NO: 229368 - protein, 156 aa, Glycine max
  unsure (1)..(156): unsure at all Xaa locations
  Clone ID: PAT_MRT3847_49144C.1.pep
ARENILGFSVGSLPFIYLSVPLFQEKPRPVHLRPIADRIKAELQSWKGNLLSFMGCVQLIISIIDGMLLXSFHLYSWPKALLIEMQTWTRNFIWTRGYFKEKTGYCWLKNCVPPGMKRALXLSALSRINEAASLKLAWQFVYSSDTWATFFKGLAS

SEQ ID NO: 229369 - protein, 106 aa, Glycine max
  unsure (1)..(106): unsure at all Xaa locations
  Clone ID: PAT_MRT3847_49145C.1.pep
AAFGIXIFSSLAFSSSIALDFFSMSSSSPTLSPNLCMFVRRHRSLSSSSSLTGSSSSRKAPSRTEESCRAESELPVSSSCSGRSCCGGVSSSDSELSSCSSAICLA

SEQ ID NO: 229370 - protein, 54 aa, Glycine max
  Clone ID: PAT_MRT3847_49146C.1.pep
AQQTMLTVSNGSPLNRVLISEFLSVPVHGAIGVCAVFRPAVNISGPAKAYFVSP

SEQ ID NO: 229371 - protein, 81 aa, Glycine max
  unsure (1)..(81): unsure at all Xaa locations
  Clone ID: PAT_MRT3847_49147C.1.pep
SXETLEXHXXXXDXXLXSRMATXAIRPFVKPXXLKPXTXXLLLQXXSXXXFEXEXHEISXHFREPDXKLKFENKREEEAIS

SEQ ID NO: 229372 - protein, 129 aa, Glycine max
  Clone ID: PAT_MRT3847_49148C.1.pep
AFSTINNWLWKFFIVMITPVLITQIGWGTYLLFAVLNACLFPVIYFLYPETAGRSLEEIDLIFAKGYIEKKSYVRADKELPLLDEFELATYAQQIGLNMGDEEAGSSDGSFKEKKRLEEDFLPQQGAQA

SEQ ID NO: 229373 - protein, 47 aa, Glycine max
  Clone ID: PAT_MRT3847_49149C.1.pep
GIYRYRDGDSLQESQTLLQLNKRPFLSRMICSLPHTTIKKLLDWHGV

SEQ ID NO: 229374 - protein, 76 aa, Glycine max
  unsure (1)..(76): unsure at all Xaa locations
  Clone ID: PAT_MRT3847_4914C.1.pep
PPSTLPSIRSTVTRTMKDATGDTVRXPLENCYLLCNINYNDFTLNXFQXASKDTPXTTKLIMTKNTLSYKAMQRTP

SEQ ID NO: 229375 - protein, 50 aa, Glycine max
  Clone ID: PAT_MRT3847_49150C.1.pep
SNQPFERTNQMFRKFPIVAESFFLKEVLPISLAEKIKTKKYKKKKKKERK

SEQ ID NO: 229376 - protein, 151 aa, Glycine max
  Clone ID: PAT_MRT3847_49151C.1.pep
IEMSIPSILDKTISPPGKHVTHASVFVQYTPYKPLDGDWQDHDYRESFAQKCFKLIDEYAPGFSTSIIGYDMLTPPDLEREIGLTGGNIFHGAMGLDSLFLMRPAKGWSNYKTPLRGLYLCGSGAHPGGGVMGAPGRNAARLVLQEVGERT

SEQ ID NO: 229377 - protein, 65 aa, Glycine max
  unsure (1)..(65): unsure at all Xaa locations
  Clone ID: PAT_MRT3847_49152C.1.pep
EFSSXSQLAAVETQLFPDHLLMQPSLDTTGTVLYIQGVNQTLNKVFCYILFLFHSIFTFEAHSDT

SEQ ID NO: 229378 - protein, 86 aa, Glycine max
  Clone ID: PAT_MRT3847_49153C.1.pep
GSHHLVSEIQLLIQVLSYPNIFLCNLSRLVVCPCSVICFLVCVLLRSCLKNVSFLFLFLLRFCSCSCFMCLSDFVSKKNLFEFCFK

SEQ ID NO: 229379 - protein, 77 aa, Glycine max
  Clone ID: PAT_MRT3847_49154C.1.pep
YIILINMINSTQVSSYYIVLSDERVIKADKSEYIQYRTLRFKHSTILCDLNGDTIQQLFLKHYGFVEFVNNFRALLV

SEQ ID NO: 229380 - protein, 140 aa, Glycine max
  unsure (1)..(140): unsure at all Xaa locations
  Clone ID: PAT_MRT3847_49155C.1.pep
FKLCFCQYSIDLLGGGIVVDTTGDWITLIQNYSISNLLRVAAWIKGCLMVKIVMSVNAAVKRSAWLSLVQVFLTNINSAKHFDACKWTKSEPHSWELILPIEVCRTNNGSEMWRCEWANQTXWHLCVLIDNAKQCTAFEI

SEQ ID NO: 229381 - protein, 71 aa, Glycine max
  Clone ID: PAT_MRT3847_49156C.1.pep
FGSRPDRATLRLTDTSCLFYTQNKYYSGEAQIQDRGVFYFLHITKYKQYQPHPQYLFISTYSHKFSVSHQL

SEQ ID NO: 229382 - protein, 58 aa, Glycine max
  Clone ID: PAT_MRT3847_49157C.1.pep
HKYIIILLKVWITNILGRPFNIDIQRFICFDQPPRLCKLLLKEFQFNLSGEKSETSNC

SEQ ID NO: 229383 - protein, 145 aa, Glycine max
  Clone ID: PAT_MRT3847_49158C.1.pep
FLGRRKIPLPEKKKYSAKKVAPKISGVLISRSPRHTGEPLPVGRTQFFLAPFHLPIFFFVNPLFWKILFFFFFFFLPILLIFLKTLFLLVFFFFFLLHNYILKKIKKKNKKGWLPKGGGGGGGGGRAGGGGGGGGGGGGGGGGVG

SEQ ID NO: 229384 - protein, 68 aa, Glycine max
  Clone ID: PAT_MRT3847_49159C.1.pep
LKSSLRIKCSQTDGNGSPAKRTALHDLVEKEGPIRWYHNLCRPVPDVLPLIASGGQGVPSHPAIFPKA

SEQ ID NO: 229385 - protein, 121 aa, Glycine max
  Clone ID: PAT_MRT3847_4915C.1.pep
GNQSSTTPTALTPAIHVHSRYRPPSLFTYRPCPLRTHMLTHLGFRFFLSLFLARVLRLQHHNTPAQQHPPPITRHGVINTLYTIRAVINLTFPLPCFTRSRVSRYYYRPSLSPPHCPFSYS

SEQ ID NO: 229386 - protein, 207 aa, Glycine max
  Clone ID: PAT_MRT3847_49160C.1.pep
AREKQLPKLVVGLLLIGAGLVLYTNRTERSAQLLQQPEVIATTVEEVSSTAKPLVRELQELPRRIKNIIASLPDQEVDEEEASLFDMLWLLLASVVFVPIFQKIPGGSPVLGYLAAGILIGPYGLSIIRHVHGTKAIAEFGVVFLLFNIGLELSVERLSSMKKYVFGLGSAHCCGTWIEFRKGWSYCCCPRDLGTKSSTSSCRACSG

SEQ ID NO: 229387 - protein, 46 aa, Glycine max
  Clone ID: PAT_MRT3847_49161C.1.pep
FLESHIAIDSITKPSNTLKSSPNSIVTLSLSRDYYCIQLNLRIVNS

SEQ ID NO: 229388 - protein, 78 aa, Glycine max
  unsure (1)..(78): unsure at all Xaa locations
  Clone ID: PAT_MRT3847_49162C.1.pep
GNDKNEIEICLESGDNAVETDQGLHMVYMHAGTNPFEVINQAVKAVEKHMQTFLHREKKRLPSXLDWIGWCTWDAIYT

SEQ ID NO: 229389 - protein, 358 aa, Glycine max
  unsure (1)..(358): unsure at all Xaa locations
  Clone ID: PAT_MRT3847_49163C.1.pep
MLFELSTFSIELRCFKNWINPSSFGFTIANGQPNQANRTAPSQGISRYFIVKSCNRENLELSVQQGVWATQRSNESKLNEAFDSVENVILVFSVNRTRHFQGCAKMTSKIGGSVAGGNWKYAHGTAHYGRNFSVKWLKLCELSFHKTRHLRNPYNENLPVKISRDCQELEPSIGEQLASLLYLEPDSELMAISVAAESKREEEKAKGVNPDNGGENPDIVPFEDNEEEEEEESDEEEESFGHGVGPAGQGRGRGRGMMWPPHMPLGRGARPMPGMQGFNPVMMGDGLSYGPVGPDGFGMPDXYGVGPRGFAPYGPRFSGDFGGPPAAMMFRGRPSLPGMFPGGGFGMMLIPGPGPFLL

SEQ ID NO: 229390 - protein, 66 aa, Glycine max
  Clone ID: PAT_MRT3847_49164C.1.pep
CGVCYSSSSSKMLRKLMRLLLLLMFFLCFSYVLSVSAIPATRTQNLKGEEEEFSALPSLTRVSAPT

SEQ ID NO: 229391 - protein, 186 aa, Glycine max
  Clone ID: PAT_MRT3847_49165C.1.pep
DVLRIGLIPASRFLQAISVAAESKREEEKAKGVNPDNGGENPDIVPFEDNEEEEEEESDEEEESFSHGVGPAGQGRGRGRGMMWPPHMPLGRGARPMPGMQGFNPVMMGDGLSYGPVGPVGPDGFGMPDLFGVGPRGFAPYGPRFSGDFGGPPAAMMFRGRPSQPGMFPSGGFGMMMNPGRGPFMG

SEQ ID NO: 229392 - protein, 165 aa, Glycine max
  Clone ID: PAT_MRT3847_49166C.1.pep
GCEKKQKGTAARRRQKGTAARRTTERVRLRERRQEGYRPARKTTRTQTRLLPSPARPPNGATPPAFIHRSHGGDDLPYQRFVSKTRIFDSLPHRHGSRCALPHRRQRDRLLVAHSALHSHKANTSFELTRSWWRPKSSKLNIFTSFRRALMSSVAILLSEFSGAN

SEQ ID NO: 229393 - protein, 98 aa, Glycine max
  Clone ID: PAT_MRT3847_49167C.1.pep
EMGVVLFRWVLPLTLLLTCALRFQSDDRLLYYQEFGIEGGLASFDSDSDPSRTSNMGKDFSDSSTDSIYLLPSRRRFRRRRILRTLATSPRALTRGAT

SEQ ID NO: 229394 - protein, 138 aa, Glycine max
  Clone ID: PAT_MRT3847_49168C.1.pep
MMFAKKRSRRGVVSSLPSSNAKKLLRLPHVFAKILELPFPSEDDVSVEETPQFFRFVASCNADGGVRALAIDIFPGITKIVIKRMDGGDVAVPGQQQQQVPSGFGLWRFRLPPWTQPEMVTAVCSGGKLMVTVPKILS

SEQ ID NO: 229395 - protein, 28 aa, Glycine max
  Clone ID: PAT_MRT3847_49169C.1.pep
QIIYHGRKMLEFFQLKEGPPTSGDSIRS

SEQ ID NO: 229396 - protein, 95 aa, Glycine max
  Clone ID: PAT_MRT3847_4916C.1.pep
EREGIRDLVFDLLINSLEPEHKIRMSMILWCIWKRRNQKLWESAEILLQISICSALQYYEEWSRARNAHHQQRSHQPLAQVSTSLGCAYIRHEFK

SEQ ID NO: 229397 - protein, 96 aa, Glycine max
  Clone ID: PAT_MRT3847_49170C.1.pep
EKKIGERTPNRPLGEFLFSKQTQKGWGNPPNCGPHPQGVPPGKSPGWFQVGPSPSPLKKLRLFFKPKITGGKGPRDVGYPNLGPHVFGVVQEPSRQ

SEQ ID NO: 229398 - protein, 72 aa, Glycine max
  Clone ID: PAT_MRT3847_49171C.1.pep
MYGGPHKSVSSGLGALDDTTAVCLAKVDSDYKESDIAIARATYHAERAATEQHIRAIFLAISATRPSADESY

SEQ ID NO: 229399 - protein, 54 aa, Glycine max
  Clone ID: PAT_MRT3847_49172C.1.pep
ALDVGHFLLGIFGNASALVLFFAPVYALHSCFTALCDHNQEDYRVQLHREVLGH

SEQ ID NO: 229400 - protein, 71 aa, Glycine max
  Clone ID: PAT_MRT3847_49173C.1.pep
TPFTPTSVNTCCSVIMLDEAHERSISTDILLGLLKKIQRRRPELRLIISSATIEAKSMSDFFRMRKKRREP

SEQ ID NO: 229401 - protein, 62 aa, Glycine max
  Clone ID: PAT_MRT3847_49174C.1.pep
DGKVPQITEKLLRITYLLPLACCNSCWLFLTQACSRREQKLLNISVCYIFKRSSIWTCSRIY

SEQ ID NO: 229402 - protein, 25 aa, Glycine max
  Clone ID: PAT_MRT3847_49175C.1.pep
SIRDPSMDKGEKHDSSQILIVSHYW

SEQ ID NO: 229403 - protein, 104 aa, Glycine max
  unsure (1)..(104): unsure at all Xaa locations
  Clone ID: PAT_MRT3847_49176C.1.pep
XSGKRGLFRAYSAPPRARCAAAVHRREYDRGAAEVVRRKPLQAGSRRAVSSLSTITVAVSPIFAGRMRICLLGSPAIGHLDTIGWPLTMEIVVLSLQAWVTIPT

SEQ ID NO: 229404 - protein, 52 aa, Glycine max
  Clone ID: PAT_MRT3847_49177C.1.pep
VKGNDGDRFQLLCQWLKHRQRSSDLIIATTTNNNTFEEQFHMPLKNNKIKEN

SEQ ID NO: 229405 - protein, 163 aa, Glycine max
  Clone ID: PAT_MRT3847_49178C.1.pep
GETGHYFAMKAMEKGVMLNRNKVHRACTEREILDMLDHPFLPALYASFQTKTHVCLITDYCSGGELFLLLDRQPAKVLREDAVRFYAAEVVVALEYLHCQGIIYRDLKPENVLLQSSGHVSLTDFDLSCLTSCKPQLLVPVINEKKKAQKGPHAPIFMAEPMR

SEQ ID NO: 229406 - protein, 113 aa, Glycine max
  unsure (1)..(113): unsure at all Xaa locations
  Clone ID: PAT_MRT3847_49179C.1.pep
MLCNGLIHCHRAGENMGAPFTXGVKSIAGFPTRKTTKDITSIATNRGRVRCMTSITTHLDKIYFKTISYLPHLDDAHLGXEFXYLLTKLXIGCLEFDLEHGFLYLLHNTATGY

SEQ ID NO: 229407 - protein, 283 aa, Glycine max
  unsure (1)..(283): unsure at all Xaa locations
  Clone ID: PAT_MRT3847_4917C.1.pep
MIKFKLYLRISYNGLCDHMEKDIFLDVCCFFIGKDRAYVTEILNGCGLHADIGITVLMERSLVKVAKNNKLGMHPLLRDMGREIIRESSTKKPRKRSRLWFHEDSLNVLTKNTGTKAIEGLALKLHSSSRDCFKAYAFKTMKQLRLLQLEHVQLTGDYGYLPKHLRWIYWKGFPLKYMPKNFYLGGVIAIDLKDSNLRLVWKDPQVLPWLKILNLSHSKYLTETPDFSKLPSLEKLILXDCPSLCKVHQSIGDLQNLLWINLKDCTSLSNLPREIYKVEIFEN

SEQ ID NO: 229408 - protein, 256 aa, Glycine max
  Clone ID: PAT_MRT3847_49180C.1.pep
CARRLGQEFHAYVVKTKSYSKLVPVQSSLIDMYCKCGDMISARRVFYGSKERNVVCWTALMSGYAANGKLEQALRSTIWMQQEGFRPDVVTLATVLPVCAQLRALEQGKQIHAYALKHWFLPNVSVASSLMTMYSKCGVVEYSRRLFDNMEQRNVISWTAMIDSYIENGYLCEALGVIRSMQLSKHRPDSVAIGRMLSVCGERKLVKLGKEIHGQILKRDFTSVHFVSAELINMYGFFGDINKANLVFNAESVNVL

SEQ ID NO: 229409 - protein, 66 aa, Glycine max
  Clone ID: PAT_MRT3847_49181C.1.pep
KDERIPLLSTIYYAAALTLVESFWDFIYVMKEAFFMLQAFLRERIAYIPDSVLTLHISAPMEFGQS

SEQ ID NO: 229410 - protein, 129 aa, Glycine max
  unsure (1)..(129): unsure at all Xaa locations
  Clone ID: PAT_MRT3847_49182C.1.pep
XXXXXXXXXXXXXXXXXXXXXXXXXXXXXXXXXXXXXXXXXXXXXXXXXXXXXXXXXXXXXXXXXXXXXXXXXXXXXXXPLHPEHPRRTPHPGRRHCRTVTHLKKTNQTEPIVTFFFLQGGVSHDLVGG

SEQ ID NO: 229411 - protein, 40 aa, Glycine max
  Clone ID: PAT_MRT3847_49183C.1.pep
SSDVLHQYITSHHVNIGNKLGKSFVVSHPSVSRYHFHTTY

SEQ ID NO: 229412 - protein, 80 aa, Glycine max
  Clone ID: PAT_MRT3847_49184C.1.pep
TTKRRGKKKTNSWKLKYPLHIFSIDSKLKLSLYPKLGLVHHLPEQKTNAMQHKKTLFNHVFFLSPQFDYWSKCFVTCVSQ

SEQ ID NO: 229413 - protein, 47 aa, Glycine max
  Clone ID: PAT_MRT3847_49185C.1.pep
SKLVGSRVNLSMHCLSKLNVKTLKKNKGFTLSLDKQCIDKLTLVQNW

SEQ ID NO: 229414 - protein, 59 aa, Glycine max
  Clone ID: PAT_MRT3847_49186C.1.pep
HTESKVKQYEPINKAMVMVSYTLWNPECGCLSRPMASIVARSHMRWASPSNLSNGHFLP

SEQ ID NO: 229415 - protein, 382 aa, Glycine max
  Clone ID: PAT_MRT3847_49187C.1.pep
MLTSANIKLQLFPINEGTRIGLEKDGHNPYLELTLRGRKKICSILKHLGKKWGSSSIAKGELMLFPYNIMENLSGCRRWTINDSDTTASAVYTAVGSPALFRLKYGWFYMLEPGSFGIPSTPTPDKPDVAGSGNANLEETLCGERDKVRISKEYKATEVGNAASETVSQKVENAAVDPTDNEPRTRISSSLQQSSSPWVDSLSNISIGGLLSEASLFGGLDPKSFAGIQPCDITSDSLDAFIAAAQINNCPVPRLPADDLHTSILDAEETCHAFPLRKLSSPTDVQAACGKDYSAVCSQDVSSNLLKFSNADKVNDQDGASQNPPSGKTQTDLLLSSRPYDDDRSLGLTGINWNDSMGPFDLGMPAQKLNGGDSLSIGGFVK

SEQ ID NO: 229416 - protein, 124 aa, Glycine max
  Clone ID: PAT_MRT3847_49188C.1.pep
KKKKALASHVETLMPFSLHLPTNHPSWNLPNPKQPTPTKQNLIFRRFPVFSSLRTSLDCVSDGGVEKGSSSKPIRLPFVVRSPASVSRFFWTGNCLQVVSVDGGGSAASDVSFDDRWLRAFGSV

SEQ ID NO: 229417 - protein, 667 aa, Glycine max
  unsure (1)..(667): unsure at all Xaa locations
  Clone ID: PAT_MRT3847_49189C.1.pep
MITWGDFYXVMSAVIPLYVAMILAYGSVRWWKIFSPDQCSGINRFVAIFAVPLLSFHFISLNNPYAMNFRFIAADTLQKIIMLFALAIWTNFSANGSLEWMITIFSLSTLPNTLVMGIPLLIAMYGEYSGLLMVQVVVLQCIIWYTLLLFLFEYRGAKLLIMEQFPETAASIVSFKVDSDVVSLDGRDFLETDAEVGDDGKLHVTVRKSNASRRSFMMTPRPSNLTGAEIYSLSSSRNPTPRGSNFNHADFYSMMGYAPRHSNFGAADLYSVQSTSRGVTPRPSNFEENGAPAAATTQQQQQAISSPRXFGFYPAVQTVPAAYPAPNPEFSSSGLTKSVSKNSQTQPQPQPQPQIQAQVAPPPQPQVAQPTNSGNKANHDAKELHMFVWSSSTSPVSEAGGLHVFSGADFGASDQSGRSEQGAKEIRMLVADDHPQNGETNKAAAEGEFGGEELKFPGKEGEQADEEGEKAGPGGLNKLGSSSTAELHPKSAVAVAGKHMPPASVMTRLILIMVWRKLIRNPNTYSSLIGVIWSLVAFRWHVQMPKIIEKSISILSDAGLGMAMFSLGLFMALQPKIIACGNSVATFAMAVRFLTGPAVMAAASIAVGLRGTLLRVAIVQAALPQGIVPFVFAKEYNVHPAILSTAVIFGMLIALPITLLYYILLGL

SEQ ID NO: 229418 - protein, 140 aa, Glycine max
  Clone ID: PAT_MRT3847_4918C.1.pep
MGLVELFGVASMPVIKVLIITAVGLLLALDNVNLLGKDARIQVNHLVHYVFNPALVGGNLADTITFENVVLLWFMPVNILLTFIIGSALGWILIKLTRAPKHLEGLILGVCSAGSIFSSKLMNPGSLTCYLCYVFTVYFP

SEQ ID NO: 229419 - protein, 271 aa, Glycine max
  unsure (1)..(271): unsure at all Xaa locations
  Clone ID: PAT_MRT3847_49190C.1.pep
PKVAFMFLTRGPLPMLPLWERFFHGHSSLFSIYIHAPPRCPLNVSHSSPFYLRHIPSQDVSWGTFTLADAERRLLANALLDFSNERFVLLSESCIPVYDFPTVYRYLTHSSLSFVESYDEPTRYGRGRYSRHMLPHIQLRHWRKGSQWFELNRALAVYIVSDTKYYSLFRKYCKPACYPDEHYIPTFLHMFHGSLNSNRTVTWVDWSMLGPHPATFGRANITAGFVQSIRNNGSLCPYNSEXGSMCYLFAGKFDASALEALVNLCSEVMNL

SEQ ID NO: 229420 - protein, 314 aa, Glycine max
  Clone ID: PAT_MRT3847_49191C.1.pep
MSKTNVRRHALEKCRSVKETQKILNHSFFTRNLKKVYPIGLQKSTSSLSLSSISLSLSQNSNDSSQADSLTPLDEKISLALRLISPRERREPTIAASNKPLQQQHQQPPHTTEPGELKRCNWITKSCDKAYIEFHDECWGVPAYDDNKLFELLAMSGLLMDYNWTEILKRKETLREVFAGFDANTVAKMKEKGIREIASNKALSLADSRVMCIVDNAKCVMKIVKECGSFSSYIWGYVNHKPIISRYRYPRNVPLRSPKAEALSKDLVKRGFRFVGPVIVHSFMQAAGLTIDHLVDCYRHSECVSLAERPWRHI

SEQ ID NO: 229421 - protein, 62 aa, Glycine max
  unsure (1)..(62): unsure at all Xaa locations
  Clone ID: PAT_MRT3847_49192C.1.pep
MVGKRTAGARVACSPDSDXDAFSHNPTDGSFAPLAYQASAMTNCANQRFLSYXVELVLRHCH

SEQ ID NO: 229422 - protein, 96 aa, Glycine max
  Clone ID: PAT_MRT3847_49193C.1.pep
IQFFITRVQGMTFFWPSVGARVCGFLKKRGVFKGLGHGGIPFFFPGFPVGKWCSRFVAKVGGLGFLFLGMCICCLCKRNSFLNKGFCGQKRNLLGF

SEQ ID NO: 229423 - protein, 65 aa, Glycine max
  Clone ID: PAT_MRT3847_49194C.1.pep
PRNVPLRSPKAEALSKDLVKRGFRFVGPVIVHSFMQAAGLTIDHLVDCYRHSECVSLAERPWRHI

SEQ ID NO: 229424 - protein, 93 aa, Glycine max
  Clone ID: PAT_MRT3847_49195C.1.pep
AAELCMVVVSAPMEHAPITYGQVTNSLINCIRYRQNGGTPPWGCCNGVMSLNAVGRTTDRPTDMRASCLMSAAILISCFKAQQQPASTPPRKC

SEQ ID NO: 229425 - protein, 117 aa, Glycine max
  Clone ID: PAT_MRT3847_49196C.1.pep
GITVFAPADDMVMNRIGDFGEYPSFFRRHVVPCRLLWNDLVDFGDGSELPTFLEGFAINITRSDGVLILNGVRVFFPDVFFNDRVVVHGVSDVLAAQDNALRIDVDDEEILFDPSEF

SEQ ID NO: 229426 - protein, 85 aa, Glycine max
  unsure (1)..(85): unsure at all Xaa locations
  Clone ID: PAT_MRT3847_49197C.1.pep
PMIAFXXXXXXXXXXXXXXXXXXXXXXXXXXXXXXXFXFFXXXXXXXFGXFGCFFFFFFFFFFFFFFFFLLCKFIQPQTLLIHHF

SEQ ID NO: 229427 - protein, 38 aa, Glycine max
  Clone ID: PAT_MRT3847_49198C.1.pep
IFFFFFFFYIFFFFFFKKKKKKKKINLKIKKKKKKKKK

SEQ ID NO: 229428 - protein, 113 aa, Glycine max
  Clone ID: PAT_MRT3847_49199C.1.pep
TLQSTTAPFLDHFLSCFLCFQRAPFTPLNFTLYSPFFVSGLTQFNLIDQWTLIYHLYYRPRYNPVSLTLIVLFPLHQPSTCDMRPRMLTTGCQPRPTKDSPHQRRKWAVMATK

SEQ ID NO: 229429 - protein, 80 aa, Glycine max
  Clone ID: PAT_MRT3847_4919C.1.pep
PQREPLKPHETSDGQVQLQKENVPPQSYTPLKRAWMDIYTLISEQSKFDDRMNAQARRVELTTEPDSPDLSNRANRADFV

SEQ ID NO: 229430 - protein, 166 aa, Glycine max
  Clone ID: PAT_MRT3847_491C.1.pep
FHVHDSFPRGSNASFIALIPKTKHPQSFDDYRPISLIGCMYKVIAKLLANRLRQVISGLIDERQTTFIKNRHILHDILVLNEVIEEACRSKRPAMVFKVDFEKAYDSVSWAFLDYMLQRMGFCPKWRHWISACLNSASISILVNGSPTKEFAPTRGLRQGDPLAPL

SEQ ID NO: 229431 - protein, 199 aa, Glycine max
  Clone ID: PAT_MRT3847_49200C.1.pep
AREGLTGLMRTTISKNMFHSYQVGSQKEEINILQYADDTLFFGSATTDNIRVLKSILRIFEMVSGLKINYAKSQFGCMGKSEAWCREAALFLNCGQLDIPFSYLGIPVGTTSKSWNTICLPKNKWELGIKDLSKFNEALLGKWGWDLANNQDQLWARILMSKYGGWNALCYGRNRADFSPWWKDLRYVFQQHHRNGIFN

SEQ ID NO: 229432 - protein, 51 aa, Glycine max
  unsure (1)..(51): unsure at all Xaa locations
  Clone ID: PAT_MRT3847_49201C.1.pep
NTVAWPRGKHFRAGDARACNYSPGTHNLVAVNKAXSDSWKSPRGTTVYKSR

SEQ ID NO: 229433 - protein, 65 aa, Glycine max
  unsure (1)..(65): unsure at all Xaa locations
  Clone ID: PAT_MRT3847_49202C.1.pep
DRWGYLGVPGRXRLACLVLLFGQGLRLGGXPGLWWXLGQIXVXXGFSIGSLPVTIRSEHLGAVLG

SEQ ID NO: 229434 - protein, 76 aa, Glycine max
  Clone ID: PAT_MRT3847_49203C.1.pep
EIEFFHCICVLERLGLGVMKLRCQFLLNFGKGTQGRSVFLVTIMPYWESTRREGASFPYTFHVFLCHKRSRITILY

SEQ ID NO: 229435 - protein, 82 aa, Glycine max
  Clone ID: PAT_MRT3847_49204C.1.pep
PLFHVTERHIKHTPWTLFLHNRQTAPTTTASLSLYCKHFINPHFSTISLLHSFTYPYISLTGSNTADAPAEPTGRAGPTNLS

SEQ ID NO: 229436 - protein, 250 aa, Glycine max
  unsure (1)..(250): unsure at all Xaa locations
  Clone ID: PAT_MRT3847_49205C.1.pep
IRLEGRLRFSKKKTMKQRYGLRRRVSSQCSNGSLDEVDNMPEPALSDRSFANPTFQAGTIEEAWFDSAAVFDSDCDDDYQSVNDDVISLNGTETNCGVSTDQMHKPGELSKRHSAHISESVRNSDAEFFDIDATNSQCKRSGRVNEANEPVFLDEFSSVDAGSKWDDGDLHNCGILPCNCLSCLSSTDQRSLXSPPNSTRKKDLMKHSFKGSGNATLFSSKTILQRPLAGSQVXPFCPIEKKMLDCWSRI

SEQ ID NO: 229437 - protein, 129 aa, Glycine max
  Clone ID: PAT_MRT3847_49206C.1.pep
DGYLEIKDRSKDVIISGGENLSSVEVEAVLYDHPAVNEVAVVARPDEFWGETPCAFVMLKEGLVAPPSEKEVVEFCRERLPHFMVPKTVVFKEALPKTSTGKIQKHVLRMDAQAMGSLAAPQPTIPSRM

SEQ ID NO: 229438 - protein, 100 aa, Glycine max
  Clone ID: PAT_MRT3847_49207C.1.pep
VPTSEPVAEPVIMATNVEVHVITNALQTTANIPDERHDELADSALEIFIQASTVFQMHSHKSVRLAPVYQKLLQTMKHYLEALHDECTTLALLQFLSHFL

SEQ ID NO: 229439 - protein, 40 aa, Glycine max
  Clone ID: PAT_MRT3847_49208C.1.pep
WPNTAITSRIMVSHSVYDKTPCRSVIQRFMLYPSVVFSQL

SEQ ID NO: 229440 - protein, 68 aa, Glycine max
  Clone ID: PAT_MRT3847_49209C.1.pep
GLLSISRAYWGGGVGLFGRYEYGHICRVDSRAGTQYWGIRIEDIPYWCGRIDVTKSHHTKNKRLTSRY

SEQ ID NO: 229441 - protein, 80 aa, Glycine max
  unsure (1)..(80): unsure at all Xaa locations
  Clone ID: PAT_MRT3847_4920C.1.pep
PCHCLVASALRITILLLLXASVIVACFNRLLETLMNDFLLWVDHYRGLCGPLVLAVAYIPLTVMAVPSSVLTQGGGYPFW

SEQ ID NO: 229442 - protein, 132 aa, Glycine max
  Clone ID: PAT_MRT3847_49210C.1.pep
TRPSTRPPTRPPTRAMVLPGVVGFKLSGKLQDGVTTTDIVLTMTQMLRKHGAIGKFVEFYGVGVGELSLPARATIANMSPEYGATMGFFPVDQVALDYLKLTGRSDETVHFTMCRLLFYHTRSIILICIYFY

SEQ ID NO: 229443 - protein, 205 aa, Glycine max
  Clone ID: PAT_MRT3847_49211C.1.pep
MQICGDTRHCHVLHLIHSGIPQNLQLLLEDPTVLKVGAGIDGDAVKVFRDYNIGPVLFSSGSGSGSRGKGGGINPNLCTEWLNTKPSKSVLFVCFGSMNTISALQMMELGKALERCGKNFVWVVRPPIGFDINSEFREGEWLPEGFVERVKESGKGLVVHDWAPQVEILSHFAVSAFLSHCGWNSVLESLSQVVPFLGWAMAAEQ

SEQ ID NO: 229444 - protein, 161 aa, Glycine max
  unsure (1)..(161): unsure at all Xaa locations
  Clone ID: PAT_MRT3847_49212C.1.pep
MRGLCGLGVELTACVLFALHPFDPYLIPNPTIQPPQSHPHIYAYMNAYRTSYGFKAHPKGAQGLAERPTNFSQRWSKTEDRSHWQATILGPAARPHAEGVFLVTIHLPPEYPFKPTPVGLRTXVIHPHINSHGRIGPDILNEHGSPALTISKVLIPICSLL

SEQ ID NO: 229445 - protein, 71 aa, Glycine max
  Clone ID: PAT_MRT3847_49213C.1.pep
FAHRPIAFDLASFHHIHMVYSQVPHDTSHFSVRASQFCYMECQFLIRYLYAQMYSHCSLRRILHYLLPLLL

SEQ ID NO: 229446 - protein, 94 aa, Glycine max
  Clone ID: PAT_MRT3847_49214C.1.pep
VLGNPPSTKDTPFFGIMFTFFWVAKTLCFMSGRVFGPPGVFCLPTPLKKKGSFFPFPQVQVFWPCGGGVTPPGASFFFFFFKRWEGGRFCIKFG

SEQ ID NO: 229447 - protein, 62 aa, Glycine max
  Clone ID: PAT_MRT3847_49215C.1.pep
IFSTCPGQQTARTISIHCLYTSNHTYSRFVGGLSIKRKILLFLSILPFFLFYLFMISCLKPH

SEQ ID NO: 229448 - protein, 216 aa, Glycine max
  unsure (1)..(216): unsure at all Xaa locations
  Clone ID: PAT_MRT3847_49216C.1.pep
MNVTVDSALFAFLFPSAWEIKVAVAASVFVILAYRFFAVRTGYADPSLTDNSAGDVADEKDKMGQSKVDSQASLAYLIKLELLAAKNLVGANLNGTSDPYAIITCGNEKRFSSMVPGSRNLLCRFSFNFLLSELMXQINVTIYDWDIIWKSAVLGSVTVPVESEGQTGAVWHTLDSPSGQVIPAVRRNFVWFQSFCLSFLVLILFYVSKISFLICN

SEQ ID NO: 229449 - protein, 92 aa, Glycine max
  unsure (1)..(92): unsure at all Xaa locations
  Clone ID: PAT_MRT3847_49217C.1.pep
EGLLDRSEIPEYLTGEVPGDYGYDPFGLNHKPEDYAQYHAIELIHARWAMLGASKFIIPDGLSKYGAYCGPKSFXFKTGALVLDGGXLSYFG

SEQ ID NO: 229450 - protein, 335 aa, Glycine max
  Clone ID: PAT_MRT3847_49218C.1.pep
MALVTTNPTINEGPLFAEVDMGSDFNAPTVRATVVQASTIFYDTPATLDKAERLLAEATSYGSQLVVFPEAFVGGYPRGSAFGLSIGNRTVKGREEFRKYHSAAIDVPGPEVDRLAAMAGKYKVHLVMGVIERDGYTLYCRKLMPTALERVIWGFGDGSTIPVFETPVGKIGAAICWENRMPLLRTAMYAKGVEIYCAPTADSRDVWQASMTHIALEGGCFVLSANQFCRRKDYPPPPEYVFAGTEEDLTPDSVVCAGGSVIISPSGAVLAGPNYDGEALISADLDLGEIARAKFDFDVVGHYSRPEVLSLIVKDHPTNPVTFTSTSTKIEDKTK

SEQ ID NO: 229451 - protein, 273 aa, Glycine max
  Clone ID: PAT_MRT3847_49219C.1.pep
MSILPKGDSVQIREVWNDNLEEEFALIREIVDEYNYVAMDTEFPGVVLRPVGNFKNINDYNYQTLKDNVDMLKLIQLGLTFSDENGNLPTCGTESTCIWQFNFREFNISEDIFASDSIELLRQCGIDFKKNSEKGIDVNRFGELLMSSGIVLNDAVHWVTFHSGYDFGYLLKLLTCRSLPETQAGFFDLIKMYFPMVYDIKHLMKFCNSLHGGLNKLAELLEVERVGVCHQAGSDSLLTSCTFRKLRDAFFSGSTEKYAGVLYGLGVESGQTN

SEQ ID NO: 229452 - protein, 63 aa, Glycine max
  Clone ID: PAT_MRT3847_4921C.1.pep
VREPVEQLPMEEDEILSPREEEESIDEVGSWYLTVIGLVWFHFISSSCHANFLHFLYYARFDF

SEQ ID NO: 229453 - protein, 145 aa, Glycine max
  Clone ID: PAT_MRT3847_49220C.1.pep
GYPRGSAFGLSIGNRTVKGREEFRKYHSAAIDVPGPEVDRLAAMAGKYKVHLVMGVIERDGYTLYCTVLFFDSQGHYLGKHRKIMPTALERVIWGFGDGSTIPVFETPVGKIGAAICWENRMPLLRTAMYAKGVEIYCAPTADAR

SEQ ID NO: 229454 - protein, 73 aa, Glycine max
  Clone ID: PAT_MRT3847_49221C.1.pep
RRDAPSVGWVYSGSHNFSAAAWGRQISNPFRTKADRPKKEDPSVNYGLHICNYELGIIFTFPPTENNGCLEVK

SEQ ID NO: 229455 - protein, 143 aa, Glycine max
  unsure (1)..(143): unsure at all Xaa locations
  Clone ID: PAT_MRT3847_49222C.1.pep
MSILPKGDSVQIREVWNDNLEEEFALIREIVDEYNYVAMDTEFPGVVLRPVGNFKNINDYNYQTLKDNVDMLKLIQLGLTFSDENGNLPTCGTESPCIWQFNFREFNVSEDIFASDSIELLRQCGIDFKKTXENGIDVNRFRE

SEQ ID NO: 229456 - protein, 81 aa, Glycine max
  Clone ID: PAT_MRT3847_49223C.1.pep
VCAGGSVIISPLGAVLAGPNYDGEALISADLDLGEIARAKFDFDVVGHYSRPEVLSLTVKDHPTNPVTFTSTSTKIEDKTK

SEQ ID NO: 229457 - protein, 39 aa, Glycine max
  Clone ID: PAT_MRT3847_49224C.1.pep
MVNKRKCQRLQLSFYERWWGTSLEQFLISKNTKEGFIHK

SEQ ID NO: 229458 - protein, 87 aa, Glycine max
  Clone ID: PAT_MRT3847_49225C.1.pep
ISTALLRFEAPPTQILFRSGGFDCDSHSAARICSSETSILPKGDSAQIREVWNDNLEEEFALIREIVDEYNYEAMDTEFPGVVLRPW

SEQ ID NO: 229459 - protein, 196 aa, Glycine max
  Clone ID: PAT_MRT3847_49226C.1.pep
ISVGPWGKVSPKPFLPGEPPKKGVVSTLAMGWREHRQGNPLVWFPRAETKVKGVKNHFKGGQKRGFLNPGFLGWAPKSPKGEGFFRGEKVGWFGQAPAPFVGPPRSAMVLRFKGAKVGPKIPPPQDPHFNLFREKPKTPNFWPFFGGLGKKPTPFLVCLKKGTNHGGSRVITGFFFKPGVFFPPKKKNKKKGPFFS

SEQ ID NO: 229460 - protein, 64 aa, Glycine max
  Clone ID: PAT_MRT3847_49227C.1.pep
LSTRSIHYAQVINDLLIKLDKFPSNLSPMFMIKPIQFEKDYFTYYHMDVIVRLSNMRARNFSIT

SEQ ID NO: 229461 - protein, 57 aa, Glycine max
  Clone ID: PAT_MRT3847_49228C.1.pep
TRRVHERKPASFLRISHTIINEDDYLVRDETIRINLTRVKKVKTEIRDEIKKHNLVK

SEQ ID NO: 229462 - protein, 111 aa, Glycine max
  unsure (1)..(111): unsure at all Xaa locations
  Clone ID: PAT_MRT3847_49229C.1.pep
MTDEVVLLDFWPSPFGMTVTIALAGEGIEYEDYEHDLMNMSRLILXVNPVHKRHAGLIHNGKLILEFLIAVLYIAEVWNDRNPLLPSYSYHRAHATFCADYVDIKIRDLGK

SEQ ID NO: 229463 - protein, 415 aa, Glycine max
  unsure (1)..(415): unsure at all Xaa locations
  Clone ID: PAT_MRT3847_4922C.1.pep
MGLVELFGVASMPVIKVLLITAVGLLLALDNVNLLGKDARIQVNHLVHYVFNPALVGGNLADTITFEXLVLFWFMHVNILITFIISSGLGWILIKLTRAPKHLEGLIMGVCSAGNLGNLPIIIIPAICKDKGSPFGDSNVCYQYGMAYASLSMAVGAVYIWTYVYNIMRVSASVVPKDAYRTSSFRLEASGEFLEFLPEEESSEPENPSKDNMDDYTLLLSSIESEENVKLPVSAKIKHQIGKLLVNSNFRAIFSPATLGAIVGFIVGVVPQIRKLMIGGDASLHVIQDSVTMVGEAAVPVITLIMGANLLKGLKGANTSFWTILGIIVVRYIFLPILGILVIKGATQLGLVQPDPLYQFVLLLQYALPPAMAIGTIAQLFGAGEGECSVIMLWTYALASVAVTFWTTYFMWLVA

SEQ ID NO: 229464 - protein, 52 aa, Glycine max
  Clone ID: PAT_MRT3847_49230C.1.pep
DTEDMLGILRPGYQTTIEVSSSLSRFMNHEQQWKGACLMVFMRLIACYVRLV

SEQ ID NO: 229465 - protein, 60 aa, Glycine max
  Clone ID: PAT_MRT3847_49231C.1.pep
PPLYYKFLGGGGWAVHVPEKLHVSLYYVPDVGFIKFFLGYSRLSPSLDKSKHLMASLRCG

SEQ ID NO: 229466 - protein, 66 aa, Glycine max
  Clone ID: PAT_MRT3847_49232C.1.pep
FASKVRLGPVGGEKILGLGPLPDFGPQGLESLKPGPHSSIGRGVHFAPPELTRFSPPGLGGSGIFL

SEQ ID NO: 229467 - protein, 37 aa, Glycine max
  Clone ID: PAT_MRT3847_49233C.1.pep
GLNRSAKRSSNLNFNHYVRNSPDLDAPPPFCRLLAAV

SEQ ID NO: 229468 - protein, 86 aa, Glycine max
  Clone ID: PAT_MRT3847_49234C.1.pep
DATVDQNSGHSKLKITIAREPDLKTGDRAQRIRPKPAAQAEVVTVAVARFKARALNRKIINAPSLPTSKRSTRRWPKCIRFHIRTH

SEQ ID NO: 229469 - protein, 185 aa, Glycine max
  unsure (1)..(185): unsure at all Xaa locations
  Clone ID: PAT_MRT3847_49235C.1.pep
FNFIILYPIYFNFLFFFFEITPEKNPQLRDLDIFLRIGDMNKGALLLPHFNSKAIVILAINEGDANIELGGLKEQQQEQQQEEQPAEERKYRAETSEQDICVSPARDPGVDNATANLKCVAMGMNAENNQRNFRAGAQDTVISQRPRQGQELAFTWAAQAVEKLMKNQRESXLADAQPKKKEEGD

SEQ ID NO: 229470 - protein, 55 aa, Glycine max
  Clone ID: PAT_MRT3847_49236C.1.pep
YSAANRSKLGSARDFPVATMYHVGQSIEFRWHDTIGMQYASLSQITWVQSGHLQR

SEQ ID NO: 229471 - protein, 43 aa, Glycine max
  unsure (1)..(43): unsure at all Xaa locations
  Clone ID: PAT_MRT3847_49237C.1.pep
TPMHDHVLCSELKRRVKILLLKWNTNKMQNQEREHRRTCLWXP

SEQ ID NO: 229472 - protein, 105 aa, Glycine max
  Clone ID: PAT_MRT3847_49238C.1.pep
CYRAVFKFMFVTYPFKPYEAISSFSFVSIFGDKNLPYIPPSLELRPEIRFCYVFLEPRKIKRCDSILIPPIVMMMPVELPKIVVALVRFWDPLSISPLPSFFLSL

SEQ ID NO: 229473 - protein, 101 aa, Glycine max
  Clone ID: PAT_MRT3847_49239C.1.pep
TSVMVKDTAPWHMQTIFSFTLKQEYEALSIRLQPNKIYKLPSLNMTSAQHIEYFKLWTKELDDRTFKKTKSQLHSITKPYHSTESAFTSQNPVTDLMNIIA

SEQ ID NO: 229474 - protein, 60 aa, Glycine max
  Clone ID: PAT_MRT3847_4923C.1.pep
EFYGERRCKWIKNHFGSLFLFPRHFIYVSHFFLSANSYFSWVLNHLWRTICTACATVRKI

SEQ ID NO: 229475 - protein, 266 aa, Glycine max
  Clone ID: PAT_MRT3847_49240C.1.pep
MNEISYLKRTGRKNQMNNQSPIIEPEPAKLTVEQIRKGEKKKICTEISPQDDELLMVCEADAHINKIGEKYKQRKSFSGDDIIMLLKSEHENNAITAYSINADKEGTELKHFLLTCPSFIGHAKKLFNLEVDCPNTLQKDETIYSMANLRLYLDCTYELTESKSLQESQVVRSFLLACGGNSRLRFSLGRLAEEICDGIENLKFYKEDSGEEVFAGNDVFAMMEKDMKCNGEINSMWEKGWRRGFSADEAELVVNKIELLLMSGLI

SEQ ID NO: 229476 - protein, 180 aa, Glycine max
  unsure (1)..(180): unsure at all Xaa locations
  Clone ID: PAT_MRT3847_49241C.1.pep
PCVRPRVRDVATGNSILFAPRLPSEYAVWLGVIKPLSYFKEHYMVSTCCFSDXIASVLQHCQGSGKPLLFLLHGLXNTDSDNYSKPADFQGIDKFDKDFTALHPILTECXVIKSELEIALIQYANDISSEAHVEVMRNTKAGKKEYQLESIFLHHTCMYGGCWHCSYTCIXATGDNRYKN

SEQ ID NO: 229477 - protein, 86 aa, Glycine max
  unsure (1)..(86): unsure at all Xaa locations
  Clone ID: PAT_MRT3847_49242C.1.pep
XXYHXXXKTSXFIFTQITQNFPIXPFSTXSFKNKIPXFPLFXSFNHXLLQPYPFLHXNPFYYIXHIKFTVXLIPNQSNLFTSHSLH

SEQ ID NO: 229478 - protein, 103 aa, Glycine max
  Clone ID: PAT_MRT3847_49243C.1.pep
KKKKQPPNSPFYNLKKTGGVCPPKRKNLGGRSPICPPKIKRGGLPKKILFFFFFGGGEGFQIPPGLLIFQNQSPILFFFLTGLVLWDIIMGTHMGAFWTKTFS

SEQ ID NO: 229479 - protein, 46 aa, Glycine max
  Clone ID: PAT_MRT3847_49244C.1.pep
LINRPYCVTTPHIPPRSHIRHRSGPLCRDKTSNTSMRQLNCAVRQQ

SEQ ID NO: 229480 - protein, 50 aa, Glycine max
  Clone ID: PAT_MRT3847_49245C.1.pep
GIKVGSCFGHKSTLFLSHYRRTISPYATTRVSSQIPGRWNGRCPAVSSEL

SEQ ID NO: 229481 - protein, 43 aa, Glycine max
  Clone ID: PAT_MRT3847_49246C.1.pep
LTMISSWSLSKSLIIRYVWYPVIPSLTSCQCDCDFLLAITMCP

SEQ ID NO: 229482 - protein, 157 aa, Glycine max
  unsure (1)..(157): unsure at all Xaa locations
  Clone ID: PAT_MRT3847_49247C.1.pep
TPNSVPXIYHEELNAESSGNPTTXQDHNLDLSLGNSANSKHKSQDMRLRMNQQQQDSLHSNEVLGLGQTGMLNHTPNSNHQFPGSSNIGSGGGFSLFPAAENHRFDGRASTNQVLTNAAASSGFPPHHHNQIFNSTSTPHQNWLQTNGFQPPLMRPS

SEQ ID NO: 229483 - protein, 71 aa, Glycine max
  unsure (1)..(71): unsure at all Xaa locations
  Clone ID: PAT_MRT3847_49248C.1.pep
MRTRDRMSEMMTDVYYXDEHAYFAVSSLRLGEDHDKGFLYTNSIWLAFEEGMTTLTHWTFNRLYCVCINYR

SEQ ID NO: 229484 - protein, 47 aa, Glycine max
  Clone ID: PAT_MRT3847_49249C.1.pep
PLRIGKESSQLPMSCHFRHSLGNKSNVSLNLLNLAVHSAGPLYVYSS

SEQ ID NO: 229485 - protein, 102 aa, Glycine max
  unsure (1)..(102): unsure at all Xaa locations
  Clone ID: PAT_MRT3847_4924C.1.pep
LSRHCQQVRVIQCGHKLIMAGGLNKTRATLQYRKFADCDSLTRNCKHMTNVXWEDPEVKASLWSQLRYVSRNNPEKQEAYIVNFLNVLQEMFLHSPLEARQL

SEQ ID NO: 229486 - protein, 258 aa, Glycine max
  unsure (1)..(258): unsure at all Xaa locations
  Clone ID: PAT_MRT3847_49250C.1.pep
MGNSSKDNDSATSADASAGDVQPSNSAVYSEGEKVLAYHGPRIYEAKVQKAEIRKSEWKYXVHEDVKNNVSKGKKRKHDAGVEKGSGTVEKLVKIQIPATLKKQLVDDWDSVTQQDKLVKLPRSPTVDEILTKYLEYKSKKDGIAPDSIGEILKGIRCYFDKALPMMLLYKKERKQYNDAIVDNVSPSTIYGAEHLLRLFVKLPELLAYVTIEEETLNRLQQKLLDFLKFLQKNQSTFFLSAYDGTKVSEGKGKGKDE

SEQ ID NO: 229487 - protein, 170 aa, Glycine max
  Clone ID: PAT_MRT3847_49251C.1.pep
LLSVHHFLPSQRREKIGCLSGVRTSFCGQVVCNSSFCGRQITRSHGNRLVVHSLLGRKVKSVKSRETVIPEPDYRIPIVLLGIAGGLVYTDNLVPAVPVGLLGLLLLFQEVKIGEQLQESGENVFVGGKNRWKYSTFVNWEFWWPNFPILVYFKESQTKPEGQIHFFPII

SEQ ID NO: 229488 - protein, 509 aa, Glycine max
  Clone ID: PAT_MRT3847_49252C.1.pep
MNKFQRRIRERQMHQNILWTRIFPPVDVDVNLVKSLLDSFSSQQGLPWSSFLICLGLMGVQLPQDGTKGKMHRVRVRVPVSAASILKHEPRLISLAVEGFYDRDIDTMKFAARMERFVERGKTEELVCVSVKMSRAMYAQLAQQRFQAPKCYPEMPARSEREGFAEAELGMKIACGLEMMYQQRKRDGEEGKGSSWEAFRKSLENSGYFQGQLPGSSEYQRLMQSAQEYYRSTSLHSKASDLLNAPVRRIDEILALPHSVDDFKDQEVPPSDDDSWLYGGEEELNSVLMERQKEMELYDLKHKKKKKAKAGQDAGVSSASNSDEFHPTRPAKTMQAFVHKLSSYKGAEAPEDRNKEVNLDVDQFIKDMESIMMHSDGEVANSNIEEGSSSDLDFDNSDDSDIVELDEDNEDREDIFMRSYSDAMNEELKATTLQKSFVRANEQIPKKDQGTSNASEHIMDEDFSPVDVDVNLVKSLLDSFSSQQGLPGPASNLLGLMGVQLPQDGKKGK

SEQ ID NO: 229489 - protein, 116 aa, Glycine max
  Clone ID: PAT_MRT3847_49253C.1.pep
FGTCSTCCLLGLLLLFQTTRVTFVFDDEALEVKIGEQLQESGENAFVGGKKCWKYSTFVNWEFWWPNFPILVYFKETQTKPEGQIHCFPIIFNGKQLYDVMVERAGPSKTSGPKES

SEQ ID NO: 229490 - protein, 122 aa, Glycine max
  Clone ID: PAT_MRT3847_49254C.1.pep
MYNITVPIYLTYINSTDDVVLCKKKKKKKKKKKKKKKKKKKKKKKKKKKKKKKKKKKKKKKKKGGPFKGFKLNYPGLAGHCLFIGAPKINSLARCLKRWGWENPGVPQIKPFGRKSPFPRGG

SEQ ID NO: 229491 - protein, 267 aa, Glycine max
  unsure (1)..(267): unsure at all Xaa locations
  Clone ID: PAT_MRT3847_49255C.1.pep
MFRDVSSCNTYNYGEAVYWDARYIQEDGSCDWYQRYSALRPFVRNFIPLSSRILMVGCCNSVMSEDMVKDGYEDIVNIDISSIAIDMMSRKYEHIPQLKYXNVRDMSLFPDESFDGVIDKDTDATFAPMLCXMLDLGTLDSLMCGTDAPISAAQMLAEVCRLLLKPGGTYILITYGDPTVRMPHISRPVFNWKITLYNIPRPGFQKPESSTPSRKSYLEPIALTEKGLLSADFVLEDPDSHYIYVCKKINDTEXTIIPAYQLTADVL

SEQ ID NO: 229492 - protein, 97 aa, Glycine max
  unsure (1)..(97): unsure at all Xaa locations
  Clone ID: PAT_MRT3847_49256C.1.pep
GECYXKLLEVSKAFVEGXMLLEDYVLTLKASVGLKALVEGVGVGKGKEDLQDXAIDSMKSTQVLPXSPRNTCWQSMFMLXXSEIISFLTGDFRLSKA

SEQ ID NO: 229493 - protein, 131 aa, Glycine max
  unsure (1)..(131): unsure at all Xaa locations
  Clone ID: PAT_MRT3847_49257C.1.pep
SLLPFFSSSSGLQHYSTAKNTGDVTELHMGVKHKPAPCEVLAHICDRVXLHYRXKLTAETGFDSTLERNDPIEFELATGQEIKGWDQRSSRMRLHDERKLIIPAMPGYENQGSPPTITSGATPIFDTELVG

SEQ ID NO: 229494 - protein, 59 aa, Glycine max
  Clone ID: PAT_MRT3847_49258C.1.pep
DSSKNLERLVCTPTLAVQKVYLQHLFPLEAGASRSTIQLNTRVISHQIMIIMTFSDHAV

SEQ ID NO: 229495 - protein, 90 aa, Glycine max
  Clone ID: PAT_MRT3847_49259C.1.pep
GTFVVSIDSQSRILYHPCMWDHSSFVTERYFLAFSQPELASAAALDTIDVLNALLRLSAFPSLNTARSVPIACPSDVKANMRNMGCLLSR

SEQ ID NO: 229496 - protein, 35 aa, Glycine max
  Clone ID: PAT_MRT3847_4925C.1.pep
NFWQSITLTLSFSPCRLEQDEPESFQFLLYQQYPF

SEQ ID NO: 229497 - protein, 63 aa, Glycine max
  Clone ID: PAT_MRT3847_49260C.1.pep
RVRSQPQWLSWAGPPPLASFPPSHSPPVVAPSSAYDPVANSGVGARGVGQMLAAPLLGLGTCL

SEQ ID NO: 229498 - protein, 140 aa, Glycine max
  unsure (1)..(140): unsure at all Xaa locations
  Clone ID: PAT_MRT3847_49261C.1.pep
FPGSSGSLVGGPPFFFFFFWGEYGSLFALGWVFTWFQVPRVDLVAFLCCVHILMKPWFDFYLPCGLRLSRWRRGYFVRVAAVRSRCLAPAGCSLASRCSFRVHLVLVRIPSFWLFFFIVLGVVVVCRFCFLPXCCLSSGG

SEQ ID NO: 229499 - protein, 76 aa, Glycine max
  unsure (1)..(76): unsure at all Xaa locations
  Clone ID: PAT_MRT3847_49262C.1.pep
FFGGRSTRTIYHNYHKMLIELVKVGGVIWYDNFLWNGSDVAPPYALFRKYVXYYMDYVLELNKALAVDPRIEICML

SEQ ID NO: 229500 - protein, 74 aa, Glycine max
  Clone ID: PAT_MRT3847_49263C.1.pep
SSSRLYTAPSLHSSLFTLSPLNPYLTLIGMYSMVGILLMSSFSLLLSPPPPPPPSLVHHQLPCTIKFSLLSLWV

SEQ ID NO: 229501 - protein, 87 aa, Glycine max
  Clone ID: PAT_MRT3847_49264C.1.pep
VYNKKQRDRPYMFSVILMLNGRKLLPQTRATGLIQESVVLNQNVNLKLVNFYQRMKNPCQFWRQDRIKRLLMYILLMRKKNDMPSCK

SEQ ID NO: 229502 - protein, 164 aa, Glycine max
  Clone ID: PAT_MRT3847_49265C.1.pep
IDYIMEDLKSPCTEEIAFFKAFSDIMENQEDMDYVIVDTAPTGHTLLLLDSSENHHRELKKKSTQTTSNVETLLPKIQNKNLTQMIIVTLAEKTPYLESKRLVEDLNRANIGHNWWVVNQSLVTLNQRDDLFSNKKEDESFWINKIKNESLDNYFVIPYRVLEY

SEQ ID NO: 229503 - protein, 39 aa, Glycine max
  Clone ID: PAT_MRT3847_49266C.1.pep
KGLVLGFIYVLFLFNVWLILILLAENFFFYVLYVFMYFL

SEQ ID NO: 229504 - protein, 61 aa, Glycine max
  Clone ID: PAT_MRT3847_49267C.1.pep
RFLPHFTSKYHLMLHPIFLESDLTKTSLAHSLTQLSYYTFNPMLIINDHLSMLNTFCITYI

SEQ ID NO: 229505 - protein, 47 aa, Glycine max
  Clone ID: PAT_MRT3847_49268C.1.pep
SSLPREILEKAVTDYDYFTLSLKFMLRLFLFSFLMYFLLIKKSYILA

SEQ ID NO: 229506 - protein, 96 aa, Glycine max
  Clone ID: PAT_MRT3847_49269C.1.pep
FALIVIFPYFHCYLIFFQFLLILYFLIYLSIISITLKFLQFQQLVAFIKLYLLLLELPICWDFLCFLYSIEVPYFWIQLFSDYWGQLFSEIKWCNF

SEQ ID NO: 229507 - protein, 90 aa, Glycine max
  unsure (1)..(90): unsure at all Xaa locations
  Clone ID: PAT_MRT3847_4926C.1.pep
INSXXIXXXXPTFPIXXXIXTXXNHGHXXFLYQIXIXSQXHXTXNXKXXXPXLXIXYXLXXXXHIXFXXXPXXRXXXXXISTXXISXHLL

SEQ ID NO: 229508 - protein, 91 aa, Glycine max
  unsure (1)..(91): unsure at all Xaa locations
  Clone ID: PAT_MRT3847_49270C.1.pep
PIKACSLYLDLETEADHLNRLLDDSDVHTCRSCAAXIRAFPIEGRRLRDVLTERYMPSAIKTXLCVFYGSPAQGLRLLDPCSVIMYPMPTY

SEQ ID NO: 229509 - protein, 34 aa, Glycine max
  Clone ID: PAT_MRT3847_49271C.1.pep
ARFAKTPRFFYMWSGLVICAYKCFSLVLDSTILC

SEQ ID NO: 229510 - protein, 69 aa, Glycine max
  Clone ID: PAT_MRT3847_49272C.1.pep
LDITYETCMDWKDLRVTVKLNEQNHAAYVTVVRSCDALVINALKEPQRDRKKTNNITHNCYISLDDVIE

SEQ ID NO: 229511 - protein, 185 aa, Glycine max
  Clone ID: PAT_MRT3847_49273C.1.pep
NSAPGFVKNEAVNLYAHQVLDAWFSCIKLLEDEDDSVRLRLSSDVQKCFTTEKTGSNLSTGSVPIQVDRVIRFCFDHLSSIFGHWIDYFDYLCQWVLRAESCVAPQGDLVRRVFDKEIDNHYEEKLLISQICCSNMEKLPILKSWADKDEFRSYLDGRRARFSHQLVSYAEDHIGKQEGNDWIGS

SEQ ID NO: 229512 - protein, 160 aa, Glycine max
  Clone ID: PAT_MRT3847_49274C.1.pep
RFFTYIQTPATPPGGTVGKLRRPTGHPAKTKTEKGDPGWQPNPKTPKGRTQQSEQPGKTHRPTHGTTPRETPAQGRKKPHSGNTKKKPKHMGKKKHRKPNGQPQNPPPKSKENQPGPPGGPRGKGTTGTHHRGGGKKTRAGQPGKKHTKEEKPPPPAKNP

SEQ ID NO: 229513 - protein, 99 aa, Glycine max
  Clone ID: PAT_MRT3847_49275C.1.pep
QKKEKGGKHKPQYLSPEPYEEILHVHKLNRWGALRRIGLITLQANFSSNGTRAGRTDNDFIPSPEHPPVVRLLFKTLQHINKGHDRLYIGFDDLVIFSF

SEQ ID NO: 229514 - protein, 374 aa, Glycine max
  Clone ID: PAT_MRT3847_49276C.1.pep
MLRHLGVHAPRLAFNFKSSLIHGGRGKTLTTRAFSSSAAVSPPSKAIVYEAHGEPDTVTKLVEVPAVEVKEKDVCVKMLAAPINPSDINRIQGVYPVRPEPPAVGGYEGVGEVHSVGSSVTSLSPGDWVIPSPPSFGTWQTYIVNDEKVWHKIEKGVPMEYAATITVNPLTALLMLEHCVTLNSGDAIVQNGATSMVGQCVIQIAKSRGIHNINIIRDRPGVDEVKERLKNLGADEVSTESELEVKNVKSLLGGIPEPVLGFNCVGGNAASLVLKFLRQGGTMVTYGGMSKKPVSVSTSSFIFKDISLRGFWLQKWLSTDKAEESRGMIDRLLSLVQEGKLKYKMDLAPFEDFNTALDKALGKLGSQPKQVIKF

SEQ ID NO: 229515 - protein, 100 aa, Glycine max
  Clone ID: PAT_MRT3847_49277C.1.pep
RERERERERERECDIATWPAIFGRAPSASDGNLIFIFTVLSSSLMYQCHYLCVVYALFAMVTFFQITFWLISTILMYCFSCMFMHASYLQKKKKKKKKKK

SEQ ID NO: 229516 - protein, 41 aa, Glycine max
  Clone ID: PAT_MRT3847_49278C.1.pep
SSVSISEFLTTELKVILFTFTPLMVQILKPFLLFEFSTEKA

SEQ ID NO: 229517 - protein, 122 aa, Glycine max
  Clone ID: PAT_MRT3847_49279C.1.pep
QLLPESSPLSKQEDLIVWMRTAALPTFRKLYGKIEVDLNAGDQINVTLQNNYNTYSFNGKKKLVLSTTSWLGGKNDFLGIAYLTVGGLCFFLALAFTVVYFVKPRQLGDPSYLSWNRNPGGH

SEQ ID NO: 229518 - protein, 69 aa, Glycine max
  Clone ID: PAT_MRT3847_4927C.1.pep
LRLLRRCPIIGWAGVLFKKTKFVLGAFFDPPIKGHVLLCFPASFQSKSGYPYIFLKTPKCMGPFSCGQL

SEQ ID NO: 229519 - protein, 51 aa, Glycine max
  Clone ID: PAT_MRT3847_49280C.1.pep
RNREFLPPCYAKTGAFFRRRKSSSFFPLGERPLNFKRARNLSTGGGGKPLG

SEQ ID NO: 229520 - protein, 344 aa, Glycine max
  Clone ID: PAT_MRT3847_49281C.1.pep
MASSSATGAGSTDPTAARRNTKRPKYSKFTQQELPACKPILTPRAVISAFLLVSIVFVPIGVASLIASRKVVEIVFRYESTCIPHEVTDKVAYIQSPADKTCKISLPVDKHMKSPIYVYYQLDNFYQNHRRYVKSRSDEQSRDRREENSTSACNPEDIANGKAIVPCGLIAWSLFNDTYSFSRDNKNLTVNKNGISWKSDREHKFGKHLFPKNFQSSAIRGGASLNESIPLSKQEDLIVWMRTAALPTFRKLYGKIEVDLNAGDQINVTLQNNYNTYSFNGKKKLVLSTTSWLGGKNDFLGIAYLTVGGLCFFLALAFTVVYFVKPRQLGDPSYLSWNRNPGGH

SEQ ID NO: 229521 - protein, 242 aa, Glycine max
  Clone ID: PAT_MRT3847_49282C.1.pep
VTPQTPPARSHRRRGPPRVTIKINVTHGSSHHDLHLPAQSTFGDVKKLLVNKTGLEPAEQRLFFRGIEKGDNQRLQAEGVKDKSKLFLLEGIGSKERKLEETRKENEMSKAFEAIASVRAEVDKLSNRVTSIEVSINGGNKASEKEFLVLTELLMSQLLKLDGIEAEGEAKLQRKAEVNRVQNLVDKLDSLKARNANPFSNSSNDVKVTTQWETFDSGMESSDAPSDNSSSTKVTQDWEQFD

SEQ ID NO: 229522 - protein, 110 aa, Glycine max
  unsure (1)..(110): unsure at all Xaa locations
  Clone ID: PAT_MRT3847_49283C.1.pep
DVLTEMVNAXLDPKNLQVENQEVIAELVDQCRSYQKRVMLLVNETSDEQLLGQGLALNDSLQRVLCQHDNIVKGTPDTGTRGTETSTLPLVYVTNEEDESDVDFAQLAHR

SEQ ID NO: 229523 - protein, 260 aa, Glycine max
  unsure (1)..(260): unsure at all Xaa locations
  Clone ID: PAT_MRT3847_49284C.1.pep
MSNATDSAGKIPPETRPAESDSGGDSGPRPTIKINVMHGSSQHEFHLPAQSTFGDVKKLLVNKTGLEPVEQRLFFRGIEKGDNLHLHLEGVKDKSKLLLLEGTASKERKLEETRKQNVMSKAFEAIAGVRAEVDKLSNRVTSIEVAINGGNKASEKEFLVLTELLMSQLLKLDGIEAEGEAKLQRKAEVNRVQKLVEKLDSIKARNANPFSNSSNAVXRHQLNNKVPTQWETFDSGMESLDAPSDNPSSTKVTQEWERFD

SEQ ID NO: 229524 - protein, 104 aa, Glycine max
  Clone ID: PAT_MRT3847_49285C.1.pep
IGGNKAEKEFVLTELLMSQLLKLDGIEAEGEAKLQRKAEVNRVQNLVDKLDSLKARNANPFSNSSNAVKVTTQWETFDSGMESLDAPSDNPSSTKVTQEWERFD

SEQ ID NO: 229525 - protein, 106 aa, Glycine max
  Clone ID: PAT_MRT3847_49286C.1.pep
MSNATDSAGEIPPETRSAESDGGGPRPTIKINVTHGSSHHDLHLPAQSTFGDVKKLLVNKTGLEPAEQRLFFRGIEKGDNQRLQAEGVKDKSKLYLLEGIGSTERK

SEQ ID NO: 229526 - protein, 169 aa, Glycine max
  unsure (1)..(169): unsure at all Xaa locations
  Clone ID: PAT_MRT3847_49287C.1.pep
LGPSAPDVGMVSMRKTVTKQAYSGSPWYGPDRVKYLGPFSGQPPCYLTGEFPGDYGWHTDGLSTDPETLTRNPELAVIHSRWAMLGDLGCXFPELLYRLGVKCGEAARLTADSQIFSEGGLDYLGNPSLVHAHSILAIWATQVILMGAADGHRIAGATLCEVTDPIYPG

SEQ ID NO: 229527 - protein, 75 aa, Glycine max
  Clone ID: PAT_MRT3847_49288C.1.pep
IKVHTFPVFYPSDEPVHPFEVYGSGNSGVTQLHILVETGQSPKDHITLESRCQSIGLSVCYTLSISCCGIGYSIS

SEQ ID NO: 229528 - protein, 104 aa, Glycine max
  unsure (1)..(104): unsure at all Xaa locations
  Clone ID: PAT_MRT3847_49289C.1.pep
DPRLFKVYTSAHQAELLRSEYTHFLVTGDVYRRDSIDSTHYPVFHKMEGFRVFVPEEWEGSGMDATLFAATDLKXCLEGLARHLFGAVEMRWVDTYXPFTNPSF

SEQ ID NO: 229529 - protein, 72 aa, Glycine max
  Clone ID: PAT_MRT3847_4928C.1.pep
GWVLGTCVENQVDFHPLSKSCSPLNPLLSAVHSSAIHTQSLAHLALSGTFGVLQRSHLCCAFPTLAAGVKVL

SEQ ID NO: 229530 - protein, 78 aa, Glycine max
  Clone ID: PAT_MRT3847_49290C.1.pep
TNESYYSPKQVVLSFVVCHTSSIIRRWCPLSSPLAFKKKKNTAIHHKVGSRGLKKILKRGWEGRRGNRYLLLFSNLFV

SEQ ID NO: 229531 - protein, 57 aa, Glycine max
  Clone ID: PAT_MRT3847_49291C.1.pep
CNTVCLLNSLSYAHDNLSFLSFVLSLDTFPYAGTTTTCESLYMGVPCVTMAGSVHAH

SEQ ID NO: 229532 - protein, 68 aa, Glycine max
  Clone ID: PAT_MRT3847_49292C.1.pep
YDSFVHFIKQGYAPRGKMTSTDHGQKNSVCNPRVRFCSFCIYRLNGIKFSESCSLASIGSVFVSSHCI

SEQ ID NO: 229533 - protein, 56 aa, Glycine max
  Clone ID: PAT_MRT3847_49293C.1.pep
CFSTCYLVLLWLCAVRWATLAAVIKGWISLLELLVSSLVSLFDSNDFIVEQESIIH

SEQ ID NO: 229534 - protein, 56 aa, Glycine max
  Clone ID: PAT_MRT3847_49294C.1.pep
DPKSRTRNTFLFDMGWFAMKCVLLLCRRRILLSLHSYLVRTTSSWMVMEYSTYNDD

SEQ ID NO: 229535 - protein, 87 aa, Glycine max
  Clone ID: PAT_MRT3847_49295C.1.pep
GNLKCVLHKRKMKELAIIFYLRKASGKLLRCGLRTLSVNGWGIVYKNRECISSPCICNKEIMSLIKCENMTKKCSIFPFYRRYEDLC

SEQ ID NO: 229536 - protein, 548 aa, Glycine max
  unsure (1)..(548): unsure at all Xaa locations
  Clone ID: PAT_MRT3847_49296C.1.pep
YEKEPGPTHAGGRSRRVEPERTLTDAQRDEFEDMLRALTLERSQIKEAMGFSLDNADAAGEVVEVLTESLTLKETPIPTKIARLMLVSDILHNSXSAPVRNASAYRTKFEXALPDITESLNDFRSPSSRPEPTLSXLKERVLKVLQVWADWXLFSDAYVNGLRATFLRPGNSGVVPVLSMCGAAPEIEQNTTSEDMVVGGKTNQDAALAMGRGAAMKELMSLPLAELERRCRHNGLSLVGGREMMVARLLSLEEAEKQKGFELDDELKYAHNQLGSGKYSSNQRETSEEPDPVWNHYGDEDLQSQGRSSVPLSPTLPIAQPELKAFTKKEKNDPVLPASKWAWEGDESDDEQRRSGKNIGLSYSSSGSENVGDGLVKADESESAADTRFSAHADSGMNEEQRQKLRRLEVALIEYGESLEERGIKNLEEIEKKVQLHRKRLQVEYGLSDSGEDGQGNRRTSERRDRHDVSRKRHRSRSPSSSPQPTLSGKDRDREHDLERDRDRQRDRSHDFDSERGRDRHREKSGSRERDDHDKDRSRDRDRRRRAK

SEQ ID NO: 229537 - protein, 69 aa, Glycine max
  Clone ID: PAT_MRT3847_49297C.1.pep
RKANCPPDSYKPICKSLRYQISAETSEMFLFGSSSPVPVSIPASILIMIIPLSASTLFPVPVPPSVVFS

SEQ ID NO: 229538 - protein, 77 aa, Glycine max
  Clone ID: PAT_MRT3847_49298C.1.pep
SACWHGGSPGIASAPHAIQSFTLSTTLGSSMFFTDDRSTDPSVGVNSSICCKIKQEFNKYAWTKLNNLYYQLIKKYR

SEQ ID NO: 229539 - protein, 188 aa, Glycine max
  Clone ID: PAT_MRT3847_49299C.1.pep
KITTTMQDPQKIDYPKELIPHWEKPVDNHTCQLIYWNLIELLEKRNDVTANHFIKEFGQTARCDHIKDMSALRKNYLSYLGTNAIQILSGKERDIGKSSDAINHYHEQTKQQLVSGLNYCNTFYYYAMHKYRNFFTYLGYGTVLYFGGRALMGRGMPRMFQSSMNNMAKKTTPTPPPTNPPPRSTSSI

SEQ ID NO: 229540 - protein, 60 aa, Glycine max
  Clone ID: PAT_MRT3847_4929C.1.pep
FGSITLRVGFPSFIQASKVRSLISSKVLCVRQNQGFKTLAGHRRPFIAAWARQSAPLREE

SEQ ID NO: 229541 - protein, 235 aa, Glycine max
  unsure (1)..(235): unsure at all Xaa locations
  Clone ID: PAT_MRT3847_492C.1.pep
METMLPQNQAEEAIVTTSLNETESEVGMREEEKELQQQDHSMFNIKSFLWHGGSVWDAWFSCASNQVAQVLLTLPYSFSQLGMLSGILLQIFYGILGSWTAYLISVLYMEYRTRKEKENVSFKNHVIQWFXEVLDGLLGPYWKALGLAFNCTFLLFGSVIQLIACARYIYYINDKLDKRTWTYIFGACCATTVFIPSFHNYRIWSFLGLGMTTYTAWDLAIAAILHGQVENVTHT

SEQ ID NO: 229542 - protein, 57 aa, Glycine max
  Clone ID: PAT_MRT3847_49300C.1.pep
CMENMTNASTKLENDISYIFHIIKKEGFNGIYTFIYIYIDSLTLKVNSSSFLFYFFI

SEQ ID NO: 229543 - protein, 112 aa, Glycine max
  unsure (1)..(112): unsure at all Xaa locations
  Clone ID: PAT_MRT3847_49301C.1.pep
KFLGYPLDGLSQMAQERKKGVPWTEEQHRIFLVGLEKLGKGDWRGITRDEVLXNYPTTRGQPHVEVHAQNYFLRLEKIDKKNRRLSLFDLDGSNKVYSNSITDHHDNFSLNE

SEQ ID NO: 229544 - protein, 91 aa, Glycine max
  Clone ID: PAT_MRT3847_49302C.1.pep
IRTYKTFTWTWPFADLRPCISCTDKLRKISAIHGTVTVCTSSSRGFTRRYLQRNLHNSWEIGMLEKTRKGGLFSRENGSDTRTCRHSCRYI

SEQ ID NO: 229545 - protein, 198 aa, Glycine max
  Clone ID: PAT_MRT3847_49303C.1.pep
VHQTARGHDHETNLFNKGRQQQQQHHWSQTVTPMDYFSTGLLVGPSSSSARTQQHQHQSSSAHFQLGHAHALPISPFSGENHSEQLQHFSFMPDHLNNIPAHHVVTSSSASHQPNGGDNNYNLNFSISTSTGLAGYNNRGTLQSNSPSSSFLPHHLQRFQPLDGSSNLPFFIGAAAPSSAPPTMDNNNNNNSNNHHHL

SEQ ID NO: 229546 - protein, 116 aa, Glycine max
  Clone ID: PAT_MRT3847_49304C.1.pep
MWKEMQECYKCQYQQIVEAKTLDALSLNTKPGNAHIDATIKLKSEVQKWNLSFLDWIHAQRSHVKALNGWLVRCLLYEPEEVPDDSTPFSPSKIGAPPVFVICHKWSRAVDNLSEK

SEQ ID NO: 229547 - protein, 85 aa, Glycine max
  unsure (1)..(85): unsure at all Xaa locations
  Clone ID: PAT_MRT3847_49305C.1.pep
MAAASSKGLSSPXXGXKXVKLGXXAPXFGRVXXRXTXTKQASSGSPWYGPXRVKYXGPFSGEPPSYLMASXPXEYGWGPAGFRPT

SEQ ID NO: 229548 - protein, 157 aa, Glycine max
  Clone ID: PAT_MRT3847_49306C.1.pep
MKALAWYGKNDVRMIDTPKPKILEDRDVIVKVTGSTVCGSDLHLLHGAVVEMQKGDILGHEFCGVVDECGPGVTKFKKGQRVVASFQIACGDCYYCKQKLSSQCEKTNSNTIENAMYGGRTAGMFGYSHFTGGYAGGQAEYTRVAYGDVNLLPLPDD

SEQ ID NO: 229549 - protein, 108 aa, Glycine max
  Clone ID: PAT_MRT3847_49307C.1.pep
KLVILGKEIVKKCGGVPLAAKALGGLLRFKREEREWLKIKESNLWSLPHNIMPALRLSYLNLPIKFRQCFAYCAIFPKDEKIEKQYLIELWIANGFFSSNDKLDAEDC

SEQ ID NO: 229550 - protein, 66 aa, Glycine max
  Clone ID: PAT_MRT3847_49308C.1.pep
CWCIQFGWPAAPPPAVMRAYSQVCLKGEKLDASYCDAALVQELEELEGVAPHHTFCCIIRRVTSDA

SEQ ID NO: 229551 - protein, 96 aa, Glycine max
  unsure (1)..(96): unsure at all Xaa locations
  Clone ID: PAT_MRT3847_49309C.1.pep
VPXRSDSLCVLRGTDVVPFMPLYPHWSVSGPRQMAQDLDRPLTGAFRDTPEHSAHMRLRSTAHTQSHKRLSVFSGRSRSNTTTSTPSVTSSRRSQA

SEQ ID NO: 229552 - protein, 47 aa, Glycine max
  Clone ID: PAT_MRT3847_4930C.1.pep
SKALGSSWKKAERELLPHDSCACVRVQNGKNPLYKSPFMIKCQEVRP

SEQ ID NO: 229553 - protein, 77 aa, Glycine max
  Clone ID: PAT_MRT3847_49310C.1.pep
SETVVCINSCHQRIRVVLSTLYCPYPNLMSYTRIMTLRFTPAHRRPNIPFFQSLVLTGELTDAFPNLMKANTMMTSS

SEQ ID NO: 229554 - protein, 51 aa, Glycine max
  unsure (1)..(51): unsure at all Xaa locations
  Clone ID: PAT_MRT3847_49311C.1.pep
LKFSIISFFNSQISWGSVILLLKTLSSCLFXLKEGPLAICTALXXXXFVXX

SEQ ID NO: 229555 - protein, 68 aa, Glycine max
  Clone ID: PAT_MRT3847_49312C.1.pep
FMCLFMCLHRRVNIPERCWREEMIESTVCPIGSIIASITPSSPYSPPPGFHNGLNPSLCIHRGTDYEQ

SEQ ID NO: 229556 - protein, 115 aa, Glycine max
  Clone ID: PAT_MRT3847_49313C.1.pep
NYLSTGFKKSQKKTTGVKKGNATNEKKKRDRKVRNRPTTPKGTQTPKKQPPPRKQKAPLAPTGPERPEKKNGPRLNPREPPITKDPQRIPEKPRQSGAPRVTHLKTTLPATTLEK

SEQ ID NO: 229557 - protein, 665 aa, Glycine max
  Clone ID: PAT_MRT3847_49314C.1.pep
MEGMVDHLAFERNNSQFDVDEMKIVWAGSRHAFEVSDKMARLVASDPAFRKDDRVVLDRKALFKNTLRKAAYAWKRIIELRLSEEEAAMLRSFVDQPAFTDLHWGMFVPAIKGQGTEEQQKKWLPLAHKMQIIGCYAQTELGHGSNVQGLETTATFDPRTDEFVIHSPTLTSSKWWPGGLGKVSTHAVVYARLITDGQDHGVHGFIVQLRSLDDHLPLPGITVGDIGMKFGNGAYNSMDNGMLRFDHVRIPRNQMLMRVSQVTREGKYVQSSVPRQLVYGTMVYVRQTIVSDASVALSRAVCIATRYSAVRRQFGSKEGGLETQVIDYKTQQARLFPLLASAYAFRFVGEWLKWLYMDVMKRLQASDFSTLPEAHACTAGLKSLTTSATADGIEECRKLCGGHGYLCSSGLPELFAVYIPTCTYEGDNTVLLLQVARHLIKTISQLGSRNKPVGTTSYIGRVEQLMQYRSDVQKVEDWLKPNAVLGAFEARAAKKVVACAQNLSKFTNPEEGFQELSVDLVEAAVAHCQLIVVSKFIEKLQQDIPGKGVKQQLELLCSIYALFLLHKHLGDFLATGCITPKQGSLANELLRSLYSQVRPNAIALVDAFNYTDHYLGSVLGRYDGDVYPKLYEEAWKDPLNDSVVPDGFQEYIRPMLKQQLRNARL

SEQ ID NO: 229558 - protein, 148 aa, Glycine max
  Clone ID: PAT_MRT3847_49315C.1.pep
IPSCTYEGANTVLLYQVARHLIKTISQLGSRKKPVGTTSYIGRVEQLMQYHSDFQKAEDGLKPNAVLGAFEARAAKKVIGCAQNLSKFTNPEEGFQEFSVDLVEAAVAHCQLIVVSKGARSRNNFVMHSKITYNCTVDPGESYELLSI

SEQ ID NO: 229559 - protein, 49 aa, Glycine max
  Clone ID: PAT_MRT3847_49316C.1.pep
PLERPPFFFFFFFSLNQQVPASTCGFYFTLYLWAESTKRPLDPSQMSLH

SEQ ID NO: 229560 - protein, 142 aa, Glycine max
  Clone ID: PAT_MRT3847_49317C.1.pep
MKHVRGTVQRGKEKNSYHVTADLGNTLQKFDVMVGTHGEITVHSVNGLITLEPVLPKLEPTSRDAKTSAASLQSPMPGKVIKVNVNKGDQVTANQSLLILEAMKMEHTIRSPFAGTVTAVNYKVGDLVEENKVLVTIEPLRS

SEQ ID NO: 229561 - protein, 59 aa, Glycine max
  Clone ID: PAT_MRT3847_49318C.1.pep
FTQNAYIFCVCLNQSLFLAYETRSLLKHTATAIVMMMSPSSSPRCILCPSSDSLLGMYS

SEQ ID NO: 229562 - protein, 121 aa, Glycine max
  Clone ID: PAT_MRT3847_49319C.1.pep
FWRIVLATILWIWALLAPTTPTFMLQDVAEYALHATVENFLTPALGVTLISGNLADREGVYSDRLETFVTYGSPPSTYRTALPAPYPGHGREQQDGLRLLLAPTSHGAPLNSLGLSRDRID

SEQ ID NO: 229563 - protein, 66 aa, Glycine max
  Clone ID: PAT_MRT3847_4931C.1.pep
VHRNCHRTFYKERPVSSTSLFLSLLSRYHPTVVLVTLTGITQRSCRTSILQSASARSDFRAIPLVA

SEQ ID NO: 229564 - protein, 515 aa, Glycine max
  unsure (1)..(515): unsure at all Xaa locations
  Clone ID: PAT_MRT3847_49320C.1.pep
DLVNPAYEIINVIGTGTRRVGYWSNYTGLSIVPPEALYSKPPNRSSASQKLLPVLWPGETTHKPRGWVFPNNGRMLKIGVPXKVNLLPYAVPYKFVSYGDGDSNPSNTELARLITAGVFDAAVGDITITTERTKMVDFTQPYIESGLVVVASVKKTDSNAWALFTPFTPMMWTVTAVFFLLVGAVVWILEHRLNDDFRGPPKQQMVTILWFSFSTMFFAHRENTVSTLGRFVLLIWLFVVLIINSSYTASLTSILTVQQLSSPVKGIESLISSKEPIGYLQGSFTRTYLIDEIGIDESRLVPLKTPEETTEALKKGPXKGGVAAYVDERAYIELFLSSRCDYSIVXQEFTRNGWGFAFPRDSPLAVDLSTAILELAENGDLQRIHDKWLLSSACLSQGAKLEVDRLNLRSFWGLYLVCGLACVLALLIYFIQTMRQYSKHGPEELESSGHGSGSSRLRTFLTFVDEKEEIVKSRSKRKKMEGISYRSTSEVGSSITFNKAYSQASLNRIDSVNEI

SEQ ID NO: 229565 - protein, 79 aa, Glycine max
  Clone ID: PAT_MRT3847_49321C.1.pep
SVLFFSRVSPPPCVPGKNGWSRILLRWWGGFSTPPPRGCSPTLFSPPFLKKGKKGGGKVPLLYGIGPVLLKFFFLFIEF

SEQ ID NO: 229566 - protein, 39 aa, Glycine max
  Clone ID: PAT_MRT3847_49322C.1.pep
IYQLFPIQIEALLGFYFLVENEAFCFRIYVQDYIDFEVK

SEQ ID NO: 229567 - protein, 691 aa, Glycine max
  unsure (1)..(691): unsure at all Xaa locations
  Clone ID: PAT_MRT3847_49323C.1.pep
MENGYVWITTTFLSTWLDIGSPLSSDATDDMQGVIILRMYIPDSERKRWFFSRWKNLTTGKTANGSQGLSTYGIFAYDTVYALAHALDAFFKQGNQITFSRDPKLSQLRGDNIHLDAVKIFNEGKLLHKYIYEVNMTGVSGLFKYTSDGNLVNPAYEIINVIGTGTRRVGYWSNYTGLSIVPPEALYSKPPNRSSASQKLLPVLWPGETTHRPRGWVFPNNGRMLKIGVPKRVSYREFVSQVKGTDMFEGFCIDVFLAAVNLLSYAVPYKFVAYGDGKSNPSITELVRMITTGEFDGAVGDIAITTERTRMVDFTQPYIESGLVVVAPVRKSESNALAFLAPFTPNMWCVTAIFFILVGAVVWILEHRVNDEFRGPPKXQVVTVLWFSFSTMFFSHRENTVSTLGRFVLIIWLFVVLIINSSYTASLTSILTVQQLYSPIKGIESLVIGKEPIGYTQGSFARNYLVQELNIDESRLVPLTTPEEAAKALSKGPQNGGVAAYIDERAYTDIFLFSRCHITCXGQEFTRNGWGFAFPRDSPLAVDLSTAILQMIDNGDLQRIHDKWLLSSACLSQGAKFEVERLQLKSFWGLYMICGLACLLALLVYLIQIWRQYHKHYVSEELHSTDGQNIGSKSSHLKTFLSFVDEKEETFKSRSKRRKMERISYRNSEGSLSISSNQGYASRRSECASEV

SEQ ID NO: 229568 - protein, 56 aa, Glycine max
  Clone ID: PAT_MRT3847_49324C.1.pep
KTIFISRKRKIYGNLRFICQNNKKEAIEAKSFQFFLYLVFLEINLIKINKNIIDKK

SEQ ID NO: 229569 - protein, 73 aa, Glycine max
  Clone ID: PAT_MRT3847_49325C.1.pep
LRIRVSEPISIEQQLFYKDGSKVLLLYSIHLCHILSLLFMICHFLCSSYRINDQLFGPRHDLIYIIFSGPQAL

SEQ ID NO: 229570 - protein, 414 aa, Glycine max
  Clone ID: PAT_MRT3847_49326C.1.pep
MPENRQVLRNADSSDNIEAIRRLKINDNWDRDAAAQSTQYPDRPGEPECLYYLRTGACGYGSNCRYHHPAHISIGTHYGEELPQRAGQPDCEYFLKTGMCKYGSTCKYHHPKDRRGAAPVSFNTLGLPMRQEEKSCPYYMRTGSCKFGVACKFHHPQHASLGAYPLAGSPTPTSTIIPTSGLPYAGGFPAWSAVPRMSYLSGQGLQSYVPPFLSSSQGVIPVQSWNNYMGNMNPAMPNGFLGSNLVYDYMNLGESLFGGQAINSALPNRPDQPECRYFMSTGTCKYGSDCKFHHPKERMSQSLINPLGLPVRPGQAVCSYYRIYGMCKFGPTCKFDHPVLTIPQNYGLTSPAMNVLDTPLTRGLSNVQPPETSPSKLSDKKLQHSDAKAATEDSSKQDDTTLNSFPASAEPLHN

SEQ ID NO: 229571 - protein, 49 aa, Glycine max
  Clone ID: PAT_MRT3847_49327C.1.pep
LERQRSTTFSQARAYGPGDQQRRVHLLPFSKPCSNGTFWQGSERQMTGS

SEQ ID NO: 229572 - protein, 36 aa, Glycine max
  Clone ID: PAT_MRT3847_49328C.1.pep
RISLFSHVCNLFNQYFCSELSLIIIMKWMLFGGLKL

SEQ ID NO: 229573 - protein, 66 aa, Glycine max
  Clone ID: PAT_MRT3847_49329C.1.pep
QICSTEASRYLMRTCYGTWASRYSSYPLRSLFSLGGERGTYSRALAFQSSRPVDIHENDVSCGSGQ

SEQ ID NO: 229574 - protein, 48 aa, Glycine max
  Clone ID: PAT_MRT3847_4932C.1.pep
NSLYSDLKDKYEFLSQTSVGTLCKLRCYGTLVNIHVGFFDKSGIIVFY

SEQ ID NO: 229575 - protein, 80 aa, Glycine max
  Clone ID: PAT_MRT3847_49330C.1.pep
LFKSNGIWIDGHIYKFVQFYYSFIIMIKIISNKNININPFKKPQTKFLKLKTNGFFFTENTWKTPLKVFDTLINHFTYSN

SEQ ID NO: 229576 - protein, 62 aa, Glycine max
  unsure (1)..(62): unsure at all Xaa locations
  Clone ID: PAT_MRT3847_49331C.1.pep
SDFGSKNRGSAPPPILGISKMTLKVVVSLFRLFSSSXAYPAPLKSFPKVGLESRSPGSSFGR

SEQ ID NO: 229577 - protein, 49 aa, Glycine max
  Clone ID: PAT_MRT3847_49332C.1.pep
TKFTLSLPTSLASLDANQTPSLNVLTTISLSTNKLNTNPHQYLALSKHF

SEQ ID NO: 229578 - protein, 130 aa, Glycine max
  Clone ID: PAT_MRT3847_49333C.1.pep
TAARRRQKGNPVLTEYAVQDLNVNTKLPFADNSFDIITNVVSVDYLTKPLDVFKEMCRILKPGGLAIMSFSNRCFWTKAISIWTSTGDADHVMIVGSYFHYAGGFEPPQAVDISPNPGRSDPMYIVYSRK

SEQ ID NO: 229579 - protein, 119 aa, Glycine max
  Clone ID: PAT_MRT3847_49334C.1.pep
YNTIDFTLPGRSYRLRNYREAVTISCCLIYGRIAQKANKPLLFLEIPLAPLFAKNILLQLLTSMKKSIFDYTLGVCSVNYGDQPYTFLVFPNKPWPFANSRRYFSISCFPGDAQTNQTP

SEQ ID NO: 229580 - protein, 180 aa, Glycine max
  Clone ID: PAT_MRT3847_49335C.1.pep
MEDSEEEELLNLTLSVDAGRERRIKKGRTRDNNNNTNSVIIPMKSNDGYEGKIFRLLQMRELMLRQDHRRKGVLLEDVNNNNNDGLPLIHLLLSTATAVDDDQRNYCAALENLIDLYQTVSLTGDSVQRVVAYFADGLAARLLTKKSPFYDMLMGEPTSEEEFLAFTDLYRGSPYYQFAH

SEQ ID NO: 229581 - protein, 56 aa, Glycine max
  Clone ID: PAT_MRT3847_49336C.1.pep
CSSRHLSSGSLLVSSPVVIGACRWAQDGSYGRRVSVVVRCRLVLKRLQAYSLYLEP

SEQ ID NO: 229582 - protein, 287 aa, Glycine max
  unsure (1)..(287): unsure at all Xaa locations
  Clone ID: PAT_MRT3847_49337C.1.pep
FGSSEYYREVLNRSLRCQHCSRPFIAYDVNMQGTTPATNSSQQAFGAQNHSQNQGAFDVAAGSQGNLHTSRSNTESHNKKGPAADVSVKPNGKRRRKRVAESSESAESVGSTDSESEEDTLYDKDGFSTHRDENPRXSTRQKHQVSYNENVSDDDEGGGSPSGAAETRGRPSKMNNQNGLAADLKGDKQGEKRKQNFYSEESLQNIDEEIKEVREKEAVGSSKIDKASEHSPSKSTNRPDNFVYPDAEFSDFDKDKKEGSFAVGQIWAIYDTIDGMPRFYAIIRKVF

SEQ ID NO: 229583 - protein, 303 aa, Glycine max
  unsure (1)..(303): unsure at all Xaa locations
  Clone ID: PAT_MRT3847_49338C.1.pep
PTPQDEMRAGMSYFHXETIWKGVPQFLRRVDTALKNIGINERVPYNAPVIQFSSWMGGDRDGNPRVTPEVTRDVCLLARMMAANLYFSQIEDLMFELSMWRCNDELRVRSDELLSGSKRDAKHYIEFWKQVPPNEPYRVILGDVRDKLYNTRERARQLLANGTSDIPEETTFTYVEQFLEPLEQCYRSLCACGDRPIADGSLLDFLRQVSTFGLSLVRLDIRQESDRHTDVMDAITKHLEIGSYREWPEEKRQEWLLSELRGKRPLFGHDLSKTEEINDVLETFHVISELPSDNFGAYIISMA

SEQ ID NO: 229584 - protein, 115 aa, Glycine max
  Clone ID: PAT_MRT3847_49339C.1.pep
FIVSAPSRSCRDPLSVCISFFSPDSLYHCRVCDRSARDFHRDVDALEPLYIYICLLSSLSPVCCIFCLSLSLGSVRARARARARALSLALSLSIYIYIYIYIYIYIYIWIVISRA

SEQ ID NO: 229585 - protein, 82 aa, Glycine max
  Clone ID: PAT_MRT3847_4933C.1.pep
FGIGLIPGIVGAFSPMAVGFGIALTTETASEKAFFTELVEAFFTLGIAFGMAWKIAVENAFGMALNIDMGIALGIVSTPLEP

SEQ ID NO: 229586 - protein, 171 aa, Glycine max
  unsure (1)..(171): unsure at all Xaa locations
  Clone ID: PAT_MRT3847_49340C.1.pep
CKSADQLLNLIGPKNPLVLFVWIAMALVWAVMAMPIMCSAFLMDDFCSSQKTGDNGTDSVCSPRPGTVTADFNLGSSRSYLADIATSAFVGGMAIGSIFMPWFADRKGRRSAVLCSLFLCGFFGCASAFSPNIYVFIXCRFAQGLSFSGCAMLNRVLAYDSIPVHLCSQSA

SEQ ID NO: 229587 - protein, 79 aa, Glycine max
  unsure (1)..(79): unsure at all Xaa locations
  Clone ID: PAT_MRT3847_49341C.1.pep
MWKTVLNSPIPSCVSVCLERWWHDIIIMXVGLPVHPKATVFSIGXLTQTTSLLYNPTSSLSFTVATLADILLGAQKPSQ

SEQ ID NO: 229588 - protein, 353 aa, Glycine max
  Clone ID: PAT_MRT3847_49342C.1.pep
VMISAKEEPGSSVPPAVDGLLRVHKRIIDGLESDFTHAPSGVAGKVSTKLLVPASQAGSLIGKQGGTVKSIQEASNCIVRVLGAEDLPIFALQDDRVVEVVGDPTGVHKALELIASHLRKFLVDRGVIPIFEMNMQTANTHHAEHMPPHQSWGPPQGLPPNVGGGSGFGPPSQYMPPPRQLDSYYPPAEMPPPVDRQPHQGISAYGRDASIGVHASSNTQSAPSIVTQITQQMQIPLSYADAVIGTAGASISYIRRASGATVTIQEARGVPGEMTVEISGTASQVQTAQQLIQNFMAEAAAAAAAPAQPQTTVPAADQGYNSYPAHGSLYASPPSNPGHAGGYSSVYGANYGY

SEQ ID NO: 229589 - protein, 73 aa, Glycine max
  Clone ID: PAT_MRT3847_49343C.1.pep
KVLIVSGRLWIPNGSGVFQKLPTHRGIFFIKTSHIFFPKLKIFQVEKTAPHVCLLMDFAGTFTPGKKNPFPPL

SEQ ID NO: 229590 - protein, 111 aa, Glycine max
  Clone ID: PAT_MRT3847_49344C.1.pep
TRPRKSQSLFFSPPSYLFSLCSPRYTLPHLLLNSSSLSLSLSLSLLFDSLPFYCPKKLLASSIHPLQFLTILSFYYLFSTKTLQKKFLYMLLSYSLIFFLRLKLLLLLDNI

SEQ ID NO: 229591 - protein, 50 aa, Glycine max
  Clone ID: PAT_MRT3847_49345C.1.pep
MVNQLVVLIMCIYTWPQLNNPRNRKKEHLSNPLPTKKCCIGDHASKWKSN

SEQ ID NO: 229592 - protein, 81 aa, Glycine max
  Clone ID: PAT_MRT3847_49346C.1.pep
KKGTSKKFIFSSISQTTTRGREEHIIRGDCDILQQQGSGDRGKNKTGSSRATLFISTEFLHIWNPWKPSLPSRRGGATGAP

SEQ ID NO: 229593 - protein, 31 aa, Glycine max
  Clone ID: PAT_MRT3847_49347C.1.pep
DRPPIVSLTAVVLTTFNSCVICYVFPIEFPR

SEQ ID NO: 229594 - protein, 167 aa, Glycine max
  unsure (1)..(167): unsure at all Xaa locations
  Clone ID: PAT_MRT3847_49348C.1.pep
XXRXXRLRAXSINRVGCXLFSIXPQPKTVSSEKGHXLSPXSVFATPXTPPXLLLPLFNLPXSPLFHSRTXXCFLLAPVPHXITPTCXREXXWQRELRGXSYLKNLQTYCVSGRRSEPQQRPAXLKKWSQITMLLLGTHHHLMAFPSXXKPQTRIKSWFHSLQEGEIR

SEQ ID NO: 229595 - protein, 245 aa, Glycine max
  Clone ID: PAT_MRT3847_49349C.1.pep
MDRYQRVEKPKAESPINENEIRVTSQGRTRNYITYATTLLQEKGSSEIVLKAMGRAINKTVMIAELIKRRIVGLHQNTQIGSTDITDTWEPLEEGLLPLETTRHVSMITITLSKKELDTSSTGYQPPLPVDQVKPLNEYDEEGEGSPRIRGRGRGRGRGRGRGFYNGGMEYGDGWDGGRGYGGRGRGRARGHAFRGRGRGRGYGVQPVGYYDYGEYDAPPPPRGRGRGRGRGRGRGRGRDQVPAA

SEQ ID NO: 229596 - protein, 42 aa, Glycine max
  Clone ID: PAT_MRT3847_4934C.1.pep
GKDRTPLYCGSDKTTKGFFKSYKNLQFYWILGAGHFVSEHHS

SEQ ID NO: 229597 - protein, 76 aa, Glycine max
  Clone ID: PAT_MRT3847_49350C.1.pep
SRSPSIIGRQTYHQPSFSRGGSTDRFTSRNYILYCIQFLVPIETDYSLIWEPVDCWLMFPCNLSTSGTFINIFYLC

SEQ ID NO: 229598 - protein, 117 aa, Glycine max
  unsure (1)..(117): unsure at all Xaa locations
  Clone ID: PAT_MRT3847_49351C.1.pep
LRVRSDEFNNHAFENSFLNNPHLCAYNPNVNLPNCLTKTMPHSSNSFSKSLALILAVIIVVLLTIASLVFYMLKTQWGKRHCKHNKIETWRVTXFQRLDLTEINFLSRLTDNNPIGS

SEQ ID NO: 229599 - protein, 160 aa, Glycine max
  Clone ID: PAT_MRT3847_49352C.1.pep
AKWKADHTGRCRAMPHIKTFARYKNQSLAWFLLTSANLSKAAWGALQKNNTQLMIRSYELGVLFLPSLFKRHESVFSCTSNVTVSEDKCPARESSEMKKTKLVTLTGIKKESMHSSSEVIIPLPLPYELPPLPYSSQDIPWSWDRQYNKKDVYGHVWPRM

SEQ ID NO: 229600 - protein, 290 aa, Glycine max
  unsure (1)..(290): unsure at all Xaa locations
  Clone ID: PAT_MRT3847_49353C.1.pep
MAELSLPQDSYFLGFDSSTQSLKATVLDSNLNIVASELVHFDSDLPHYKTKDGVHRDPSGNGRIVSPTLMWVEALDLILQKLSKSNFDFAKVAAVSGSGQQHGSVYWKSGSSQILSSLDPKKPLLDQLENAFSIKESPIWMDSSTTAECRAIEKAFGGALELARVTGSRAYERFTGPQIKKIFDTQPEIYDGTERISLVSSFMASLCVGAYASIDHSDGGGMNLMDLKKRXWSKVALEATAPGLESKLGELAPAYAVAGNIAPYFVERPPKPFVCYLYAISINNCCVIRI

SEQ ID NO: 229601 - protein, 211 aa, Glycine max
  unsure (1)..(211): unsure at all Xaa locations
  Clone ID: PAT_MRT3847_49354C.1.pep
SALRSQLQEIEGTLTKAESRLNEEVGSVQAAASQREAELSSKLEDYXHKNSNDRNVLNDKVAALEKELQLARDGNVNQEGAESQKLELEAALKNSLEELETKKNDISLLQKQVTDLEQKLRVAGDKSSVKGDESVDQKEGLEVKSRDIGSSLSIPSKRKSKKKSEVTSGQTSSSSETHVQTGHDSPVINFKFILGVALVSIVFGIILGKRY

SEQ ID NO: 229602 - protein, 290 aa, Glycine max
  Clone ID: PAT_MRT3847_49355C.1.pep
SSRIGSRELGTAHSAEVQTLNSQISSVGDEKNMLNETNQNLKKELQSLIFDLEEKLKEQQKIEGSLRSEVETLKVEVAEKSTLQSQLEEIEGKLAQAESRLNEEVESVQAAASQREADLSSKLEDYAQKFNDRNVLNDKVAELEKELQLARDAIANQKGAESQKLELEAALKNSLEELETKKNDISLLQKQVTDLEQKLQVAGDKSSVKGDEGVDQKEGLEVKSRDIGSSLSIPSKRKSKKKLEVTSAQTSSSSETHVQTGHDSPIINFKFILGVALVSIVFGIILGKRY

SEQ ID NO: 229603 - protein, 403 aa, Glycine max
  unsure (1)..(403): unsure at all Xaa locations
  Clone ID: PAT_MRT3847_49356C.1.pep
TSAPGTWRWMLGVAAVPCFXLIFLLKIYVFLVFVAINXGKQEEAKEILRRIYPPQDVEDEINALKESIETELNEEASASNKVSIMKLLKTKTVRRGLYAGMGLQIFQQFVGINTVMYYSPTIVQLAGFASNRVALLLSLVTAGLNAFGSILSIYFIDKTGRRKLLLFSLCGVVVSLVVLTVAFHETTTHSPMVSTIETSHFNNTCPDYSTAFNPGEWDCMKCLKASPECGFCASRANKLLPGACLIAIDTTENQCQKEDRLWYTRGCPSQYGWLALVGLALYIIFFSPGMGTVPWVVNSEIYPLRYRGICGGMASTSNWVSNLIVAQSFLSLTQAIGTSSTFMIFIFITVAAIVFVIIFVPETKGLPIEEVENMLERRSLNFKFWQTSPDSNDIPIKQKNQSV

SEQ ID NO: 229604 - protein, 61 aa, Glycine max
  Clone ID: PAT_MRT3847_49357C.1.pep
RFFINQPRGVAPAWASYLQGVGKGPLLLSFGHWAKFFYVLKTPLGERGLFLFVFPGGPKKI

SEQ ID NO: 229605 - protein, 55 aa, Glycine max
  Clone ID: PAT_MRT3847_49358C.1.pep
LMMLLDTARHYTRRDPCIKQSLQNVFAEQSVDKSEYICPVSCVRLNHHKDFCAWQ

SEQ ID NO: 229606 - protein, 90 aa, Glycine max
  Clone ID: PAT_MRT3847_49359C.1.pep
SESDQGFVPLLRYGCKRRRSGVVLCFSSWRSLRLDPRSHSLALPRFAPHFGTTMWSFHSDSWSVMWSRRDRQEREECQVICCAVYKCCCT

SEQ ID NO: 229607 - protein, 89 aa, Glycine max
  Clone ID: PAT_MRT3847_4935C.1.pep
NRHHPQTYFQQDKKKPKTQSLTDPKLDGVSESKALDLLEPQAMPAAYNNNDGDEETTNVPSPVIQVNHYLHPLHSYKEEPSLLSSSRSR

SEQ ID NO: 229608 - protein, 55 aa, Glycine max
  Clone ID: PAT_MRT3847_49360C.1.pep
LTIYSLSFHIKSVYYYVSLRNLIIGIKFKRTNYFHKLLISTFKDSNCVYYIVVVC

SEQ ID NO: 229609 - protein, 103 aa, Glycine max
  Clone ID: PAT_MRT3847_49361C.1.pep
KLVMLCYYCYDGRRHECCMVNILSFTSPRDVRRLSLVSSIFRSDAVWDKFLPSDFHTMMEWQMGPPFPSTIFSVVIFLRTCFLCSILISVMFINKFTSPIQIG

SEQ ID NO: 229610 - protein, 76 aa, Glycine max
  Clone ID: PAT_MRT3847_49362C.1.pep
FLKPAECIPELDPRDWVCRSLKVSPFIIKAASSGLMGLWSSLLHPTKKSPLFDGAGSFGTPVDARASTYPTWYSTA

SEQ ID NO: 229611 - protein, 94 aa, Glycine max
  Clone ID: PAT_MRT3847_49363C.1.pep
GSSYFKGDAPVKMLVPHGTTVGSRLIGLPGIKRYLFVPPCKKRAKFFSSGGGISPSFSCPIFLDKVYLSSPFFLTWSALSAQSTIICQETQNTS

SEQ ID NO: 229612 - protein, 83 aa, Glycine max
  Clone ID: PAT_MRT3847_49364C.1.pep
LFTSSSSSSSSWGGHNVSEGYVLLHYDAFSALFIIWISLKGSLDSVGVHVAASAMGPTSARRRSATTASAHIADFIITLSLLT

SEQ ID NO: 229613 - protein, 120 aa, Glycine max
  Clone ID: PAT_MRT3847_49365C.1.pep
MIRVLVIAKEGGEADRIIQSLRELPGIALEALHVTSLSDARSHLRETLFDAIVLGLESADPSGLDDLHRLLERASAPVLVLTDSDRPELYSAAIEAGAAECIGKGDSPLTILSRALLQRV

SEQ ID NO: 229614 - protein, 86 aa, Glycine max
  unsure (1)..(86): unsure at all Xaa locations
  Clone ID: PAT_MRT3847_49366C.1.pep
MASCGSLLELLFASLILMPQGLATYYKPIRSHRVKPSCQATVYXPPVINQTTVYSRTTGYKPPYXKPPFKKPPYGKYPSVGDNTHA

SEQ ID NO: 229615 - protein, 60 aa, Glycine max
  Clone ID: PAT_MRT3847_49367C.1.pep
KVNVDVVVEVPVYVGEAGVEAHQVDLLMKVQSGWCSASDGGRGAYIKACMSLLKMVGVCS

SEQ ID NO: 229616 - protein, 70 aa, Glycine max
  Clone ID: PAT_MRT3847_49368C.1.pep
MVNATKGVFISCDIPMAQYIINMNASLPASDKFIIHILDNTHMFVQPHVEQMIRSRIAKFREDNTYVKPN

SEQ ID NO: 229617 - protein, 77 aa, Glycine max
  unsure (1)..(77): unsure at all Xaa locations
  Clone ID: PAT_MRT3847_49369C.1.pep
GTIIVHPSKVPLXYSRDLKXXIXLTPXXFGTSIPXSSXNXIXLRKAXPXWEEVFQDLFAFLLRNDXGXELEXEAMEV

SEQ ID NO: 229618 - protein, 125 aa, Glycine max
  unsure (1)..(125): unsure at all Xaa locations
  Clone ID: PAT_MRT3847_4936C.1.pep
MKSTTYLALCGLCALSXSYQPSATADIGFGTESNPSRNGVTYYETTGIRRKGRGIECGETYTETCPLTVVQSTFDVAKGVPLIISCPVMMLDMIERLISSLSCTYVPMCALTTSRWTGNLKGMPD

SEQ ID NO: 229619 - protein, 158 aa, Glycine max
  Clone ID: PAT_MRT3847_49370C.1.pep
MSLVSSSSYYYCLTSMLKALVTIIVFLMMACAQDVLSDDGFFSPKNTVRVYNRMNDNILVYLHCQSKDDDLGQHVLAVGEHQEWSFNDRVIGTTLFWCTMNANNVHASFEVYNMKTELMKCSSQCNRILNNSGGYFFDEFDGYWEKRLSWNIPKTPSF

SEQ ID NO: 229620 - protein, 42 aa, Glycine max
  Clone ID: PAT_MRT3847_49371C.1.pep
AFWSFIIEWGLHKHSIFWVESRAFASSDCVLIRVARIRVLEV

SEQ ID NO: 229621 - protein, 79 aa, Glycine max
  Clone ID: PAT_MRT3847_49372C.1.pep
FTFPLLLSPTPQHSLSGDFLNSSTRPFADPKANFWGHSTHKNTLARIHKLYWLRSTPKHKFCPLRLIPTMILVQHKPNF

SEQ ID NO: 229622 - protein, 57 aa, Glycine max
  Clone ID: PAT_MRT3847_49373C.1.pep
QRSMFISIKQLRLDDRYPHFACRLPSLRVIDNLISYAGDAHYHLPTSYPELYDPRRP

SEQ ID NO: 229623 - protein, 70 aa, Glycine max
  Clone ID: PAT_MRT3847_49374C.1.pep
KNNITWGGCHKQQGQHSTIAIIDCAEFIDNFLSLAYLCLSLFTLHSKCPLYSGSYTRINTNCLLLSPMMH

SEQ ID NO: 229624 - protein, 65 aa, Glycine max
  Clone ID: PAT_MRT3847_49375C.1.pep
FLFLIYHQFSKTSPQFDNLVVPLSKVTINFFANHNSQLQQGLNLRNVALLFFVFHCPKHLRSPFL

SEQ ID NO: 229625 - protein, 81 aa, Glycine max
  Clone ID: PAT_MRT3847_49376C.1.pep
PNPNFQWFGGGQPNKWQSFFKILNGGAIRGSFFSRRILTKKLPGLIGIFRGDPHPPQGWGPGHNIQRGGFYAPRDLHGLPQ

SEQ ID NO: 229626 - protein, 84 aa, Glycine max
  unsure (1)..(84): unsure at all Xaa locations
  Clone ID: PAT_MRT3847_49377C.1.pep
ACCCDDLITMFHLHKRWSFKASTTLQLAITLQVQARHVELVLHSSQLLIDYKVVEGAXLLIVSSGYPEYKLKMKPLKLSYKSRT

SEQ ID NO: 229627 - protein, 62 aa, Glycine max
  Clone ID: PAT_MRT3847_49378C.1.pep
STITNDWVGTWPRNSNHQPAIGGRVATITTHVLRRSCRTTGILPEVKPTPLGSVRRYFIEAP

SEQ ID NO: 229628 - protein, 73 aa, Glycine max
  Clone ID: PAT_MRT3847_49379C.1.pep
GATVNGNGWILVNRKDRTVNCHCNSQHTTLSADKIKGRKRGVSTFFYFFTHTLLPLIKFESFFVTIKLFFQNK

SEQ ID NO: 229629 - protein, 86 aa, Glycine max
  Clone ID: PAT_MRT3847_4937C.1.pep
IHLVVQREQGMVHTLWIFACKGFYKVEKKSQGPQVAWGLYVCTGCCRTSIKFLCLSSSSLHSLISAVHFNYRFYFWLSFYFCSLFS

SEQ ID NO: 229630 - protein, 58 aa, Glycine max
  Clone ID: PAT_MRT3847_49380C.1.pep
CEKVTKHKAYLGNHITVSRESCARAYRKRPDEKRNALCTVEWLLNADVHTILKIVELH

SEQ ID NO: 229631 - protein, 370 aa, Glycine max
  Clone ID: PAT_MRT3847_49381C.1.pep
MNIKPIIILAFLISLSLTNVVVSARLFPNVSSWLNAHAPTGGAWDAFLNFTGCHRGDKYDGLANLKSYFERFGYFPHAPPSSNFSDEFDDALESAIKTYQKNFNLNVTGVLDDATVQQIVLPRCGVADIINGTTTMNAAKENETASFSKPKFHTVAHFTLFPGMPRWPEGTQELTYAFFPGNGLSDAVKGVFAAAFARWAEVTSLKFRETASYFGADIRIGFFSGDHGDGEPFDGSLGTLAHAFSPTNGRFHLDAAEDWVVSGDVTRSALPTAVDLESVAVHEIGHLLGLGHSSVEEAVMFPTISSRKKKVVLARDDIEGIQFLYGSNPNFNGSTATSAPERDASDGGRCLTCVGPSSGVFALLTFAFLF

SEQ ID NO: 229632 - protein, 196 aa, Glycine max
  Clone ID: PAT_MRT3847_49382C.1.pep
MEYQYHPSSYGVSSSSHSNHHQQGSTTPKSLSSQRSLVSVPSLNHHHHLHTPNSTVYHHCLTTLKGHTSSYISSLTLSGKFLYTGSSDREIRSWNRIPENSSNNNNNSNTVLTGNGAVKSLVIQSNKLFSAHQDHKICVWEISTNNNNDNDHDQKYTHVATLPTLGDRASKILNPQNQVQIRKDKKCTWVHHGDTV

SEQ ID NO: 229633 - protein, 84 aa, Glycine max
  unsure (1)..(84): unsure at all Xaa locations
  Clone ID: PAT_MRT3847_49383C.1.pep
DREREREREKEXDKKRDREEDEEDAYERRXLXRKLREKEAAYQERLKNWEXRXRXXXRXYEXEAEREEESRREMAXXATRLXDS

SEQ ID NO: 229634 - protein, 95 aa, Glycine max
  unsure (1)..(95): unsure at all Xaa locations
  Clone ID: PAT_MRT3847_49384C.1.pep
GDNMVGCMDGDLTEEEIEFCLMYYVGSAQARXEITKERKNSTHPDYHHIXSDLEEQELFLKDTDERACAYIAGPAXPYRWGVTGDGAQLVKASND

SEQ ID NO: 229635 - protein, 43 aa, Glycine max
  Clone ID: PAT_MRT3847_49385C.1.pep
SQPLQFSCMTPFFKLRCLEDLIECAVSQHSRLHLLHPDPFPDS

SEQ ID NO: 229636 - protein, 100 aa, Glycine max
  Clone ID: PAT_MRT3847_49386C.1.pep
PTLAWMCITRRYVTFLAHEETTLTIWNNLKNSFEHTQYISMTCKGLSDRVLITRSFTHELRTQFMMNIPSPILRLYTGKADRANHDFIVPDTNDYNTDWI

SEQ ID NO: 229637 - protein, 60 aa, Glycine max
  Clone ID: PAT_MRT3847_49387C.1.pep
KWPVPYFFFLGHSAISGLLNPIVWVLSRIFFLFFWLPRIFSCFLPSLLSPLFINKLVISF

SEQ ID NO: 229638 - protein, 83 aa, Glycine max
  Clone ID: PAT_MRT3847_49388C.1.pep
MRTQWGKLMATLSEGGDDETPLQVKLNGVATIIGKIGLFFAVVTFAVLVQGLVSQKLQQGSLRSWTGDDALETVEFFAVAVTI

SEQ ID NO: 229639 - protein, 134 aa, Glycine max
  Clone ID: PAT_MRT3847_49389C.1.pep
MMARFISNKTKTHLLRHSESAKGVIVCHRHQSSEATKAKWVEIDGVKLLEEHVQRVMVKKATPDWLPFLPGSSFWVPPPPSPFLHKFSIPSHPFFLQDDESGNSIATPRGTEVTVQLKVMTPAEHVSLSEDEEG

SEQ ID NO: 229640 - protein, 193 aa, Glycine max
  unsure (1)..(193): unsure at all Xaa locations
  Clone ID: PAT_MRT3847_4938C.1.pep
LELPPPPPPQQHNNTTTTTTKTKTPPPPPPPSTTTTKTKATTTSKPHNFPESIKEVFSISKIAIPMILTGLLLYCRSMISMLFLGHLGELALAGGSLAVGFANITGYSILSGLAVGMEPICGQAFGAKRFTLLGLCLQRTILLLLFTSLPITLLWLYMKXILLLCGQDEAIATQAQQYRVYSIPDLIAQSFLH

SEQ ID NO: 229641 - protein, 95 aa, Glycine max
  unsure (1)..(95): unsure at all Xaa locations
  Clone ID: PAT_MRT3847_49390C.1.pep
GLECDLYLLTVVADPDFNMGAMENKSLDTFNKXLVLDCIETDTDADYAEILGVMGQEXAHNWAANRGTXVLDWIQLNLKEGLTVLXDQEFSSDTA

SEQ ID NO: 229642 - protein, 145 aa, Glycine max
  Clone ID: PAT_MRT3847_49391C.1.pep
MIVNGLTSNVGFLRKLVLTTAMSMVGPNATSAVIRYALQMFAQIPQPDTFMWNTYIRGSSQSHDPVHAVALYAQMDQRSVKPDNFTFPFVLKACTKLFWVNTGSAVHGRVLRLGFGSNVVVRNTLLVFHAKCGDLKVATDIFDDS

SEQ ID NO: 229643 - protein, 85 aa, Glycine max
  Clone ID: PAT_MRT3847_49392C.1.pep
MEPKRPPWVFLLGRTITKSAHANKFNFGGSRGWDHTPPQSHNNWAGRNRFPMKDPLVFQCTSGSDPVLEAKKEDYARSLRHQPHQ

SEQ ID NO: 229644 - protein, 52 aa, Glycine max
  Clone ID: PAT_MRT3847_49393C.1.pep
PPFPWHPLIRQSNPRPGSPWPLNPPPNTNFILTAGPLFFYFNPLFWPRLKTF

SEQ ID NO: 229645 - protein, 47 aa, Glycine max
  Clone ID: PAT_MRT3847_49394C.1.pep
TLLRTTTNPFTYKHHIALTLKGVKYTYVEQNYMNKTELLLKSNPFHN

SEQ ID NO: 229646 - protein, 108 aa, Glycine max
  unsure (1)..(108): unsure at all Xaa locations
  Clone ID: PAT_MRT3847_49395C.1.pep
RQTPTSTRPQVRNLWPQKPYCPGPQLTNPRSRAWPIGNMLQQLLTLEQLQLSTRSPNKLNRKGLQLLAMVVRKSVNRKLYQKWNMRYFKCPXYGTLPNKYSQCRQYKF

SEQ ID NO: 229647 - protein, 68 aa, Glycine max
  Clone ID: PAT_MRT3847_49396C.1.pep
AQIPQLVVRRAPGAYHWKRDLLMKVKNTMTIGMDGSLVSSEMALWAEALDSFTEELSCPYDGNYANAN

SEQ ID NO: 229648 - protein, 50 aa, Glycine max
  Clone ID: PAT_MRT3847_49397C.1.pep
LLLLHLYKVYYFCKLHMLLEECTIDQCGPGTFMANHLNRHYCGKCRLTYV

SEQ ID NO: 229649 - protein, 54 aa, Glycine max
  Clone ID: PAT_MRT3847_49398C.1.pep
KMSNAFLNVVCGRNLVFVFNKKGIPPPLFLLSCSPVVCKIYIPTYDYEIKFFFG

SEQ ID NO: 229650 - protein, 84 aa, Glycine max
  Clone ID: PAT_MRT3847_49399C.1.pep
KGFGGPKIFFPPPPKVKDFFLNPPPRSFYVGGGGFLWGGVILQKPLSPPSLFELKICGPKLIPGPGWPPDGFNLIFAIRGVLGP

SEQ ID NO: 229651 - protein, 91 aa, Glycine max
  unsure (1)..(91): unsure at all Xaa locations
  Clone ID: PAT_MRT3847_4939C.1.pep
GFSPPQAWFSSAENNLSSDIDKRLPPPLGKVKIIVFLARVDLFPVALLAVLFGVKNENVSSSPPNKKRTRLFDNCKSLXYLVEECPFAFVN

SEQ ID NO: 229652 - protein, 49 aa, Glycine max
  Clone ID: PAT_MRT3847_493C.1.pep
KIELYYKEILYPEYTDSNVLCFNACDCLPTLHTTKSIITKHVLQALHES

SEQ ID NO: 229653 - protein, 59 aa, Glycine max
  unsure (1)..(59): unsure at all Xaa locations
  Clone ID: PAT_MRT3847_49400C.1.pep
KISIWPLQPALSSYPFPKNPLSKYHNVNLGNXNKRQKKKKENKKIENSNKEGPYDSTID

SEQ ID NO: 229654 - protein, 154 aa, Glycine max
  Clone ID: PAT_MRT3847_49401C.1.pep
MAFSATLSYTSFPCLPRFPQTLRTKSVHFPLIRAVQGGQAETPESKKSEGSSNAQSSSAAAPKPKKPVYSLKKGQIVRVDKEKYLNSVNYLSVGHPPYYKGLDYIYEDRGEVLDMRIFETGEYALIAWVGVPTAPAWLPTDMLIKSEKLNYERL

SEQ ID NO: 229655 - protein, 90 aa, Glycine max
  Clone ID: PAT_MRT3847_49402C.1.pep
ACSLHCDEAEQTASTPVAYSTEEIQSDLAVVAGSPSQVTEDDKHQAMIPAHSEEAISNVVTPVVCRSDRYDACHAPNQIVLPTAEVRWNN

SEQ ID NO: 229656 - protein, 212 aa, Glycine max
  unsure (1)..(212): unsure at all Xaa locations
  Clone ID: PAT_MRT3847_49403C.1.pep
TRQARWAFVNKAENLLTRLQNINLCFHFEVEQQVNGVFLNFFGFNGTAGVWRIKALEESGGWLERTTVEDMDIAVRAHLNGWKFIFLNDVKVLCELPESYEAYRKQQHRWHSGPMQLFRLCLPAIITSKIAFWKKTNLIFLFFLLRKLILPFYSFTLFCIILPLTMFVPEAELPIWVICYIPVFMSXLNILPAPKSFPFIVPYLLFENTMSV

SEQ ID NO: 229657 - protein, 42 aa, Glycine max
  Clone ID: PAT_MRT3847_49404C.1.pep
YGCEKTTAWGGKLRAEINNGTKGNRNVGRGSRSRLNLYLYMR

SEQ ID NO: 229658 - protein, 87 aa, Glycine max
  Clone ID: PAT_MRT3847_49405C.1.pep
ILTFIQRRKRKQRDCCMPIAAATADASLNQNNAYADGILPPNHSEIEPSQELQPPTAPNDHPRPTSAGFDNRGPRERGPLLSSSRSR

SEQ ID NO: 229659 - protein, 97 aa, Glycine max
  Clone ID: PAT_MRT3847_49406C.1.pep
GPTPGPRRASHTTQPSTKNRNPTPARTHDKFPETAIENQEKDNDKSSRQPEHQTSQTPRARRRKVTNNNSELRRTRASEHNERLREASVRLRIHTQI

SEQ ID NO: 229660 - protein, 79 aa, Glycine max
  Clone ID: PAT_MRT3847_49407C.1.pep
KGSSVLREVQEATAYKSPQNGIKKPKSTTATTKGMDPKFLRNQRYARKITKTIFVFNGKLCSKSVFSSIINLLTENTLL

SEQ ID NO: 229661 - protein, 554 aa, Glycine max
  Clone ID: PAT_MRT3847_49408C.1.pep
EMEGSIRCSANYVPLTPISFLDRAAVVYRDRLSLVSGDVTYTWTQTHQRCIKLASSISQLGVGLSPLDVVAVLAPNVPAMYELHFAVPMSGAVLCTLNTRHDSAMVSLLLKHSEAKLVFVDYQLLDIAKGALQILSKITTKLPHLVLILESGHPSPPHAKGTLTYEDLIAKGSLQFEVRRPKDEWDPISLNYTSGTTSNPKGVIYSHRGAYLNSLATVLLNEMRSMPVYLWCVPMFHCNGWCLPWAIAAQGGTNVCQRSVTAEGIFHNIFRHKVTHMGGAPTVLNMIINSPPKVRKPLPGKVQVMTGGAPPPPDVIIRMEELGFNVTHSYGLTETFGPASICTWKPEWDNLPRDAQAKLKARQGVAHVGMEDLDVKDPHTMKSVPADAKTMGEVMFRGNTVMNGYLKDLKATQEAFKGGWFWTGDLGVKHPDGYIELKDRSKDIIISGGENISTIELEGVIFSHPAVFEAAVVGRPDDYWGETPCAFVKLKEGCSATSDEIIQFCQNRLPRFMAPRTVVFTDLPKTSTGKTQKFVLREKAKAMGSLTKKNASRL

SEQ ID NO: 229662 - protein, 128 aa, Glycine max
  Clone ID: PAT_MRT3847_49409C.1.pep
TFMFNFAKSRPELGSKLFLAWTGWVCMWTAILLFLLAILGACSIINRFTRLAGELFGLLIAMLFMQEAVRGLIHEFHIPERANLTSPEFQSSWRFGNGMFSLALSFGLLHTALRSRKARSWRYGSGCL

SEQ ID NO: 229663 - protein, 490 aa, Glycine max
  unsure (1)..(490): unsure at all Xaa locations
  Clone ID: PAT_MRT3847_4940C.1.pep
MGGSVRDVKSKGEVDEVVASGSPVILHFWASWCEASKHMDQLFSHLSTDFPNARFLRVEAEEQPEISEAYSVSAVPFFAFCKDGKTFDTLEGADPSSLANKVAKVAGSINPGEAASPASLGMAAGASVLETVKELAKDNDSSKEKNQVQPGLSGPLKKRIQQLXDSNPVMLFMKGTPEEPKCGFSRKVVVVLNEERVKFGSFDVLSDSEVREGLKKFSNWPTFPQLYCKGELLGGCDIAIAMHESGELKEVFKDHGIDTTNEAKEKESGNGKGGISKSTDLSTTLSSRLESLVNSSAVMLFMKGKPDEPKCGFSRKVVEILQQENVPFESFDILTDEEVRQGLKVYSNWSSYPQLYIKGELIGGSDIVLEMQKSGELRKNLHEKGILPAETIQDRLKNLIASSPVMLFMKGTPDAPRCGFSSRVADALRQEGLNFGSFDILTDEEVRQGLKVYSNWPTYPQLYYKSELIGGHDIVMELRNNGELKSTLSE

SEQ ID NO: 229664 - protein, 84 aa, Glycine max
  Clone ID: PAT_MRT3847_49410C.1.pep
KVYGTIVSRAVPQFLSLSLSLSLSLFPFSLSWDLFMSEKNKSDKLCVYLGANSSAINPGFGWFVTPLLWLCLIVYYPYEIKILN

SEQ ID NO: 229665 - protein, 60 aa, Glycine max
  Clone ID: PAT_MRT3847_49411C.1.pep
MSVRDHGTNCEGQSTLLHGSYELGRVLWHGTFSTVYHARYLISGQHVAMNVVGYEPVFYD

SEQ ID NO: 229666 - protein, 236 aa, Glycine max
  unsure (1)..(236): unsure at all Xaa locations
  Clone ID: PAT_MRT3847_49412C.1.pep
MGNISSGGNPRRRHSGASRRSHPPPPPRPVTPQPEIAANPFVYHGAAAPYPNPPLHYPQYHYPGYYPPVPPMPYHPHQHQHHHRHMDPAWIQGHFPSGPMMPNPAPFVEHQKAVTIKNDVNIRKETLKLEPDVENSGHFLVSFSFDATVSGSITIYFFAKEGEGCILTPMKENQLAPVSVHFEQGLGQKFXQAAGTGIDFSTFEESELLKAGEMDVYPLAVKADASPGNHDESDRS

SEQ ID NO: 229667 - protein, 100 aa, Glycine max
  Clone ID: PAT_MRT3847_49413C.1.pep
MLRGGILFPPPPKWEPPFLNKARGGSPPSPVGAPHAWALYPTGGGFLGRSPLPFRPPMFLAFWEKGRVGALPPPFISWNPGGGFGPATPPSFPRLVVGPP

SEQ ID NO: 229668 - protein, 227 aa, Glycine max
  Clone ID: PAT_MRT3847_49414C.1.pep
FFLITLVSLLLILFVGKVGVGAAIAFVSIYIVYAFIVAANEILRKHARRLKLDAVTPMLPVQGSVFSLGSEEDTSIYSSLLEDTESDPPRLPPSLPQWMWSSNVAIYSNQANKINFLDDERPPWGWSDGSTENTRTSFTVSKLFLMMEIPLAIPRRLTIPMVHEEVWSKPYAVASASLAPILLAILCSTQDNVSNQGVILSYCVGVTLGCTFGILAYKYTVSDHPPP

SEQ ID NO: 229669 - protein, 76 aa, Glycine max
  Clone ID: PAT_MRT3847_49415C.1.pep
ISKYRAKRSQRKFNKIIKYACRKTLADNRTRIRGRFARNDEISEIPKAPCSSSTTEEYEDEFWVEFIEGLNEEVMA

SEQ ID NO: 229670 - protein, 105 aa, Glycine max
  Clone ID: PAT_MRT3847_49416C.1.pep
YFFGTRVSNVYTTTLNNRRFHALLNCGKKKTAPHPSSKKKEERVKPFGDRLVWLPNAEPPEWLDGSVIRDRGFDPFGFAKPAEYLQIELDSLDQNLLKNINGDVI

SEQ ID NO: 229671 - protein, 84 aa, Glycine max
  Clone ID: PAT_MRT3847_49417C.1.pep
SKTVFLNDTCDNGRGGLPTTLFIILYNHNLSSHINKKILTILAKTKKILFLTIIDPFSISSHPVLFFKNNEILTSYSTNSMLTR

SEQ ID NO: 229672 - protein, 53 aa, Glycine max
  Clone ID: PAT_MRT3847_49418C.1.pep
TRNQSYINIIKQKGVLNHDGQSPLTKNVECGGSKDISGQTIEKHDLTLEKHHR

SEQ ID NO: 229673 - protein, 31 aa, Glycine max
  Clone ID: PAT_MRT3847_49419C.1.pep
LNNQKPDGYLHSTIKNLNSDHTPSTVSRYIN

SEQ ID NO: 229674 - protein, 261 aa, Glycine max
  unsure (1)..(261): unsure at all Xaa locations
  Clone ID: PAT_MRT3847_4941C.1.pep
HASAHASEESTEYIYLTIIKLQMLYHVGMAWDLRWRTCHNNSTEFCLLKPTVSPEPVIPSIEQMSWLDMEWCSILQRTQLHMNLLEPFIAFRRVLLQVLSSRDCMLQHLLQSATTLRKGCRFSQAAAALHEFKLLSVETKGQSSSVYWLGRLEEAKLFRAQSQNVMAINLAMYISQNYHSNEEASDAYRLIGKWLAETRSSNSRTILEKYLKPAVSIAEDVNATAKNALQRKCQAHFHLAHYADALXKAMKKTYSMMAAAC

SEQ ID NO: 229675 - protein, 69 aa, Glycine max
  Clone ID: PAT_MRT3847_49420C.1.pep
NYVMVQLQVLSLQIIKKGKIKVRGIAGAHQMDSFNENVKLVKIQTSFMCQVPLTLFIHGKVQVTVELWK

SEQ ID NO: 229676 - protein, 82 aa, Glycine max
  unsure (1)..(82): unsure at all Xaa locations
  Clone ID: PAT_MRT3847_49421C.1.pep
ALVLEIVMTFGLVYTVYATAIDPKKGNLGIIAPIAIGFIVGANILFGWGLXSGAAMEPRCGHCGACLSLSWHLGPDHWTLLG

SEQ ID NO: 229677 - protein, 46 aa, Glycine max
  unsure (1)..(46): unsure at all Xaa locations
  Clone ID: PAT_MRT3847_49422C.1.pep
IXCXXXGXVXHMIKSMMWAYXISSCIKLCQFPVEPIPCNMXATXXF

SEQ ID NO: 229678 - protein, 51 aa, Glycine max
  Clone ID: PAT_MRT3847_49423C.1.pep
LSEIGTLLAQNTFISHNGLVSSVSLALCMPQQIVLSLRERRLAQATLPIFD

SEQ ID NO: 229679 - protein, 39 aa, Glycine max
  unsure (1)..(39): unsure at all Xaa locations
  Clone ID: PAT_MRT3847_49424C.1.pep
GVLXRSVLMRQSPLXSXTHKLXGXRXXHHXXXMAXAPXQ

SEQ ID NO: 229680 - protein, 46 aa, Glycine max
  unsure (1)..(46): unsure at all Xaa locations
  Clone ID: PAT_MRT3847_49425C.1.pep
MIKPYFSGXKXKSXRXGQNITSXYDXDXTSAXLQXXKLXDCDFLKR

SEQ ID NO: 229681 - protein, 131 aa, Glycine max
  Clone ID: PAT_MRT3847_49426C.1.pep
MGGKKRKQERRTQHVKGKQPKKKKGEKGQKGRPDNQANPGQRGRPRPSPKARPQPKPRPGPGKPGGHEKNDPPEKPKKLGGVKPGGLGGPTVKKKRKRTVKRRETQEKKAPERVARDKPDRSRRANRAPLG

SEQ ID NO: 229682 - protein, 244 aa, Glycine max
  Clone ID: PAT_MRT3847_49427C.1.pep
MDIDFKEYQLRCELRGHEDDVRGICVCGSKGIATSSRDRTVRLWSLDDNRRFVSSKILLGHTSFVGPLAWIPPNSEFPHGGVVSGGMDTLVCVWDLKTGEKVHTLKGHQLQVTGIAFDDGDVVSSSVDCTLKRWRNGQSVEWWEAHKAPVQAVIKLPSGELVTGSSDSTLKLWRGKTCLHTFQGHSDTVRCLSVMSGLGILSASHDGSLRLWAVSGEVLMEMVGHTAIVYSGDSHASGLIVSGS

SEQ ID NO: 229683 - protein, 95 aa, Glycine max
  Clone ID: PAT_MRT3847_49428C.1.pep
SPISHRRVFSKSTKSGKENDSPSLWPAQRVIFFPLRNRTQTSREHLRDSSNQVTSAFVSGSKVRQPVIPSLSTIGTRWDRRRFTSAAGFQPGAAA

SEQ ID NO: 229684 - protein, 29 aa, Glycine max
  Clone ID: PAT_MRT3847_49429C.1.pep
ARPLWWALETMCEILYLCTMPGTKFLLRK

SEQ ID NO: 229685 - protein, 117 aa, Glycine max
  Clone ID: PAT_MRT3847_4942C.1.pep
ETHLDLSQKPLRAFCFPSPSSSVLSVLCRSKLLLLLLPVFENGFCRFVPDSAGECATVLPLLQPHQHLRHAFRSQPSSHHRHRYRHQVLRSRRAFLKGLLNNNPIPPLRNRQEDPLG

SEQ ID NO: 229686 - protein, 65 aa, Glycine max
  Clone ID: PAT_MRT3847_49430C.1.pep
KRKGLQLTKINIAFTNWFHTYKRITLQKQIKREYRLKKWIKLSVLVSSIAMDNVRSELPGDTQKF

SEQ ID NO: 229687 - protein, 81 aa, Glycine max
  Clone ID: PAT_MRT3847_49431C.1.pep
LNTFLYLSARNKEKRKTKKKGPPGKTPKGDERVHAPFFGGAQENQGDPSPGLEDTPDKSKKELTCSQDQLDYRRNGRLLLQ

SEQ ID NO: 229688 - protein, 88 aa, Glycine max
  Clone ID: PAT_MRT3847_49432C.1.pep
VSLLCAPLMERIQKSPSIDNSQGWFHVTLLASRDIIILDNTLWRYGLSVIMHHKNRKTLYEASLLSSESETQHDHRSTSTPYGSHRPG

SEQ ID NO: 229689 - protein, 379 aa, Glycine max
  Clone ID: PAT_MRT3847_49433C.1.pep
MFTKQMISSEIPMLMSKACEIFIQELTFRAWMHAEKNNKSIVQPCDVAKVIMQTDTMNFLTEIIPNNLGDFSVFDAKEENIANIAEENEVSLSFTAGFMGNPMMKMDSEENAGNIVEGNQATLPYTSGFMGNPMNMMNMDNEYNANGSQVALPYTAGFMGNPMMNMGNEENAINIAEGSQVALPYNADFVGNLMNMMQMGTEDNAGNLANGSQDALPCTAGFMGNPMMNMGSEENVRNIAEGSQASMPYTTGFMGNLMNMMQMDNEDYAGSQVALPYPGFMKNSAMNMEENVGNITEESQVVLPYTDGFMENHIDMMNMSYDLEAGNQLIPQPNMMQPPFMPSDQLPYNFQPNVRGTLLTLYHGPMNVGMHLPLPGVDE

SEQ ID NO: 229690 - protein, 41 aa, Glycine max
  Clone ID: PAT_MRT3847_49434C.1.pep
TSRFLRVPGGCHVGGYYLRNRFQWTDTIGPWEERPVHLGDA

SEQ ID NO: 229691 - protein, 54 aa, Glycine max
  Clone ID: PAT_MRT3847_49435C.1.pep
LRPMNTVPILFNLQNMLDSRVNYVGRTYNLKEHIIPLQGLTNLLRHYFIYHGRQ

SEQ ID NO: 229692 - protein, 89 aa, Glycine max
  unsure (1)..(89): unsure at all Xaa locations
  Clone ID: PAT_MRT3847_49436C.1.pep
SSXTFNHXXXXTHXAPEINGXXSHHRSAPCDNAAMSDLLSKXPXIXTVKNXXXXXVXXDYFGAKKLHQIXNXTXLXATMXXXTXTVPGX

SEQ ID NO: 229693 - protein, 52 aa, Glycine max
  unsure (1)..(52): unsure at all Xaa locations
  Clone ID: PAT_MRT3847_49437C.1.pep
VCPYGRFVGHAIAYGCHCQSWCDWSLVVRGPPSLLKSPLXSVXXKKSTARPC

SEQ ID NO: 229694 - protein, 77 aa, Glycine max
  Clone ID: PAT_MRT3847_49438C.1.pep
MYCIFFYRQSARVICALTENSRVFLEDDRSYPLMKAMRHSCVVGVSISIRCAQIPEPYTMFLLVPESSQAAQGKPLV

SEQ ID NO: 229695 - protein, 197 aa, Glycine max
  Clone ID: PAT_MRT3847_49439C.1.pep
MNLLKNLDTLRRFDSFSKTIEDFRVKTSGGGLVTLLSVWCMGVLFYAEVKDFMTPGITEDLFVDTSRGPKLRINLDIVMPTISCSFLSLDAMDSAGEHHLHIDHNIYKRRLDLMGQPLEDPQKEDLQTSTSVKSSTEAPNITKSVELKNDTCGSCYGAPKEIIKCCNTCEDVREAYMIMQWKFPDPDQFEQCKNDQS

SEQ ID NO: 229696 - protein, 76 aa, Glycine max
  Clone ID: PAT_MRT3847_4943C.1.pep
LDGLYNNLLRCDIPCIDLYTRDVRIKSINITNNYIKYLCFKINLSLNIYSNDVYYLYMNLCNFSFTSLRSFAGQKL

SEQ ID NO: 229697 - protein, 52 aa, Glycine max
  Clone ID: PAT_MRT3847_49440C.1.pep
KNGVKAPSIYHSPRGPTTSQVLSSLSVLPAAGILLLLTGLTLAGTLIGLSFC

SEQ ID NO: 229698 - protein, 91 aa, Glycine max
  Clone ID: PAT_MRT3847_49441C.1.pep
PKSVGIRIKITSDLQKTAAAGDGTDLPIKQGIKTPDKNFPRSQTKSCDQLNWGTIYKFILLKVILQRVMAANQNRIQFSTQKKLFTNGPVG

SEQ ID NO: 229699 - protein, 120 aa, Glycine max
  Clone ID: PAT_MRT3847_49442C.1.pep
PSQSVDGILPVSANFVSKNQKMNLRTIIIIALSSFVLLLVLVGAFSIILKWRKTGRPSSAVGPAFTSSLNKRSGLGSMLSSSITSSTSISLMSTMATSLLSVKTFSLSELEKATDKFSSK

SEQ ID NO: 229700 - protein, 64 aa, Glycine max
  Clone ID: PAT_MRT3847_49443C.1.pep
AGAALEYLSFQHSFILTCSSTFWRGTFQRGSSLQMQFIFNKNSTFVCNYHLGSSFFIHSTICKT

SEQ ID NO: 229701 - protein, 63 aa, Glycine max
  Clone ID: PAT_MRT3847_49444C.1.pep
RSGGKLFLGKRGFSVQTLSMGSFKMGVVSPGPSGQKGGFPFFFFFPLVNGKKSLNKKKSCNSF

SEQ ID NO: 229702 - protein, 71 aa, Glycine max
  Clone ID: PAT_MRT3847_49445C.1.pep
FFFLSPILPSFSDLRYFPILLLISSSKPIPSQGFSSPKLLNMSSRHQNRHHSILDLCCEMKLWWLETEHGG

SEQ ID NO: 229703 - protein, 221 aa, Glycine max
  Clone ID: PAT_MRT3847_49446C.1.pep
MALPNQQTVDYPSFKLVIVGDGGTGKTTFVKRHLTGEFEKKYEPTIGVEVHPLDFFTNCGKIRFYCWDTAGQEKFGGLRDGYYIHGQCAIIMFDVTARLTYKNVPTWHRDLCRVCENIPIVLCGNKVDVKNRQVKAKQVTFHRKKNLQYYEISAKSNYNFEKPFLYLARKLAGDTNLHFVESPALAPPEVQIDLAAQQQHEAELLAAASQPLPDDDDDQFE

SEQ ID NO: 229704 - protein, 70 aa, Glycine max
  Clone ID: PAT_MRT3847_49447C.1.pep
SFPLALLGTVVGKNWSGALNNPLSRKTIPLPIPGKEVVPFTPLVFSLNGRTATPLASIFIEMVFGFLPFW

SEQ ID NO: 229705 - protein, 222 aa, Glycine max
  unsure (1)..(222): unsure at all Xaa locations
  Clone ID: PAT_MRT3847_49448C.1.pep
MALPNQQTVDYPSFKLVIVGDGGTGKTTFVKRHLTGEFEKKYEPTIGVEVHPLDFFXTNCGKIRFYCWDTAGQEKFGGLRDGYYIHGQCAIIMFDVTARLTYKNVPTWHRDLCRVCENIPIVLCGNKVDVKNRQVKAKQVTFHRKKNLQYYEISAKSNYNFEKPFLYLARKLAGDPNLHFVESPALAPPEVQIDLAAQQQHEAELLAAASQPLPDDDDESFE

SEQ ID NO: 229706 - protein, 221 aa, Glycine max
  Clone ID: PAT_MRT3847_49449C.1.pep
MALPNQQTVDYPSFKLVIVGDGGTGKTTFVKRHLTGEFEKKYEPTIGVEVHPLDFFTNCGKIRFYCWDTAGQEKFGGLRDGYYIHGQCAIIMFDVTARLTYKNVPTWHRDLCRVCENIPIVLCGNKVDVKNRQVKAKQVTFHRKKNLQYYEISAKSNYNFEKPFLYLARKLAGDPNLHFVESPALAPPEVLIDLAAQQQHEAELLAAASQPLPDDDDESFE

SEQ ID NO: 229707 - protein, 58 aa, Glycine max
  Clone ID: PAT_MRT3847_4944C.1.pep
MREWMTVSVVHARFDNILCCLLRKKKPFFVCFLRNKVISLICQPRKYKFFPFQNGKEL

SEQ ID NO: 229708 - protein, 221 aa, Glycine max
  Clone ID: PAT_MRT3847_49450C.1.pep
MALPNQQTVDYPSFKLVIVGDGGTGKTTFVKRHLTGEFEKKYEPTIGVEVHPLDFFTNCGKIRFYCWDTAGQEKFGGLRDGYYIHGQCAIIMFDVTARLTYKNVPTWHRDLCRVCENIPIVLCGNKVDVKNRQVKAKQVTFHRKKNLQYYEISAKSNYNFEKPFLYLARKLAGDPNLHFVESPALAPPEVQIDLAAQQQHEAELLAAASQPLPDDDDESFE

SEQ ID NO: 229709 - protein, 986 aa, Glycine max
  Clone ID: PAT_MRT3847_49451C.1.pep
MEAEFGAKNQYLYGPVVSGMKKAVVGNGKRSLEWDLNDWRWDGDLFTAQPLNSVPSDCRGRQFSPPHPEIPAKNANPSTTNLSYSVFISGEGKRELEKRRRGVIGEGEGEGLNYEAGSLSLNLAGQGYPLMVEEEEKSGKKTKVIGTNTTTTTTTTSNRAVCQVQDCRADLSNAKDYHRRHKVCDVHSKATMALVGNVMQRFCQQCSRFHVLQEFDEGKRSCRRRLAGHNRRRRKTHPDVSVVNEGSLNDQRDSNYLLMSLLRILTNLHSNGSDHTRNQDILSHLLKNLASLAGPNNGGRLAPLLEESKGLVNAGTHGADHDKPNLNSNAPEASRPSSSIKTDNGIIAQDPPMSVVQGNLNNIDLNNVYNDIQNTVENHKKPYPPVASGMGFIDHASWLQCDSLKSSPPQTSRNSDSTSTQSPSSSSGEAQSRTDRIVFKLFGKDPSDFPLLLRSQILNWLSHSPTEIESYIRPGCIILTIYLRLEKSAWEELYCNLGSSLRKLLAASNDSFWRTGWVYARVQHAVAFLYNGQVVLDVPLRLKSPQHCMISCINPLAVPASASAQFIVKGFNLSQSSTRLHCALEGKYLVHASCHDLIGGADAPIQHLSFSCQIPSVTGRGYTTDGDHGLSSCSFPFIVAEQEVCSEICKLENVIEEAETTDDIQIKNQHMEEKTQALDFLQEMGWLLHRSHVKFKLGSMAPFHDLFQFNRFAWLVDFSMDHGWCAVMKKLLDIIFEGGVDAGEHASIELALLNMGLLHRAVKRNCRPMVELLLRFVPVKTSDGADSEMKQVAEAPDRFLFRPDTVGPAGLTPLHVAASMSGSENVLDALTNDPRMVGIEAWKSARDSTGLTPNDHACLRGYYSYIQLVQNKTNKKGERQHLVDIPGTVVDSNTTQKQSDGNRTCRVPSLKTEKIETTAMPRQCRACQQKVAYGGMKTAMVYRPVMLSMVTIAVVCVCVALLFKSSPRVYYVFQPFNWESLEYGAM

SEQ ID NO: 229710 - protein, 38 aa, Glycine max
  Clone ID: PAT_MRT3847_49452C.1.pep
TTRRKEAHLSLSLHFIVFVFAVSKLTQCSLALSQLVTY

SEQ ID NO: 229711 - protein, 221 aa, Glycine max; identical to SEQ ID NO: 229708
  Clone ID: PAT_MRT3847_49453C.1.pep

SEQ ID NO: 229712 - protein, 206 aa, Glycine max
  unsure (1)..(206): unsure at all Xaa locations
  Clone ID: PAT_MRT3847_49454C.1.pep
SLSVFRFSLHIHFILLFSSQALPNQQTVDYPSFKLVIVGDGGTGKTTFVKRHLTGEFEKKYEPTIGVEVHPLDFFTNCGKIRFYCWDTAGQEKFGGLRDGYYIHGQCAIIMFDVTARLTYKNVPTWHRDLCRFIFCPTDFSGVCENIPIVLCGNKXVDVKNRQVKAKXVTFHRKKNLQYYEISAKKQLHFESHFLYLARKLCSDTN

SEQ ID NO: 229713 - protein, 242 aa, Glycine max
  Clone ID: PAT_MRT3847_49455C.1.pep
WDRTIKVWRISDSKCLESIHAHDDAVNAVVCGDGGVMFSGSADGTVKVWRREPRGKGLKHAPVKTLLKQECAVTALAMDAAGGSMVYCGASDGLVNFWESDKNYAHGGVLKGHKLAVLCLPAAGTLVFSGSADKTICVWKREGLIHTCMSVLPGPDGPVKCLPVEEDRKAPAKGDRERLWSLYSGSLDKSVKIWSVSESMNNDNNNTHSNDPVRPPRMAFDADSLPSVSDSSFSSGRAHGRN

SEQ ID NO: 229714 - protein, 205 aa, Glycine max
  unsure (1)..(205): unsure at all Xaa locations
  Clone ID: PAT_MRT3847_49456C.1.pep
SLSVFRFSLHIHFILLFSSQALPNQQTVDYPSFKLVIVGDGGTGKTTFVKRHLTGEFEKKYEPTIGVEVHPLDFFTNCGKIRFYCWDTAGQEKFGGLRDGYYIHGQCAIIMFDVTARLTYKNVPTWHRDLCRVCENIPIVLCGNKVDVKNXAVKAKHVTFHRKENLQYYEISAKSNYNFEXPFLYLXQELAGDTNLHFVESPALA

SEQ ID NO: 229715 - protein, 144 aa, Glycine max
  Clone ID: PAT_MRT3847_49457C.1.pep
MALPNQQTVDYPSFKLVIVGDGGTGKTTFVKRHLTGEFEKKYEPTIGVEVHPLDFFTNCGKIRFYCWDTAGQEKFGGLRDGYYIHGQCAIIMFDVTARLTYKNVPTWHRDLCRVCENIPIVLCGNKVDVKNRQVKAKQVTFHRK

SEQ ID NO: 229716 - protein, 239 aa, Glycine max
  Clone ID: PAT_MRT3847_49458C.1.pep
VLLSALNSLSLSLSLDQSWALPNQQTVDYPSFKLVIVGDGGTGKTTFVKRHLTGEFEKKYEPTIGVEVHPLDFFTNCGKIRFYCWDTAGQEKFGGLRDGYYIHGQCAIIMFDVTARLTYKNVPTWHRDLCRVCENIPIVLCGNKVDVKNRQVKAKQVTFHRKKNLQYYEISAKSNYNFEKPFLYLARKLAGDPNLHFVESPALAPPEVLIDLAAQQQHEAELLAAASQPLPDDDDESFE

SEQ ID NO: 229717 - protein, 92 aa, Glycine max
  Clone ID: PAT_MRT3847_49459C.1.pep
WGPQNQLVFFPPFSPPQPDFSLLGPNRVDPLFYSSPGRALKGKHISPFPLVKKKTPPGPKKQTPFPRGLGGLLKPPGRPVFPLENGAWGPPH

SEQ ID NO: 229718 - protein, 103 aa, Glycine max
  Clone ID: PAT_MRT3847_4945C.1.pep
QEQALQEMGLHLSQSKLKMEDIKEVNQALKGHAWLKDDQATHCRQCEKEFSISRRKHHCRNCGHIFCNTCSSNELALPSYPKPVRVCDSCHTLLLHRCSSTAS

SEQ ID NO: 229719 - protein, 337 aa, Glycine max
  Clone ID: PAT_MRT3847_49460C.1.pep
MAVEARHLNLFPSQLITNRQVMDSGEANMMNMYNNSTPIGGYSSFLPLSGAVTETALPSSVFNHSLANAVKSESGVTYNNNNNNNNVSVSPMSRKRSRDNNNNYGYNNNNNDSFSFLGQDVSLQIQQQQLDIEHLIMQRMEKVRMEIDEKRKRQARRIIEAIEVGVMKKLKTKEEEIEKIGKLNWALEEKVKHLCMENQVWRNIAETNEATANALRCNLEQVLAQRGGMAAEEDVGGGATVCGGAEMDDAESCCGSTEEDGLEKETGGWRTLAGCAGVKDKEGGGNGRLCRNCRKEESCVLILPCRHLCLCTVCGSSLHICPICKSYKTASVHVNMS

SEQ ID NO: 229720 - protein, 43 aa, Glycine max
  Clone ID: PAT_MRT3847_49461C.1.pep
LIPLSHPTVVLRSISTTRDYGSQMMALKKIAFRVKITDCTVLD

SEQ ID NO: 229721 - protein, 40 aa, Glycine max
  Clone ID: PAT_MRT3847_49462C.1.pep
ACYLIKGRSVLRIPYALKVVKRLISFEPNNVCSIICGQYW

SEQ ID NO: 229722 - protein, 63 aa, Glycine max
  Clone ID: PAT_MRT3847_49463C.1.pep
ISSGSFFSFLAICKAQMKSPGSGIDAPSPSLWIANSTSSTEKFIISKEPLVSSTTPLSSSGSS

SEQ ID NO: 229723 - protein, 46 aa, Glycine max
  Clone ID: PAT_MRT3847_49464C.1.pep
KQRITLAHDATHAPPNNHNFTSLHTKLQRLLIFKRRKGINRLFLWN

SEQ ID NO: 229724 - protein, 59 aa, Glycine max
  Clone ID: PAT_MRT3847_49465C.1.pep
IKHCYINVFLYVFFYVFLSFFSFSYCSHLWSGCCSLHPFISMYLLTSLSSSVIHSSSSH

SEQ ID NO: 229725 - protein, 197 aa, Glycine max
  Clone ID: PAT_MRT3847_49466C.1.pep
MKDTSAGDTVENAAGDGIKAWSSGSHLWVRRVMHVTMFLAGLAVLWMFLYNSASPFEFPTSSDYFSAESSKADYDPKLESVLANASMKDKTVIITILNDAWAEPGSMFDLFLESFRLGNETQWLLNHLVAITWDQKTYARCLAMHKHCYQLGTKGGNFTGEVFFMAPNYLQMMWRRTEFLGSVLEMGYNFVFTDTDI

SEQ ID NO: 229726 - protein, 80 aa, Glycine max
  unsure (1)..(80): unsure at all Xaa locations
  Clone ID: PAT_MRT3847_49467C.1.pep
IDETDAAGPTGKQREGGAKKTLHQLQGETDGXEQNEGTTQTAATNLPEILDPASTRPGRQERHTAAPNPDARGRQEISEP

SEQ ID NO: 229727 - protein, 46 aa, Glycine max
  Clone ID: PAT_MRT3847_49468C.1.pep
MCLSVVVMLPPICYYSHDRLLRRFETISIMIEGRNNQCPIHEFRIL

SEQ ID NO: 229728 - protein, 93 aa, Glycine max
  Clone ID: PAT_MRT3847_49469C.1.pep
WLPILHHRSGAYYDCAHPSRTSHRSNVITLYIGHQAAFSLLRHLFPGERTLPPILPSSRVLCWLLLLLSFPLTLTPPPPPQRRRTSYSDDRKP

SEQ ID NO: 229729 - protein, 30 aa, Glycine max
  unsure (1)..(30): unsure at all Xaa locations
  Clone ID: PAT_MRT3847_4946C.1.pep
ILPQCLIQGCIXTLDLHLNHQKRLFAQFKR

SEQ ID NO: 229730 - protein, 34 aa, Glycine max
  Clone ID: PAT_MRT3847_49470C.1.pep
SYAQTQDVSTSRSAQEPSPSLTTTLPVSDLEPNP

SEQ ID NO: 229731 - protein, 67 aa, Glycine max
  Clone ID: PAT_MRT3847_49471C.1.pep
KKSSNEISKNGKLGAVLLSRCYLLSIYSSSCSYYLIVDSTHFFANPGRAIWTWILLGVFLANPFSIF

SEQ ID NO: 229732 - protein, 94 aa, Glycine max
  unsure (1)..(94): unsure at all Xaa locations
  Clone ID: PAT_MRT3847_49472C.1.pep
KSGLSDGWNYNTDLTGXXYDXGDNVKFGFPMAFTTTMLAWSVLEFGDVMPPNELRNALVAIRWXTDYLLKTVSQPIGIFVQVGDPNSDHECWER

SEQ ID NO: 229733 - protein, 47 aa, Glycine max
  Clone ID: PAT_MRT3847_49473C.1.pep
CVFSLSSDGPLIYLIFITQYPHHAISLLFQVPYKTALILNMFFYINN

SEQ ID NO: 229734 - protein, 83 aa, Glycine max
  Clone ID: PAT_MRT3847_49474C.1.pep
VPVLKDEKLSVRILVDHSIVKSFAQGGRTCVTSRVYPTKAIYGAARLFLFNNATEASVTASVKVWQMNSAFIHPLHPDQRNSI

SEQ ID NO: 229735 - protein, 45 aa, Glycine max
  Clone ID: PAT_MRT3847_49475C.1.pep
FHTKNIAQTFYFFRLKIIFVLNCFIHIKNTCLACFGNVHGHGASF

SEQ ID NO: 229736 - protein, 168 aa, Glycine max
  Clone ID: PAT_MRT3847_49476C.1.pep
MPEILDGAIRRAVVIGNGFAGAENQCIGLVRALGFSNRHSLYRVTRPRGGINRWLKWLPVSIHKRLDSVIRMICGKSRFQTPHKIGISNVLDADAHHIATMVRETFHKDGPLLVIASGRDTISVASSIKRLAPENVFLVQIQHPRFQLNRFDLVITPRHDYFPLTPHA

SEQ ID NO: 229737 - protein, 74 aa, Glycine max
  unsure (1)..(74): unsure at all Xaa locations
  Clone ID: PAT_MRT3847_49477C.1.pep
MSHTEVKLKIPFGNKLLDAVCLVPNKSLTYGIILTHGASGDMNLAHXMSLACHLAYHGFFCLRFTCKGLNIAHR

SEQ ID NO: 229738 - protein, 68 aa, Glycine max
  Clone ID: PAT_MRT3847_49478C.1.pep
KVAQPPSDPKRRVCINAKASFLVATLWNNQVRCWEITRNGTEATSTPNAWMEYELPVGSSPPQDEGPT

SEQ ID NO: 229739 - protein, 97 aa, Glycine max
  Clone ID: PAT_MRT3847_49479C.1.pep
KEKPSQDFTGLLEPKIPNSISGVTLWIKQLNKIYPLISIFNLFSKKKPFLGDSQSLFGKNFNLTKGKGLQEHPKCFPLQETTFEHFSLPQEMTNPLF

SEQ ID NO: 229740 - protein, 108 aa, Glycine max
  Clone ID: PAT_MRT3847_4947C.1.pep
PSKLSVSPHMSSISPPVSSQICLMSYRLEHILSSLKNTVVICKSPAQQCSLNNLTSNNCSLTPYLKHTLYKIKSLLPSMRPHKATMNTTLAYYHTKSGPTFGRPTAIV

SEQ ID NO: 229741 - protein, 132 aa, Glycine max
  Clone ID: PAT_MRT3847_49480C.1.pep
SRLQCSKETDHYAAFTDYIKGLSPSSLDMELRMFQIIDDDDQQEAEKRPELVSIGWLLDYFIHELSSRNNFEFLQAVMRLFLKIHGETIRQQSCLQEKARKLLDIQCMVWQRVDKLFQSSRCVIAFLSNSQI

SEQ ID NO: 229742 - protein, 65 aa, Glycine max
  Clone ID: PAT_MRT3847_49481C.1.pep
SSLKTYLSACLFGKNPSCHLTWYAFPPFKNFLLSNQWKDTSIELCELNFVLWISKQAIYFSSLKS

SEQ ID NO: 229743 - protein, 66 aa, Glycine max
  Clone ID: PAT_MRT3847_49482C.1.pep
DPQEFSSWRDELSAISIQESLVRNWVKAFSFFIVGNKISQRFKVRSDAFQDPKKGWDICSVVPLLR

SEQ ID NO: 229744 - protein, 54 aa, Glycine max
  Clone ID: PAT_MRT3847_49483C.1.pep
LIIKFHIQDYPVLGSGSSNHLVYLLNCLLSTKWPVAMFYLEPEHFLDTRAHPCS

SEQ ID NO: 229745 - protein, 51 aa, Glycine max
  Clone ID: PAT_MRT3847_49484C.1.pep
RSNSLCILLSYVLRYNQASVTPFIKRRAHTTKRKLLTEKKIFTSLKPFFAF

SEQ ID NO: 229746 - protein, 129 aa, Glycine max
  unsure (1)..(129): unsure at all Xaa locations
  Clone ID: PAT_MRT3847_49485C.1.pep
IRSCIILLDHNMDARVSYLGXPPFITPNTIHVSTIVAGTFGYLAPEYFDTGRATLKGDVYSFGVVLLELLTGKKPSDEAFMEEGTMLVTWVRQEFLKIYFYDYIHQTSLKSIWEWPIYYLNFHQVGWLV

SEQ ID NO: 229747 - protein, 46 aa, Glycine max
  Clone ID: PAT_MRT3847_49486C.1.pep
SPLFLNPIEILNQQLDAARLLDAPVGRRCSLCDATCTYPRRLINFC

SEQ ID NO: 229748 - protein, 91 aa, Glycine max
  Clone ID: PAT_MRT3847_49487C.1.pep
MYCPPGRPFYKGFMRRIPGNIFGVCLGTPQLIFQTSQGIPPGPPSPLNTSPFFTRGPPPPPPPPPPPPPPPPPPPPQRRRTSYSDDGKPTW

SEQ ID NO: 229749 - protein, 120 aa, Glycine max
  Clone ID: PAT_MRT3847_49488C.1.pep
MGSCEATNVVLSKIKNFDPENASKIMGYLLMNLEESELIRVACSPDTVLQTLVLRVKSHLGLTLSTPSSPSQFPPSPLNPIARLTGTSSNPFSRGGPTNGFDFTRNPASPSSHSHAWNFP

SEQ ID NO: 229750 - protein, 100 aa, Glycine max
  Clone ID: PAT_MRT3847_49489C.1.pep
FFFFFFFFFFFFFFFFFFFFWKNTPEFHICKGRGKWIIKKLQGSHNGYGQHQTFQQKNPGILLAGFFFFFLGKISRTFLLNPPPQGLKFILSERINNSLG

SEQ ID NO: 229751 - protein, 136 aa, Glycine max
  unsure (1)..(136): unsure at all Xaa locations
  Clone ID: PAT_MRT3847_4948C.1.pep
TLTVTVSANTEGSVIDALNLVYLLSNVKLMSPLVKCLPQLALNYQRKSPVGXPLWNVLLDNAGGFLSIGQQVLDPTATPDWRAMTGDPVKFSLGFVSIMVDGVFILQHYVLCAKNNHFVLHGEESEPFLPRVKQMR

SEQ ID NO: 229752 - protein, 157 aa, Glycine max
  unsure (1)..(157): unsure at all Xaa locations
  Clone ID: PAT_MRT3847_49490C.1.pep
LGPRTITAGIGKPCATLHXTKPADCAFLKRNFTQMSNVMWVAPEDKASLWSQLHSVTCNNLEMQEAYLVNLANVLRELHLHTPEEARLLRRKALSRIERLQKADVPTIAQIEESHSMQRMMNAPDSNDNIVLLLSIDMXGSQGAGQALSNRLLLLIG

SEQ ID NO: 229753 - protein, 79 aa, Glycine max
  Clone ID: PAT_MRT3847_49491C.1.pep
AGSKRTTKGDHNFICLCSKSNHIRMRSHPIARTHTLSLICIHSIPETYIKPSTDRPSIGSSNCTDAHIPIIDSSRNVRC

SEQ ID NO: 229754 - protein, 136 aa, Glycine max
  Clone ID: PAT_MRT3847_49492C.1.pep
TLKYANRARNIQNKPVVNRDPMSNEMLKMRQQLEYLQAELCARSGGSPEEVQVLKERIAWLEAANEDLRCELHEYRSRCSTVEQCEKDAYENSTCNVKTDGHKRGLPITESDYPMSETTGDSREDEEVEKEWEGKD

SEQ ID NO: 229755 - protein, 69 aa, Glycine max
  Clone ID: PAT_MRT3847_49493C.1.pep
VAEEPPIGTMVVLMWPTSEGADDAAASSCRVVAVLCVLLVRLLGHASGSSMHHLLQSRTHRVIRKKERE

SEQ ID NO: 229756 - protein, 119 aa, Glycine max
  Clone ID: PAT_MRT3847_49494C.1.pep
MNSMAVRLAKHLRLSALTSFSLGGVPRSGASWYSTSLSGGENDHPLPDNDAPKKEALDEEFDDFLGEKPELQLQGVDPKKGWGFRGVHKAIICGKVGQAPVQKILRNGRNITIFTVGTG

SEQ ID NO: 229757 - protein, 119 aa, Glycine max
  Clone ID: PAT_MRT3847_49495C.1.pep
RLRETTEGVRQLASSRWTAATQFAIVATLSSLSHHLQKPSSEDNKDILDKTKDAIITLQEVLVGKHDEDIEETLYKYHIPTDRWWSTLCKVIEGLALLKGLPLDNIQHLELDFEGRSFD

SEQ ID NO: 229758 - protein, 179 aa, Glycine max
  Clone ID: PAT_MRT3847_49496C.1.pep
MLSQTHVLSSRPFSFNRFSMPTKMAVITSRAPFSVRVSTSTTSTPLAGDTIPALVMSEQQTPNLQSRVAAAPSIAVARNLGFRPTPELGLLSHLFVLSMAFGAFFSVAVFSIPTLIAFGRLGASVKKLSKVVSEEVPGTLHSLKLSSMELNDLTQQLSSLRHKIAGISKGKQDSSTARS

SEQ ID NO: 229759 - protein, 190 aa, Glycine max
  Clone ID: PAT_MRT3847_49497C.1.pep
MARKKLNLTYITNDPKRKTTLKKRKNGLMKKMNEISTLCGIESCAIIYSPNDPQPEVWPSDSGVQRVLSRFMEMSEVKQSRKMLNQENLLRQMINKGQQQLTRQRNQNRKKEMTNLMFQYLTAGKIFGNPSLVDLNDLSWLIDQNLNEIEKKITMLQIQEVTPVIENGEQEHMHHVQGLESNMDTKQKKH

SEQ ID NO: 229760 - protein, 44 aa, Glycine max
  Clone ID: PAT_MRT3847_49498C.1.pep
AKKNYPKKCPLKVGVILINQPSIYKQSLKMGYPLETMWNPGNNG

SEQ ID NO: 229761 - protein, 143 aa, Glycine max
  unsure (1)..(143): unsure at all Xaa locations
  Clone ID: PAT_MRT3847_49499C.1.pep
ARGSFCLMPRCSVMPTNPNCAVATIKTTTTMHVVAWSPADFKGRMNYQTPTVDAAGDHTLVLRADTMIXDSTTTIEDLARHDHKVDLMCPXRPSVRWTPSDGMEPGEPRLAQLDLADVAMDNDYIGAEADKGHEQDADCYDLL

SEQ ID NO: 229762 - protein, 82 aa, Glycine max
  Clone ID: PAT_MRT3847_4949C.1.pep
SNLYLIRKSYTSFTFVMFEKNATSRAMQVLHVLVYTINKNGGRERTLPCIYIHASMDRSHLTFWKWENYNIKLENSVNLPTR

SEQ ID NO: 229763 - protein, 54 aa, Glycine max
  Clone ID: PAT_MRT3847_494C.1.pep
AIMPLLARVFLGFCQALSAILAVLEGHCILSFMRASRCIRVNLVIQFIVICCRV

SEQ ID NO: 229764 - protein, 66 aa, Glycine max
  Clone ID: PAT_MRT3847_49500C.1.pep
HHFTLFCHIEHQSYVRVGLDFNIHWKVNFLINHTLLQLIVWDVRSLSALQGIEFRGQLALPFETAY

SEQ ID NO: 229765 - protein, 84 aa, Glycine max
  Clone ID: PAT_MRT3847_49501C.1.pep
LIICLISSLIHAPGMFLKMNKGKNCAKTLLGESQCSPKKWVGKWETIDNSGKVLVPLVLPYIIYIYNTFADKKKKCGERLFNPL

SEQ ID NO: 229766 - protein, 50 aa, Glycine max
  unsure (1)..(50): unsure at all Xaa locations
  Clone ID: PAT_MRT3847_49502C.1.pep
MSCCFGFCPCGSSYKGNVFFLNCEMYPHLIYTXSTTTXTFLMVLSVNAQF

SEQ ID NO: 229767 - protein, 88 aa, Glycine max
  Clone ID: PAT_MRT3847_49503C.1.pep
FLITFIFMFNFTFAIKMFKNLTFFSGKYKEGEKSVVKQIFFLSFFNYGYQTLIFLTSPDLLISETLYFVIILLFFFYLYFLLKTFQII

SEQ ID NO: 229768 - protein, 329 aa, Glycine max
  Clone ID: PAT_MRT3847_49504C.1.pep
MASFPSNSAWEHSMASAQQNSNPHASSPSFMTRVAMRISRSRWFTFLRRVFHYQNGPRSNLGSNPFNSSTWMMLELIALLVQIASTTFTLAISKSEKPIWPMRVWIAGYDIGCVLNLLLLCGRYHQLHVTQGNNALSLSELEQQRNNEESSVYRTSHLIDKCRSSLELFFAIWFVMGNVWAFDSRFGSFPQAPKLQVLCIILLSWNAICYSFPFLLFLLLCCCVPLMSTLLGYNMSMGSSARGASDDQISQLPSWRYKGLHSNLDIANDSQSSERLINQDPECCICLAKYKDKEEVRQLPCSHLFHLKCVDQWLRIISCCPLCKQGLQR

SEQ ID NO: 229769 - protein, 60 aa, Glycine max
  Clone ID: PAT_MRT3847_49505C.1.pep
EGSPPLPNLSAKIQAKEGIPPAQQRLIFSGKQLKEGGTLPVYNIQKEAPLPLGLGLRGGF

SEQ ID NO: 229770 - protein, 76 aa, Glycine max
  Clone ID: PAT_MRT3847_49506C.1.pep
SLVHVLDKFSTQRGKKRTFKMNSRCFLVHPQQEYSMVPFSSNSATEDRVASARNRPPRVTPPSFLVRIAMRISRAR

SEQ ID NO: 229771 - protein, 190 aa, Glycine max
  Clone ID: PAT_MRT3847_49507C.1.pep
MNSRCFLVHPQQEYSMVPFSSNSATEDRVASARNRPPRVTPPSFMVRMAMRISRARWFTFLRRVFHYQNGSRSNLGSNPFNSSTWMMLELIALLVQIASTTFTLAISKSEKPIWPMRVWIAGYDIGCVLNLLLLCGRYHQLHVTQGNNALSLSELEQQRNNEESRYPMLFISTTSYQSFCQLVVPKSYNL

SEQ ID NO: 229772 - protein, 185 aa, Glycine max
  Clone ID: PAT_MRT3847_49508C.1.pep
INLVPCSVYRSSHLIDKCRSSLELFFAIWFVMGNVWAFDSRFGSFPQAPKLQVLCIILLSWNAICYSFPFLLFLLLCCCVPLMSTLLGYNMSMGSSARGASEDQISQLPSWRYKGVHTNLDLGNDSQSSERLINEDPECCICLAKYKDKEEVRQLPCSHLFHLKCVDQWLRIISCCPLCKQGLQR

SEQ ID NO: 229773 - protein, 88 aa, Glycine max
  Clone ID: PAT_MRT3847_49509C.1.pep
NSARVNDVSTWEHCAHNYTACPNRYASESISLACKFAYRNATPGSTLKDEYFLSRLPVVEKRLAQGGVRLAAILNRIFTSSKTRIAQA

SEQ ID NO: 229774 - protein, 65 aa, Glycine max
  Clone ID: PAT_MRT3847_4950C.1.pep
DAHRPGDKLYVTRLASRITTIVLEIRLSAEGKLIEVHLEVDARTKEYPGEGFETRDNFDVADRTV

SEQ ID NO: 229775 - protein, 64 aa, Glycine max
  unsure (1)..(64): unsure at all Xaa locations
  Clone ID: PAT_MRT3847_49510C.1.pep
MKDFEPRPNVSAXGANDVDVKPKKSVPKDFDPSPPVSFFNANAIEPGEEKKIMKDFEPTPKVST

SEQ ID NO: 229776 - protein, 61 aa, Glycine max
  Clone ID: PAT_MRT3847_49511C.1.pep
KAAAAAALSHVGLGELFRVSTTAAQELGTKIKLVLQLIQTKVSSECHEPFSNNIVNRKTWR

SEQ ID NO: 229777 - protein, 48 aa, Glycine max
  Clone ID: PAT_MRT3847_49512C.1.pep
QRPSTANIDSGFVVLMARSISFRTLFGCSPSQTSGKCVLCVEKKERES

SEQ ID NO: 229778 - protein, 39 aa, Glycine max
  Clone ID: PAT_MRT3847_49513C.1.pep
TAVRTRQKGTPNRDVLIHSPLYNNLYRALSLLLLQTLQF

SEQ ID NO: 229779 - protein, 53 aa, Glycine max
  unsure (1)..(53): unsure at all Xaa locations
  Clone ID: PAT_MRT3847_49514C.1.pep
AXFYHFFFTFLSRPLPQGXXRLXAINRESKKTKXLITXIMXXRXGSIXDKXNA

SEQ ID NO: 229780 - protein, 66 aa, Glycine max
  Clone ID: PAT_MRT3847_49515C.1.pep
LFASELKLMSKEAEDSESADAAAVSAGNNHEVGNTIPEASRRAGTKGDATLEEGNSADNSLYVVKG

SEQ ID NO: 229781 - protein, 79 aa, Glycine max
  Clone ID: PAT_MRT3847_49516C.1.pep
LIIQHITQSSLATFLCNTSLRVNHCGARIDTLIIKEHVSFDPDIQNAYGYQRRHSKLYPLIIELPKEKAQIGGDSGVCS

SEQ ID NO: 229782 - protein, 171 aa, Glycine max
  Clone ID: PAT_MRT3847_49517C.1.pep
QAVTKTNLKKGGSPPWEKFFFKGPQVSSPPKAVFFKTPAGKKLLRPGFPLVGVFGGPWSVFLGGPQGENRPFKLSNPLCSNQGFLPLSPIKAGPFFFYVIKGVPKGAPASLFVVSPGGPPFLLKTSLCCFFFWGFNKFRAPVPKKKKKKKKKKKKKKKKKKKKKKKRKKDK

SEQ ID NO: 229783 - protein, 268 aa, Glycine max
  unsure (1)..(268): unsure at all Xaa locations
  Clone ID: PAT_MRT3847_49518C.1.pep
MASLRCLHSTHPHLHRGSALLAISNRCFNHSSLLNRTLSVNPPRTAPPRAMAKPSFSTAQDLVASPGDFEFAQPLKIVEYPDPRLRARNKRIVAFDDSLKKLVHEMFDVMYKTDGIGLSAPQLGINVQLMVFNPVGERGEGEEIVLVNPRVSQYSKKLTLFNEGXCLSFPGINADVKRPESVKIDARDINGTRFSVNLSDLPARIFQHEFDHLQGILFFERMTEEVLDGICGQLQALETKYEGMTGLSSPEKIENRRRRKVAVGFGKR

SEQ ID NO: 229784 - protein, 59 aa, Glycine max
  Clone ID: PAT_MRT3847_49519C.1.pep
LCVVACVFFFLWCVCLPSRLLPLLGVLLLVPLLLLARLRLLPLPLVPLLPPLCFLRPLP

SEQ ID NO: 229785 - protein, 149 aa, Glycine max
  unsure (1)..(149): unsure at all Xaa locations
  Clone ID: PAT_MRT3847_4951C.1.pep
MSSIVKEVLASPIQMTDQVSKLAEEDQNFRQECLEKSKTEKLAGLLRQAARNSNDLYERPTXSADERYDEYLGLPPIAANEPILCLIWEQVAILLSGASLDERSDAAASLVSLARDNDRYGKLIIEGGVPPLLKLLKEGRMDGQENESS

SEQ ID NO: 229786 - protein, 72 aa, Glycine max
  Clone ID: PAT_MRT3847_49520C.1.pep
AFYKGVAPLCDGQIPYTMMKFRCFERTVEALYKFVVPKPRSECSKPEQLVVTFVAGYIAGVFCAIVSHPADS

SEQ ID NO: 229787 - protein, 50 aa, Glycine max
  Clone ID: PAT_MRT3847_49521C.1.pep
TVVGGYYILITKFYISDQVWDRIAPGLASQFDSPYSIPTIAPPSIAYSWW

SEQ ID NO: 229788 - protein, 29 aa, Glycine max
  Clone ID: PAT_MRT3847_49522C.1.pep
FFFFFFFFFFFFFFFFFFFFFFLLQRINA

SEQ ID NO: 229789 - protein, 59 aa, Glycine max
  unsure (1)..(59): unsure at all Xaa locations
  Clone ID: PAT_MRT3847_49523C.1.pep
RTECLLITIXLNTCXVQTHXKLMXVHIFNIMKNIMLKKNKTCKTCLLRVEVKRSTKIHT

SEQ ID NO: 229790 - protein, 86 aa, Glycine max
  unsure (1)..(86): unsure at all Xaa locations
  Clone ID: PAT_MRT3847_49524C.1.pep
THGSKGLLMLXXLFWXPFWKWSLMMLERLLGQXFPLSSFLWSGVMVFFSRPFXLXSEIYSTWTPLVVIEVGRCAVGVLAELLETRW

SEQ ID NO: 229791 - protein, 84 aa, Glycine max
  Clone ID: PAT_MRT3847_49525C.1.pep
MESSLGDMLIKVVVFILVQALVYLILSNSSNIFNKNMKKSNSFRPARSVSIRRMLALISDFPPEGEPSPSPKGPKTPSLHQSDQ

SEQ ID NO: 229792 - protein, 93 aa, Glycine max
  Clone ID: PAT_MRT3847_49526C.1.pep
NATRQITLSIVSWKTVSKVPEDKKLIKKILKEGEGYERPNKGALVKLKVIGNLQNGPLFLKKGHAHEEKLFEFKTDEEQVIDGLARGRAFFLS

SEQ ID NO: 229793 - protein, 320 aa, Glycine max
  Clone ID: PAT_MRT3847_49527C.1.pep
MKLTTILIFFIFALPFTFANLRVGFYTATCPRAETIVGEVVQRRFSQDKSIVAALLRMHFHDCFVRGCDASILIDPTSTRTSEKIAGPNQTVRGFEIIDEAKAILEQACPLTVSCADIIALATRDAVALAGGIRYSIPTGRKDGLLADPSLVILPAPPLSVQGALQFFTARGLTLEDMVTLLGGHTVGFAHCSVFQERLSSVQGRVDPTMDPELDAKLVQICESNRPSLSDPRVFLDQNSSFLFDNQFYNQMRLRRGVLHLDQQLAFDSLSRDIVEDFAANDGTFQERFANAMIKLGSIGVLDGNEGDVRRNCRAFNIPL

SEQ ID NO: 229794 - protein, 59 aa, Glycine max
  Clone ID: PAT_MRT3847_49528C.1.pep
FHTPVPCCHKHQPSLFLFYHPTSSLHLCWTSAIDNNSAHVSVTPFHFHAGLGSNTLLES

SEQ ID NO: 229795 - protein, 76 aa, Glycine max
  Clone ID: PAT_MRT3847_49529C.1.pep
GGVFWAYPLGGFNSLFKKGKKRGQFWSPFSAKKGGFSPPLPLTPPPDKPILGPFFFFGGGFWPPPPLFYPLNPLFF

SEQ ID NO: 229796 - protein, 64 aa, Glycine max
  Clone ID: PAT_MRT3847_4952C.1.pep
HKQTQHHTLLISFKPVGLCCNSLLFFLLLHITSNIPFLASTTFNGHFTSFLHHLSLSSTILLLL

SEQ ID NO: 229797 - protein, 79 aa, Glycine max
  unsure (1)..(79): unsure at all Xaa locations
  Clone ID: PAT_MRT3847_49530C.1.pep
GVNCKVLINIVXESTDIGQDVXGYLINKAEESWDGEEGQMXFGYRVDETPEXLMSLSEVLARELCARLTEVLKYGTCAW

SEQ ID NO: 229798 - protein, 37 aa, Glycine max
  Clone ID: PAT_MRT3847_49531C.1.pep
VLQNICSCVFRCIPTYLSFHSMLIADSKFLEVAWIPS

SEQ ID NO: 229799 - protein, 303 aa, Glycine max
  unsure (1)..(303): unsure at all Xaa locations
  Clone ID: PAT_MRT3847_49532C.1.pep
MGKRNSQRKSAAMFDSDDDSSVTSSSTALSDLMSVSGAEDVQFVQDSFLDQALDALDEKRGSTREKALSSIIDAFNSNMQHEFVEKKFATLLHQCLAXNKKGSKKASAKEIALASHAIGCLALTVGCGXHAREIFEXSIRPLDESLTSRIDVSKTPSLLECLAIITFVGGNDQEETERSMDMMWRVINPKLGSNVVAVKPSASLIANVVSAWSFLLSTVSNLKLNTKNWQNSISYLSSLLDKEDRSVRIAAGEALALIFEIGVIDKFSAESDSASDTTQGSKPLESYIFLQGLKGKVINQCKN

SEQ ID NO: 229800 - protein, 61 aa, Glycine max
  Clone ID: PAT_MRT3847_49533C.1.pep
GFPLVFKLPLKWKKVSFPKPHLVVEKPSKFVLLGAGHNLQKNFLEREVQENPKRLVPGWDQ

SEQ ID NO: 229801 - protein, 453 aa, Glycine max
  unsure (1)..(453): unsure at all Xaa locations
  Clone ID: PAT_MRT3847_49534C.1.pep
LFFVLSSGNSQRKSAAMFDSDDDSSVTSSSTARSDLMSVSGAEDVQFVQDSLLDQALDALDEKRGSTREKALSSIIDAFNSNMQHEFVEKKFATLLHQCLASIKKGSKKASAKEIALASHAIGCLALTVGCGDNAREIFEESIRPLDESLTSRIDVSKTPSLLECLAIITFVGGNDQEETERSMDMMWRVINPKLGSNVVAVKPPASLIANVVSAWSFLLSTCXGIQLTILLLMQXISYLSSLLDKEDRSVRIAAGEALALIFEIGVIDKFSAELDSASDTTQEGSKPLESYIFLQGLKGKVINQCKNLSXKAGGKGSAKKDLNSQRNLFRDILDFFEYGYSPDISMKIGGDSLQASSWSEMMQLNFIKHFLGGGFIKHMQENEFLHEVFGFSPKRKYLNTNEHRMSGGEKRMFKSPNSFLNKARTQSLNKQRILSEGRNFGHYAVGVVDEEA

SEQ ID NO: 229802 - protein, 299 aa, Glycine max
  Clone ID: PAT_MRT3847_49535C.1.pep
MSNVSKSSFASDKYERVGPDYFGYYSSEVVNLLSQDEDVFPVSTQTPELPETKYEEGGKKNLVNQTDNCSGTWDSNAVGAGLSEFKKDRFKSLLRQSVIALSSEVDEVVDPVFAAYHLQSKLKSKSQSLNDTATASDNVMQVPCKKLKISSSSTSARFLERTTNVNPQCSRKTTDDVQFLLEKDSVEVAEMVTEYSNDLSGTLGYMEEQLELLLDTIMFKCRPMTLAEKQRLQSLIQKLPARNLDRVVELIWRNRPIEEQNCDKIFVDLEKEDDATLWRLYYYIEAVEKAKSLSCSQEA

SEQ ID NO: 229803 - protein, 215 aa, Glycine max
  Clone ID: PAT_MRT3847_49536C.1.pep
SEFFLQQLFDTCCASPFSAMSNASKSFVASDKYERVGPDYFGYYSSEVVNLLSQDEDGFSFNQTDNCSGPLYSNAVGAGLSDFKKDRFKSLLRQSVIALSSEVDEVVDPVFAAYHLQSKLKSKSQSLNDTATASDNVMQVPCKKLKISSSSTSARFLERTTNVNPQCSRKTTDDVQFLLEKDSVEGAEMVTKYSNDLSRTDDATLWRLYYYVEAV

SEQ ID NO: 229804 - protein, 62 aa, Glycine max
  Clone ID: PAT_MRT3847_49537C.1.pep
QDTIYTSKIKDRMGDFDITIQHETISSSCHEWIPLLTNTGGEDILRILFTYRYPSNYINSHI

SEQ ID NO: 229805 - protein, 496 aa, Glycine max
  Clone ID: PAT_MRT3847_49538C.1.pep
MGSEEERVLENQLELQLQEQRGSLSAIGQALLSDPTNPELLAVHEELVQAIKDAEEGLLHLKRARLLQEADSVLHNTNIFTEEEKVEPLDSTDVEPEPLEDKCYSVGSKCRFRHKDGRWYNGQVVQLDNAVAKVSFLTPTSANMLMCKFFLQQRCRFGSNCRLSHGLDVQLSALKKYVPTIWKQSLVGSSIWAVSTANAGTWREAELKSWDEKAGVGQVVFRDDGSSVKLGAEEMALSEHAEMSDIESDSSLDQSDSSDYEEEEESQGIGFLESTNLQRGIQTETATFATWENHTRGIASKMMANMGYREGMGLGVTGQGMLDPIAVKVLPPKQSLDHALESHKREENKEKQGKKKQSRGGKRKREKKFAEANRAAKEEEESASDVFALINNHLAMHNEAFGGGLMKKQQSKGSEEGKKVDRRALVAYEEEVKDLKIRVEKLEHIVNANRKEKAVYEGAMRKLNETRKALADAEAVHASASNSVTSKEKEKRWLKF

SEQ ID NO: 229806 - protein, 113 aa, Glycine max
  Clone ID: PAT_MRT3847_49539C.1.pep
PCSCREKKKKKKKKKKKTKKKKKKKKKKKKKKKKKKKKKKKKKKKKKGDLQHRHFSPREKKKGGAPKKDKIFPQEKIKNPSRGGPQFFFLGVILNRGFPTKLICPGKKGEPRG

SEQ ID NO: 229807 - protein, 64 aa, Glycine max
  Clone ID: PAT_MRT3847_4953C.1.pep
KNVEKTARIYSCKQKRMNRSVILRRRDHESSYSTTNKLHACMTRYYQVLLSSVSGHWIQVSHSC

SEQ ID NO: 229808 - protein, 60 aa, Glycine max
  Clone ID: PAT_MRT3847_49540C.1.pep
ENCVIEREREKRHLVSSAHMASLQGFTITNYHLVDEDQYVSHTAYSSVHERMQYISSSHS

SEQ ID NO: 229809 - protein, 42 aa, Glycine max
  Clone ID: PAT_MRT3847_49541C.1.pep
NTLNIINKSINNFILKYEHLQSLTNNEQSLQFFHLKSFFLQL

SEQ ID NO: 229810 - protein, 132 aa, Glycine max
  Clone ID: PAT_MRT3847_49542C.1.pep
LELLPRLRRLKRHHTPLLLLWKSSNHHSSTPLQHPLLQSRVLYYSATAALPPDDIVAPPLLENINSAGCWGATEENRRSSIISSCCQYDVIILRINTLFLTPDVCGDPYHHHPPRRRRLAALIGYDAAAADE

SEQ ID NO: 229811 - protein, 120 aa, Glycine max
  unsure (1)..(120): unsure at all Xaa locations
  Clone ID: PAT_MRT3847_49543C.1.pep
RLFSFFKTTNQKLAPFTQLLVLLKPLQVSINFQKPEIFFSRNTPTQIKEHITTKLGVTECLGTRKXLGIPSMIGKKKXKSIFVYLRDRIWRKNHHWFGKHLSKEGREVLIKLVAQAIPSY

SEQ ID NO: 229812 - protein, 100 aa, Glycine max
  Clone ID: PAT_MRT3847_49544C.1.pep
KKRANNKNNNKKKTQGGAKKGPAKKKNPIYKGGKTKEGLGIREKKNGGGKVKKGETSQGGTRDEHGGTPSNTRGKNKGEKGAPQIPLIRGSRRAQRERKI

SEQ ID NO: 229813 - protein, 142 aa, Glycine max
  unsure (1)..(142): unsure at all Xaa locations
  Clone ID: PAT_MRT3847_49545C.1.pep
GGKLADFVIRKPSFFGAKPKMGAQRGWGGKGKKGGPKAKNPTPXPGINRPNFGTICKGGSSXPLLFVKKTPLDKGVKAXNGLNKRVKPVKNVRKLPKRDMKLNDTFPKILVAPETYPVPANGEVFPCPAAKIVPLSQNNFLF

SEQ ID NO: 229814 - protein, 53 aa, Glycine max
  Clone ID: PAT_MRT3847_49546C.1.pep
FQASEKKLSNPMREIKVQKLVLNISVGESGDRLTRAAKVLEQLSGQTPVFSKG

SEQ ID NO: 229815 - protein, 73 aa, Glycine max
  Clone ID: PAT_MRT3847_49547C.1.pep
VLTMQLRKPNDLSIENPKINYPKPWGFFKITSPAIFGKQWGLANKLFQHLQEEKQKLKIKKKKKNSRLVLSLS

SEQ ID NO: 229816 - protein, 52 aa, Glycine max
  Clone ID: PAT_MRT3847_49548C.1.pep
QTSSILPLNETVLLYIPYPTKGHEIKDPRENIIRSLTTGGTQLIKRLIPIVF

SEQ ID NO: 229817 - protein, 52 aa, Glycine max
  Clone ID: PAT_MRT3847_49549C.1.pep
MASEKKLSNPMREIKVQKLVLNISVGESGDRLTRAAKVLEQLSGQTPVFSKG

SEQ ID NO: 229818 - protein, 92 aa, Glycine max
  unsure (1)..(92): unsure at all Xaa locations
  Clone ID: PAT_MRT3847_4954C.1.pep
PGPDSIGIVAISHGCPGVAARACGLVGLEPTRVAEILKDRLSWFRDCRTVDVLNVMSTGNGGTIELLYMQLYAPTTLAPXRDFWLLRYTSLL

SEQ ID NO: 229819 - protein, 68 aa, Glycine max
  Clone ID: PAT_MRT3847_49550C.1.pep
FKSPLPAKGVFLNAIFKRGFPCFPFLFCLTTGHINQFLLKNTPALENDVLYKRFCFFLCHAFFFLKSF

SEQ ID NO: 229820 - protein, 94 aa, Glycine max
  Clone ID: PAT_MRT3847_49551C.1.pep
PALKAPPALACMITDPMLTKNVVTSHLSCANKTPRDYSALDSNLTIGNTRLPACSWPNLHIGFFSSLASALPLLCSFSLFSFFFPHSRMVILSS

SEQ ID NO: 229821 - protein, 51 aa, Glycine max
  Clone ID: PAT_MRT3847_49552C.1.pep
TIRFSSRKAYLKTSPRIKGPFAKRTSVLFLVDQMFSPPLFTEVGYGIVPSF

SEQ ID NO: 229822 - protein, 79 aa, Glycine max
  Clone ID: PAT_MRT3847_49553C.1.pep
FPARPTHTHNPNPNLSPTLSYYQTIPNPRMSYTACVHKPSHISSTITTTRSTPSITLPHHHSHISYFFSIFYLTLIHHH

SEQ ID NO: 229823 - protein, 40 aa, Glycine max
  Clone ID: PAT_MRT3847_49554C.1.pep
DGVIVVAIKEHIIPKSIVQHNLDNIRDEDNHNRQFQTYSL

SEQ ID NO: 229824 - protein, 69 aa, Glycine max
  unsure (1)..(69): unsure at all Xaa locations
  Clone ID: PAT_MRT3847_49555C.1.pep
VVAXXFFHHLFLKTFSXLSSNHILGEQPRXFLRPHIGXFXFFILGVLLLVRFFFFVAYPSKSSLPKIER

SEQ ID NO: 229825 - protein, 47 aa, Glycine max
  Clone ID: PAT_MRT3847_49556C.1.pep
NSNQLISSVLNFLALHNFLLINDMYTSQIMFYTSYIRSILLECCAKS

SEQ ID NO: 229826 - protein, 120 aa, Glycine max
  Clone ID: PAT_MRT3847_49557C.1.pep
DLLKRLVLNNFCTIPAKLVLQLTTAFRERGLCNRNGTFFYKDHLHKSNTPILAIAGDQDLICPPEAVEETVKLIPEHLVTYKVFGEPGGSHYAHYDLVGGRLAVEQVYPCIIEFLSCHDK

SEQ ID NO: 229827 - protein, 179 aa, Glycine max
  unsure (1)..(179): unsure at all Xaa locations
  Clone ID: PAT_MRT3847_49558C.1.pep
SLSRLEKVSCTEAHXAGGKTFKYDIIGAGSHCSQDFPEKEDQEKPKTIDARLRQRIDPQYNEAQAQMETKSGKLTFDDDETPNGSMLDLNSSQSISALPNNTVXGTILRNDLSENCLTEGNFRASVDLQRTHRIKGVINMAATVDIADNTGIALDCAMNRTIRGRAQSEIDTIWCQTVN

SEQ ID NO: 229828 - protein, 119 aa, Glycine max
  Clone ID: PAT_MRT3847_49559C.1.pep
MAKTSFKLQHPLERRQAEASRIREKYPDRIPVIVEKAERSDIPDIDKKKYLVPADLTVGQFVYVVRKRIKLSAEKAIFVFINNTLPPTAALMSAIYEENKDQDGFLYMTYSGENTFGSH

SEQ ID NO: 229829 - protein, 124 aa, Glycine max
  unsure (1)..(124): unsure at all Xaa locations
  Clone ID: PAT_MRT3847_4955C.1.pep
MATTLISAYSFMGTPIGXLPHHQLSLRTRLDITKVLVRLHEYTPIHSICPNIVFPGIATRAVRLLYTLADATVAADPAAAADSAAFTTDADRQKSGCXFCFISHTMEFVLNEANDGLSVEHVPY

SEQ ID NO: 229830 - protein, 73 aa, Glycine max
  unsure (1)..(73): unsure at all Xaa locations
  Clone ID: PAT_MRT3847_49560C.1.pep
LAFXVLLVWPXXVPVCLFLPXAXVVWVPXXXCVXVLFPFVSLRXLLXLXRXXXSVRVFARXXWFSXCGVFFAV

SEQ ID NO: 229831 - protein, 96 aa, Glycine max
  Clone ID: PAT_MRT3847_49561C.1.pep
TWAIHKPSLHPDFDDDPFERRGRNHERFDVFHDLGFHSIRASTEWACFGPPKKALGVRIHGVLGVLSIFFGSSKLLLISGISKIPYPCSLCKSPCC

SEQ ID NO: 229832 - protein, 59 aa, Glycine max
  Clone ID: PAT_MRT3847_49562C.1.pep
VLNSTTLHMIITDNWPSNPNPKPFPCKSGLPIGSILTYTCMPLHRSSTLSTKFSSPDVV

SEQ ID NO: 229833 - protein, 49 aa, Glycine max
  Clone ID: PAT_MRT3847_49563C.1.pep
QCTYHDAGMRRKAASGGTTDNTGMALSCAIKRFLRGRASNDNYTMCSKD

SEQ ID NO: 229834 - protein, 61 aa, Glycine max
  Clone ID: PAT_MRT3847_49564C.1.pep
LGDDHNFFITPGSDKRQFFTWPPPPFIIKKGMWEKHHPTLSSTAQKTYTLFWRKNKPNNLF

SEQ ID NO: 229835 - protein, 290 aa, Glycine max
  Clone ID: PAT_MRT3847_49565C.1.pep
MATPDHLFNLRNNFYLGAYQAAINSSDVANLSQEDTLERDTLVHRCYIALGQLQFVISEIHDDAPTPLQAVKLLALYFSSPDTKDSAIASLKEWLADPAIGNNATLRLVAGLVFLHENDFNEALKHTNAGGTMELHALNIQIFIKMHRSDYAERQLRIMQQIDEDHTLTQLANAWLNLAVGGSKIQEAYLIFQDLSERYQSTSLLLNGKAVCCMHMGNFDEAETLLVEALNKDARDPETLANLVVCCLHLGKPSNKSFSQLKLSHPEHVLVKRVSSAEESFDRALQSFSS

SEQ ID NO: 229836 - protein, 162 aa, Glycine max
  unsure (1)..(162): unsure at all Xaa locations
  Clone ID: PAT_MRT3847_49566C.1.pep
MKKLFDFGNKALCYVRMLSGYEERRIQSYRLQLELRVQQAQARRAAINKVPQQVILSDDRRMVEEMQAFNKKLEETXAGVEYYFKPLDKESEFIMKMQLHGEEKTSDMMINALYKQASLQHVEADNNACTHQVDNSDTNLNESEMIEEEKTLNEMLKALLSE

SEQ ID NO: 229837 - protein, 34 aa, Glycine max
  Clone ID: PAT_MRT3847_49567C.1.pep
PIIELANAYSCIQTLLRLIPSMVRNHSPKFCYQT

SEQ ID NO: 229838 - protein, 269 aa, Glycine max
  Clone ID: PAT_MRT3847_49568C.1.pep
GGPTGYLAWKMMAEGDYTSAVRLVIHFTESGLKPEVYSYLVAMTAVVKELNEFAKALRKLKGFTRAGLVAELDLEDVELTEKYQSDTLADGVRLSNWVIQDGSPSLHGIVHERLLAMYICAGHGIEAERQLWEMKLVGKEADGDLYDIVLAICASQKESNATARLLTRLEVASSPQKKKSLSWLLRGYIKGGHFNEAAETIMKMLELGFYPEYLDRAAVLQGLRKRIQQYGNLDTYVRLCKSLSDANLIGPCLVHLYIRKYKLWVVKML

SEQ ID NO: 229839 - protein, 69 aa, Glycine max
  Clone ID: PAT_MRT3847_49569C.1.pep
RWVASIKKSVVSFVLDISLINGRGALKIDLTMESRLGNSFILFSHFFKPWAFSLVKKNSTETGNFARLV

SEQ ID NO: 229840 - protein, 75 aa, Glycine max
  Clone ID: PAT_MRT3847_4956C.1.pep
LTKQFHNMHTTSSLCTFHVQCIYICHLQLTLCSMKRQLSLHPQNLIGYQPLKFSMKRLRSLPCTVPKSESTAQLS

SEQ ID NO: 229841 - protein, 78 aa, Glycine max
  Clone ID: PAT_MRT3847_49570C.1.pep
YIDLLGGGILLDKTGDWITLIQNSTISLGSRVAARKKGCLTVMIVMSGNAAGKRSDRASLVQVFLTNCIGAEHLDACK

SEQ ID NO: 229842 - protein, 127 aa, Glycine max
  Clone ID: PAT_MRT3847_49571C.1.pep
AASFPNSIKVSLLTPLALRGFPFMPPRRFFFLILTYFFFALVQGITFSQASFFSTLYREICVRLPVCGTCFIPGSGWSFFFGAPMFLFFSAPPFFFFFFFFFFFFPNSNFPLNNKKWKRNSDAIQYY

SEQ ID NO: 229843 - protein, 38 aa, Glycine max
  Clone ID: PAT_MRT3847_49572C.1.pep
LIKLYISIDNDHEGGNVSSNSAQLIASPILDLYLASAA

SEQ ID NO: 229844 - protein, 92 aa, Glycine max
  Clone ID: PAT_MRT3847_49573C.1.pep
KKFAYGYIEDLKCRVLELPYQGEELSMVILLPDDIEDESTGLKKIEEQLTLEKLHEWTKPENLDFIEVNVSLPRFKLEESYTLNSDLARLGV

SEQ ID NO: 229845 - protein, 54 aa, Glycine max
  Clone ID: PAT_MRT3847_49574C.1.pep
ALITSDHPDIVCMRSVNVKVLMYSIQDFVPYRHFNTQEGACRKIGTNHSQGLIS

SEQ ID NO: 229846 - protein, 190 aa, Glycine max
  unsure (1)..(190): unsure at all Xaa locations
  Clone ID: PAT_MRT3847_49575C.1.pep
KEAYGEKFCFRNKTKPMGGCATKPKVSKDDPDGMPKAPQPEPQPELQPNKDTLKTKAPAAQVEQAAAAHNNNLNVNEIVDDDQANKRRSLSFLFKENEDKKGSTENEKNTVEESVKEEVLEVKKPAEDAKSNEPIVKQESPRPDEKLSEESRNNESSKQENETLKXETSHAEETHVNEPAXETVKLEPEA

SEQ ID NO: 229847 - protein, 73 aa, Glycine max
  Clone ID: PAT_MRT3847_49576C.1.pep
HTLGLKTLPAFSLQTTPTEAPDPYTPFLLSRTKASRCPAPTLLLIPSRTFPLSPSTLPFLNSKPYILDFNKFS

SEQ ID NO: 229848 - protein, 95 aa, Glycine max
  unsure (1)..(95): unsure at all Xaa locations
  Clone ID: PAT_MRT3847_49577C.1.pep
IICVIGGTATPMQEVQVPMDGLISSQECVPRTYCVXNQQNLFVLNGGMEKLTFPQGTSRSVKRMLFSIGGRELVQRNAISHEIWPNACSFQMWED

SEQ ID NO: 229849 - protein, 352 aa, Glycine max
  Clone ID: PAT_MRT3847_49578C.1.pep
MHRTYSMRSSRAPTASQIQSPPPPSSSTKSGRFFGKANIGHTFRHKSAGAFGPDLAKKLSQLVKMEKNVMRSMELVSRERMEVAQQLSIWGEACDDDVSDVTDKLGVLIYEIGELEDQYVDRYDQYRVTIKSIRNIEASVQPSRDRKQKITDQIAQLKYKEPNSPKIVVLEQELVRAEAESLVAEAQLSNITREKLKAAFTYQFDAMREHCEKLAIIAGYGKHLLELIDDNPVTPGETRQAYDGYEASKAIIQDCEDALTNWVSQNASVSSKLSQRSRTLSQRRRNATRRGEGHDLSGQDQPLDSRESGLWIPATEHQGNDYEDRDDLDDDVNSTIASEHQRGREEERVIAA

SEQ ID NO: 229850 - protein, 156 aa, Glycine max
  Clone ID: PAT_MRT3847_49579C.1.pep
MTSTTLFTTPPPPSTTSAAPVDKDNLALLIDNSKSTHHLLQIHAALLRRGLHHHPILNFKLQRSYASLFHRTPNPNVFLWTHIINAHAHFDLFHHALSYYSQMLTHPIQPNAFTLSSLLKACTLHPARAVHSHAIKFGLSSHLYVSTGLGDAYARG

SEQ ID NO: 229851 - protein, 163 aa, Glycine max
  Clone ID: PAT_MRT3847_4957C.1.pep
MLETSNDQVKLKPLHWDKVNTNNADHSMVWDKVDRGSFRVDQDLMEALFGYVATNRRSPKGKSHSAIPSKDASAQSAKTNFLLDPRKSQNIAIVLKSLAVSQGEILDALTDGKGLNADTLEKLARVSPTEEEQSLILQYKGDPARLAAAESFLFSILKAVPSA

SEQ ID NO: 229852 - protein, 74 aa, Glycine max
  Clone ID: PAT_MRT3847_49580C.1.pep
LVSRTYFLLTLCRKKENFMGQALSAQLNQGVLCPHYMCGKFFSNIAYNNPIRGNHVLIYANGISPLKRECITVL

SEQ ID NO: 229853 - protein, 88 aa, Glycine max
  unsure (1)..(88): unsure at all Xaa locations
  Clone ID: PAT_MRT3847_49581C.1.pep
TKSMLLTAVLPRKPERLGXHIDATNNHPWSSMDTLPASAHVINSLLMLLITKMTIDAGMNNGYTVVVTVLRHPNDAKRASIDITLKSY

SEQ ID NO: 229854 - protein, 117 aa, Glycine max
  Clone ID: PAT_MRT3847_49582C.1.pep
FTHHIVTHIPVFVLHYYSIRMSTKGKTGSRSSQGDVKQPPPNLGGAMGNTGSSKGKTGSWSSQGNVKQPLPNLGGAMGNTGSSKGKTGSWSSQGDVKQPPPNLGGAMGYASSKGKTG

SEQ ID NO: 229855 - protein, 125 aa, Glycine max
  Clone ID: PAT_MRT3847_49583C.1.pep
GKNNVNSYESQRIGHSLLSYVWKQWRDHAPLSILDPNMKGSFPEIEVIRCVHIGLLCVQQYPDARPTMATIVSYMSNHLINLPTPQEHAFLLQMDPKAIVQESSSSQSSTLLSNNEISITEFLPR

SEQ ID NO: 229856 - protein, 78 aa, Glycine max
  Clone ID: PAT_MRT3847_49584C.1.pep
LVLSKPSNAPLHGLKPRETLPKKLLRHAHERIYDGVRQKGNKTLTRGLGVHSQHREFSPIVGKGTPWRPGCLWYRGSI

SEQ ID NO: 229857 - protein, 62 aa, Glycine max
  Clone ID: PAT_MRT3847_49585C.1.pep
LYFLCYFYLFCICFPTEKLTIYTYKVKTSARNPINMYQKAERVIQADGPPSIRLSKSGGQSS

SEQ ID NO: 229858 - protein, 301 aa, Glycine max
  Clone ID: PAT_MRT3847_49586C.1.pep
MFNTWGHTVCFDLVIFHFNDCTKYWMLDGMNSIFGTGNAKCSSLVHLCDQQQYMLIASRTAASKYRSGIVLAWLDSSHQKKAKKAKMQSMSLTLSKRLSNSKPLFRISSSLVAHASSATTSPPPPSPPVPSPSALNSLLTAPWSATQSRGITLSGSDIRVGNLIGNRGRAHEVLKLYRPLEGTGKATLEVPPQSVAGYATVATTEDGAERKERNSGLSKATKTKREQLLKATAVASLLLIYPNTYSLLFANFFVFWHLYAGIGEILADYVHHEMTREFVMISLRLFLIIALKDVCLNFVFV

SEQ ID NO: 229859 - protein, 120 aa, Glycine max
  Clone ID: PAT_MRT3847_49587C.1.pep
IWVHGDVMSISVFLTAVRIAHLPPTPAQATLHGSLFLFLTPAESRTDGRKGDQFTRSTGGYASNEESHRSWSHCATGQRIFDHVLAKENAEPAGVRDTDEAKTTRFYANPSVQIVTADVT

SEQ ID NO: 229860 - protein, 85 aa, Glycine max
  unsure (1)..(85): unsure at all Xaa locations
  Clone ID: PAT_MRT3847_49588C.1.pep
XXSTEGXSXEAXGXGAXVLSXLVCSVTTXSGVGVXVXTTSSXFXXXXAXNDXSFVXSGXEXYAXTTSTVXXXIPKXMXLIEKKXX

SEQ ID NO: 229861 - protein, 56 aa, Glycine max
  Clone ID: PAT_MRT3847_49589C.1.pep
GQRAKVLRHFEKGRRCYERLIHGSKFKWHFRVVLVEGLILVVVPVVMDHLAILAII

SEQ ID NO: 229862 - protein, 43 aa, Glycine max
  unsure (1)..(43): unsure at all Xaa locations
  Clone ID: PAT_MRT3847_4958C.1.pep
TLFFIFQREFINAKTSSYYSKKKKRKTTRQIFLGEVLTGKXMI

SEQ ID NO: 229863 - protein, 53 aa, Glycine max
  unsure (1)..(53): unsure at all Xaa locations
  Clone ID: PAT_MRT3847_49590C.1.pep
XTXXSTXXPXNAXSKKGMAXLXXRLEVRSXPVXHXTRMLQLPXXXFHLXIAYL

SEQ ID NO: 229864 - protein, 112 aa, Glycine max
  Clone ID: PAT_MRT3847_49591C.1.pep
QISLKPTLQAAQKTKGGNNKNVSNKKHELTNPPRLPYLPLMQKISLCLSILPADMAAAPFVGKFSQIMFHVQFPKLNKVTGDFAISCLKAFLNGRKTPFSDKCWVEKLGGRV

SEQ ID NO: 229865 - protein, 84 aa, Glycine max
  Clone ID: PAT_MRT3847_49592C.1.pep
RIWLFYFHHEKETPTRQSSISHYSCFQVNSGTVPTKAQTMMLTQELPPHAPEKQLVTRKRHLNTQICYIVCQYSKIVLPMTSKL

SEQ ID NO: 229866 - protein, 56 aa, Glycine max
  Clone ID: PAT_MRT3847_49593C.1.pep
RDGKGSFVRLEVVTASLGFLTNFEDVYKLWAFVAKFLNPTFIREGGLPTVQEGSET

SEQ ID NO: 229867 - protein, 60 aa, Glycine max
  unsure (1)..(60): unsure at all Xaa locations
  Clone ID: PAT_MRT3847_49594C.1.pep
IKPRYRFHMWIMEKGLSSKXYSIASMVATSNKNFVARAFKIHPAALKHWFEQFYPRNLQV

SEQ ID NO: 229868 - protein, 56 aa, Glycine max
  unsure (1)..(56): unsure at all Xaa locations
  Clone ID: PAT_MRT3847_49595C.1.pep
SLPQRIIKETQHLLXKPAPEIXASPSENNIQYFNVIILNPTQSPYKEKSFQVKIIL

SEQ ID NO: 229869 - protein, 139 aa, Glycine max
  Clone ID: PAT_MRT3847_49596C.1.pep
MAASKCNSATPLIPVPPKSLIFLHEWWLVKQRKGLAVGGLASVEIADRERVFLSSVIVGREETNVLHSEDGITILFRGFINTSRSSQNGVPFQVCQHFLVGFPHDWKKYSAYSFGDAFGDSSVCSKNICHGLGISSGNH

SEQ ID NO: 229870 - protein, 281 aa, Glycine max
  unsure (1)..(281): unsure at all Xaa locations
  Clone ID: PAT_MRT3847_49597C.1.pep
MREQSFGDKMHGITTLALTATANTNTFLSCPLRSVLPLTPPSNSCIPTCKFSYGIRFNHSQRKHQKTERWSNKYRTMVVRARRNESPYEVLGVSPSATVDQIKRAYRKLALKYHPDVNKEHKAQEKLMRIKHXLESVDIYEVQTCIMIIAKXLVPAKNVILEVEVMIEEEFYGLEDFFKDLQQEFRNWEANTASQGKPKSLWEELAEIGEEFVEFLEKELNITDQNDDYKTPQGGNTSNFPGTETPSNSSQGQAGKGSRGVEDNLEEIEATLAQLKKELGL

SEQ ID NO: 229871 - protein, 89 aa, Glycine max
  unsure (1)..(89): unsure at all Xaa locations
  Clone ID: PAT_MRT3847_49598C.1.pep
RPGGMGCPGGPGXPLAFGQSKTKFQMEPNTGATFYDDAGVDEAKPDFMEVVEFLINPARLTTXKARIPRGHVLAVTPRTVKTLPANAID

SEQ ID NO: 229872 - protein, 48 aa, Glycine max
  Clone ID: PAT_MRT3847_49599C.1.pep
DTRTLLWTQILDFFTTRLLLGTGFYITVCSALTLYKGLDNALLLLDHN

SEQ ID NO: 229873 - protein, 147 aa, Glycine max
  Clone ID: PAT_MRT3847_4959C.1.pep
TTPFYPFSIRREMACCSAHQLNFFLMGKLIFSGPVGGEKLYPSRIGRKRGSLHHPQYMENFFIHNLFFVGPKRPGLNNQQGWAHGQRPQKKRVPKKRAFFKGKGKKGLFQEKTPLGEEPLEESFPKSFGGKKKTPEFWFLPRPQGNP

SEQ ID NO: 229874 - protein, 109 aa, Glycine max
  unsure (1)..(109): unsure at all Xaa locations
  Clone ID: PAT_MRT3847_495C.1.pep
IRXEAERERXXQXXEAAXERRAXEGRGXEXXTEERXGXXXRMGGTXXENXXXXKRAEXXTEEGKARXTXXXTXXTXNPXDPKXXXXXRRQXGDKXPKGKXNXKPKPPQP

SEQ ID NO: 229875 - protein, 153 aa, Glycine max
  Clone ID: PAT_MRT3847_49600C.1.pep
MLIPKKISKTILKYLFKEGVVVAKKDTVGKHPEIDVPNLYVIKLMQSLKSKGYVAEKFNWWYFYWHLTNDGMEYLRDFLSLPESIVPATLKPQARAQRAPQAQGQAPAKEGQAEGTQGKTGAPTGRGYYRDSNKAQQTGSIGRGSAPRNNTNK

SEQ ID NO: 229876 - protein, 148 aa, Glycine max
  Clone ID: PAT_MRT3847_49601C.1.pep
INKRAIEEYIILIFKNKKMKTQNMMFVVLVVCLAVCVGTSWGHFFDDTTGKAEQAKDAAAPTVYSAMDAAAPTVDSVMDAAAPTVDSAMDAAAPTVKSAMDAAAPTIDAAAQKSGSFASWAYDKISRGLGFGTEEPVAQTKYEETKTN

SEQ ID NO: 229877 - protein, 198 aa, Glycine max
  Clone ID: PAT_MRT3847_49602C.1.pep
MQNQQPSGIINPKYCAPYNVDLAIVRKVLALTDSFTVTDVNGQIVFSLKASLMTLHDHRVLLDAAGEPVVTLRRKLMTAHDRWQVFRGESTEPKDLIFSVKRSSFFQLKTKLDVFLANNTKEEVCDFKVKGSWFERSCVVYAGESLNIVAQMHKKHTVQSIVFGKDNFMVTVYPNIDYAFIVALILILDEIHKDMKNQ

SEQ ID NO: 229878 - protein, 67 aa, Glycine max
  Clone ID: PAT_MRT3847_49603C.1.pep
EILVKNHPNYNHIFLKKNSSPDILNEATDSLPCSLGDEWSQLSNIHQFQNNISCAIFLPNILQHMFY

SEQ ID NO: 229879 - protein, 309 aa, Glycine max
  unsure (1)..(309): unsure at all Xaa locations
  Clone ID: PAT_MRT3847_49604C.1.pep
MPMVSQEETLVEAALRVLNTADPFEKARLGDSVASRWLNGDIAEPYDPSGSDLTLPDRPARLSSVKLVAPSLMPKLGRAGSLQSRIAIVHSLTHTESWAIDLSWDIIARFGKQESMPREFFTDFVKVAQDEGRHFSLLAARLEELGSYYGALPAHDGLWDSATATSKDLLARLAVEHCVHEARGLDVVPTTILRFRNNGDNTTADLLYGRXLESVVYPEEITHCAAGVKWFKYLCERSRNPASEQEEESGSGSRTEEHEAIAKFHAIVRAYFRGPLKPPFNEAARKEAGFGPQWYEPLAVKEVNSIPNY

SEQ ID NO: 229880 - protein, 41 aa, Glycine max
  Clone ID: PAT_MRT3847_49605C.1.pep
HGIFLLTYCHIQASFAPRLDDRTEINCKLFTLSGDQTLYNY

SEQ ID NO: 229881 - protein, 61 aa, Glycine max
  Clone ID: PAT_MRT3847_49606C.1.pep
NYKSYHFVLRPSLLSCSTNHLPSPLPLECMSSLLMGLGSMRFYNEYLTHNPNFKDPFLYNA

SEQ ID NO: 229882 - protein, 101 aa, Glycine max
  Clone ID: PAT_MRT3847_49607C.1.pep
LLATSGGSLHYVCVGSTNCHNPPLLNTLTITLSHFLLLKPTFNVYFTPIWFTGCDFYLPTSSSVVLRKNTVLRVSLYNIVAVSYMLFLYHSLLRILYVPSF

SEQ ID NO: 229883 - protein, 40 aa, Glycine max
  Clone ID: PAT_MRT3847_49608C.1.pep
KKCYLIILASIITKITCITFTYIKIYKESVLKIYRESVMN

SEQ ID NO: 229884 - protein, 132 aa, Glycine max
  unsure (1)..(132): unsure at all Xaa locations
  Clone ID: PAT_MRT3847_49609C.1.pep
MADDSNRSVRLLCRPKQLNTKGSDPGIHFWLIGSPFFPPLTVASFLRRIHTLPSSASPDLPKESEDLRTLIPKGFEVVGALASGDDTHARTAXDAARALMNLLYGDGTDRPVIGAVCGSDSGELRFVVSESE

SEQ ID NO: 229885 - protein, 203 aa, Glycine max
  Clone ID: PAT_MRT3847_4960C.1.pep
MMGRLIRGLEERGVFEDVSVIMVGDHGMVGTCDKKLIFLDDLAPWIDVPKDWVVTHTPVLAIRPPSGNDPADVVAKMNEGLSSGKVDNGKFLRVYLKEDLPSRLHYAASDRIAPIIGLIEEGFKVEQKRTKRQECGGSHGYDNAVFSMRTIFIGHGPRFARGRKIPSFENVEIYNLITSILKIKGAPNNGSASFAESVLLSAA

SEQ ID NO: 229886 - protein, 195 aa, Glycine max
  Clone ID: PAT_MRT3847_49610C.1.pep
SRPAAQEASHTKPDEIQISSDDFSKTSDPSVTGVELVQLRNGPSKNAEPCAKNNARDNITKDPLLSIDARPSRTWNSLPANSQANDDQGLQQHRSGEWGDILDVISRRKTQALAPENFENMWTKGKNYKKKDGENQSNEHVSQHPVVGKLPKVDHMKAISGPKERDSNSKLILPPKRRHINSGHSSQFSVEIHFM

SEQ ID NO: 229887 - protein, 80 aa, Glycine max
  Clone ID: PAT_MRT3847_49611C.1.pep
YGIAARPSSSPIMFNLFSQLYFSLLQKTTNINQFKKRNPANFEIPQMSEISHMFSTYSAFVASTCYNTPSRHQIHKPCKS

SEQ ID NO: 229888 - protein, 149 aa, Glycine max
  unsure (1)..(149): unsure at all Xaa locations
  Clone ID: PAT_MRT3847_49612C.1.pep
AYTRALTTWATWVDNNIDANRTQVXFRGYSVTHFRGGQWNSGGKCHKETEPNASGKHLRKYPSKMRAFEHVVIPKMKTPVIYMNISRLTDYRKDGHPSIYRMEYKTAEEQTAAEQHQDCSHWCLPGVPDTWNELLYVSLLKYGKGHWKS

SEQ ID NO: 229889 - protein, 104 aa, Glycine max
  Clone ID: PAT_MRT3847_49613C.1.pep
QPTSTLIMVDELTHIAQVLYQILSPDAIAVTAATDALDFLTLTPHMICYLHTISTLPGDLSQSISAAIYRMNRIRRSFHSCRVKPSIVSNDFQFQLMQALLQIG

SEQ ID NO: 229890 - protein, 99 aa, Glycine max
  Clone ID: PAT_MRT3847_49614C.1.pep
TEEDHEESHVDYGVSLLISLSQLRFCSVLNTWQGNKTLPPTCRRPCVLCFIIGCVFVVCVIAELYYWAVFFSVGRSGSRYLPGMGCVHINTFQLIRPLC

SEQ ID NO: 229891 - protein, 127 aa, Glycine max
  Clone ID: PAT_MRT3847_49615C.1.pep
VFHGANDVSCYVVVGDVLVVVFPAFEVASAEDLVSHSVSSDAQLHHAIVSRGLLFPSRPFLLSLVLRAVSHSPCATGSVLRILYCARVGAIGGRSHICTLHGEALGGGVGESCGGGVKERDSCGACG

SEQ ID NO: 229892 - protein, 47 aa, Glycine max
  Clone ID: PAT_MRT3847_49616C.1.pep
THDGFPHSRFSSMAMEMFTSLQYRPSHKVQWRIIISPSVVTCTSFIT

SEQ ID NO: 229893 - protein, 149 aa, Glycine max
  Clone ID: PAT_MRT3847_49617C.1.pep
MREEEMEKLRGVVRDCVSKHLYSSAIFFADKVAAFTADPADIYMQAQALFLGRHYRRAFHLLNASKIVLTDLRFRYLAAKCLEELKEWDQCLSMLGEAKVDDDGNGYDMKDSNVMYLDKDCEDREINISSAICFLRGKAYEALENRAQA

SEQ ID NO: 229894 - protein, 80 aa, Glycine max
  Clone ID: PAT_MRT3847_49618C.1.pep
RERPLVSTTTIAAGKQERNMMKVAPTSPLPTKHVRILFHRTCLEHSIITTNSPKSLNYKRGTISPGEAEPSLKLTLTVKS

SEQ ID NO: 229895 - protein, 186 aa, Glycine max
  unsure (1)..(186): unsure at all Xaa locations
  Clone ID: PAT_MRT3847_49619C.1.pep
MAGCSSNFAVARFANVRKEVVLGNEETNLIRLSFRGVLNESAFQVLRGSKCGRSCVPMQEKAMFLIMSMSQPSAENESQSAVTSIGLSEGGGDNVLSNDDGTRDSEPDSKNERNDDNGVVLDGSGGNGSFGSGGAGDGSGXGGSNDDGNDNEEEEFGPILKYDEVMRETEARGATLPLDMIEAAKS

SEQ ID NO: 229896 - protein, 84 aa, Glycine max
  Clone ID: PAT_MRT3847_4961C.1.pep
RKVSKVEQKRTKRQECGGSHGYDNAVFSMRTIFIGHGPRFARGRKIPSFENVEIYNLITSILKIKGAPNNGSASFAESVLLSAA

SEQ ID NO: 229897 - protein, 263 aa, Glycine max
  Clone ID: PAT_MRT3847_49620C.1.pep
RRGPLSLLCSSCVRLTRVCTAISALCSPAAALFISLVYSSQIQALAALWRLFRGRKWNPLRQRLDSFDYTVKQHIVGSLLFTPLLLLLPTTSVFYIFFSIMDTTINLVCLLIEVTISVIHVTPYTKIFLWLVRPRRFPSGIWLEIIGCQSNSTASPSADITDEMTSYKESLHLKDFNREKSSSLVSALHSNYLSIGKIISPHYIHVFLGVSGSSISTVAHGILIGQRMPSMRGTLLPSPMPWTSMHYKEYWRLCHDSLIACFR

SEQ ID NO: 229898 - protein, 126 aa, Glycine max
  Clone ID: PAT_MRT3847_49621C.1.pep
KVIVLSASANKLGNLKVHADAYASLIMEELDPDHNGYIEMWQLETLLKEMASAEDGTKKLDNCRAMTLSRAMIPSKYRTPVSKFLSTTAEFALDKWKKIWVVALWLAINLVLFIWKFKQYREREAF

SEQ ID NO: 229899 - protein, 64 aa, Glycine max
  Clone ID: PAT_MRT3847_49622C.1.pep
PVSPSEIDDIKYTRATNITSSLSLNFRTTATAAAPDAGRRWEVAQGQEGEEERGDQGAQCSAPH

SEQ ID NO: 229900 - protein, 338 aa, Glycine max
  Clone ID: PAT_MRT3847_49623C.1.pep
MAAGVYNQPIVAFQSHSHINNFNHQQKFNHLVRVVTKDFIGSNFLSRRDCRVIQSLASQTSVVDTVSSPSKSKTSDRDTHKKSNEASLILIRHGESLWNEKNLFTGCVDVPLSKRGIDEAIEAGKRISSIPVDLIFTSALIRAQMTAMLAMTQHRRRKVPIIMHNESEQARGWSQVFSEDTEKQSIPVIAAWQLNERMYGELQGLNKQETADRYGKEQVHEWRRSYDIPPPNGESLEMCAERAVSYFRDQIEPQLLSGKNVMISAHGNSLRSIIMYLDKLTSQEVISLELSTGIPMLYIFKEGRFVRRGSPIGPTEAGVYAYTRRLALYRQRLDDMFQ

SEQ ID NO: 229901 - protein, 86 aa, Glycine max
  Clone ID: PAT_MRT3847_49624C.1.pep
SPTPPYCFEKTRERGKGNFSEPAINTGWGNKPACPRSPFWEPVFFRRHKNLPDTSRSFKFLLRKSTGAPLRKYPQVAVTYVVSIFP

SEQ ID NO: 229902 - protein, 72 aa, Glycine max
  Clone ID: PAT_MRT3847_49625C.1.pep
KSIKINYYYLLPHITYHSNNRPCEANLQIYLLSVSHTNPYCMALLYGLNFTLMPHQGLARGGELVPQRREEE

SEQ ID NO: 229903 - protein, 165 aa, Glycine max
  Clone ID: PAT_MRT3847_49626C.1.pep
MADHRNGSAQAANGTAQAAGTAYSIDLNAFQTRLRSFYQHWDAHKTDLWGSSDAIAVACPPPSEDLRYLKSTALNLWLLGFEFPETIMVFTKKQIHILCSQKKASILESVKKSAREVVDADLVLHVKPRNDDGTALMDAIFRAIRALSKSDGRDTPTVGYISREG

SEQ ID NO: 229904 - protein, 145 aa, Glycine max
  Clone ID: PAT_MRT3847_49627C.1.pep
MPQPKDLPGFYYDSEKSRYFPIKGPIPGSSSKPMTPALNSPQTSSNQESGGSCCRKLRNRTPSKLLRARELDGHCAIASRYCRSNFTEEFRKMQASRPVIWKYRGTDGMRITALEHLRVDVQTSAGKTETDVLLTDSTNGSMSFS

SEQ ID NO: 229905 - protein, 53 aa, Glycine max
  unsure (1)..(53): unsure at all Xaa locations
  Clone ID: PAT_MRT3847_49628C.1.pep
HXXKEHXXHSLNKXXXLXXIXXXXQIITSIKSXXLXYTTQXXNXXCKXXPKTX

SEQ ID NO: 229906 - protein, 90 aa, Glycine max
  Clone ID: PAT_MRT3847_49629C.1.pep
HRGSNCHSCRRMVGYCEVVRPLFFFIRAHRQSTRADLAVPRLASVRVMKEAKQCLPCKPNCARNIYSFCLPGNRVFFKATTSTPYLRTCG

SEQ ID NO: 229907 - protein, 76 aa, Glycine max
  Clone ID: PAT_MRT3847_4962C.1.pep
ARGTAQEYRGICRTIASQGLHKLPSNSGKNTYACDGHTYSCLLDNGCVLRADADESIGRSGPIRCLERVKDDSMKR

SEQ ID NO: 229908 - protein, 36 aa, Glycine max
  Clone ID: PAT_MRT3847_49630C.1.pep
VAGLREWFVQSAERHAHPRIPFMVNMSATAFSSKKN

SEQ ID NO: 229909 - protein, 63 aa, Glycine max
  Clone ID: PAT_MRT3847_49631C.1.pep
SLTNSSQALRMTSSSSSGLCGSSHNKFSQTLWNLDLSLSRTLQLCRSFKKRPKSPQKFDSRLK

SEQ ID NO: 229910 - protein, 57 aa, Glycine max
  unsure (1)..(57): unsure at all Xaa locations
  Clone ID: PAT_MRT3847_49632C.1.pep
ACKKTKRLQAPXLIHVVPPISNKFPLFGFDDAELELSFECIWRVLRVETFLRKPKSF

SEQ ID NO: 229911 - protein, 167 aa, Glycine max
  Clone ID: PAT_MRT3847_49633C.1.pep
ERDWAKDETSLKSGFRHLEHMPFPFWLALFVEGTRFTQTKLLQAQEFAASKGLPIPRNVLIPRTKGFVTAVQSLRPFVPAIYDCTYAVPKSEASPTLVRIFKGISCPVKVQIKRHKMEELPETDDGIGQWCKDAFVAKDALLEKYSTTEIFSEQDLQQIRRPKTSIL

SEQ ID NO: 229912 - protein, 129 aa, Glycine max
  unsure (1)..(129): unsure at all Xaa locations
  Clone ID: PAT_MRT3847_49634C.1.pep
SSAHASEKILVAKATDHNSRLQLTTTTKGVIWLDQVSAMPLDTYKGHGFRTDLVEMLTALKPRFIRFPGGCFVEGEWLRNAFRWKASVGPWEERPGHFGDVWMYWTDDGLGYYEFLXLAEDLGTAPIWV

SEQ ID NO: 229913 - protein, 53 aa, Glycine max
  Clone ID: PAT_MRT3847_49635C.1.pep
PRWTSFLSVALWGYLSRVRSTIRITICFQHTTFAYFHNEFCCRSLVGLTFMYD

SEQ ID NO: 229914 - protein, 138 aa, Glycine max
  Clone ID: PAT_MRT3847_49636C.1.pep
EPFCGSYNPRLWPLKHLEAFRVARSTFPLFMEVLPQVTSGFHGFVPVDKSVFLPPYDQVDMFPRQFLCPLFAPRSVGQCLPPPLSHPSHQVSRLFNELLSFIFAWVGCPLCGVYACPGGPVTPAFWGLIKASWVPIQV

SEQ ID NO: 229915 - protein, 85 aa, Glycine max
  unsure (1)..(85): unsure at all Xaa locations
  Clone ID: PAT_MRT3847_49637C.1.pep
MKIRLSTETMKITDSVSIKVHAKVIQVXGPRGRLVRDLTHMTRDFQPMTDENRTGKLNIHAWFGSRKAFTAIRSALSHVDIHTTG

SEQ ID NO: 229916 - protein, 38 aa, Glycine max
  Clone ID: PAT_MRT3847_49638C.1.pep
MGISRDSIHNMPATGGNNNAWWKKIKYHLGRHAANTKL

SEQ ID NO: 229917 - protein, 65 aa, Glycine max
  Clone ID: PAT_MRT3847_49639C.1.pep
EKEEFKEREKYSELIRVNLPRKKKRKQKRKLHRMNGNSENSYKRILSLQERESKRELCFSLQRHD

SEQ ID NO: 229918 - protein, 86 aa, Glycine max
  unsure (1)..(86): unsure at all Xaa locations
  Clone ID: PAT_MRT3847_4963C.1.pep
KNQQAAEPQPKKTQTHQNPTPXXDPQXPQNKXHHPXXPRXHHPXXAATPTPTAGARRKXGXAXDPXDESAXRGRXAXQHXXRPGDA

SEQ ID NO: 229919 - protein, 67 aa, Glycine max
  unsure (1)..(67): unsure at all Xaa locations
  Clone ID: PAT_MRT3847_49640C.1.pep
ISCRTLYYLIEDFATDKNFCXLFISSLNNYKFKLEKSWISTTTLLSGIGFRGKTLLFLSFLSLSSYH

SEQ ID NO: 229920 - protein, 30 aa, Glycine max
  Clone ID: PAT_MRT3847_49641C.1.pep
VQNSEQNYTSHEKVYQIRGPIMRPGETQAK

SEQ ID NO: 229921 - protein, 177 aa, Glycine max
  unsure (1)..(177): unsure at all Xaa locations
  Clone ID: PAT_MRT3847_49642C.1.pep
QKLNAERHLWNAWVTISELRHSVILKRIKLVLLRQKLKLTSILKGQISYXEEWALLDRDHSSSLLGATEALKASTLRLPVVXKXIADVPNLKDALGSAVDVMQAMASSIYSLSSKVEETNCLVAEILKVTSKERLLLEHCKEFLSSLAAMQVKDCSLRTHMLQLSRVPTSSCLTTRV

SEQ ID NO: 229922 - protein, 78 aa, Glycine max
  unsure (1)..(78): unsure at all Xaa locations
  Clone ID: PAT_MRT3847_49643C.1.pep
GVASFPFWWCLVIFGSEGYLSLRWIRGPSLLGVSTLMVWSAALLGVDILAERVPLPPALYPTSGVCTQIXCVSCTVQS

SEQ ID NO: 229923 - protein, 71 aa, Glycine max
  unsure (1)..(71): unsure at all Xaa locations
  Clone ID: PAT_MRT3847_49644C.1.pep
MEYMNQRPKDDSLIFELDDTMHPLNTGLAKACGQNSKDYMAEKLGIEKSKIEDXSNLLYKIQGKTTAGKRT

SEQ ID NO: 229924 - protein, 56 aa, Glycine max
  Clone ID: PAT_MRT3847_49645C.1.pep
VLIPSVYLDRLARSRVCVHVDIQRITVYTEYHVQPSSIYLVACVNASVNVLGINGS

SEQ ID NO: 229925 - protein, 139 aa, Glycine max
  Clone ID: PAT_MRT3847_49646C.1.pep
PGKLHTDDLPTKPPLVPTYKEWSGLMRSLFLATLTNNQSTFDSGSHGFIAGALKNTPHQLGLLAPPNKLQNVLENDYMKSLVESPTEETSLIYVSQLASPICGDQDSLVTNPPMPVYGSEYKKQMALSGSLTSTSLKRT

SEQ ID NO: 229926 - protein, 74 aa, Glycine max
  Clone ID: PAT_MRT3847_49647C.1.pep
PTRPPTRPPTRPITKERSRCDMVKKNIFTMCSTISEHLLLQNYFMCQKKKKNKKKKKNKKKKKQKQIKKTYNDN

SEQ ID NO: 229927 - protein, 186 aa, Glycine max
  Clone ID: PAT_MRT3847_49648C.1.pep
PQPVPGLEDSLRDKTVNVGSSECAVEAPAHGPFEEDYSTMPMSPKSGELSHSHGISGNRLNHRIKQKSIAEIMGEDKDVNTKNQEGDATEKVTVRKKRKGSEDTMASKSVQMRKALFSNTDRNVAGAENDGGCWGKEDGDNGTLAQLKKKKKAFGIGKSSSGSKKETDLEGKFKGKNEKGSLSREN

SEQ ID NO: 229928 - protein, 55 aa, Glycine max
  unsure (1)..(55): unsure at all Xaa locations
  Clone ID: PAT_MRT3847_49649C.1.pep
MXXQXXXXXXVSSIVXAXIXWXXXRKXKLPPSPKGLPIIGHLHXXXPIPHQDFYK

SEQ ID NO: 229929 - protein, 41 aa, Glycine max
  unsure (1)..(41): unsure at all Xaa locations
  Clone ID: PAT_MRT3847_49650C.1.pep
LFVXXVXXVVXXXXAPXXGSRFXXXXPXVAGAALRXXGCSG

SEQ ID NO: 229930 - protein, 106 aa, Glycine max
  Clone ID: PAT_MRT3847_49651C.1.pep
PRIPFNNYCATDCSTQRTIERLELTSKTFGGTNGLHPFKYKTLITLNTFHMDCLPSYLFGLGLNSDTEQHYRIIRLSNPITKLLQYVIHYYTIAYTMLKQQYYCII

SEQ ID NO: 229931 - protein, 61 aa, Glycine max
  Clone ID: PAT_MRT3847_49652C.1.pep
SSIHLVIEAADQLTWQLPSKAENFLECHTWKIFPWHVLTYIAPSGYFFLSSTKGYIHLLFL

SEQ ID NO: 229932 - protein, 119 aa, Glycine max
  Clone ID: PAT_MRT3847_49653C.1.pep
FNNVYFSSQFVVNIKHALRAIGDCNCLFSILISRYSSLDNLLVILRSPPRTGLTFAGVVSFWTALSFAFFTHVVCIFVSLGTKVRWIELVCINRGISGLLLTLVLLVILYKLIGFTDYL

SEQ ID NO: 229933 - protein, 428 aa, Glycine max
  unsure (1)..(428): unsure at all Xaa locations
  Clone ID: PAT_MRT3847_49654C.1.pep
MDMEMKEGEAPVLWFETSDSVCCQHQFEPDGRLSVVIVDDSRPLYQRMAGSFMNKFFPSGYPYSVNEGYLRYTQFRALQHVTSAALSVLSTQSLLFAAGLRPTPAQATAVSWILKDGMQHVGKLICSNWGARMDSEPKRWRLLADVLYDIGIGLEVLSPLCPHLFLEMAGLXNVAEGIGNLAKGMSIVASRATRLPIYSSFAKEGNLSDLFARGEAISTLFNVVGIGIGIQLASTVCASMQGKLVVGPLLSIIHIYSVSEEMRATPVNTLNPQRTAMIVADFLKFKXAGSVSSPADLRYREDLLFPRRLIEDAGNVRVGRDLHKVIKPSRLLESKQVFPGEKFILNGDNRCIDMVLEQDAIGKDALRGWLVASYAVQIGKSSHELSTSTLLQAYEKMNEVFPAFIKELQCKGWHTDRFLDGSGCRFAL

SEQ ID NO: 229934 - protein, 94 aa, Glycine max
  Clone ID: PAT_MRT3847_49655C.1.pep
QGGTTGQTGALREKAGGPKAGTKHQQEGRAERPGGPKERGKAHKEGGAHRPLGEGKTEVPARKKKRPTPGKGAGGFRPPGGALFTTRKRDTLEG

SEQ ID NO: 229935 - protein, 253 aa, Glycine max
  Clone ID: PAT_MRT3847_49656C.1.pep
HASENTFIWGEDMDEWAPIHMIYGMERAIATWEVRLAASATALLHKLQKGIPPWVPLKGFEKKTYKQLQEEAIESKRRDLAVLEANDGLWPGAKIPSHALFLWASGSELTTILEQDHMPNKYIPKYLRKKLAEIIPGLRPWEVLSIEQAMDRLTFNGEWYREPLGSFTTGPPYLEHWNRDVMRLYKIFDDLNTELYEHMENSIAGFDKIMEKIRDDFIARTDKMLEKKDKEKREARKKAGLPEYQWPEKPYVP

SEQ ID NO: 229936 - protein, 84 aa, Glycine max
  Clone ID: PAT_MRT3847_49657C.1.pep
FVWLLLLNGNADGSKDVYKLAELEEQHVKGFHQNVSKSFVKEGENPAEKVSELSFEKGEEIAKASHESLVSDAEWVCKSPKSWR

SEQ ID NO: 229937 - protein, 88 aa, Glycine max
  Clone ID: PAT_MRT3847_49658C.1.pep
VERSREVLTFSNSSTCKTWLIKLCLKHRFHTDQACSTGATASSAACVFNGLRNNRVGTAFAKRPEQECAKNGATCSTSPPRSPSVKAY

SEQ ID NO: 229938 - protein, 38 aa, Glycine max
  Clone ID: PAT_MRT3847_49659C.1.pep
LQFFHILLVLFCLKGENLCVLSYIQFFDKKLCLVSFTS

SEQ ID NO: 229939 - protein, 145 aa, Glycine max
  unsure (1)..(145): unsure at all Xaa locations
  Clone ID: PAT_MRT3847_4965C.1.pep
RPPIASAHASAQFIWLVEQSGVIVVRGSSLRCVVEEPLQKLDLVLVGPQPLKQLPXSSRGGDDFFSSISSRQRCFRSDESVRTMVAVGFEIGVPPPLETKESGTATVTVRAVEGEGTFSSSSSSSYSAAPSGLCPTVGTGGVFAK

SEQ ID NO: 229940 - protein, 46 aa, Glycine max
  unsure (1)..(46): unsure at all Xaa locations
  Clone ID: PAT_MRT3847_49660C.1.pep
QDKWKTLLHTATLSSDQLMGXPLPQELLNMVLAAHAFWSYHQSNHH

SEQ ID NO: 229941 - protein, 62 aa, Glycine max
  Clone ID: PAT_MRT3847_49661C.1.pep
SSRSNQIQLKSKIKRKKDKVQTSQHMAASIPFTGINSSRDLPIPRESNNPFPNWSSNMSKFA

SEQ ID NO: 229942 - protein, 84 aa, Glycine max
  Clone ID: PAT_MRT3847_49662C.1.pep
FSLFQLNRSLAECRVSSKVGSESGLLSLCVRLLNLAWSCACFSLSVAGTEGGFLSLESSSLRGGGGCALLVSSPPASARGRSRG

SEQ ID NO: 229943 - protein, 78 aa, Glycine max
  unsure (1)..(78): unsure at all Xaa locations
  Clone ID: PAT_MRT3847_49663C.1.pep
MPESEHDLDEEAPNATMETKVAVGGAAPKRVWRWTXSQLHQTDGIIPSQAGWNKGDSQKLMTNFGTPRNTTTKVKSGE

SEQ ID NO: 229944 - protein, 128 aa, Glycine max
  Clone ID: PAT_MRT3847_49664C.1.pep
LPWLLFQRRYAADSVNHLGKERFASLVFVGAACIHCPLLLFAMALSPSVVPVLVDPLGIIRFMAQPRQLIHMALWLPMWTPLGDGKVCLSGVCFEGRYPEIELARPLNQECRLYSHMVGTEQVVAARA

SEQ ID NO: 229945 - protein, 78 aa, Glycine max
  unsure (1)..(78): unsure at all Xaa locations
  Clone ID: PAT_MRT3847_49665C.1.pep
TLSFPQATFRITACAAVLKFPHAARIVKPFILVGYPRKICNKSALIXNMCTSGLIGARSVGAAIRHVCGITRQVLKAP

SEQ ID NO: 229946 - protein, 42 aa, Glycine max
  unsure (1)..(42): unsure at all Xaa locations
  Clone ID: PAT_MRT3847_49666C.1.pep
LDGIYEGDLAKVVDVDNVRXRVXVKLXXRIDXQXFGSNMEGR

SEQ ID NO: 229947 - protein, 119 aa, Glycine max
  Clone ID: PAT_MRT3847_49667C.1.pep
DSQGNGTAVSLFFLVLCIHAMLHPCPFTLPTHIPLDWPCGQSLECMGCWGPVGCTGPEPLAPSRLAWSQQVGDLSRACLSQLSPPIPPLSCLGQLPRACLLAAWQGAVQGQVRSPVTAR

SEQ ID NO: 229948 - protein, 106 aa, Glycine max
  unsure (1)..(106): unsure at all Xaa locations
  Clone ID: PAT_MRT3847_49668C.1.pep
SXXXVSXXXXSTXSXXXXDSGXGQXGTXXNXXEXXSARXLXXCFHTIXXRXXLRXQXHXNXXXXXXXSHDYXXXXXXGSSLXXXXLXQHDXXXLXQFAFXKXPSXG

SEQ ID NO: 229949 - protein, 58 aa, Glycine max
  Clone ID: PAT_MRT3847_49669C.1.pep
FHSQKLRLVLCIKAQLIHALTTASAAPHWVNLIRCFIPTDPGICTTSQRRFYLQRLFL

SEQ ID NO: 229950 - protein, 91 aa, Glycine max
  Clone ID: PAT_MRT3847_4966C.1.pep
MAASLDAAATFMRPTSVRISSRILISTQCISKAFGMSPAATNLTCSLQPDFQELAQVCVHATKIARFALATSALVVSGSSAQSVPIRPTLN

SEQ ID NO: 229951 - protein, 54 aa, Glycine max
  Clone ID: PAT_MRT3847_49670C.1.pep
MSAQRRGVELQMSMSNTIVLLYPHQSIPLSISYVKSHVSFRQGGIRILIELPCI

SEQ ID NO: 229952 - protein, 53 aa, Glycine max
  Clone ID: PAT_MRT3847_49671C.1.pep
AGIGHAPSGVKYLVALPQNMLQRWLPQSQTKIACFIHFILDIIRIWVSNLIKN

SEQ ID NO: 229953 - protein, 96 aa, Glycine max
  Clone ID: PAT_MRT3847_49672C.1.pep
RHTARAARTRAESARDGCEKTTEGEVGTFTGGTSLVSQSMRFTHIMGQRLQSILLFLECSHGGCSSLCIGAYLAFVRFGVIEVSCASYFLHHDDTW

SEQ ID NO: 229954 - protein, 132 aa, Glycine max
  Clone ID: PAT_MRT3847_49673C.1.pep
MGSKRYALLMCGEDSEYLVKMHGGTYGVFMKLLQEQEEKWDLYKLVQGEFPEQHDLPLYDGFVISGSCYDAHANDPWILDLIALVIKLDSMHKKILGICFGHQVQFLMLNTSHPYQSSFGSSLVNCHPFYIF

SEQ ID NO: 229955 - protein, 97 aa, Glycine max
  Clone ID: PAT_MRT3847_49674C.1.pep
IFYSKEISVLGHGSETASKLQGTTPHDQLLIDTSDSFSGLLLFTIGFLLLMVAFVKDREFQSFFAKGCVMLHISMAVWRFFFERKLGDLAHEWPRHA

SEQ ID NO: 229956 - protein, 76 aa, Glycine max
  Clone ID: PAT_MRT3847_49675C.1.pep
DRGGEAFATGLEESSNDSLILGVLLGKGKIKTLCAGLRPGDTLSESLSVPLLDTLLFDIGLGVRLKLCLKLSQVLA

SEQ ID NO: 229957 - protein, 448 aa, Glycine max
  unsure (1)..(448): unsure at all Xaa locations
  Clone ID: PAT_MRT3847_49676C.1.pep
MVHSLLLLLLLLTLTATSAQHDGPSITATMEQFSGYKIHEPHSFQPSSLSVDAQALQNQIDELAAFSDSPAPSVTRVLYTDKDVLGRRYVKTQMELAGLSVREDAVGNIFGRWDGLEPELAAVATGSHIDAIPYSGKYDGVVGVLGAIEAIRVLKRSGFKPRRPLEVISFTSEEPTRFGIGCLGSRLLAGSEDLANSLKTSTDIQNISFLDAAGSAGYSKNEDDLSSVFLKKGTYSAFVELHIEQGPILEDEGISIGIVTAIAAPASLTVEFEGNGGHAGAALMPNRNDAGLAASELALAVERHVLDSVPIGSIDTVFTVDCLELHSGAINSIPSKYHLEIDTRDIDEERRNKVVEKIHQSAIKITKTRGVKLSDFRVINQDPPAIYDEEVFKLAETTXYMARTSPMSMFFIPCFKRYSLKPECFATIEDSSHVVKVSALTLDKLSSQ

SEQ ID NO: 229958 - protein, 58 aa, Glycine max
  unsure (1)..(58): unsure at all Xaa locations
  Clone ID: PAT_MRT3847_49677C.1.pep
MWHQNLGVDSTGTVRETVFSASIFVLVALVLSVYLVFEHLAAYNQPXDQKFLIGLILM

SEQ ID NO: 229959 - protein, 460 aa, Glycine max
  unsure (1)..(460): unsure at all Xaa locations
  Clone ID: PAT_MRT3847_49678C.1.pep
MIHSLLLLFLLIAVSAQQHQHDDPSITATMEXFSGYTIHEPHSSLSVDAQALQNQIDELAAFSDSPAPSVTRVLYTDKDVLGRRYVKTQMELAGLSVREDAVGNIFGRWDGLEPELAAVATGSHIDAIPYSGKYDGVVGVLGAIEAIRVLKRSGFKPRRPLEVISFTSEEPTRFGIGCLGSRLLAGSEDLANSLKTSTDIQNISFLDAAGSAGYSKNEDDLSSVFLKKGTYSAFVELHIEQGPILEDEGISIGIVTAIAAPASLTVEFEGNGGHAGAALMPNRNDAGLAASELALAVERHVLDSGSIDTVGTVGILELHPGAINSIPSKSHLEIDTRDIDEERRNKVVEKIHQSAIKITKTRGVKLSDFRVINQDPPAISDEAVIKAVETATKELNLKSXLMSSRAYHDSLFMARLSPMGMIFIPCYKGYSHKPEEFATIEDMSNGVKVLALTLAKLSSQ

SEQ ID NO: 229960 - protein, 59 aa, Glycine max
  Clone ID: PAT_MRT3847_49679C.1.pep
IRHQHRRYEQEITGSQMDADAMWGKSRVLRWKLMRNLWFRIEAIMTFFGIVLLGSAWAS

SEQ ID NO: 229961 - protein, 75 aa, Glycine max
  Clone ID: PAT_MRT3847_4967C.1.pep
KKKKSIFRRAPPNLLSLSGKNTYLGLKSTTGPGKKSPNLVKAKAHGIPRKKVNQEPGYKNRTPGLKIKGKSTPPN

SEQ ID NO: 229962 - protein, 100 aa, Glycine max
  unsure (1)..(100): unsure at all Xaa locations
  Clone ID: PAT_MRT3847_49680C.1.pep
ETEGHPYLPRDSHLPGYLACFLTASNILSVYVFSSLLLISFVWSSXRRPMKTTGPRLLMCWLAFTGLTHTIIEGYFVFSPEFFKDRNGFYLAEVCELLLH

SEQ ID NO: 229963 - protein, 48 aa, Glycine max
  Clone ID: PAT_MRT3847_49681C.1.pep
PHMRLNAHLFMQKDCSMRRVPSVTSGKPTRAPTESSIYYSHYHRIIFT

SEQ ID NO: 229964 - protein, 73 aa, Glycine max
  Clone ID: PAT_MRT3847_49682C.1.pep
EEQRVAQVELAKQLCLCVIDAINSLPCSTNIAVSCRRTLLKLARAELAFLSRPSSSSVPLRSLLFKFVTCLCL

SEQ ID NO: 229965 - protein, 97 aa, Glycine max
  unsure (1)..(97): unsure at all Xaa locations
  Clone ID: PAT_MRT3847_49683C.1.pep
MGFTLLIEVLSHAYADELYLGQRDGGEFWTFDKEPLXQEAFKRFGKKLAEIEQKLIQRNNDETLRNRYGPVQMPYTLLYPSSEEGLTCRGIPNSISI

SEQ ID NO: 229966 - protein, 106 aa, Glycine max
  Clone ID: PAT_MRT3847_49684C.1.pep
VVCCLWFQLFIFIYKYLLLSGGPKPVDTNPCVRGNFFKMGGPKFKPWGRVEPGRAGKNPGGTQIICLEKHPPLYQRAQIGNRPQPIGLKEVGQPQWARESPLYRGN

SEQ ID NO: 229967 - protein, 294 aa, Glycine max
  unsure (1)..(294): unsure at all Xaa locations
  Clone ID: PAT_MRT3847_49685C.1.pep
GSSKDLAFHSIAPEALLPYFQKLDIWPINVRVDYSPNRVDLAALSHGKYVELVNLVPWKGVELNLKHVHASGIYGWASVCETTVGEWLEDISQNQIRKILRGLPTVRSLIAVGAGAAKLVSSPVQSYKKERRVLKGVQRGTMAFLRSISLEAVGLGVHLAAGAHDILLXAEILAAYPLSPLPVKDKSKTDXRSIQPKDAQEGIQQAYESLSDGLGKSAAVLVQNPLKKSXRGSGAGPALAAAVRAVSAAAIAPGSACHSEVHYALFVSGNISLSPFCIKESILKYCPTQPWEED

SEQ ID NO: 229968 - protein, 248 aa, Glycine max
  Clone ID: PAT_MRT3847_49686C.1.pep
YVRLVNVVPWKGVELNLKHVHASGIYGWASVCETTVGEWLEDISQNQIHKILRGLPTVRSLIAVGAGAAKLVSSPVQSYKKERRVLKGVQRGTMAFLRSISLEAVGLGVHLAAGAHDILLQAEGILASIPSPVPLPVKDKSKTDVRSNQPKDAQEGIQQAYESLSDGLGKSAAVLVQNPLKKFQRGSGAGPALAAAVRAVPAAAIAPASACASAVHYALLGFRNSLDPERKKESMEKYCPTQPLWEED

SEQ ID NO: 229969 - protein, 85 aa, Glycine max
  unsure (1)..(85): unsure at all Xaa locations
  Clone ID: PAT_MRT3847_49687C.1.pep
LEPNRLEAEFARKGVPVCKKFSIEPWAPEMYFNEKIGFLKGQMPPNFCKGRRAFKKGFQKVKGRIXALVVKAQKVPKGGWFMQDG

SEQ ID NO: 229970 - protein, 175 aa, Glycine max
  unsure (1)..(175): unsure at all Xaa locations
  Clone ID: PAT_MRT3847_49688C.1.pep
NFHKADVNTEIIFNCQMGRGRTTTGMVIATLFYLNRIGASGIPRSNSVGRVSQCLTNVADYIPNSEEAIRRGEYTVIRSLIRVLEGXGVEGKRQVDKVIDKCASMQNLREAIGTYRNSILRQPDEMKKEASLSFFVEYLERYYFLICFAVYIHSEMATLCSCSADHRGFTDCVRN

SEQ ID NO: 229971 - protein, 58 aa, Glycine max
  Clone ID: PAT_MRT3847_49689C.1.pep
ISRMDPLILPLVSLSWSASTSPCLPVMQFGMTNKIMGLYRELNVLDGRLLMTTPYLKD

SEQ ID NO: 229972 - protein, 37 aa, Glycine max
  Clone ID: PAT_MRT3847_4968C.1.pep
FTLGANISIMGLGISVSGVELLTLFQYNCPKFRICYF

SEQ ID NO: 229973 - protein, 415 aa, Glycine max
  Clone ID: PAT_MRT3847_49690C.1.pep
MKALRTLRRTLYSPTPATVFRAFFSAQPQPHHDDPTDSSVFDSSHYALEAEPTLKPEPKPTWDEKYRARADRVVFGEEGPKGKLRVKEEEDERRRRALAKALLEAAMDEGEDEEEEGKGAGLVKEDDQKSLSVGIIGAPNAGKSALTNYMVGTKVAAVSRKTNTTTHEVVGVLTKGDTQICFFDTPGLMLNCGGFPYRDVKVRVESAWSSVNLYEVLIVIFDVHRHITRPDSRVIQLIKRMGARSIPNQRRILCMNKIDLVEKKKDLLKVAEEFKDLPGYERYFMISGLKGSGVKDLTQYLMEQAVQRPWEEDPFTMSEEVMKMIALEVVRERLLDHVHQEIPYDVEHRLIDWKELRDGSLRIEQHFITNKLSQCKILVGKNGSKIGRIGIEANEELRSIFKKQVHLILRVRHKK

SEQ ID NO: 229974 - protein, 86 aa, Glycine max
  Clone ID: PAT_MRT3847_49691C.1.pep
LGLAGSVVPPVGKAMSGRQINCWSVPVMGSGFDVTVNARLIAFYQCCVALLLSPCLSKLMQAWEGLFASSLSIESKFIITGNSFCF

SEQ ID NO: 229975 - protein, 81 aa, Glycine max
  Clone ID: PAT_MRT3847_49692C.1.pep
PSVGQWSLDSPASATSVFIHYPCYSVMLSRELVTVWALSVQRAEYPEARDDRCDDTIFIFSHRTATFVSSINSASDHCLIS

SEQ ID NO: 229976 - protein, 43 aa, Glycine max
  Clone ID: PAT_MRT3847_49693C.1.pep
SSFNFDLQQTPYRYFHTHFYSLFPLSLKGIISPFTKEKSPFFN

SEQ ID NO: 229977 - protein, 45 aa, Glycine max
  unsure (1)..(45): unsure at all Xaa locations
  Clone ID: PAT_MRT3847_49694C.1.pep
DPVERPLXFFFFFFSHLISKSYLQLGRISTERGTIQFPKWLYIHK

SEQ ID NO: 229978 - protein, 50 aa, Glycine max
  Clone ID: PAT_MRT3847_49695C.1.pep
IGINTTSEASGKNLMNDCVFIIYSNAFHECLLLTLCLCLYTRRSPFDTLL

SEQ ID NO: 229979 - protein, 122 aa, Glycine max
  unsure (1)..(122): unsure at all Xaa locations
  Clone ID: PAT_MRT3847_49696C.1.pep
APCPYFWLLFVAVSSISGVRPSRHGFSCGSCPPGGRVSLCPARSARVRPAWCCWLPGGSGVRSCASRLFCGLRVSFCRLFVLLHLPRSVALPLGPFCLPLLAVARXGVLFCGSLLQSRVRAS

SEQ ID NO: 229980 - protein, 112 aa, Glycine max
  Clone ID: PAT_MRT3847_49697C.1.pep
LEAQNGEHIAAFILKPVQGEAGVIFPPNGYLKADRDLSSKYTVLMIADETHTVLARTPMMLACEWDEEHPEVLILRKALCGGGIPSRALLAYKDAMPCILPVQNGSTLDGNT

SEQ ID NO: 229981 - protein, 80 aa, Glycine max
  Clone ID: PAT_MRT3847_49698C.1.pep
LGPPQNLFWIVQPVFFFKIVGRGHSNVGIFFSIGPLLKFEIFQMGGGLFFFFKIVGVPLHPKWDYGLWFLKLNLLKTWKE

SEQ ID NO: 229982 - protein, 48 aa, Glycine max
  Clone ID: PAT_MRT3847_49699C.1.pep
MRYMTISAHDVYFGISSRGIVSNFSPWFVAASICPLFIPRASCMIKCL

SEQ ID NO: 229983 - protein, 92 aa, Glycine max
  Clone ID: PAT_MRT3847_4969C.1.pep
SKKLFSRQIIILIKDQDHYYLFLSIRYFLEVCITTILQTIQKCTEYCTLKMNGNKDKQTHDIGACITRRVDEGGEELRRGAIRMNCTGTGKI

SEQ ID NO: 229984 - protein, 94 aa, Glycine max
  unsure (1)..(94): unsure at all Xaa locations
  Clone ID: PAT_MRT3847_496C.1.pep
XTSXXFSFHFRXFXSSSEAXAHRXXPCXXXXSXIPYHHLVHQIXPSSSMXVHTXXXAAPAXSMSETXPXVSDXNXVDXLSXFXXSVXSRLQXSP

SEQ ID NO: 229985 - protein, 173 aa, Glycine max
  Clone ID: PAT_MRT3847_49700C.1.pep
MAGGGAPAKADEPQPHPPKDQLPNISYCITSPPPWPEAILLGFQHFLVMLGTTVLIPTALVPQMGGGNNEKARVIETLLFVAGINTLLQTMFGTRLPAVIGGSYTFVPTTISIILAGRFSDEPDPIEKFKRIMRSIQGALIVASTLQIVLGFSGLWRKCARFLSPLSSVPFVS

SEQ ID NO: 229986 - protein, 151 aa, Glycine max
  Clone ID: PAT_MRT3847_49701C.1.pep
MAGGGAPAKADEPQPHPPKDQLPNISYCITSPPPWPEAILLGFQHFLVMLGTTVLIPTALVPQMGGGNNEKARVIETLLFVAGINTLLQTMFGTRLPAVIGGSYTFVPTTISIILAGRFSDEPDPIEKFKRIMRSIQGALIGASTLQIVLG

SEQ ID NO: 229987 - protein, 531 aa, Glycine max
  Clone ID: PAT_MRT3847_49702C.1.pep
MAGGGAPAKADEPQPHPPKDQLPNISYCITSPPPWPEAILLGFQHFLVMLGTTVLIPTALVPQMGGGNNEKARVIETLLFVAGINTLLQTMFGTRLPAVIGGSYTFVPTTISIILAGRFSDEPDPIEKFKRIMRSIQGALIVASTLQIVLGFSGLWRNVARFLSPLSSVPLVSLVGFGLYELGFPGVAKCVEIGLPQLILLVFVSQYVPHVLHSGKHIFDRFAVLFTIVIVWIYAHLLTVGGAYNDAPHKTQISCRTDRAGLIDAAPWIRIPYPFQWGAPSFDAGEAFAMMMASFVSLVESSGAFIAVYRYASATPLPPSILSRGIGWQGVGILLSGLFGTVNGSSVSVENAGLLALTRVGSRRVVQISAGFMIFFSILGKFGAVFASIPPPIIAALYCLFFAYVGAGGLSFLQFCNLNSFRTKFILGFSIFIGLSVPQYFNEYTAINGYGPVHTGARWFNDIINVPFQSKPFVAGVVAYFLDNTLFKREAAIRKDRGKHWWDKYKSFKGDTRSEEFYSLPFNLNKYFPSV

SEQ ID NO: 229988 - protein, 80 aa, Glycine max
  unsure (1)..(80): unsure at all Xaa locations
  Clone ID: PAT_MRT3847_49703C.1.pep
PTRPHTLFVLPHSKTAIGIGIAKKGRSVTTRLDXVDRTMYSTFCSTVNFFSHLYTHSMNQQKLLFQAGERHSFEKLYHWI

SEQ ID NO: 229989 - protein, 163 aa, Glycine max
  unsure (1)..(163): unsure at all Xaa locations
  Clone ID: PAT_MRT3847_49704C.1.pep
EYRCSVISITLLFSLALAGESHVHTSLPDEHKWEACWPNTPIPTALGKLLKPLPASVEIDELPKQMDDTQYPKTFFSKEDLHPCKTMRVQCTKRPYAQPYGVYTWLTDIQHASIERCSCDEICITKEAFEGEEKSCAQSLGTLIGLAIXSTLGKNIQAPRKLP

SEQ ID NO: 229990 - protein, 107 aa, Glycine max
  Clone ID: PAT_MRT3847_49705C.1.pep
YMGGFFFPSVFFKKKARVTKIKKKNQITLNNNASKSNKIFTEDLYRAKLFNISKGLLTGWSIRIGQRIKWAYYCNNLRDSTHSNSRSGTEPYSTNKAIKTYWGISPT

SEQ ID NO: 229991 - protein, 37 aa, Glycine max
  Clone ID: PAT_MRT3847_49706C.1.pep
GRVGGGGRYGGYLVAHLVLHRGSSFMVTQKYKLVAVI

SEQ ID NO: 229992 - protein, 101 aa, Glycine max
  Clone ID: PAT_MRT3847_49707C.1.pep
LKTAARRRQKGMQQMLLLSLIMSFYLCGLGVKKSRLKQLDEIQVKTINTSNGKNLHKCPALIFEFTCVVFGIRINNLQLAYFLFNLFSLFLSYLLMLINLN

SEQ ID NO: 229993 - protein, 49 aa, Glycine max
  Clone ID: PAT_MRT3847_49708C.1.pep
DSFLVFLPGGSPCHCRLSTTNCLPEDDTAPLALSLTVSAANSAAPWTQV

SEQ ID NO: 229994 - protein, 95 aa, Glycine max
  Clone ID: PAT_MRT3847_49709C.1.pep
QEIDNLIAEAAQTDGRLARRPLQDISKEIQAHMMLLSLFIQLIEERSVAIMSLDSLSLCGRFSVRKLMAQDLLQGELRILKSASAWLENYCFSMT

SEQ ID NO: 229995 - protein, 76 aa, Glycine max
  Clone ID: PAT_MRT3847_4970C.1.pep
QFHHILNSHKDQVAAKSDPSYRLSELCQRTQPISATRCTMKKPCHIPSVSMPISKEHAFEAPKKPFLSRLSMNEIF

SEQ ID NO: 229996 - protein, 150 aa, Glycine max
  unsure (1)..(150): unsure at all Xaa locations
  Clone ID: PAT_MRT3847_49710C.1.pep
MSYSRILNSLLLVVLLVTCASGEDPYRFYTWNVTYGDIYPLGMKQQGILINGQFPGPQIESVTNDNLILHVFNSLDEPFLISWNGVQQRRNSWQDGVYGTNCPIPPGKNFTYVLQVKDQIGXYFYFPSLAFHKAAGGCGGFKNASRSEIP

SEQ ID NO: 229997 - protein, 61 aa, Glycine max
  unsure (1)..(61): unsure at all Xaa locations
  Clone ID: PAT_MRT3847_49711C.1.pep
AFRVLFKARNGLVSSVELSHVMSSLGXELSYQKVSXMICLANVNVNGLIKYEEFGKVRMAK

SEQ ID NO: 229998 - protein, 96 aa, Glycine max
  unsure (1)..(96): unsure at all Xaa locations
  Clone ID: PAT_MRT3847_49712C.1.pep
HAIGGRPPYCXDKGYLVDCAMEYLEMPDVMSYVVDSEWIHYEYDDLITICEVITIIMNPDDSIRASIHALCTICKSKMHIPLNDGAKGIITDCAMN

SEQ ID NO: 229999 - protein, 277 aa, Glycine max
  Clone ID: PAT_MRT3847_49713C.1.pep
KRVTLDSLVVQYLKHQHRQCPAPITTLPPLSLLHPHVCPEPKRSLDAPSNVTARLGTREFKYMYGGVHGNRRDRQFVYSRFRPWRTCRDDAGALLTCITFVGDSSHIAVGSHNGELKFFDSNNSNVVESYTGHQSPLTLVQSFVSGETQLLLSSSSQDVRLWDATSILGGPSHSFEGCKAARFSNSGNVFAALSSESARREIRLYDIQTCHLESNFSDTFAASTGRGHVYSLIHFNPSDSMLLWNGVLWDRRDSGPVHRFDQFTDYGGGGFHPAGNE

SEQ ID NO: 230000 - protein, 200 aa, Glycine max
  Clone ID: PAT_MRT3847_49714C.1.pep
ETYEKDERKRQIKSDNLDKNHPDEGESAKNSSRNKNSSKGKSSSKSEIPNRHDNKSSDNNNHDHPIKNQTTFTRTVVVANETVNHDVSNSASSHKEGNKTNHSVSSFDKAASGISPNLASENQADKSVSSNQGREEGKKIRNTAPPFRNNPKGDVTRSRNYPSNYGPPPSKAAFETVSKGPSSTSQIFDPPNGKQFKKIN

SEQ ID NO: 230001 - protein, 46 aa, Glycine max
  Clone ID: PAT_MRT3847_49715C.1.pep
CRMNYVAEISLRESSHRLGRCKRRHSFTTRCSYGSLSMWLFSKSIS

SEQ ID NO: 230002 - protein, 45 aa, Glycine max
  Clone ID: PAT_MRT3847_49716C.1.pep
RGKDKLVNEAYDLYSEMDARGIFPDAITYTTLIYGFCLLGQLMGA

SEQ ID NO: 230003 - protein, 100 aa, Glycine max
  unsure (1)..(100): unsure at all Xaa locations
  Clone ID: PAT_MRT3847_49717C.1.pep
XNCVLLVWECYRMVVSLGNNWAFEILPNGEKAIVGWMSRXWXGLXIPXDPXSYNPAAYLWYLLCXLXLXATXDXPXPXXHXXXSGXKLKIXLSXDGIDFS

SEQ ID NO: 230004 - protein, 100 aa, Glycine max
  Clone ID: PAT_MRT3847_49718C.1.pep
KSRNLPIDALVKSTYLRCNALLNKRGREITIMLASSQVCTEVLNRVIKGILKKENTHNVFEFDRCDIRFLIQEIINPREVQPARDFTVRLDERWCDCDKF

SEQ ID NO: 230005 - protein, 320 aa, Glycine max
  Clone ID: PAT_MRT3847_49719C.1.pep
MAMAAQAMAQFRFSPLSSHYRYHYQYNYHSTPSFPSPRRHPRNQRLHLSFSGGDRGGSGGGGGGGDSDGGGGDNEKNVGLGVVGMVLNGWRSRVAADPQFPFKVLMEELVGVSAAVAGDMATRPKFGLNELDLVFSTLVVGSILNFILMYLLAPTSCSSSSSTLPWIFARCPSSHMFEAGPYGSVERLGTLLYKGGVFALVGLGAGLVGTAISNGLIATRKKVDPTFQSPNKSPPMVLNAFTWAAHMGVSSNVRYQTLNGVEFLLDKWLPPLLFKFSVLALRFINNVAGGMTFVMLARFTGSQAAAAAAVPVPVPVPKHS

SEQ ID NO: 230006 - protein, 309 aa, Glycine max
  Clone ID: PAT_MRT3847_4971C.1.pep
MENQQEMMKVEKVCEIYEKISKLEDLNPSNHVNNLFTQLVTICTTPCQIDVTKLSQQVRETIAKLIRLCGKAEGLLENHYSTLIGSYENPLSHMKLFPYYSNYFKLSHLEFTMLTTHITQVPTQLAFVGSGPLPLTSIMLATHYLKHTCFHNYDMDPLANAKAHELVSSDTDLSKRMFFHTCDILNVSNGLKDYYVVFLAALVGMDHKEKGRVISHLAKFMAPGAILLLRSAHGARAFLYPVVDPSSDLKGFEVLSVFHPTDEVINSVIVARKGLYSSPVLASKCSGVEGFNHFNHGNVIEELTVDDQA

SEQ ID NO: 230007 - protein, 98 aa, Glycine max
  unsure (1)..(98): unsure at all Xaa locations
  Clone ID: PAT_MRT3847_49720C.1.pep
FCEPVPFGCPPAGTPVRGVCPPWFGGPNPFFFKGGFPLCCGQRHIFCFAAAKLFELEIRGFRQDNGIQNQSQKTQETVEEFVKKKHKTKKKKKRNHXK

SEQ ID NO: 230008 - protein, 75 aa, Glycine max
  Clone ID: PAT_MRT3847_49721C.1.pep
DGCSICAYNHPFGCDCKKLRSDLIISYHLFCSLCLILDDVSPSPCPEALLYLSAFFTQPNLPSVFMTWVCCFLSL

SEQ ID NO: 230009 - protein, 60 aa, Glycine max
  Clone ID: PAT_MRT3847_49722C.1.pep
TQGEHNDLAEEIVRTDCSHGRNPRHLSRSHARNQKIEILHQTKLNRDTVDVNDRLILTET

SEQ ID NO: 230010 - protein, 215 aa, Glycine max
  Clone ID: PAT_MRT3847_49723C.1.pep
QKQKYTMAFTFTRILILFVSLSSLILDTHAARAPRTIQTRLYSLCKPTTNMDLCYKTILPEVVGLSRFSNYKALEVEILATQKQVETTSKLITSLLAKPDNSKDLTESLQICKEQYGNILDSIEESKNQVAQRNVIEARFKFSAAISLQVSCNDSFTAGTSPIVKEAQDVFDLAGNCLDIMKAIEDRESRRRRGGSPVTSPSVPSPCQGQVGLCS

SEQ ID NO: 230011 - protein, 54 aa, Glycine max
  Clone ID: PAT_MRT3847_49724C.1.pep
EICFSTPFWFPVLHVTFILEEQEDEISKHSNNEFGDLGYTTFIILNGTPTRSCN

SEQ ID NO: 230012 - protein, 101 aa, Glycine max
  Clone ID: PAT_MRT3847_49725C.1.pep
VVGSRSIHTRVGRDPKCSRYITATRFPHSCIRPCTVTSVGRRCFPDLEESQRHLLGPYSVSFRSDENPPPMVRPVRSSPYPNPHPVRVNVTVVIPSHVHSI

SEQ ID NO: 230013 - protein, 84 aa, Glycine max
  Clone ID: PAT_MRT3847_49726C.1.pep
RSRVQFYISSAVAAPIPSSSLACFSNHYRRQLCWCLSIGHWDPSPCEDSRPQFGHWIAGCAKGENPASADCASSLSVTHNRVVT

SEQ ID NO: 230014 - protein, 75 aa, Glycine max
  Clone ID: PAT_MRT3847_49727C.1.pep
HALSDNLCISARNHSHGFSASECQANQASATSEECTVAWGVCNHAFHFHCISRWLKTRQVCPLYNSEWEFQKYGH

SEQ ID NO: 230015 - protein, 85 aa, Glycine max
  Clone ID: PAT_MRT3847_49728C.1.pep
FHERVQLDSICSNELGDPDAVPVVPGRMDVNYLDNWTNQDNLQLLNLFYDATPSDYVSAIVTDHGMIPPTSVAVIVREYGREHLI

SEQ ID NO: 230016 - protein, 160 aa, Glycine max
  Clone ID: PAT_MRT3847_49729C.1.pep
MAEMKKKAELIFFPIPEIGHLASFLELAQLLINHHNHLSITFLCMKLPYAPSLDAYIRSVIASQPQIQVIDLPQVEPPPQELLRPLSHYIWSYLQTLKPHVKGIVQNILSSHSNPIIGLLLDVPRSPWLGLGDDLGIPSFLHRSSVGRCCRLCPPLRWRQ

SEQ ID NO: 230017 - protein, 119 aa, Glycine max
  Clone ID: PAT_MRT3847_4972C.1.pep
YTGSFNEVKLFFLPHQDLTVVRTFFAVILHLLQKPSSLESSCSLHLVSIWQNFHSLLSFCSCSWSQNEDLLWRGVDLSWGVFTLFYLISILFSLWWWLCLSWRVEFCSSSFPFSSKMPL

SEQ ID NO: 230018 - protein, 116 aa, Glycine max
  Clone ID: PAT_MRT3847_49730C.1.pep
LHCLIGWLLKLRDKEKKKNCTILHQISHLRFHLSHWWKTLLIYCQKLRDLRLTMSLIHWSLILWITMMLFIHNLDNVEGRYHYHKGQKKNSPAPNPPAESPTPPEDPPSPPSNSPS

SEQ ID NO: 230019 - protein, 42 aa, Glycine max
  Clone ID: PAT_MRT3847_49731C.1.pep
MGKEYRYNIWYDLYYYKSPPCRSPTCHPPYYYKYPPPPTSYP

SEQ ID NO: 230020 - protein, 85 aa, Glycine max
  Clone ID: PAT_MRT3847_49732C.1.pep
LMLLNKMILSFKTISFQSMNTPMSGYSHIVDDNMSHQTQLVQCVQYRPLVCALGVFYVIILSFIFLCSPFVCMCVRVCEKPTILF

SEQ ID NO: 230021 - protein, 140 aa, Glycine max
  unsure (1)..(140): unsure at all Xaa locations
  Clone ID: PAT_MRT3847_49733C.1.pep
FHTPEKKGENFTKKKKTEPGKQKNQVLNWVGQEVGNPPKKPPQKKTPPGGGGGGKKFFKPPPXXLPXSEKKDQKKKNGTKGKKGTGNNEARGAHRGEPPKVKKENLQNLNGERIIGGAEGIKKKNHSPRGPPPARPPGNP

SEQ ID NO: 230022 - protein, 89 aa, Glycine max
  Clone ID: PAT_MRT3847_49734C.1.pep
MYNFHLWHAEKIKNVSNGDVADDSYHRYKEDIGIMKYMNLDAYRFSISWSRVLPKGKLSAGVNHEGVNYYNNLINELMANGHNLLTQIS

SEQ ID NO: 230023 - protein, 121 aa, Glycine max
  Clone ID: PAT_MRT3847_49735C.1.pep
LNTLKSYNNIKLILMQGSIIDTVVTIFSGTVCDLVERRPMLITSSIMFFLSGLVMLWAPNVVIVLLARIIDGVVIAHAVTLTPLYISEIVPADIRGQLNTYSLNLGPLQATGIRVWTIFNI

SEQ ID NO: 230024 - protein, 69 aa, Glycine max
  Clone ID: PAT_MRT3847_49736C.1.pep
MPKQIHEIKDFLLTARRKDARSVKIKRSKDVVKFKVRCSKYLYTLCVFDSEKADKLKQSLPPGLSVQDV

SEQ ID NO: 230025 - protein, 68 aa, Glycine max
  unsure (1)..(68): unsure at all Xaa locations
  Clone ID: PAT_MRT3847_49737C.1.pep
XIPSXAAXELRAPSLLSPFYLTIQLYLLSFSLLFLLVHLTRSSRVPIILFNQVHILLPLGLNLTLRYT

SEQ ID NO: 230026 - protein, 43 aa, Glycine max
  Clone ID: PAT_MRT3847_49738C.1.pep
ASFWTVCCIQSLFIVSSLHLSVPPIQLSINTLSQTSIPLRTND

SEQ ID NO: 230027 - protein, 35 aa, Glycine max
  Clone ID: PAT_MRT3847_49739C.1.pep
GSKLLLSLVYKICGSEMQMKQGLVLLFFILELYGK

SEQ ID NO: 230028 - protein, 147 aa, Glycine max
  unsure (1)..(147): unsure at all Xaa locations
  Clone ID: PAT_MRT3847_4973C.1.pep
MGFPKDPHHASSMHPVCVKTVLADLRLHTSYGYALRAAQHYIYIANQSSIASSYTWSQHTDLGANHLIPMEIALAIAASIVASERSAVYIHLPMWPEGVPTGAAALXILLRRHLTLSAMYDTLYTALYELWLDSAFSPHYYVHLSSL

SEQ ID NO: 230029 - protein, 110 aa, Glycine max
  Clone ID: PAT_MRT3847_49740C.1.pep
HLQNGLNYSSNKVVYFQRVTVILSDLSLLYGVYRLTRNLDSRKQQLIWSLVIWSPMLFIVDHVHFQYNGFLIGILLISLSYLEEGRDLLGGFVFAVLLCFKHLFAVAAPI

SEQ ID NO: 230030 - protein, 57 aa, Glycine max
  Clone ID: PAT_MRT3847_49741C.1.pep
MAEQTENGFLKHTKVFLSSNKTGNGKRPGKGVNRFWKSIGIGFRTHQEAIEGTYIDK

SEQ ID NO: 230031 - protein, 47 aa, Glycine max
  Clone ID: PAT_MRT3847_49742C.1.pep
ETERLLMNGKIVRLRQMPIIHQCPLLPGYPIQLYYLTPTYELYERVA

SEQ ID NO: 230032 - protein, 65 aa, Glycine max
  Clone ID: PAT_MRT3847_49743C.1.pep
LEPRAVPYKILMYDHAFRASYLISHDGVTNAGGTVSYESLSHNALCIEADDLATQILATNGKSIT

SEQ ID NO: 230033 - protein, 115 aa, Glycine max
  unsure (1)..(115): unsure at all Xaa locations
  Clone ID: PAT_MRT3847_49744C.1.pep
AESAIGYEGVEKRMEICLLQPGLFADPQGRGIRAITKXQVGENITPTACTIGGILKXNXVDSYALSECRLFVYAYKNIIKTCGTTKLLLAMPPILKMAEQLSNDVKSANDTRGGL

SEQ ID NO: 230034 - protein, 49 aa, Glycine max
  Clone ID: PAT_MRT3847_49745C.1.pep
KNHTLPIYQFSRHWQKNEQKIKKKSNTPIIKEKHFLGRLDLNEQSYENR

SEQ ID NO: 230035 - protein, 32 aa, Glycine max
  Clone ID: PAT_MRT3847_49746C.1.pep
AVYHLTAHFVFFNIQILKILQYLTKAQPISIM

SEQ ID NO: 230036 - protein, 76 aa, Glycine max
  Clone ID: PAT_MRT3847_49747C.1.pep
MAKGKGEKKKKKKKKKKKKKKKKKKKKKKKKTKKGQRHKKKKNKKTHKKKKGPLFKRNQSYNPRLGTLKLFYWENQ

SEQ ID NO: 230037 - protein, 50 aa, Glycine max
  Clone ID: PAT_MRT3847_49748C.1.pep
LTSMVWCHSSAAWLDGAICYQCYVRRFVIALDLKDNRVVLVSRWQSIGIM

SEQ ID NO: 230038 - protein, 56 aa, Glycine max
  Clone ID: PAT_MRT3847_49749C.1.pep
IALSAADMETVTMAMITGVVLFTEVYDAADLDMEIMSVVGSHASSLDTDLELKSMY

SEQ ID NO: 230039 - protein, 86 aa, Glycine max
  Clone ID: PAT_MRT3847_4974C.1.pep
PRSNWLLINTRGRPSLKSLSHSLRVQIMLKVTGSLLGRYPQAFTPKSNAFPDPFSHMCMLYYTSSTPLGHWRRGTFSNKLFKGIWC

SEQ ID NO: 230040 - protein, 51 aa, Glycine max
  Clone ID: PAT_MRT3847_49750C.1.pep
KINISHIQGLPNPKKICFYIYIYIYIYIMLNLLLSSFKRFYCVSIHFVFKS

SEQ ID NO: 230041 - protein, 64 aa, Glycine max
  Clone ID: PAT_MRT3847_49751C.1.pep
CNNISRTKLMIKKSLNYQNENLLSSKTQIKKSYSTKLSKPSSTLLPLPSPYLESRSCRTEPGTA

SEQ ID NO: 230042 - protein, 102 aa, Glycine max
  unsure (1)..(102): unsure at all Xaa locations
  Clone ID: PAT_MRT3847_49752C.1.pep
TLVHDIVWAYLHSXLAPIRVHCTANRVREQGLISASELIHSGEYNPRCIRICPGXKVSHMLRCWLGXPSVKAARXHLARMHEHPWIAYYGGXMQCYFGSRLW

SEQ ID NO: 230043 - protein, 64 aa, Glycine max
  unsure (1)..(64): unsure at all Xaa locations
  Clone ID: PAT_MRT3847_49753C.1.pep
CKGCXXXVXMPISYSXQXXHSXCXXIISAXYXPQGXCLINALXXISQELRAXLCCSSSVSSSVX

SEQ ID NO: 230044 - protein, 46 aa, Glycine max
  Clone ID: PAT_MRT3847_49754C.1.pep
SLPLNCPQLPSHTPSNIFDLRPNDIKVVMALGDSITAGFGVMGTAG

SEQ ID NO: 230045 - protein, 52 aa, Glycine max
  unsure (1)..(52): unsure at all Xaa locations
  Clone ID: PAT_MRT3847_49755C.1.pep
ISTSHISTHAGGXTCAGLYTFYIISHLSLTWNSRHHKSNKWRLFTKPTRSLI

SEQ ID NO: 230046 - protein, 65 aa, Glycine max
  Clone ID: PAT_MRT3847_49756C.1.pep
LQTLDQELNTMMEFRSSNGSIGLFLRLQVLFIWEGGGVGLIVTDKCSSEIVYITNCYVTMDFSAN

SEQ ID NO: 230047 - protein, 99 aa, Glycine max
  Clone ID: PAT_MRT3847_49757C.1.pep
ARDFIMETLASQAMKTVTLGRSSHYDSSSTKVKITTRGFGANADKVVQPEIPCVEKNIPCRNSIDEKVVVVGDLPHAPKKMKPLRSILKVGANLNDKSN

SEQ ID NO: 230048 - protein, 124 aa, Glycine max
  Clone ID: PAT_MRT3847_49758C.1.pep
MGTTKNNNNNFNSTSKSDNSANDNKNNTRVVLNVYDLTPLNNYLYWFGFGIFHSGIEVHGKEYGFGAHDFPASGVFEVEPRKCPGFVYRCSVTLGQVNMHPSEFRTFIEGIANEYHGDTYHLIS

SEQ ID NO: 230049 - protein, 61 aa, Glycine max
  Clone ID: PAT_MRT3847_49759C.1.pep
VVWDLVHVPEYVRRLQEMKMEDIRMSERVTAFMVSSHVVSFRKPTHHVHGPPEVRLDWRFC

SEQ ID NO: 230050 - protein, 92 aa, Glycine max
  Clone ID: PAT_MRT3847_4975C.1.pep
KEIKGNQIKRDLGGSKAFFRHCLPAEKGVKGTEKDIEAPKSIVFPQSKNRKDAQKSRKSNKDLPRRKLKERSFEGFEQNKGALAKAGYRPSA

SEQ ID NO: 230051 - protein, 64 aa, Glycine max
  unsure (1)..(64): unsure at all Xaa locations
  Clone ID: PAT_MRT3847_49760C.1.pep
LLGTPTCCLTVGARGAMLLADYHLVEKLAAFDEXPMPDRVVHARGASAXGYCEDTHDMAHLTCA

SEQ ID NO: 230052 - protein, 71 aa, Glycine max
  unsure (1)..(71): unsure at all Xaa locations
  Clone ID: PAT_MRT3847_49761C.1.pep
MATIKGDKARQIFDSRGNPTVDVDGTLIDGSLTQRQQCASGALTGVXYEASELMDRRSYYARKGALNAEEN

SEQ ID NO: 230053 - protein, 923 aa, Glycine max
  Clone ID: PAT_MRT3847_49762C.1.pep
MKHPKPQTQSTPTPSPSSRSSSLSSHLAMVELKQKILTSLSKLSDRDTHQIAVEDLEKTISGLSPDAIPMILNCLYDAATDPKPAVKRDALRLLAAVCAAHSDAAAAHLTKIIAHVVRRLKDADSAVRDACRDTVGALAAQYLKGDGGGGGGGVGTVVGLFVKPLFEAMGEQNKGVQAGAAVCMAKMVECAGGSGGEAVPVAAFQKLCPRIYKLLNSPNFMAKAAILPVVASLSQVGAIAPQSLEHLLPSIHECLSSTDWATRKAAAEALSSLALHSSSLVTDRAAPTLAVLEACRFDKIKPVRDSINEALQLWKKIAGKGDGSPDDSKPSSDGGNESAISSEASDPKKVNLDERKTDSPVKGSSTSSSNMDSTKAKAASISEKAVVILKKKPPVLSDKELNPEFFQKLERRGSDDLPVEVVVPRRGLNSSNSNNEEESEANAKDSKERINSVGNIPNDDHGSSSNKYRIFERGNDGNSKQRNYDDFGHDRFSERRVNTKELRTKAYDTDGRTENDQRDGSANAAGFSKTDGQSEVPFSNNRANWLAIQRQLLQLERQQVHLMNMLQDFMGGSHDSMVTLENRVRGLERIVEDMSRDLSISSGRRNFAGFEGSSNRPSSKYNGFNDYSSSKYGRGGDGRIPFGERFAQSDGNALGMRGRGPSWRSDMSEGWDHPGYGASRNGQMSSRRAFGGSSADGRSPKSVHESDQAGNRRAWDKAAMPIRLGEGPSARSVWQASKDEATLEAIRVAGEDNGTSRATRVAIPEMTAEAMADDNVGQEKDAIWTSWTNAMDALQVGDIDSAFAEVLSTGDDILLVKIMDRTGPVIDQLSSEVACEIVNAIGQFLLDQNMYDICLSWIQQLLEIVLENGPDTFGIPMEVKKELLLNLHEASTDPAEAWEGVQPDQLLLQLASAWEIDLQQHDK

SEQ ID NO: 230054 - protein, 66 aa, Glycine max
  Clone ID: PAT_MRT3847_49763C.1.pep
IQQLLEIVLENGPDTFDIPMEVKKELLLNLHEAYSDPAETWEGVQPDQLLLQLASAWEIDLQQHDK

SEQ ID NO: 230055 - protein, 218 aa, Glycine max
  Clone ID: PAT_MRT3847_49764C.1.pep
MPQETLPNSNFISPLRRGLNLKGSAASACNNNETLHSVTEETINDHELAQRKAEEAASRRYVAAEWLRQMDNGASSSLSKEPSEEEFCLALRNGLILCNVLNRVNPGAVVKVVDNAVVDNVAVQSSEGPAQSAIQYFENMRNFLEAVNDMKLLTFEASDLEKGGSSSKVVDCILCLKGYYEWKLSGGIGVWRFGGTVIRITSFPKWSSSNILGLKGGC

SEQ ID NO: 230056 - protein, 71 aa, Glycine max
  Clone ID: PAT_MRT3847_49765C.1.pep
KWQNRGSDDDENGNGCPCPVKLCDCLEELVRFTLNSNSHHLNLSSQFFSNLLKDDATHPSSSHSLSQPNGL

SEQ ID NO: 230057 - protein, 31 aa, Glycine max
  Clone ID: PAT_MRT3847_49766C.1.pep
HFVDLMLIHVLLNALCIAMAHIYKISLNILS

SEQ ID NO: 230058 - protein, 57 aa, Glycine max
  Clone ID: PAT_MRT3847_49767C.1.pep
WYSTLPSSKWMEPLVRLAIPFWRRDANRLVNFLPGVDSPFCRLLAAVSSRSSRFGRF

SEQ ID NO: 230059 - protein, 59 aa, Glycine max
  Clone ID: PAT_MRT3847_49768C.1.pep
KLTVLALQLLVDNMVWKKVVYVDRLLQLFRYIPREQLTIPDFVFQHDLEVNGGKGLIVD

SEQ ID NO: 230060 - protein, 66 aa, Glycine max
  Clone ID: PAT_MRT3847_49769C.1.pep
YEKSSPCFFQKGPFSVVSCLHLSGLSIPLCARKDSPSSFRIIYGGKYKGNIMSCEITLLFESIFFV

SEQ ID NO: 230061 - protein, 82 aa, Glycine max
  unsure (1)..(82): unsure at all Xaa locations
  Clone ID: PAT_MRT3847_4976C.1.pep
ASSIISSPTITTINHDHTHIVTPFTNLXSITSFPTRKTNNNITCITSNDEKMQYMRIXPPINKKKLKLFATSRLNDAQLAKE

SEQ ID NO: 230062 - protein, 71 aa, Glycine max
  Clone ID: PAT_MRT3847_49770C.1.pep
LKHTRSFERSLATKMQTCRMAADHALGGHAECSRIYACLFHCLDPSLLVCCRASVHLSLYLSIFHPSVHHV

SEQ ID NO: 230063 - protein, 100 aa, Glycine max
  Clone ID: PAT_MRT3847_49771C.1.pep
VRSEQSLVRWATPQLHNIDALAKMVDPTLNGMYPAKSLSRFADIIALCVQPEPEFRPPMSEVVQALVRLVQRASVVKRRPSEESGFGHKTPDHEAMDMPF

SEQ ID NO: 230064 - protein, 90 aa, Glycine max
  unsure (1)..(90): unsure at all Xaa locations
  Clone ID: PAT_MRT3847_49772C.1.pep
DLSCSPFPPSSSRALAVPSPRPLPGQPAPVPSGGVGVRPNDTAPLYHTISDFDFQSFNLALYQEWIELDLFNLXVQRFSVDEFAEAASTK

SEQ ID NO: 230065 - protein, 693 aa, Glycine max
  unsure (1)..(693): unsure at all Xaa locations
  Clone ID: PAT_MRT3847_49773C.1.pep
MARPSFPLALCFSFIFVALPLSLATTDPSDVQALEVMYNVLNSPTQLTGWKIGGGDPCGESWKGVTCEGSAVVSIKLSGLGLDGTLGYLLSDLMSLRDLDLSDNKIHDTIPYQLPPNLTSLNFARNNLSGNLPYSISAMGSLNYLNLSNNALSMTVGDIFASLQDLGTLARAFFXFLQKNQLTGSLSALVGLPLDTLNVANNNFSGWIPHELSSIHNFIYDGNSFENRPAPLPPTVTSPPPSGSHRRHHSGSGSHNKTQASDNEKSNGHKGLTVGAVIGIVLGSVLVAAIVFLALVFCIRKQKGKKKGARNFSGSLPRGVINVTPQMQEQRVKSAAVVTDLKPRPAENVTVERVAVKSGSVKQMKSPITSTSYTVASLQSATNSFSQEFIIGEGSLGRVYKADFPNGKVMAIKKIDNSALSLQEEDNFLEAVSNMSRLRHPSIVTLAGYCAEHGQRLLVYEYIANGNLHDMLHFAEDSSKALSWNARVRIALGTARALEYLHEVCLPSIVHRNFKSANILLDEELNPHLSDCGLAALTPNTERQVSTQMVGSFGYSAPEFALSGVYTVKSDVYSFGVVMLELLTGRKPLDSLRVRSEQSLVRWATPQLHDIDALAKMVDPTLNGMYPAKSLSRFADIIALCVQPEPEFRPPMSEVVQALVRLVQRASVVKRRPSEESGFGHKTPDHDAMDMSF

SEQ ID NO: 230066 - protein, 64 aa, Glycine max
  unsure (1)..(64): unsure at all Xaa locations
  Clone ID: PAT_MRT3847_49774C.1.pep
SMFLCCCCCLGPRWNLPTINYLIFIKSIDRRVCPKISAMNNKLSLALMTAQLWRNSWTXRINDM

SEQ ID NO: 230067 - protein, 71 aa, Glycine max
  Clone ID: PAT_MRT3847_49775C.1.pep
KVCGAALSCLMLVAVLGSQAQFTNDAETELMMSKLPLENPVVLNSFHFAADCCTSYISQSILCSLMKSYFE

SEQ ID NO: 230068 - protein, 40 aa, Glycine max
  Clone ID: PAT_MRT3847_49776C.1.pep
YACFQNQVGMLSDRQPLTRCQWMPKTRDSVLKVQAEMIGW

SEQ ID NO: 230069 - protein, 87 aa, Glycine max
  Clone ID: PAT_MRT3847_49777C.1.pep
ARQGRDVCGRTALTKKVQELWVTMPHEKKLAKAHKDYKKEMAGTQQNEQIAQVNERTTAGIAPEEANNLPATSAVAVTATTPAKAEL

SEQ ID NO: 230070 - protein, 67 aa, Glycine max
  Clone ID: PAT_MRT3847_49778C.1.pep
SLRLMRESGRDRKEEHSSDQLRHTRGRNFVGLGVRVSHVATLLSLKACPECNLNGSVVNASRSASRG

SEQ ID NO: 230071 - protein, 56 aa, Glycine max
  Clone ID: PAT_MRT3847_49779C.1.pep
IIYTNFIIFQTLILLFYYLKYYIILKYIKLIQHDSTRIESLKLKPVSSSIYSSIQI

SEQ ID NO: 230072 - protein, 112 aa, Glycine max
  Clone ID: PAT_MRT3847_4977C.1.pep
QPVNILLHRQFSVCVRCFSTISSIIFCPSRASPHICLFMSSSVELFPTQQPRPDAGVSCSARTSKYAATACIYPPMDIILLFSVIVICCIHQVARRQVECATVIKVLELKCP

SEQ ID NO: 230073 - protein, 114 aa, Glycine max
  Clone ID: PAT_MRT3847_49780C.1.pep
MSAPQFDPKNMIYRNMGPTGLRVPVFSYGGWLTVGGTQKGDIVKELMKTCFDNGINMFDNAEAYNAGESEREMGRVIEELGWDRRDIIVTTKIFFGTARKDTGNTRGLSRKHIV

SEQ ID NO: 230074 - protein, 69 aa, Glycine max
  Clone ID: PAT_MRT3847_49781C.1.pep
KGQTPGPFPTLLKGAKYFEIFLMDPPRQKKRGVSTNLGYFSKNTEPPCKFKFKVHRKKPPLRLSNLFLG

SEQ ID NO: 230075 - protein, 84 aa, Glycine max
  Clone ID: PAT_MRT3847_49782C.1.pep
MQKSCGENERKPQNMPKAEEDRPLEAVPQEAEGNPQPSEEGVSQEAEGNLRGGLTQPGQGYKEDSPVRHLDPEEMIRGADELER

SEQ ID NO: 230076 - protein, 63 aa, Glycine max
  Clone ID: PAT_MRT3847_49783C.1.pep
SSMLTSHILALHAVFEAFLHRQFEPGPYVLKATQAPFPLVASNLYATHKARYSSQCIAFDSCL

SEQ ID NO: 230077 - protein, 87 aa, Glycine max
  unsure (1)..(87): unsure at all Xaa locations
  Clone ID: PAT_MRT3847_49784C.1.pep
TATAAATSSFMGTRXPEAHSXAGRXHXRFGFGKKXAPAPXXXXXGSGRXTXRPXWYPGXKSPXXXYGXXVGXYGXDPFLAXXXXXYF

SEQ ID NO: 230078 - protein, 67 aa, Glycine max
  unsure (1)..(67): unsure at all Xaa locations
  Clone ID: PAT_MRT3847_49785C.1.pep
FSSILGLYIVKTNFHFRASLLSCGLEIKMDHRSDXDIKLDAVWDNRLPFHEMVVYHSGEKYGILHSA

SEQ ID NO: 230079 - protein, 102 aa, Glycine max
  Clone ID: PAT_MRT3847_49786C.1.pep
MKEKKNTASTLKRILVNCSSQAKAYGSCVAAKVPDIERDMCVKEFAALKSSSKPNIGLSGSDGLSHAYIQYPPLRFNVPGSSGLFYDDGNKFLLSPTADQVM

SEQ ID NO: 230080 - protein, 47 aa, Glycine max
  Clone ID: PAT_MRT3847_49787C.1.pep
KTRPDRRVQWILVIFYKGVARPLFGIYPGKFVPAKPPPNKVYIYKGG

SEQ ID NO: 230081 - protein, 85 aa, Glycine max
  Clone ID: PAT_MRT3847_49788C.1.pep
PRAARAARAAFGQSKRDSAAVLRLPSWADGFLGSAMIINVLTTLPAQRSTGLGSGASVSKVSPETASKTASVAGKLRLQVAVLQH

SEQ ID NO: 230082 - protein, 66 aa, Glycine max
  Clone ID: PAT_MRT3847_49789C.1.pep
PTKIILEVRSSNNKCYMPKMVKKKHIFPLKKQCGKLGEWILSGEVFEFCHVKISTIKTSSLYSFII

SEQ ID NO: 230083 - protein, 65 aa, Glycine max
  Clone ID: PAT_MRT3847_4978C.1.pep
THTGPTFELRRAIHGGGYKDVRWRTIKALLHVTWPSIPMRGSTEPCYIACQSKNVYLSHKGILFL

SEQ ID NO: 230084 - protein, 409 aa, Glycine max
  unsure (1)..(409): unsure at all Xaa locations
  Clone ID: PAT_MRT3847_49790C.1.pep
STFIVAARQRHGERREGRVXVWWLSSSLLMGMATLSSSLPLFHRYPNPNPNPSLFRPSLSLSFSFSRTKPRRAPFLVLASSSHDFTSNSKKSVLTELIQEIEPLDVSHIQKDVPPTTTDAMKRTISGMLGLLPSDQFHVVIEALWEPLSKLLISSMMTGYTLHNVEYRLCLEKNLDMFEGDIEKPKAESTKVDLQGLMHDSVNVIDFGRDKSLSSKVEKLHEDADIQELGDISAEALQYIFNLQSRLSSMKKELHEVKRKSAALPRVRFVGEEKNDLLDYLRSLQPEQVAQLSEFTSPELKDTILFVVHGLLATLSPKMHSKPSTISENTTVGATNVGNEDCAEVVENSAHQFQPVVSLTRDYLARLLFWCMLXWDTILEALSVDWXLTDLLSLTSDPENDASGSQPIT

SEQ ID NO: 230085 - protein, 53 aa, Glycine max
  unsure (1)..(53): unsure at all Xaa locations
  Clone ID: PAT_MRT3847_49791C.1.pep
PAVRTAARGRQXGKMVFLMCYNLTDLPMAIKADILFKSISFFEEIFHLSDQTN

SEQ ID NO: 230086 - protein, 88 aa, Glycine max
  Clone ID: PAT_MRT3847_49792C.1.pep
TAAFFFFFFFFFLPARGDIVRISPGQYRTSPASCLVSISRPTNVCYFHKGHTKKGPTGSLHMATLSILARLQTGYLTVHDQLAGLNSS

SEQ ID NO: 230087 - protein, 63 aa, Glycine max
  Clone ID: PAT_MRT3847_49793C.1.pep
EIWEVLKAVPPPSPSSSMDFNFDINCSSPYITAPSNPQRFINFYYITPTIPTLIHFSSFTPNT

SEQ ID NO: 230088 - protein, 45 aa, Glycine max
  Clone ID: PAT_MRT3847_49794C.1.pep
GARSKILVRSCRADVMKLTLFLERVVFCNQLLRSWFKFYFVELKM

SEQ ID NO: 230089 - protein, 64 aa, Glycine max
  Clone ID: PAT_MRT3847_49795C.1.pep
SDLSQHQESCVFSSILCTCRPTAGKVVVQIVHRSSHPQKVSHEPVGHEGLSLEYRQQARDRPRV

SEQ ID NO: 230090 - protein, 118 aa, Glycine max
  Clone ID: PAT_MRT3847_49796C.1.pep
MPEEEVVELKFRLYDGSDIGPFRYSPASTIAMLKDRIFADWPKDKKIIPKAANDIKLISAGKILENHKTVGQCRVPFGELPKGVITMHVVVQPSLLKAKTEKKVDEVPRKHICACSIL

SEQ ID NO: 230091 - protein, 48 aa, Glycine max
  Clone ID: PAT_MRT3847_49797C.1.pep
HHGHGEKYTIMLCFNLFKVQAVTVTGFKLMEPSVSVAFSQPYRADSAR

SEQ ID NO: 230092 - protein, 135 aa, Glycine max
  Clone ID: PAT_MRT3847_49798C.1.pep
TFEHFDFFLDLTQAIQISFDLSHRKPGNKVFGVLFFFEGGGGCSSSLLYNRGCTPKKKRFKPFLPNTLNWRGHGVAPPFFYLHHRKLRREPVNLHPNPKPPINSFQLHPKFFFSTNRHPRRRPRILRRLQNPFRG

SEQ ID NO: 230093 - protein, 130 aa, Glycine max
  unsure (1)..(130): unsure at all Xaa locations
  Clone ID: PAT_MRT3847_49799C.1.pep
TVLIFLIXIYSQVFVWALPVXSKNARGKQGSYPINLFFPSNWHYFLGWPWVQNFXLFSQWFPRNKTGNFFXELFGKWREFYIWGGAPFLLGGFFFIFFPPPPFFCLGAKPFPGRVIFGVVFLFRAGVFLK

SEQ ID NO: 230094 - protein, 45 aa, Glycine max
  unsure (1)..(45): unsure at all Xaa locations
  Clone ID: PAT_MRT3847_4979C.1.pep
ENMKSLVSSVAAVSXEAIACHGTCYHTFPLRMITRVGERSSEVKC

SEQ ID NO: 230095 - protein, 184 aa, Glycine max
  Clone ID: PAT_MRT3847_497C.1.pep
KSLNDNKFVYHFIQQDSSSSLSGVFDASSSASLKNDLDFTLRSGDHVVSFSKRLRIPGSSSTAHDLSQQVWRIDKDEYVTSFAIMRFNLVQLFLQNDQSAHLRRMIVDLEAPRFDSGSLVSQDPAISYVWSEKSLNDDQRGAILKILTAKDYALILGMPGTGKTSTLVHAVKAFVIRGTSILLT

SEQ ID NO: 230096 - protein, 77 aa, Glycine max
  Clone ID: PAT_MRT3847_49800C.1.pep
WVNADAVLKVTNVNGVFDCHPHNDNVTLDHISFREIVSRNVTSMDMMALAYCEENGIPVVVFNMLEPANVSRALCGS

SEQ ID NO: 230097 - protein, 48 aa, Glycine max
  unsure (1)..(48): unsure at all Xaa locations
  Clone ID: PAT_MRT3847_49801C.1.pep
NKIQAHLILIWNLKSVELTYFSNHRMGVCLKLYGIILKSREPFFQXKK

SEQ ID NO: 230098 - protein, 185 aa, Glycine max
  unsure (1)..(185): unsure at all Xaa locations
  Clone ID: PAT_MRT3847_49802C.1.pep
YDSFKXXDGVAYLIYSSEDNSELHIGPLTEXYLNVTSVMRRILVGQHREAPALFKHQGTYYMITSACTGWAPNEALAHAAESILGPWETVGNPCIGGNKMFRLTTFFAQSTFVVPLPGFPGSFIFMADRWNPANLRDSRYVWLPLIVAGPVDQPLEYSFEFPLWSRVSIYWHRKWRLPQGWNGFK

SEQ ID NO: 230099 - protein, 586 aa, Glycine max
  Clone ID: PAT_MRT3847_49803C.1.pep
GPEFPARPRVRNEGNENPLEEFGTLEEHVPFHEEQHAMVHHQQGQAEEEDHQVPFCEEIQGDEEGGDGVGVDDEMSNVFLEWLKSNKDSVSANDLRNVKLKKATLESAARRLGGGKEAMKQLLKLILEWVQTSHLQNKRRKENNGSSISSVLQAQFQDPSGQNNNQNTQSGSFAPESNTCFNNQTPWLSSQTFATDQAPLMVPPQQFPQPMVGYVGDPYTSGAASNNISATHNHNNSNPYQPGAEQYHMLESAHSWPHSLFNVASNYSQSFGDNNGLNPHGGFGGGGYGNNQYPYQFFHGPGDRLMRLGPSATKEARKKRMARQRRFLSHHRHHSGNHQNQGSDPHARLGGDNCNTALAAPHHANPSANWMYWQAMIGGAAGPLAPVIPAEPPVVQPVVDRSAMQTQNCHQNRVASDRRQGWKPEKNLRFLLQKVLKQSDVGSLGRIVLPKKEAETHLPELEARDGISITMEDIGTSRVWNMRYRYWPNNKSRMYLLENTGDFVRANGLQEGDFIVIYSDVKCGKYMIRGVKVRQQGVKPETKKVGKSQKNQHGTGTNASTTACTAANNGTPSSPKTKAEKSSKLI

SEQ ID NO: 230100 - protein, 62 aa, Glycine max
  Clone ID: PAT_MRT3847_49804C.1.pep
LFYTFHSSVITHFRCLATSGLYCHAACRNCSGKISWKAAKYLHTGALMNVHRDQMWWFYPIH

SEQ ID NO: 230101 - protein, 758 aa, Glycine max
  Clone ID: PAT_MRT3847_49805C.1.pep
MECEVELQGGDLHAGVVTEPNPIGFGTMENEHTLAVAEREMWLNSDQDEFLGVNDASMFYADFPPLPDFPCMSSSSSSSSALPFPVKTMTCSTRTTTTTTTSSSSSSSSWAVLKSDAEEDAEKNHCNRYMHDQLDATLSSTASMEVSQQKNLDPGLGGPVGECMDDVMDTFGYMELLEANDFFDPASIFQNEDNENPLVDFGTLEQHVPLHDEQHEMLHHQQGRTEEVDHQVPVCEEIQGDEEGGDGVGVDDEMSNVFLEWLKSNKDSVSANDLRNVKLKKATIESAARRLGGGKEAMKQLLKLILEWVQTSHLQNKRRKENNGSSISSALQAQFPDPSVQNNQNTQSGSFSPESNACFNNQTPWLSPQTFATDQAPLMVPPQQFQQPMVGYVGDPYTSGAASNNITTSHNHNSNNPYQPGAEQYHMLESAHSWPHSQFNVACHYSQSFGDNNVIFPQGGFGGGYGNNQYPYQFFHGPGDTLMRLGPSATKEARKKRMARQRRFLSHHRHHNGNHQNSGSDPHARLGGGDNCTTGLAAPHHANPTANWMYWQAMTGGAAGPLAPPAEPPAVDRSALQTQNCHQSRVASDRRQGWKPEKNLRFLLQKVLKQSDVGSLGRIVLPKKEAETHLPELEARDGISITMEDIGTSRVWNMRYRYWPNNKSRMYLLENTGDFVRANGLQEGDFIVIYSDVKCGKYMIRGVKVRQQGVKPETKKVGKSQKNQHGTGTNASTTACTAANNGTPSSPKTKAEICSKLI

SEQ ID NO: 230102 - protein, 64 aa, Glycine max
  unsure (1)..(64): unsure at all Xaa locations
  Clone ID: PAT_MRT3847_49806C.1.pep
NXIVXGCTSTQASIDEPPXXXRXVXPAXVLGIXNXXRXXXSXXXXGXXXXXXSXIPSLRTXACD

SEQ ID NO: 230103 - protein, 214 aa, Glycine max
  Clone ID: PAT_MRT3847_49807C.1.pep
ELVDVKLGQEYELVVTTHAGLYRYRVGDILKVSGFKNKAPQFSFVCRKNVALSIDSDKTDEVELQNAMKNAVTHLEPFDAHVSEYTSYADTTTIPGHYVLYWELNLKGSTPIPPCVYEDCCLTIEESLNSVYRQGRVSDKSIGPLEIKIVEQGTFDKLMDYAISLGASINQYKAPRCVKFAPIVELLNSRVTSNYFSPKCPKWVPGHKQWIHQN

SEQ ID NO: 230104 - protein, 118 aa, Glycine max
  unsure (1)..(118): unsure at all Xaa locations
  Clone ID: PAT_MRT3847_49808C.1.pep
MIDIGNDYFLVYFPHPEDKEKAQSEGPWFVYDHYLVVRDXNPNFHSDLEAIEKVAVWVRFSGLPIEYYDYKVFVTNGDHIGRTVRVDRNMLSQLSVTSHSKYISIHSFKHSDPLYHPN

SEQ ID NO: 230105 - protein, 132 aa, Glycine max
  unsure (1)..(132): unsure at all Xaa locations
  Clone ID: PAT_MRT3847_49809C.1.pep
MASSVMACPSNLPXFTVXKXLSXEAFPSLSRXSSSFRVVASGGKKIKTDKPYGINGGLAXMERVDASLPKRKGKGVFPLVYKYRAYVDGYTPIYDPQDWAPTGDVYSGGTTWLAIWAVTLPCLLAVGHFFAY

SEQ ID NO: 230106 - protein, 56 aa, Glycine max
  Clone ID: PAT_MRT3847_4980C.1.pep
NSIYISISTLSCYGLIVKKPLPCLCVLWAHSMLDYLHGLMYDVSELYIFCNSPTRV

SEQ ID NO: 230107 - protein, 48 aa, Glycine max
  Clone ID: PAT_MRT3847_49810C.1.pep
TSTYSVRIMDLAVVGLLGTASHPTQISGPAIGNWSVAARHIPREVEVA

SEQ ID NO: 230108 - protein, 85 aa, Glycine max
  Clone ID: PAT_MRT3847_49811C.1.pep
SNLAVIGVLTAKLSQSLRVISVFSVEPFFSRCFLDIDHLLPAPSVFQIRPLFAAIRLCEIYRVILRISIDLSTPDFLFQLALWVS

SEQ ID NO: 230109 - protein, 58 aa, Glycine max
  unsure (1)..(58): unsure at all Xaa locations
  Clone ID: PAT_MRT3847_49812C.1.pep
MYSGTHKTLTEPLRPLTDTTTVSLANVNSDYKESDIAIVRASYHRXRPANEKHIRSIF

SEQ ID NO: 230110 - protein, 159 aa, Glycine max
  unsure (1)..(159): unsure at all Xaa locations
  Clone ID: PAT_MRT3847_49813C.1.pep
DGVWVDRIPAWIKYATVDPTRFAAPYDGVYWDPPLSERYQFKYPRPPKPKALRIYEAHVGMSSFEPRINSYREFADEILPRIRANNYNTVQLMAVMEHSYYASFGYHVTNFFAVSSRSGTPEDLKYLIDKAHXLGLQVLMDVIHSHASNNVTDGLNGFD

SEQ ID NO: 230111 - protein, 110 aa, Glycine max
  Clone ID: PAT_MRT3847_49814C.1.pep
APPGGLPSGFSPEVFPPSSIPDPAGSQMVAPSPGHPLVFLGPQGPREIVPQLGKGFLGLGVSALGKNLGAPKRGPPPFSPPQRPWKTPLRGGNLKKVPFFYKPLVFYFKD

SEQ ID NO: 230112 - protein, 77 aa, Glycine max
  Clone ID: PAT_MRT3847_49815C.1.pep
NTGPGIFFWHGLKKKISFLPPDQKLGILKRPPPTTFFFFFFFKPFFFFFFFLFFFFLTFLFLSLDLNFFFSVCVFVC

SEQ ID NO: 230113 - protein, 58 aa, Glycine max
  Clone ID: PAT_MRT3847_49816C.1.pep
FPLRWRVHRSKSPTFVDLVRWLEVQRLSFSHQVKWIILRSNALNDHLPSKKNHLIRPF

SEQ ID NO: 230114 - protein, 55 aa, Glycine max
  Clone ID: PAT_MRT3847_49817C.1.pep
GCGAGDRPFPRSSRGRVRTYWFKAVGPSGTRSPNELMIEIFASVFNRPRPCVGPR

SEQ ID NO: 230115 - protein, 102 aa, Glycine max
  Clone ID: PAT_MRT3847_49818C.1.pep
HTNSYNNRLGLQFTFSNLVLQEETIHLIKQNDEPILIFYRPSCHGPQRGGGKRCIRWFDQTPQMNRVLVLPKLVLGATFQETQTERTRSSSPQVTELSNWPP

SEQ ID NO: 230116 - protein, 122 aa, Glycine max
  Clone ID: PAT_MRT3847_49819C.1.pep
MAGSNQSVVPLNTWVLISNFKLSYKLLRRDDGTFNRELAEFLDRKVPANAIPVEGVFSIDYVDRNAGLFYRVYLPASGNEAQWGIKDLEKPVSTTEIDPVIIFFHGGSFSYSSVNSAIYDTF

SEQ ID NO: 230117 - protein, 75 aa, Glycine max
  Clone ID: PAT_MRT3847_4981C.1.pep
KKIILTLWKNIAYIVFTSTLQVIYKTVSLILRSVLSNLHPFKTCLMLSINGLLNAMTPSLVQQQESKRSSFASIN

SEQ ID NO: 230118 - protein, 43 aa, Glycine max
  Clone ID: PAT_MRT3847_49820C.1.pep
VFPAKLSFKPTKLFCPYSPPPPPPPPPPPPPPPPPPPPPPPPP

SEQ ID NO: 230119 - protein, 363 aa, Glycine max
  Clone ID: PAT_MRT3847_49821C.1.pep
MWVPPLSIFCTLERQPDMAGSNQVNLNESRSVVPLNTWVLISNFKLSYKLLRRDDGTFNRELAEFLDRKVPANAIPVEGVFSIDHVDRNAGLFYRVYLPTSGNEAQWGIRDLEKPLSTTEIVPVIVFFHGGSFSHSSANSHIYDTFCRRLVRICKAAVVSVNYRRSPEHRYPCAYDDGWAALRWVKSRAWLQSGREAKVHVYLAGDSSGGNIVHHVAVRAAEEEIEVLGNILLHPLFGGEKRTESELRLDGKYFVRLKDRDWYWRAFLPEGENRDHPACNPFGPRGRSIEGLKFPKSLVCVAGLDLLQDWQLAYAKGLEDCGQQVKLLFLKEATIGFYFLPNNDHFYCLMKEINNFVNSDSDC

SEQ ID NO: 230120 - protein, 113 aa, Glycine max
  unsure (1)..(113): unsure at all Xaa locations
  Clone ID: PAT_MRT3847_49822C.1.pep
MASTNALSSVXMLRSLNRQSLTRRANHIGRVNYRXPNNRLIVKACDKEIALDQHSRSDMHAXGIDKLDDAAGLTLVPIWRKVVLDEYGSSKAVYDDVTISHAIEHADPMENAG

SEQ ID NO: 230121 - protein, 79 aa, Glycine max
  Clone ID: PAT_MRT3847_49823C.1.pep
ITTNPTFTTITYFITPSLTFTSSQIILYFIPTTSNSSSTFIIKSLIFLIFYTSTLPKNLIKLFLLTIFTFFPFPLIKPL

SEQ ID NO: 230122 - protein, 34 aa, Glycine max
  Clone ID: PAT_MRT3847_49824C.1.pep
SSFGFLVPSESLKLTGIFNLKFDKGRPDSGRYRR

SEQ ID NO: 230123 - protein, 48 aa, Glycine max
  Clone ID: PAT_MRT3847_49825C.1.pep
APVFVFSYYRVWTVASCHRRSYVLARSNMRLTAKDRLLKGLLMVTPVS

SEQ ID NO: 230124 - protein, 74 aa, Glycine max
  Clone ID: PAT_MRT3847_49826C.1.pep
RHICCSLVPAYSNLFEFGGVQRVGLLMVFSTLVEDSVSVDKRIVVVGNVDVSKGLGFREDLSQGSVRFGFHRSV

SEQ ID NO: 230125 - protein, 87 aa, Glycine max
  unsure (1)..(87): unsure at all Xaa locations
  Clone ID: PAT_MRT3847_49827C.1.pep
LPLGLGFRGGKQIFVKTFSGXAISPQVGRFCPLCHVKAQIXGKGGIPPGQQRVIFFGQQLXDGRALPGFNIPKGLTLPLVPRFRGGV

SEQ ID NO: 230126 - protein, 197 aa, Glycine max
  unsure (1)..(197): unsure at all Xaa locations
  Clone ID: PAT_MRT3847_49828C.1.pep
KAHLTASGSNAAGRASPDVDGRTTFVSNVHFAGTKDCLTQSCSXRAQIPQIDWVXEHASGNGKLTDHVEFLSEETGSVAAPLDNTVFMXRILNVIKKSATPQESAPAMALLRFGNGTPFPSARFSRHPFPRGIPGVFRARPPIKLGASPRVRKRDAQGSGSDSSSSVNTGNVAAPVGRGFTYIRTESKPEGSLGTTT

SEQ ID NO: 230127 - protein, 124 aa, Glycine max
  unsure (1)..(124): unsure at all Xaa locations
  Clone ID: PAT_MRT3847_49829C.1.pep
MFHNNNNNSVSISVSDDEPDELGRMRIRARRKRKKLGNRRLVRKLLLKYWMLLIIVPALALLVFEATRIARSPSSNTETRNNKADRSRKEPPANLNRLDPTTHVVAGVRERCLKLLPPEKXEQL

SEQ ID NO: 230128 - protein, 69 aa, Glycine max
  Clone ID: PAT_MRT3847_4982C.1.pep
GVLFCSLRGLLSGGGIFPLFPGGQRSFCPTSILFLHGGGLYPPASSFREPWGEPFWVSESSGGGKGSIC

SEQ ID NO: 230129 - protein, 282 aa, Glycine max
  Clone ID: PAT_MRT3847_49830C.1.pep
MSMSKSSKMLQYINYRMRVTIQDGRQLVGKFMAFDRHMNLVLGDCEEFRKLPPAKGKKPAEGGDREDRRTLGLVLLRGEEVISMTVEGPPPPEESRSKAVGAAALAGPGIGRAAGRGIPPAPVVQAQPGLAGPVRGMGGPAPGMMQPQISRPPQLNAPPVSYPGGGPPVMRPPGQMPGQFAPPPMARGPPPPMPPGQFAPPRPGGPPPQFQVPPPQFGQRPMGPPPPGQMVRGPPAPPRPGMPAPPPPRPGMPPPPGSGVPVFGPPRPGMPPPPNPPNQQQQ

SEQ ID NO: 230130 - protein, 476 aa, Glycine max
  unsure (1)..(476): unsure at all Xaa locations
  Clone ID: PAT_MRT3847_49831C.1.pep
MFHSSSSNNNNNNNNGLSISVSDDEPDELGRMRIRARRKRKKLGNRRLLRKLLLRYWMLLIIVPTVGLLIFEATRIARSPSLNIEIPINKADRSSPTFRKEPPANLNRLDPTTHVVAGVRERCLKLLPPEKLEQLDIPVEEESSSVPVGEVLYMSESDRSFVGGSVTLSQLRTEDTRFNLFTGXEQTFKQRDQSFEKKETMAIHCGFYSVNGGFKISDEDKSYMQGCKVVVSTCAFGGGDDLYQPIGVSEASLKKVCYVAFWDEITLKAQELVERRIGENGFIGKWRVVVVRDLPFADQRLNGKIPKMLSHRLFPQAKYSIWVDSKSQFRRDPLGVLEALLWRSNSLLAISEHGARSSVYDEAKAVVKKNKAKPEEVEVQLNQYRKDGLPEDKRFNGKKALCEASVIVRKHTPVTNLLMCVWFNEVARFTSRDQLSFPYVLWRLKAFKNINMFPVCTRKDLVNSMGHVRKAKPLQS

SEQ ID NO: 230131 - protein, 210 aa, Glycine max
  Clone ID: PAT_MRT3847_49832C.1.pep
MAVKHGRSCCCCLFGILWKILVALIVLVGLVFLIFWLVVQPRSFKFQVTEADLTQFDYYTNNHTLHYNMVLNFTARNPNKKLSIYYDKVEALAFYEDARFANYDVITHMNSFRQYKKSTSPMSAVFSGKKVLMLNSEQVSKLNQDKSDGVYDIYVKLNFRIRFRLGDSISGNFKPKVKCHLKVPFSKSGTFTLFETTKCSVHFGGLDISY

SEQ ID NO: 230132 - protein, 40 aa, Glycine max
  Clone ID: PAT_MRT3847_49833C.1.pep
ACGTFCMRCRCVPPGPYGNKKMCGKCSPHMVPHGTKLKGP

SEQ ID NO: 230133 - protein, 76 aa, Glycine max
  unsure (1)..(76): unsure at all Xaa locations
  Clone ID: PAT_MRT3847_49834C.1.pep
KNRIKDMEKLIGSISSYSCSYARRSERRMKETLDDTHKIFFKCYFTSQLLQDAYTEPQLIYRDLYXDRKXGRPLWQ

SEQ ID NO: 230134 - protein, 104 aa, Glycine max
  Clone ID: PAT_MRT3847_49835C.1.pep
AWDQWRDQTPLNILDQNIKEFCNHREVIKCIQIGLLCVQEKPEDRPSMTQVVSYLNNSLVELPFPRKPINSKQNEIVLKMIVGESSSGSALSNNGMSVSIFIPR

SEQ ID NO: 230135 - protein, 467 aa, Glycine max
  unsure (1)..(467): unsure at all Xaa locations
  Clone ID: PAT_MRT3847_49836C.1.pep
ERIRGRVSMKXRLRYIAAXYKGLLIPFIIXLLQTLLALLLVASYWWLAWANPQTEVGLANAQKLFFNMLRSIFHSPMSFFDSTPAGRILNRVSFLVFSLLLCFFFNLSLHVWCTFDIMGAGVSHQVSIDQSVVXLDIPFRLGGFASSTIQLIGIVAVMTXVTWQXVLLLVAPLCSMCLGTQIYYMASSRELVRIVSIQKSPIIHLFGESIAGAATIRGFGQEKRFMKRNLYLLDCFARPFFCSLAAIEWLCLRMELLSTFVFAFCLVLLVSLPHGSIDPSMAGLAVTYGLNLNARLSRWILSFCKLENKIISIERIYQYSQIPSEAPAIVEDSRPPSSWPENGTIQLIDLKVRYKENLPVVLHGVSCTFPGGKKIGIVGRTGSGKSTLIQALFRLVEPEAGSILIDNINISSIGLHDLRSHLSIIPQDPTLFEGTIRGNLDPLDEHSDKEIWEALDKSQLGDFVLLG

SEQ ID NO: 230136 - protein, 132 aa, Glycine max
  Clone ID: PAT_MRT3847_49837C.1.pep
MAHQNLGTKLTALVVDDNKINRKIHQKLLESVGMKNQGVENGQEAVDIHCHGQRLDLILMDMDMPIMNGIEATKELRSMGIGSMIVGVSSRCTEAEIRKFMEAGLNDYHEKPLNNSKLSSLLDKINPSFTRN

SEQ ID NO: 230137 - protein, 90 aa, Glycine max
  Clone ID: PAT_MRT3847_49838C.1.pep
NSHLIFSCISIFSMLSFDLLFHITTNWHHSFFLVYENRNIHQEGRQKQMFLLPYPCLMTKIIIFKIKSVVNLIKTVRITCIGGVIGVVRR

SEQ ID NO: 230138 - protein, 40 aa, Glycine max
  Clone ID: PAT_MRT3847_49839C.1.pep
MCFIPRSDWFFDNQKPLVIPKARVGELIGAKSVTHAFFFC

SEQ ID NO: 230139 - protein, 184 aa, Glycine max
  Clone ID: PAT_MRT3847_4983C.1.pep
LNCGITMPLIGLGTYSFPNDRKATELAVHNALEMGYRHFDTAKIYGSEPALGKALNEAICEGEIEREGIFLTSKLWGSDHHDPVSALKQTLENLGMEYLDMYLVHWPVKLKPWVNYPVPNEDDFEKLDLETTWAGMEKCLEMGLCRCIGVSNFSSKKIECLLDYASTPPAVNQVEMHPMWRQGR

SEQ ID NO: 230140 - protein, 60 aa, Glycine max
  Clone ID: PAT_MRT3847_49840C.1.pep
LKTKPILVFSPRKGPNAPPFHHLKPRTQWTFKKKKQGIKLELHGQKNSTFSLNSNHKQPF

SEQ ID NO: 230141 - protein, 152 aa, Glycine max
  unsure (1)..(152): unsure at all Xaa locations
  Clone ID: PAT_MRT3847_49841C.1.pep
MIGEFTLQHIQQLEFGKNEEENKWPPGLGHFSKQAFFVQCTDFYKSECNMYCLDCMNGALCSACLACHKEHKAIQFLKXRRSSYHDAIRVSEIQKILDITGVQTYIITCAKIVFXNERLNLGLTKGVTNTCQVCLQHRKWSLFLMQYNPPSS

SEQ ID NO: 230142 - protein, 127 aa, Glycine max
  unsure (1)..(127): unsure at all Xaa locations
  Clone ID: PAT_MRT3847_49842C.1.pep
ADQSDNEDNSGRVPPLSRKKLWLMTGPVSVTSIVMMKPGNLQGDLXADAIAGDSVLCFLMWVTVMGLLIQLLSELLWVRTGKHLAKLCREEYPAGARRVLWIMVXITLNGSDIEEDIESAIASTIVS

SEQ ID NO: 230143 - protein, 82 aa, Glycine max
  Clone ID: PAT_MRT3847_49843C.1.pep
NSGIIFKIIFNFKTLDSKIFLYLYLSFPQQMLATSNKLLFITMQLAKTFRNVPKLYNCKSYDEIQYCFPIIKLRSIVFHKNL

SEQ ID NO: 230144 - protein, 48 aa, Glycine max
  Clone ID: PAT_MRT3847_49844C.1.pep
LACIYSSSESLGIKKHNSSTEHLSCPAKVSFILIMMMSTTDVNTKSFT

SEQ ID NO: 230145 - protein, 149 aa, Glycine max
  unsure (1)..(149): unsure at all Xaa locations
  Clone ID: PAT_MRT3847_49845C.1.pep
TPLFFKIFGFPPNFVPPLFFGLGPGFFPVCVGPPLNGVNSKILGISSSKTPLFFFFKPLKKKGPFPFFKGFFPNFGRLGFXNGSLFLPLNPVKNFFKPLKSVFFPPKFPVIFFFLGAPPGSNGNFQKRGKLFFLFFFKRFQTLFFWGKF

SEQ ID NO: 230146 - protein, 115 aa, Glycine max
  Clone ID: PAT_MRT3847_49846C.1.pep
FVAHFVFSMSRMTSAAVLFVNEPSIPSQKKDLSLTLSPPNFKLKSAFNAEVDKISKTSYRFLERLPPLKQKVFRPPPREQTRLPRLLRGSSCSLILPGKGPLLGNVFPQFCWPLS

SEQ ID NO: 230147 - protein, 107 aa, Glycine max
  unsure (1)..(107): unsure at all Xaa locations
  Clone ID: PAT_MRT3847_49847C.1.pep
FTLPATDPVVVSCDNGTPAGVLTKQAMSYMAHMVHSRCGGEKKSMREWTHPMVDKVARMANLKQDVCGAERGITFWXPLTVICISISYERVIKYNDEKLPRQAQDAS

SEQ ID NO: 230148 - protein, 66 aa, Glycine max
  unsure (1)..(66): unsure at all Xaa locations
  Clone ID: PAT_MRT3847_49848C.1.pep
XXXDWDXLNPNLPXXGFXPQIDALSKPXXXXXXXXXEXTKKKREKREHNGSXCRQGFGFXXREGXV

SEQ ID NO: 230149 - protein, 98 aa, Glycine max
  Clone ID: PAT_MRT3847_49849C.1.pep
MTEQMTLHGTLKGHNCWVTQIATTPQFPDMILSASRDKTIIMWKLTRDETNYRIPQRALRGHSHFVSDVVISSDGQLALSGSWDGTLLLWDLTTSTTT

SEQ ID NO: 230150 - protein, 145 aa, Glycine max
  Clone ID: PAT_MRT3847_4984C.1.pep
LVYYRENIREDTCCNSHSYIASFYQQSLCQISLSLSLSRSEITLMEQSKEKNAPWLSVPQFGDWDQKGQVPDYSLDFSKIRETRKQNKTNISRASLGNEEELTASATNNANTVHSDEHQHPHYNQTNSPTSRRSFLSYFNCCVKA

SEQ ID NO: 230151 - protein, 59 aa, Glycine max
  Clone ID: PAT_MRT3847_49850C.1.pep
PLRHNRMLTVLAEIHAQVQQLMSYLTGLSCIMRHFACLQYLNPILVLALSLDDLQCPYQ

SEQ ID NO: 230152 - protein, 79 aa, Glycine max
  unsure (1)..(79): unsure at all Xaa locations
  Clone ID: PAT_MRT3847_49851C.1.pep
LXKKKKKKKKKKKKRKKKKFKKKKKKKKKKKKNLKKKKKKRGGPPPRDLPPPEFISDPVPEGDPVSLIGGRIKAGRNKG

SEQ ID NO: 230153 - protein, 94 aa, Glycine max
  Clone ID: PAT_MRT3847_49852C.1.pep
HGELSKFINHWHEIKAAPLARKNSWQLTIINLGLSFHSHLLKARDGFPFAGLIDLQGALIKRCLGLKTLNQRRKCFTKRKSRVCNHFVLVPNQS

SEQ ID NO: 230154 - protein, 45 aa, Glycine max
  Clone ID: PAT_MRT3847_49853C.1.pep
LRTYPFVLIGNKNPNKVELKKYYLVPKGVAEPFYQPEVKGKKKNG

SEQ ID NO: 230155 - protein, 212 aa, Glycine max
  unsure (1)..(212): unsure at all Xaa locations
  Clone ID: PAT_MRT3847_49854C.1.pep
KGLATRALHYSGITSLEDAMXWIIDHENDIEAREMPLVDVDIDIESTESFPITEEMRMKAQSLRVQERKRKEEEEKRLEREREKERIQAGKRLLEAKRIAEENERKRNLALKKAEKEEEKRAREKVLKKPEQDKLNRRYKQGLPLEGQAAVXSSAIEIEQEKKSXVXYNTTAKAEQLRECLRNLSVTSXEDARVRRAFQXILVYVGNVAKNP

SEQ ID NO: 230156 - protein, 39 aa, Glycine max
  Clone ID: PAT_MRT3847_49855C.1.pep
PTRSPTRPSTRSPTRPVICSALPYLVEIFEYIMVSWSCC

SEQ ID NO: 230157 - protein, 102 aa, Glycine max
  unsure (1)..(102): unsure at all Xaa locations
  Clone ID: PAT_MRT3847_49856C.1.pep
SNISSTVHLQPAVLYDAGCTNLKSMAVFPTRKTNNYITSIASNCGRVQCMQVWPPIVKKNFETLSYLPDLYDAQFAYEVXYLLMKVCIPFLEFVLEHIFLFP

SEQ ID NO: 230158 - protein, 467 aa, Glycine max
  unsure (1)..(467): unsure at all Xaa locations
  Clone ID: PAT_MRT3847_49857C.1.pep
MSKDYLIILSLLLSTVLATASSSSSSSSLYLGKGFSHRKLSPSYHIHKTIDESYAVIFDAGSTGSRVHVYRFNQQLDLLRIGQDLELFVKTMPGLSAYAENPQDAAESLIPLLEEAEAAVPQEFHPRTPVKLGATAGLRQLEGDASDRILQAVSDMLKNRSTLNVGADAVSVLSGNQEGAYQWVTINYLLGNLGKHYSETVAVVDLGGGSVQMAYAVSETDAAKAPRAPDGVESYITEMFLRGKKYYLYVHSYLRYGMLAARAEALKVRDSENPCILAGFDGYYVYGGVQYKAKAPPSGSSFSQCPNXVVVEALHVNATCSYKDCTFGGIWNGXGGELGENKLFIASFFFEVADEGXGFVDPNAPMPKVRPVXDFENAAKVACNTELKDLKSIFPRVKDGDVPYICLDLVYEYTLLVDGFGIDPQQEITLVRQVEYQDSLVEAAWPLGSAIEAISSLPKFEKLMYFI

SEQ ID NO: 230159 - protein, 87 aa, Glycine max
  unsure (1)..(87): unsure at all Xaa locations
  Clone ID: PAT_MRT3847_49858C.1.pep
MASLKVAFLAAVLCMVVVSAXMXHAAITCGQVTSSLAYCISFLHKGGTSVFGLLHRLKSLSGRLQTTXRRATVCSCPSXAASYVRLF

SEQ ID NO: 230160 - protein, 136 aa, Glycine max
  unsure (1)..(136): unsure at all Xaa locations
  Clone ID: PAT_MRT3847_49859C.1.pep
RLEPELQNQIWTIFKKYESSIEVEIQQRSVEYFALSRXSALIKKAEDTEVDTAELSAIKLRAQQQSQTSNALVVTGQSHANGTPPVGQLSLVKVPSMSSNADEADQRLSQENGTLSKVDSQPPSADLLGDLLGPLA

SEQ ID NO: 230161 - protein, 188 aa, Glycine max
  Clone ID: PAT_MRT3847_4985C.1.pep
DFEDGSDHVIEWSKRVSIIKGIAKGIGYLHNNEASKPTIVHQNISVEKVILDHEFNPLITDAGLPKLLADDVVFSALKASAAMGYLAPEYLTTGRFTEKSDIYAFGVIVLQVLSGKVLMGGTIRVAVEAFRFEDFVDTNLKGDYSKSEAAILSKLAIQCTLEVPEQRPTMVEVIQELTMLPNPSSHSS

SEQ ID NO: 230162 - protein, 134 aa, Glycine max
  unsure (1)..(134): unsure at all Xaa locations
  Clone ID: PAT_MRT3847_49860C.1.pep
ISLQPWNAFRPDGVIIFSDILTPLPAFGVDFDIEEVRGPVIHSPIRSEEGLKVLHPIDLDRLKFVGDSLKILRQEVGGHAAVLGFVGAPWTIATYIVEGGNXDYVIFQVESXAHCIQIFDSWXGQLPPEMWERW

SEQ ID NO: 230163 - protein, 266 aa, Glycine max
  unsure (1)..(266): unsure at all Xaa locations
  Clone ID: PAT_MRT3847_49861C.1.pep
TLFSIIHEKLPTVSTSTISILLSTYAKILMHSQPPDPELQNQIWTIFKKYESSIEVEIQQRSVEYFXALSRKGAAXMDILAEMPKFPERQSALIKKAEDRHEVDTAELSAIKLRAQQQSQTSNALVVTGQSHANGTPPGPHPAANDGCFRGPNTNIXSCVGQLSLVKVPSMSSNADEADQRLSQENGTLSKVDSQPPSADLLGDLLGPLAIEGPPGISVHPQPSSNSGLEGTVVEATXIVPAGEQANSVQPIGNIAERXFHALCMK

SEQ ID NO: 230164 - protein, 50 aa, Glycine max
  Clone ID: PAT_MRT3847_49862C.1.pep
DIFCIIKFQHYITFPYLSNSNCFSTTSYHIILFHNLGSIHLRVLKFNTYG

SEQ ID NO: 230165 - protein, 205 aa, Glycine max
  unsure (1)..(205): unsure at all Xaa locations
  Clone ID: PAT_MRT3847_49863C.1.pep
MATSINSSALGWKHSSFFVQSNNGFNVASPPFKPKPPRSSNFSLYCSAASSSSDPLLVKAARGDPVSRPPAWMMRQAGXPWKAFRPDGVIIFSDILTPLPAFGVDFDIEEVRGPVIHSPIHSEEGLKVLHPIDLDRLKFVGDSLKILRREVGDHAAVXGFVGAPWTXTYIVXGGSXRTYTTIKSMCHTAPHVFEXLLLSHLTQAI

SEQ ID NO: 230166 - protein, 410 aa, Glycine max
  Clone ID: PAT_MRT3847_49864C.1.pep
MATSINSSALGWKHSSFFVQSNNGFNVASPPFKPKPPRSSNFSLYCSAASSSSDPLLVKAARGDPVSRPPAWMMRQAGRYMAVYKNLAEKYPSFRERSETTDLIVEISLQPWNAFRPDGVIIFSDILTPLPAFGVDFDIEEVRGPVIHSPIHSEEGLKVLHPIDLDRLKFVGDSLKILRQEVGGHAAVLGFVGAPWTIATYIVEGGTTRTYTTIKSMCHTAPHVLRTLLSHLTQAIADYVIFQVESGAHCIQIFDSWGGQLPPEMWERWSKPYIKEIVNLVKKKCPGVPIVLYINGNGGLLERMKDTGVDVIGLDWTVDMADGRRRLGSGIGVQGNVDPAYLFSPLDALTEEIQRVVRCAGPRRHILNLGHGVLVGTPEEAVAHFFEVARSLQFDTLFQNNTAKGPNLVT

SEQ ID NO: 230167 - protein, 56 aa, Glycine max
  unsure (1)..(56): unsure at all Xaa locations
  Clone ID: PAT_MRT3847_49865C.1.pep
SDDKAVCDEEYSQTIALFCFPTKNFSIGLVNVPLYPVTDKKWCVTXDKPGIRASGL

SEQ ID NO: 230168 - protein, 139 aa, Glycine max
  Clone ID: PAT_MRT3847_49866C.1.pep
SRSVITKHSTSAYPIGLRTKGTHREREHPGPPLVDDRTPWNQPGPIDGYRLGLQHHEAHTETLSRHDLKPTAIADCLIRLNAINHCGSPLATRNDDLIRCWSYGNSSHCWDPRALGITDEACDYRNRERVTDPADIRGA

SEQ ID NO: 230169 - protein, 78 aa, Glycine max
  Clone ID: PAT_MRT3847_49867C.1.pep
EYVWNCIISEYILLDSVPAIYFIASFIGLTAKQMDEVYQTKSLFSYILYHVSSHFRTLFFKAIYIMLKDHKKIFQMCK

SEQ ID NO: 230170 - protein, 105 aa, Glycine max
  Clone ID: PAT_MRT3847_49868C.1.pep
FAELMMSSGLICNNSMSWVTFHSTYNFSYLVKILTHRNLPTRLEKFLKTIKVFCRDNVYNIKHIIRFYNTLYNKLNHIAQSLNLKHTRKNYHHTKSDSLLTVHAF

SEQ ID NO: 230171 - protein, 457 aa, Glycine max
  Clone ID: PAT_MRT3847_49869C.1.pep
VRNSQNDPPCKFGSRKKKYRVNILRCESLASLAPATLDRLFVRDYDVVVSIVPLPHSSVLPGSTGLVHFGPPSYSFMTPWMKLVLYSTVASGPLSVVLMKGQCLRFLPAPLAGCEKALIWSWDGSTVGGLGGKHEGNLVKGSILLHCLNSLLKHSAVLVQPLSRFDLDESGKVITMDIPLPLKNSDGSNTYVGKDLGLCEGESSKLNSLLTDLANKMELWTVGYIRLLKLYNGRESNQFSPEEEKYEWVPLSVEFGMPLFSPKLCNDICQRVVSSELLQSGSFEKHHHAMQSLRKNLRDICAEYQATGPAAKILYQKEKAKESSRQLMSYASGRWNPLMDPSSPISGASSEHQRLKLANRQRCRTEVLSFDGSILRSYALTPVYEAATRPIEEATQANTIKAETDECDSKEVILPGVNLIFDGSELHPFDIGACLQARQPISLIAEATAGSASLATK

SEQ ID NO: 230172 - protein, 39 aa, Glycine max
  Clone ID: PAT_MRT3847_4986C.1.pep
RRTSSGIARTRPASVELSLLMTSRGGNSPADQGFCWTVL

SEQ ID NO: 230173 - protein, 376 aa, Glycine max
  Clone ID: PAT_MRT3847_49870C.1.pep
MERGSGKLSRKKSGGGNGQVLDGSNIMELVGNQQVFTTFVDHKFHELDTDKDGKLSVKELQPAVADIGAALGLPAHGTNPDSDHIYSEVLNEFTHGKQENVSKSEFKEVLSDILLGMAAGLKRDPIVILRIDGEDLLEFVNGSGYEAEMNSIFSQIESPNRSLHDHIIEALGKLTVEQGIPPTSDSWVLSNIMEPALLSQAGSDLDKSVSQETFLEEFKIVAMSVANRLKEQPVIVAHSENTFDGSGVKRLLSNKFELDKILNSAMETMPKDRNGKLSKEYLRVALDTVAPSAGLPPVGAIEEMDKVIGEVFKMVNADDAKVVKEDEFKKLLTEILGNIMLQLEGNPISVSSNSVVHEPLDSSSTLLQPSPSETAA

SEQ ID NO: 230174 - protein, 81 aa, Glycine max
  Clone ID: PAT_MRT3847_49871C.1.pep
KKGTPCTMQQKGPALIILQKGTGVKNLHKGTAPIMLHKGSAPKSPQKGPPPTKLQKGFYLFPKKKKKKKNKKRPFGCEKTT

SEQ ID NO: 230175 - protein, 85 aa, Glycine max
  Clone ID: PAT_MRT3847_49872C.1.pep
PHFWELFFLDHVCGSHNGYEMWTSGWAHHTLWHMRSLIDHAKRPTVYDILSGISLDLAIAVDTLMTPLSAAQATARCSDNAEFSA

SEQ ID NO: 230176 - protein, 118 aa, Glycine max
  Clone ID: PAT_MRT3847_49873C.1.pep
MKMKVLVFFVATMMVAWQCHAYDMFPLRMNTDYGARTPEVTCSSCRLAEEAHNIFGFDTIPDECVESTTEYIHGEQSTSDSITGNQHAYFYATDLQVHPKDTLELSIHGTELSNIPYY

SEQ ID NO: 230177 - protein, 55 aa, Glycine max
  unsure (1)..(55): unsure at all Xaa locations
  Clone ID: PAT_MRT3847_49874C.1.pep
KSKGHLISKVPFYCSYFILQTMICLLSLVNXRNLQLAIGKEWVVTLDLATQNNXL

SEQ ID NO: 230178 - protein, 89 aa, Glycine max
  Clone ID: PAT_MRT3847_49875C.1.pep
EGNISLISLPHCHRPFGVMFHLEFLSQKFVYGTDPAFTVRLAVHYSLGEKYFTDKQNHPFGRKYLYEGPKKMSLRKKHFRKTLVPLSFE

SEQ ID NO: 230179 - protein, 40 aa, Glycine max
  Clone ID: PAT_MRT3847_49876C.1.pep
HYYVKCSASALQAVPEINKLYPVHSTNEIETLITSAVRLL

SEQ ID NO: 230180 - protein, 104 aa, Glycine max
  unsure (1)..(104): unsure at all Xaa locations
  Clone ID: PAT_MRT3847_49877C.1.pep
XRXAHLXILXVXTXSTXHXXXQXXNXXXXYNTIXXIRPXXTXLXXGXEXLXPXNLNXMSXNXXESXXKTHXTRXXXXCHLXHLIXGXSSXXKXXXHWRXXSXVL

SEQ ID NO: 230181 - protein, 196 aa, Glycine max
  Clone ID: PAT_MRT3847_49878C.1.pep
EVWGCLKFIPHRLAGATLMTPVVNYWWHNLPLNMTTKAYYKQPKHDQWALRVAHYFPWLTYWWFTQEWFPSSSVVQRNPAVFSNQDLSIVSKFLINRQQQSQVQQQGEAESICRDAIVGFGSWDFDPLDINNPFPDSTGHVHLWQGDDDKLVPVMLQRYIAQNIPWIHYHEVPGSGHLFPYMEEVSATIIKTQLVD

SEQ ID NO: 230182 - protein, 35 aa, Glycine max
  Clone ID: PAT_MRT3847_49879C.1.pep
PPETLWVKKGVNKGPTIRRGRIQLICIYITLVRHD

SEQ ID NO: 230183 - protein, 123 aa, Glycine max
  Clone ID: PAT_MRT3847_4987C.1.pep
KKKKGGGRFKGPNFPSFFFPGHTFFWGAPKLISLAAVFHRGGWKTLGVPHFIPFAKLPLFPPWLFTKRAPPVPLSHQLPTLIGNWPPPCTGPLTAGGGGVPPSLPVTFASALPPFLFVFFLSF

SEQ ID NO: 230184 - protein, 98 aa, Glycine max
  unsure (1)..(98): unsure at all Xaa locations
  Clone ID: PAT_MRT3847_49880C.1.pep
XXGXCXQNDHXXIXXXSXSGHXNXXTIXGSRIVXIXXASVXPLKQXXXAXASKXVGRXCXXSXXXXXCIVXXGVXXVSSCXRXXARAEFRAYVRVHAT

SEQ ID NO: 230185 - protein, 71 aa, Glycine max
  Clone ID: PAT_MRT3847_49881C.1.pep
RPGRPLRPTPSRPPPTINLRRTSPTPTAAEAAVHWAKLRWCLGNDAFFFFVLLVSFTCMGNACRVLSMRIG

SEQ ID NO: 230186 - protein, 59 aa, Glycine max
  Clone ID: PAT_MRT3847_49882C.1.pep
SRVGPASNDASVVVECSHVHASYQVASGTSSSLCLSSGSPGVKVIISRSNNSISRCSIG

SEQ ID NO: 230187 - protein, 56 aa, Glycine max
  unsure (1)..(56): unsure at all Xaa locations
  Clone ID: PAT_MRT3847_49883C.1.pep
XXXPEXXPXPPPPPFVSGSPPPPPTTRPPRRTVAPPPRYHTTVINRAXFSTXCCGI

SEQ ID NO: 230188 - protein, 40 aa, Glycine max
  Clone ID: PAT_MRT3847_49884C.1.pep
SIINSISSQNSTNTHLILLHFKKIFTPFFLLTNYFSLLNF

SEQ ID NO: 230189 - protein, 39 aa, Glycine max
  Clone ID: PAT_MRT3847_49885C.1.pep
LPLKCSSYPLLKPQPSLFNVISGPRQERKRRVGTGIRRR

SEQ ID NO: 230190 - protein, 118 aa, Glycine max
  Clone ID: PAT_MRT3847_49886C.1.pep
ETPQKKYQPFSNREKKETALEKILRHTLYTGNGILKKTPKLPTWGAPTISNLKGTPPTKTPEKTTAKPFPRAYKRTLVFFIPPPRKRVSYTAPIGTYVDKCPKSCNLSKDRARKKAQT

SEQ ID NO: 230191 - protein, 65 aa, Glycine max
  Clone ID: PAT_MRT3847_49887C.1.pep
NIDLLELNHVNAKNGYPKNVILDHILLVKCCQSSSIFTKKKVVLITLNFKSHVEFLKKVRLGEVN

SEQ ID NO: 230192 - protein, 85 aa, Glycine max
  Clone ID: PAT_MRT3847_49888C.1.pep
IFNMVHDIFVKVKLEVTRTSTILNVFGSRRSSDVTRFIFCPNFCKMVTSILQLDLMNFFRKSMSLVQSYNPRNDNSDHQYFNNLS

SEQ ID NO: 230193 - protein, 299 aa, Glycine max
  Clone ID: PAT_MRT3847_49889C.1.pep
MEFPSSSSSSSIFSPRPSDDTVFYAIYPDSPTATTTVTLQSLHLKILETLSPFTQDYIWQHQPFALSVSTPPNPSCPCPSSSHLPHLHGHLRFGDNLDDEWFAVFLLFQISQRFPSLSIRLWDSDGDFLLIEAAFHLPRWLNPDSAHHRLFLRDGSLHIVPRNRLPNPSLIDSLNFIVNSPHESLASDGIQRAVRKRISNYPEQARKNMHRVRVRVPVSVAQVLKHEPRLISLAVEGFYDRDIDTMKFASRMERFVERGKAEELVCVSVKMSRAMYAQLVQQRFQAPKCYPGMPARSEK

SEQ ID NO: 230194 - protein, 333 aa, Glycine max
  Clone ID: PAT_MRT3847_4988C.1.pep
MYIEFKLSSRRSKGESIRRFFEHAEEAEEEEDDDSVDKDGNELDGECSRPQKHAKSPELAREFLLDAATVIFKEQVEKAFREGTARQNAHSIFVCLALKLLEDRVHVACKEIITLEKQMKLLEEEEKEKREEEERKERRRTKEREKKLRRKERLKGKEKEKKCSESNDALGSPEISKEELSAVADMEQNNPISCRSLVIEANETNLLGDDSPNIEDEEFSSECNTLKPHDLSHDDCGEEISNTKDEMGQSTIEQSMLSSKRCKEFQLDMMVRMSFNRKFSTASISSLNFPSYVTQITSTSHNTPFSPPFPPIPMARLASPTMQYGLLLVPTPH

SEQ ID NO: 230195 - protein, 109 aa, Glycine max
  Clone ID: PAT_MRT3847_49890C.1.pep
MEFPSSSSIFSPRPSDDTVFYAIYPDSPTTTSTATLRSLHLKILETLSPFTEDYIWQHQPFTLSVSTPPNPSCPCPSSSSHLLHLHGRLRFGDNLEDEWFAVFLLFRIS

SEQ ID NO: 230196 - protein, 179 aa, Glycine max
  Clone ID: PAT_MRT3847_49891C.1.pep
MELFFYAVFGGLGAVVAVTELSKSNKDRINTSSAFNSFKNNYLIVYSLMMAGDWLQGPYVYYLYSTYGYGKGDIGQLFIAGFGSSMLFGTIVGSLADKQGRKRACVTYCITYILSCITKHSPHYKVLMLGRILGGIATSLLFSAFESWLVAEHFKAIFLGNGLVAILSGLFGNVLVDTL

SEQ ID NO: 230197 - protein, 95 aa, Glycine max
  Clone ID: PAT_MRT3847_49892C.1.pep
IYKIFLTFWVHADETKTLGFKKIVRGGQSKKSGAGPRDYTLETLGSQKALTMDRAKLVPVKKSAPFTKPHTIRPRSTKGKTSGAKGGNVLQLMGE

SEQ ID NO: 230198 - protein, 64 aa, Glycine max
  unsure (1)..(64): unsure at all Xaa locations
  Clone ID: PAT_MRT3847_49893C.1.pep
XXXILXXXWXXLXDGVXVRVAEKHDEKMIFLQQQAPTAPRDDGLQKSHQYNHDHEXPSIFCEKR

SEQ ID NO: 230199 - protein, 459 aa, Glycine max
  Clone ID: PAT_MRT3847_49894C.1.pep
MELFFYAVFGGLGAVVAVTELSKSNKDRINTSSAFNSFKNNYLLVYSLMMAGDWLQGPYVYYLYSTYGYGKGDIGQLFIAGFGSSMLFGTIVGSLADKQGRKRACVTYCITYILSCITKHSPHYKVLMLGRILGGIATSLLFSAFESWLVAEHFKRGFDQQWLSLTFSKAIFLGNGLVAILSGLFGNVLVDTLALGPVAPFDAASCFLAIGMAIILSSWSENFGDPSENKDLLTQFRGAAVAIASDEKIALLGAIQSLFEGSMYTFVFLWTPALSPNDEEIPHGFIFATFMLASMLGSSLASRLMARSSLRVESYMQIVFAVSSAALMLPILTTFLVVPSGVKGGSISFSGCIQLLGFCAFESCVGIFWPSIMKMRSQYIPEEARSTIMNFFRIPLNIFVCVVLYNVDAFPITVMFGMCSIFLLVACILQRRLMVISDKPKTEDWQLKDRDAESEPLNI

SEQ ID NO: 230200 - protein, 75 aa, Glycine max
  Clone ID: PAT_MRT3847_49895C.1.pep
QILDWNFMNLGTKGYDYGKDWEAIRLREREEEHVDSKCQKRIWWTSNLGCIMVPISDPSGIPPPTTVDMPNQKDC

SEQ ID NO: 230201 - protein, 71 aa, Glycine max
  Clone ID: PAT_MRT3847_49896C.1.pep
MQSFRRWVEPKAFRYDVFLSFRGWDTRFSFTGFLYKGLFDHGFRTFMDDREIDKGSQIPQTLREAIEDSRV

SEQ ID NO: 230202 - protein, 69 aa, Glycine max
  Clone ID: PAT_MRT3847_49897C.1.pep
DSDVSFCMMAVAVLARAHSVAEVQSQHLLWVSGSFSRRTGALYVSTSLYRSTPNTFLSMRDQEQRAILD

SEQ ID NO: 230203 - protein, 64 aa, Glycine max
  Clone ID: PAT_MRT3847_49898C.1.pep
SSNENVSQGLKEEVRDARLEVLASLRQETDEERLSWKELSALLRLECREYTPLLAMIMECLVPK

SEQ ID NO: 230204 - protein, 89 aa, Glycine max
  Clone ID: PAT_MRT3847_49899C.1.pep
LESRSISPSHWILITAAMATKGGWPHCEQCAHAPPTAYYHQTSGSYWHLWHYVPRRGRVPCLQVHPARWRCVALLHSGEDAWTHWGPGP

SEQ ID NO: 230205 - protein, 214 aa, Glycine max
  Clone ID: PAT_MRT3847_4989C.1.pep
MRRHDRAGLARRKRRSKSNRNTHRERTKRRRRRTQRERECVKVMTMDREKEREIELESAMYTNCLLLGLDPAIIGVGASNATPRVGHFRHSNPKLGEQLLYFILSSLRGPIQSAKDFDKVWPIFDSAQSRDFRKVVQGIISELESQGALPRSNSRVSSLATCCGPRFVELLWQLSLHALREVHRRTFTADISSNPLPAPLTDVGFSHAATLLAG

SEQ ID NO: 230206 - protein, 74 aa, Glycine max
  Clone ID: PAT_MRT3847_498C.1.pep
LSLLLVIRPPGHPIKFSKMCFHFRAFLGNKVCPPTGKYPWFLGLSPFPAQGHFIPLARFVIELLCMRLKRNDCY

SEQ ID NO: 230207 - protein, 42 aa, Glycine max
  Clone ID: PAT_MRT3847_49900C.1.pep
RKISYTSREDSTYFSQLLSSTCFFQLNITSTYLYTFLELSLK

SEQ ID NO: 230208 - protein, 106 aa, Glycine max
  Clone ID: PAT_MRT3847_49901C.1.pep
ENKMPSNYFSRLAASIQRSIAGKEGRIRDSAEVLIGQGKLWFGSSKFFHSAHSSYCVEVQLLVWPDVALASSSELGGKRRTLSVVDTLSRTFSVPSGAGPSFQVCG

SEQ ID NO: 230209 - protein, 63 aa, Glycine max
  Clone ID: PAT_MRT3847_49902C.1.pep
ICMFPPKGAPWFLVPLRGFFQKKTPPFLGALPLGGSWPPLFLRGFLGIFPCTLSGFEMTRFSP

SEQ ID NO: 230210 - protein, 62 aa, Glycine max
  Clone ID: PAT_MRT3847_49903C.1.pep
EKLLRMLFEIKITGFLSSLKNFLRAHWFQGWLTNQAFFFRLWISFFKSLELFLGFGTPFFEN

SEQ ID NO: 230211 - protein, 184 aa, Glycine max
  Clone ID: PAT_MRT3847_49904C.1.pep
MADSSSNSKDHHNTRVYHPYQDLNVPIQKLYNLPTAPEHLFPEEAARTHRSWGDNLQYYTGSGYLAGALIGAARGTVQGLREAESGDSLKIRLNRVLNSGGHAGRRLGNSLGVVGLIFAGLESGMTYLRGTDDLVNSAVAGLGTGTLFRAAAGPRSAAIAGAIGGIAAAAAVSGKQALKRYVPI

SEQ ID NO: 230212 - protein, 112 aa, Glycine max
  unsure (1)..(112): unsure at all Xaa locations
  Clone ID: PAT_MRT3847_49905C.1.pep
MESIGEEQHGFLSETDHVSPTRRPWELGNNGGGSGLVGTMSKAARPGPELFHRWDDKNIVCERNRWKKLNAWIVALRAVEPNITXMDKVYIIKDGMEYIQHLHEQEKRMPAE

SEQ ID NO: 230213 - protein, 150 aa, Glycine max
  Clone ID: PAT_MRT3847_49906C.1.pep
SSGKIEGKNVFYWFQNHKARERQKRRRREMEENNNNNISASSSGEGLKETGCGVKETKKWASTSNCSGHAEESAALDIAEKGSNGWTQFEGKDSIQVLMRRNIAEKQAKLQEIMEMPCFPPVTMEASTPTTSHRRTTHYNTQLLTPQNYK

SEQ ID NO: 230214 - protein, 260 aa, Glycine max
  unsure (1)..(260): unsure at all Xaa locations
  Clone ID: PAT_MRT3847_49907C.1.pep
SRAGASFINVSMSTITSKWFGEDEKNVRALFTLAAKVSPTIIFVDEVDSMLGQRTRVGEHEAMRKIKNEFMTHWDGLMTNSGERILVLAATNRPFDLDEAIIRRFERRIMVGMPSVENREKILRTLLAKEKVDEKLDFKEVATMTEGYSGSDLKNLCTTAAYRPVRELIQQERLKTLEKKQKDAGGQNNDVQEAPDTEDEVQHDKVITLXPLNMQDFKEAKSQVAASYAAEGAGMNELKQWNELYGEGGSRKQQQLSYFL

SEQ ID NO: 230215 - protein, 97 aa, Glycine max
  Clone ID: PAT_MRT3847_49908C.1.pep
MGEIKEECASPDKRKVALYSSGESKATASACETASSLGSISPEVSHLRWGMWYKLRELEVATNGLCEENVNGESGYGSVYRGLFPDGTKVAGDLDLI

SEQ ID NO: 230216 - protein, 70 aa, Glycine max
  Clone ID: PAT_MRT3847_49909C.1.pep
DIKFECILYTFVFSKEFFFYSQKKEECLASHSETHFILLVHIYEFLNSLPVYQFCMYNLFFIVVIGFSNN

SEQ ID NO: 230217 - protein, 80 aa, Glycine max
  Clone ID: PAT_MRT3847_4990C.1.pep
HTIPLISHFNLYVIVTGFTLQWEHCRYWCWKYTTHEHLKSALQICSYKNWIDDPLVLQIIYILIQANLHLISIVKASQQN

SEQ ID NO: 230218 - protein, 79 aa, Glycine max
  Clone ID: PAT_MRT3847_49910C.1.pep
ICAALMRYGEWPYSALVMLPKLSYGGELRLCNTCSRTPPLALGPRKLDVIGPFGLLHNPLNEAILYCRFYMSFSIQIES

SEQ ID NO: 230219 - protein, 85 aa, Glycine max
  Clone ID: PAT_MRT3847_49911C.1.pep
NQAHLYLKVVHRGNIILLSLYQEPYTRLFPVQKLMTWGAIRLLCLITLQSNFCWYAICASKTNTNCISKLDLPQFACFFHQALEF

SEQ ID NO: 230220 - protein, 79 aa, Glycine max
  Clone ID: PAT_MRT3847_49912C.1.pep
RKYVIYKMGYILFIQLFCWIYPNGETYTKNPQKGGKENPNRRGRVLIPHRGEKRNPKLSKGGHQCEKGAKAEKEKERIS

SEQ ID NO: 230221 - protein, 80 aa, Glycine max
  Clone ID: PAT_MRT3847_49913C.1.pep
AVFFISTNHEDRISTPATECNFSSIPAPGHMNPMVDTARLFAKHGVGVTIITTPANDLTFQKAIYRDFSCGKLHQNTCDS

SEQ ID NO: 230222 - protein, 57 aa, Glycine max
  unsure (1)..(57): unsure at all Xaa locations
  Clone ID: PAT_MRT3847_49914C.1.pep
XSENFTYTLVCKTMFTEMMDTHHQPRKNRENDVQKITEERVAIAEPASPSTSPSHEF

SEQ ID NO: 230223 - protein, 166 aa, Glycine max
  Clone ID: PAT_MRT3847_49915C.1.pep
MAGMNSSVLACSYAISGAACSELNGKVTSVASVASSGYKLPLIKCEARVPKAKESEGRRGALVLLAATLFISAASNSSANAGIIDDYLERSKANKELNDKKRLATTGANFARAYTVEFGSCKFPENFTGCQDLAKQKKVPFLSDDLELECEGKDKYKCGSNVFWKW

SEQ ID NO: 230224 - protein, 86 aa, Glycine max
  Clone ID: PAT_MRT3847_49916C.1.pep
VMFLFLNLQDRYALYRGFLSVVSIPISYSVLTYTFVACLLTLSVTFISLVTRLIFPGEQEFTQRYIGITKICVLEQLHHSSKRTLL

SEQ ID NO: 230225 - protein, 173 aa, Glycine max
  unsure (1)..(173): unsure at all Xaa locations
  Clone ID: PAT_MRT3847_49917C.1.pep
MAAMNSSVLACSYAISGAACSELNGKVTSVAYVACSGYKLPLIKAEARVPKAKESEGGRRGALVLLAATLFTSAASNSSANAGIIEDYLERSKANKISLCAXELNDKKRLATTGANFARAYTVEFGSCKFPENFTGCQDLAKQKKVPFLSDDLELECEGKDKYKCGSNVFWKW

SEQ ID NO: 230226 - protein, 156 aa, Glycine max
  unsure (1)..(156): unsure at all Xaa locations
  Clone ID: PAT_MRT3847_49918C.1.pep
MLNFLSLPVSHLFSNFTVYVFPGYRIRAGSSSPVHRRDADHRFGSDYNNMPRSRGYGGGRDPGRYRDPSPSYGRGRVGGRPMGRAFDGPGFASGLARGEGNNRNNANVRPREGDWICPDPLCNNLNYARRDHCNSCNRSRNAPARSPRRAYSAPXP

SEQ ID NO: 230227 - protein, 109 aa, Glycine max
  unsure (1)..(109): unsure at all Xaa locations
  Clone ID: PAT_MRT3847_49919C.1.pep
THSTLLLFRTAHASVRITHEESVTAWTTHERAATTMMADGWPYXNAKVHERPGTTLPDDEDHAVXNPTINNMTAYGLNPGMARSXQLDTNPHSIGLQTAWIQEPTTLTP

SEQ ID NO: 230228 - protein, 78 aa, Glycine max
  Clone ID: PAT_MRT3847_4991C.1.pep
KDSVEGKVHSDEKSGYRSHNAIWTRTQWVDGKTFLYDITGAGSQIRIDVQGGHDRETLETMVPMIATNNYICRQQGYC

SEQ ID NO: 230229 - protein, 124 aa, Glycine max
  unsure (1)..(124): unsure at all Xaa locations
  Clone ID: PAT_MRT3847_49920C.1.pep
NADYWGLATGYARAGAPLAHLAIYRACWDFPIGDCTDADIXLKALDMAMHDGVDDLTXSLGLAIPLFSYVDQRDSLVIGSYYAXLRGSQCGCSAGNYXPGFYTDTYTAPWIITAGATTIDRALP

SEQ ID NO: 230230 - protein, 327 aa, Glycine max
  Clone ID: PAT_MRT3847_49921C.1.pep
MASSRDKEPAPPHHHPPLLSSLVVRPSHTDAAAAAGGGRAADFEPGELHRDPPPPYSRSDRYPDEPGYRIRAGSSSPVHRRDADRRFASDYNNLSRSRGYGGGRDPGRYRDPSPPYGRGRVGGRPMGSGLARGEGNNRNNPNVRPREGDWICPDPLCNNLNFARRDHCNSCNRSRNAPARSPRRSFPAPPPLHAPPRRFPGPPIDRSPERTLNGYRSPRGLARDGPRENKFDRPPPLDWDNRDRGRDGFSDERKGFERRPLSPPPPLLPSLPHHRGGRWARDVRQRSRSPIRGGPPPKEYRRDTFMHRARDDRHRHGMGRDRIGGMY

SEQ ID NO: 230231 - protein, 52 aa, Glycine max
  Clone ID: PAT_MRT3847_49922C.1.pep
TNLMNFYKLENNDVLQLFIKSKKKKKKRIMRIDEKKEKQEVITFPPLFQIRN

SEQ ID NO: 230232 - protein, 54 aa, Glycine max
  Clone ID: PAT_MRT3847_49923C.1.pep
SAHLGKSATGRAGHAAEFVLRNLHLQNPLPTKLAHTLVTQNAKLNMAKLLIRSK

SEQ ID NO: 230233 - protein, 111 aa, Glycine max
  unsure (1)..(111): unsure at all Xaa locations
  Clone ID: PAT_MRT3847_49924C.1.pep
HLANVTCYTQCTSPENTTSGKKLRKVKREASSSEKPKPVGTHXIIVPEISXNIMRVYHGKTFNQVEIKPEMIRHYLVEFLISYKPIKHGSAILNTKNHPQCSTMRPSLNLV

SEQ ID NO: 230234 - protein, 69 aa, Glycine max
  Clone ID: PAT_MRT3847_49925C.1.pep
CSLSLSLSLPWNTLDADACTLCGHDKRHRDQLRIRQITLYTQLREPLTVTSSTLPGRRPIYAGASDSED

SEQ ID NO: 230235 - protein, 407 aa, Glycine max
  Clone ID: PAT_MRT3847_49926C.1.pep
HASGSPLRPVLVNLPSKRISPAAFLDSRFFHYTASTSSLFSLRNKPLSSPTITHLGNTKPSKSFSVGASSSRDSVVTLLDYGAGNVRSVRNAIRFLGFDIKDVQTPQDILNASRLVFPGVGAFAAAMEVLSKTGMDEALCSYIDKDRPFLGICLGLQLLFESSEENGPVKGLGLIPGTVGRFDSSNGFRVPHIGWNALQITEDSGILDDVGNHHVYFVHSYRAMPSDDNNEWISSNCDYGDKFIASIRRGNVHAVQFHPEKSGHVGLSILGRFLNPKSNMAKKPGEGKASKLAKRVIACLDVRTNDKGDLVVTKGDQYDVREHTKENEVRNLGKPVDLAGQYYKDGADEVSFLNITGFRDFPLGDLPMLQVLRYTSENVFVPLTVGGGIRDFTDSTGRYYSSLEVAS

SEQ ID NO: 230236 - protein, 96 aa, Glycine max
  Clone ID: PAT_MRT3847_49927C.1.pep
MGWKAAEKLIRHWKILRGDNVMITRGKDKGETGILKRVIRSQNRVIVESKNPVKKHIKQGQGHEGGIFTVEAPLHASNVQVLDPVTGYVIVQILNW

SEQ ID NO: 230237 - protein, 59 aa, Glycine max
  Clone ID: PAT_MRT3847_49928C.1.pep
YIMQGSDLKAFCYMHNTLLICTTHKCFAFFPLLSISGSKLLLNNLYINDTHASRSSLRS

SEQ ID NO: 230238 - protein, 86 aa, Glycine max
  unsure (1)..(86): unsure at all Xaa locations
  Clone ID: PAT_MRT3847_49929C.1.pep
YWDKEKKSIYSFLKDRVWNGIHHQSTKFISKVGMEILLXSVAQSISTLCMDVFLLPSNLREELEKMMNFFWWGSNNNHNKGIHWLN

SEQ ID NO: 230239 - protein, 73 aa, Glycine max
  Clone ID: PAT_MRT3847_4992C.1.pep
HSVRQFALSASLSRIGIALSALLFLSKRSKRVIVKIPILNWSDNSNDVGGVGSQRRRDNVGHKMVQSEVQQCR

SEQ ID NO: 230240 - protein, 92 aa, Glycine max [sequence omitted]

SEQ ID NO: 230241 - protein, 358 aa, Glycine max
  Clone ID: PAT_MRT3847_49931C.1.pep
MVQKEKEAIIKEGTTEIEMEGTRAKEGTLPPGFRFHPTDEELVTCYLVNKISDSNFTGRAITDVDLNKCEPWELPGKAKMGEKEWYFFSLRDRKYPTGVRTNRATNTGYWKTTGKDKEIFNSETSELIGMKKTLVFYKGRAPRGEKSNWVMHEYRIHSKSSYRTNRQDEWVVCRVFKKSGGAKKYHSSNHARTVNPYSLEIGPSIMPPPMMQLGDPSAHFLYGRNYMNSAELAELARVLRGGGSTSSVNLPIQSQLSYPTSSSAGGGGFIISGLNLNLGGGATATTQPILRPMQPSPPVHTMAQVLDVNSSMMTTSSLGAENNVGYGTEVSNNMNSHGNRYMGMDHHCMDLDNYWPSY

SEQ ID NO: 230242 - protein, 49 aa, Glycine max
  Clone ID: PAT_MRT3847_49932C.1.pep
AFYHAIDEPCVMPSNSQMCMVHPYYKRNQSIYLDTINMDSLARKALVIA

SEQ ID NO: 230243 - protein, 66 aa, Glycine max
  unsure (1)..(66): unsure at all Xaa locations
  Clone ID: PAT_MRT3847_49933C.1.pep
CFHFKKKKKKKKKKKKKKKKKKKKKKKKKKKKKKKKKKKKKKKKKKKKXGGGRFRGPRLTSRGLQS

SEQ ID NO: 230244 - protein, 57 aa, Glycine max
  Clone ID: PAT_MRT3847_49934C.1.pep
PDTGDTTILEAIGGDMESLDGDRGTTYRRLLSTTKQTKTMDRSEPGEDAQARAPIRS

SEQ ID NO: 230245 - protein, 312 aa, Glycine max
  unsure (1)..(312): unsure at all Xaa locations
  Clone ID: PAT_MRT3847_49935C.1.pep
MITVLSGPIGTLANQFFESRKLSQPTFSDLSLKPARISRKTLSLKMAQVAQNPSQQQKVIITNKYGNKLVGILHESGTKEIVILCHGLRSTKEDDIIKNLAAALENAGVSSFRFDFTGNGESEGSFEFGHYWREVDDLHDVVQHFHGANHKVIAIIGHSKGGSVVLLYASKHHDIKTVVNLSGRXDLKAGLEERLGKDYLERIMKDGFIDVMQSGSXDYRVTLXSLMDRLDTYMHEACHKIDKEXCRVLTVHGSXDPVIPVGDASEFAKIIPNHXLIIIEGADHSYTNHQDELASVVVNRIKEALVHFSNDV

SEQ ID NO: 230246 - protein, 59 aa, Glycine max
  unsure (1)..(59): unsure at all Xaa locations
  Clone ID: PAT_MRT3847_49936C.1.pep
ELKTTVLALADXRHDMKGCSRHSRREKYNQHQLRSVANLSPKPEQSMFKGQVYNCKRCI

SEQ ID NO: 230247 - protein, 116 aa, Glycine max
  Clone ID: PAT_MRT3847_49937C.1.pep
LFFFFFFFFCFVVFFFFSFLKKKFAKIFKRRCPWGVKRDNWVLLHLRGENGVPQLPSFLRRVFGGNGQFQKIYGERGGNRDFLPQKGRDRRKARGGVSIILEPGFGGPFGALGRFW

SEQ ID NO: 230248 - protein, 57 aa, Glycine max
  Clone ID: PAT_MRT3847_49938C.1.pep
NSKVTYNGPYRGKTENWPRSPRNQWSWVKQTIQVFKWVLWVKAFTKIKTIKGKISFP

SEQ ID NO: 230249 - protein, 71 aa, Glycine max
  Clone ID: PAT_MRT3847_49939C.1.pep
RIKYLYFKINGLKLWILKNMRTKFLYFKIGGSKLQILKNRETKITFKSTFKRTKFTETIFISRTKDKIGRV

SEQ ID NO: 230250 - protein, 60 aa, Glycine max
  Clone ID: PAT_MRT3847_4993C.1.pep
KMRSNQQERIEMNDLNFKRYIIVIIIMLKKNLVCKVDYYLISRRIGVRFGEIEGDRIDIR

SEQ ID NO: 230251 - protein, 131 aa, Glycine max
  Clone ID: PAT_MRT3847_49940C.1.pep
MMQDSIGIPACFSSSAEKQHSHHDHDHGAVTRSGQSVYMSVYRTKVADHCRLITITWCKNLLLHGLSVSVEGPEGEEQYYTCKVELKPWYFWRKQGSKRFIVDGKAVDIFWDLKAAKFNGETEPTSEYYVA

SEQ ID NO: 230252 - protein, 87 aa, Glycine max
  Clone ID: PAT_MRT3847_49941C.1.pep
MSYSKTLGLKPRLQIKFFLVHSQKSFYRNYRGSSSTKILNERDPNLLLFKSEGNYDFIVPQVSPLQGGDQVTLSRNNRQNFQYNHVI

SEQ ID NO: 230253 - protein, 60 aa, Glycine max
  Clone ID: PAT_MRT3847_49942C.1.pep
FRSNDRIGHPVYYNDFGEFEDKELYSKTFLDEEKRNKFIKWRIQPFRNNFRNLSTPCIGD

SEQ ID NO: 230254 - protein, 49 aa, Glycine max
  Clone ID: PAT_MRT3847_49943C.1.pep
ARGGVLNCYTLFHGLAQGACRWVDLLAPDSYRFPGYVLYMIPEEIYNVN

SEQ ID NO: 230255 - protein, 48 aa, Glycine max
  Clone ID: PAT_MRT3847_49944C.1.pep
PFFFMLFLRCCSYFLAYLIKRTGPNLTPFFIDQTYFPIFNSYLLYIHY

SEQ ID NO: 230256 - protein, 138 aa, Glycine max
  unsure (1)..(138): unsure at all Xaa locations
  Clone ID: PAT_MRT3847_49945C.1.pep
TAIAAYPTFALVRESSLSDPSXAQPLNNFEALGANLTRGDLYHPEKLVTAIAQVDVLISTLGHLHFADQLKIITAIKESGNGNRIFPSECGSDARRAHAVRPTTSALAISALIQTIIVVRRVPYTYLSXNYLAGYFVA

SEQ ID NO: 230257 - protein, 136 aa, Glycine max
  Clone ID: PAT_MRT3847_49946C.1.pep
MALSPLNNNNETLFVGKNRPNCPYSGSGKSPLIWSDDLRLQDLGTASSCISPQDDPFKGDHKVQISPPSMDSDPISEIYDTKPMILHGESVSDQNKFDASMKVERPSPKRSPLQPDRTSPMINSSSVAQGRSSPFG

SEQ ID NO: 230258 - protein, 551 aa, Glycine max
  Clone ID: PAT_MRT3847_49947C.1.pep
MREPSSVGFEGNGVVSSPPQALIERLKDYGQEDVFALWYELSPEEREFLVKDIESLDLSRIDRIIRCSLRSQGLPAAAIEPVPESNVSTVEERSQEDRERWLKMGLKAISDGKLAVLLLSGGQGTRLGSSDPKGCFNIGLPSGKSRSVSTVEERSQEDRERWWKMGLKAISDGKLAVLLLSGGQGTRLGSSDPKGCFNIGLPSGKSLFQLQAERILCAQRLAAQATNENSASSVQIHWYIMTSPFTDEATRKFFESHKFFGLEAEQVTFFQQGTIPCVSKDGRFIMETPYRVAKAPDGNGGVYSALKSTKLLEDMASKGIKYIDCYGVDNALVRVADPTFLGYFIDKGVAAAAKVVRKAYPQEKVGVFVRRGKGGPLTVVEYSELDQSLASAVNQATGRLRFCWSNVCLHMFTLDFLNQVANGLEKDSIYHLAEKKIPSIHGYTMGLKLEQFIFDAFPYAPTTALFEVLREEEFAPVKNANGSNVDTPDSAKLLVLRLHTRWVVAAGGFLTHSVPLYATGVEVSPLCSYAGENLEPICRGRTFHAPCEISF

SEQ ID NO: 230259 - protein, 101 aa, Glycine max
  unsure (1)..(101): unsure at all Xaa locations
  Clone ID: PAT_MRT3847_49948C.1.pep
QFIFDAFPYAPTTALFEVLRXSXFAPVKNANGSNVDTPDSAKLLVLRLHTRWVVAAGGFLTHSVPLYATGVEVSPLCSYAGENLEPICRGRTFHAPCEISF

SEQ ID NO: 230260 - protein, 57 aa, Glycine max
  Clone ID: PAT_MRT3847_49949C.1.pep
LYNIISILHITINITILKDQFNNNPSSSSHITYYIQPINLYILNYANLLNYTHTIHI

SEQ ID NO: 230261 - protein, 45 aa, Glycine max
  Clone ID: PAT_MRT3847_4994C.1.pep
LEPLFFGRGWTLELHNRYFISKNEKRKTKITFNGCSSPPGERSFQ

SEQ ID NO: 230262 - protein, 118 aa, Glycine max
  unsure (1)..(118): unsure at all Xaa locations
  Clone ID: PAT_MRT3847_49950C.1.pep
ILAKGVLTAHDTWIPIHRGPLGTIWSSHGARLLDYGPTSIXPYKRMINVLXGPLSVCLDASAHRATDVCNAVALCAYWIYIAHPESFSLAAQRELGGKILLRMLSEEYVLTMTVLGSA

SEQ ID NO: 230263 - protein, 61 aa, Glycine max
  unsure (1)..(61): unsure at all Xaa locations
  Clone ID: PAT_MRT3847_49951C.1.pep
VVXYLLLSLVIIHELERVLCGTLLRELGKYCIRITLQVLHVVHKYCHKELKSCQVWIFMLW

SEQ ID NO: 230264 - protein, 87 aa, Glycine max
  unsure (1)..(87): unsure at all Xaa locations
  Clone ID: PAT_MRT3847_49952C.1.pep
GRIERNLLTSWYGRTDCSFDVVDISDTXGGTQAYYLERHYSRLKTFXAEAXPADTDIIYVDGMENADECDRSPAKLPCKDMPIDYIQ

SEQ ID NO: 230265 - protein, 293 aa, Glycine max
  Clone ID: PAT_MRT3847_49953C.1.pep
MGTIFPPHSLSPLLNIKPSPSRILLAPSPQPKSNSLFCSKPIVSSLRKNQTSSPKPSSGTSWLAHAQQGLAALAISLALNFSPVLFNGNALASEFDVLNEGPPKDSYVFDDAGVLSRVTRSDLKQLLSDLESRKNFRINFITVRKLTSKADAFEYADQVLERWYPSVEEGNNKGIVVLVTSQKEGAVTGGPAFVEAVGEKILDATVSENLPVLATDEKYNEAIFSTAKRLAAAIDGLPDPGGPTVKDNKRESNFKTKEETEEKRGQFTLVVGGLLVIAFVVPMAQYYAYVSKK

SEQ ID NO: 230266 - protein, 80 aa, Glycine max
  Clone ID: PAT_MRT3847_49954C.1.pep
ENAVRSISVAPFRGGRPIRVITFPNTIVHIEPDMTSRFQLLRTTTNGDLVQGIDLALAQVNVACATVDLTSSYTPTPLVE

SEQ ID NO: 230267 - protein, 62 aa, Glycine max
  Clone ID: PAT_MRT3847_49955C.1.pep
LPSTRAQVTSSNPFFISVSVLQPHLLLCIFFDPSCPLDSNPCFLITSQSIAPRYLEFGPCHR

SEQ ID NO: 230268 - protein, 45 aa, Glycine max
  Clone ID: PAT_MRT3847_49956C.1.pep
YVEISRVEETKKTAAYMKGADLLLDSILEMMLDRHHSIIEAVAHK

SEQ ID NO: 230269 - protein, 47 aa, Glycine max
  Clone ID: PAT_MRT3847_49957C.1.pep
KWVGGWCYKQGKGHGKNLLVQLGCIILKEWKRFKGMLSFWNGFFWLN

SEQ ID NO: 230270 - protein, 113 aa, Glycine max
  Clone ID: PAT_MRT3847_49958C.1.pep
MSSTVGQTIKCKAAIAWEAGKPLVIEEVEVAPPQAGEVRLKILYTSLCHTDVYFWDAKGQTPLFPRIFGHEASGIVESVGEGVTHLKPGDHALPVFTGECGDCAHCRSGKSRK

SEQ ID NO: 230271 - protein, 143 aa, Glycine max
  Clone ID: PAT_MRT3847_49959C.1.pep
MGEATERYAVVTGANKGIGLEIVRQLASAGIKVLLTARNEKKGLQALETLKDSGLSHLVLFHQVDVADATNVASLADFVKSKFGKLDILINNAGIGGVVIDDTDLITTAIMNRGAIPEDNGTKGITHTYELAEECLQINYYGA

SEQ ID NO: 230272 - protein, 19 aa, Glycine max
  Clone ID: PAT_MRT3847_4995C.1.pep
PLIIKILVVYLHNDSGFLS

SEQ ID NO: 230273 - protein, 192 aa, Glycine max
  Clone ID: PAT_MRT3847_49960C.1.pep
MGEATERYAVVTGANKGIGLEIVRQLASAGIKVLLTARNEKKGLQALETLKDSGLSHLVLFHQVDVADATNVASLADFVKSKFGKLDILINNAGIGGVVIDDTDLITTAIMNRGAIPEDNGTKGITHTYELAEECLQINYYGAKKTTESLMPLLQLSDSPMQSNLSSTLGQTREFAKETWDGNYKPGCRFPY

SEQ ID NO: 230274 - protein, 78 aa, Glycine max
  Clone ID: PAT_MRT3847_49961C.1.pep
LELEQLHLIFLITKTSLLREKVMETGTVSPEDIDSEGEQLDEISVIIGISIVNFASSILGTDIRVLTDTRRYHMLKDS

SEQ ID NO: 230275 - protein, 47 aa, Glycine max
  unsure (1)..(47): unsure at all Xaa locations
  Clone ID: PAT_MRT3847_49962C.1.pep
GXXEFSVEFXXRXXPLSEXFGXWLXXATXXRLLSATSVVXXNPSTXL

SEQ ID NO: 230276 - protein, 208 aa, Glycine max
  unsure (1)..(208): unsure at all Xaa locations
  Clone ID: PAT_MRT3847_49963C.1.pep
RNWIRPCRTVSFRGTHNVAEPKPGSSMAIFGLGAVELAGAEGAWIVAASRIIGVDLVSSIFEEAKKFGVNEFVNPKDHDKPVQEVIAAMTNGGVDRAVECTGSIESMLMSXECLYNGWGASGLVGVPNKDDAFKTHPVNFLNERTLKGTFYGNYKPRTDLPSVVEKYMNGELELEKFITHTVPFSEINKAFDYMLKGESIRCIIRMGE

SEQ ID NO: 230277 - protein, 57 aa, Glycine max
  Clone ID: PAT_MRT3847_49964C.1.pep
TRSHATDLTADSYNTQNNTGYTPIAMILPKHGAGYNCTCTLNKDTKQTDSANFSPIE

SEQ ID NO: 230278 - protein, 69 aa, Glycine max
  Clone ID: PAT_MRT3847_49965C.1.pep
VTRKYPRTPPFVLEGCPSGCDFSSSVVDNGEDKIVLLLFRPPLPFDFNALPFYDAPPDDDLPRPALCFL

SEQ ID NO: 230279 - protein, 76 aa, Glycine max
  Clone ID: PAT_MRT3847_49966C.1.pep
LWKRVYLKACWSSQRVARKFTIAITMSIIKLPIKPNCETNNFRNTRVLHCRLFYFSQIVVNFSWCQYPATSLTCYY

SEQ ID NO: 230280 - protein, 43 aa, Glycine max
  unsure (1)..(43): unsure at all Xaa locations
  Clone ID: PAT_MRT3847_49967C.1.pep
IFPDRERTDSGTYGCTAISNMGSYXAYYTLNGNDPSPVPCSSS

SEQ ID NO: 230281 - protein, 42 aa, Glycine max
  unsure (1)..(42): unsure at all Xaa locations
  Clone ID: PAT_MRT3847_49968C.1.pep
FCISTLFFFYTHLHRRILIFFYSPTKKIFAALSLNQXHFNNK

SEQ ID NO: 230282 - protein, 81 aa, Glycine max
  Clone ID: PAT_MRT3847_49969C.1.pep
FFDSIEQALKQLPREKIQIATKFGITKIDSSGMFVKGTPEYARSCCEASLKRLGVEYIDLYYQHRVDLSVPIEETVKRFFL

SEQ ID NO: 230283 - protein, 324 aa, Glycine max
  Clone ID: PAT_MRT3847_4996C.1.pep
MGSLPHVVEDCMGFLQLYSDGSIFRSNGIEFKVSPIQDNSITYKDYLFDKRFNLSLRFYKPQQQHIALSNKKVPIVIFLHGGGFCFGSRTWPHIHNCCMRLASGLQAAVVSPDYRLAPEHRLPAAVDDAVEAVRWLQRQGLSLREDAWLSGGVDFDRVFVVGDSSGGNIAHHLAVRLGSGSREMDPVRVRGYVLFAPFFGGEVRTKSEEGPPEHMLSLELLDRFWRLSMPVGKSRDHPLANPFGPGSPNLEQEKLDPILVIVGGNELLKDRAKNYATRLKELDKDIKYVEFEGCEHGFFTHDSFSSEVAEEVIQILKRFMLANF

SEQ ID NO: 230284 - protein, 76 aa, Glycine max
  Clone ID: PAT_MRT3847_49970C.1.pep
PPFSLALLMMAAGKVCHRKAQSKGVPGAGQCNVPKVLEQSFTYMVMMNTISLAMTQEGNQPSYPFLEMLLFPVFNL

SEQ ID NO: 230285 - protein, 47 aa, Glycine max
  Clone ID: PAT_MRT3847_49971C.1.pep
RRSKGLLYMELHQETCLNLLVLMIGWNFFHINKLAVTTPCYLIVFFF

SEQ ID NO: 230286 - protein, 92 aa, Glycine max
  Clone ID: PAT_MRT3847_49972C.1.pep
RVRVKLEALLCTSTYKSKKFNVSHNESPAFTGIGLNVNNKNPTTSLNTILKGFYTGAYQFQREEVLAAFFNKFEKFYDLFVNQGTVLFNSLV

SEQ ID NO: 230287 - protein, 195 aa, Glycine max
  unsure (1)..(195): unsure at all Xaa locations
  Clone ID: PAT_MRT3847_49973C.1.pep
MGAMFRSEEMTLCQLFLQPEAAYTSVSALGELGIAQFRDMNEDMNNFMRKFVSEVRRCDELERKLRYIEEEVRRDGVPIPDLDEMPMAPNPREIIDLEAHLEKTETEMLELSQNGVNLKSNFKELKEMKYVLEKAQHFMAEECDLFTAASTFVFQQEESDSNRALIGGDERGRLGFVAGVIPXDRVPGFERMLWR

SEQ ID NO: 230288 - protein, 101 aa, Glycine max
  Clone ID: PAT_MRT3847_49974C.1.pep
DEMKMGEISTSIASYMHENGLSEEKVHQYFKTLIDKEWQYLNKGQVMGSTLSKSVIQVAIDLGRTARYTYQCGDGIGRQDGITKRRMKLWLVDPVEVNEAS

SEQ ID NO: 230289 - protein, 67 aa, Glycine max
  Clone ID: PAT_MRT3847_49975C.1.pep
ERGLPQKGYNTRNMLTLVYLYACHLYDITSAVIICADSLEAIYYTLSPSSSSSYAYRVSPGLLARVR

SEQ ID NO: 230290 - protein, 333 aa, Glycine max
  unsure (1)..(333): unsure at all Xaa locations
  Clone ID: PAT_MRT3847_49976C.1.pep
REDDRRVTEDERRQLEDALRLESTDLNNESDEVIIGHRHSCYEEREIPIEDGNCNKSGENKQEKKGWFGGWRKKDSKPEASKKIAPPRSSLCVEEKVSDLLGDSPSRNQSKPGRHSVEIAVRGDESRRRKDAKASSANPDSRSRHKDGNRENEYKKGLRPILWLSPYFPLKTEELLPLLDIVASKVKAIRRLRELLTTKVPIGSFVVRSSLKRXLPMGTFPVKVAIPWVPTIRVLVTFTKFEELEPVDEFATPPSSPSAAEQESPAVPHFSASSWFQWIKAPYRSSTSAPGSSSRIENIEDPFAIPSDYTWVTAEAKKKKMQENKSKKGKRIN

SEQ ID NO: 230291 - protein, 628 aa, Glycine max
  unsure (1)..(628): unsure at all Xaa locations
  Clone ID: PAT_MRT3847_49977C.1.pep
MVNSGGYLLASHGFVTAAEFRTEAVSILEEEKADVIASEINQRDVPNHDTPLHLAVKFGDEVATELLKVAGANGSLQNEQSWSVHQEACCIIEEGMGNQLRNHYQPLRXAKFFGRVTGLVIITRKKLALYLESIWLFKKLGIFVITWISPLXSSKFXKRDSTRSADMTLAGXFDGIKSQISVHAILFLGDGSEDGKVPPGSLCMISHKEKEVLNALDDAGFPANDEEVQQEVVAMSKTNIFRPGIDVTQAVLLPQLTWRRQEKTEMVGPWKAKVYDMHNVVVSIKSRGVPGAMTDDELFSSCNENETESEELNDILTEDERRQLEDALRLESTDLNNESDEVIIGHRHSCYEEREIPIEDGNCNKSGENKQEKKGWFGGWRKKDSKPEASKKIAPPRSSLCVEEKVSDLLGDSPSRNQSKPGRHSVEIAVKGDESRRRKDAKASSANSDSRSRHKDGNRENEYKKGLRPILWLSPNFPLKTEELLPLLDIVANKVKAIRRLRELLTTKLPMGTFPVKVAIPVVPTIRVLVTFTKFEELEPVDEFATPPSSPSAAEQESPAVPHFSASSWFQWIKAPYRSSTSAPGSSSRIENIEDPFAIPSDYTWVTAEAKKKKMQEKNKSKKGKSHN

SEQ ID NO: 230292 - protein, 71 aa, Glycine max
  Clone ID: PAT_MRT3847_49978C.1.pep
RDRKVFSLTYNHHEQREADKKKSKEVKSYFSPLPRKSNYTGEVRIICLSILFVYLLFVRIISFKILLVFYN

SEQ ID NO: 230293 - protein, 43 aa, Glycine max
  Clone ID: PAT_MRT3847_49979C.1.pep
LVIGFNITSRDANCRLARPLYRSDQLPTMKKRKKRGGHALNTP

SEQ ID NO: 230294 - protein, 87 aa, Glycine max
  Clone ID: PAT_MRT3847_4997C.1.pep
LLYLSRNICALANNSFFWNYYIVLFYRQGMMCFWGISVVGVLGNILSRTYHHVSKFIKGMSMNISENFQRERNEKNRDGKVCVFVFP

SEQ ID NO: 230295 - protein, 74 aa, Glycine max
  unsure (1)..(74): unsure at all Xaa locations
  Clone ID: PAT_MRT3847_49980C.1.pep
TNXTSPSQKLPSXSSRHLHPIPQPXPHIPHKPLRPTNKILRLLIIQKQISSLRMRQFRDSHSSNMIIISINDIS

SEQ ID NO: 230296 - protein, 134 aa, Glycine max
  Clone ID: PAT_MRT3847_49981C.1.pep
EQNMGAPPSYEEAVGESRSPVHSERDAETSAPSAPRDSSPHVNDNPSQISALTGSFPVNNNPTEATTAASGAQETETTDDFFDPRGPSSAAPAAPATTNSVEMDLLGSLSDSFSSNALSLVPAASATAAPDANS

SEQ ID NO: 230297 - protein, 120 aa, Glycine max
  unsure (1)..(120): unsure at all Xaa locations
  Clone ID: PAT_MRT3847_49982C.1.pep
AGKCKRRXLLHFSQAHQTFRRAEFDAICQIKGISVVPNSPSDGIHIQSFEFQNDEFDVFRLLERAVLVKAAYELIAEGDGHEQVMAKLASDPSSSLARFDFADQSWSLLDSPHQKKRSGD

SEQ ID NO: 230298 - protein, 241 aa, Glycine max
  unsure (1)..(241): unsure at all Xaa locations
  Clone ID: PAT_MRT3847_49983C.1.pep
MSAKNLNFDADTALAKDFLSNFADANGEAKYMNILQDVANHKTRAVQIDLEDLFNYKDLDEEFLSRVTDNTRRYIGIFSNAIDELMPEPTEDFTDDDHDILMTQRSDEGVEGTDGSDPRQKMPPEIKRYYELYIKASSKGRPSTIREVKALNIGQLVRISGIVIRCSDVXMKVAVYTCEDCGFEIYQEVTARVFMPLFECPSKRCDTNRRKGNVILQLRAPKFLRFQEAKIQELAEHVPKG

SEQ ID NO: 230299 - protein, 256 aa, Glycine max
  unsure (1)..(256): unsure at all Xaa locations
  Clone ID: PAT_MRT3847_49984C.1.pep
CSQLQSYWLQVAVCRQFKPVTLELGGKSPFIVCKDADVDAAVEASHFALFFNQGQCCCAGSRTFVHESIYGEFVEKAKARALKRVVGDPFKNGVEQGPQIDSVQFEKIMKYIRSGVESGAQLESGGQRIGSKGYYIQPTVFSNVQDNMLIAKDEIFGPVQSILKFKDLEEVIRRANATSYGLAAGXFTKNMDTANTLMRALQAGTVWINCYDVFDAAIPFGGYKMSGQGRVRGIYSLRSYLQVKAVVTALKNPAWL

SEQ ID NO: 230300 - protein, 50 aa, Glycine max
  Clone ID: PAT_MRT3847_49985C.1.pep
NITNPGAVSHNEILEMYTDYIDPSYKCTNYNLEEQAKAIIAPRINNEMDS

SEQ ID NO: 230301 - protein, 540 aa, Glycine max
  Clone ID: PAT_MRT3847_49986C.1.pep
MQVMASRILSTLHYVCSSSASATKRCLGLYSHWQRSISGIAASVVADVEPSIAPVQIDQSQLLIDGKFVDAASGKTFPTFDPRTGDVIANVAEGDAEDVNRAVHAARKAFDEGPWPKMTAYERSRIILRFADLLEKHNDEVAAIETWDSGKTYEQAANVEIPMVVRLFRYYAGWADKIHGLTVPADGPYHVQTLHEPIGVAGQIVPWNFPLLIFSWKVAPALACGNTVVMKTAEQTPLSALYVSKLFLEAGLPPGVLNVISGFGPTAGAALCSHMDVDKLAFTGSTSTGKRVLELSAHSNLKPVTLELGGKSPFIVCKDADVDAAVEASHFALFFNQGQCCCAGSRTFVHESIYGEFVEKAKARALKRVVGDPFKNGVEQGPQIDSVQFEKIMKYIRSGVESGAQLESGGQRIGSKGYYIQPTVFSNVQDNMLIAKDEIFGPVQSILKFKDLEEVIRRANATSYGLAAGVFTKNMDTANTLMRALQAGTVWINCYDVFDAAIPFGGYKMSGQGRVRGIYSLRSYLQVKAVVTALKNPAWL

SEQ ID NO: 230302 - protein, 206 aa, Glycine max
  Clone ID: PAT_MRT3847_49987C.1.pep
MATTFLSLLFLIFSLLTPALISSSPVQDPEFVAQEVNRKINASVARRNLGYLSCATGNPIDDCWRCDPNWEKNRQRLADCAIGFGKNAIGGKNGKIYVVTDSGDDDPVTPKPGTLRYAVIQDEPLWIIFARDMVIKLKEELIMNSFKTIDGRGASVHIAGGPCITIQYVTNVIIHGINIHDCKQGGNAMVRDSPALRVDIRHGVDL

SEQ ID NO: 230303 - protein, 64 aa, Glycine max
  Clone ID: PAT_MRT3847_49988C.1.pep
QRLSCDGGNGMCASTRRAFNLGVDEAYHNRYKHSLKDVAAHTTDHVARQVFLPNHSILLLKREK

SEQ ID NO: 230304 - protein, 68 aa, Glycine max
  Clone ID: PAT_MRT3847_49989C.1.pep
CPMSLKLIFTIVTRLGTSRTYRVHAMLKSANSQNVQLVLVRQSLRVSYVCNNVIIMDCGVLCHMHQFF

SEQ ID NO: 230305 - protein, 204 aa, Glycine max
  unsure (1)..(204): unsure at all Xaa locations
  Clone ID: PAT_MRT3847_4998C.1.pep
MGSLPHVVEDCMGFLQLYSDGSIFRSNDIEFKVSPIQDNSITYKDYLFDKRFNLSLRFYKPQHVAPIDNNKKLPIVMFLHGGGFCFGSRTWPHIHNCCMRLASGLQAVVVSPDYRLAPEHRLPAAVDDAVEAVRWLQRQGLSLKEDAWLSGGVDFDCVFVVGDSSGGNIAHHLAVRLGSGSREMDXVRVRGYXVFAPFFGGEGS

SEQ ID NO: 230306 - protein, 288 aa, Glycine max
  unsure (1)..(288): unsure at all Xaa locations
  Clone ID: PAT_MRT3847_49990C.1.pep
PHFESWNAGVLGPITLSGLNEGRRDLTXHKWSYKVGLKGEALNLHSLSGSSSVEWLQGFLVSRRQPLTWYKTTFDAPAGVAPLALDMGSMGKGQVWINGQSLGRYWPAYKASGSCGYCNYAGTYNEKKCGSNCGQASQRWYHVPHSWLKPTGNLLVVFEELGGDPNGIFLVRRDIDSVCADIYEWQPNLVSYDMQASGKVRSPVRPKAHLSCGPGQKISSIKFASFGTPVGSCGNYREGSCHAHKSYDAFQKNCVGQSWCTVTVSPEIFGGDPCPSVMKKLSVEAICT

SEQ ID NO: 230307 - protein, 214 aa, Glycine max
  Clone ID: PAT_MRT3847_49991C.1.pep
MEELIISPSSSSSLVSLSQENPTPTLQQKLQFLLQSQPDWWVYAIFWQASHDDNGNLYLSFGEGHFQGTKETSPKSLTIPTKNKFLMKTPTNDNINDAEWFYVMSLTRSFAVNNNSSSNSTSCSSSSSLPGKSFALGSVLWQNNRHELQFYNCERSNEAHVHGIETLICIPTQNGVVEMGSYDTIKQNWNLVQHVKSLFHTSPDPTIQILDDHT

SEQ ID NO: 230308 - protein, 40 aa, Glycine max
  Clone ID: PAT_MRT3847_49992C.1.pep
FFRLPGRHTARFTHFVLLFLHLFLCHELLRCEGRNLRQIT

SEQ ID NO: 230309 - protein, 68 aa, Glycine max
  Clone ID: PAT_MRT3847_49993C.1.pep
YVQEAPKLTICFYRRHLITKNNKVLLKSPPQPKRGELKFMNSKRGEESPPPRNDPYHTPKELPHAPLT

SEQ ID NO: 230310 - protein, 233 aa, Glycine max
  Clone ID: PAT_MRT3847_49994C.1.pep
RVRGRVGSNLITPHTTHLPLLPPSTSSSSHMEDLIISPSSSSSLVSLPHENPTPTPTLLQKLQFLLQSQPDWWVYAIFWQASHDDNGNLYLSFGEGHFQGTKETSPKSLTIPTKKFMRAPTNDTNNINDAEWFYVVSLTRTFAVNNNASSSSSSLPGKSFALGSVLWLNNMHELQFYNCERSNEAQVHGIETLICIPTQNGVGEMGSYDTIKQNWNLVQDVKSVLITPADPGA

SEQ ID NO: 230311 - protein, 62 aa, Glycine max
  Clone ID: PAT_MRT3847_49995C.1.pep
QVSLSAFYSFYVGQQLISFFLFWSSQFRAAAHDPIPAISAYQKDELEVRSYESARSGEAHLL

SEQ ID NO: 230312 - protein, 81 aa, Glycine max
  Clone ID: PAT_MRT3847_49996C.1.pep
LQIQIINMLELNESHSINLHFPLTHIILFFTCIKLSKAQSSMEPVPTYITHHSWEPSVAITVGAIIIALLLMGIISIYLRR

SEQ ID NO: 230313 - protein, 62 aa, Glycine max
  Clone ID: PAT_MRT3847_49997C.1.pep
DARRMVCTNQVDMTGRLLAGSLAFECRIMHYLIVRILLPRSSNLAQVSEEDLIIMWVFLTGR

SEQ ID NO: 230314 - protein, 54 aa, Glycine max
  Clone ID: PAT_MRT3847_49998C.1.pep
MEKLPRSIRFDLLQIRTVKVSNISLVTSKKDIEEFFSFSRDIRYIEMPKERGHT

SEQ ID NO: 230315 - protein, 212 aa, Glycine max
  unsure (1)..(212): unsure at all Xaa locations
  Clone ID: PAT_MRT3847_49999C.1.pep
MKFLGLLNLAALASAVPTPTVQEVGKTINKRAAITDAANIGYATENGGTTGGAGGATVTVSSLAEFSKAAESDEKQVIYVKGQITGNNKIRVKSDKTIVGASGASLDNIGLYINKQKNVIVRNLASKNVVAANGDAIGIQKSTNVWVDHCELSSDFSKDKDFYDGLLDVTHASDWVTISNTYFHDHHKXSLVGHSDSNADEDTGTLHVTYAN

SEQ ID NO: 230316 - protein, 87 aa, Glycine max
  Clone ID: PAT_MRT3847_4999C.1.pep
PLANPFGPGSPNLEQVKLDPILVIVGGNELLKDRAKNYATRLKKLDKDIKYVEFEGCEHGFFTHDSFSSEVTEEVIQILKGFMLANF

SEQ ID NO: 230317 - protein, 155 aa, Glycine max
  Clone ID: PAT_MRT3847_499C.1.pep
PNQTDFAIGPFMHVAQDDLAGFEGTRRPGWFYKPGLGSAHKKIKLDHLYDIVLMSHYYQPKKNFSAFETECLAIGTIPKNLAAAAKDPFSSSSFFTLELVAAARHRTWSATRWSPCTCHLGLQLAAQNHKLAATPRRCTPGSALTAAPWSHFQWW

SEQ ID NO: 230318 - protein, 319 aa, Glycine max
  unsure (1)..(319): unsure at all Xaa locations
  Clone ID: PAT_MRT3847_49C.1.pep
MATLIAPITFSPGLDAEALRKAFQGWGTDEKTVIAILGHRNVHQRQQIRKVYEEIYQEDLIKPLESXMILDNVVQTKQRAVYRWMLEPADRDAVLANVAIKNGSKGYHVIVEIACVLSAEEVLAVKRAYHNRYKRSLEEDVATNTTGDIRQLLVGLVTAYRYGGDEINAKLAKTEADILHESIKEKKGNHEEAIRILTTRSKTQLLATFNRYRDDHGASITKKLLDNASTDFQKALHTAIRCINDHKKYYEKVLRNALKNVGTDEDALTRVVVSRAEKDLRDIKERYYKRNSVHLEDAVAKEISGDYKKFILTLLGKED

SEQ ID NO: 230319 - protein, 104 aa, Glycine max
  Clone ID: PAT_MRT3847_4C.1.pep
MASATGSGSSSGFGSPCGACKFLRRKCVTDCIFAPYFCSEQGAAKFAAIHKVFGASNVSKLLLRIPAHGRFEAILTIAYEAQARLRDPVYGCVSHIFALQQQVA

SEQ ID NO: 230320 - protein, 111 aa, Glycine max
  Clone ID: PAT_MRT3847_50000C.1.pep
APGGFFFLFGRLFGPQLEAPHTRGGRAFSCAVFFFSPKAGGGHHKMVFFFFSDPLVLFFFGSLAFSKVNFRPRAVSCGGGMRYKSNLVSTKIIRFLGFYKNKDTIIDQKYK

SEQ ID NO: 230321 - protein, 98 aa, Glycine max
  Clone ID: PAT_MRT3847_50001C.1.pep
DDHPHQSSVPPCCPLPIAHHHAHPFSISHFVPLVLPQMALCVASIMLIAVFYSVLLHLSHQAVRYVLPCLRSVNHNLSIVVMWHIVSSLCAIMHDGCK

SEQ ID NO: 230322 - protein, 199 aa, Glycine max
  unsure (1)..(199): unsure at all Xaa locations
  Clone ID: PAT_MRT3847_50002C.1.pep
MQDIPFCSLIVFFFLIGASLVSPLYDGPLYDSTAYTECKEKPEEPLYGGGLFKTEQHSRRGSIANNSYVPSLVLYNLTQGTIYSFSAWVRVKDSSSAMIRTTLETEKETHDCIGTVSAKHRCWSFLKGGFVLNWPSNLSIIFFQNADGKDINIDVASPSLQPFTKQQWRINQQYIINTXRKRAVTIHVSDSNGKEIGRS

SEQ ID NO: 230323 - protein, 79 aa, Glycine max
  Clone ID: PAT_MRT3847_50003C.1.pep
TLTQRHGTKHHVVLECLRRSSLCSSWHSSNLISATDAVTCHSHMAPWAGLTYEKPFKCILKIQMASLPSTYNGADLSLS

SEQ ID NO: 230324 - protein, 101 aa, Glycine max
  unsure (1)..(101): unsure at all Xaa locations
  Clone ID: PAT_MRT3847_50004C.1.pep
FLFLLVVLLFLVFALLCFFSFSCSVVRLRVFVCFSLAGSRARWSLRAPFSWFLVPRGVLPLFVWLLLLGGXVPSGVGALSPFENGPLVLLCVRATAGQMGP

SEQ ID NO: 230325 - protein, 64 aa, Glycine max
  Clone ID: PAT_MRT3847_50005C.1.pep
VFSSLKKRAWQFIFEHMYPLERFCQSLYVTLCFSHLPNSVVMGVFPILFSPFPTFSPIFLVLTG

SEQ ID NO: 230326 - protein, 75 aa, Glycine max
  Clone ID: PAT_MRT3847_50006C.1.pep
IESRGDSNPHLSFSSFIHQQCVRLWSDLATRLDDTKRLLAHAHHNRLFSIHPLAATSNLGSLHVAKFLVRTSVYT

SEQ ID NO: 230327 - protein, 92 aa, Glycine max
  Clone ID: PAT_MRT3847_50007C.1.pep
RDCSVSTKKMFHGLGCDQPHKILKAKGKSSRGPGPNFWSRKKKFWPLVLPKNPFLTVYPSSDLLYASLFRWCVGSPLLFGLNPFPKKGSFVC

SEQ ID NO: 230328 - protein, 65 aa, Glycine max
  Clone ID: PAT_MRT3847_50008C.1.pep
CKGSKTRSKRRPMGFIHNQASPSHIGIRTVGVEKACSFSIDSDLCISIVTWNMNGQVHPITNTYG

SEQ ID NO: 230329 - protein, 144 aa, Glycine max
  unsure (1)..(144): unsure at all Xaa locations
  Clone ID: PAT_MRT3847_50009C.1.pep
CGPKVPLPPGHSLPSSPPPAPPPPPQPLPPXPPIPSPYLPSLSLSNSKPPNPKLPPLTPLPALSGPHSSPTSPPPATSPPSPTKPSPPPPNVSPTPSSATPPPASPSHVTVLTFSGCFLRETLRRWLSTAPPFSSATPTTPSGR

SEQ ID NO: 230330 - protein, 97 aa, Glycine max
  Clone ID: PAT_MRT3847_5000C.1.pep
MGFRIPGIIRQASFSTAKATHKELEVPKGYLAVYVGDKMKRFVILVSYLNQPSFQELLSQAEEEFGYDHPTGSLTIPCKENEFLNLTSRLSELYIML

SEQ ID NO: 230331 - protein, 56 aa, Glycine max
  Clone ID: PAT_MRT3847_50010C.1.pep
LWNLEYKNISLTLGGRKQSLVSLVVFIPSNQPVWLGNEIIFRLVQNFERQFFVSPV

SEQ ID NO: 230332 - protein, 67 aa, Glycine max
  Clone ID: PAT_MRT3847_50011C.1.pep
KPVDDISVSLSPSVTKNFHGYHVCPIDMLILAGCGISLCFTCERKVTVCQSCLRLCIQNNKSTSVFH

SEQ ID NO: 230333 - protein, 59 aa, Glycine max
  Clone ID: PAT_MRT3847_50012C.1.pep
VNSDLMMMRQCCGQRCSVFRANRSLGHNGIARSPPHELTVLGWKIITTLAPLTNDPTFV

SEQ ID NO: 230334 - protein, 143 aa, Glycine max
  Clone ID: PAT_MRT3847_50013C.1.pep
PLASAVGNAAVVNHCDFPVYLWSVGGSVGPMVTIAPKGMYKEPLHHDPASGGIALKVTTHANGLYDGSAQTNFAYTLDGSTVWYDMSDVFGDAFSGHTLNVLPSDPTCRRICWGSGVAPSGSQVKDCQANSDITLNLCAAAKC

SEQ ID NO: 230335 - protein, 386 aa, Glycine max
  unsure (1)..(386): unsure at all Xaa locations
  Clone ID: PAT_MRT3847_50014C.1.pep
LKIKSWLQVVKVSVGTLFHGERILCDHVFASDSGKRIAESCFAEITKDGAVSLLGFPEMVAKCKKSPEXMFRILDLYEAISDYWPQIEFIFSFESTVNIRTQTVTSMVKLGDAVRTMLTDFETAIQKESSKKPVPGGGVHPLTRYVMNYLTFLADYSGVLVDIIADLPQSPLPESYYRSPMREENPPASELSERIAWIILVVLCKLDGKAELYKDVAHSYLFLANNMQYVVVKVRKSNLGFLLGEEWLAKHELKVREYTSKYESVGWSAVFSSLPENPAAELTAEQARACFVRFDAAFHEACKKQASWVVSDPKFRDEIKDSIASKLMQKYSVFFEKNRVGSKSVRDFLPDDIGKYLSNILCDGDSVSVSSHSSSTTSASHRSNRR

SEQ ID NO: 230336 - protein, 221 aa, Glycine max
  Clone ID: PAT_MRT3847_50015C.1.pep
MALPNQQTVDYPSFKLVIVGDGGTGKTTFVKRHLTGEFEKKYEPTIGVEVHPLDFFTNCGKIRFYCWDTAGQEKFGGLRDGYYIHGQCAIIMFDVTARLTYKNVPTWHRDLCRVCENIPIVLCGNKVDVKNRQVKAKQVTFHRKKNLQYYEISAKSNYNFEKPFLYLARKLAGDANLHFVESPALAPPEVQIDLAAQQQHEAELLAAASQPLPDDDDDQFE

SEQ ID NO: 230337 - protein, 124 aa, Glycine max
  unsure (1)..(124): unsure at all Xaa locations
  Clone ID: PAT_MRT3847_50016C.1.pep
MPNAGPAKWRQIVGDAMIEVSKLTXPTQACNSLSAQHIEMVELQTSSIFEAFHHKLVHSGEIQETVVRKISQEEWLTAWSTQVRPATTLWADRCPELYDTVHDSGVSTVAGDLVTGVNLTTLGH

SEQ ID NO: 230338 - protein, 51 aa, Glycine max
  Clone ID: PAT_MRT3847_50017C.1.pep
QVKIIIWSLKTNKFCELKKKISNSPYKSLFVNLQQIVPPNTALKTKIFAHL

SEQ ID NO: 230339 - protein, 214 aa, Glycine max
  unsure (1)..(214): unsure at all Xaa locations
  Clone ID: PAT_MRT3847_50018C.1.pep
MMPPGLVSNLQEVLLNRKGDSNSNSNSNNAEQHEQSSENSEPVEFDASKPIVLVTNSDGVESPGLTHLVEALVQQGLYNVHVCVPQSDKSVSAHSVTLRETIEAASAKISGATAFEISGTPVDCVSLALSGALFSWSKPMLVISGINRGSNCGHHMFYSGVVAGAREALLCGVPALSISLNWKKDESQENDXKDAVSVCLPLINTAIRDVEKGN

SEQ ID NO: 230340 - protein, 53 aa, Glycine max
  Clone ID: PAT_MRT3847_50019C.1.pep
PFQIVQAFLTTNQDLNSLSGKNHQACQTYKRPIIYSPTPSTEPSPVSESSTKV

SEQ ID NO: 230341 - protein, 89 aa, Glycine max
  Clone ID: PAT_MRT3847_5001C.1.pep
VVASMTFLRQVWLHGNQFSGTIPQNIRNLTSLQELNLNSNQLVGLIPDSLANMDLQILVLNNNGFMGPIPKFKADKVSYDSNLFDHSKP

SEQ ID NO: 230342 - protein, 387 aa, Glycine max
  Clone ID: PAT_MRT3847_50020C.1.pep
MTTSSGSLKNTIPPGLSTPLQEVLLNRKRPQQEPNNNAGPSSSTEDAHRRRLLQLESLNSKLIVLVTNSDSIESPGLTFLVEALVRQGLYDVHVCVPQSDKSASGHSVTRGETVEAASAKISGATAFEISGTPVDCVSLALSGALFSWSKPMLVISGINRGSNCGHHMFYSGVVAGAREALLCGVPALSISLNWKKDESQENDFKDAVSVCLPLINTAIRDVEKGTFPKSCLLNVEIPTSPLSNKGFKLTKQSMWRSTPNWLAVSTSRYPTGHFLANQGGLGLQFAQLGRDASAAGAARRLATQKKNLEIIESMGAAGKSDPNRVKKYFRLEFLDNQQEEEVDEDLDYRALESGYVAVTPLSLSPHIETVIQMAASDWISAVLPGEQ

SEQ ID NO: 230343 - protein, 87 aa, Glycine max
  Clone ID: PAT_MRT3847_50021C.1.pep
IHLLKKGREDYRKTRITQKACLRKVEPTRKRVLNKHIHLTEVETDHRLLGTLRPHQPRVFVLPKKGKPSRGGCRKSSKHGLYKNPGL

SEQ ID NO: 230344 - protein, 130 aa, Glycine max
  Clone ID: PAT_MRT3847_50022C.1.pep
MMPPGFVSNLQEVLLNRKGDSNSNSNAEQEQSSSENSEPVEFDASKPIVLVTNGDGVDSPGLTHLVEALVQQGLYNVHVCVPQSDKSVSGHSVTLRETIEAASAKINGATAFEISGTPVDCVSLALSGAL

SEQ ID NO: 230345 - protein, 87 aa, Glycine max
  Clone ID: PAT_MRT3847_50023C.1.pep
MMPPGLVSNLQEVLLNRKGDSNSNSNSNNAEQHEQSSENSEPVEFDASKPIVLVTNSDGVESPGLTHLVEALVQQGLYNVHVCVPQS

SEQ ID NO: 230346 - protein, 60 aa, Glycine max
  Clone ID: PAT_MRT3847_50024C.1.pep
RKTISPRKQIFPFLPPPFNLPFISKTGVPTKTGPKFITRGDSPPSGGPPLFFIIVLFFFF

SEQ ID NO: 230347 - protein, 54 aa, Glycine max
  Clone ID: PAT_MRT3847_50025C.1.pep
ERDTCVGRVTGEWGNNAGQYLAADNIESAIKTNESLNGHHKNVKCMCAEVTCTN

SEQ ID NO: 230348 - protein, 76 aa, Glycine max
  Clone ID: PAT_MRT3847_50026C.1.pep
APKSLKKLPSQMLNRPRSLLNHAKERLLHKVTNQKPIQTIDIAAPNSPHIFSQNRNGLIHKKYMRQMNLGTTNTNN

SEQ ID NO: 230349 - protein, 125 aa, Glycine max
  Clone ID: PAT_MRT3847_50027C.1.pep
MASLGSPSSSFWCYRCNRIVRVPQNDAVLLCPDCNSGFLEELQTPPHSRRSTRGGGGSPFNPVIVLRNANDVVSPETRNFELYYNDAVSGSSGPSTLRPLPQGVTEFLMGSGFDNLLDQLDGRGG

SEQ ID NO: 230350 - protein, 194 aa, Glycine max
  Clone ID: PAT_MRT3847_50028C.1.pep
RNSLEIFFLLIGHVNKMSHRKSHSHGSIPFSWEDKPGVCKTPNSDFPLNNIGINKKSCSPLPPPPFAPTHLSNSRRMLEIQDNEKIPLPPCPLQPPRRSTSEKEKGFRWQEDPFLVAYKECTKSEKNYKVPRKNKKGGVGSNFSLSKSIFSCKGTINDVKDDIYVKLPCLPAARDRSLTLEGEHKRGFNYETWL

SEQ ID NO: 230351 - protein, 227 aa, Glycine max
  unsure (1)..(227): unsure at all Xaa locations
  Clone ID: PAT_MRT3847_50029C.1.pep
SPAEDIFCHGHLLPHKGSSXVQASPPRSSTNSMDSFPLPIRELLEDDNHSIKDTSGSSNNSTSDSNNSSKRDQDNNNNIGKKVQGKSKFSFSLFGLTKGHKGYQDKEDKVKHKNKVRFDVIHAIKKYLRMVQPRMLFKGQREKIRPRGQCYSYSGNVTPKNYKLQDWRGQYSAPASMRTSPTNSGLLIATTPLPPASDSTMEELQAAIQAAIAHCKNSIAKEENLKC

SEQ ID NO: 230352 - protein, 73 aa, Glycine max
  Clone ID: PAT_MRT3847_5002C.1.pep
EACKITQCSLQGKNHEIIPKSAHKQDYQIMKALGDLPEQTQKKHMSPKPHTCYKGKNPPFPPRERHGIQNPPL

SEQ ID NO: 230353 - protein, 114 aa, Glycine max
  Clone ID: PAT_MRT3847_50030C.1.pep
GDQIHLKVHFIHSWVKQLMQLSQSKPINLLVEIKSFQIPVCTGINKHFNLIKKFKNKTLLFTKTLLYTGHFIGQTEWDYYKPANVTIKDLHFLGGENSTIKYQSFGIINKIVIL

SEQ ID NO: 230354 - protein, 58 aa, Glycine max
  Clone ID: PAT_MRT3847_50031C.1.pep
FNEKLNVYQHIYIKFIRYLHTSHVPDTKQNKSTATLCLRVDIHSERLSLNVIAFYRMG

SEQ ID NO: 230355 - protein, 71 aa, Glycine max
  Clone ID: PAT_MRT3847_50032C.1.pep
FFPSSSIHGCHWTSHVFRLTYLFFSFILAKVYWNMSAVISRQRSKSVVNIFGPIGILKIPIVPGPRVLVFN

SEQ ID NO: 230356 - protein, 95 aa, Glycine max
  Clone ID: PAT_MRT3847_50033C.1.pep
STTSNRRRGHLHSKLKQGRLPSGGGGARDKPVFHHHVIIEGTEGVVRPQGLAQRPNPSWSSPAYRSQQSIAISIYLLHINKVRVIGADKVLRRLR

SEQ ID NO: 230357 - protein, 110 aa, Glycine max
  Clone ID: PAT_MRT3847_50034C.1.pep
RFLINLYHRLPHLKTGNKNNRLLDFKNCSISAYFFVYDVIMGMKITLCAGHRLLESCYLALLAYLLNTLLFHRGLPVRYKRIMGLSEVSAQLQVSGCRKSGLVLPLSYMA

SEQ ID NO: 230358 - protein, 63 aa, Glycine max
  Clone ID: PAT_MRT3847_50035C.1.pep
AFSGSTTVIIAASSNSLMPLSLLNYLESHMSQLTSFISAIYDLILVYLLFTTSKSLITFYFIL

SEQ ID NO: 230359 - protein, 84 aa, Glycine max
  Clone ID: PAT_MRT3847_50036C.1.pep
GVKKDFTGQFSCDIESDGRVQIRGVLTGGSTITKQSRVFQMKIRQLCSPGPFTLSFSLPGPVDPRLFAPNFRPDGIFEGVVIKQ

SEQ ID NO: 230360 - protein, 84 aa, Glycine max
  Clone ID: PAT_MRT3847_50037C.1.pep
HDSDEMPRYGACEPPAGYDSRYLRPTTDETCKGRASHLIRRHLMLPGNQYLVLLPQLPWCNNSALLCRTCMHKYMVNTLLILCH

SEQ ID NO: 230361 - protein, 240 aa, Glycine max
  unsure (1)..(240): unsure at all Xaa locations
  Clone ID: PAT_MRT3847_50038C.1.pep
MEFLRCPVSAFLFPAFCFIIFFIFFPWKEQNYATHFPPPLVLSTIIKDLNNHTNIITSPSPSPSPSPSLQPPPLLPLELLSNFTPANESYNNTTVLSSTIMKYPSLEKIEEGLARARASIQESIRSRNYTSANXXNFVPKGSIYLNPXAFHQFKQXSLRXVXXKFKVLGCYEXGXXPLXHDGPANDIYSXXGQFLDEIXXEAXLGTXFXAEHPDQAXIFFLPFSIPMFVHYVYXPIPKAF

SEQ ID NO: 230362 - protein, 139 aa, Glycine max
  Clone ID: PAT_MRT3847_50039C.1.pep
ISDRGNCMGYHSQPKKQTGYPLIEGRELEVDASMPVEKIKSASNKRYIVVRRKLRHGEVYQLAPFMLQSDMPFRTTNNRKLKTRSVKIVVTAEELESLFSGSKRFQIRRRIAGVRRSFGLRGCQKWLPSLPTIQEVHNY

SEQ ID NO: 230363 - protein, 92 aa, Glycine max
  Clone ID: PAT_MRT3847_5003C.1.pep
KKGGFLFNPGAGLAIFHYTLAFGVLPKKFARGGAPPKWPISVFHVYRKTSPSPRGLSPPPLGWPTNPGGLTMSENPETTNSSWAPKPLLTAR

SEQ ID NO: 230364 - protein, 85 aa, Glycine max
  unsure (1)..(85): unsure at all Xaa locations
  Clone ID: PAT_MRT3847_50040C.1.pep
MIDITRNGVVKMKVLVNYHATILVAWQSHAYNMLSIQINTTYLILTSQVKCSTNYLTVLTHNIFNFXTIPHYNKQATMEYIHFLQ

SEQ ID NO: 230365 - protein, 83 aa, Glycine max
  Clone ID: PAT_MRT3847_50041C.1.pep
AWNSGSDVGPQESSRAFPPIDTTQVSLVDDALSSSNSSSSNNNNNNRLSMLRNKFGFLAGRNLMPCAFRRWANIDDISSTSFQ

SEQ ID NO: 230366 - protein, 108 aa, Glycine max
  Clone ID: PAT_MRT3847_50042C.1.pep
DTGIHICRIILLQNSTCLTFISIIFWLTMMLLPVSAAWNFKLFQRNVTVIIYPKFYPRQCCTLEQEQPKDNHNQHKKQFADWFDGKLEKKQKERREQRKYGCRTCLDS

SEQ ID NO: 230367 - protein, 96 aa, Glycine max
  unsure (1)..(96): unsure at all Xaa locations
  Clone ID: PAT_MRT3847_50043C.1.pep
THTYTAYKWGHRPDSCRXHVQGGTLNPCQMHIMEMIQGRRYDDYDDHDHDDILKTMRGXLNSVMRNEGIDEDYEXEGRVQKCCTQMSELRSPKCRC

SEQ ID NO: 230368 - protein, 98 aa, Glycine max
  Clone ID: PAT_MRT3847_50044C.1.pep
KKKGTSLYYKKTNFGDPLQGFLTPFFFDPGVPPRGPLFFYPVWRTNFLLTRVDHLQGCPPKKAPGFVPYAGNRKTAFANGANPFLGAPFFWGMEATKL

SEQ ID NO: 230369 - protein, 75 aa, Glycine max
  Clone ID: PAT_MRT3847_50045C.1.pep
RTRRRQKTAEGCILNFIIERPMSPGHLEPLGPVQITTHHTVLFTANVLSYGISLTTHDPTQHSRYIIQYKIRCAY

SEQ ID NO: 230370 - protein, 108 aa, Glycine max
  unsure (1)..(108): unsure at all Xaa locations
  Clone ID: PAT_MRT3847_50046C.1.pep
MWGAPIYPRLGLRLRRSLHLKILVHGGISKSGKRHAKPDDPNPCGEKPLHVEDPLFQATKHLKLLXKNSPDSLETHFLSFELYIRKHRMLFALHAEKQLLRLDAEHPY

SEQ ID NO: 230371 - protein, 66 aa, Glycine max
  Clone ID: PAT_MRT3847_50047C.1.pep
HLLYDWLAVLVMYLNPLTYEASGVCLLLLRNGSASNVSSTSVGPSYQAQRNAMSSESKFILHTWTR

SEQ ID NO: 230372 - protein, 433 aa, Glycine max
  Clone ID: PAT_MRT3847_50048C.1.pep
MAKTFKYIILGGGVSAGYAAREFAKQGVKPGELAIISKEAVAPYERPALSKAYLFPESPARLPGFHVCVGSGGERLLPEWYTEKGIELILSTEIVKVDLAAKSLISAGGETFSYQILIVATGSTVIRLTDFGVEGADAKNIFYLREVDDADKLYAAIKAKKNGKAVVVGGGYIGLELSAVLKLNNIDVTMVYPEPWCMPRLFTAGIAEFYEGYYANKGVNIIKGTVAVGFTSNSDGEVKEVKLKDGRVLEADIVVVGVGGRPQTVLVKGQVEEEKGGIKTDAFFKTNLSDVYAVGDVATFPLKLYGELRRVEHVDHSRKSAEQAVKAIKAAEEGKTVEEYDYLPYFYSRSFDLSWQFYGDNVGDTVLFGDNNPASSKPKFGTYWIKDGKVVGVFLEGGTPEENQAIAKVAKVQPPVADVNQLAKEGLSFASKI

SEQ ID NO: 230373 - protein, 85 aa, Glycine max
  unsure (1)..(85): unsure at all Xaa locations
  Clone ID: PAT_MRT3847_50049C.1.pep
MTNAYESQLTLLLIDDSTVRSSCMLLRRADDSYVVSYLSTXAMLCGISTVQLERKPVELQIRDTTRQERVRTMACSNYSGTHGII

SEQ ID NO: 230374 - protein, 45 aa, Glycine max
  Clone ID: PAT_MRT3847_5004C.1.pep
KPCLHFIHLRSGNQEISMLSWNLCIQTLYLCYIYEQTKLVGYSHQ

SEQ ID NO: 230375 - protein, 250 aa, Glycine max
  Clone ID: PAT_MRT3847_50050C.1.pep
MPIRNIAVGRPEEATHPDTLKAALAEFISTFIFVFAGSGSGIAYNKLTDNGAATPAGLISASIAHAFALFVAVSVGANISGGHVNPAVTFGAFVGGNITFLRGIVYVIAQLLGSIVASLLLAFVTASTVPAFGLSAGVGVGNALVLEIVMTFGLVYTVYATAIDPKKGNLGIIAPIAIGFIVGANILLGGAFSGAAMNPAVTFGPAVVSWTWTNHWIYWAGPLIGGGIAGLVYEVVFISHTHEQLPTADY

SEQ ID NO: 230376 - protein, 225 aa, Glycine max
  unsure (1)..(225): unsure at all Xaa locations
  Clone ID: PAT_MRT3847_50051C.1.pep
MPIRNIAIGRPEEATHPDTLKAGLAEFISTLIFVFAGSGSGIAYNKLTDNGAATPAGLISASIAHAFALGGNITLLRGIVYVIAQLLGSIVASLLLAFVTASPVPAFGLSAGVGVGNALVLEIVMTFGLVYTVYATAVDPKKGNLGIIAPIAIGFIVGANILLGGAFSGAAMNPAVTFGPAVVSWTWTNHWIYWAGPLIGGGIAGLXYEVVFISHTHEQLPSTDY

SEQ ID NO: 230377 - protein, 57 aa, Glycine max
  Clone ID: PAT_MRT3847_50052C.1.pep
HRMRGRFTKDVCPHYYCAISNYVHNSLIDSLCAIDMLSKSRCRDAQITTLIRLSSLV

SEQ ID NO: 230378 - protein, 88 aa, Glycine max
  unsure (1)..(88): unsure at all Xaa locations
  Clone ID: PAT_MRT3847_50053C.1.pep
MPIRDIVVGRPEEATHPDTLNAALADFIXSTFSFVFAGSSSGIAYIKLTDHGAVIPAGLISASIAHAFALFVAVSVGANIFGGHVIPA

SEQ ID NO: 230379 - protein, 59 aa, Glycine max
  Clone ID: PAT_MRT3847_50054C.1.pep
FSNWQRILNAWVMPYFLCCVDRRNERRVRSNSSSCQGFRLCIRSDSSLWTSVRWHESDS

SEQ ID NO: 230380 - protein, 45 aa, Glycine max
  Clone ID: PAT_MRT3847_50055C.1.pep
QYEFYNLPFKMVDILKGNHLFLACSDRVTDNCVAICCVAILVELA

SEQ ID NO: 230381 - protein, 107 aa, Glycine max
  unsure (1)..(107): unsure at all Xaa locations
  Clone ID: PAT_MRT3847_50056C.1.pep
MVNVAQLHKQVQSGNVNVDANGELMYVKVMTDEQLETLRKQIAVYGTICEQLIEMHXTLSAQQDLAGVILGNIYCDPLMTSGGHKITSRHMWTPTPVQLQILERIFD

SEQ ID NO: 230382 - protein, 83 aa, Glycine max
  Clone ID: PAT_MRT3847_50057C.1.pep
TDVAVPRLFTAGIAEFYEGYYANKGVNIIKGTVAVGFTSNSDGEVKEVKLKDGRVLEADIVVVGVGGRPQTVLVTGLVDEEKG

SEQ ID NO: 230383 - protein, 252 aa, Glycine max
  unsure (1)..(252): unsure at all Xaa locations
  Clone ID: PAT_MRT3847_50058C.1.pep
MPIRNIAIGRPEEATHPDTLKAGLAEFISTLIFVFAGSGSGIAYNKLTDNGAATPAGLISASIAHAFALFVAVSVGANISGGHVNPAVTFGAFVGGNITLLRGIVYVIAQLLGSIVASLLLAFVTASPVPAFGLSAGVGVXGNALVLEIVMTXFGLVYTVYATAIDPKKGNLGIIAPIAIGFIVGANILLGGAFSGAAMNPAVTFGPAVVSWTWTNHWIYWAGPLIGGGIAGLVYEVVFISHTHEQLPTTDY

SEQ ID NO: 230384 - protein, 56 aa, Glycine max
  Clone ID: PAT_MRT3847_50059C.1.pep
MGGFFLTFFSFLLPGGMNTNGTRCFITKNHWKHNNRGQHKNATINRKAIFPHHINP

SEQ ID NO: 230385 - protein, 74 aa, Glycine max
  Clone ID: PAT_MRT3847_5005C.1.pep
RVKKRETKSAFQGFILKGDGKISPKKLSQVLKTQGESSTLRACKKMVMGGKKNGKGFKNLNEFIRIIISRKKLP

SEQ ID NO: 230386 - protein, 168 aa, Glycine max
  Clone ID: PAT_MRT3847_50060C.1.pep
MPIRNIAIGRPEEATHPDTLKAGLAEFISTLIFVFAGSGSGIAYNKLTDNGAATPAGLISASIAHAFALFVAVSVGANISGGHVNPAVTFGAFVGGYITLLRGIVYVIGHLLGSIVAYLLLAFFTVVPVPAFSLSAGVRVCNSLVLDILMTFSLGYTFYSTVGRSHIG

SEQ ID NO: 230387 - protein, 134 aa, Glycine max
  unsure (1)..(134): unsure at all Xaa locations
  Clone ID: PAT_MRT3847_50061C.1.pep
MPIRNIAVXRPEEATHPDTLKAALAEFIVTFIFVFVVSGSGIDYNKLTDNGAYTPAGLISASIAHAFALFVAVSDGANIYGGHVNPDVTFGAFDGGNITFLRGIVYVIGQLLGSIGASLLLAFRTAFTVPAFGL

SEQ ID NO: 230388 - protein, 47 aa, Glycine max
  unsure (1)..(47): unsure at all Xaa locations
  Clone ID: PAT_MRT3847_50062C.1.pep
FDLLSKAEVFACTVXENPVRVXYYLDDTTXIVRLVQGLACVLEQIDQ

SEQ ID NO: 230389 - protein, 134 aa, Glycine max
  unsure (1)..(134): unsure at all Xaa locations
  Clone ID: PAT_MRT3847_50063C.1.pep
MPIRNIAVGRPEEATHPDTLKAGLAEFISTFIFVFAGXGSGIDYNKLTDNGADTLVGLISDCIAHAFDLFVAVSDGANIYGGHVNPAVTLGAFVSGIIYYLQGIVYVIEQLLGYSRAMLLLAFVTDFTVPAFGL

SEQ ID NO: 230390 - protein, 89 aa, Glycine max
  Clone ID: PAT_MRT3847_50064C.1.pep
PLSPTYYFDYSLLITGTVIISTGPIHFLISLYYFHYLFSSLKIHSSSHSHIILTLKNSHSYNIITLHTNATYYQFNNPNYIATIFTDTF

SEQ ID NO: 230391 - protein, 38 aa, Glycine max
  Clone ID: PAT_MRT3847_50065C.1.pep
PNLGRKVQSYLRKKEVFCSTLLKLRNWLLRNKKSLVIV

SEQ ID NO: 230392 - protein, 56 aa, Glycine max
  Clone ID: PAT_MRT3847_50066C.1.pep
NGNITNTSLSATEVKGNPQYYIGPGLETRKLLFFPDTNILQGSPKYAPTCKMPWPT

SEQ ID NO: 230393 - protein, 63 aa, Glycine max
  unsure (1)..(63): unsure at all Xaa locations
  Clone ID: PAT_MRT3847_50067C.1.pep
TMIASKMYXYIYFVENKGQLPYDDDMNREFCNMSLAISPNANIEKMLADFTHLFNKEVYIGHD

SEQ ID NO: 230394 - protein, 53 aa, Glycine max
  Clone ID: PAT_MRT3847_50068C.1.pep
FAFGKCWILCMIWNLCPLALVRLYNPLKEITHDPVVEHALPIRQFPHLFQLSH

SEQ ID NO: 230395 - protein, 67 aa, Glycine max
  Clone ID: PAT_MRT3847_50069C.1.pep
FRPTPKTVIFWEVILRLFFFGFPGRVGPKKIFVFPLFFQKKKNFFFVFKKLNKNLFFFKKCFEIATL

SEQ ID NO: 230396 - protein, 108 aa, Glycine max
  unsure (1)..(108): unsure at all Xaa locations
  Clone ID: PAT_MRT3847_5006C.1.pep
MSDPNSGSDVMTLKCTADLVYGGYVLNGNKIWXTNEPIAQSLVVYAKPDITAGSKGITVSIIDKGLPGSNTAQNLDQLGMPGSDTCELVFENCFVPNENILGIEWKGV

SEQ ID NO: 230397 - protein, 77 aa, Glycine max
  Clone ID: PAT_MRT3847_50070C.1.pep
VLSTHPSNGKTLTPGLSPSSMEILVKPVPKITPQCNLAAVHLIAAFLNHHSKFVSNFIYLYSARLYAKIYQSVLRRG

SEQ ID NO: 230398 - protein, 46 aa, Glycine max
  Clone ID: PAT_MRT3847_50071C.1.pep
QYWLCASFEKGCSFPCVLPFFIGWFYILSQIFLLLFSLASRLYMPS

SEQ ID NO: 230399 - protein, 75 aa, Glycine max
  Clone ID: PAT_MRT3847_50072C.1.pep
FGFRRVKENVADEILGHSPLPLPPILPPRRSHPLLHRASSSAPSCCFFIVRSRSLKPDKTDNGGHDSTCGKGRWG

SEQ ID NO: 230400 - protein, 53 aa, Glycine max
  Clone ID: PAT_MRT3847_50073C.1.pep
HTSFSPPPHHRIPLVPVAQKSTMSMTYRPLLVQHKTRVKNNANPPWDSHDNTL

SEQ ID NO: 230401 - protein, 70 aa, Glycine max
  Clone ID: PAT_MRT3847_50074C.1.pep
MPCLIVWLIKHADKDKTCDSFPMSNCFCQLIVNITRSAMHSQLNSAMMLHGSLKRNYVYMVTHKWCSDKN

SEQ ID NO: 230402 - protein, 274 aa, Glycine max
  Clone ID: PAT_MRT3847_50075C.1.pep
MKRYVYIDDDESSHDIYCDNRISNRKYTVLNFLPKNLWDEVSRVMNQYFLLIACLQLWPLITPVNPVSTWGPLIFIFAVSASKEAWDDYNRYLSDKKANEKEVWVVKKGIKKHIQAQDVHVGNIVWLRENDEVPCDLVLIGTSDPQGVCYIETAALDGETDLKTRVIPSACMGIDVDLLHKIKGVIECPYPDKDIRRFDANMRLVPPFIDNDICPLTIKNTILQSCYLRNTEWACGVAVYTGNETKMGMCRGIPEPKLTAMDAMIDKLTGAIFI

SEQ ID NO: 230403 - protein, 289 aa, Glycine max
  unsure (1)..(289): unsure at all Xaa locations
  Clone ID: PAT_MRT3847_50076C.1.pep
SVLHECLLTFLQIICDHDLFVEMPGRDPSDRNYLSSVLIQELFVTWDHEDLSLRAKAARILVVLLCKHEFDVRYQKPEDKLYIAQLYFPLVGQILDEMPVFYNLNSVEKREVSIVILQIVRNLDDASLVXEFGSRQSIARTRLFFKLMEECLLLFEHKKHADGMLLGSSSRNPVGEAPASPKYSDRLSPAINNYLSEASRQEVRPQGTPDNGYLWQRVNSQLSSPSQPYSLREALAQAQSSRIGASAQALRESLHPLLRQKLELWEENLSAXVSLQVLEVTEKFSMMAA

SEQ ID NO: 230404 - protein, 83 aa, Glycine max
  unsure (1)..(83): unsure at all Xaa locations
  Clone ID: PAT_MRT3847_50077C.1.pep
XEFFFCFLLFQFFKFGFFFPTIIINKVMVGYKVEDHFAQDKDTLIRNLLWETIFGARVVGEIPPLLTKLFEKRGGFKKKGGNT

SEQ ID NO: 230405 - protein, 62 aa, Glycine max
  Clone ID: PAT_MRT3847_50078C.1.pep
KTRHRPVISTHIKPCDQSKQQGRLGAGQKLSLKISIFASALDQESLENTRDDGTHNGLNIEP

SEQ ID NO: 230406 - protein, 100 aa, Glycine max
  Clone ID: PAT_MRT3847_50079C.1.pep
FTVPAPKGCMPQRGGSPSFFSPFDFFCRGGAHPGGEPGFFVVLTKKGGPPPVSRKGPPWVFSPPAGGLLGWRVGTLPPFFTLSQKPGWGIKGWVFSLGQP

SEQ ID NO: 230407 - protein, 75 aa, Glycine max
  unsure (1)..(75): unsure at all Xaa locations
  Clone ID: PAT_MRT3847_5007C.1.pep
SDVRLLRDLQQAEPSWTVVRVCCAKMGAGADHMYVVIKSLAGRYTSQNALLMXYTLGCKLDPDLVKGGIYLDYHR

SEQ ID NO: 230408 - protein, 119 aa, Glycine max
  Clone ID: PAT_MRT3847_50080C.1.pep
MSVEARRLAVLCAHLNPTRLLPDPPSSPRVSLTGSACASDSDTQNHTLQNDCVFCKIIRDQSPAVKLYEDDMCLCILDTSPLSHGHSLIIPKSHFPSLDATPPSVVAAMCSKVPFISNA

SEQ ID NO: 230409 - protein, 75 aa, Glycine max
  Clone ID: PAT_MRT3847_50081C.1.pep
KFLQHLLLAMFGHKMCSASPNKDFSYKEFYAKAVLDHTFGFTHIYVISFSLASFKNVVLSDSCAHVPANVNVPKM

SEQ ID NO: 230410 - protein, 133 aa, Glycine max
  unsure (1)..(133): unsure at all Xaa locations
  Clone ID: PAT_MRT3847_50082C.1.pep
RALFVPNMSKYSKVTXGASVIXXDLHGIXLSWQFNLQRIWEKITPGKKMTPLLEKDFKIDNKEILPPHEFLYDDASSGCHSHNYLARSAVIPSLPLTIKWLRDCVKDHPSPRLQVLVTGSLHLVGDVLKLLKR

SEQ ID NO: 230411 - protein, 88 aa, Glycine max
  Clone ID: PAT_MRT3847_50083C.1.pep
MVMLWEQYQPEFKKILKETPSKRGNKKGEVKNSEYGQEEEKEDMEGKLCRMQALKFSTGQIKLGRGRPTLLKFSEALKGIGWLPNVGT

SEQ ID NO: 230412 - protein, 42 aa, Glycine max
  Clone ID: PAT_MRT3847_50084C.1.pep
CVEIVIIGRRTICSCHALVAGFAHEEKSLCQVQTCGRTGRSE

SEQ ID NO: 230413 - protein, 152 aa, Glycine max
  Clone ID: PAT_MRT3847_50085C.1.pep
MLGGSGGERNSSVYRECLRNHAASLGSYATDGCGEYTVDGAGGLQCAACGCHRNFHRKVKYLAAAESPPTEYGGSNSKKRFRSKFTEDQKEKMLGFAEKLGWKLQRRDLDDEIERFCRSVGVSRQVFKVWMHNHKNSSSSSSTAANVSSLTQ

SEQ ID NO: 230414 - protein, 55 aa, Glycine max
  Clone ID: PAT_MRT3847_50086C.1.pep
VATSAYARKCLVYDVMDHLCLEMGVNVAVFFFFQTPSGLCPLGELSPSQLLSWIE

SEQ ID NO: 230415 - protein, 97 aa, Glycine max
  Clone ID: PAT_MRT3847_50087C.1.pep
CMDILLTSKRENVVICFCCNNNVCMSHSVTKPVAYASTFFSLIILGRKVASWPDIRRDRARSSFAPRASLLMSSVFSEVRVYRCCTRRLSSRRSKPA

SEQ ID NO: 230416 - protein, 90 aa, Glycine max
  Clone ID: PAT_MRT3847_50088C.1.pep
MKIEVGLGGVWNEDEKATVVEVLGRGAFDYLVANSVSNENLLMAFGCGENMQNKLSDLVERPNSSNFRWNYAIFWQISQSKYGDWVLGWE

SEQ ID NO: 230417 - protein, 112 aa, Glycine max
  unsure (1)..(112): unsure at all Xaa locations
  Clone ID: PAT_MRT3847_50089C.1.pep
WASXLVFSHFGLGPQSYFXFFFLHILKHGALIISVYASYYMIMIELINAFKYQWCRPLTVTLXGQQLVLLLFVCXSHDLLLLPVYWFLSPIXCSNLXSLLIRTFSPLXWFLL

SEQ ID NO: 230418 - protein, 150 aa, Glycine max
  Clone ID: PAT_MRT3847_5008C.1.pep
HTTTNCNVDNTTTNANASNTTTKGNEYNTTTNYNANNTTTNPNASNTTTNGNAIQHNNQLQRRRQHNNQRQRIQHNNQRQRIQPNKQRQRSQHNNQIQRIQQNKQRQRQRTQHNNQTQRKQQQKPSHRRLQQRHRAPRFCCPHHNTQRRC

SEQ ID NO: 230419 - protein, 30 aa, Glycine max
  Clone ID: PAT_MRT3847_50090C.1.pep
MDCCVCTTMPLILRPPRNTICGACYEELGA

SEQ ID NO: 230420 - protein, 89 aa, Glycine max
  Clone ID: PAT_MRT3847_50091C.1.pep
LKICENSIMLASKFSIFLYQAIQFLPNTIPATPKSSGELGFMNFPTFFVLSFWLIWAVYIFPTEIIGRKYYQICIGFFAAVVMTIFYCS

SEQ ID NO: 230421 - protein, 165 aa, Glycine max
  unsure (1)..(165): unsure at all Xaa locations
  Clone ID: PAT_MRT3847_50092C.1.pep
LENCSNALRSFNIYLQTGEVLEESHKIEIDLDEILKLEKIIWAHRLRATWLKHGDRNXKFFHQKASHRQKLNSTDKITNEEGMLIKDEEDIXVVILEFFEDLFMTSIPQDTDLVAQLVGGRIINDLRNVLNGDFTKEEAFEALNQMHPLKAPSLDGTPAVFYHKV

SEQ ID NO: 230422 - protein, 131 aa, Glycine max
  Clone ID: PAT_MRT3847_50093C.1.pep
MAMNHARSIRHILTTKEVVGVACQRTFATGKAKKGSKGGAAADAPKASTLSKEVKSSTVVGANILKEGTDPKIQPDSEYPDWLWHLLDKCPALSELRRRNIDTLSYEDLKRFVKLDTRARIKENNSVKAKN

SEQ ID NO: 230423 - protein, 452 aa, Glycine max
  unsure (1)..(452): unsure at all Xaa locations
  Clone ID: PAT_MRT3847_50094C.1.pep
TSAPAMIGWVKLGPLLSEEEFRFIVLSPIIELFGSRDRVARVGLPSQADPLGDXMXAQVVDEQVYPHVATGFSDTSAFLRELTLKSMLILAPKLSQRTFSGSLLKHMSKLQVDEEPAIRTNTTILLGNIASHLNEGTRKRVLINAFTVRALRDTFPPARGAGIMALCATSSYYDITEIATRILPNVVVLTIDLDSDVRSKAFQAVDQFLQMAKQHYEKTNTAEATEGTAIGISSLPGNAGLLGWAMSSLTLKGKPSDHAPVASVSSSARTPTSSNASPAVDAPSTAPVRVSSTPDFAEHLVPTSPTSTDGWGELENGLGENDKDGWDDLEPLEEIKPTPALVNIQAAQRRPVSQPVSQIKQASSLLSKSTPKLSKDEDGDLWGSIAAPAPKSSKPLSLKSTVTDDDDPWASIAAPAPTTKAKPLSAGRGRGAKLAAPKLGAQRINRTTSSGM

SEQ ID NO: 230424 - protein, 131 aa, Glycine max
  unsure (1)..(131): unsure at all Xaa locations
  Clone ID: PAT_MRT3847_50095C.1.pep
ATHPFILGVCTFGDQINCREAWATIYKDLVTDADSVIPKALDSFKSVENVKGNGRPRAIKKITFLEDGXTKCVLRKIYSIYEANWGYSYYALGDTALPDTVETITLYYXTLAGPNGXSAEKLTVTYETRRR

SEQ ID NO: 230425 - protein, 203 aa, Glycine max
  Clone ID: PAT_MRT3847_50096C.1.pep
HASGRRRRRRKFDKIDFDFQDFDIPPTKGKNGKGGNNGKNNNDKGHGSNNGNVGHHMGPMGQMGPMVQRGPMNQMGPMDHMRNMNINMPAVQGLPAATAAAAMNGGYYQGMQMQMQQPNPYNMQQQQQQQQLMAMMMNQQQQQQQQANMNMYPPHMMYGRPHPHQHQHPSMNYFPPPPMPSHPMADPITHVFSDENTESCSIM

SEQ ID NO: 230426 - protein, 118 aa, Glycine max
  unsure (1)..(118): unsure at all Xaa locations
  Clone ID: PAT_MRT3847_50097C.1.pep
PTMSNLGKVGESLRQRGXKRLIEVPCDDSRDLPLLAIRRXATRRGSKSIIGMIPEEFRGVFXIILLNVICHAVTPLERDRRMPVTSMKLAKALKRPGRALYGLGGYLIVSLRLITMKQ

SEQ ID NO: 230427 - protein, 274 aa, Glycine max
  Clone ID: PAT_MRT3847_50098C.1.pep
FLIFQNYLLKVNIHCDGCEEKVKKILQKIDGVYSVNIDAERGKVMVSGHVDPAKLLKKLKRSGKHAELWGGQRGMMYNQNYPTYPQFKNMHIDNTKGGSKDNKSQNHKGGAQKGGGGGGGGGGGGQLAHFQNANGGSKVPPKNQKSVNFNLSEDELDESDFDEFDDDYDEFEDDLEEEEEEEEYGNGYGHGGHGHGHGHGHGQQGQGHPMQHNKMMAMMGQVGNGRGPHGMNGPAMNGHKGNGGVNYGGVKKGEVIDLPIQIKGKGGNFNEGKK

SEQ ID NO: 230428 - protein, 531 aa, Glycine max
  Clone ID: PAT_MRT3847_50099C.1.pep
MSKQDMMKSQNCLLKVNIHCDGCEQKVKKILQKIDGVYSVNIDAERGKVMVSGHVDPAKLIKKLKRSGKHAELWGGQRGMMYNQNYPTYPQFKNLHIDNTKGGSKDNKSQNHKGGAQKGGGQLAHFQSANGGSKVPPKNQKSVDFNLSEDELDESDFDEFDDDYDEFEDDFDEEDEEEEYGHGHGHGHGQQGHPMQHNKMMAMMAQMGNGRGPHGPGGMMNGPAMNGHKGNGGVKKGEVIDLPIQMKGKGGNFSFSEGKNEIKGNGDGGQKNKGGKQKGGDNNHNNGNKKKNSKGKNGGGFLVRFLGLGKKNKKGGGGGGSADTTTSKNKNNNKGKKDGGKFDKIDFDFQDFDIPPTKGKNGKGGNNGKNNNDKGHGSNNGNVGHHMGPMGQMGPMVQRGPMNQMGPMDHMRNMNINMPAVQGLPAATAAAAMNGGYYQGMQMQMQQPNPYNMQQQQQQQQLMAMMMKQQQQQQMQANMNVYPPHMMYGRPHPHQDPSMNYFPPPPMPSHPMADPITHVFSDENTESCSIM

SEQ ID NO: 230429 - protein, 39 aa, Glycine max
  Clone ID: PAT_MRT3847_5009C.1.pep
LKKGSTLATEFPLQLTRETNAIHSTNFTYPKKHPKGKPH

SEQ ID NO: 230430 - protein, 55 aa, Glycine max
  Clone ID: PAT_MRT3847_500C.1.pep
EVKLSLSSLVIPIFLFNYHPFVNSCLHHFPSRFANTVGVCRTNASWCPAMTISGS

SEQ ID NO: 230431 - protein, 136 aa, Glycine max
  unsure (1)..(136): unsure at all Xaa locations
  Clone ID: PAT_MRT3847_50100C.1.pep
WKSSLDSTGLTPNDYACLRGYYSYIQLVQKKTIKKGERQHVVDITGIVVDSYTTQKQSNGHRTCRVSSLQTEKIETTTMPRQCRAXRTAMVYWPVMLTMVTIAAVCVCVALLFKSSPRVYYVFQPFNWESLEYGAM

SEQ ID NO: 230432 - protein, 129 aa, Glycine max
  Clone ID: PAT_MRT3847_50101C.1.pep
LVLIPMACLSFPQFLLLHRYHMTWSYCFTSFNTVQLGKLGPGCKWGHVAMARKKASLDSAIEEELSDNESLVEKKTTRSSKTKKETTRTRKKTKDESPGDTDSASIEGSTAASSDNSKKTQRTRKKDAS

SEQ ID NO: 230433 - protein, 75 aa, Glycine max
  Clone ID: PAT_MRT3847_50102C.1.pep
CRIPCVGGHQGKGSFTQTQLSCIRCHHLWLLLDACNIGSVDFLTLLSKRAGPFINGSIGLSFNTQRIKFFRMLVD

SEQ ID NO: 230434 - protein, 81 aa, Glycine max
  Clone ID: PAT_MRT3847_50103C.1.pep
VGDWDSADAPANDQKWVQPSDTPITRKRWSRGDGTQSQADTIAHRNVYSEHLYSWLRRLFHISKGAGLRFTDRVPGLQWRT

SEQ ID NO: 230435 - protein, 224 aa, Glycine max
  Clone ID: PAT_MRT3847_50104C.1.pep
TAARDDRRVSSSDSDYFFLYFVQMEKVRMEIDEKRKRQARRFIEAIEVGVMKKLKAKEEEIEKIGKLNWALEEKVKHLCMENQVWRNLAEANEATANALRCNLEQVLAQCGGIAAEEDRGGATVCGGAEMDDAESCCGSTEEDCEGKKVGWRTLAGCAGVKDKDEGGESSNGNGRMCRNCGKEESCVLILPCRHLCLCTACGSSLHICPICKSFKTASVHVNMS

SEQ ID NO: 230436 - protein, 85 aa, Glycine max
  unsure (1)..(85): unsure at all Xaa locations
  Clone ID: PAT_MRT3847_50105C.1.pep
MQIFVKTLTGKTITLEVESSDTIDNVXKAKIQDKEGIPPDQQXLXFXGXQLVEAYLADYNFXRXVFHSSSSXXGXRXFXKTXATD

SEQ ID NO: 230437 - protein, 43 aa, Glycine max
  Clone ID: PAT_MRT3847_50106C.1.pep
ANYIEHPFVIFPSRGHLLTSHTQAYTKRHCRPSHTSVHISHHL

SEQ ID NO: 230438 - protein, 155 aa, Glycine max
  Clone ID: PAT_MRT3847_50107C.1.pep
APSAEEEKPFLFICSTSMASSCRGYSKAQMCFFKILRIISSTPPSKQQQPFPTKGVGIDLNLRFRSVTETEESESSRSDNDNASATAQTNSNEGFPEKSVEVSEKLDNNNNNNTTNEVNNHAETASFKGRDGNCFDLLIEAARVVSGREESDSEE

SEQ ID NO: 230439 - protein, 402 aa, Glycine max
  unsure (1)..(402): unsure at all Xaa locations
  Clone ID: PAT_MRT3847_50108C.1.pep
MEAAWATILTLILILALICAWKVLIWLWLRPKRLEKLLREQGLQGNPYTLFVGDSKEFLKMRKEALSKPMNLSDDIIPRVSSYEQHSVNKHGKNSFIWLGPIPRVTILDPEQIKDVFNKIYDFPKPNMNPLVKLLATGLAGYEGEKWSKHRRIINPAFNLHQLVLHDRAASAADENGNEEEELYGRFNNSGSGSINTSLSASASSASLTNGSAPVYPAAVTQRSGGETWFEVGQFKTYTPTADDIGHVLKFECTVVDAETKLTVGHVNTLLTSRVIPAPSPSPRRLIPVDGMGHLDADGRITSSGTFTVLSYNILSDAYASNDLYNYCPTWALSWPYRRQNLLREIVGYRADIICLQEVQSDHYEDFFSPELDKHGYYXFYKRKTNEVYNGKXNTIDGCATF

SEQ ID NO: 230440 - protein, 65 aa, Glycine max
  unsure (1)..(65): unsure at all Xaa locations
  Clone ID: PAT_MRT3847_50109C.1.pep
ESSNGSARVDXPSRETQITVSXNWEVVNGSISSSVWTTVNGGSEQEMHYMTNANAXNIVKDDFXN

SEQ ID NO: 230441 - protein, 85 aa, Glycine max
  unsure (1)..(85): unsure at all Xaa locations
  Clone ID: PAT_MRT3847_5010C.1.pep
XQDGCSQRAKTLPRTKTXSNYCCKXHYPXSXSXSQFAPEHXSXMXXXXAQSYDHCMRXLSSXVKXQYPXSXNQFTXELFYTNQTX

SEQ ID NO: 230442 - protein, 97 aa, Glycine max
  Clone ID: PAT_MRT3847_50110C.1.pep
PPPPIFWVSEVKEIFLSSKSGPIGVFPNLAPISPPVNIGFFKKRFFKNPWLTMAFMGGFSRITHNEIPVLVNYAEKGCALYPPKAPPTFLITKGGVD

SEQ ID NO: 230443 - protein, 66 aa, Glycine max
  Clone ID: PAT_MRT3847_50111C.1.pep
MVVSSNSCNAINCLSVLFIQPEHKNRAIYRHIPACSLPSSSQRAVPMCVRDAWEDRVGPPREFPAR

SEQ ID NO: 230444 - protein, 124 aa, Glycine max
  Clone ID: PAT_MRT3847_50112C.1.pep
SAVSHKSDVYSYGMVVLEMVGMKTNIKAEVSRSSEIYFPQWIYNCIESDQELGLQNIRNESDDKMVRKMIIVGLWCIQTNPSTRPAISKVVEMLDSEVELLQIPPKPCLSSYSTSPVHLSCETS

SEQ ID NO: 230445 - protein, 64 aa, Glycine max
  Clone ID: PAT_MRT3847_50113C.1.pep
LFFTHAFSFPSIQEFQRTYISFSTPKEGEKVFSSCQTPPFQVIFLLNRALFRHFKKEKKLFGNF

SEQ ID NO: 230446 - protein, 247 aa, Glycine max
  Clone ID: PAT_MRT3847_50114C.1.pep
MKISGDSTRPLRPFPPAIAAPSPDSDLQPLRRATRRHPRTPSTRLRRAGGHTGKRSRPETPLFKWKIHDGVRERSVGGDPLEEVGRKKEAPPHASVSARKLAAGMWRMQLPEEAAGDSGRRRGSRKIGEDRLGVQHGIGHVDHQFLSHHSGMMHGSAMMNASQSPRSISGTKDGHFCELKPSFQLSSTAMEGATKWDPVCLKTSDEVQHIYSQMKLLDQKVSTVSAVSALEAELEQARVQIQELETE

SEQ ID NO: 230447 - protein, 53 aa, Glycine max
  Clone ID: PAT_MRT3847_50115C.1.pep
SSRVEVCTLVKHDYKWESIQIFYRLEEISCVICMYVAKPMCFTVCVVYCGIFS

SEQ ID NO: 230448 - protein, 186 aa, Glycine max
  unsure (1)..(186): unsure at all Xaa locations
  Clone ID: PAT_MRT3847_50116C.1.pep
LEQDRNGCYRNAKWTVEIVENSNIIRLKSCYGKYLTASNMPFILRGTGKKVLQTLPTRLNSSVEWEPIREGVQVRLRTRYGQYLRGNGGLPPWRNTITHDVPHRTATANWXLWDVDIVKFSPKTTGLIXRPGPIPIPPPIHFLIPTPTNLSPCSSPSSSPLISKMDSLVKIDLRSNTTSESEDSEC

SEQ ID NO: 230449 - protein, 91 aa, Glycine max
  Clone ID: PAT_MRT3847_50117C.1.pep
NAGVLSFMTSKKPKSNYFTTPPKKNWINKIYFLPHPLPRNERQAKTNFIALRNDLIFQTHLFNLTFRSNKTMPTQPEMGDKPPPPKKKGRE

SEQ ID NO: 230450 - protein, 61 aa, Glycine max
  Clone ID: PAT_MRT3847_50118C.1.pep
YFILLVHSFNLNTWKRRSSSYMPHCRLSSSLMTEDSGVSMGGIVEVKCPQIPYIQDSMIPL

SEQ ID NO: 230451 - protein, 71 aa, Glycine max
  unsure (1)..(71): unsure at all Xaa locations
  Clone ID: PAT_MRT3847_50119C.1.pep
ALSLNGCFVNKWVQPCNFYKXKTLNVRTALPMPDIXHKLPERSILPRSLLLKLLPSASKIVEMKLVMKASD

SEQ ID NO: 230452 - protein, 72 aa, Glycine max
  Clone ID: PAT_MRT3847_5011C.1.pep
GLIKQLNAVIGVDKLTTLFRASNTSGCWVYGGPGVHRVGTRLELLGLCEMPVTIILRRLLNGGDKRNCCSAR

SEQ ID NO: 230453 - protein, 43 aa, Glycine max
  Clone ID: PAT_MRT3847_50120C.1.pep
ENLRMLVGPADTCTMLYLEPGFCLTSAWYCVVYGVDEGYIIDT

SEQ ID NO: 230454 - protein, 40 aa, Glycine max
  Clone ID: PAT_MRT3847_50121C.1.pep
INNHILDIIKIYNVQYSLLRNISYSQIFYISWVGSSEITS

SEQ ID NO: 230455 - protein, 35 aa, Glycine max
  Clone ID: PAT_MRT3847_50122C.1.pep
VVPLLVRFIGLGLTSFFLVKALWFVLMAHSSIQLC

SEQ ID NO: 230456 - protein, 534 aa, Glycine max
  Clone ID: PAT_MRT3847_50123C.1.pep
MRKDVRSEIDVLPQVSTSKEQASMSVRSISTRENIHTLLRQAKVTPNREFQDCHVSKFNRLQQGETCLQLECGVESRSNDIGDNGCLVESARETDKGNAPTANQTSPADAINDTEHHDTRMGSPIQRGNLNESDNASKISMVENLSTVRISPDDVVGIIGQKHFWKARRAIANQQRVFAVQVFELHRLIKVQQLIAGSPDILLEDGAFLGKSPPKGSTPKKLALEYVVKPRQQNLKRKDDSEKLNHKMECSAENAVGKTSLSSVKDGSHLSKCTPFPGNQHQTNVAADSGMGPWCFNQSPPGHPWLIPVMTPSEGLVYKPYPGPGFTGTGCGGGCGTLREDDRRGSFMNPGYGIPTSHQGVGAPPDTHPGSHGYLPPYGMPVMNSSMSESVVEQGNQFSALGSHGHNGHLPGGGKANHNTNNKSSCNLPVQRNGAISHVLKHQTSKDFELQETSASSPSEMAQGLSTGQVAEGRDVLPLFPMVPAEPESVPQSLETGQHTRVIKVVPHNRRSATASAARIFQSIQEGRKQNDSV

SEQ ID NO: 230457 - protein, 67 aa, Glycine max
  Clone ID: PAT_MRT3847_50124C.1.pep
FFIEKNEEKYTNSFSLYARNLPKHAHKIWLKTKIQASKQQKLDTNLNQQKLDTERTLYLPRISSRQG

SEQ ID NO: 230458 - protein, 57 aa, Glycine max
  Clone ID: PAT_MRT3847_50125C.1.pep
LELGKMVKCFDFFLSLNFGKMTKLLVWRTDKPQDDMPQTPNSQVTIVSRDHPRGGNY

SEQ ID NO: 230459 - protein, 54 aa, Glycine max
  Clone ID: PAT_MRT3847_50126C.1.pep
MPLSYSHYCKYPCTSRTDTIHFIRFWGEKLPCVQNFEKNNCRCSYLVHSTCIDP

SEQ ID NO: 230460 - protein, 65 aa, Glycine max
  Clone ID: PAT_MRT3847_50127C.1.pep
LLNNICYPLYIINFYCTNYKMKLYCDEKLFLHKLRNFDEMNLHLTWSSLQSSLARVVFPEPPIPE

SEQ ID NO: 230461 - protein, 109 aa, Glycine max
  unsure (1)..(109): unsure at all Xaa locations
  Clone ID: PAT_MRT3847_50128C.1.pep
PPRPLNPNIKNEFRLLKTSKNPDVSLGPTGLANFPQAWPEPGAWTAVRQLSDLLXKHLTRVINIPMYKSQTGIKPTTETVDQGILVPCQSPWITPLLPVXKPGTNDYRP

SEQ ID NO: 230462 - protein, 60 aa, Glycine max
  Clone ID: PAT_MRT3847_50129C.1.pep
QQTGTIGRLRLNATGTIRQQLERPNVCRVYPLSLSISIAPVIKDPSLHTHDCYIYNYYIL

SEQ ID NO: 230463 - protein, 130 aa, Glycine max
  Clone ID: PAT_MRT3847_5012C.1.pep
IELRDAPEEHPVLITEAPFTPTADREKMTQTMFETFNEPAMYDAIQADLSLYATGRTPCIELDSGDGGSHTDSIYEGDALPHANLRVYLADRDSTEYLALTPTARGYSFSTSGEKEIARDVKDKLAYAAL

SEQ ID NO: 230464 - protein, 84 aa, Glycine max
  unsure (1)..(84): unsure at all Xaa locations
  Clone ID: PAT_MRT3847_50130C.1.pep
DXYXXXVXXCXGTXITQIXEXLXXLKEVXXXLGLVALXXRIXFLTPXXISXYXLXEXXXLXXXKQXXYLXXRAEFRAYVRVXAT

SEQ ID NO: 230465 - protein, 138 aa, Glycine max
  Clone ID: PAT_MRT3847_50131C.1.pep
MDSRAVQTHAHEHHHISHNVGSHEVPRGEEHHHHDHEKKSVLKKVKQKAKKIKDTITKHGHHHDHDHERGHGYYYDDQHIPDDHDLGEEDEMDEYPEVHGAPIYDSAPVRGAAPGHANTLGRPGVNFGGQQYGSRTYS

SEQ ID NO: 230466 - protein, 75 aa, Glycine max
  unsure (1)..(75): unsure at all Xaa locations
  Clone ID: PAT_MRT3847_50132C.1.pep
VNLKKEYKGIFWQEEIIPFFQSATFPKECTSVQKFYIELSKXVKEKLGAVDPYFTKLAYAMVTLIEALDELTCTT

SEQ ID NO: 230467 - protein, 75 aa, Glycine max
  unsure (1)..(75): unsure at all Xaa locations
  Clone ID: PAT_MRT3847_50133C.1.pep
IYRIESYDVTSIPACIPMYLMSRLIKSLAFNWLISIXGSDKIFGRCVCFLNAPLKEXFHQETCRMIKALHKYDCL

SEQ ID NO: 230468 - protein, 44 aa, Glycine max
  Clone ID: PAT_MRT3847_50134C.1.pep
LQRVASRDVERMSLNLIIYRMPKVKPKYKRPLYRIQGYERVQAT

SEQ ID NO: 230469 - protein, 88 aa, Glycine max
  Clone ID: PAT_MRT3847_50135C.1.pep
LPVGGAAGVFRFRSRVPPAPRVGVVPSLFFGGPARGLPRGGDGPPPPGSYQGLFLPPPLGTCSAFFVFVAPVHVPLGFRVAGVLVFTK

SEQ ID NO: 230470 - protein, 67 aa, Glycine max
  Clone ID: PAT_MRT3847_50136C.1.pep
VIAQSYIFFLVKRSFSISIFRSWISLPSDLGGLGNSGFGEALQLLNREPLSRLFRICHLFPFLLFPF

SEQ ID NO: 230471 - protein, 156 aa, Glycine max
  unsure (1)..(156): unsure at all Xaa locations
  Clone ID: PAT_MRT3847_50137C.1.pep
MESAATALNNIINNNNTVPAVSPPPPPPPSSEPQPMNMNVNMNMNVVNTTEGTTPTPTPTTMVPPTTMVVPAVPAPTTTTLAVATTTPGSLDLFGKKKRGRPRKYDADGNLRVSARPTPTPPSGFTLSTPSEYSSSKRERGXHYNTTANNSYQQQL

SEQ ID NO: 230472 - protein, 44 aa, Glycine max
  Clone ID: PAT_MRT3847_50138C.1.pep
CVSTTNRNFPGRMGHMEGQIYLASPYTAAASALTGFVTDPREFL

SEQ ID NO: 230473 - protein, 131 aa, Glycine max
  Clone ID: PAT_MRT3847_50139C.1.pep
GSSSGVQRVLSRFMEMPEVRQSRKMLNQESFLRQMITKGQQQLTRQRNENRKKEMTNLMLQYLTAGKVVGNPSLVDLNDLSWLIDQNLNEIEKKITMLQIQEVVIPVIENEGHMNHVQGLESNMDTKKKQH

SEQ ID NO: 230474 - protein, 81 aa, Glycine max
  Clone ID: PAT_MRT3847_5013C.1.pep
SFWLCCYCFWADFGKLNASSYYTVVVDCGGTGTRVNVYEWMVGVKGISKGNLPVLLHSYPDNATRSSSLWKSYCEYHCMQT

SEQ ID NO: 230475 - protein, 103 aa, Glycine max
  unsure (1)..(103): unsure at all Xaa locations
  Clone ID: PAT_MRT3847_50140C.1.pep
MKMKDLGVFIDTALVAXQGHAYDMGPXRGSTDYGAHAREVKCSRWKLAVEAHNRAGFMTIPAESVGXTTDDIHGVQYQADYSSAYQRADFNARDLELYTEGTF

SEQ ID NO: 230476 - protein, 78 aa, Glycine max
  Clone ID: PAT_MRT3847_50141C.1.pep
ILRNIGRGQGGVGRCRLHGSASAVTDMRRSFEVRDMAAEALSGVVMVAKNRKRYVQDDQNIALLLQLLDPGEGNSGTN

SEQ ID NO: 230477 - protein, 214 aa, Glycine max
  unsure (1)..(214): unsure at all Xaa locations
  Clone ID: PAT_MRT3847_50142C.1.pep
VYKGTLGWAIPGTTTTKCHIPYNSVVCGTKARLIYPAVHVPRLVIARVCVGEIPGVFHIALTFYSDYDDEGAPTNRVFRPTWDLSKVTPECIARFKDNNPIGNIKVFMSIGDRGTQHPFKPLNNKSWIDNATDALTHLIMNEHYDLHVDCIDVLYKHMDASPGDFIDCVXQLIRNLKREGVLSDACIYHSLALNKNIIPSEYSAESFLDDWVHY

SEQ ID NO: 230478 - protein, 55 aa, Glycine max
  Clone ID: PAT_MRT3847_50143C.1.pep
KLCFLISMSCLFVSSQPSFKQIPFQGEARKGQPNLKSKTGKMTQGSLLLKWKALF

SEQ ID NO: 230479 - protein, 74 aa, Glycine max
  Clone ID: PAT_MRT3847_50144C.1.pep
MTESCDMPEELETHIYIGWKRAQEYDDECTWSSHRSWSFREESTRSSRGHDKRNRRRLKAIEDMRSGINGDWKQ

SEQ ID NO: 230480 - protein, 86 aa, Glycine max
  Clone ID: PAT_MRT3847_50145C.1.pep
HIRKRVRREGKRLGKSELSFPEHPEKMKNVSLFAIIRFCGLSSGGCSANDRQMLILDGGTNQDLLHKTFFARFIIPRWRCQILSHL

SEQ ID NO: 230481 - protein, 42 aa, Glycine max
  Clone ID: PAT_MRT3847_50146C.1.pep
FHFYRWAMFGFAVGLLTEYATGSDFVDQVKILLSNFGIVDLE

SEQ ID NO: 230482 - protein, 77 aa, Glycine max
  Clone ID: PAT_MRT3847_50147C.1.pep
SSTRAKGGCPRFDGNGATTRLGGLIPLKRGTNGTTPLGGHGLLLLICILTGCTLLCNELDYDLYAFRHDPTAQKLSP

SEQ ID NO: 230483 - protein, 182 aa, Glycine max
  unsure (1)..(182): unsure at all Xaa locations
  Clone ID: PAT_MRT3847_50148C.1.pep
MSMACSIPCIKIPTRSSSPSCTSSSSSYSLRFSSSKPHNSVTIRNSQAEGPIRRPVAPPIREPSSSSSAPQLQKPTLPSQPPSPSSSPPQKPATVVGDDKNVITLEFQRQKAKELQEYFKQKKLDEADQGPFFGFIGKNEISNGRWAMFGFAVGXLTEYATGSDFVDQVKILLSNFGIVDLE

SEQ ID NO: 230484 - protein, 178 aa, Glycine max
  Clone ID: PAT_MRT3847_50149C.1.pep
MHQNPSLFLLSIMHSTSKSTSSYSLRFSSSKPHSVTIRNSQAEGPIRRPVAPPIREPSSSSSEASAPQLQKPTLPSQPPPSPSPPQKPATVVGDDKNVITLEFQRQKAKELQEYFKQKKLEQADQGPFFGFIGKNEISNGRWAMFGFAVGLLTEYATGSDFVDQVKILLSNFGIVDLE

SEQ ID NO: 230485 - protein, 140 aa, Glycine max
  unsure (1)..(140): unsure at all Xaa locations
  Clone ID: PAT_MRT3847_5014C.1.pep
INTDTFDRKHXSPTLAMIHGLXIHTGSLFLNFDTLASPFTDIAVDPLVWRGSSTPDFTCEITEXTEEWPIDSFDEWRKAKNLTNFILHQHSFGGYVAAKYALKHPAHAQHLILVASAGFSSESDATSEWIHKFRATWRDA

SEQ ID NO: 230486 - protein, 184 aa, Glycine max
  unsure (1)..(184): unsure at all Xaa locations
  Clone ID: PAT_MRT3847_50150C.1.pep
HASGRFHLPGIVGPRPCXVLCVLPGMIIPTMGALIYAIAEEPWMFLFVDLKLMFTLLFKIGLRLVLRXILAENVWSRSIKPKTFIESLPHECLFDILRKLPAGQDXGVWCASVSKXLLMLVSNICNTDIHSYXRTGYENHEISDQGYLSPNLEGKKGTDGKLAAIAVGTALXRGVGKLTIRGCH

SEQ ID NO: 230487 - protein, 85 aa, Glycine max
  Clone ID: PAT_MRT3847_50151C.1.pep
GTEQTSGPNLLKGRGNLAQANSGAQFNSIQFITNPFPPLPPLGPQKLKINSSPAKKTFPNPKTHFPSIKILNFWGPVNFFYFFRP

SEQ ID NO: 230488 - protein, 84 aa, Glycine max
  Clone ID: PAT_MRT3847_50152C.1.pep
KGAFRAPPRVNKNRHLEMVGHYPKHPPSYTFGVNPPKARKSFYSSKGTPPQNLPKLGSGIIRELPACFCYGRGNNLLRFFKTSQ

SEQ ID NO: 230489 - protein, 59 aa, Glycine max
  Clone ID: PAT_MRT3847_50153C.1.pep
AADDQLCYHNKIDSHKGPLLNPSSSYSYRSAQLFLSIHTGFRIPIATVLASRSPYFHSF

SEQ ID NO: 230490 - protein, 32 aa, Glycine max
  unsure (1)..(32): unsure at all Xaa locations
  Clone ID: PAT_MRT3847_50154C.1.pep
ILQLIEKHAAQLCVLAXNCDQPDYVKLVKPLC

SEQ ID NO: 230491 - protein, 88 aa, Glycine max
  Clone ID: PAT_MRT3847_50155C.1.pep
SRSRPTSSRSPLSSSTPPSRLARLRSPPTLTSPPLSPSSSSSSSRSSPPSSTSSPSSVAPSPSSSAPSSPSSSTPSMPYSSPSRTSVT

SEQ ID NO: 230492 - protein, 60 aa, Glycine max
  Clone ID: PAT_MRT3847_50156C.1.pep
RTNLNPFSIFTLIFHLISSDAAFLIYMYIYLSIYIYICKRKTNIHVAPIKIVIYGYKPSI

SEQ ID NO: 230493 - protein, 40 aa, Glycine max
  Clone ID: PAT_MRT3847_50157C.1.pep
YLETLSITQWTRAGHEYFTRTIGKLKSGNIKSPLHLQGLE

SEQ ID NO: 230494 - protein, 115 aa, Glycine max
  Clone ID: PAT_MRT3847_50158C.1.pep
KNSTALLHADNVNNTKPAGTFTKEYYINIILSSSNNNLGSNSNPSQPPTSPKTPNNKSMKILIIASAVAASLFLLLSFIIGYLIFRYVRRGSAAEDSSNPEPSSTRCRNFSLTEI

SEQ ID NO: 230495 - protein, 197 aa, Glycine max
  Clone ID: PAT_MRT3847_50159C.1.pep
MEISKHTNRSYEDFDPLFMWRREEGRDTLELHLPGFRRDQIRIQINHVGLLVISGERHFEGNRWKRFKKEFEIPSYCNDDAIHGNMMQSILSVVMPKKSPQISQEEQEHKKERRANKKEDTEEASTKEGIAEEDIGHAEEYHQFEENYNYVRQLPQETTREVALKFMLVMVLILVIASYLADVSKSLMAQGASYFHN

SEQ ID NO: 230496 - protein, 35 aa, Glycine max
  Clone ID: PAT_MRT3847_5015C.1.pep
RFDTSYNILSKTLDRVAILTDQQRIMFIRNRCQTV

SEQ ID NO: 230497 - protein, 121 aa, Glycine max
  Clone ID: PAT_MRT3847_50160C.1.pep
AFNILQAITLRKYPAKMSLATWVCFVGALQSSIVAIFAERHHPHAWSLGWDTRLFAPAYAGIVTSGVQYYIQGMVSKIMGPVIVTAFNPLRMIIVTALACIILSEQLFLGSIIGAVVVVLG

SEQ ID NO: 230498 - protein, 93 aa, Glycine max
  Clone ID: PAT_MRT3847_50161C.1.pep
RNQILHKTKHRQTVIQRCFPYNDYHYPPPAPFYNPFYLQKFFFFLAHIFLFFASLLFLYVTILTCLCFFHQTATPFNPFIFFIFSLPYLNTIF

SEQ ID NO: 230499 - protein, 135 aa, Glycine max
  Clone ID: PAT_MRT3847_50162C.1.pep
SLSGAFWARVCLYRSSFLGSFRGLAGSGFPGICFGGSWFFCPLCLASRCGTCGPAPGSGFCSSVGSRLRGLTGLPFFPCSLPRRCLVSWCAPGLILAGSSSFRPLVPPLSPWLSLPQGSLPWSNSSRGLAWVSLW

SEQ ID NO: 230500 - protein, 80 aa, Glycine max
  Clone ID: PAT_MRT3847_50163C.1.pep
MFPPMSTSLYGAFRGFSLRFIFLLYKILTFPKIPFSSRIKLQRLSLQNGIPQIKELIICSEPKATKLYFNLSVFKMAYLK

SEQ ID NO: 230501 - protein, 97 aa, Glycine max
  Clone ID: PAT_MRT3847_50164C.1.pep
PRVRTAARRRQKGHFLFHLISIFFLFSKLLHCFPPFKLGLGCWILLLGIVLFFLYIFIRFSVDIDRRLVNQEPRQLNSERNIFLWAEKLLFFTAMMG

SEQ ID NO: 230502 - protein, 46 aa, Glycine max
  Clone ID: PAT_MRT3847_50165C.1.pep
IGYYRRGIWCEVRGDLFKIKRCCMLSALAPLRVDHRKSSYKSVRKR

SEQ ID NO: 230503 - protein, 286 aa, Glycine max
  Clone ID: PAT_MRT3847_50166C.1.pep
MSSREEGMNKHKKNKNKINNDVVVDVDVGEGDVIEGVEFYSNGDFYEGEFHGGRCSGSGVYHYFESGRYEGEWVDGKYDGYGIESWARGSKYKGCYKQGLRHGFGVYKFYTGDSYAGEWCNGQSHGVGVQACSDGSCYVGEFKFGVKHGLGCYHFRNGDRYAGKYFGDKIHGFGVYHFANGHYYEGSWHEGRRQGYGMYMFRNGDGRCGEWDAGNLKLSLPPQNDAIIRTVQAARKTAENAINLPRKDDHVNKAVIAANRAATAARVAAVKAVQNQMGGKFCDIDV

SEQ ID NO: 230504 - protein, 52 aa, Glycine max
  Clone ID: PAT_MRT3847_50167C.1.pep
QQKGLFSSDQVWLATPDTKIRVQRFAPSRRAFYGAFAKSMIRLSSINGWTEG

SEQ ID NO: 230505 - protein, 65 aa, Glycine max
  unsure (1)..(65): unsure at all Xaa locations
  Clone ID: PAT_MRT3847_50168C.1.pep
EREEDRKDASWVDFHLHVQXSFDPFNGIYPQPQPXXHLLPXTPPFXKRSSPSTMTGSAPSSSSTG

SEQ ID NO: 230506 - protein, 112 aa, Glycine max
  Clone ID: PAT_MRT3847_50169C.1.pep
NLVSNAVKFTHEGKVGINLYVVPEPPFAKAEGHQKMITEQSTNSANGVKEEKRASTPRSSSDQNCLDGQKHNDHPSQNHAFNDECRSSVKSECSMNGDTDEQTHSTETVWIR

SEQ ID NO: 230507 - protein, 98 aa, Glycine max
  unsure (1)..(98): unsure at all Xaa locations
  Clone ID: PAT_MRT3847_5016C.1.pep
DRGIHVESTASLYPLSVAKILRKLGEIEKPGLVILGKQAIDDDCNQTGQMIAGLLNWPQGTFASKXVVLDKEKQVATVDREVDDGIETVCLNLPAVIT

SEQ ID NO: 230508 - protein, 155 aa, Glycine max
  Clone ID: PAT_MRT3847_50170C.1.pep
MKPLSKLLNKLCGKMIMLLASLLIELIILIQKLRESRPISTRQYIKLIEKKNPTICYTKRFNLKAEHATECRVCLSEFEQGEKLRKLKCQHTFHRDCLDKWLQQYWATCPLCRKQVLPDDVVFKHRQHQNQPEAASNGNHDNLLYLFSAFRGGNT

SEQ ID NO: 230509 - protein, 72 aa, Glycine max
  Clone ID: PAT_MRT3847_50171C.1.pep
NQAKENLILLNNQIMILAKTEGLQHHMSDENLFLLSQQLQWKHQKGAYTNNFLRIRNSRWWFMACASKSTRL

SEQ ID NO: 230510 - protein, 82 aa, Glycine max
  unsure (1)..(82): unsure at all Xaa locations
  Clone ID: PAT_MRT3847_50172C.1.pep
SYTTTNRFTQKNGIDYREEAFXPVSRKDSFRIIMTLVAHYDLKLHQMDVKIGFLKGDLEENVYMDQPMGFSIDGKEHMVCKL

SEQ ID NO: 230511 - protein, 197 aa, Glycine max
  Clone ID: PAT_MRT3847_50173C.1.pep
SHIQWKVFESSSSSSVENSTFDRPVIPVKRARSKRQRPSNFSPLFSIPLIVNLPAVRKDQRTAASDSAFGTNVAGNLSNKVKKQKKKDLSLLSDVEMTRSSSPESGSPRKCMHCEVTKTPQWREGPMGPKTLCNACGVRYRSGRLFPENRPAASPTFVASLHSNCHKKVVEMRSRVIQEPVRCSMLASSNLHGNSVG

SEQ ID NO: 230512 - protein, 86 aa, Glycine max
  Clone ID: PAT_MRT3847_50174C.1.pep
IQHIHNKFHVSNRKNRSFTLLIETPFQEAPAHVESNQIPFFAHLNYGRGRIKLIIYYYGDDISDKIEKLEQKMWQSLMVFVRTESL

SEQ ID NO: 230513 - protein, 154 aa, Glycine max
  Clone ID: PAT_MRT3847_50175C.1.pep
QCAPFPHSTKIMSKDIANMKDSWFFDNNFNGLSDEIFDDVINFFDFPLEDVEANGVEEDWDAQLKCLEDPRVDVYTASSAGLCAKTQNEKPQLGMKFSASGNGISPIKQLGKATGPVYGKTITHQNVTSNGKDLHQLTYTYSPVSVFESSSSFS

SEQ ID NO: 230514 - protein, 277 aa, Glycine max
  unsure (1)..(277): unsure at all Xaa locations
  Clone ID: PAT_MRT3847_50176C.1.pep
MFGSAQPSSSPFGTPSSTPAFGTPSSTPAFGTPSSTPAFGTPSFATPSSTPAFGTPSSTPAFGSSLFSTPFSSQQQQHQLPQQQQQQTPLFQQQQTSSAFGFQNSLALAAPQPSLFPNAQLTTQMANVAPVPFSLADRDVQTIVDAYKDDPGNPKYAFKHLLFSVTEPQFRVKPAGVSDIMWAEAMGKLEGMESADRERLWPQLVQGFKDLSQRLKIQDEVIVSDAERLRITQSNVXMLQRHFQADTLPWIIRLKRKEQIVQRRFLAVMRIVEALEE

SEQ ID NO: 230515 - protein, 87 aa, Glycine max
  Clone ID: PAT_MRT3847_50177C.1.pep
AAVDVGTLRDPQHDNERVKDPKWLIVIGVCTHLGCVPVANAGDYGGYYCPCHGSHYDASGRIRRGPAPLNLEVPPYEIKDDGIVVVG

SEQ ID NO: 230516 - protein, 109 aa, Glycine max
  unsure (1)..(109): unsure at all Xaa locations
  Clone ID: PAT_MRT3847_50178C.1.pep
KRGEXXKPXQADSATEXANKNAAGXXXXDXKKQQENTNANGEDKXRQERXGGNEGGTKKKNGNFFFFNDEKNRNDGIFFVYGIRGDREKHGNFFCYVGENGRENGKMEG

SEQ ID NO: 230517 - protein, 117 aa, Glycine max
  unsure (1)..(117): unsure at all Xaa locations
  Clone ID: PAT_MRT3847_50179C.1.pep
FILQPQTTAREVGTIEKMLDRLSCPDCLIHRALPELETKHTTPDDPERGISVARSRGXKDHRKGGXPYTRVRTEPXKNSTPQLMSTTTNGECVLGKDLAMVKVNVACAADGLTSSYT

SEQ ID NO: 230518 - protein, 52 aa, Glycine max
  Clone ID: PAT_MRT3847_5017C.1.pep
SLWTHPTFMIDNLQTLLYKRILEVYKSSLYICHIPVTKKFYIKYVKQHNLYP

SEQ ID NO: 230519 - protein, 54 aa, Glycine max
  Clone ID: PAT_MRT3847_50180C.1.pep
SISKDLRTSLNHGWRVTLLITILDASEASQHMHELSNQSHAKRISNKKKKKKGK

SEQ ID NO: 230520 - protein, 323 aa, Glycine max
  Clone ID: PAT_MRT3847_50181C.1.pep
VGWFCHSALLVPYFSWKISHGKHHKATGHMERDMVFVPKTREVYATRVGKAVHEISELAEETPIYTLLHSIVQQLGGWPMYLVANVTGHNNHDRQIEGKGKGKKNGVFGGVNHFNPSSPLYEKRDEHLILLSDLGIGLTVAALTVIGKTYGFNNLLVWYILPYLWVNHWLVMITFLQHTDPTLPHYDADTWTYTRGAAATIDREFGFIGRHLLHGIVETHVLHHYISTIPFYHADEATEAIKPVMGRHYRSDTKDGTVGFLKALWKSARWCQWVEPSVGAEGEGKGVLFFRNHNGLGTPPQKLDAPGAKKASKMEVGPESDNE

SEQ ID NO: 230521 - protein, 137 aa, Glycine max
  Clone ID: PAT_MRT3847_50182C.1.pep
MDVEKVVHTGGCHCKSVRWKVVAPSSVVAWDCNCSTCYMRANTHFIVPANNFELLGDSEKFLTTYTFGTHTAKHTFCKICGITSFYCPRSNPDGVAVTFRCVDPGTLTHVEIRHFDGKNWDSAYNQTGIFSFSKVQK

SEQ ID NO: 230522 - protein, 53 aa, Glycine max
  Clone ID: PAT_MRT3847_50183C.1.pep
ARIPKSSSRWKQRLGLRRGSSKKDKNKNNEGFQQTRVDDEKGFCSGQGDKTAS

SEQ ID NO: 230523 - protein, 204 aa, Glycine max
  Clone ID: PAT_MRT3847_50184C.1.pep
MEGSRRLRGHSIGVFSEGIGLVLFRWSTLLTAVENEWGGHESRVKADQLASDILSWFTQSKEPLYIDDLEDILDQGMLSLNVEVEDGSIEEVAEKLMVMHEEFLEDNFSSFENLRKANLEHAARPPVPQIVNDDEDDTDEDVGNDENMIVDDNSSNMNPETSTSVANTNSVNRSVNGPLPKVSGEADDGWVVVSNRRMRVEKIR

SEQ ID NO: 230524 - protein, 80 aa, Glycine max
  Clone ID: PAT_MRT3847_50185C.1.pep
VLQGNCYSRRCANYCLNINCIRFYKTDMPTAFFMQLLTDICTCLNGRIAVHQISLIISPNKVSIKNKIYTVKTSCLTQIV

SEQ ID NO: 230525 - protein, 115 aa, Glycine max
  unsure (1)..(115): unsure at all Xaa locations
  Clone ID: PAT_MRT3847_50186C.1.pep
GGYVDLCRGVWRIQGSLAVSRGIGDRHLXKQWVTAEPETKVLRIEPEHDLLILASDGLWDKVSNQEAVDTARSFLVGNNKSQPLLLACKKLVDLSVSRGSLDDTSVMLIKLEHYI

SEQ ID NO: 230526 - protein, 130 aa, Glycine max
  unsure (1)..(130): unsure at all Xaa locations
  Clone ID: PAT_MRT3847_50187C.1.pep
ITRASREDERDRIENXGGYVDLCRGVWRIQGSLAVSRGIGDRHLKQWVTAEPETKVLRIEPEHDLLILASDGLWDKVSNQEAVDTARSFLVGNNKSQPLLLACKKLVDLSVSRGSLDDTSVMLIKLEHYI

SEQ ID NO: 230527 - protein, 389 aa, Glycine max
  Clone ID: PAT_MRT3847_50188C.1.pep
MSCSVAVSNSPVFSPSSSLFCSKPSIISSSPESLSLSLSHLKPSNSSTTSSCSSPSAAASSSSSPSSPFRLRLPKPPTAFSASSSASSTSPNCTVLKRKRPARLDIPVSSLTFAVPPTPSVAARDVVEAEEDGFGVYCKRGRREYMEDRYTAGDNLRGEHKLAFFGIFDGHGGAKAAEFAANNLQKNVLDEVIVRDEDDVEEAVKRGYLNTDSDFLKEDLHGGSCCVTALIRNGNLIVSNAGDCRAVINRGGGGEALTSDHRPSREDERDRIESLGGYVDLCRGVWRIQGSLAVSRGIGDRHLKQWVTAEPETKVLRIEPEHDLLILASDGLWDKVGNQEAVDIARSFLVGNNKSQPLLQACKKLVDLSVSRGSLDDTSVMLIKLEHYI

SEQ ID NO: 230528 - protein, 60 aa, Glycine max
  Clone ID: PAT_MRT3847_50189C.1.pep
MVKARCPVEEKAAWDVKQSVAPVHGINLVIPVSAFDTMSHKGCSPSSIVVAFHQILCLVP

SEQ ID NO: 230529 - protein, 326 aa, Glycine max
  Clone ID: PAT_MRT3847_5018C.1.pep
MMSSDSVLPLPENPIIVGFGGVGVDFLAVVPSFPKPDSKIRTTEFTFQGGGNNGNTMTCAARLGLKPRIISKVSNDGPGKTMLEELEAEGVDTSFFVVSKEGTSPFSYVIVDNQTKTRTCIFTPGYPEMVPQDLSRANLLSALDGARMVYFDARMPDNALVIAQEAFHQNISILIDAERPREGLNDLLSLADYVVCSEKFPQAWTEASSIPRALVSIILRLPRLKFAIVTLGKDGCIMLEKCVDDEGSHIEEMDVDSCFVSLTTRKEDSTAMPTCIPSPVTKLRAEGIEESVCGRLYYGTSEKIPPSELELADPYRNPRHPLLSRV

SEQ ID NO: 230530 - protein, 187 aa, Glycine max
  unsure (1)..(187): unsure at all Xaa locations
  Clone ID: PAT_MRT3847_50190C.1.pep
MASDAKLSSSESLNGLKFGQKIYFEDVGFATPATSLTSSATTATTVTSSSSSSSRKGRGGSVQPAQPPRCQVEGCEVDLSNAKTYYSRHKVCGMHSKSPTVIVXAGLQQRFCQQCSRFHQLPEFDQGKRSCRRRLAGHNERRRKPPPSSLLTSRYARLSSSAFDHSGRGGNFLMELASYPKLSLRNS

SEQ ID NO: 230531 - protein, 55 aa, Glycine max
  Clone ID: PAT_MRT3847_50191C.1.pep
WLAWFGLIERRRRKKKPLFQKLHACLGLDYFTFPSKEPIIKILTEKLKNKRTILP

SEQ ID NO: 230532 - protein, 40 aa, Glycine max
  Clone ID: PAT_MRT3847_50192C.1.pep
FTTESSVSHEATVYQLFELRVLCCETTMSASSSRSVRVRA

SEQ ID NO: 230533 - protein, 141 aa, Glycine max
  unsure (1)..(141): unsure at all Xaa locations
  Clone ID: PAT_MRT3847_50193C.1.pep
PPPPNKIFFFPPPPKKRGGGKQKFFPPPPPPPLLGGGGKKKNPPPXNPQPQKFFFFFFLGEKKKSPPPPPFFKKNPPPPPRWGGGGFFSPPPILVPPRDSPPRFKKNSPLFCFVSPPFGKFFSPIFLPPQKKKGFANRIPG

SEQ ID NO: 230534 - protein, 62 aa, Glycine max
  Clone ID: PAT_MRT3847_50194C.1.pep
LLTGAKPRGLFAITKSRDKKWVVKNMSCLTTYSFFFFFATNNITYEGGFPKNHSSNPRFFRL

SEQ ID NO: 230535 - protein, 84 aa, Glycine max
  Clone ID: PAT_MRT3847_50195C.1.pep
RARRDTHARNMSVSLTAMTFNLHDDDPQDSPNSWEKRTDIFIRGFYQLLTHHSLYPTRSESAIGFSLTRLRPLSSIWDIPERAP

SEQ ID NO: 230536 - protein, 82 aa, Glycine max
  Clone ID: PAT_MRT3847_50196C.1.pep
GRGYWAPPRHDRKRREPKFQKTKHYGLITAKAKRGLPQKKKQESPAVWGISKKKAKNPPHLGGRYKKKLKNAPKTNVYYPQR

SEQ ID NO: 230537 - protein, 117 aa, Glycine max
  Clone ID: PAT_MRT3847_50197C.1.pep
FGKGSNSSNSLPSILGPLGALIFSNFRGAFFWNITPKIPGKHPWGVRKATPPSSPPKNGKTAPNFILLPVFQGIYVSFKGGNQRHFRFSKKHCLVFKNLEPLPPRVYFTKKFWSCLT

SEQ ID NO: 230538 - protein, 108 aa, Glycine max
  Clone ID: PAT_MRT3847_50198C.1.pep
TSGVAPLLTESVEATKVGTGKTIAIGTGTEPIIPFGLTSIMYGRTLKGSVFGGLKAISDLSIVANKCQKEEFPLQELFTHEVPLTDINKAFELLKKPNCVKVVIKMSR

SEQ ID NO: 230539 - protein, 109 aa, Glycine max
  Clone ID: PAT_MRT3847_50199C.1.pep
HASAHASAHASDNFQPSRKVFPVLDQDLNFLPYEDYESESPDNETDVESSPGFLVKKKRAPSDLVAKISLSDLVKYFGMPIVEASRNLNVVLTVLKRKCTEFGIPRLPH

SEQ ID NO: 230540 - protein, 247 aa, Glycine max
  Clone ID: PAT_MRT3847_5019C.1.pep
TVDRVDTLEDGVAKRQKVTSQVEPPLPDEVDDDWEDSKAAKSSDNSKARSASSRDNQKRQEGFEEEVVQDPQSAHLSSIRQHPDEIEPGFYKREHDAKQEPERNRMMLKGRERSYPYKDRHPSSAPQLHANTDGFDGQKERDNSEMDWARRDDDLYNRRVRNDEPRKRDRAKVRENERNDKEDSLHSRKQLDNGSYRVLYEKDVGSRDSRHRERDEGLRIRYEAVEDYRGKRRKDEEYLKREHIDKE

SEQ ID NO: 230541 - protein, 126 aa, Glycine max
  Clone ID: PAT_MRT3847_501C.1.pep
MNDFDGLLTTDFGFKPQGKSAPMAASKSSSSSNNNKTSSLNFDLGSRSARGASNSSVNAAATSLDDLFGDSSSVFRASADFRSKPVNDGPVFDKPVYDEDIFDGVPGLKSSSKVFYDDVFASGGSA

SEQ ID NO: 230542 - protein, 59 aa, Glycine max
  Clone ID: PAT_MRT3847_50200C.1.pep
HQQDTPPVRVFLLTTLIHKKEQNAQIPKLLTKENTPAHYLNKGFFESPPLQFISSKINR

SEQ ID NO: 230543 - protein, 46 aa, Glycine max
  Clone ID: PAT_MRT3847_50201C.1.pep
GSRNGSQNADCSFCTTASITRGGERAMGDKELKGGLKNRSRQLEQT

SEQ ID NO: 230544 - protein, 84 aa, Glycine max
  unsure (1)..(84): unsure at all Xaa locations
  Clone ID: PAT_MRT3847_50202C.1.pep
DLQKDPPTSCSAETQAEDMMHRQATITATAARTYAAGVFLVTTHCTSDYSFKPTKADTTTKVFYPNMKSMGSMCLXMLKEQWIP

SEQ ID NO: 230545 - protein, 81 aa, Glycine max
  unsure (1)..(81): unsure at all Xaa locations
  Clone ID: PAT_MRT3847_50203C.1.pep
FXLNTQQISXPDXSPLXPNXLLPXDXASQHXKPRFXSSISFXSQNLCISPRLSNSDQISPASASLAEAGEIXSSSKFFTST

SEQ ID NO: 230546 - protein, 56 aa, Glycine max
  Clone ID: PAT_MRT3847_50204C.1.pep
SKSTLKLLLPLADPAQALNVPVVPLGAMLAAAYPLSSRPPYVFSWLNTLISAEDMM

SEQ ID NO: 230547 - protein, 145 aa, Glycine max
  unsure (1)..(145): unsure at all Xaa locations
  Clone ID: PAT_MRT3847_50205C.1.pep
MRNPRWFSATYALPRRPKRRPVLKQPPISQSLTDFFDPQSPQEAKVAPLLARSNLLITRDIEWANLVLGFEQKLMEVGVLHRQWHLWRRIYDLYLGNKQFAVVENPGLWNWTFTLXDINGEVLAQIDRDWRRFGFEXFTDAGQYV

SEQ ID NO: 230548 - protein, 61 aa, Glycine max
  Clone ID: PAT_MRT3847_50206C.1.pep
INGPHCSYQEYGNRVNIGISLKHLQFLKATWQKMASGTTLAVDNQITLSVKSNLLFGNKKG

SEQ ID NO: 230549 - protein, 349 aa, Glycine max
  Clone ID: PAT_MRT3847_50207C.1.pep
MKNWSKEGWRWLSKIDFHGNVASKVIVTRRFGSGVNGGKENEMDVHKLTREFLVKLWVDDRKMRNPTDPVKSFGGYGDPRWFSATSAVPRRPKRRAVLKQPPISQSVSDFFDPQSPEEAKVAPLLARSNLLITRDIEWANLVLGFEQENRYAIVDACYPQSPVGFIREQSNIIARQLLRLRRPFVAYITDALGNELFRVRRPFWWITSSIYAEIDGKEVGVVHRRWHLWRRIYDLYLGNKQFAVVENPGLWNWTFTLKDINGEVLAQIDRDWRGFGFEILTDAGQYVIRFGSSDPSSKIGLASAIEDLEVSRKLTLAERAVTVALAISLDNDYFSRHGGWGLPFFVAEE

SEQ ID NO: 230550 - protein, 54 aa, Glycine max
  Clone ID: PAT_MRT3847_50208C.1.pep
MYNIVCTNVWFMCREQQGLVPLAGSNDESWCQGLDGLASRSAAYYQQGARFAKW

SEQ ID NO: 230551 - protein, 46 aa, Glycine max
  Clone ID: PAT_MRT3847_50209C.1.pep
VHTYYNASTVFNMIINNEITVTFLYEEDNILAFTYIHPQALIYITI

SEQ ID NO: 230552 - protein, 58 aa, Glycine max
  Clone ID: PAT_MRT3847_5020C.1.pep
HIISLWGGDRRRLEMYQICADTLCEAYAAHRSSIVERHLKLIFAVRGVVLNRRILLIH

SEQ ID NO: 230553 - protein, 37 aa, Glycine max
  unsure (1)..(37): unsure at all Xaa locations
  Clone ID: PAT_MRT3847_50210C.1.pep
LRSVACKPMPADESXSIQMHFSPRALMPFMLAEDXSR

SEQ ID NO: 230554 - protein, 474 aa, Glycine max
  unsure (1)..(474): unsure at all Xaa locations
  Clone ID: PAT_MRT3847_50211C.1.pep
MTEKKRKERDEGNRRRLKPKKKSNTQWKKTGPRLPSSLQKHIDRLNPTTSFDSADSDDDNDVYEYEEERAEEESKKNKRYDSASVDDDLAQDIEDENVQSDDESEDDDYTGTKRNENAPSDDSGEEDDDRHARMLQAITGMPSEAFEENKKKKKVMKDTVIPELYPESEYNPSRDVVDGDGRISIEDLLNPLREKSGYGKLRKRYQQIEKNAKIIHVPLSKAVQAKVERKAAYEISKKDVTKWQHIIQRNREAPTIFFDENVNLGFSTVGAIASEFEPRTEFEKKMAALVYDEEVMEAHKKDGSKLLEMNKVSIEDEKDRQNRIAKMRSLLFRHEMKAKHIKKIKSRTFHRLLKKDKLKAEASQIQMDPEAAKEYAMKQERQRAEERMTLKHKNHNPWAARIIQRGLHNQDEGTRAAIHEQLQRHAELTRKMKSMKGSSSSSEDSSDEDXDDNSAGSDQIGITDFGKAKKTVKV

SEQ ID NO: 230555 - protein, 50 aa, Glycine max
  Clone ID: PAT_MRT3847_50212C.1.pep
AGHRIFSSPQRTHHLHLILNSKYIGPPLKWNIKLDAYSYAYTTRECNRDD

SEQ ID NO: 230556 - protein, 61 aa, Glycine max
  Clone ID: PAT_MRT3847_50213C.1.pep
MDSMTCRQPKPDGVEATVELPMVSSIPTAHLGRWWVRLDGASGGAREWPETEKSLQQKEEE

SEQ ID NO: 230557 - protein, 60 aa, Glycine max
  Clone ID: PAT_MRT3847_50214C.1.pep
KKNGTDLTQGHSLPVCRVRYAEKGSEIATKSSESYEKDAYKAGEGSKANSSEPCVMGDEK

SEQ ID NO: 230558 - protein, 100 aa, Glycine max
  Clone ID: PAT_MRT3847_50215C.1.pep
VFLCRVVFSPLGGCSAFLLRVAGFLFLWVCGPRLVCFSFPSGFVRGVVVLFCVFLVFLGLLLLFPVFWSGRLWSRFVVFTVSVGRPGSSVPVPAGVPAFP

SEQ ID NO: 230559 - protein, 137 aa, Glycine max
  Clone ID: PAT_MRT3847_50216C.1.pep
MIQPSLESCTNDYVLPDSDGDDTLEATWRAIMEGQGKTMKPQLKKSDTWGARIAKAEPFHRNGEGGGGDDDPVAWAQKELKKSDTFNDRASLRRDKSMSPEELNRRAEAFIKKINNQMKLQRLESYQRFREMVNRGV

SEQ ID NO: 230560 - protein, 162 aa, Glycine max
  Clone ID: PAT_MRT3847_50217C.1.pep
MMTPNLNLEPENHSEGSSQVASNVSFHEASHDLKKGSTTTSSCLTKDETDPGSITLDLTLNFNNSGDGELKGSSDASSEVGAEAPASASATPRVFSCNYCRRKFYSSQALGGHQNAHKRERTMAKRAMRMGMFTERFTSLASLPLHGSPFRSLGLEAHSAMH

SEQ ID NO: 230561 - protein, 65 aa, Glycine max
  unsure (1)..(65): unsure at all Xaa locations
  Clone ID: PAT_MRT3847_50218C.1.pep
MLAVKLELKLLLQHQQLPRVFSCNYCRRKFYSSQALXGHQNAHKRERTMAKRAMRRGMFTERYTS

SEQ ID NO: 230562 - protein, 109 aa, Glycine max
  Clone ID: PAT_MRT3847_50219C.1.pep
EHRQEEGCDLPSVLPVGGNLVSIGSTAGSSGALSRNISHDRDNSQVTSPCSPHSSSHTLSLIISLSKSQSLEQSSLNVLSPVSSLISLSIPHYISPKNPIMYIVNSYVC

SEQ ID NO: 230563 - protein, 79 aa, Glycine max
  unsure (1)..(79): unsure at all Xaa locations
  Clone ID: PAT_MRT3847_5021C.1.pep
IGKDVQAMNSEVGEDALLSADLLHLYCLEKIARKHVGHGAXSTLSSSDLLHLAWTFASDLPLXLVHHIPAYTLDHFYSQ

SEQ ID NO: 230564 - protein, 119 aa, Glycine max
  Clone ID: PAT_MRT3847_50220C.1.pep
CTRKFYSSQALGGHQNAHKRERTMAKRAMRMGMFTERYTSLASLPLHGSPFRSLGLEAHSAMHRRHVPSSAAALRAPDMRAAAKFERNQFGSLVFVEDDDVGFFWPWQFQTGRPTRSWC

SEQ ID NO: 230565 - protein, 141 aa, Glycine max
  unsure (1)..(141): unsure at all Xaa locations
  Clone ID: PAT_MRT3847_50221C.1.pep
TRPSGVLTRPEQGKRAELLMYHSTKSGDEKTSLNDYVTSMKEGQSDIYYFTXECXKAVENSPFLXMLKKKVYEGVYMVAAFAXYAVGQLKESEGKKVDYASKQWLLFDLRGEDRSMLEELIEKSDNVFCVIKDALGDDADK

SEQ ID NO: 230566 - protein, 60 aa, Glycine max
  Clone ID: PAT_MRT3847_50222C.1.pep
GALTGLASENFISSRRAIIPALLGCYFFYRGITFTYERALGMTNDFSSKPVITRDQYLDC

SEQ ID NO: 230567 - protein, 60 aa, Glycine max
  unsure (1)..(60): unsure at all Xaa locations
  Clone ID: PAT_MRT3847_50223C.1.pep
NIFHSQTTIIVPPHNPYSXNFFLLTIHFPPYYPFKPPKISFITKFFHPNINSKFKPFPFI

SEQ ID NO: 230568 - protein, 173 aa, Glycine max
  Clone ID: PAT_MRT3847_50224C.1.pep
ATDGSNRSSSIPKDLLPLYRRCHQIGKDLLAANCNVCRRSSNLATCLDCSIVLCDGAGHLIEHIRTHPSHQKYYSHKLKRLVKCCKSTCKVTDIKDLLVCHYCFDKAFEKFYDMYTATWKGAGLAIMWGSICCEDHFTWHRMNCLNANVEESAYILKPDGHKGKRTQLSDFIF

SEQ ID NO: 230569 - protein, 75 aa, Glycine max
  unsure (1)..(75): unsure at all Xaa locations
  Clone ID: PAT_MRT3847_50225C.1.pep
NSTGNIQTINTQILFVLQFCETMDSSCCIKKLLVVLFPVSLNKYYEFSSCILFSLNKLNICILLXXGNNHISCVK

SEQ ID NO: 230570 - protein, 171 aa, Glycine max
  unsure (1)..(171): unsure at all Xaa locations
  Clone ID: PAT_MRT3847_50226C.1.pep
SWMPVYFKSVYNVNLKQAAWFSAVPWATMAMSXXLAGVASDFLINAGYPTIFVRKFMQTIGFIGPAVTLLCLNYANTPAVAATLMTIALSLSSFSQAGFMLNIQDIAPQYAGILHGISNCAGTIAAIISTIGTGYFVQWLGSFQAFLTITACLYFVTTIFWNLFATSEQIL

SEQ ID NO: 230571 - protein, 55 aa, Glycine max
  Clone ID: PAT_MRT3847_50227C.1.pep
KLEQAIGAQQTQRSGCIPVPQILVSLICMVGGLKQQCLSHSHFVSNILLEVQSIG

SEQ ID NO: 230572 - protein, 84 aa, Glycine max
  unsure (1)..(84): unsure at all Xaa locations
  Clone ID: PAT_MRT3847_50228C.1.pep
PLPPXEXXXRXLLFQNXLHXSLHLISHXXXXXXXXXXXXXXQPNCADXDTHXHXKTPPRTTLYLFTQKEKYILQNHDDVTLVSS

SEQ ID NO: 230573 - protein, 95 aa, Glycine max
  Clone ID: PAT_MRT3847_50229C.1.pep
HSSRPCPRISGGGFLMPIPVPAGNFSPTARPRMGQSPRGSPSCGENCHAYPHPLTPLIFFMSFIIYCFEFFYLSKKRKINFLLIKFVFTPQIYLN

SEQ ID NO: 230574 - protein, 166 aa, Glycine max
  Clone ID: PAT_MRT3847_5022C.1.pep
FSHVPQKGPGKILWPLVWRQFCLCYQGQKLVSEMDYIRDYGIKDGDQLHFVYHVSDTCSFERKQSKKRVVNLKQHMRSSSKVNRYQQKEHNDDKDIDLDDIVIENARIQHCNNAEENGGGKRSLAGILAGLFSHSRLAVVSRARIESMICCSMMARFIVSSRKIRR

SEQ ID NO: 230575 - protein, 223 aa, Glycine max
  Clone ID: PAT_MRT3847_50230C.1.pep
MARRLLPLTSLRHLSIAASRRLLSSALPVAPRPYPPLTARFAVVRCLCNRPGDSAYSPLNTGKPTSILSSITERPPTDMAPLFPGCDYHHWLVVIHKPGGEGATKQQMIDCYVQTLAKVLGSEEEAKKKIYNVSCERYFAFGCDIDEETSNKLEGLPGVLFVLPDSYVDPEHKDYGGELFVNGEIVQRPPERQRRVEPQPQRQQDRPRYNDRTRYVRRRENTK

SEQ ID NO: 230576 - protein, 170 aa, Glycine max
  Clone ID: PAT_MRT3847_50231C.1.pep
VFYREKAAGMYSPISYAIAQGLVEIPYVALQTIVFGVITYFMVNFERDVGKFFLYLVFMFLTFMYFTFYGMMAVGITPTQHFAAVISSAFYSLWNLVSGFLIPKSHIPVWWMWFHYLCPVSWTLRGIITSQLGDVEEMLVGPGFKGNVKEFIAATLEYDTKINGMSSVLL

SEQ ID NO: 230577 - protein, 135 aa, Glycine max
  Clone ID: PAT_MRT3847_50232C.1.pep
EFWGFGEWSPSSARSRFSVPAAAGLLGCSCRFAGLYSLSTTLRHRLPCHLRSGGRRRLHGSRFCHHPSSPRQGMHCPPVVGVSSYEWGHLRREVVALRQPQRKRRQRVLETWLCELGEAWISIWGFRSRGRARER

SEQ ID NO: 230578 - protein, 64 aa, Glycine max
  Clone ID: PAT_MRT3847_50233C.1.pep
ECDQPQISRAAERSIGSSSEVALHDILWTSVFTSSESWILHKQQTLTNSSRIICYGICCPLVSK

SEQ ID NO: 230579 - protein, 234 aa, Glycine max
  Clone ID: PAT_MRT3847_50234C.1.pep
CSEELSMTALDSSEFIGLNHRIEESKGNGEVSGGNGFELEIEKREEEEVEEEKEEEEEKEEEEEEELSEGDDSMYDYGSDGDGGNEMYLWKNKGYFEEPEVRNENSLFMNSSVAFGSRDLDDFLLQSGDISVMPDLFQNQRKKNDGVNMGSGRNEEGKDEKYVVRGNEVEETKDVGYFDSVEEVRDSEISADCDHVRDSDMLANIVESSPFIDCRNHVEPAGPGSDDFGLGAWK

SEQ ID NO: 230580 - protein, 46 aa, Glycine max
  Clone ID: PAT_MRT3847_50235C.1.pep
HSNLITLKLTKIKTSGCSEIRTTWHDLKNNLNEPQLKRTQTIFKEK

SEQ ID NO: 230581 - protein, 254 aa, Glycine max
  Clone ID: PAT_MRT3847_50236C.1.pep
PRVRFNHRIEESKGSGEVSGGNGFELEIEKREEVEEEEEEEEEELSEGDDSMYDYGSDGGNEMYLSKNIGYYEEPKVRNENSLFMNSSVAFGSRDLDDFLLQSGDISVMSDLFHNQRKKNNGVNKGSGRKEEGKDEKDMVRGNEVEETKDIGYSDAVEEVRDREISADCRRVRDSDMLANTVESSPSIDCQNCIETQVQGPESSYVGKVDEVDLDLLAKEVPDMGLDVNDGGCMEKGNATSEEAIGTGDAHGVK

SEQ ID NO: 230582 - protein, 53 aa, Glycine max
  Clone ID: PAT_MRT3847_50237C.1.pep
IHFCSFSHQLALHFQSTCKERVVCSTKRVLITYFLHSFHLYLPMLGIIKFITS

SEQ ID NO: 230583 - protein, 85 aa, Glycine max
  unsure (1)..(85): unsure at all Xaa locations
  Clone ID: PAT_MRT3847_50238C.1.pep
MDKVLTSIAKKIKNFXVIYLINITKVPNFNTIYELYKPYTIMFFFKNKHIIIYLKTRNNNNINXTLKDKQYFINIIKTIYHNTRK

SEQ ID NO: 230584 - protein, 143 aa, Glycine max
  Clone ID: PAT_MRT3847_50239C.1.pep
MREQSFGDKMHGITLPLTATANSFLLRSPLPSCFIPTCKVSYGFRFNHSQWKHHKTEGWSNRNRTMVVRARRSESPYDVLGVSPSASVDEIKKAYRKLALKYHPDVNKEDKAQEKFMRIKHAYNTLLNSSSRKNMILEVEGMI

SEQ ID NO: 230585 - protein, 104 aa, Glycine max
  Clone ID: PAT_MRT3847_5023C.1.pep
KANQQRNGKALKLGGLKKNVIRGSPKPPPLKQNGKRGFATGDKKPNFGNKSCEMMGETSNYVRKTSFLKTKTQGQETNIYCDHKKRHPLMNQTGRFTFFFGQPW

SEQ ID NO: 230586 - protein, 98 aa, Glycine max
  unsure (1)..(98): unsure at all Xaa locations
  Clone ID: PAT_MRT3847_50240C.1.pep
ALITHAKCYSVAQRLPMCTFAVDAMFKQLGIVFFCARINARCGRVMAYAIAPATXVLWSAHLYSITVWCVNLSTQPCFCAIGSLACELIFYCYTVGVS

SEQ ID NO: 230587 - protein, 75 aa, Glycine max
  Clone ID: PAT_MRT3847_50241C.1.pep
DRNFVHLYNPFIKGNGVSTMSVRELSYFILDSYNIHYHLGGHGDPALLQPQHAWITRRTLCLASLYPTTKMINSL

SEQ ID NO: 230588 - protein, 94 aa, Glycine max
  Clone ID: PAT_MRT3847_50242C.1.pep
NTFPVRTSFCNSLIASDSNRLNFRDRLWNRISHSYCSCSISIESSMLLMAWYLCIGRLLLYHILISHQFSSVKVSGGHLSSSTAHATNDDLGDP

SEQ ID NO: 230589 - protein, 70 aa, Glycine max
  Clone ID: PAT_MRT3847_50243C.1.pep
FLFNIFLFFFIFFFFSFVSGNNFIFLFIFFFFFFFFITFLSFFLFWSVRQPYDHSQAHGSVLRTILYSQR

SEQ ID NO: 230590 - protein, 94 aa, Glycine max
  unsure (1)..(94): unsure at all Xaa locations
  Clone ID: PAT_MRT3847_50244C.1.pep
ARVRLGIRLEXKDKXVFNHCFTXSGVIDWLVSNKLVRNRQEGLMISASLLSEGYLQPASDLSKXAADGIAENPFLDNPDAFYYFPDSGFFCEEN

SEQ ID NO: 230591 - protein, 648 aa, Glycine max
  unsure (1)..(648): unsure at all Xaa locations
  Clone ID: PAT_MRT3847_50245C.1.pep
MSMSDSDSSSSYGAEYKSLKQVSRERLLHEMLRSAKTGDSKSTWKVLIMDKLTVKIMSHSCKMADITDEGVSLVEDIFKRRQPLPTMDAIYFIQPTRENXIMFLSDMSGRKPLYRKAFVFFSPTIAIELVMEIKKDAQVLPRIGALREMNLEYFTIDSQGFITNNGRALDGFLGSPGNILVPVXATKISCAXMILASVCPEKFEGEKGQNLMRLAKLTEEDMNVVHNMRMLPRPESCELLIIDRTIDQIAPVIHEWTYDAMCRDLLNMEGNKYVHEVPSKTGGPPERKEVLLEDHDPIWLELRHAHIADASERLHEKMTNFISKNKAAQIQHGSRGSGEMSTRDLQKMVQALPQYSEQIDKLSLHVEIAGKINRIIRESGLRELGKLEQDLVFGDARMKDVIKFLTTKEDTSRENKLRLLMILASVYPEKFEGEKGLNLMRLAKLTEEDMNVVHNLRMLGGEPDTKKTLTSSFALKFDMHKKKRAARKDRSGEEETWQLSRFYPIIEELIEKVSKNELSKLDYPCLNDPSPTFHGTPYAVPVTQNPPAHSMRSRRTPTWARPRGSDDGYSSDSVLKHASSDFKKMGQRIFIFIVGGATRSELRICHKLTGKLKREVILGSSSIDDPAQYITKLKMLTAQELSLDDLQI

SEQ ID NO: 230592 - protein, 98 aa, Glycine max
  unsure (1)..(98): unsure at all Xaa locations
  Clone ID: PAT_MRT3847_50246C.1.pep
PGPHIGFGLSFAIFIDGRLGVRVRVLRISRRFSTKTLGFSSLNVGFSTRTIQSIRNLNKGGHLRFYGSQGLNCYPSRSPLGSPFYHLLTTXQALNSAQ

SEQ ID NO: 230593 - protein, 70 aa, Glycine max
  Clone ID: PAT_MRT3847_50247C.1.pep
TNLIQPATDIQPSRVSHTRALIYIFYPCNNIVVLFTLTMRILIELSLITIHLYFYLYITLCNDLTNYDHL

SEQ ID NO: 230594 - protein, 383 aa, Glycine max
  Clone ID: PAT_MRT3847_50248C.1.pep
ARLVMDIKKDAQVLTRLGALREMNLEYFTIDSQGFITNNERALVELFGDEENNHKGVTCLNVMAKRIATVFASLREFPFVRFRAAKSLDATTMTTFHDLIPTKLAAGVWDCLMKYKKTVPNFPQTETCELLIIDRTIDQIAPVIHEWTYDAMCRDLLNMEGNKYVHEVPSKTGGPPERKEVLLDDHDPIWLELRHAHIADASERLHEKMTNFISKNKAAQIQHGSRGSGEMSTRDLQKMVQALPQYSEQIDKLSLHVEIAGKINRIIRESGLRELGQLEQDLVFGDAGMKDVIKFFTTNEDTTRENKLRLLMILASIYPEKFEAEKGLNLMKVAKLTDEDAIAINNLRMLGGEPDTKTTSTSSFALKFDMHKKKRAARKDRSG

SEQ ID NO: 230595 - protein, 99 aa, Glycine max
  Clone ID: PAT_MRT3847_50249C.1.pep
RYPFHFSLVSRLRSLIRFSDSSAISLSIRDRSPVGGFGAQRPRSPPCQCRIPIPPPPLMALNTRVSNKLAATDYYMKCLGQRKQEIQNLHGRYKMLNSA

SEQ ID NO: 230596 - protein, 41 aa, Glycine max
  Clone ID: PAT_MRT3847_5024C.1.pep
ASPTYAESLNLFSKTSTLSRLIKRFGRYMQSCVHTDMDFDM

SEQ ID NO: 230597 - protein, 235 aa, Glycine max
  Clone ID: PAT_MRT3847_50250C.1.pep
MAFRGKEMLKKVLKTVGENGLSRREKESLERCLPRSKIVMNRAKRGLFAGKHIQFGNRVSEDGGNKSRRTWKPNVQEKRLFSYILDRHVRVKITTHALRCIDKAGGIDEYLMKTPYHKMDTEMGILWKAKIEKLYEELGNKEVVFFSPEDEAKFEQEFDDLKLSEREARKEVRRKMYTGMSKQKLIEVERKDDQCIDEGGNKIEGEISHDSSKQVVPVSYVLAADKLKVGSVVSN

SEQ ID NO: 230598 - protein, 72 aa, Glycine max
  Clone ID: PAT_MRT3847_50251C.1.pep
TFEFLLSVYSSLVRKNFHVLVERIQVASTVFKMELSLTFPAACLSSVKPLPFLVYFSIKCEKVDLCMRFPSS

SEQ ID NO: 230599 - protein, 107 aa, Glycine max
  Clone ID: PAT_MRT3847_50252C.1.pep
MADDSNRLVRLLCRPKPLNTKGSDPGIHFWLIGSPFFPPLTVASFLRRIHALPSAASPDLPKESEDLRTLIPRGFEVVGALASGDDAHARAAVDAARTLRNLLYGEG

SEQ ID NO: 230600 - protein, 52 aa, Glycine max
  Clone ID: PAT_MRT3847_50253C.1.pep
NETHIFIFYFNLKFYFLFISFYFIEWTLKVYPTKIFFFCFFYGKTKILIPYI

SEQ ID NO: 230601 - protein, 55 aa, Glycine max
  unsure (1)..(55): unsure at all Xaa locations
  Clone ID: PAT_MRT3847_50254C.1.pep
WSLLXIYLSSLKLXRNPHFLSSTMVCSSSICTEYXTXXEHPSFXHHXTSSKTXIQ

SEQ ID NO: 230602 - protein, 112 aa, Glycine max
  Clone ID: PAT_MRT3847_50255C.1.pep
GPFWGSQRPPFFNPPPPRGTKYNPGFRTGRSWEAPKSLFSSTHLGGGGVVSLNNDRDLVWGPAPFLVSSPDLLAGLSIFFGEAQFFAPMFSGKTVLVLPGGAPLLSWGVFCF

SEQ ID NO: 230603 - protein, 187 aa, Glycine max
  Clone ID: PAT_MRT3847_50256C.1.pep
MPISASPTEERATLSWRKIPHFKYDAVQPRLRRNTTTTLTFATATGGSKFASVSVAEPKLHHDFMPTPSQLFKNPLAAFAIVPRDAALFSAGAIAGAAAKTVTAPLDRIKLLMQTHGVRLGQDSAKKAISFIEAIAVIGKEEGIQGYWKGNLPQVIFFNIYSDSRLCADDSYKKICKGENGELSVAG

SEQ ID NO: 230604 - protein, 85 aa, Glycine max
  Clone ID: PAT_MRT3847_50257C.1.pep
NKCVLLFSRYQCRRRLWWTSFTNDLLWTTFRHCWIYLMHTVIQCTISTIYFLLLFLSPLPLVLRWVHLLFPTKTTSATLSHHQQH

SEQ ID NO: 230605 - protein, 70 aa, Glycine max
  unsure (1)..(70): unsure at all Xaa locations
  Clone ID: PAT_MRT3847_50258C.1.pep
NFAAVVGDGFIAQXITFRNTAGAKNHQAVXILRSGSDLSVFYKCSFEGYQDTLYIHSERPLLSSSQPSHS

SEQ ID NO: 230606 - protein, 68 aa, Glycine max
  unsure (1)..(68): unsure at all Xaa locations
  Clone ID: PAT_MRT3847_50259C.1.pep
MDVGKNXRISKGKKGGNTKAAEPFAKKRWYDSKAPCLLEVKTMGXTLVSRTKGTNITAEGLTDRVLKV

SEQ ID NO: 230607 - protein, 69 aa, Glycine max
  Clone ID: PAT_MRT3847_5025C.1.pep
TPNYELVRYSNNICAARNFLLDRILFACLFLLSSLPQSCYPAPMAHLLIVLYSPRSIYYLLFPLPLPIY

SEQ ID NO: 230608 - protein, 61 aa, Glycine max
  Clone ID: PAT_MRT3847_50260C.1.pep
HFSYKSRHGLQGNREELLRLTSYKLNVGCKSTGNKMFADERLVGTKHKRHKFKTMVNDLQL

SEQ ID NO: 230609 - protein, 26 aa, Glycine max
  Clone ID: PAT_MRT3847_50261C.1.pep
LNNLCVVNNQHVQVDAFNLRNNGHVA

SEQ ID NO: 230610 - protein, 54 aa, Glycine max
  Clone ID: PAT_MRT3847_50262C.1.pep
MHQFRNGAEIELARKLDFNDSMVSYSSNCTKASLYNHNDGRGSCCNDSRNGREI

SEQ ID NO: 230611 - protein, 52 aa, Glycine max
  Clone ID: PAT_MRT3847_50263C.1.pep
CHHAAETDASIRMHGKTLDHMQIKRAKPQKLMKGGNFFEPGLRIAADNGGGR

SEQ ID NO: 230612 - protein, 93 aa, Glycine max
  Clone ID: PAT_MRT3847_50264C.1.pep
FFFLWRHFNSFGWPLFCSSLTGPSLSLPNLIGLESIFFSLAGYVLKTPGPIVFTMGRSLCLSIGPLFLGVHSGRWVGFFPPLSSFFLPPSPCP

SEQ ID NO: 230613 - protein, 252 aa, Glycine max
  Clone ID: PAT_MRT3847_50265C.1.pep
MQTLTPPYPNPLNYLTRARHSVIRVAPTRFTVKCGYGFESASFSQGLGASRADWQSSCAILASKVVSQREDSPADGDDNDNNVGDVNGHNAAVTNLNIVPVKADGENIKPIPPKPLTISDLLPAPMHGSQLRVAYQGVPGAYSEAAAGKAYPNGEAIPCDQFEAAFQAVELWIADRAVLPVENSLGGSIHRNYDLLLRHRLHIVGEVQLPVHHCLLALPGVRKEFLTRVISHPQALAQCEHSLTKLGLTVTR

SEQ ID NO: 230614 - protein, 97 aa, Glycine max
  Clone ID: PAT_MRT3847_50266C.1.pep
GEKKIFFLKNETPQPNGGGSCALAHCPFPPPKRAPPLLIFFGPKPYWVPYLICYKTPFHNKNPTPSSILLPSDNNTLTTFDPSLGPYNYILLIFFLP

SEQ ID NO: 230615 - protein, 212 aa, Glycine max
  unsure (1)..(212): unsure at all Xaa locations
  Clone ID: PAT_MRT3847_50267C.1.pep
MAAEVYYQAIGTLQSHSYLNNLNHHQKHQNNLVTLVSRDFISSNGLSTRRSNCTGQRNCSVIRSLASQTSVVDPVLSPSRSNAGDTYKKSNEAALILIRHGESLWNEKNLFTGCVXDVPLSKKGIDEAIEAGKRISSIPVDVIFTSALIRAQMTAMLAMTQHRRGKVPIMMHNESEQAXSWSQVFSEDTKXQSIPVIASWQLNEXMYGELQG

SEQ ID NO: 230616 - protein, 58 aa, Glycine max
  Clone ID: PAT_MRT3847_50268C.1.pep
CWFQSAFHSIYSLQTPYVASLWSIKMLVCYNFFAQYVKLSFNEVFILVQIVGVLSLDV

SEQ ID NO: 230617 - protein, 184 aa, Glycine max
  Clone ID: PAT_MRT3847_50269C.1.pep
GRNQEIAPDGERWQRTNSFQQRGLIPSPSTPQTPLQMMHKAEKKYEVGKVTDEEQAKQRQLKGILNKLTPQNFEKLFDQVRAVNIDNVVTLNGVISQIFEKALMEPTFCEMYANFCFHLAAVLPDLSQDNEKITFKRLLLNKCQEEFERGEREQEEANKADEGEVKLSNEEREEKRTKARRRML

SEQ ID NO: 230618 - protein, 155 aa, Glycine max
  Clone ID: PAT_MRT3847_5026C.1.pep
PAGSEDGYAKVEILNEQHQDLSAAKVSLGVLGVISQITLKLEPLFKRSITYVEKDDSDLGDQAAAFGDAHEFGDILWYPSQRKVLYRVDDRVPTNTSGNGLYDIISFRPTPSNTSAFIRTREDIQESTKDANGKCIDATTTTDTFITEAYGLTNN

SEQ ID NO: 230619 - protein, 101 aa, Glycine max
  Clone ID: PAT_MRT3847_50270C.1.pep
MMCRYVVHIPENLAMDAAAPLLCAGITVFNPLKDHDLVASPGKKIGVVGLGGLGHIAVKFGKAFGHHVTVISTSPSKEAEAKQRLGADDFIVSSNPKQLQL

SEQ ID NO: 230620 - protein, 124 aa, Glycine max
  Clone ID: PAT_MRT3847_50271C.1.pep
MSLTLFLKTLFLFFPCYLCLLDSATTTTTLKPILLTPSKPATTIPAFPEQSDVSGCPLTLSDELFDGIKSACSGAKSGADMELHHSRCCPVLAAWLYSAYSATALGSMAGHSHSHSNSAHGHGH

SEQ ID NO: 230621 - protein, 88 aa, Glycine max
  Clone ID: PAT_MRT3847_50272C.1.pep
WATPGEGFVKWDPWEVFPGAFLSPFLKMIKAFLFFVARFLFHRGPRCPPFFFFSQNLGGIFPPPLLFGPFKRFFFFSPFLKPGAPPSV

SEQ ID NO: 230622 - protein, 384 aa, Glycine max
  Clone ID: PAT_MRT3847_50273C.1.pep
MMCLNTHLVSLQLREGLINSLVMAESRANHTVSVFGWAAHDSSGKITPYSFKRRQNGVNDVTIKILYCGICHTDLHCAKNEWGITMYPVVPGHEIIGEVTKVGTNVKGFMEGDRVGVGCLAASCLECHHCKTDQENYCQDLQFVYNGIFWDGTITYGGYSQIFVADYRYVVHIPASLPMDAAAPLLVCAGITVFNPLKDHDLVASPGKKIGVVGLGGLGHIAVKFGKAFGHHVTVISTSPSKEAEAKQRLGADDFIVSSNPKQLQAARRSIDFILDTVSAEHSLLPILELLKVNGTLFLVGAPDKPLQLPAFPLIFGKRSVKGGIIGGIKETQEMLEVCAKYNITSDIELITPDRINEAMERLAKNDVRYRFVIDIANAAASNN

SEQ ID NO: 230623 - protein, 49 aa, Glycine max
  Clone ID: PAT_MRT3847_50274C.1.pep
GARLWWAIDFSSTPPPLFFPSLCFRNECWIFGGSPQSLLIWNFTSFGQE

SEQ ID NO: 230624 - protein, 84 aa, Glycine max
  Clone ID: PAT_MRT3847_50275C.1.pep
LYDIGGLSRGGIHTILDAHCNMNQLDNSGNAHRSWWGCCSCMVCWRQRPSLYGRSLQLRGIGHLSKEHDMPTCKLISTMLDHAE

SEQ ID NO: 230625 - protein, 240 aa, Glycine max
  unsure (1)..(240): unsure at all Xaa locations
  Clone ID: PAT_MRT3847_50276C.1.pep
PRVRKVMIQRKDGQHSFINDVLYVPNMKNNLLGLGQLLEKGYSMQMEDSQMKIFDSKRRLILKASLSRNRTFKIGIQIAEFQCLVASISDESWMWHHRFGHLNFRSLSELKSKKMVHSLPQIEIPKQLCVECCVSKQPRNSFKSEIPIRSKRKLEVIYFDVCDPFEVKSLGGNNYFVSFIDEFTKKMWIYFIKQRSEVLNIFKKFKFLSEKQSDKVIKVLRTDGGGXEYDSHEFQVFCDE

SEQ ID NO: 230626 - protein, 63 aa, Glycine max
  Clone ID: PAT_MRT3847_50277C.1.pep
MSCSSSSGSEEDDEGFDSYRKGGYHAVRVADQFAGGRYIAQRKLGWGQFSTVWLCYDTTTSAY

SEQ ID NO: 230627 - protein, 108 aa, Glycine max
  Clone ID: PAT_MRT3847_50278C.1.pep
LVMIILLNDNLKIQLRNGSPAHRVPENAQLGRVHIATYFDYELHELPWSTLRSEEPIKLICIRLKAKDGLITCNSTGEKVDFCAITDITPDPTIIIYHSGVPWSILFN

SEQ ID NO: 230628 - protein, 58 aa, Glycine max
  Clone ID: PAT_MRT3847_50279C.1.pep
KSFPIDLFGEWPLQVCIFGSAFLNSDFLKYNTEPLGSFKNQQDNILTQLCYHLSDEQH

SEQ ID NO: 230629 - protein, 76 aa, Glycine max
  Clone ID: PAT_MRT3847_5027C.1.pep
MSVTELKERHLAATETINSLRERLKERRLSLLDTDIAGYARSQGRAPVTFGPTDLVWCRALQGHTGKVYSMDWTSE

SEQ ID NO: 230630 - protein, 38 aa, Glycine max
  Clone ID: PAT_MRT3847_50280C.1.pep
FYIIGWILYFAKRFGLFVSIGGFKPGVKFVKTNENDAH

SEQ ID NO: 230631 - protein, 108 aa, Glycine max
  Clone ID: PAT_MRT3847_50281C.1.pep
MLFVNMLVLVSGWTPTPDLSLPLSYFYQQANLISPLHSGCDHVCSYQVSASLDALIEISSGKVNIHVLMAMAAFASIFMGNSLEGGLLLAMFNLAHIGELMMQLTHLL

SEQ ID NO: 230632 - protein, 36 aa, Glycine max
  unsure (1)..(36): unsure at all Xaa locations
  Clone ID: PAT_MRT3847_50282C.1.pep
PGGWAPCFVLSKGLLRVFVRGVRLXPPKPAVFLVWF

SEQ ID NO: 230633 - protein, 60 aa, Glycine max
  Clone ID: PAT_MRT3847_50283C.1.pep
GFPLEKFENSPKKEKNRGELIFPCFLGPIRELTLTCNLEFQGDRVPGTNFWLLFNRIYRK

SEQ ID NO: 230634 - protein, 64 aa, Glycine max
  Clone ID: PAT_MRT3847_50284C.1.pep
RPTFASITFYDFGQTQQTNQSGQRTKLHNEARQYKTIPKGAQYHAPKGPKLPAHYHQRITPQTA

SEQ ID NO: 230635 - protein, 79 aa, Glycine max
  unsure (1)..(79): unsure at all Xaa locations
  Clone ID: PAT_MRT3847_50285C.1.pep
TTFXTGFMLYFTRRRHIIIFITILDNTNGITIFNTLLSTNYIFIVNTKLKITIFSTYHITNSCSYTNSMTISIFSSSPP

SEQ ID NO: 230636 - protein, 49 aa, Glycine max
  Clone ID: PAT_MRT3847_50286C.1.pep
QLREVIKATCIIMSIPGGTGPPMEEDDGFTEQHTQHCIDDYSRVSGRVG

SEQ ID NO: 230637 - protein, 50 aa, Glycine max
  Clone ID: PAT_MRT3847_50287C.1.pep
SPKQFLQNLRVLVHIGLFLGMRLLLTTIRINLRNTFLLKVENWFRQLMRL

SEQ ID NO: 230638 - protein, 60 aa, Glycine max
  Clone ID: PAT_MRT3847_50288C.1.pep
NPRAFFSNDAKKFHSSYCLQRDPLARPTAHKLLDHPFISRSIGNKSCKCQHNQRCFSLHV

SEQ ID NO: 230639 - protein, 80 aa, Glycine max
  Clone ID: PAT_MRT3847_50289C.1.pep
PSFSVRERDQLRRGCVGRQTQCSMAITNKVPHIPLSTGEEGDSVRTWTVKHPEKVPSDQDALYCNERNWEDEKDDEEYDA

SEQ ID NO: 230640 - protein, 47 aa, Glycine max
  Clone ID: PAT_MRT3847_5028C.1.pep
TKSGDAFFGNFKDGWRHGQFLCINANGTRYTEIWENGVLVDGKYLDR

SEQ ID NO: 230641 - protein, 55 aa, Glycine max
  Clone ID: PAT_MRT3847_50290C.1.pep
VLQNKLGNHRPLFLTTRTKMSLSELSYKYKCPAFPFSLVSTNTLKQNSQNINLVD

SEQ ID NO: 230642 - protein, 50 aa, Glycine max
  Clone ID: PAT_MRT3847_50291C.1.pep
GQFFFFFLLLFPFFLKNILIRGGLSRSYTFPSLNSHPLTFKRNRPLCLLT

SEQ ID NO: 230643 - protein, 36 aa, Glycine max
  Clone ID: PAT_MRT3847_50292C.1.pep
GVALTSFCIFRSRHSLNPQPPHSQKYSNVLQWGSSI

SEQ ID NO: 230644 - protein, 116 aa, Glycine max
  Clone ID: PAT_MRT3847_50293C.1.pep
FFFLKKGENKLFFLVGNPKKKNQKIFWKHLGGGGFKKWGPNPNPFKPNFLTGWGFFLEHHFLIKKQSRLTCGSPPERVKKLKKFCLTHQIFYFPRRGAPKKSSFWGLRGFSKRGPK

SEQ ID NO: 230645 - protein, 71 aa, Glycine max
  Clone ID: PAT_MRT3847_50294C.1.pep
FFFRNITELYELCNVTCFLSVMSRNLTDYTIVPSLASGMLRNFTDCALTLPFDSRHVAKLHGLPNDGCQVP

SEQ ID NO: 230646 - protein, 103 aa, Glycine max
  Clone ID: PAT_MRT3847_50295C.1.pep
EVWSGIIPGSTAISRRPPYIYRGAFFNFCCYNTKDSFIEDRPTNESRQLFHPIGLYYIIYSTYSVHALFFFYLQPPPLLRGYNFFVYSFLLNYKKNLGYKSCF

SEQ ID NO: 230647 - protein, 50 aa, Glycine max
  Clone ID: PAT_MRT3847_50296C.1.pep
ANNLFSTALGIISVYFLFSYGQIFSIYLSSLEYRVPLNKIIFIPFSVASP

SEQ ID NO: 230648 - protein, 336 aa, Glycine max
  Clone ID: PAT_MRT3847_50297C.1.pep
FLSGKTYMFRISNVGFSTSINFRIQGHTLKLVEVEGSHTVQNLYDSLDVHVGQSVAVLVTLNQPPKDYYIVASTRFTETPLTTTAVLHYANSFSSALGPVPAPPVDKYDFDWSMKQARTYRWNLTANAARPNPQGSFHYGKITPTKVIKLANSAPLINGKLRYAVNSVSYVNPDTPLKLADYFNIPGIFSVNLLQNSPSNGPGYIGTSVLQTSLHDFIEVIFQNNENTMQSWHLDGYDFWVIGHGFGQWTDASRKTYNLVDALTRHTTQVYPKSWTTILVSLDNQGMWNLRSAIWERQYLGQQFYLRVWDAQKSLANEYDIPNNVLLCGKAVGHHP

SEQ ID NO: 230649 - protein, 110 aa, Glycine max
  unsure (1)..(110): unsure at all Xaa locations
  Clone ID: PAT_MRT3847_50298C.1.pep
MRRTGLLHLLCLVIALVSVQAEDAYKYYTWTVTYGTISPLGSPQQVILINGQFPGPRLDLVTNENVILNLINKLDEPFLLTWNGIKQRKNSWQRXVLGTNCPIPPNSNYT

SEQ ID NO: 230650 - protein, 537 aa, Glycine max
  Clone ID: PAT_MRT3847_50299C.1.pep
MRRTGLLHLLCLVIALVSVQAEDAYKYYTWTVTYGTISPLGSPQQVILINGQFPGPRLDLVTNENVILNLINKLDEPFLLTWNGIKQRKNSWQDGVLGTNCPIPPNSNYTYKFQAKDQIGTYTYFPSTQLHKAAGGFGALNVYHRSVIPIPYPNPDGDFTLLVGDWYKTNHKTLRQTLESGKPLAFPDGLLINGQAHSTFTGNPGKTYMFRISNVGFSTSINFRIQGHTLKLVEVEGSHTVQNLYDSLDVHVGQSVAVLVTLNQPPKDYYIVASTRFTETPLTTTAVLHYANSFSSALGPVPAPPVDKYDFDWSMKQARTYRWNLTANAARPNPQGSFHYGKITPTKVIKLANSAPLINGKLRYAVNSVSYVNPDTPLKLADYFNIPGIFSVNLLQNSPSNGPGYIGTSVLQTSLHDFIEVIFQNNENTMQSWHLDGYDFWVIGHGFGQWTDASRKTYNLVDALTRHTTQVYPKSWTTILVSLDNQGMWNLRSAIWERQYLGQQFYLRVWDAQKSLANEYDIPNNVLLCGKAVGHHP

SEQ ID NO: 230651 - protein, 70 aa, Glycine max
  Clone ID: PAT_MRT3847_5029C.1.pep
MVEFIGMLKVKVIKGPNLAIRDIKSGDPYVVLSLGQQTVQPTIIRSHLNPVWNEENMLSVPEHYGQIKLV

SEQ ID NO: 230652 - protein, 168 aa, Glycine max
  Clone ID: PAT_MRT3847_502C.1.pep
FKLGSTNIQNRNISLKYKSRKTAMKQESPASPLPSSLPQPSPTMTTTKNVIKLQNSLTPSRLRLPSKYREPPKTPPEVVVNNVVVSTPSRRAKSVTPELKHNSRIKRGLVLNKAKPNEEVVGTTQRGREAEETKVVAGFVRPHVVEQIARPRNGAGDFVSRGTRGLCE

SEQ ID NO: 230653 - protein, 325 aa, Glycine max
  Clone ID: PAT_MRT3847_50300C.1.pep
MRFLSLSLSLSLSLCVAFCEILFDMASRDNKKASSSRAGRIRTLSDLNRPSADSDSDSDGPQEYYTGGEKSGMLVQDPSKGNDVDEIFNQARQLGAVERPLDQLQEPPRSTSFTGTGRLLSGETTRSTNNQQPEAVVHNIVFWSNGFTVNDGPLRSLDDPENASFLESIKKSECPKELEPEDRRSSVNVNLIRRNENYREPEKQHVAFQGVGRTLGSSSTSMAPDSPAASTPPNTAPTPSAGLVVDQSLPSTSIQLRLADGTRLISHFNYHHTISDIRAFIDASRPGGRQNYQLQLMGFPPKILADETQTIEQAGLANSVVIQKF

SEQ ID NO: 230654 - protein, 40 aa, Glycine max
  Clone ID: PAT_MRT3847_50301C.1.pep
NSIGSMYNSKKLKGFSKSQPKFKAFNDHYFSLAGQDEPQP

SEQ ID NO: 230655 - protein, 63 aa, Glycine max
  Clone ID: PAT_MRT3847_50302C.1.pep
RQIEAFHVFKLFTTNQHKPPNIVNVFITNKSKILKLLKDFKIDKEDEQFEANKSQVIRKIKTL

SEQ ID NO: 230656 - protein, 540 aa, Glycine max
  Clone ID: PAT_MRT3847_50303C.1.pep
MGSTGLLHLICLVIALVSVSLVQAEDAYKYFTWTVTYGTLYPLASPQQVILINGQFPGPRLDLVTNENVILNLINKLDEPFLLTWNGIKQRKNSWQDGVLGTNCPIPPNSNYTYKFQAKDQIGTYTYFPSTQLHKAAGGFGALNVYHRSVIPIPYPNPDGDFTLLVGDWYKTNHKTLRQTLDSGKSLAFPDGLLINGQAHSTFTGNQGKTYMFRISNVGLSTSINFRIQGHTLKLVEVEGSHTVQNLYDSLDVHVGQSVAVLVTLNQPPKDYYIVASTRFTETPLTTTAVLHYANSFSSALGPVPAPPVDKYDFDWSMKQARTYRWNLTANAARPNPQGSFHYGKITPTKVIKLANSAPLINGKLRYAVNSVSYVNPDTPLKLADYFNIPGVFSVNLLQNSPSNGPGYIGTSVLQTSLHDFIEVIFQNNENTMQSWHLDGYDFWVIGHGFGQWTDASRKTYNLVDALTRHTAQVYPKSWTTILVSLDNQGMWNLRSAIWERQYLGQQFYLRVWNAQKSLANEYDIPNNVLLCGKAVGHHP

SEQ ID NO: 230657 - protein, 71 aa, Glycine max
  Clone ID: PAT_MRT3847_50304C.1.pep
QLRLADGTRLISHFNYHHTISDIRAFIDASRPGGRQNYQLQLMGFPPKILIDETQTIEQAGLANSVVIQKI

SEQ ID NO: 230658 - protein, 37 aa, Glycine max
  Clone ID: PAT_MRT3847_50305C.1.pep
FPTPRLAFLVANLTTAPLFSLLNSILYFVTNLILLTS

SEQ ID NO: 230659 - protein, 86 aa, Glycine max
  unsure (1)..(86): unsure at all Xaa locations
  Clone ID: PAT_MRT3847_50306C.1.pep
NNANASPSLFXFXXLFXXVXXMTSXNSEGXXLLXLKAGCGXRPHRSXYFLXGNRCHXMXXXGNLLHRRQSNPSLXPKKKPHRLXXX

SEQ ID NO: 230660 - protein, 44 aa, Glycine max
  Clone ID: PAT_MRT3847_50307C.1.pep
SVLSIFSTALSHSRAFVVDVIGPHPGWLALMAGISTGAASFFIS

SEQ ID NO: 230661 - protein, 104 aa, Glycine max
  unsure (1)..(104): unsure at all Xaa locations
  Clone ID: PAT_MRT3847_50308C.1.pep
GSCNFSRRQAATLWKXXXXVHGRXXRVLLTALGREAFLETKLLNQQILITIRDKLLAFGIMLTGMGVDSIAASELSSNLPNDSRSLFDFSSLQQTSSINQQDLK

SEQ ID NO: 230662 - protein, 93 aa, Glycine max
  Clone ID: PAT_MRT3847_50309C.1.pep
ILNPLSRGGNKIFFFGLGPPKPNLRPSFFPPSWGQKQPLKGGALFNLGGPPKSKTSLKNKDFWEPCSYKGVSHKKIFGKKSPQIFGFLKRILF

SEQ ID NO: 230663 - protein, 124 aa, Glycine max
  unsure (1)..(124): unsure at all Xaa locations
  Clone ID: PAT_MRT3847_5030C.1.pep
FGGANFFAFGFTMGDGLGAQIGDALILVYTVXSAIDARRXVRHSHVPICAPLPIGFLVFLVDLAAILITGIGINPARSLDAAIIFYNDLVWDEHWIFWVGPFFGAALAALYRQVVIKAIPFMSK

SEQ ID NO: 230664 - protein, 101 aa, Glycine max
  unsure (1)..(101): unsure at all Xaa locations
  Clone ID: PAT_MRT3847_50310C.1.pep
XXXXLXVCXXLXXXXHXNVXSXXXXXNXXSSSXXVXXXXXSXVXXXLXXRXXGGXEGGGGGXXXXXEXXXFXXXXXXXXXXXSXDSXXKXLAEXXXXVXXX

SEQ ID NO: 230665 - protein, 45 aa, Glycine max
  Clone ID: PAT_MRT3847_50311C.1.pep
KIGNPRTPGKFPTKKFWGVGHPRLTTKTILVGKALPAPWKPHQSP

SEQ ID NO: 230666 - protein, 78 aa, Glycine max
  Clone ID: PAT_MRT3847_50312C.1.pep
YITETCKQKTHNTQTLIEKSLANLHTSHEYHGCCCLYTNQICLIYCTSNSLYKPFYLYTNFHIFCFKLKLLLLTILLL

SEQ ID NO: 230667 - protein, 85 aa, Glycine max
  unsure (1)..(85): unsure at all Xaa locations
  Clone ID: PAT_MRT3847_50313C.1.pep
GAYRNPRGFNAAAIRALVVGVXPVVRGFMQEDEIALSVPNTYVVIYNNAWLISFFCAGFWYVVLSNLRGKPGNSGARAPLLPTAK

SEQ ID NO: 230668 - protein, 43 aa, Glycine max
  Clone ID: PAT_MRT3847_50314C.1.pep
LGEQSHGPGALSAANSWPLSLPSRLGVIGLASVEPITTYRWLA

SEQ ID NO: 230669 - protein, 69 aa, Glycine max
  Clone ID: PAT_MRT3847_50315C.1.pep
VGMLRNEALLQCCFVLRLGLLIDYDFEFAKGILSLIAAILGLSFFSIKVASFMINLTHKAVVHHGKCFS

SEQ ID NO: 230670 - protein, 84 aa, Glycine max
  Clone ID: PAT_MRT3847_50316C.1.pep
STCKSEKTFSYPFLYSQEHFIIVSNVMTCNPPSVLQNKLNFNLNITCHYFSYICKHFNTSITLKFTTKTPPTTTYSSIFTFYFI

SEQ ID NO: 230671 - protein, 61 aa, Glycine max
  Clone ID: PAT_MRT3847_50317C.1.pep
WRLLVLWPGLGGCFMGLEGIPVFVPMARVWSACQARLAIFGWSVISYEGRDVVLALGNSFL

SEQ ID NO: 230672 - protein, 73 aa, Glycine max
  Clone ID: PAT_MRT3847_50318C.1.pep
VVRNFCMYASHKQVGNPRECVVLKMGQNKPPSMENGGVGVFQTATGENLPLIMSQLLHNLTKIRAPVHVGFFG

SEQ ID NO: 230673 - protein, 55 aa, Glycine max
  Clone ID: PAT_MRT3847_50319C.1.pep
PPRGPRVVSNPFGPGIYPREPPLFGKVQRNCGLSFSGALLWSLPPLLFNVDPIFA

SEQ ID NO: 230674 - protein, 151 aa, Glycine max
  Clone ID: PAT_MRT3847_5031C.1.pep
KARAIAKKAGAKVLGFEGLGKLQVMIFEELVEHKLEQPHFITEYPFEVSPLARRNDENPNVTDRFELFIGGREIANAYSELNDAEDQAERFQAQVAEKDAGDDEAMHYDADFVRALEYGMPPTAGEGIGIDRLVMLLTNAPSIRDVILFPH

SEQ ID NO: 230675 - protein, 282 aa, Glycine max
  Clone ID: PAT_MRT3847_50320C.1.pep
MKIEELDDGECSRDHEEKFERQIVSVDAKRALVGAGARILFYPTLLYNVLRNKIEAEFRWWDQIDEFLLLGAVPFPKDVPYLKKLGVGGVITLNQPYETLVPSSLYHAHGIDHLVIPTRDYLFAPSFVDINRALWIIAQNATCGKTTYVHCKAGRGRSTTIVLCYLVEYKHMTPATALEYVRSRRPRVLLAPSQWKAVQNYNKRRPSPLPYSPSGDAVLITKADLEGYHSTGDAGMELAIVPKMLKTKPMIARLSCLFASLKVSGSSVPMTRRLPVSESRAC

SEQ ID NO: 230676 - protein, 111 aa, Glycine max
  Clone ID: PAT_MRT3847_50321C.1.pep
WYYFIIFYQLILNLGGGSFGEKTGIHGPKAKGEKTKAKEALGKGTFEKKGEKIPGGSPKKKKIEKLTQNPGLKGKGGPISLAGKKENALGFFSPGKKKGKSHQVVFCLPGE

SEQ ID NO: 230677 - protein, 251 aa, Glycine max
  unsure (1)..(251): unsure at all Xaa locations
  Clone ID: PAT_MRT3847_50322C.1.pep
DXXGYSXDXXTYXKYCRDXXXXXSXXXYGNXEEEKMIEXXWKFYQNEEDTXXSENVEQSNTSFNQTSSRDKGCIGKISKEEKIRKKGFNELFPDDDTSLEDVSNNNSHERSADSEDSDSQEHSSGKSHVKEAIRQMKLEMEENRFYYIPPSVKRKRLDYIHYVRKRDEGALTYVAHADYYILLRACARIAQVDIRILHIGVLRLERRLAWLEKRIDQCLHSKPTSISCQFCCNKATENGSDGLPGLSNLNI

SEQ ID NO: 230678 - protein, 45 aa, Glycine max
  Clone ID: PAT_MRT3847_50323C.1.pep
GVLNEDHYVGYLLSLFAPNNSINSPARSDCHVYCGALSSIKSVFP

SEQ ID NO: 230679 - protein, 102 aa, Glycine max
  unsure (1)..(102): unsure at all Xaa locations
  Clone ID: PAT_MRT3847_50324C.1.pep
LQYSVIKMHVPAFIIATTLVAWHCHTYDKFPLRMNTGYGARIPEVKCANWRLAVKAHNIFGFETIPEECIESSYEYIHGDQYRXGSNIINQQAYFYATDLEV

SEQ ID NO: 230680 - protein, 69 aa, Glycine max
  unsure (1)..(69): unsure at all Xaa locations
  Clone ID: PAT_MRT3847_50325C.1.pep
EHVGASDVRVVLGFDEEDDEGVVVYIKELVTAYQCIGMYYLLXHVEFPAVVVYLVSEMTYVKKKHFIQA

SEQ ID NO: 230681 - protein, 52 aa, Glycine max
  Clone ID: PAT_MRT3847_50326C.1.pep
PPTKNFTCLSHFKKNTYKCHFCFKKGGRGGPIFCYKWGPKPPNSKKINLMII

SEQ ID NO: 230682 - protein, 82 aa, Glycine max
  unsure (1)..(82): unsure at all Xaa locations
  Clone ID: PAT_MRT3847_50327C.1.pep
XAKSCLPXTXTRNXTNCXAXQXXXSRIDSXXXEXFFLLIYKGNRSXAIAXDNXPFXLDEVIXXAQFRGVQCSHRSLCFXKPI

SEQ ID NO: 230683 - protein, 75 aa, Glycine max
  unsure (1)..(75): unsure at all Xaa locations
  Clone ID: PAT_MRT3847_50328C.1.pep
QGLGGEGRFIQRACFHPYGPRAEFRNWFFKIKTPYHKLIPNLPLEFGNFNRAPLLGGXVXGAKGKREGFGPQXQV

SEQ ID NO: 230684 - protein, 193 aa, Glycine max
  Clone ID: PAT_MRT3847_50329C.1.pep
MLSVVRVHLPSEIPIVGCELTPYVLLRRPDKTVSTDDVPETAPLDGHFLRYKWYRVQSDKKVAVCSIHPSEQATLQCLGCVKAKIPVSKSYHCTTKCFSDAWQHHRVLHDRAACALNENGNEEDHVFGHFIVLGLGQAIDVYLPLHQVLGFEIGKQHLYIQQELHKLTMKSYQKSLHPWLEVRLIDIFECSID

SEQ ID NO: 230685 - protein, 63 aa, Glycine max
  Clone ID: PAT_MRT3847_5032C.1.pep
LLIIGLLSRLPNGAPERARPPGIQCSNFLKPGLCHNLGRTKYLWHSVDKGPFLRIGKEFYCVV

SEQ ID NO: 230686 - protein, 41 aa, Glycine max
  Clone ID: PAT_MRT3847_50330C.1.pep
QTSEANFHDHAQTIFLSENTRVKANQIIILTLYSTRESDDY

SEQ ID NO: 230687 - protein, 283 aa, Glycine max
  unsure (1)..(283): unsure at all Xaa locations
  Clone ID: PAT_MRT3847_50331C.1.pep
MLSVVRVHLPSEIPIVGCELTPYVLLRRPDKTVSTDDVPETTPLDGHFLRYKWXYRVQNDKKVAVCSIHPSEQATLQCLGCVKAKIPVSKSYHCTTKCFSDAWQHHRVLHDRAASALNENGNEEEEVFGRFNSTGSGATNSSLSASASSASLTNGSATPLYPAAITQRSGETWFEVGRSKTYTPTADDVGHVLKFECVVVDAETKLPVGHVNTILTSRVIPAPSPIPRRIIPVDGMAHLDVDGRMTSSGTFTVLSYNVLSEAYASXDLYNYCPSWAPSWHIAG

SEQ ID NO: 230688 - protein, 81 aa, Glycine max
  unsure (1)..(81): unsure at all Xaa locations
  Clone ID: PAT_MRT3847_50332C.1.pep
XDNNFXXGTAMXXVTXSXNTTPXRXXWXXXRXXXXXNSRXXXXXSRRXPXFFFFNLEERTLEAYKGSNSSRAEFRAYVRVX

SEQ ID NO: 230689 - protein, 45 aa, Glycine max
  Clone ID: PAT_MRT3847_50333C.1.pep
ALEMADMLDIPLGQFAVQYCRAHARVHQLRGSCVMTDSDRSELSR

SEQ ID NO: 230690 - protein, 79 aa, Glycine max
  unsure (1)..(79): unsure at all Xaa locations
  Clone ID: PAT_MRT3847_50334C.1.pep
FWTVIKDMLNVPVLXIIGSFIPSTMIAVLYYFDHXVAFQLASSDKFQLKXPPSFHYXICFLLGXMVIICGLTGIPPSNG

SEQ ID NO: 230691 - protein, 67 aa, Glycine max
  Clone ID: PAT_MRT3847_50335C.1.pep
VSTNSQKTTMQEDPPPSECWVSTQVQKITIEDSPPPLEWWVTVYTLQFPIWEFQTIMQPNHSPHMPS

SEQ ID NO: 230692 - protein, 59 aa, Glycine max
  Clone ID: PAT_MRT3847_50336C.1.pep
TQAKNVWFSTIKTTINDILIPLISHMISIRNLLTYHTKLERIQIYFNEIYQNIIILYTR

SEQ ID NO: 230693 - protein, 65 aa, Glycine max
  Clone ID: PAT_MRT3847_50337C.1.pep
MASTGFDEDGDTRGGMWVLEQKIDQPMDEEAERLKNMYREKKFSTLLLLRLAYQSLGVVYGVWEL

SEQ ID NO: 230694 - protein, 115 aa, Glycine max
  Clone ID: PAT_MRT3847_50338C.1.pep
MSDKPRSGTRFGADSDASDLYAGGDNEYVTELNEEGDDDDTKSKGKASSSEGGVRQKPRTFTVQDAFEETKGVETDPFAQHNKGRVIAEREDEYHARRMNRIISPSRAESFAMDA

SEQ ID NO: 230695 - protein, 99 aa, Glycine max
  Clone ID: PAT_MRT3847_50339C.1.pep
CKLVHTDGYPVFDFLGAKDDIVSGGSYQLLHFRDLRLSWPVFMYLVHGRAHSSTGLLQRICYLTFAHCLKATSSIETPTSTEMASAIHRQARHYPVLLK

SEQ ID NO: 230696 - protein, 38 aa, Glycine max
  Clone ID: PAT_MRT3847_5033C.1.pep
RPLMSAADSYLDRHINTIGVDYRIQPEHLDGNTIYHLS

SEQ ID NO: 230697 - protein, 48 aa, Glycine max
  Clone ID: PAT_MRT3847_50340C.1.pep
VQCVCWERNLIELGEVQSNYILDHPNGEVRPLCAYPSCFTCLMTSKHT

SEQ ID NO: 230698 - protein, 46 aa, Glycine max
  Clone ID: PAT_MRT3847_50341C.1.pep
TAARRRQKGISQSLVIPVVSNTVEDQEDYYNPDSHAGSSPLRLNSS

SEQ ID NO: 230699 - protein, 137 aa, Glycine max
  Clone ID: PAT_MRT3847_50342C.1.pep
MRRAFRIEAVGLMSLWFSFGSSVLARFVVEWESGKEGCTMHVSPDQLWPHTKFLEDFINGGEVSPLLDCIRLTAGPLHALAAATRPARAGPVPGVAAALSSIPKQTGSYISSQGLLLGNSTTCCQPTSGGQTLSCYC

SEQ ID NO: 230700 - protein, 159 aa, Glycine max
  unsure (1)..(159): unsure at all Xaa locations
  Clone ID: PAT_MRT3847_50343C.1.pep
LRLRXGMQIFVKTLTGKTITLEVESSDTIENVKQKIQDKEGIPPDQQRLIFAGKQLEDGRTLSDYNIQKESTLHLVLRLRGGMQIFVKTLTGKTITLEVESSDTIENVKQKIQDKEGIPPDQQRLIFAGKQLEDGRTLSDYNIQKESTLHLVLRLRGGQ

SEQ ID NO: 230701 - protein, 78 aa, Glycine max
  Clone ID: PAT_MRT3847_50344C.1.pep
SSRIGSRQIKRDGITKLVILPLYPQFSISTSGSSLRLLESIFREDEYLVNMQHTVIPSWYQREGYIKAMANLIEKELR

SEQ ID NO: 230702 - protein, 115 aa, Glycine max
  Clone ID: PAT_MRT3847_50345C.1.pep
LIPPRPSFAFLSSSSVVEQRVCISECLTNTSNVNAIAGDSPLCFGHDVKELDCKPVEGKRAGGTIGLGAFGFHNKRNQTIGLGECEQLDLVVTESVIRWSSCTQLPTSPRSSLVC

SEQ ID NO: 230703 - protein, 33 aa, Glycine max
  Clone ID: PAT_MRT3847_50346C.1.pep
RPSCSYVPWTTTSFPKQSVVTYTARSVTSQSVA

SEQ ID NO: 230704 - protein, 158 aa, Glycine max
  Clone ID: PAT_MRT3847_50347C.1.pep
KKIVNICSCKLSEPSFGKLKVIKINLCGQLKSVFLISVVSLLSVLETIEVLECNSLKEIVQVETQSTGEVKLMFPELRSLKLQFLSQFVGFYPIPSRKQKELFNEKIDVSKLERMELSSIPIDIIWSVHQSSRISSFKNLTHLDVNSCWELKDVISFS

SEQ ID NO: 230705 - protein, 53 aa, Glycine max
  unsure (1)..(53): unsure at all Xaa locations
  Clone ID: PAT_MRT3847_50348C.1.pep
IFTISNKITSFIDKLQKTLSITSFLDKHEKTFSSHDLFSLGCEASXGWVVLHL

SEQ ID NO: 230706 - protein, 130 aa, Glycine max
  unsure (1)..(130): unsure at all Xaa locations
  Clone ID: PAT_MRT3847_50349C.1.pep
PAPVRSRAPPPPRFVPAGPAAPPSASXXPXCSPVXPLLXSGXXSLXGXDXGAPSGVCCPSVXAXXASAPPXIPRXAACXCFFXVAXRLPSLLEXQAHSLPPPRGVDLGFIMSQPNPHCXHVPVSPRQGRD

SEQ ID NO: 230707 - protein, 95 aa, Glycine max
  unsure (1)..(95): unsure at all Xaa locations
  Clone ID: PAT_MRT3847_5034C.1.pep
MSAESPSSARKVVVHLRATGDAPILKQSKFKIAGTDKFAKVIDFLRRQLHRETLFVYINSAFSPNPDELVIDLFNNFGFDGKLVVXNYACSMAWG

SEQ ID NO: 230708 - protein, 122 aa, Glycine max
  unsure (1)..(122): unsure at all Xaa locations
  Clone ID: PAT_MRT3847_50350C.1.pep
LRNRAHGQPGKGQTQKARPQNATXEKRNRHGQEPDKTQKXDNXERGXQTNPTXEENPHAAGDQNRRDSEKTXPKKAPAEQRASKQETXTGQQXPEGAPNNGRDHRQPXHNXEGKNARKQDAS

SEQ ID NO: 230709 - protein, 41 aa, Glycine max
  Clone ID: PAT_MRT3847_50351C.1.pep
RSMSIVFHYIYKYNLPLLSLWTLTKILVGFCLRLREFWMGK

SEQ ID NO: 230710 - protein, 35 aa, Glycine max
  Clone ID: PAT_MRT3847_50352C.1.pep
CPVLLGHIQTLNVLLNDNLNLLSTWPFNFQLSLIF

SEQ ID NO: 230711 - protein, 85 aa, Glycine max
  Clone ID: PAT_MRT3847_50353C.1.pep
IMIFSILLLLGNYLQFLYHRFKKIPLVLVSLKTILYLFCVQDCIIFFKKKKGFIDRYQNQFILPQKKIMIFRSYYFKGVLLILSS

SEQ ID NO: 230712 - protein, 152 aa, Glycine max
  unsure (1)..(152): unsure at all Xaa locations
  Clone ID: PAT_MRT3847_50354C.1.pep
MGMKQVIKNLDAFPRAEDHLLQKTQSGALVSVIGLIIMATLFVHELGYYLTTYTVHKMSVDLKRGETLPIHINMTFPSLPCDXRLNSYGHIIGTEYISDLVEKEHTNQEHDDNKDHDHHHEHSEQKIHLQNLDESTENIIKKVKEALKNGEG

SEQ ID NO: 230713 - protein, 347 aa, Glycine max
  Clone ID: PAT_MRT3847_50355C.1.pep
MGMKQVIKNLDAFPRAEDHLLQKTQSGALVSVIGLIIMATLFVHELGYYLTTYTVHQMSVDLKRGETLPIHINMTFPSLPCDVLSVDAIDMSGKHEVDLDTNIWKLRLNSYGHIIGTEYISDLVEKEHTHHKHDDNKNHEHSEQKIHLQNLDESTENIIKKVKEALKNGEGCPVYGVLDVQRVAGNFHISVHGLNIYVAQMIFDGAKNVNVSHFIHDLSFGPKYPGLHNPLDDTTRILHDTSGTFKYYIKVVPTEYRYISKEVLPTNQFSVSEYYSPINQFDRTWPAVYFLYDLSPITVTIKEERRSFLHFITRLCAVLGGTFAVTGMLDRWMYRLLETLTKSKSKR

SEQ ID NO: 230714 - protein, 90 aa, Glycine max
  Clone ID: PAT_MRT3847_50356C.1.pep
YGTVSVRPPITQVYTRKEKKNCRDLRHVCIDGGLEIVGIILTVIAESEESEIVGIISLLYIFTTHARFASYAWQVLLFIKISLHMLGLGP

SEQ ID NO: 230715 - protein, 53 aa, Glycine max
  unsure (1)..(53): unsure at all Xaa locations
  Clone ID: PAT_MRT3847_50357C.1.pep
HLQDENNPDFVVEGVSLLLEDHERLLSDLTFALNHKTFYLKKCCAXSHHLKGS

SEQ ID NO: 230716 - protein, 81 aa, Glycine max
  unsure (1)..(81): unsure at all Xaa locations
  Clone ID: PAT_MRT3847_50358C.1.pep
GCXFHSXFFNXQLXLRPLRXXXFXXALLXXXXXRXLXSQALHXXWICXLLTSXCFIILIRRLRXXXRGSXGTIXSALWFIX

SEQ ID NO: 230717 - protein, 59 aa, Glycine max
  unsure (1)..(59): unsure at all Xaa locations
  Clone ID: PAT_MRT3847_50359C.1.pep
MERGDIDNIIDRLLHERGKSAKLVHLSEAVIXPTCVASRDISMRQTNLLELDAPIEICG

SEQ ID NO: 230718 - protein, 1595 aa, Glycine max
  unsure (1)..(1595): unsure at all Xaa locations
  Clone ID: PAT_MRT3847_5035C.1.pep
NRWYSSSSEIKPASSKNQRYIIVGIDYFTKWIEAVPLPNGVKIPKFTKFAGETNESTVEHIARYLVEAGDLANNENLRMKFFPSSLTKNAFTWFTTLPPHSIHNWNQLERIFHEQFYMGQSKISLKELASVRRKALESIDDYLNRFRLLKARCFTQVPEHELVEMAAGGLDYSIRKKLDTQYLRDMAQLADRVRQLERLKAEKARNSKFHKKEKVAYVETNDSDQEFDIIYENIEPSNGKNPVEPKNDKFVSKTYTFDITKCDEIFDLLVIDGQIVVPKGLKVPPIEQQKKRGYCKFHNFLGHKTSRCVLFRDLVQKALDEGRLKFGEKPKVVQANAETSKAADTLYAEPQEIMMVETMEVSHVQVQDISEEDYNEQMKKKYQVVNKGAKQNQRFDKGKRVMVQSNTNQKSGRRNTFAPPGSVPVEKWMHQGLIRFNKGIMEVGRSSGTKQIGPQEANKYSYRNNYKGKNPMTRTQWRXVPASEEIGLTESANGPXREVSRRPVKERLLPPVDEDKMEDEDLLDSEPDFDVICVQLAYFEKPDFQMKSHLKPLFIRAKVENVGINKVLIDGGAAVNLMPRFMLYKIGKHDTDLSAHNIVLSNYEGKTGYSLGAIQVDVAVGSIVRPTLFLVIQSKANFNLLLGREWIHGVGAVPSTLHQKLIIWREDGIVENIEADQSFYKSEVDNVTAQTFDKKLANIAPCGDKEAVVESSDNVAQDPLEEIDIGDGSIKRPTYISANITSSLKEKLVPLLREFKDCFAWDYHEMPGLSREMVEMKLPIKEGRRPVKQLPRRFAPEIMSKIKEEIERLLRCKFIRSARYVEWLANINNATPKDEYAMPIAEMLVDSAAGFEFLSMLDGYSGYNQIFIAESDVSKTAFRCPGALGTYEWVVMPFGLKNAGATYQRAMNSMFHDFIDTFMQIYIDDIIIKSSSEDSHLDYLRQSFERMRKHGLKMNPLKCAFCVRAGDFLGFVVHKKGIEINQNKTKAILETKPPSTKKQLQSLLGKINFLRRFISNLSGKAQIFSPLLRLKKDEPFKWNEEHQKAFDEIKEYLIKPPVLMPPSRNKTMKLYIAASDKTIGSMLAQEDDDGIEHAIYYLSRVLNDAETRYTAIEKLCLCLYFSCAKLKQYIKPVDVYVYSHYDIIKHMLSKPILHSRIGKWALALTEYSLTYKPLKSVKGQIVADFIVDHSLIEMPQHYVDTEPWILYFDGSKHKHGTGIGVLIISPNKVPTKFKYKIKGLCSNNEAEYEALITGLEILISLGARNVNIRGDSELVLRQLTQEYKCVSEHLAKYFVMANSLLNHFDYINIEHIPRQENQEANDLAQIASGYKMSKEKLTQAIDNILDNDWRKSIIEYLENPIGNVARKIKFRALNYVIVGNDLFKKTAEGVLLKCLSESEAYLAVSHVHSGACGSHQAGHKIKWLLFRQGLYWPSMLKDCIEFAKGCQECQKHAGIQHVPASELHSIIKPWPFRGWALDLIGEIKPASSKNQRYIIVGIDYFTKWIEAVPLPNVDQEAVISFIQNYIIYRFGIPETITTDQGSVFTGRKMKEFAQKIGFRLLTSTPYYAQANGQVEAANKIVINLIKKHIAQKPRN

SEQ ID NO: 230719 - protein, 78 aa, Glycine max
  Clone ID: PAT_MRT3847_50360C.1.pep
QPLWPMKPTGSVRVTCLFPVGSQGHRGGFQFCFNPPYSGISIVVVDSLVSYVHIGLYIHMLCIRNWIQSALVIWAVPI

SEQ ID NO: 230720 - protein, 81 aa, Glycine max
  Clone ID: PAT_MRT3847_50361C.1.pep
GKNPGLRPCSHILESSTLHYLCSYIGAATPVSRKDCCPEILLGKLKLPVPPQISPTNLAKEKRNLERPPQASTKERTSLDY

SEQ ID NO: 230721 - protein, 326 aa, Glycine max
  unsure (1)..(326): unsure at all Xaa locations
  Clone ID: PAT_MRT3847_50362C.1.pep
MVVASCWCSSSSSWLPLSLPLHSNLKAASTSLSPKWKYHAFSEASSSSCSLVHNNQDDDLQALLQILPSDLHHNLLNQPNRPQLLEVILDLGRFPEARYLGKHGGHSLRNTELXVTVKELEYAEQAVGEFGKDNRAGIEGTLHRISAIRSRNGHIVGLTCRVGRAVTGQIDMVYDLLQYGKSILFVGRPGVGKTTVMREIARVLSDELHKRVVIVDTSNEIGGDGNIPHAAIGGARRMQVPEPSMQHRVMIEAVENHMPEVIVVDEIGTEAEAHACRSIAERGIMLIGTAHGQQLENIIKNPTLSDLVCFYFYMVVPITSGYANNI

SEQ ID NO: 230722 - protein, 108 aa, Glycine max
  Clone ID: PAT_MRT3847_50363C.1.pep
SSDPRVRCVMHDITLSALNYTSLHSRLVRVFSAHCYPLDSYLNQLTPSVHPALEYLPSLQHHNNTDTLSAQAPVYAVLTNVPIILPLDCDHYIYIISALRTAINSMIY

SEQ ID NO: 230723 - protein, 56 aa, Glycine max
  Clone ID: PAT_MRT3847_50364C.1.pep
NVRSLLIYENAMEGRSVLPSNIGFKFTRYSLLLILKNGYDIQISLPKFFEYMTFNT

SEQ ID NO: 230724 - protein, 58 aa, Glycine max
  Clone ID: PAT_MRT3847_50365C.1.pep
CQGGYHHYNRHITKSLKTMSFHPNPNLNNLQTTYPLNHMVLNMHLSYPKFITLPLIPN

SEQ ID NO: 230725 - protein, 81 aa, Glycine max
  unsure (1)..(81): unsure at all Xaa locations
  Clone ID: PAT_MRT3847_50366C.1.pep
XGXXQENWAQVTXPVWAVPLGXPEXDXLVDGLPHAHXXPXLGPDXPTSRPCQPKDGDERAMERXLLPFFNSRMSXALCFVL

SEQ ID NO: 230726 - protein, 62 aa, Glycine max
  unsure (1)..(62): unsure at all Xaa locations
  Clone ID: PAT_MRT3847_50367C.1.pep
NDRSLIEKKTSVELILPWSGTHKSSTISAALFCVLSGLXXYRVHEVRNSANNHALETSDSTE

SEQ ID NO: 230727 - protein, 164 aa, Glycine max
  unsure (1)..(164): unsure at all Xaa locations
  Clone ID: PAT_MRT3847_50368C.1.pep
VYRASVCMVGPFTGLKSMAGLPTKKTNYDITFIALNCGILQCMRVCPPDGKKKFETLCYLPHLDDAQXAKEVQYLLRKGWIPCLQFQLDHGFVYREHNRSPRYYDGRYXTMWDLPXFGCTDAYQXVKELQEAXTXYPNCFIRIIRFDHLSPSPCINFIAFKSPS

SEQ ID NO: 230728 - protein, 66 aa, Glycine max
  Clone ID: PAT_MRT3847_50369C.1.pep
LRVLNPPSQVDGPYKRKQRPMLLDFKNISMSAYFDEDKFVIWNEDHSSALATDFLNHCLFHFWFIC

SEQ ID NO: 230729 - protein, 128 aa, Glycine max
  Clone ID: PAT_MRT3847_5036C.1.pep
MVRFCWRPAAVGDDGDVNGRVEGLLWYKDLGNHLYGDFSMAVIQANSSLEDRSQLESGPLTSDYLGPQGTFVGVYDGHGGTAASQFVSDNLFCNFKGMLYMPLTLFYKHMCIYWSYSIFFSLDTFQMN

SEQ ID NO: 230730 - protein, 49 aa, Glycine max
  Clone ID: PAT_MRT3847_50370C.1.pep
MGEEEVYISIAVIAHVDSRKSTTTGHLIYKLGSIDKHVIERFEKEAAYM

SEQ ID NO: 230731 - protein, 146 aa, Glycine max
  Clone ID: PAT_MRT3847_50371C.1.pep
MSDINPNQPLPMDEVVTYKECWHNHAAARGRVIYDGCLEYLVDQDNLICACCGCHRNFHRKHTIFNGIPETQTLDRVQGMRPKRKKRTTFSSEQRNKLICFAESVGWKPRKDKKNEIQSFCSEMGMTRRMFLIWLSNNRHRAIKKA

SEQ ID NO: 230732 - protein, 148 aa, Glycine max
  Clone ID: PAT_MRT3847_50372C.1.pep
LHSSSIRHSSMAATASKFLQTPSKPKLRSQSNPKSSPVVTPDTPQTLYPRRSTRAKSLLFDAPKPPHTPLEISLTTPKRRIRRSIDCVDQDSGEDKATTSKISDKNKAPVVDASKKKKNGKNSIEVSFAPVTPASSEKASTRKREGEG

SEQ ID NO: 230733 - protein, 74 aa, Glycine max
  Clone ID: PAT_MRT3847_50373C.1.pep
RTVEDGVDRAKPWQLSEIVVADVLALGSNGIQKLWKWARSEKNLNGKLMIILLLSLKCIEVAITILHVILNFLF

SEQ ID NO: 230734 - protein, 101 aa, Glycine max
  Clone ID: PAT_MRT3847_50374C.1.pep
LKASEPAGKGFNGVKPQRPVLPGIKSLSCKVETPSAACSNGVKKAKSSAPPKYEKNAACQCLKEVPPLFPILKEVRAPALPNQGGVKVGFFIPKKNGISAG

SEQ ID NO: 230735 - protein, 64 aa, Glycine max
  Clone ID: PAT_MRT3847_50375C.1.pep
MANEAQNSFSPFHVLVSLVLLQSNIGMQPELARTSLRKAARCSSFTGTYSNSSTNTCTWRIFTN

SEQ ID NO: 230736 - protein, 117 aa, Glycine max
  Clone ID: PAT_MRT3847_50376C.1.pep
ESETFLQKAIQQQGRASVMDTIQEIQERHDTVKEIERNLNELHQVFLDMAVLVQSQGEQLDDIESHVARANSYVRGGVQQLHVARKHQKNTRKWTCIAIILLIIIILIIVLPIVLRN

SEQ ID NO: 230737 - protein, 116 aa, Glycine max
  Clone ID: PAT_MRT3847_50377C.1.pep
VFFSLGSFFLVICGLVAPRGPSCAVRIFVSRCRVGSFLPLFVLGRVFASFFVRSPFLRFCGPARLVWPGVLGSLSLFRRAWFLCAFSLPAAGCVRGLPFKGSPWGSVSSWVGCLFG

SEQ ID NO: 230738 - protein, 68 aa, Glycine max
  Clone ID: PAT_MRT3847_50378C.1.pep
KEKQQKEAGTWELLQKMTNWQIPNYEIQKTGSKKRGGAASSYSILIEISTFPSSPPNALADQDTCLFP

SEQ ID NO: 230739 - protein, 72 aa, Glycine max
  Clone ID: PAT_MRT3847_50379C.1.pep
MASFRFSFGFGVVAAVVLSLIFTLYMPVAVHAQSLAPAPAPTSDGTSIDQGIAYVLMMLALALTYLIHSSTF

SEQ ID NO: 230740 - protein, 581 aa, Glycine max
  unsure (1)..(581): unsure at all Xaa locations
  Clone ID: PAT_MRT3847_5037C.1.pep
TNVMSGYFGLNLGLHRPNFVSPLSEYVLQTELPRGVKIPKFTKFAGETNESTVEHIARYLVEAGDLANNENLRMKFFPSSLTKNAFTWFTTLPPHSIHNWNQLERIFHEQFYMGQSKISLKELASVRRKALESIDDYLNRFRLLKARCFTQVPEHELVEMAAGGLDYSIRKKLDTQYLRDMAQLADRVRQLERLKAEKARNSKFHKKEKVAYVETNDSDXSSILFMKISKTIPVEPKNDKFVSKTYTFDITKCDEIFDLLVIDGQIVVPKGLKVPPIEQQKKRGYCKFHNFLGHKTSRCVLFRDLVQKALDEGRLKFGEKPKVVQANAETSKAADTLYAEPQEIMMVETMEVSHVQVQDISEEDYNEQMKYREVSRRPVKERLLPPVDEDKMEDEDLLDSEPDFDVICVVSILPSEYDVQSEVTEIESEFDHFDMADPKPVFEKPDFQMKSHLKPLFIRAKVENVGINKVLIDGGAAVNLMPRFMLYKIGKHDTDLSAHNIVLSNYEGKTGYSLGAIQVDVAVGSIVRPTLFLVIQSKANFNLLLGREWIHGVGAVPSTLHQKLIIWREDGIVENIEADQS

SEQ ID NO: 230741 - protein, 253 aa, Glycine max
  Clone ID: PAT_MRT3847_50380C.1.pep
MADGSNGGVLMLEAPPSYGRPTGSNAEIIDALPYIDDDYADPRVKLEVDRLVEDEMRRSTKKPTDFLKDFPPLPNSNFQQNYPMIAREYERVRAGRPPVALDRSRYELEMPPANKRNDETAWKQALHRAQHLLQYQIMRMENLDLMLKYGPDTWKQHNQRLEVYLSRMQKLAQEQNEKIEKVNRERKYHQQNTAYELNALSMQWKELCQKNIDISAACASVENRINELKRGAAERGWNLEAVTENGQLAKSEL

SEQ ID NO: 230742 - protein, 258 aa, Glycine max
  Clone ID: PAT_MRT3847_50381C.1.pep
PRVRSDLADGSSGEILMLEAPASYGRSSDSDAEIIDALPYIDDDYADPRVKLEVDRLVEDEMRRSTKKPTDFLNDFPPLPNSIFQNYPMIAREYERVRAGRPPVALDRSRYDLEMPPPNKRNDETAWKQALHRAQRLLQYQIIRMENLDLMLKYGPDTWKQHNQRLEVYLSRMQKLAQEQNEKIEKVNRERKYHQQNPAYELNALSMQWKELCQKNIDISAACASVENRINELKREAAERGWNLGAVTENDQLANSEL

SEQ ID NO: 230743 - protein, 202 aa, Glycine max
  Clone ID: PAT_MRT3847_50382C.1.pep
MSPEQGAMQSQLDAVADWIVKLEYLQSLRLKSRDEKGRPWNLHLKSLKNHINLTDIYLLGNLNGPSILTQLPPNLVELTLSHSKLEEDPMKILKDLPNLRSLSLHAESYIGIKLVCNSKSFPQLYVLKVWKPEQLKDWEVKQQALPSLRQLEIRSCLRMTKLPDGLKHVNSLLELKLTNMPVEINTDKHNIPPNCEVHRDDS

SEQ ID NO: 230744 - protein, 30 aa, Glycine max
  Clone ID: PAT_MRT3847_50383C.1.pep
YKFQHRTNNLMPQVTSIQPSQSKRQNYLGV

SEQ ID NO: 230745 - protein, 66 aa, Glycine max
  unsure (1)..(66): unsure at all Xaa locations
  Clone ID: PAT_MRT3847_50384C.1.pep
XXAXXGXXXXGGGXXXXXXAXXXXVVWXLSRGFXRGSXGXXSQXISSXXPXLXXSRAXVXXSVXAT

SEQ ID NO: 230746 - protein, 387 aa, Glycine max
  unsure (1)..(387): unsure at all Xaa locations
  Clone ID: PAT_MRT3847_50385C.1.pep
ALCYSAAGQNEVALNLLRKACGSSEAKHRPHFPSFLFGAKLCSLNPNHAREGIKFSQEVIDLVKHQNEHFLSQGQKFLGICHGAAARISVLDSERIIFQKESLKFLKDAALNGNNNDPEVMLTLGLENAIQRNLNAAYDNIMMYSDMMAGSSRRGWQLLALTVSAQQRFQDAETIVDFALDEAGDIDQLELLRLKAVLQITQQQPKQAIETYRILLAVIEARKEHWLQAKTFRHEALTEQKLEMEAWQDLATIYADLCSFLDAKACVDKSQSIEFFSPRSWHITGLLFEAQSLHKEAFVSFSVSLSIEPDXIPCIISTAKLFLKLGIPSLPIARSFLMNALRLDPTNHDAWFNLGLVSKMEGSLQQAADCFQAAYELKLSAPVQKFE

SEQ ID NO: 230747 - protein, 92 aa, Glycine max
  Clone ID: PAT_MRT3847_50386C.1.pep
PGPPPPNFVVQNPKKCPPHQLGSSNSPPPERPLPRARLKNKNKTGYSSTQYFSPQKPMFKTPSFGGPPRRPPKKKGVGNFAGPPPPPRGEKN

SEQ ID NO: 230748 - protein, 341 aa, Glycine max
  unsure (1)..(341): unsure at all Xaa locations
  Clone ID: PAT_MRT3847_50387C.1.pep
LGCLQVGKGLSKDDKAQKLALQHWLEAXIDPRHRYGHNLHMYYDIWFESQSTQPFFYWLDVGDGKEINLEKCPRSILQRQCIKFLLPLQKEREEYEVIVENGKLVYKKDGRLVDTDEKSKWIFVLSTTRALYVGRKQKGTFQHSSFLSGGATTAAGRLVAHQGALEAIWPYSGHYHPTEENFKEFISFLEEHNVDLTNVKRCAIDDDNPSLIGTNSFTATNESQQAMGPTLNSRTGPASAINVNDSKTHKKDDAATFNLSKRLSCKWTTGAGPRIGCVRDYPEHLQSRALEQVNLSPRPTSARLSNYGPIPSPRPSPKVRMSPRIAYMGLPSPRNPIPAAS

SEQ ID NO: 230749 - protein, 128 aa, Glycine max
  unsure (1)..(128): unsure at all Xaa locations
  Clone ID: PAT_MRT3847_50388C.1.pep
KKKGAPPFPGGKKVGTKGFSLYPPIFFNVKGARLKPPNEKFGPVKALIRFXPLGGPFXRAPPPQFGPVPGVVPQSLAPPTPMSGAIWAGGVWAPRYFPPEKALPFGGGKMGGFGKNFGLEPPPRAPPV

SEQ ID NO: 230750 - protein, 87 aa, Glycine max
  Clone ID: PAT_MRT3847_50389C.1.pep
PTLYYYSLPGQYCIPCSTYYYNYLPPLTRSSSPYLYVSPAPSSRYPPPSYEYTSPPAPSTAPAPKYMYKSPPPAVYIYASPPTPIYK

SEQ ID NO: 230751 - protein, 1951 aa, Glycine max
  Clone ID: PAT_MRT3847_5038C.1.pep
MARPPPSNRNNDLPNMEGQPTQTSVSNANINSGIGAIPDQTVGTISSTALTVMNQTGVTSPMTNMTLASSTTSASAFAPWNNPRLQNSQPNIENLNMSSPSGSVAGNQGRQPPIRQIQIQAPVQEVQMPNNPGMQMAQAPQTLARIEPPAQQVEPNPGIVLVNRNQNADEVIGNIQQNRFDRQNNLAQMVETILVQNGLNLGLHRPNFVSPLSEYVLQTELPRGVKIPKFTKFAGETNESTVEHIARYLVEAGDLANNENLRMKFFPSSLTKNAFTWFTTLPPHSIHNWNQLERIFHEQFYMGQSKISLKELASVRRKALESIDDYLNRFRLLKARCFTQVPEHELVEMAAGGLDYSIRKKLDTQYLRDMAQLADRVRQLERLKAEKARNSKFHKKEKVAYVETNDSDQEFDIIYENIEDNEVDLAELKPGPPYVCKLLRPSNGKNPVEPKNDKFVSKTYTFDITKCDEIFDLLVIDGQIVVPKGLKVPPIEQQKKRGYCKFHNFLGHKTSRCVLFRDLVQKALDEGRLKFGEKPKVVQANAETSKAADTLYAEPQEIMMVETMEVSHVQVQDISEEDYNEQMKVVYPQAEEELIDFLNRCKLENKIVMLCPRCSAVCDREATEGLKKYQVVNKGAKQNQRFDKGKRVMVQSNTNQKSGRRNTFAPPGSVPVEKWMHQGLIRFNKGIMEVGGSSGTKQIGPQEANKYSYRNNYKGKNPMTRTQWQRLLPPVDEDKMEDEDLLDSEPDFDVICVVSILPSEYDVQSEVTEIESEFDHFDMADPKPVCYYVMNNGCVEEQLAYFEKPDFQMKSHLKPLFIRAKVENVGINKVLIDGGAAVNLMPRFMLYKIGKHDTDLSAHNIVLSNYEGKTGYSLGAIQVDVAVGSIVRPTLFLVIQSKANFNLLLGREWIHGVGAVPSTLHQKLIIWREDGIVENIEADQSFYKSEVDNVTAQTFDKKLANIAPCGDKEAVVESSDNVVHSVKLHPTYGFIWEREEIDAVPSEDGVIPPTGITAYMAENRLNTAFEAESQQSMAVEAKIEDHENKETKDRRLDCIYDDEPLGFEKNPVSEVPKMQAQDPLEEIDIGDGSIKRPTYISANITSSLKEKLVPLLREFKDCFAWDYHEMPGLSREMVEMKLPIKEGRRPVKQLPRRFAPEIMSKIKEEIERLLRCKFIRSARYVEWLANIVPVIKKNGTLRVCIDFRDLNNATPKDEYAMPIAEMLVDSAAGFEFLSMLDGYSGYNQIFIAESDVSKTAFRCPGALGTYEWVVMPFGLKNAGATYQRAMNSMFHDFIDTFMQIYIDDIIIKSSSEDSHLDYLRQSFERMRKHGLKMNPLKCAFCVRAGDFLGFVVHKKGIEINQNKTKAILETKPPSTKKQLQSLLGKINFLRRFISNLSGKAQIFSPLLRLKKDEPFKWNEEHQKAFDEIKEYLIKPPVLMPPSRNKTMKLYIAASDKTIGSMLAQEDDDGIEHAIYYLSRVLNDAETRYTAIEKLCLCLYFSCAKLKQYIKPVDVYVYSHYDIIKHMLSKPILHSRIGKWALALTEYSLTYKPLKSVKGQIVADFIVDHSLIEMLQDYVDTEPWILYFDGSKHKHGTGIGVLIISPNKVPTKFKYKIKGLCSNNEAEYEALITGLEILISLGARNVNIRGDSELVLRQLTQEYKCVSEHLAKYFVMANSLLNHFDYINIEHIPRQENQEANDLAQIASGYKMSKEKLTQLIEIKDKLELLEPLSTKLPMPKLVGANTPQNNEDESMNDLQEKIQILAIDNILDNDWRKSIIEYLENPIGNVARKIKFRALNYVIVGNDLFKKTAEGVLLKCLSESEAYLAVSHVHSGACGSHQAGHKIKWLLFRQGLYWPSMLKDCIEFAKGCQECQKHAGIQHVPASELHSIIKPWPFRGWALDLIGEIKPASSKNQRYIIVGIDYFTKWIEAVPLPNVDQEAVQFLRDEK

SEQ ID NO: 230752 - protein, 101 aa, Glycine max
  Clone ID: PAT_MRT3847_50390C.1.pep
AARLPYRTYLSGTRPPTRPYGCEKTTNWVVHSLNNPDACRAEGDTTIGLRPPSVIGKLRTNHTPSHGFAVVFLIPRSDCSKNRWKKSEWKKDHNVAIEWNH

SEQ ID NO: 230753 - protein, 285 aa, Glycine max
  Clone ID: PAT_MRT3847_50391C.1.pep
MGKSASTTAAAALVLLLFFISPSTAEIKTLSITSDTRPMILLEKFGFTHSGHVSIAVSSVSVVASGGSQPDPSRLGFFLLSEESLLQVLTEIQQNPSFCVLDSRYTMHLFTFRKLSPPPAATANYTYPVTIPNEYSIFFANCAPETSVSMLVHTELYNLDADSEHSRDYLSAGQTHLPTLFSLFSVAYFAFLALWIYICYSNKLSLHRIHLLMAALLLMKALNLLCAAEDKHYVKVTGTPHGWDVLFYIFQFIRVVLLFTVIVLVGTGWSYLKPFLQEREKKVLM

SEQ ID NO: 230754 - protein, 81 aa, Glycine max
  unsure (1)..(81): unsure at all Xaa locations
  Clone ID: PAT_MRT3847_50392C.1.pep
TKSDPPSWDXFFPIKVXGPXNGFKMGSSERANKTSWHLSVFMDNPYQXAVWNVLWGISQDCAIAGNLFMPAFFVPQDIARW

SEQ ID NO: 230755 - protein, 264 aa, Glycine max
  unsure (1)..(264): unsure at all Xaa locations
  Clone ID: PAT_MRT3847_50393C.1.pep
LYLSRTSQSSIQFSRTTSSQVPTLPLPHALLSQPPGGQPSRKKAIASTSSRRPRSHCSQSLGRDATACHPFTSSHRRDSTADSHCDPQMSITRQRPLGGGGHHVLDYLKRMQAENPAFFYAVQDDNNLACGNIVWADATSRTNYSYFGDAVILDTTYKTNRYRVPFTSFTGLNHHGQPVLFGCALIFNESESSFIWLFRTWLHAMSGRHPVSITTDLDPFIQVTVAQVLPSTRHRXCKWSIFRETRSNWLINVSHLILKLNSEM

SEQ ID NO: 230756 - protein, 47 aa, Glycine max
  Clone ID: PAT_MRT3847_50394C.1.pep
SRRNSDIYLTVHLLHHGFYKRLYLIGFDIICDLLWRCCCWFHRIFSK

SEQ ID NO: 230757 - protein, 94 aa, Glycine max
  unsure (1)..(94): unsure at all Xaa locations
  Clone ID: PAT_MRT3847_50395C.1.pep
XXXLXXIXXXFXXXXXXXXXXQXYXXYNXXXFXXXYXSKYIQXXXXNXXXXFXXXIXXXXXXIXXLXXIXXFXXXXXXXXXFXXNXXXXXXXXX

SEQ ID NO: 230758 - protein, 145 aa, Glycine max
  Clone ID: PAT_MRT3847_50396C.1.pep
MDSPKDHQNVVTIDVHAAKDLLNSSGYRYLDVRSVEEFNKSHVENAHNVPYVFITEAGRVKNPDFVDQVAAICKTEDHLIVACNSGGRSLRASVDLLDSGFKNIVNMGGGYSAWVDAGFAGNKPGEDLKTSCKFRPNIAKPTAQP

SEQ ID NO: 230759 - protein, 93 aa, Glycine max
  Clone ID: PAT_MRT3847_50397C.1.pep
HRYRCCRRRRRRRRGVRGFPFRHGARREGGPPSLWLVNENLGNSGIESEASVDGACSLLLARWMMMDEERGIRVRFALGIWESHCVRGLGAVG

SEQ ID NO: 230760 - protein, 81 aa, Glycine max
  Clone ID: PAT_MRT3847_50398C.1.pep
FLFGAPRGSPFFIREGSGGEFGGEIYFSQVLPKNQFSPRFKQAFNRENLGEVGGRAGIYSGVNRWKMGGPPGGGPFFLFEC

SEQ ID NO: 230761 - protein, 50 aa, Glycine max
  Clone ID: PAT_MRT3847_50399C.1.pep
GRALLCSFLSCAVAAFTFSAKVRFALRSHKLAGLVNTKNSNLWFMIIYII

SEQ ID NO: 230762 - protein, 172 aa, Glycine max
  unsure (1)..(172): unsure at all Xaa locations
  Clone ID: PAT_MRT3847_5039C.1.pep
ESWSPAVRSGFRSTTRRHRRRLERHRRVNTCCKTDLHSRIGKWALALXRYSLTYKPLKSVKGQIVADFIVDHSLIEMLQDYVDTEPWILYFDGSKHKHGTGIGVLIISPNKVPTKFKYKIKGLCSNNEAEYEALITGLEILISLGARNVNIRGDSELVLRXLTQEYKCVNEH

SEQ ID NO: 230763 - protein, 254 aa, Glycine max
  Clone ID: PAT_MRT3847_503C.1.pep
MAMYAMLRRASSAALPQLARRPAMASSSSRTFHSVLSVLRRETATTTTIAPSLRFANAFATKSSADEHLAQVLQSEIQCALEDDHAQHQVEVPVDFPFDIEDNPGERTIQLKGKFRDEIIKVQVDIPNVAPEEEHEDDENGNNEKNDSESSIPLVVSVFKENGVSLEFGVTAFPDEISIDSLSIKQSEESEDQLAYEGPEFIDLDENLQKAFHKYLEIRGIKPSTTNFLQEYMFAKDNKEYLMWLKNLKNFVEK

SEQ ID NO: 230764 - protein, 128 aa, Glycine max
  unsure (1)..(128): unsure at all Xaa locations
  Clone ID: PAT_MRT3847_50400C.1.pep
NSVLIQGAVINNLMRRPILGIADDLYDDDIAGYQEVDDAVDTDDGDAVADDEREAGLRRYGATLNDIEIRELMESADADISVTMDYREFIAAXFMTTXLERDEHLIAGCQYCXKDGSGYMTCDVLQHA

SEQ ID NO: 230765 - protein, 82 aa, Glycine max
  unsure (1)..(82): unsure at all Xaa locations
  Clone ID: PAT_MRT3847_50401C.1.pep
DLIAGSPARELXCVTSLAESDPPLLEDALKRIKVIREKELSHADDQRRMSYPIAEEALRLLLWLXLDSDAVCEAALGLYELN

SEQ ID NO: 230766 - protein, 241 aa, Glycine max
  unsure (1)..(241): unsure at all Xaa locations
  Clone ID: PAT_MRT3847_50402C.1.pep
STLDISDCSTVAAHPRYANPYNTPSSAPPPLTPPGHEAAGTIAALGRNVTTLSLSDPVTADPLSPCHSCFHCTRNKPLLCTALTAYGGNAPGAFAQYARYPAHLVHRTGALPALSAVLMEPAACALHGIERMQLAPGSRVLLFGCGPTGLLLAQLLRLNGAAHLTIASKTGPKLDLARGMGVADAFVAISDDGAVADMXALHAANPHGFDVVVXXXXXPXVLXXSIEFVRXXXKLVVTTTR

SEQ ID NO: 230767 - protein, 68 aa, Glycine max
  Clone ID: PAT_MRT3847_50403C.1.pep
MQFLKKKKKKKKKKKKKKKKKKKKKKKKKKKKKKKKKKKKNIKKKKIKKKKTKKKKKKKGGPPKKTKI

SEQ ID NO: 230768 - protein, 89 aa, Glycine max
  Clone ID: PAT_MRT3847_50404C.1.pep
ADLRCLSQMLGIGSDALDRLTHTESPLSQSYISRARERSIVNQTDSKEISSMDDMVGQHLDVSILCQQMDSEGNKLVPLYQRVLTALII

SEQ ID NO: 230769 - protein, 129 aa, Glycine max
  unsure (1)..(129): unsure at all Xaa locations
  Clone ID: PAT_MRT3847_50405C.1.pep
KPGGRAQPQNTNAAXXAPKXRRPADENXRDEARRINGGDDHHXXXAKXXXXKADPAXXTTEXHXXDENXXRXQXXGPXDXQHDXDAXKRXDGEXRRNPXDXRXGKTTXPXGXGGXSXKKEXXPXEXHDD

SEQ ID NO: 230770 - protein, 75 aa, Glycine max
  Clone ID: PAT_MRT3847_50406C.1.pep
RTGLQQHTIATMDISHDDTDLHLLTITSSCTFSMMTPELLPAIKAGTFCLMIKIEHTLREDCYSRLRRVWPGNYV

SEQ ID NO: 230771 - protein, 51 aa, Glycine max
  Clone ID: PAT_MRT3847_50407C.1.pep
LTWTCIPHRMFFLHLRSPYPFTTCPKIKNKSHCYPFSLSTILCLTFQTGRT

SEQ ID NO: 230772 - protein, 586 aa, Glycine max
  Clone ID: PAT_MRT3847_50408C.1.pep
ACPPYVYHSVGFLFAPIVLAWLLCISTLGLYNIFKWNPHVYKALSPYYMFKFLKKTRISGWMSLGGILLCITGSEAMFADLGHFSYMAIQIAFTFLVYPALILAYMGQAAYLSHHHDSELELSFYVSVPESVRRPVLILAILASVVGSQAIISGTFSIINQSQSLGCFPRVKVVHTSDKIHGQVYIPEINWILMILCIAVTIGFRDTKHMGNASGLAVMTVMLVTTCLTSLVIVVCWQKPPIIALCFLLFFGFIELLYFSASLTKFCEGAWLPILLALFLMIIMFLWHYATIRKYEYDLHNKVSLDWLLALGPSLGIARVPGIGLVFTDLTTGIPANFSRFVTNLPAYHRILVFVCVKSVPVPHVPAAERYLVGRVGPAAHRSYRCIVRYGYRDVHQDVDSFESELVARLADFIQYDWYRSRRSSMSIEDDGSNSNESSSYRLTVIGTTGFTIQPGYESGGESVQQASVSVGFPTVQSVTDVIEMEPVMTERRVRFAIEDEPESDARSETGVQMQEELEDLYAAQEAGIAFILGHSHVRAKQGSSVLKKLALNYGYNFLRRNCRGPDVALKVPPVSLLEVGMVYIV

SEQ ID NO: 230773 - protein, 69 aa, Glycine max
  Clone ID: PAT_MRT3847_50409C.1.pep
KDGRIQNLTSHTLEPVPIDIGGPGRPPGVRFRNDVAAGGLAFVVATVMHLHVFQAPIVYEPTLVEAVDN

SEQ ID NO: 230774 - protein, 51 aa, Glycine max
  unsure (1)..(51): unsure at all Xaa locations
  Clone ID: PAT_MRT3847_5040C.1.pep
YFFLXLFFTNIITTTTXKKKRLFSNLLNTPTNLKKKKKKTHPTTNIFYPYP

SEQ ID NO: 230775 - protein, 54 aa, Glycine max
  Clone ID: PAT_MRT3847_50410C.1.pep
SLTQIWTREADIYATPRADSLPAVLTEIESTKVGMACLKHGSSTFISEGPRLIP

SEQ ID NO: 230776 - protein, 102 aa, Glycine max
  Clone ID: PAT_MRT3847_50411C.1.pep
NSARGKECRWVFSLVNLIKKKKKKINSTDVYWTNGPNMFGPFSDVHRGDNEGNCFTFLHFPFYLYIFFMYFFCIFPQKIYLFQNLILLLFSGSSLRYYLFLF

SEQ ID NO: 230777 - protein, 70 aa, Glycine max
  Clone ID: PAT_MRT3847_50412C.1.pep
MVVKVYGPTYGSPKRALVCLIEKEFDFETGHVDLFRGEIKDPEFLKLQQFGPLPVIQDGDYTPYESRAII

SEQ ID NO: 230778 - protein, 42 aa, Glycine max
  Clone ID: PAT_MRT3847_50413C.1.pep
ALESLRDYDGGVAQTADAALISLRPLSRTTTFVEVDIIFSQL

SEQ ID NO: 230779 - protein, 84 aa, Glycine max
  Clone ID: PAT_MRT3847_50414C.1.pep
HVKLRIIMSIRHTKLLLRCVSFLESVSCVECLPCTAILGMIDYVVVDVVYVVVITYGVGTEVIGHNANDPTDNVWNVLGNTIGL

SEQ ID NO: 230780 - protein, 50 aa, Glycine max
  Clone ID: PAT_MRT3847_50415C.1.pep
VHAHHHDAVTDISVSGISGGGRCQHLHALTLYSCCPLIVGGESRFVSSSS

SEQ ID NO: 230781 - protein, 101 aa, Glycine max
  Clone ID: PAT_MRT3847_50416C.1.pep
LRNSGFLLLGSLGCALGEEVVLSVLERHHLLQFPVWRFWSRLRTRVPCYLPDYSRIIQSQDDKGEDGKKQTGDARPERLREERNSRGNCTPLSASQKPWNE

SEQ ID NO: 230782 - protein, 95 aa, Glycine max
  Clone ID: PAT_MRT3847_50417C.1.pep
MASAAARSIFRSCSASRSAFRVASESKPVRSPFRIASNKPLSQSQSTLRFPVELSSCVESMMPYHTATASALMNSMLSISSRTSAWIPEGQKQTT

SEQ ID NO: 230783 - protein, 64 aa, Glycine max
  unsure (1)..(64): unsure at all Xaa locations
  Clone ID: PAT_MRT3847_50418C.1.pep
PPPPKTPPPPPPSPHSXPPPPPPPTHTHAAPPSPPPPQHPPRRXPKEQAXPPIXPTNVAKEWPT

SEQ ID NO: 230784 - protein, 81 aa, Glycine max
  Clone ID: PAT_MRT3847_50419C.1.pep
APHAAAAPDTLSSPLRANTPPRQCPRKIRSNTTWDVKNNAWAFLMAFWGVEPEGGGGLKGTLLVRLNEWNKSCQMKTGSTL

SEQ ID NO: 230785 - protein, 123 aa, Glycine max
  Clone ID: PAT_MRT3847_5041C.1.pep
MKSCTLISKSTGPFTMPLTSEAAAIRVIRNLEHLGLYYTLFVWIILFIVLIPHRKLSLIILVIMTYVIVIYCLVLRAYPKSIFLHRTIDKKFVLALLVFATFVQLILTEAGIQLAVTLACAVP

SEQ ID NO: 230786 - protein, 95 aa, Glycine max
  Clone ID: PAT_MRT3847_50420C.1.pep
MASAAARSIFRSCSASRSAFRVASESKPVRSPFRIASNKPLSQSQSTLRFPVELSSCVESMMPYHTATASALMNSMLSISSRTSAWIPEDCNDDV

SEQ ID NO: 230787 - protein, 83 aa, Glycine max
  unsure (1)..(83): unsure at all Xaa locations
  Clone ID: PAT_MRT3847_50421C.1.pep
RGTYLHAGRNNVLLAXPALLNAINNYVKSIMQPDFNSATCEXLNNLNVXVIALLVKGINNRPCFIIQRETLALLVIGEKCLSY

SEQ ID NO: 230788 - protein, 37 aa, Glycine max
  Clone ID: PAT_MRT3847_50422C.1.pep
KTKKKLLENIKKVIDSIILCIQQRHFSFSLLTNVLIW

SEQ ID NO: 230789 - protein, 65 aa, Glycine max
  Clone ID: PAT_MRT3847_50423C.1.pep
ATGAKHKPRGYVTHYLSCLSVTKRTNISRTLSAKKNNAHPPEAAHTGLLSLARAEQNPPALLPMR

SEQ ID NO: 230790 - protein, 325 aa, Glycine max
  Clone ID: PAT_MRT3847_50424C.1.pep
ARVRTVVAENEDNLCTISEEEQAAIAAAEAARAKALAAAEAYASAEARCNTLLQLPKIPSFHKFARREQPSQNDECDSRKRWPGGVYGRQDCISEIDSRNCRVRDWSVDFSAACVNLDNSRMPVDNLSQRSHSNEIASHLNFREHSGESVAGDSSIYTKAWIDTAGGIAIKDHHAIERWQSQAAAADSYFSNPSIDLKDEEDSNACSKLPSWKRDGIANESSISQVTVNKEAQKGHSRGADHIKQAVVDYVASLLMPLYKARKLDKDGYKAIMKKSETKVMEQATDAEKAMTVREFLDFKRKNKIRSFVDVLIERHMTTKPDMKS

SEQ ID NO: 230791 - protein, 113 aa, Glycine max
  Clone ID: PAT_MRT3847_50425C.1.pep
MKVVLPSIPLGTALIDMYAKCGQLQKSRMVFDSMMEKDVICWNAMISGYGMNGYAESALDIFQHMEESNVMPNGITFLSLLSACAHAGLVEEGKYMFARMKSYSVNPNLKHYT

SEQ ID NO: 230792 - protein, 66 aa, Glycine max
  Clone ID: PAT_MRT3847_50426C.1.pep
MSYITVEAIVGATQVMAVAAILAVVVATLVVVSAYKSDNPEPFMDQRVKRYGPIFTTHVFGEPTVF

SEQ ID NO: 230793 - protein, 39 aa, Glycine max
  Clone ID: PAT_MRT3847_50427C.1.pep
QDDIDWKLIDKTGNESRHMGRTGEYKLDEPHEQILTNTL

SEQ ID NO: 230794 - protein, 60 aa, Glycine max
  Clone ID: PAT_MRT3847_50428C.1.pep
EVILILGTLSLCSKHSHVSRPSTIKLGNLVLCHLWCSKGEEKRENIDMLYILKQSFGHTT

SEQ ID NO: 230795 - protein, 67 aa, Glycine max
  Clone ID: PAT_MRT3847_50429C.1.pep
GGDDWDIGACHEIIYMHAHKMKVPIYFGIPSSFNVHPHFLNPFLSLYSLVIFKELICIGDERRKQAN

SEQ ID NO: 230796 - protein, 119 aa, Glycine max
  Clone ID: PAT_MRT3847_5042C.1.pep
HASAVFALKEDQHIRVQKEGFEVKEEKKVEQVTVALHIGLPNTGGHDPDDDNDHDADDEKKVFHVKEEEEPLKKGFQGNCSFNQERRFWIPTPAQILVGPMQFACSICSKTFNRYNYAG

SEQ ID NO: 230797 - protein, 79 aa, Glycine max
  Clone ID: PAT_MRT3847_50430C.1.pep
GEKKFIYLLLFLNRGGKLLGKIKGPPFFFSPPQGVNPLNFKPRQTNPLVPRNLGNRAQQILFLRSGAKGVLPVTWPPGL

SEQ ID NO: 230798 - protein, 161 aa, Glycine max
  Clone ID: PAT_MRT3847_50431C.1.pep
MSDPENTPAPQSEQDSSSPPPAQDQPVAADAKLGPAGVSFSIWPPTQRTRDAVITRLIETLSSPSVLSKRYGTMSPDEASTAARQIEDQAFSVAASSAASDNDGIEILQVYSKEISKRMLDTVKAKSTTASAAVDIGTPASDAAPAPAADGDSAAGAESET

SEQ ID NO: 230799 - protein, 64 aa, Glycine max
  Clone ID: PAT_MRT3847_50432C.1.pep
NTKLEIGGFCNSRSLIKQFNCLRTSPFFVQSSLLTKIMCYNILLTCASNIHFTVYKHLTMRLVF

SEQ ID NO: 230800 - protein, 197 aa, Glycine max
  Clone ID: PAT_MRT3847_50433C.1.pep
MVGVVIEDEVVVAPTNFSMVEEGIYRSSFPRSSNFSFLESLNLRSIIYLCPEPYPQENLEFLQSQNIRLFHFGIEGKTDLSVSAVRDNILEAVKVLIDVRNHPVLIHCNQGKHRTGCVVGCLRKLQSWCLSSVFEEYKRFAGAKYRTTDLRFIETVDLLSLRQCLNSIIYQYLGYASKKLRLRYRDENSIKPQLTSV

SEQ ID NO: 230801 - protein, 46 aa, Glycine max
  unsure (1)..(46): unsure at all Xaa locations
  Clone ID: PAT_MRT3847_50434C.1.pep
XSRSPTTGTXFGGDSNXREXGRXDQKKPXLKXRKLSLKPYLWICPN

SEQ ID NO: 230802 - protein, 66 aa, Glycine max
  Clone ID: PAT_MRT3847_50435C.1.pep
KSNSGCQCHMHEGFFYPSLIFCVQDMAISLNANKRAVTSNLINYFLFENFFFEYFFFLDYCLNMPI

SEQ ID NO: 230803 - protein, 82 aa, Glycine max
  Clone ID: PAT_MRT3847_50436C.1.pep
SSSSEESFQACITSTYEGISAGLSSNGMGICRRSIVRSNLKVNISHQLFFLQIFLFGMINVMSPVRDPPKEPPVYPAVVNGR

SEQ ID NO: 230804 - protein, 172 aa, Glycine max
  Clone ID: PAT_MRT3847_50437C.1.pep
MAHLDVCHQVRFIGQLEEYGSRLSSSIPTVEGSKDKEEIVEVKPIFMPNFKKRKRLSLNRLREIKADMCARQSSGTPKTKCESIDRWSAKRYELAQQSMWEVLKGEGATFENPITRPALRMAARKHIGDTGLLDHLLKHIDGKVAPGGTERFRRCFNTNGIMEYWLESANLD

SEQ ID NO: 230805 - protein, 51 aa, Glycine max
  Clone ID: PAT_MRT3847_50438C.1.pep
SIFVLRRLRARDEYRERSIKERERSLSDHSIFFILHVMFCYCFFRAHKVSI

SEQ ID NO: 230806 - protein, 82 aa, Glycine max
  Clone ID: PAT_MRT3847_50439C.1.pep
SLSLGEACSTARVTDFRFDADGSYFPPKLCGRHQVLAAMAVLYWFLSSASSVFNFWLFPTLENSSLYKLVIGTPIIRVQMPE

SEQ ID NO: 230807 - protein, 190 aa, Glycine max
  Clone ID: PAT_MRT3847_5043C.1.pep
MRFWLEENTHPTMAATIPFSLLRNCAPLKLATPFARKASIFNLLLPLQPRRLVSSTCAVNNEEATAKTAAVNFDSEAPTIFDKIINKEIPSSIVYEDEKVLAFRDINPQAPVHVLVIPKLRDGLTQLGKADSRHGEILGQLLYAAKIVAEKEGIDDGFRVVINNGPSACQSVYHLHLHVLGGRQMNWPPG

SEQ ID NO: 230808 - protein, 217 aa, Glycine max
  Clone ID: PAT_MRT3847_50440C.1.pep
MDLQRQEPCPSENLNIITFSDTVPCQNPSINTQTKTNQTQMEDQKHQHDSVPRVLLDLSLSSNKDSGDDNSKLKPELNLLNCFHTNFSENSSESSQGNELDPRVFSCNYCQRKFYSSQALGGHQNAHKRERTLARRGYKAGAADFGHTYSNIHFLPSHGLYNKALGIQVHSMINKPSYQTPFFGLCRSNNGWQRQPLDSQPAIGNFRVAETESSSLA

SEQ ID NO: 230809 - protein, 59 aa, Glycine max
  Clone ID: PAT_MRT3847_50441C.1.pep
FNGLVLTLCPQCWKFVLDKPPPNLGLAASLAKFYSFFCFPNFPFLFSFPLLSQLYLIIR

SEQ ID NO: 230810 - protein, 53 aa, Glycine max
  Clone ID: PAT_MRT3847_50442C.1.pep
DHNPFFFALQHQTSGATFLSPFDIKLNVITIQHPYHYWLIILTSRSHLLRSIT

SEQ ID NO: 230811 - protein, 65 aa, Glycine max
  Clone ID: PAT_MRT3847_50443C.1.pep
LFFFFFFFFFFFFFFFFFFFFFFLKSRQNGGPRFYSTDPLRGENKNKKKRGFCLFYGGLGLQKKK

SEQ ID NO: 230812 - protein, 65 aa, Glycine max
  Clone ID: PAT_MRT3847_50444C.1.pep
NHGLVIGAVYVLVNSNLKFSRGRLLCLKNIEVRFQLAGLYFELNLRNIEVRFPCTTSYSFPLLYV

SEQ ID NO: 230813 - protein, 99 aa, Glycine max
  unsure (1)..(99): unsure at all Xaa locations
  Clone ID: PAT_MRT3847_50445C.1.pep
MSAGPGLESLVXDQTISVITNDGRNIVGVLKGFDQATNIILDESHERVYSTKEGVQQLVLGLYIIRGDNISVVGELDEELDSSLDLSKLRAHPLKPVIH

SEQ ID NO: 230814 - protein, 60 aa, Glycine max
  Clone ID: PAT_MRT3847_50446C.1.pep
AGPWSFIITCTTLSSTFTSLNNLARICSYLYVIRYADMHYSTRSTSYVGNCHFMSCGYVT

SEQ ID NO: 230815 - protein, 183 aa, Glycine max
  Clone ID: PAT_MRT3847_50447C.1.pep
MIIPEKNRKEICKYLFQEGVCFAKKDFNLAKHPEIDVPNLQVIKLMQSFKSREYVRETFAWMHYYWFLTNDGIEFLRTYLNLPSEIVPATLKKQAKPPGRPFGGPSGDRPRGPPRFEGERRFGGDRDGYRGGPRGGPGGDFGGDKGGAPADYRPSFGGPGGRPGFGRGSGGFGAPTSSNLPQV

SEQ ID NO: 230816 - protein, 230 aa, Glycine max
  unsure (1)..(230): unsure at all Xaa locations
  Clone ID: PAT_MRT3847_50448C.1.pep
IQSCAAMPHRNNPAPLPLVVTLNCVEDCSLEFESLAGVATVEHVPLSRLSDGKIESAAAVLLHSLAYLPRAAQRRLRSYHLILCLGSADRAVDSALAADLGLRLVHVDTSRAEEIADTVMALFLGLLRRTHLLSRHALSASGWLGSVQPLCRGMRRCRGLVLGIVGISSSARSLATRSXAYKMSVLYFDAXPGKMNEKFPSAARLMDTLNDLLADWNLIPYIGLKIMTDQ

SEQ ID NO: 230817 - protein, 55 aa, Glycine max
  Clone ID: PAT_MRT3847_50449C.1.pep
IYKQKPLRLYFRKPGERTKILILNNIFLFTTFLNPFCNLKIHVETNFKAHLVKTA

SEQ ID NO: 230818 - protein, 76 aa, Glycine max
  Clone ID: PAT_MRT3847_5044C.1.pep
FTEIVIFYFNIILGVILVPSNAIISSTLNQILSSKQCLYSWDKIVYNKYAEYNVAKNISRKISNHFYDKPQNITKT

SEQ ID NO: 230819 - protein, 612 aa, Glycine max
  unsure (1)..(612): unsure at all Xaa locations
  Clone ID: PAT_MRT3847_50450C.1.pep
MPHRNNPAPLPLVVTLNCVEDCSLEFESLAGVATVEHVPLSRLSDGKIESDAAVLLHSLTYLPRACPAPAAGRYHLILCLGSGDRAVXSALAADLRLRLVHVDTSRAEEIADAVMAMFLALLLRTHELDKPPLPSSADPLWCSXIESTVRLSGNCSELLKDGYIIALYARDRSALHVSRQRVKGGGWIMDSMSNVSKRDPAAQFLIIFRSKDTIGLRSLAAGGKLLQINRRMEFVFASHSFDVWENWTLEGSLQECRLVNCRNPSAVLDVRVEILATVGEDGSDCRSVILKKEELVXLQSRDLMIFQMFLCERLECIHSVEHNFYFFHFFASFSLLLIEDXHWSDELGPRVMIFWLCLVTPFIKLLKIKSNLSXVGIXKHQVSSLSQSTSARSEGRRSRSGKKAKKRHTRHKSQQKHEDPSALEKEGTSQRDDTAMSGTDQALSSSSEDSRNRKTPIESMQEPTGAQVIKSSLRLSGNCTELLKDGYIIALYARDCSALHVSRQRVKGGGWIMDSMSNVSKRDPAAQFLIIFRSKDTIGLRSLAAGGKLLQINRRMEFVFASHSFDVWENWTLEGSLQECRLVNCRNPSAVLDVRVEILATVGEDGVTRWLE

SEQ ID NO: 230820 - protein, 67 aa, Glycine max
  unsure (1)..(67): unsure at all Xaa locations
  Clone ID: PAT_MRT3847_50451C.1.pep
INKCYVHWVFGRPLSMGFFNESXSMXYTLILXSSYXSVFQNHXINLGNQFFFRKLXXVVLQDFGIDF

SEQ ID NO: 230821 - protein, 120 aa, Glycine max
  Clone ID: PAT_MRT3847_50452C.1.pep
ELNNSKPVEPKNSKPVEPKNSKPVEPKNSKPVEPKNSKPAEPNKNKPAEPNNNKPVEPNNNKPVEPNNNKPVAAQSRSANARNPQPLSSPPVSRAGPQTNSLSVLPTLTPSAAKTPPSTR

SEQ ID NO: 230822 - protein, 38 aa, Glycine max
  Clone ID: PAT_MRT3847_50453C.1.pep
STYYSLIADDIDPTMGYLTMCTHPLTILTQGMDHTLTM

SEQ ID NO: 230823 - protein, 79 aa, Glycine max
  Clone ID: PAT_MRT3847_50454C.1.pep
IPVFPCLMLTEVEPRMASQVLHHKALFAPTLSIPSSSRNVTLISRVPSTSISWHCTPLIAKLSFAVKTDSNVERPGDAI

SEQ ID NO: 230824 - protein, 61 aa, Glycine max
  Clone ID: PAT_MRT3847_50455C.1.pep
PALQNCKLDYKLPMGKTQCPWFYRFKLNRKRSHSTGLQAQNITGNSAHTMAGAALAILIHK

SEQ ID NO: 230825 - protein, 54 aa, Glycine max
  Clone ID: PAT_MRT3847_50456C.1.pep
MEQKRKLEARVNTIERSEETKVMKVDVETFNLFTSCRALDFILDYMYFMSLQYL

SEQ ID NO: 230826 - protein, 38 aa, Glycine max
  Clone ID: PAT_MRT3847_50457C.1.pep
CGYGRSVAPIEVGYDAHAGRRHSGLLVTTFNKCNWLRI

SEQ ID NO: 230827 - protein, 88 aa, Glycine max
  unsure (1)..(88): unsure at all Xaa locations
  Clone ID: PAT_MRT3847_50458C.1.pep
DFSHDHGGGGGIRFFSSKNLVFAPFVPASKMATTLSFSGKKRLFSFCPPLVGPGNKTLGAKETNKGFSVWEKKPQKKKKIXXKKRPLE

SEQ ID NO: 230828 - protein, 63 aa, Glycine max
  Clone ID: PAT_MRT3847_50459C.1.pep
NTDIHMNYLLDPIGAQIHNAPTTRVETTKLNAGTVSVTQIAHLRHMRGILHKKRNHVEGESSS

SEQ ID NO: 230829 - protein, 46 aa, Glycine max
  Clone ID: PAT_MRT3847_5045C.1.pep
SWHINSYSGVASCRFIKFGIVYKFNCLRRFNSLLNTPCPYKSNTPN

SEQ ID NO: 230830 - protein, 30 aa, Glycine max
  Clone ID: PAT_MRT3847_50460C.1.pep
IKAGMHDIELWCRPSTEQFAATSFDDLKHI

SEQ ID NO: 230831 - protein, 61 aa, Glycine max
  Clone ID: PAT_MRT3847_50461C.1.pep
NSSFFCTKGLSSTLFPVALGVLLLPYSFSHSSAHASLSHFSAPTFSYVICHPLLLAVMWSA

SEQ ID NO: 230832 - protein, 122 aa, Glycine max
  Clone ID: PAT_MRT3847_50462C.1.pep
EKEVVKDRKKIENDKEREQQHGDQTVREMFVDHEDLVTVKLEENGAVGGTEPMDISTTSTSQLCGIPSSDVTILEGHTSEVCACAWSPTGSLLASGSGDSTARIWTIAEGRCKPGSENGPLN

SEQ ID NO: 230833 - protein, 613 aa, Glycine max
  unsure (1)..(613): unsure at all Xaa locations
  Clone ID: PAT_MRT3847_50463C.1.pep
MASISSAELNYLVYRYLQESGFTHAAFTFGYEAGINKCSIDGNLVPSGALVTFVQKGLQYFEMEANLSNCDADLEEDFSFLQPLDLITKDVHELRQMISERRKKLQKERKKEFEKEHEGERVRVREKDRREREKEVEKDRRERDKEVEKDRREREKEVEKDRREREKEVEKDRREKEKEVEKERRERQKEVVKDREKVENEKEREQQNDRQTVRKMLRDHENAVPLYVCEKTTDSGPEPMDISTTSTSQLCGIPSSDVTILEGHTSEVCACAWSPTGSLLVSGSGDSTARIWTIAEGRCKPGSENGPLNVLVLKHVRGKTNEKSKDVTTLDWNGEGTLLATGSYDGQARIWTTNGELKSTLSKHKGPIFSLKWNKKGDYLLTGSCDQTAIVWDVKAEEWKQQFEFHSGPTLDVDWRNNVSFATSSTDNMIHVCKIGETHPIKTVIGLQGEDNCIKWDPTGSLLXDGIFDLFCXIWSMKQDTYLHDLREHSKEIYTIRWSPTGPGTNNPNHKLVLASASFDSTVKLWDVELGKLMYSLDGHRHPVYSVAFSPNGDYLVSGSLDRSMHIWSLRDGKIVKTYTGNGGIFEVCWNKEGDKIAACFANNTVCVLDFRM

SEQ ID NO: 230834 - protein, 103 aa, Glycine max
  Clone ID: PAT_MRT3847_50464C.1.pep
MIVRKNKPSARSLLMLFVMVLAFLFVTYNLVFIIKHHMGGTWVAEELRFLDPVISMPGKVMALANSNSKFHVAVTATDAAYSQWQCRIMYYWYKKVKDIPGSN

SEQ ID NO: 230835 - protein, 178 aa, Glycine max
  Clone ID: PAT_MRT3847_50465C.1.pep
MVTRYARFCGTPPDSLNLRRYDALLVCVTNAKGANIRKFDVTVYIKVLRAVDLPGQPVSELMEVRGDSDTSMVSFSEFLVMFDDPDWGFGIMPTLVKLETGDRNRHGDVVCSVCRYPIIGSRFKEIKSHFSLCNQCYSEGKVPSSFKQEEYRFKEYGSEGEAMKDKCMCFNLQSRNEK

SEQ ID NO: 230836 - protein, 151 aa, Glycine max
  Clone ID: PAT_MRT3847_50466C.1.pep
QSNSTPANPPKRSNLLHYMAMFIVALIILEGLAVMIIWLVMKPKRLEYSVENAAIHNFNLSDANHLYANFDITIRSYSPSSIICIYYDTVEESVRYEDHTLPTNAVHPFFQSHKNVTKLHVALTAQSVALYESVPKDLKLERSSGDIELDV

SEQ ID NO: 230837 - protein, 56 aa, Glycine max
  unsure (1)..(56): unsure at all Xaa locations
  Clone ID: PAT_MRT3847_50467C.1.pep
SSRSQLPSKAVAGDVTCGSGRGGLPTTVGIIGGGNIRYXNVNRRTLTQLGKGKKIV

SEQ ID NO: 230838 - protein, 66 aa, Glycine max
  Clone ID: PAT_MRT3847_50468C.1.pep
RFGRARHKEQRALFDLSFEVQRLTIANTLNCKPQNTRTTTKSLIPLGEGRNMHQTTPFNLGQDHIL

SEQ ID NO: 230839 - protein, 68 aa, Glycine max
  Clone ID: PAT_MRT3847_50469C.1.pep
SNLCWWMSLGLIFSCPSYASALCCSNDVSNRCGSKLSKGMTINTLLDMLIISFSFLWSRGSFTDTWGE

SEQ ID NO: 230840 - protein, 48 aa, Glycine max
  Clone ID: PAT_MRT3847_5046C.1.pep
PTIAKWESFVSCDCFTGSGTDPVISLDPSGNTTFRKECVNDQLTNLEP

SEQ ID NO: 230841 - protein, 140 aa, Glycine max
  unsure (1)..(140): unsure at all Xaa locations
  Clone ID: PAT_MRT3847_50470C.1.pep
PRLPPGPLPGVRHVFFVAPLCVRNRRXEGPPLGEVVQILAGLPKPPSSQQGGFPIPESFLFFSNRFGSPPPGSKGPKDXNPPRWPPPGFLGILIFKGPVGGRGGFQIYFGWGGEAFFFSLPFSGFFFSFGGGVFFKGFKG

SEQ ID NO: 230842 - protein, 61 aa, Glycine max
  Clone ID: PAT_MRT3847_50471C.1.pep
GKSVINLVPPSISSSKSDPYVLGTSITLVKSRISPGNKKKVQESVAAVRRAKINSSNIFKS

SEQ ID NO: 230843 - protein, 185 aa, Glycine max
  Clone ID: PAT_MRT3847_50472C.1.pep
DAVSTLEFNSPLPRNVVTAPLRRNPELDTFYYLGLKGISVGGEALPIPESIFEVDAIGGGGIIIDSGTAVTRLMSEVYDALRDAFVKGAKGIPKANGVSLFDTCYDLSSRESVQVPTVSFHFPEGRELPLPARNYLIPVDSVGTFCFAFAPTTSSLSIMGNVQQQGTRVGFDIANSLVGFSADSC

SEQ ID NO: 230844 - protein, 62 aa, Glycine max
  Clone ID: PAT_MRT3847_50473C.1.pep
PMGPPPPGQMVRGPPAPPRPGMPAPPPPRPGMPPPPGSGVPVFGPPRPGMPPPPNPPNQQQQ

SEQ ID NO: 230845 - protein, 484 aa, Glycine max
  unsure (1)..(484): unsure at all Xaa locations
  Clone ID: PAT_MRT3847_50474C.1.pep
MAPLTYLFFPLFLLFALTHSRSTPHSSKTTLLDVVSSLQNAHNAVAFTPHHLNQHQRQQEALLLSSSFGIHLRSRASIQKPSHRDYKSLTLSRLARDSARVKSLQTRLDLFLKRVSNSDLHPAESKAEFESNALQGPVVSGTSQGSGEYFLRVGIGKPPSQAYVVLDTGSDVSWIQCAPCSECYQQSDPIFDPISSNSYSPIRCDEPQCKSLDLSECRNGTCLYEVSYGDGSYTVGEFATETVTLGSAAVENVAIGCGHNNEGLFVGAAGLLGLGGGKLSFPAQVNATSFSYCLVNRDSDAVSTLEFNSPLPRNAATAPLMRNPELDTFYYLGLKGISVGGEALPIPESSFEVDAIGGGGIIIDSGTAVTRRRFKSEVQLSVASKRXTAPLRRNPELDTFYYLGLKGISVGGEALPIPEAIFEVDAIXRRRDYYPLPVDSVGTFCFAFAPTTSSLSIIGNVQQQGTRVGFDIANSLVGFSVDSC

SEQ ID NO: 230846 - protein, 386 aa, Glycine max
  Clone ID: PAT_MRT3847_50475C.1.pep
LVLKSKKRKLVKLREKYFQQNGGSISQQQLSTSENSSRITQIFTEEELKKATNNFDESLIIGSGGFGTVFKGYLADNRVVAVKKSKIVDESQKEQFINEVIVLSQINHRNVVKLLGCCLETEVPLLVYEFVNHGTLFDFIHTERNINDETWKTRVRIAAEAAGALSYLHSEASIPIIHRDVKTANILLDNTYTAKVSDFGASRFVPIDQTEIATMVQGTFGYLDPEYMRTSQLTEKSDVYSFGVVLVELLTGEKPYSFGKPEEKRSLTNHFLSCLKEDRLFDIVQIGIVNEENKKEIMEVAILAAKCLRLNGEERPSMKEVAMELEGIRIMEKHPWINTDQNVEETQHLLHEASSSIYELGDSSSHQYAGYDSIRDHVLIALDDGR

SEQ ID NO: 230847 - protein, 47 aa, Glycine max
  Clone ID: PAT_MRT3847_50476C.1.pep
FDVGWVLGGILSGHISDHLDARAITAARSLYCADRALVVYRGYGRAG

SEQ ID NO: 230848 - protein, 49 aa, Glycine max
  unsure (1)..(49): unsure at all Xaa locations
  Clone ID: PAT_MRT3847_50477C.1.pep
NSIHSPTFYNFMTCKTFTLPNXTTFQHIPLSPSFLITKKPIPFSLSNNF

SEQ ID NO: 230849 - protein, 269 aa, Glycine max
  unsure (1)..(269): unsure at all Xaa locations
  Clone ID: PAT_MRT3847_50478C.1.pep
FVSRRREKTTEGEFVNNGTLFDFIHTERKVNNETWKTRVRIAAEAAGALTYLHSEASIAIIHRDVKTANILLDNTYTAKVSDFGASRLVPIDQAEIATMVQGTFGYLDPEYMRTSQLTEKSDVYSFGVVLVELLTGEKPYSFGKPEEKRSLTNHFLSCLKEDRLSDVVQDGIMNEENKKEIMEVAILAAKCLRLNGEERPSMKEVAMELERMRLTEKHPWINTFQNPEEAHXLQKGSSSLCVSGDSGSHQYTGYDSINDHVQIAFDDGR

SEQ ID NO: 230850 - protein, 65 aa, Glycine max
  Clone ID: PAT_MRT3847_50479C.1.pep
FRSPKNSGSVSNRKGPVSPPKLLSPVTRVVSVEFKKKTLLPYKQGLLGGLGFNPGMHPLRAKIGF

SEQ ID NO: 230851 - protein, 53 aa, Glycine max
  Clone ID: PAT_MRT3847_5047C.1.pep
SNFHLLPAKTKHFFTLLRYFHDLTTPTSSPNKCELDDRLQLYPFVLKLIDGHF

SEQ ID NO: 230852 - protein, 31 aa, Glycine max
  unsure (1)..(31): unsure at all Xaa locations
  Clone ID: PAT_MRT3847_50480C.1.pep
TAVAEKPHPVRALYCGVCSXPPDYCEYGSDY

SEQ ID NO: 230853 - protein, 47 aa, Glycine max
  unsure (1)..(47): unsure at all Xaa locations
  Clone ID: PAT_MRT3847_50481C.1.pep
KLPXWXXSNSSXFXXPCXLXCLPXLGNXNIERTNRTIAKILLXLXKQ

SEQ ID NO: 230854 - protein, 68 aa, Glycine max
  Clone ID: PAT_MRT3847_50482C.1.pep
FEGSLINTVYILSDPYKYVKCIINVLDHRNLNHVFPWVTSCSLQGTCHINSFFKFFSFKRVREGVRWA

SEQ ID NO: 230855 - protein, 35 aa, Glycine max
  Clone ID: PAT_MRT3847_50483C.1.pep
LIGYCCHWQERRKVFYLNQFVVPSPLLWLTFPHQK

SEQ ID NO: 230856 - protein, 66 aa, Glycine max
  Clone ID: PAT_MRT3847_50484C.1.pep
EFSLSQLFRKSRAHNFQLLFNLKMFPGFFYLKKEYLSCQPQYESFPACSSAEFRRCVCKSWATLYF

SEQ ID NO: 230857 - protein, 129 aa, Glycine max
  Clone ID: PAT_MRT3847_50485C.1.pep
GSENGTNGTTHIAQLRAVPAYTQLIEEVNPVKMNRANKSIPVAQDTTCSGSHGNEGKKEAAHSTKSFTGASPDNSKKQSSNNGVKVTSRSDSIDLFFDACEISNGSNGTHYVKVPLSETTEGNREAMKS

SEQ ID NO: 230858 - protein, 99 aa, Glycine max
  Clone ID: PAT_MRT3847_50486C.1.pep
VFGMGLYELFVSNLGVDQKPSDRSSLFGLFPLKERPKWLDIKTVDELKTKLGHVIVMLLLIGLFDKSKKAVIHTPVDLLCFCVSVLLFSSCLFLLSKLN

SEQ ID NO: 230859 - protein, 71 aa, Glycine max
  unsure (1)..(71): unsure at all Xaa locations
  Clone ID: PAT_MRT3847_50487C.1.pep
GDNMIERSTXLDWYXGPALLEALDXINEPKRPSDKPLRLPLQDVYXIGGIGTIXFTPVSTRPTGTPIPPIL

SEQ ID NO: 230860 - protein, 52 aa, Glycine max
  Clone ID: PAT_MRT3847_50488C.1.pep
SQHPYVYELVCFTLYRLHMERELLRVDANRIRRQMHEVVLGNYRSFIAVVDA

SEQ ID NO: 230861 - protein, 76 aa, Glycine max
  Clone ID: PAT_MRT3847_50489C.1.pep
LFFFFFFFRNHPNKKNPMLYTFIIINPSFTYNRLTGGRLPSINQVWLTRAHPVPLHPLKPLWPCYSKTSYEDALDN

SEQ ID NO: 230862 - protein, 61 aa, Glycine max
  Clone ID: PAT_MRT3847_5048C.1.pep
MTKVKFSFDNRKSKDQLFTFDPPICISIVEFVKSNIFFRKINILCPNLKNLEKKKERKRKP

SEQ ID NO: 230863 - protein, 175 aa, Glycine max
  Clone ID: PAT_MRT3847_50490C.1.pep
MEGWDPNTKSTLTQIPLLGTKAGPRDGAAWTQRLKEEYKALIAYTQMNKSNDNDWFRISAANPEGTRWTGKCWYVYNLLKYEFDLQFDVPVTYPSTAPELELPQLDGKTQKMYRGGKICLTVHFKPLWAKNCPRFGIAHALCLGLAPWLAAEVPILVDSGMIKHKDDTATTSTES

SEQ ID NO: 230864 - protein, 82 aa, Glycine max
  unsure (1)..(82): unsure at all Xaa locations
  Clone ID: PAT_MRT3847_50491C.1.pep
MGLVILEQRKGAVXMFLTHLKHHKGTVFFFSIHFSDLHFYILFIVNDIIHHPGRCSPLSKVVFRDPYRFNKRTDLFIVFDGI

SEQ ID NO: 230865 - protein, 107 aa, Glycine max
  Clone ID: PAT_MRT3847_50492C.1.pep
FCVSSDFFYISVTSLLKKMMPSTSRGHSSAGDVSKRVYRGDSLLPAKRVKQEDPLEENQQMNIDDDLDYDNDIDYEDTADYEPRPDVSLEEAGIPDNLEKFVSFILH

SEQ ID NO: 230866 - protein, 103 aa, Glycine max
  unsure (1)..(103): unsure at all Xaa locations
  Clone ID: PAT_MRT3847_50493C.1.pep
VDDKRADAREDEGQCEKRTTQKPKGAEEEDHHRRRKKTKEKTAKRRKTXXEAATEDGKQXTPQPQSRSRTRKKTKEDRGRDKKGRRTEHRTQNNPKRNKXKRE

SEQ ID NO: 230867 - protein, 310 aa, Glycine max
  unsure (1)..(310): unsure at all Xaa locations
  Clone ID: PAT_MRT3847_50494C.1.pep
PRRPSVRLFACTASDHVNLTRPEPYGAGVGGLSRDIPETANVKLPCNTTHCQNSSKSKQARPITVGIVLLTIAVSAIGILTFTVYRRRKQKLGSTFDISDSYLSTDEAIGAYRKNGSPLVSLEYSTGWDPLADSRNFNGYSQEMFQSLRFNLEEVESATQYFSELNLLGKSSFSATYRGVLRDGSVVAVKSISKTSCKSDEAEFMKGLNMLTSLRSDNVVRLRGFCCSRGRGECFLIYDFVPNGNLSRFLDVKEGDGEVLEWSTRVSIVKGIAKGMAYLHAYKAXKPAXLVHQSISAEKVLIDQRYNPLL

SEQ ID NO: 230868 - protein, 58 aa, Glycine max
  Clone ID: PAT_MRT3847_50495C.1.pep
SHNSNHILNQSIPQSRSLNIQNSSNNSNENRSKTIRYGAITPFFCENLKIVQRTGAKG

SEQ ID NO: 230869 - protein, 233 aa, Glycine max
  unsure (1)..(233): unsure at all Xaa locations
  Clone ID: PAT_MRT3847_50496C.1.pep
MLITVREASSCSSSPLSFWLNRFNAKPSKTLKTTSICQASFSVQRRPTHSWNTRHLSTSSELANFDPLGINSDLSSGLNSTWKNLVCSITQTFESTSSAEKGKPNSSQGVAAAIEDSSIDFGDFFKGPLPGKFLKLLGFLALSRLGVYIPLGGVNREAFVGNLDQNSLLSTLDSFSGGGIGRLGGCSLGVLPSLDAPLVFRLRARVWPSSLAPPLCQGPARRXAVLQYTRYAS

SEQ ID NO: 230870 - protein, 72 aa, Glycine max
  Clone ID: PAT_MRT3847_50497C.1.pep
PHPHFSAFQKGGPRLGFPFIVQCFLSWFNPPALPDFSFPGGLKRGAFTPHQSMGIPNGPLGGFTYWGPLRGP

SEQ ID NO: 230871 - protein, 68 aa, Glycine max
  Clone ID: PAT_MRT3847_50498C.1.pep
TKMMKDPCNNNRELKEFGKPENREEPLVLNRGLTFTRVGLRHQKGLAGITKLRNALRSSENKTRGQGL

SEQ ID NO: 230872 - protein, 44 aa, Glycine max
  Clone ID: PAT_MRT3847_50499C.1.pep
GPLSAHWPHFRYLHIRSPYLRSSYNNLAEVKCRQTLHDCIVTMP

SEQ ID NO: 230873 - protein, 84 aa, Glycine max
  unsure (1)..(84): unsure at all Xaa locations
  Clone ID: PAT_MRT3847_5049C.1.pep
THLEKPSALYSNYFPPSSITSNLTKLSMLSYRSXIPLLYTPMLLLIDFLCTNLYHFFPAILQYLEKFSLHLLSLSFYLLNPLQT

SEQ ID NO: 230874 - protein, 53 aa, Glycine max
  Clone ID: PAT_MRT3847_50500C.1.pep
YVIHYKNQNPTSTLPKERIITIFCLADQLVLISYPTKEDNFYLPHLSKHKIYP

SEQ ID NO: 230875 - protein, 81 aa, Glycine max
  Clone ID: PAT_MRT3847_50501C.1.pep
TRLKILHIFNCPQLLYLPSDMLGLTALERLIIDACPELCRKCHPQFGEYWSLIAHIKHISIGETKARQRLFRIQSQLRLRL

SEQ ID NO: 230876 - protein, 46 aa, Glycine max
  Clone ID: PAT_MRT3847_50502C.1.pep
CSSQRAISVVCKYRPTHGNQIPPGSIVYRKNIKCTLICRQLASSAC

SEQ ID NO: 230877 - protein, 155 aa, Glycine max
  Clone ID: PAT_MRT3847_50503C.1.pep
MRSSSSSDRNRINIAASAQKVDVDNRISLRFYYRIADNILRQADIFRAEKNIIDLYVMLLRFSSLVSETIPRHRDYRSSPQRQKESLKKAVRPTAGEFVYQGSRSQQFSYVRPVEEHVRRLSLTLPPPKEETLSRHSILGPNGLKGHWRPPIIDK

SEQ ID NO: 230878 - protein, 374 aa, Glycine max
  Clone ID: PAT_MRT3847_50504C.1.pep
ARGAVRPTAGEFVYQGSRSQQFSYVRPVEEHVRRLSLTLPPPKEETLSRHSILGPNGLKGHWRPPIIDKGIKYPSNIDLSPVELPSLQQSMEDESLKKKDNSIAEHHKSELASILTQSEDCQLQPHPQPEPDQEPPSLISFETTETSAQIEVIRQPSPPPVLAEVQDLVPAVSPCVNEAGCKTEIPSLDNSVHAEDPLQLHISAALMESFMKLAKSNTKKNLETCGVLAGLLKNRKFYITALIIPKQESTSDSCQTTNEEEIFEVQDKRSLFPLGWIHTHPTQSCFMSSIDLHTHYSYQIMLPESVAIVMAPRDSSRNHGIFRLTTPGGMSVIKQCDQRGFHPHSQPPDGGPIYKTCTDVYMNPDLKFEVIDLR

SEQ ID NO: 230879 - protein, 79 aa, Glycine max
  Clone ID: PAT_MRT3847_50505C.1.pep
IDLCVQRGLTNKSIGSREDPSQFCSATLSRLSTIGYDVCDLCGAKFSAVTAPGCIVCGMGSIKRSDALAGAGPVPSPFG

SEQ ID NO: 230880 - protein, 158 aa, Glycine max
  unsure (1)..(158): unsure at all Xaa locations
  Clone ID: PAT_MRT3847_50506C.1.pep
MRSSSSSDRNRINIAASAQKVDVDNRISLRFYYRIADNILRQADIFRAEKNIIDLYVMLLRFSSLVSETIPRHRDYRSSPQRQKESLKKKLLISLNELEXLEPVVQQKINELNNKFAYQQNGQGKFISNNSLDFSPVKKLTSASYGLIKAVRPTAGEF

SEQ ID NO: 230881 - protein, 1623 aa, Glycine max
  unsure (1)..(1623): unsure at all Xaa locations
  Clone ID: PAT_MRT3847_50507C.1.pep
MEWTTLQHLDLRHVGRGVRPLQPHAASFHPHQALVAVAIGTYIVEFDALTGSKISALDIGAPAVRMSYSPTSGHTVIAILQDCTIRSCDFDLEQTCVLHSPEKKTEQIFSDTEVHMALTPLQPVVFFGFHKRMSVTVVGTVEGGRTPTKIKTDLKKPIVNLACHPRLPVLYVAYAEGLIRAYNIHTYAVHYTLQLDNTIKLLGAGAFAFHPTLEWIFVGDRRGTLLVWDVSTERPSMIGIKQVGSQPITSVAWLPMLRLLITLSKDGNLHVWETRVTVNPNGPPTQANFFEPAAIESIDIPRILSQQGGEAVYPLPRIKALEFHPKSNLAALVFANATIADNSKNKARYSTDGRKQLFAVLQSARGSSASVLKEKLSALGSSGVLADHQLQAQLQEHHLKGHGHLTISDIARKAFLYSHFMEGHAKISPISRLPLITVLDNKHHLKDFPVCQPFHLELNFFNKANRVLHYPVRAYYMDGLNLMAHNLSSGSDSIYRKLYNSIPGNVEYRAKYLIHSKKQRLFLVVYEFSGATNEVVLYWENSDAQVANSKSSTVKGRDAAFIGPNENQFAILDDDKTGLGVYTLPGGASQEAKDNDKVFEENPTATAETSAGSIRGPTPFMFETEVDRIFSTPLDSSLMFASHGNQIGIAKLIQGYRLSTSTANGHYISTNSEGKKSIKLKRNEIVLQVHWQETLRGHVAGILTTQRVLIVSAALDILAGTYANFDKGLPSFRSLLWVGPALLFSTAAAISILGWDGKVRSILSISMPYAVLVGSLNDRLLLANPTEINPRQKKRVEIKSCLVGLLEPILIGFATMQLSFEQKLDLSEILYQITSRFDSLRITPRSLDILARGSPVCGDLAVALSQSGPQFTQVMRGVYAVKALRFSTALNILKDEFLRSRDYPKCPPTSHLFHRFRQLGYACIRFGQFDSAKETFEVIADYESMLDLFICHLNPSAMRRLAQKLEEEGLDSELRRYCDRILRARSTGWTQGIFANFSAESMVPKGPEWGGGNWEIKTPTAVKDIPQWELAAEVTPYMKTDDGTIPSIIVDHIGVYLGSIKGRGNIVEVREDSLVKVFMPTGNENKVNGLEASSVKSISKQSNVVSNTKGDSLMGLESHNQQLASSSADEQAKAEEEFKKSLYGAAADGSSSDEEGVSKIKKLRIKIRDKPIASSTVDVNKIKEATRQFKLGEGLAPPMRSRSSSGGSQDLGQILSLPPPTTGSASSTVSTPGDLFGTDALTQSEPISQPTTGALGGGLKPGPIPEDFFQNTIPSLQVAQTLPPAGTFLSNYTPGVEINKTTPNQVSAFQVNVGLQGGVPPQTIQQPAVPIESIGLPDGGVPPQSSAQAVVMPQSQLQASQAQISSQPLDLSILGVPNSADSGKPPQTGSQQIAVHPGQVPRGAPASVCFKTGLAHLEQNNLSDALSCFDEAFLALAKEQSRGIDIKAQATICAQXLKIAVTLLREIGRLQKVHGPSAISAKDEMARLSRHLGSLPLLAKHRINCIRTAIKRNMDVQNYAYSKQMLELLLSKAPPSKQDEFRSLIDLCVQRGLTNKSIDPLEDPSQFCSATLSRLSTIGYDVCDLCGAKFSAVTVPGCIVCGMGSIKRSDALAGAGPVPSPFG

SEQ ID NO: 230882 - protein, 519 aa, Glycine max
  Clone ID: PAT_MRT3847_50508C.1.pep
MRSSSSDRNRINIAASAQKVDVDNRISLRFYYRIADNILRQADIFRAEKNIIDLYVMLLRFSSLVSETIPRHRDYRSSPPRQKESLKKKLLISLNELENLKPVVQQKINELNSKLAYQQNGQGKFSSNNSLDFSPVKKQTSASYGLIKAVRPTAGEFVYQGSRSQPFSYVRPVEEHARRLSLTLPPPKEETLSRHSILGPNGLKGQWRPPIIDKGIKYPSNIDLSPVELPSLQHSLEDESLKKKDNSIAEHHKSELDSILTQSEDCQPHPQPQPQHDQEPPSLISFETTETSARIEVIRQPSPPPVLAEVQDLVPAVSPCVNEAGCKTEIPSSDSSVHVEAPMQLHISTALMESFMKLAKSNTKKNLETCGVLAGLLKNRKFYITALIIPKQESTSDSCQTTNEEEIFEVQDKRSLFPLGWIHTHPTQSCFMSSIDLHTHYSYQIMLPESVAIVMAPRDSSRNHGIFRLTAPGGMSVIKQCDQRGFHPHSQPPDGGPIYKTCTDVYMNPDLKFEVIDLR

SEQ ID NO: 230883 - protein, 474 aa, Glycine max
  Clone ID: PAT_MRT3847_50509C.1.pep
MGLNWHRWVVSAFLLVAWALILDTGEICFCMGGKTSDFLRNDYLSLDMPIDSDTFRVPPGYNAPQQVHITQGDHVGKGVIISWISPHEPGSSTVIYWAENSEFKWQAHGFFLTYKYFNYTSGYIHHCTVHNLEFDTKYYYEVGIGNTTRQFWFKTPPPVGPDVPYTFGLIGDLGQTYNSNRTLTHYEKNPVKGQTILYVGDLSYADDFPYHDNTKWDTWGRFTERIAAYQPWIWTAGNHEIDFAPELGETRPFKPYTCRYHLPYTASNSTSPLWYSIKRASTYIIVLSSYSAFGKYTPQYKWLVKELPKVNRTETPWLIVLMHSPMYNSYVNHYMEGETVRVMYEKWFVEYKVDVVFAGHVHAYERSERVSNIAYNVVNGLCRPINDQSAPVYITIGDGGNLEGLATAMTEPQPSYSAYREASFGHGILDIKNRTHAHFSWNRNQDGYAVVADSVWLHNRYWNHPEQTSLAAFR

SEQ ID NO: 230884 - protein, 197 aa, Glycine max
  unsure (1)..(197): unsure at all Xaa locations
  Clone ID: PAT_MRT3847_5050C.1.pep
DFWSAGGPGYNDMIMXRVLAHKDILDLAKYANVPVMSVLTDYNHDCQIMAGALTMGEHIGRXERTFVVYAGDGKNIGHSCLLWGSXCRKTLSSVSCKGLEPDAKTVERVGKAGIMENEVTNDPKEGFKGAVVWCRRGGSRMGQKEEAVXCSHVFKGLXVKRDVMDLVGYRGWLWIVYPGGRVGWGWWCVWGWVGVGC

SEQ ID NO: 230885 - protein, 69 aa, Glycine max
  Clone ID: PAT_MRT3847_50510C.1.pep
VQYKGHSLGHESESINLGLCATIEALIYLHLPFSFIFSFSFCNFEAFYDNERLIHLLLGDWCTKLLSCN

SEQ ID NO: 230886 - protein, 58 aa, Glycine max
  Clone ID: PAT_MRT3847_50511C.1.pep
PVIFVCTPYANHFTNTLLVIRVVTHYSHRKIALLVAEKNMHKMFIGFMAGKKGSVPVG

SEQ ID NO: 230887 - protein, 52 aa, Glycine max
  Clone ID: PAT_MRT3847_50512C.1.pep
PYLRAAIEAGLIVAACKSVSRSRNQVCNHIIRFTIKLPCRVNQVMLIMSHAC

SEQ ID NO: 230888 - protein, 128 aa, Glycine max
  Clone ID: PAT_MRT3847_50513C.1.pep
MFRSPQQLIAAPNHSYPSVLVAQPPPLQNAAPSSQGQFHMLSNPPSQQFVQSTGGIITPYGYGSIPPLPPAPQLPTHVGAMVPLTHQTLQITPHQQIPITQQAPAPPTFRPLQPPGMVYYTNHQHSIQ

SEQ ID NO: 230889 - protein, 48 aa, Glycine max
  Clone ID: PAT_MRT3847_50514C.1.pep
VLSCLCRVFKDKLYSCILCELMRPSMVENPKVVVRVEPARTAYEHEQA

SEQ ID NO: 230890 - protein, 40 aa, Glycine max
  Clone ID: PAT_MRT3847_50515C.1.pep
SDQQNSRIQVWERPLLFRAKQIAGSLGLIATNEKVSTNGI

SEQ ID NO: 230891 - protein, 58 aa, Glycine max
  Clone ID: PAT_MRT3847_50516C.1.pep
QHGSRLNISPIQISMICLKYSKFNQSTQLISVCNHLAFTTVTSLKTVCKTQPRVKTKD

SEQ ID NO: 230892 - protein, 122 aa, Glycine max
  Clone ID: PAT_MRT3847_50517C.1.pep
EIVRLQGCREELQRKNVELEANLEGVESSKGSGSKVQYLRVPHPKSGIDSMVEILKCLKDKGVDTRSIKSTFSPQELFAVLETETDEMLMLKALLGEHMMNLIGSFISMPGKVQIKSKRLFI

SEQ ID NO: 230893 - protein, 54 aa, Glycine max
  Clone ID: PAT_MRT3847_50518C.1.pep
SSGGGGIKWGVFGSCFWGPFPPLKSESFFRGFGILFFPKGFLPPFPPLCFFGFF

SEQ ID NO: 230894 - protein, 152 aa, Glycine max
  unsure (1)..(152): unsure at all Xaa locations
  Clone ID: PAT_MRT3847_50519C.1.pep
GEDDRRGNKKMEENEKFAVSKAGAVDAYAMVDSFKIHEKVNSQIFTGVMAFVMGIVTMVRMTKNMPKKLTDANFYSNFGGEYKGQAPNTEEMTTMPNISAQEFMTVMKRMAELEDRMVNMNNQTTCMPPEKEEMLNAAISRADAXEQELLAT

SEQ ID NO: 230895 - protein, 36 aa, Glycine max
  Clone ID: PAT_MRT3847_5051C.1.pep
GSSTPLYDTQWGILKQRIRSGGNIGGKTTSDQDNAW

SEQ ID NO: 230896 - protein, 105 aa, Glycine max
  Clone ID: PAT_MRT3847_50520C.1.pep
QGRGGEKIFFLGASQKRGIPLFFFAWEGFIKGGGTIRKKGEMLFVSKGKTPLPLGFEAKSFEFPPLLGKGALGEKNEALSFRKFTKKTLFFFVGDTKTGPKKFGG

SEQ ID NO: 230897 - protein, 44 aa, Glycine max
  Clone ID: PAT_MRT3847_50521C.1.pep
TRFGLLSWWDFLGTCFKCILSTFFLKQVMHITISLLSQANLGFS

SEQ ID NO: 230898 - protein, 58 aa, Glycine max
  Clone ID: PAT_MRT3847_50522C.1.pep
LVLFFFFFPKVLLMHICCRLDKMIGRIHRFLPLSDTLAINLPSHSLTPPIHFYNESQF

SEQ ID NO: 230899 - protein, 130 aa, Glycine max
  Clone ID: PAT_MRT3847_50523C.1.pep
MYRFTANDGKTKLKAMIPSDMRSQVLSGAIQNLGLIRVLDYTVNDIPNKSDKYLLAIKCEAVSPALEMEIKSEESGSGILLKPKVEGGVKTEGAAAGILLKPKQEVVTKSANQILREQHGNSVPAARMAM

SEQ ID NO: 230900 - protein, 58 aa, Glycine max
  unsure (1)..(58): unsure at all Xaa locations
  Clone ID: PAT_MRT3847_50524C.1.pep
DPLVRGXSTTSNKDSSSXXTXXPNAESKQTWXXRKIMSRMLRKQRLSHRLNQTKTSLS

SEQ ID NO: 230901 - protein, 77 aa, Glycine max
  unsure (1)..(77): unsure at all Xaa locations
  Clone ID: PAT_MRT3847_50525C.1.pep
ARNSARAXSLADXASXVXSXSXLFXAXXXXXSXXSXIXXXXWDXTGXXXXXXXXXXPRXLXXXXXGXSVXXLXDSXH

SEQ ID NO: 230902 - protein, 45 aa, Glycine max
  Clone ID: PAT_MRT3847_50526C.1.pep
RKLFIEGVLPFIEPRMPGIFGPQNLLSVSIYLCNKSYDHCATTID

SEQ ID NO: 230903 - protein, 41 aa, Glycine max
  Clone ID: PAT_MRT3847_50527C.1.pep
HQCMFPPEYHRFIVQCIQSSNALTHRLRSVGYTLDCYNFNV

SEQ ID NO: 230904 - protein, 108 aa, Glycine max
  Clone ID: PAT_MRT3847_50528C.1.pep
VSNIAPLERTSSSLDPQYSKSPSWPSFKGYTEQHVCSATFSKKTECRPDFLSETATRSQPSSVSSVSIGFPSQNVVRAPSLRSRHLCNHVHALTSTQYRIHDAWSTEF

SEQ ID NO: 230905 - protein, 42 aa, Glycine max
  Clone ID: PAT_MRT3847_50529C.1.pep
EEYHSSQQHNIILENSSTKQIANILYHQRKLGLCSPYIAVFC

SEQ ID NO: 230906 - protein, 48 aa, Glycine max
  Clone ID: PAT_MRT3847_5052C.1.pep
TRVEFTLFTYCFAFPIFFPIPSLFLRMVFKMVYNIGSLIIHPHKVQLK

SEQ ID NO: 230907 - protein, 115 aa, Glycine max
  unsure (1)..(115): unsure at all Xaa locations
  Clone ID: PAT_MRT3847_50530C.1.pep
MAHTLYDLMSAYRLEKLDEYIISRMYINGYQAAKDDLTAYATLPTATSDEYGNVCTWYKHIDALLRXISSDHGXGSGGIVEGSLGAEPDTTPTAADTKAGIAEDDDDDDVDLISE

SEQ ID NO: 230908 - protein, 77 aa, Glycine max
  Clone ID: PAT_MRT3847_50531C.1.pep
MPYISVSLCCVWYEPPGSPRFWSHLDSSVIQGVFSKVMPSVLVCMALFFMLCFLDGSSDITGIASSVDATSPLAKVR

SEQ ID NO: 230909 - protein, 123 aa, Glycine max
  unsure (1)..(123): unsure at all Xaa locations
  Clone ID: PAT_MRT3847_50532C.1.pep
MNIPNVLIVPYPVQGHVNPLMNFSQKLVEHGCKITFVNTDFTHKRVMNSMAKQESHDESPMKLVSIPDGLGPDDDRSDVGELSVSILSTMPAMLERLIEDIHLNGXDKITCIGAGVIMGWALG

SEQ ID NO: 230910 - protein, 70 aa, Glycine max
  Clone ID: PAT_MRT3847_50533C.1.pep
PSKTERVHAPAHSYDIKLAEDIYKIPILKPSTQNKDNPGEKPTLSGYDGGRPNPFSPPSLSYSSHSLLSS

SEQ ID NO: 230911 - protein, 98 aa, Glycine max
  unsure (1)..(98): unsure at all Xaa locations
  Clone ID: PAT_MRT3847_50534C.1.pep
GRVADGSTTPKYSKARYDEIVKEVSSYXKKVGYNPDKIPFVPISGFEGDNMIERSTNLDWYKGPTLLEALDQINEPKRPSDKPLRLPLQDVYKIGGIG

SEQ ID NO: 230912 - protein, 265 aa, Glycine max
  Clone ID: PAT_MRT3847_50535C.1.pep
MVIIHYSAASCCCVPSLHRSSPSRSILAPAIFFFRDAAPNLRLVSVWSQPPGSEGFGEPNKHSSRDASVGFSASSSSVIDFLTLWHRLKTTKRKGWANHGIKGAESIADHMYRMALMALVSGDVPGLDRERCIKIALVHDIAEAIVGDITPSDGVPKAEKSRMEQEALNKMCELLGGGIRAEEIKELWAEYENNSSLEANLVKDFDKVEMILQALEYETEHGKVLDEFFLSTAGKFQTEIGKSWAAEIISRRKSLSAKRPSSYSG

SEQ ID NO: 230913 - protein, 220 aa, Glycine max
  Clone ID: PAT_MRT3847_50536C.1.pep
MKASRIALFTLVVLLFVAEVQVSKAVTCSPVQLSACVSAITSSTPPSNLCCSKIMEQKPCLCQYLKNPNLKKFVDSPNARRVANTCGTPFPRCVSLDGDADRLVYFIVPPQSSGRIDLVDGDKILSLFALFIREQLSFLNEKEDMKNCHQAHVGVIQTAYANGASTNYLKLLGLEVNFTPTGVKYRHEKATEFDIGIYFEANGHGTVFFRIFHRVVGGLD

SEQ ID NO: 230914 - protein, 108 aa, Glycine max
  unsure (1)..(108): unsure at all Xaa locations
  Clone ID: PAT_MRT3847_50537C.1.pep
PRVRSMQGPLEFXQEVDVLSKLRHPNLITLIGACPDSWALVYEYLPNGSLEDRLACKDNTPPLSWQARIRIAAELCSALIFLHSSKPHSVVHGDLKPSNILLDANLIR

SEQ ID NO: 230915 - protein, 86 aa, Glycine max
  Clone ID: PAT_MRT3847_50538C.1.pep
LGNGQGEFKCDPHEATCYDDGKTYHVGEQWQKEYLGAICSCTCFGGQRGWRCDNCRRPGGEPSPEGTTGQSYNQYSQRYHQRTNIL

SEQ ID NO: 230916 - protein, 310 aa, Glycine max
  unsure (1)..(310): unsure at all Xaa locations
  Clone ID: PAT_MRT3847_50539C.1.pep
MLRSSFLVVLLTSLVLLLLIPRSYSSEINVTQTYPSTKFEYALLEFPLNIQYLVAEFFLIGAKGYGLDAFAPGLAQGGPPPIVGXAQKANLDPLTEELXLQSGLTLIGRLKAXIKRAIKGFPRPLINLNKELFAQIVDQAFGQPLNPPFDPYANSLNYQLAAYITTVVGPNIYVGIIPKLQNTESKELFAGLLGTASGGRTSRRAYLYERWDSPVPPYKVTVAEFTNRISERANKLGMEGIKSEGIVVSPWNGAEGKVSGNVIEGDKYSLSYGRTPEEILRILYGSGNETIPGGFYPHGANGHIAQYYFN

SEQ ID NO: 230917 - protein, 73 aa, Glycine max
  Clone ID: PAT_MRT3847_5053C.1.pep
MEQSEKSPKKTSSLRSSFPRDPRGSLEVFNPNTSTSTSTNVRVRSQPLWKSWTESEEPRHEIAATSWMAINPA

SEQ ID NO: 230918 - protein, 349 aa, Glycine max
  unsure (1)..(349): unsure at all Xaa locations
  Clone ID: PAT_MRT3847_50540C.1.pep
SFLCLVDLIPAEKCKFDGVNDKVVVDAANGVGGVKLKYLGKLLNGLIIEVRNSSEDGGVLNDGVGADYFXKEKVLPNSFGSKDTGIRXSGRIDLVDGDKILSLFALFIREQLSFLNEKEDMKNCHQAHLGVVQTAYANGASTNYLKLLGLEVNFTPTGVKYLHEKATEFDIGIYFEANGHGTVLFSESFIESLEARTNEISLGSKVSGSEGEKAALRLLAVSKLINQAVGDALSGLLLVEVILQHMGWSINKWNELYHDLPSKQLKVKVADRTAVVTTNAETVVVSPPGLQEAINEETAKYPQGRCFVRPSGTEDVVRVYAEASTQEAADTLANCVAKLVDQFLGFNSS

SEQ ID NO: 230919 - protein, 117 aa, Glycine max
  unsure (1)..(117): unsure at all Xaa locations
  Clone ID: PAT_MRT3847_50541C.1.pep
MTWGNSNLQSLPLPSFFPSRGLTLNLPVLFCFSAPRSGLSWKHSIDVGAGVIDADCRGPVGVILFNHXDTDFEVKVGDRVAQMIIQQIVMPEVVEVQDLDSTLRAEGGLEPTEFRTR

SEQ ID NO: 230920 - protein, 298 aa, Glycine max
  unsure (1)..(298): unsure at all Xaa locations
  Clone ID: PAT_MRT3847_50542C.1.pep
HWMVRARNKGMKASEQDYFEQLSSSFRCLVDLIPAEKCKFDGVNDKVVVDAANGVGGVKLKYLGKLLNGLIIEVRNSSEDGGVLNDGVGADYVQKEKVLPNSFGSKDTGIRCVSLDGDADRLVYFIVPPESSGRIDLVDGDKILSLFALFIREQLSFLNEKEDMKNCHQAHVGVIQTAYANGASTNYLKLLGLGGNFTPTGVKYLHEKATEFDIGIYFEANGHGTVLFSESFIESLEARTNEISLGSKVLGSEGEKAALRLLALSKLINQAVGDALSGLLLXEVILQHMGWAINKWNE

SEQ ID NO: 230921 - protein, 305 aa, Glycine max
  unsure (1)..(305): unsure at all Xaa locations
  Clone ID: PAT_MRT3847_50543C.1.pep
MNEEQQCLLLSSASRFWPPKGVKLSYGTAGFRADASLLQSTVYRVGILAALRSLKTRSVIGLMITASHNKVSDNGVKIADASGGMLSQHWEPFADALANAPSPQHLLLLINEFVEKEGISVDGDWQVEVLLGRDTRPSGDALLQAAKQGVTSIVGAVATDMGILTTPQLHWMVRARNKGMKASEQDYFEQLSSSFRSFIGXCLVDLIPAEKCKFDGVNDKVVVDGANGVGGVKLKDLGQLLNDAIVRGENNTEGGGVLNDGVGADYVQKEKVLSNSFGFKDTGIRCVSLDAVATKLLVVDLHRSN

SEQ ID NO: 230922 - protein, 195 aa, Glycine max
  Clone ID: PAT_MRT3847_50544C.1.pep
RLGFAALTLSILASVPRQALASSHGFHARKIFPVEPSSFKGLCSSAVTIHGYECQELEVTTKDGYILSLQRIPEGRRKVSGRETMKQPVIIQHGVMADGMTWLMNSTEQNLPLILADNGFDVWIVNSRGTRYSRRHTSLDPSINAYWNWSFDEMVTYDLPAVYDYVSKQTGQKIDYVGHSLGTLVALASFSKGNW

SEQ ID NO: 230923 - protein, 75 aa, Glycine max
  unsure (1)..(75): unsure at all Xaa locations
  Clone ID: PAT_MRT3847_50545C.1.pep
MGQKCMSYALVXRGTEILAEHTGYSGNXNYIGCQCLQKHDGTDNMFTYNSDAHTFNCLGHNGYTYCAAADESIGR

SEQ ID NO: 230924 - protein, 52 aa, Glycine max
  Clone ID: PAT_MRT3847_50546C.1.pep
DISDPHHLWCNYMIATLCLLAEWKLSIDLIRLMFAVNALMYQLNLVTVTHAR

SEQ ID NO: 230925 - protein, 109 aa, Glycine max
  Clone ID: PAT_MRT3847_50547C.1.pep
ETRFISQKPPKVILSSMEVVAQSMGFKTHIRNYKMRIESISTNKASYFSVILEVFEIAPTFFMVDIQKAAGDAGEYLKFYKNFSSNLEDIMWKPPHETSKLRNSKTKGQ

SEQ ID NO: 230926 - protein, 208 aa, Glycine max
  Clone ID: PAT_MRT3847_50548C.1.pep
MLQPFTTCFTFLHRKTKFFLNKPRIKEMMGACCKRRQSNIKLFSSSSDLSTSSFLHMKLSTQFHQVFKLIDTNGDGKISINELSELLSSLGYNKCTAVKEAEGMVKVLDFNRDGFVDLDEFMIVMNGMEEEKEEKFGSGMEHDGGYLMDAFLIFDTDKNGLISAKELQRVLINLGCDNCSLRECKRMIKGVDKNGDGFVDFEEFRSMM

SEQ ID NO: 230927 - protein, 115 aa, Glycine max
  Clone ID: PAT_MRT3847_50549C.1.pep
ITREVCKGLELFNYLTTRMADSFARLMLMRLLDENPVDQPPSSLSPPPQPRPRRNPRDRAPRHNTPSSHHSPPQSFNNSGTLNMEGAINNAGCVQGNGNGSIIFGSFDSTKNNYY

SEQ ID NO: 230928 - protein, 92 aa, Glycine max
  Clone ID: PAT_MRT3847_5054C.1.pep
PRVRAIRHLAIWICPLGNVSLYIGSVSTVPASAYVADGDPTCYIDISSTHTACNNDPSVAQRANRQRRWIAYSESRCAEEYDEIHDPYIRRF

SEQ ID NO: 230929 - protein, 79 aa, Glycine max
  Clone ID: PAT_MRT3847_50550C.1.pep
IPFEVLRCKNLGLLCVQQKPGDRPDMYSVIPKMNGEKLMPQPKAPGFYPGKCTPESVSSSKTCKFLSQNEISLTIFEAR

SEQ ID NO: 230930 - protein, 137 aa, Glycine max
  Clone ID: PAT_MRT3847_50551C.1.pep
LTVLLQATVSKILFTNKGSRSRPVASGVIFMDALGREHRVYLKQGPKSEIIVSAGALGSPQLLMLSGIGAERELRKHNIDVVLNQPLVGQGMSDNPMNAIFVPSPVPVEVSLIEVVGITNVGSYIKPPVVKCSPLVL

SEQ ID NO: 230931 - protein, 133 aa, Glycine max
  Clone ID: PAT_MRT3847_50552C.1.pep
TVPSLMRTILPGLQTHANMLAENSLKLLVLSGETFSLTLWEMLSTILPKTLILNLYGSTEVSGDCTYFDCKRMPLILKEEKLTSVPIGLPITNCDVMMLLNENGASNDGELYVGGSCIFRDYYNEPNIMSDAY

SEQ ID NO: 230932 - protein, 44 aa, Glycine max
  Clone ID: PAT_MRT3847_50553C.1.pep
LLENVNLIKYLNLITTTIHYLHILIYSPKTYKNQSKKHSSLNKL

SEQ ID NO: 230933 - protein, 85 aa, Glycine max
  Clone ID: PAT_MRT3847_50554C.1.pep
MSFLRRLCPCLHKGGASFHDGDDDDIDRNHPGDSFDLIFGLHTLQLDTNFFSDINRLCHGGCGPVFRGLMPNGQEVAVNKLSLES

SEQ ID NO: 230934 - protein, 154 aa, Glycine max
  Clone ID: PAT_MRT3847_50555C.1.pep
IQKLVPGGGATELPISATLKQKSSSVQGIQKWPYEAAAIAFEAIPRTLAQNCGVNVIRTMTALQGKHANGENAWMGINGNTGDITDMKECKIWDAYNVKAQTFKTAIEAACMLLRIDDVVSGIKKRQAPGAGQARSKPKVETEVDADSEQILPD

SEQ ID NO: 230935 - protein, 312 aa, Glycine max
  Clone ID: PAT_MRT3847_50556C.1.pep
MVQSSVPLCNTCGEQVGLNGNGEVFVACHECNFPICKDCFEHEINEDHRVCMRCGTPYEERTKEEDDFHEIKVHENEDDDFHEIKVHENQSATPSEISNSQDVGLHARHVSTVSAVDSEVNEESGKSIWKNRVESWKGKDKKNKKKKSAPKEEKEASIPPEQQMEETRPAEAAAAPLSVVIPMSKSKIAPYRTVIIMRLIILGLFFHYRVTNPVESAFPLWLTSIICEIWFAFSWVLDQFPKWSPINRQTFIDNLSARFEREGEPNELAAVDFFVSTVDPLKEPPLITAYTVLSILAVDYPVDKVSCYVSDD

SEQ ID NO: 230936 - protein, 77 aa, Glycine max
  Clone ID: PAT_MRT3847_50557C.1.pep
ERREFSLFQPPGWNSGGFFPCKTSFTVFVQLEAFHGPLSVSDKFPCGCRNFNKFPSPWLGLLGSIRCVQVLNIMLVE

SEQ ID NO: 230937 - protein, 51 aa, Glycine max
  Clone ID: PAT_MRT3847_50558C.1.pep
PQSGARNIDIHNPSHPGQSKLFKYQITPTSGVKTATPILLFSRNKKSAYPF

SEQ ID NO: 230938 - protein, 63 aa, Glycine max
  Clone ID: PAT_MRT3847_50559C.1.pep
FHKNVVPTVFFGSFLGWNGNNVMMDRFFLKIQQVQDMVIWSIFWGAIWFGIMINGKWGFFWFF

SEQ ID NO: 230939 - protein, 59 aa, Glycine max
  Clone ID: PAT_MRT3847_5055C.1.pep
LVTKMKYLGIMLEGIIFGIICTRIESMLLLIYSIFPSFFHLTDSCWNHRGTHLSSSRSR

SEQ ID NO: 230940 - protein, 64 aa, Glycine max
  Clone ID: PAT_MRT3847_50560C.1.pep
IIKNWIMTRSSVKISPISFKVMKEKIKLYILRPTDNVSYYFFSFKFYFICHKINILFLYTDYVS

SEQ ID NO: 230941 - protein, 49 aa, Glycine max
  Clone ID: PAT_MRT3847_50561C.1.pep
YRKIKYLGVNENEKALDGICSLIWFRLCIRNGIALFSVSMHGKELVSAY

SEQ ID NO: 230942 - protein, 40 aa, Glycine max
  Clone ID: PAT_MRT3847_50562C.1.pep
TPRGESQFITKANTSIGKTPKNPSKNYPNLINNSLLSDNE

SEQ ID NO: 230943 - protein, 159 aa, Glycine max
  Clone ID: PAT_MRT3847_50563C.1.pep
GTTSRIVGTYGYMSPEYAMEGTFSTKSDVYSFGVLLLEIVSGRKNTSFYDVDHLLNLIGHAWELWNQGESLQLLDPSLNDSVDPDEVKRCIHVGLLCVEHYANDRPTMSNVISMLTNESAPVTLPRRPAFYVERKNFDGKTSSKELCVDSTDEFTASTY

SEQ ID NO: 230944 - protein, 606 aa, Glycine max
  Clone ID: PAT_MRT3847_50564C.1.pep
MEEQIKSEFKRSGFGLEDEQEILSKCVTYCINYSLTPSDLVSSWEVYYLNRQLNEPIVQNTEIDGFLLHLQNEKKETVIKEKEEAGLHIYSIGDVEMILNNDDDTKDNTPGTPINHHQDPLSPALDTTSLMYENVLSSGKPSKSKLITPFSKRTDKFVVKFSINTVPKVEKAENDEDDVLTRVPLHERCSLSIHRSGPKPGCRFLYDRTEDRLNAIENRLRKYTRAFVASGLYEEPTDPTTASQRSIFAVGMICCDGEGRLNEKSVMLQSSIEHSGGECVRLDLQRLSHYSIFPGQIVGIGGHNPSGHCFVATKLVDSIPTYIANEDSNPAKKQAVDKENQPTDLLCKERELSMIIAAGPFTTTDNLLFEPLIALLTHAKLRPPQLLVLLGPFVDSEHPDIKKGTVDRSFDEIFEEILKKLEEYVDSATRVVLVPSIRDANHDFVFPQPALDMKSQIVSLSNPGIFEANKVKVGCCTVDILKQISGEEISRTAADGKPIDRLSRLANHILNQQSFYPLYPPAEGVPLDFSLAPEALQLSSIPDILILPSDIKYFVKVLSSENEGINHTKCIAVNPGRLAKGEGGGTFVELDYCGGSDQINASVVGI

SEQ ID NO: 230945 - protein, 92 aa, Glycine max
  Clone ID: PAT_MRT3847_50565C.1.pep
KIYPCPKGPQGEGGEKLFPDSPPPFLCFKGKEKERGPIKKFFLAPPPELLGENRGPLGNPAFDNPQGFPPGKFWENPSKKRETETLGKLKRA

SEQ ID NO: 230946 - protein, 112 aa, Glycine max
  Clone ID: PAT_MRT3847_50566C.1.pep
TQISTGDLGEKKKIKIKMPVFIPRIEYKTLGPNTIVTENQIREILRKADSNGDGRLSKEELKKAFKEFGSKMPGWRACRLLRKADTNHDGVLTMEELDTIVDFALARYTFRK

SEQ ID NO: 230947 - protein, 56 aa, Glycine max
  Clone ID: PAT_MRT3847_50567C.1.pep
AKNTSSQQKHPFMFLIYGRTGWIGGLLGKLCEKQGIPYEYGNGRLEDRSSLLADLQ

SEQ ID NO: 230948 - protein, 93 aa, Glycine max
  unsure (1)..(93): unsure at all Xaa locations
  Clone ID: PAT_MRT3847_50568C.1.pep
VAVGAVWHSIVAHVRIGCFSLIGFPVGLVLGIFILLQVKGIWIAMLFGPVILAXVLTIITPRLXWDLLVTNARSGINIWSKVVFVRATPSSGG

SEQ ID NO: 230949 - protein, 44 aa, Glycine max
  Clone ID: PAT_MRT3847_50569C.1.pep
NRFLKGILCVKFKSLGFQGIFCLRSLRITNYVINGLENSLDYQF

SEQ ID NO: 230950 - protein, 88 aa, Glycine max
  Clone ID: PAT_MRT3847_5056C.1.pep
QLTNFIGSMQILVGMIYRRYKKTSYAGFISVSTYLYIFCEKTTQGGSKQCKFDKDTFHLFIFPGLSSKMTWRLLMIMEIIKHADTCVS

SEQ ID NO: 230951 - protein, 173 aa, Glycine max
  Clone ID: PAT_MRT3847_50570C.1.pep
TRDKPFAALNLLNHMREMGIEPTVLHFTTLIDGLSRAGNLDACKYFFDEMIKNGCIPDVVAYTVMITGYVVAGEIEKALKMYQYMISREQVPNVFTYNSIIQGLCMAGKFDEACSMLKEMKTKGCSPNSFVYNTLASCLRNAGKTADAHEVIRQMTEKGKYADIHSRFRGHKA

SEQ ID NO: 230952 - protein, 61 aa, Glycine max
  Clone ID: PAT_MRT3847_50571C.1.pep
KKEVNGPTPGWLSFQAVFFYPPKKPPLENWMMWNFLCFKGGVRAFPQGMRRCMLRIKRIHN

SEQ ID NO: 230953 - protein, 107 aa, Glycine max
  Clone ID: PAT_MRT3847_50572C.1.pep
RVSYASAGFSCAAVGDGFPFCVSACAFPVCAFASGCGGRGSSFVFPFGLVWRGLCRVPGAWWCSVLWPGSWSLLLWLFLSKPRSLFQGAPRLSLLWGGVLVGWWIVA

SEQ ID NO: 230954 - protein, 352 aa, Glycine max
  Clone ID: PAT_MRT3847_50573C.1.pep
MRRKRVSLKIRSSKRLSKKLLPPYASYALVAIVLFLLGVFFYSVSSASSPPNHPSNSLPITNHSSLSTSTELPHSISFTNHSSLSASPPPPVYVYEKPCDYSDGRWVRTKRGPLYDGSKCLQMKAKQNCIANGRPDLGYLFWRWKPSECHLPRFDPNTFLQLISNKHIAFIGDSLARNHLESLLCFLATTEKLQGFTQFQEGYTRWLFRSHKATVSFYWSPFLVDGVPRKNPGLPYNKIHLDRANMKWEKDLDQIDIIVLSLGHWFLVPSVFYWRDKVIGCVSHPVSNCTKDIGVYVPIRRALRTALNSIIKRKVKRGNGIDVIVRTYSPSHLKVDGIRWYLCKSKPMEWGR

SEQ ID NO: 230955 - protein, 93 aa, Glycine max
  Clone ID: PAT_MRT3847_50574C.1.pep
GWGWVTVRPKMVNFPLQEWSRPLAFARSRTKLFGPIALCRSSLVCSLLLMVQLISGTLLRHAHVSQSIAFNFPVYHLFFPAALILTVPLSNTV

SEQ ID NO: 230956 - protein, 73 aa, Glycine max
  Clone ID: PAT_MRT3847_50575C.1.pep
HACADASGHTSDHAFGSICPAVTSKIAYSRWTTKTLVSEIDSRIVKCTKRSHCRLENGHESRRDKEWLEGMDG

SEQ ID NO: 230957 - protein, 87 aa, Glycine max
  Clone ID: PAT_MRT3847_50576C.1.pep
ESSQLKLFRTHFSNVVKQSNSDAFQNAVDCALDEVGRCAEFGLACSCIPKDTYDEIKLQTVQNTGIREELSFTRRVDESLLSSSRSR

SEQ ID NO: 230958 - protein, 75 aa, Glycine max
  Clone ID: PAT_MRT3847_50577C.1.pep
SSRSRAADLSFFSLFFLFFFLGFPSLKALPPSFFLSSLISISFHSPSTPKWHGKHGNHQGLQNQPSAFFRLPLIA

SEQ ID NO: 230959 - protein, 44 aa, Glycine max
  Clone ID: PAT_MRT3847_50578C.1.pep
TAGLLLFITTHISPKIHGRDLICAKGLFFFGIRYQCRNGLNLGF

SEQ ID NO: 230960 - protein, 52 aa, Glycine max
  Clone ID: PAT_MRT3847_50579C.1.pep
GRGVTFFFNPYFPKDTWFGFNLCNGAFFFWYQVSMQKWLIFMVLGFVFNCWL

SEQ ID NO: 230961 - protein, 114 aa, Glycine max
  unsure (1)..(114): unsure at all Xaa locations
  Clone ID: PAT_MRT3847_5057C.1.pep
RSVEWSSPCQRTASICAHAAGEPGSPGGSFFVPLGYAGAIKDGVSNADTENLERLKLDGVKHASNAMLAIMXFVQEGGQGITPLGVRGLSINQFNVGDWIAGLCGFKATPVRSV

SEQ ID NO: 230962 - protein, 60 aa, Glycine max
  Clone ID: PAT_MRT3847_50580C.1.pep
ATLLRSRSGLTCLKIIARSMQRLMSAAPMIVDVWTQSFQSYTHGCYYCHLLLRTSPPMHY

SEQ ID NO: 230963 - protein, 46 aa, Glycine max
  Clone ID: PAT_MRT3847_50581C.1.pep
AGLFFFFFFCFGNWRCLSGDHDWNVFHLAPNGRQNIPILILVLSVS

SEQ ID NO: 230964 - protein, 73 aa, Glycine max
  Clone ID: PAT_MRT3847_50582C.1.pep
GWLQRTRCVYGTQHNYVSSNKSGKARNLILPIFVNVYLRNGICTVQKEVRQFVKEKLSSLICKGLQKAYDVLP

SEQ ID NO: 230965 - protein, 151 aa, Glycine max
  unsure (1)..(151): unsure at all Xaa locations
  Clone ID: PAT_MRT3847_50583C.1.pep
PGLPVXLSVFRSAPPPFCSPSPLLRRXFLALLLPPXFLPGVFAFGRVSVXCSFLPVFRLRLLCFVXPXLPSPLALGCSFSPSVXWXXFFXXXXFPPPPSVAGPCLLCFCPFPSPXVFFPLFRVLLFCWRFRFFSVPPPPLVSSSAXPPPPP

SEQ ID NO: 230966 - protein, 109 aa, Glycine max
  unsure (1)..(109): unsure at all Xaa locations
  Clone ID: PAT_MRT3847_50584C.1.pep
MILEEGCAKMQLFQASNDREDENAKIDEAGVDLKVMIEEMESMAEPSDGIXPICLEPMQDPVTLRTGQTYDRYNILKWLSLGHXTCPTAMLELXHDVVTLNSTLWHLML

SEQ ID NO: 230967 - protein, 55 aa, Glycine max
  Clone ID: PAT_MRT3847_50585C.1.pep
LILGACTNHCSVFMIMREFLFSTSFIWTLKILYLTWECKLTDRISFYIKGMQTCD

SEQ ID NO: 230968 - protein, 52 aa, Glycine max
  Clone ID: PAT_MRT3847_50586C.1.pep
HSLLMDYPSLALVKEKFCEVCSPSVVSLVHSKNECNHFTYFLFIKEECLPLV

SEQ ID NO: 230969 - protein, 57 aa, Glycine max
  Clone ID: PAT_MRT3847_50587C.1.pep
IYWVYRYEFQMQYGSIGWSVGATLGYAQAAPHKRVIACIGDGSFQVIHSNSLLAFII

SEQ ID NO: 230970 - protein, 109 aa, Glycine max
  unsure (1)..(109): unsure at all Xaa locations
  Clone ID: PAT_MRT3847_50588C.1.pep
FFLQVKREDVFWRTGIKRSTRSQSNKVVDPDHNLRHILTLPPKLQAETDKSLESVSLGSSCSPAPSGQKIPLYSVAHSRAGDKGNDINFXSLIPHFSXPDYERLKLNIT

SEQ ID NO: 230971 - protein, 76 aa, Glycine max
  unsure (1)..(76): unsure at all Xaa locations
  Clone ID: PAT_MRT3847_50589C.1.pep
PTTPWFRSAVAFFLGDINXNICSEIGKGTKVAFLTEFYPFQKTGLPEGLGAKNQKFVSFAPXPMLTKLLENCQTLK

SEQ ID NO: 230972 - protein, 62 aa, Glycine max
  Clone ID: PAT_MRT3847_5058C.1.pep
VGGRGVYGAGFLGRTGVFLGGFLGRGAAWGLSIVRLIVRTLLYFRKFGDLIPRFGLELLLLE

SEQ ID NO: 230973 - protein, 452 aa, Glycine max
  Clone ID: PAT_MRT3847_50590C.1.pep
VNGLSTEQRKRLTISVELVANPSIIFMDEPTSGLDARAAAVVMRAIRKIVDTGRTVVCTIHQPSIDIFESFDELFLMKRGGQEIYVGPLGHHSYHLISYFEGIKGVRTIEDGYNPATWMLEVTTSAKEMELGIDFAELYKNSDLYRRNKELIEELSTPAPGSKDLYFSSKYSRSFITQCMACLWKQHWSYWRNNEYTALRFLFTIAVALLFGSIYWNLGSKIKKQQDLFNAMGSMYAAVLLLGIKNSNSAQPLVAVERTVFYREKAAGMYSALAYAFAQVVVELPHVLLQTVVYSAIVYAMIGFEWSVTKFFWYLFYMYFTFLYFTYYGMMSAAMTPNPSLAGIISSGFYEVWNLFSRFIIPRPRMPVWWRWYYWANPVAWTLYGLVTSQFGDIQDHIEFNGRSTTVEDFLRNYFGFKHDFLGVVAAVLIGFAVTFALIFAIAIKMLNFQRR

SEQ ID NO: 230974 - protein, 56 aa, Glycine max
  Clone ID: PAT_MRT3847_50591C.1.pep
LPPLHKHQISQHYHNHIIIPYRQSRHSYSIMIRGMIAADSYWTISSNSYLCAIRVL

SEQ ID NO: 230975 - protein, 54 aa, Glycine max
  Clone ID: PAT_MRT3847_50592C.1.pep
CHPSLSSFQEYMHIGSCKYIPPKEYRLWMIRSFNSMFLLTWHLKLSLISLILFL

SEQ ID NO: 230976 - protein, 43 aa, Glycine max
  Clone ID: PAT_MRT3847_50593C.1.pep
CIMQGLEEYYSESGDVTSEESSVNSRLYATNEVSATHGSTMTP

SEQ ID NO: 230977 - protein, 36 aa, Glycine max
  Clone ID: PAT_MRT3847_50594C.1.pep
LKNPSPHASPIVNYHLYDHKICEEQKLLMLNTLVVS

SEQ ID NO: 230978 - protein, 83 aa, Glycine max
  unsure (1)..(83): unsure at all Xaa locations
  Clone ID: PAT_MRT3847_50595C.1.pep
LITFLSSIWKPFFXXXXXSLWLAXLXSAXFAITSSKXNDXPXQQPQXLEPXHRXESEGGLIETWNXQHPELXXAGVTXSXRXX

SEQ ID NO: 230979 - protein, 87 aa, Glycine max
  Clone ID: PAT_MRT3847_50596C.1.pep
MREPSSVGFEGNGAVSSPPQALLERLKDYGQEDAFALWYELSYEEREFLIKDIESLDLSRIDRIIRCSLRSQGLPAAAIEPVPESSV

SEQ ID NO: 230980 - protein, 110 aa, Glycine max
  Clone ID: PAT_MRT3847_50597C.1.pep
QWTFHINNITWLPKKKILIYDINGFIYLFIIKDVFRIKQLSAFLFFLFLYDSNLKILMTVYNCPESYYTTLVLFGISLWLSLATFPEATNFNFVYYYAKDFLGAFYAFFF

SEQ ID NO: 230981 - protein, 129 aa, Glycine max
  unsure (1)..(129): unsure at all Xaa locations
  Clone ID: PAT_MRT3847_50598C.1.pep
KGEILSGGIILDKPMTRCFTILPMEFNLSXRQRGVNSERCIVKKRDKLSCQVGFNPYSMEWTGLANRLLSKGNDILCCDYARFEGSITMHVMSYWAELILSVCGGDAXLMRVMSHLLVTXCSRMAMCKK

SEQ ID NO: 230982 - protein, 53 aa, Glycine max
  Clone ID: PAT_MRT3847_50599C.1.pep
FSNHLFLNLFNSNPPLIFLFRSPPHIQLQNISHKLPFLTSNPTPPPHIYITNF

SEQ ID NO: 230983 - protein, 88 aa, Glycine max
  Clone ID: PAT_MRT3847_5059C.1.pep
WEKRGKKGMDMEKPKALGGGKRGPPKTPLESQKKGKSGRIREGPKTLGSGRMGGGRAHWGREFPMGKTFFTGGFYPQKTKAGSTGAGF

SEQ ID NO: 230984 - protein, 157 aa, Glycine max
  Clone ID: PAT_MRT3847_505C.1.pep
YPPSLAGMISEAFPDLKCVVLDRPHVLENLSESNNLTYVGGDMFKSIPKADAVLLKWILHDWTDKDCIKILENCKEAISSNNGKRGKIIVIDMVIQEKQDEHKVTELKLLWDVAMACVLNGKERNEEEWKKLFMEAGFQDYKISPLTGFLSLIEIYP

SEQ ID NO: 230985 - protein, 41 aa, Glycine max
  Clone ID: PAT_MRT3847_50600C.1.pep
LSVYSVYYFWTITTKLTEALFIISKKILLGSQGRGFEHFWK

SEQ ID NO: 230986 - protein, 91 aa, Glycine max
  Clone ID: PAT_MRT3847_50601C.1.pep
FLFFFLFVCDLLFFFYFVIFCFPLQLTIPGGLPFFNQLYQRKKSFSFWSNPAKTRGTRSSSFSPHAPASSSPVSPPTSSPKTSFKKMPPPL

SEQ ID NO: 230987 - protein, 106 aa, Glycine max
  Clone ID: PAT_MRT3847_50602C.1.pep
LSFFCICWGQTRLNIADYSKYGFEQPIMACCGYGGPPLNFDSRVSCGLTKILNGTTITAKGCNDSSVYVNWDGTHYTEAANQYVASQVLTGNYSNTLLGDKIPFLL

SEQ ID NO: 230988 - protein, 97 aa, Glycine max
  unsure (1)..(97): unsure at all Xaa locations
  Clone ID: PAT_MRT3847_50603C.1.pep
PRVRGRLGGCEKTTEGDERLVGHSTAGAAAGGLAVVGTTPLDVVNTLLQGSGVCWXDRFTNGSIGDVIKTIMKKYGYLRLMLGWIPRMLFNAPAGGI

SEQ ID NO: 230989 - protein, 100 aa, Glycine max
  unsure (1)..(100): unsure at all Xaa locations
  Clone ID: PAT_MRT3847_50604C.1.pep
YASGDGVEMIFSSGTXSVVEADIKLIVVRDKSVPTLVGTEFPKDEKLSCCKIFDILNMRLFTILPMEINLVDRQKFLNFARFIMKKRYKINFQVGINSYF

SEQ ID NO: 230990 - protein, 82 aa, Glycine max
  Clone ID: PAT_MRT3847_50605C.1.pep
ACFGVHKERVSLDHLLAFRGEHFVFSKKEKERNQEEHMVVPESEMNSQNEVESPLQLEQQQQQHNNKNDPFSSLGRQSSSIY

SEQ ID NO: 230991 - protein, 110 aa, Glycine max
  Clone ID: PAT_MRT3847_50606C.1.pep
VFGSITNKMAFMISRAESEAEKSSLKHMEDKDSTNTLDGVSSQLQLKSSLSSKASAQTLNKQQVLNRIRHRKSLNRIKGAFEGLLGNSKGNTTSAQDQIWLQQDDAFSSP

SEQ ID NO: 230992 - protein, 333 aa, Glycine max
  unsure (1)..(333): unsure at all Xaa locations
  Clone ID: PAT_MRT3847_50607C.1.pep
LLLLSFLCLVLNTQIPILLLNLNFTFVEPFPLGGVGVEFVRYAVVTGANKGIGLEIVRQLASAGIKVVLTARNEERGIQALQTLKDSGLSHLVLFHQVDVADATSVASLADFIKSKFGKLDILVNNAGIGGAVIKDTDSFTSLLLKRGAAPEEDVTKAITQSYELAEECLQINYYGAKTTVESLLPLLQLFDSPRIVNVSSXMGQLERLPKGSWAREVFSDANIITEEKVDEILKKFLRDFQEGSLESNGWPRHLGAYIVSKAAMNAYTRILAKKYPSFCINSVCPGYVKTDITSNTGLLTVEEGAASPVRLALLPNGSPSGLFYYRSDVASF

SEQ ID NO: 230993 - protein, 73 aa, Glycine max
  Clone ID: PAT_MRT3847_50608C.1.pep
ADLIKCKNLSTSRAISRFTCDRKTWLSYFSHSECLFHSTNLLCTNNSYMKCFINSTAHSTAQLLKKFLMPKSF

SEQ ID NO: 230994 - protein, 86 aa, Glycine max
  Clone ID: PAT_MRT3847_50609C.1.pep
PPNNNNLNNPQRPPSNGMSSPVESFSGGRPSTTTTSTTITNGTPFLIGTRRYPGPPPFVPEDCPSDWDFSSSVVDDGGGNIGLLSF

SEQ ID NO: 230995 - protein, 140 aa, Glycine max
  Clone ID: PAT_MRT3847_5060C.1.pep
MPEMDAEKVVHTGGCHCKSVRWKVVASSSVIAWDCNCSNCYMRANTHFVVPAVNFEPLGDSGKFLTTYTFGTHTAKHTFCKICGITSFYHPRSNPDGIAVTFKCVDPGTLTHVEIRHADGKNWERAVIETGIASHSKVQK

SEQ ID NO: 230996 - protein, 71 aa, Glycine max
  Clone ID: PAT_MRT3847_50610C.1.pep
SSDIFFKRQSHFSCELGPLFSPTSQLVGKETEINQYPIVSVHHMGSSSYPAWTRVGIVLHPYRHVQVIRIL

SEQ ID NO: 230997 - protein, 154 aa, Glycine max
  Clone ID: PAT_MRT3847_50611C.1.pep
MDGLVKSQVPHERSLLALFKSSPSSSSLSSSFSSSWTSEVVLQTRSKIRREGEPNNVADLRSEQTRSHIIENEAIQGVGFINGIDGHSGMEWKDLEKRFDQVARTGSGAEPVVTWSEFGFCIGMHSSPEFANELLKALRRGKGWKSNITKTDLY

SEQ ID NO: 230998 - protein, 179 aa, Glycine max
  unsure (1)..(179): unsure at all Xaa locations
  Clone ID: PAT_MRT3847_50612C.1.pep
PDYVLQVSSPNDPQTPVAFLYFLDSGGGSYPEVISSGQVEWFRQKAEEVNPDSRVPEIIFWHIPSTAYKVVAPKFGIPKPCGKTINKGTVAAQEVKXGMMALLVNRTSVKAIFVGHNHGLDWCCPYEKLWLCYARHTGYGGYGDWPRGARILEITQTPFSLQSWIRMEDGNVHSEVVLS

SEQ ID NO: 230999 - protein, 153 aa, Glycine max
  Clone ID: PAT_MRT3847_50613C.1.pep
MAGTGDLDADAVLSDVEDDGGDPIPLETKAPSPEDVSVEKLRDVLAELDRERQARIAAENTKSELQVSFNRLKALAHEAIKKRDEFGRQRDDAVREKEETAKQLEETAKERDALRSEIGNSSHMLVTGMEKISAKVSSFAGNALPLPRSQKYI

SEQ ID NO: 231000 - protein, 66 aa, Glycine max
  unsure (1)..(66): unsure at all Xaa locations
  Clone ID: PAT_MRT3847_50614C.1.pep
MKLSIAVIEKFEEAEGRSTGEVSIADFSGLLXLKKEICTAQSLNESQVPDSLLKRLVTNATEFPPV

SEQ ID NO: 231001 - protein, 102 aa, Glycine max
  unsure (1)..(102): unsure at all Xaa locations
  Clone ID: PAT_MRT3847_50615C.1.pep
CEQDNTEYKKFGDFQSLQIDRAIXLLFYFFYPEKLVKQSTATRPYAMHMQYLHYSINESRNKLLFDYHKINSSREFIKHVECQVTNTEQRVPFNMKWVKRET

SEQ ID NO: 231002 - protein, 53 aa, Glycine max
  Clone ID: PAT_MRT3847_50616C.1.pep
VTSIPLSLFLSSRTYFLSGWLIWAHTQNMIHFTIGQRSYQEQSENFTPASDSL

SEQ ID NO: 231003 - protein, 65 aa, Glycine max
  Clone ID: PAT_MRT3847_50617C.1.pep
TKICFCLIQLQKLVRVDNLFIAIGHNILEGLHGTYELSDKLRAANIKNDRPADLMDVILVLTLRI

SEQ ID NO: 231004 - protein, 44 aa, Glycine max
  Clone ID: PAT_MRT3847_50618C.1.pep
NKSPHLLLEYEELKSVLCYVSSSSSWSLGLYTAFITVSVPCSSS

SEQ ID NO: 231005 - protein, 54 aa, Glycine max
  Clone ID: PAT_MRT3847_50619C.1.pep
KRELSKYVSDQYVLPYWGKACILGTWVTGSGSVAYEQMNTVSGWQPALKARESG

SEQ ID NO: 231006 - protein, 44 aa, Glycine max
  Clone ID: PAT_MRT3847_5061C.1.pep
EIDYLGLHYHIHASFQTYKCVVYRPPPFFDLLVQEINLVLVIIR

SEQ ID NO: 231007 - protein, 67 aa, Glycine max
  Clone ID: PAT_MRT3847_50620C.1.pep
LPREPAILRPYDCIAYLITCAPADFYPRRRAGNYCDYYYHSNHVAPFPITQPPRGRTGKNKNDCSDL

SEQ ID NO: 231008 - protein, 249 aa, Glycine max
  Clone ID: PAT_MRT3847_50621C.1.pep
NHVAELLKAVNGIRVIARKCSWYYVSVHCDCNYPNHVAELLKAVNGNFRSHPCLNKQKLLYAPMGNLLILQPDEKFSPSHHLLPSGSGLYLLCCPLSESDDTEKRLRAAQMVFLNSPHPLEILSDRSAYGSGGSIQRDHDMNSYLKSLRTVIRKELNQIRKAKREQRRKVWWPLLLSRGADTSIVAGRSMISINVGQRQSPFSSVIQTGRESLKRFSRIVTSQHMHLFVLLLFPARLLLLGTYSVINLK

SEQ ID NO: 231009 - protein, 57 aa, Glycine max
  Clone ID: PAT_MRT3847_50622C.1.pep
SAWAIINSTVHISELTMLNQDAYSDVTDHAVHALGTSVLNIYGSVLSSIIYFKIHAF

SEQ ID NO: 231010 - protein, 184 aa, Glycine max
  Clone ID: PAT_MRT3847_50623C.1.pep
MASALISRSSRRFLKPCSSSVSLYPAIFNPVISSQQSASQNPSQNPPFKLPQLQSFNFEFRKTTGSLSSFHLVAHVSTWPSKENKNHQSGGNVSSSWVELYLPRKVQPYARLARLDKPIGTWLLLWPCMWSITLATTPGHLPDFKMLALFGCGALLLRGAGCTINDLLDRDIDTMVERTKLRPV

SEQ ID NO: 231011 - protein, 114 aa, Glycine max
  Clone ID: PAT_MRT3847_50624C.1.pep
HSPILCNAVLIRYQPLSDKPNTRAVSISFHLLNNAIADQHNSDTLYSNGVGPLITLTLARIEKHDQYQRLRVEESGLFQLLIMADEYQRRETQMILPILIILLLVLMLDRCQGS

SEQ ID NO: 231012 - protein, 60 aa, Glycine max
  Clone ID: PAT_MRT3847_50625C.1.pep
AESLISGFELVTSRSQLHQVTLLSTVNQILILIYPYHILIFNYLVMLKLTAIRVWHHIRP

SEQ ID NO: 231013 - protein, 74 aa, Glycine max
  Clone ID: PAT_MRT3847_50626C.1.pep
LKCSQDLSRLLVGIFFSRCGSLLFDKRRRLLIPSVIATHTVGETVRKNYGLPFCKRLEKTIIDCSTKIYKKNIM

SEQ ID NO: 231014 - protein, 65 aa, Glycine max
  Clone ID: PAT_MRT3847_50627C.1.pep
MSRVYVGNLDSRVTERDLEDEFRVFGVIRSVWVARRPPGYAFIDFDDRRDAQDAIRELDGFSSTS

SEQ ID NO: 231015 - protein, 58 aa, Glycine max
  unsure (1)..(58): unsure at all Xaa locations
  Clone ID: PAT_MRT3847_50628C.1.pep
LIILIDHCDANLVDHVGLSVFRILLQVTRPKTVMLGNIPATTTYXNIHHYHEATRIPG

SEQ ID NO: 231016 - protein, 92 aa, Glycine max
  Clone ID: PAT_MRT3847_50629C.1.pep
MSRVYVGNLDSRVTERDLEDEFRVFGVIRSVWVARRPPGYAFIDFDDRRDAQDAIRELDGMFRRIMLLECNRIKIKIKMCIYMYICYILLIC

SEQ ID NO: 231017 - protein, 66 aa, Glycine max
  Clone ID: PAT_MRT3847_5062C.1.pep
TQTHISSINLLHLHIEPNFCIIILNLINQNMLHVMYIKMTNKNIKIYREKNEKYGCLPKKKTFFRV

SEQ ID NO: 231018 - protein, 248 aa, Glycine max
  unsure (1)..(248): unsure at all Xaa locations
  Clone ID: PAT_MRT3847_50630C.1.pep
MCVTDINFPILFTERKKGPYKTKRSPSRRGRSLCFFFVLNAPHEFLQRARLLGFFFLSSHCIASGSSEKMSRVYVGNLDSRVTERDLEDEFRVFGVIRSVWVARRPPGYAFIDFDDRRDAQDAIRELDGKNGWRVELSHNSRGGGGGRGWXALGGSDLKCYECGEPGHFARXECRMRGGSIRSRSRSPPRFRRSPSYGRRSYSPRGRSPRHRSLSPRGRSYSRSPPYRGREEVPYANGKGRKNIRHDE

SEQ ID NO: 231019 - protein, 96 aa, Glycine max
  unsure (1)..(96): unsure at all Xaa locations
  Clone ID: PAT_MRT3847_50631C.1.pep
QHVNICFPYYLTNRAYTGTGARILTIFFTFYLSTCCTYYLTTCGTCYXNGTLYLVNTXSSHTXAGYRNEHRQHDQSHCDQNEKKWIIYKINENLSL

SEQ ID NO: 231020 - protein, 471 aa, Glycine max
  Clone ID: PAT_MRT3847_50632C.1.pep
DNEDPSTQKKPRVVWSVELHRKFVSAVNLLGIDKAVPKKILDLMNDEKLTRENVASHLQKYRLYLKRISCGANRQANMVAALGTADSSYLRMGSLSGVGHLQTLTGPQQFHNNAFRPFPPGGMIGRLNTSVGLNNHGLSSSEALQLSHAQNLNNSINDPLKFQSSIACGNQNAIQGMPMSIGLDQLQHNKGVSVSVGPIQNMSPLIDARPTFAVSNRLSDQIPKVTMGCSPSPVLDVSNNALVLKADSENTQGRGVYENLTSVASQHSQFSLPLLGHGRCSDIWSSPMRSSGTNSYPPSETLQGGNLSGASSITSLSNQSHDSQTDMHSQGLIFTNNSGQISNNVPFLGWDDHNHDSSYHSNVIGNSIDSLIDPEGHTSINSTYNRNLDFNFCDPLQMKHDGIMGLSDENSLKQQHRYIMNQQKSQNSRAPNNIGSLEDFVSSMMKQKQDKVKFLDGSYLCNNNYPDGTSM

SEQ ID NO: 231021 - protein, 181 aa, Glycine max
  Clone ID: PAT_MRT3847_50633C.1.pep
RVSGTPKLEQMCLQVLSMYVIPGISCIEISEDKMQDEDQEVCLSTGKGVASLISGVAVIPDSDLPIIVTTIQSCSQGMNKVLVSLQQKFPSVSKSLLKNKVREVSDYVDNRLQVKKEVLDKLGSAVKPEKSSGGPRSIAAFFSKRCLPPTGEGSKPGETSPLPPLKSSSAIDERPQSSYNI

SEQ ID NO: 231022 - protein, 61 aa, Glycine max
  Clone ID: PAT_MRT3847_50634C.1.pep
GYSQFGHWLKMKLKGGSKLNSCPVQIKASKGNLGPFLTGFCCLTGDPKGVSTPVLKQVSLA

SEQ ID NO: 231023 - protein, 99 aa, Glycine max
  Clone ID: PAT_MRT3847_50635C.1.pep
VSLTAGFSASVAAAASHSFDTTRSRSQCTVLPKYISMERKILKWKRPGNKFERITGIHPSDRGVLFRGIGWRMARSGLASFIIVGSYLFVADQLASSLT

SEQ ID NO: 231024 - protein, 83 aa, Glycine max
  unsure (1)..(83): unsure at all Xaa locations
  Clone ID: PAT_MRT3847_50636C.1.pep
GCAIRQPLXVVDVVGVSYSAANAWTQVNRQLLSYICGWVCTASNYWKWYVMPRYVHRVACRCVLRLPNSRQLLCTISGLDNVG

SEQ ID NO: 231025 - protein, 109 aa, Glycine max
  unsure (1)..(109): unsure at all Xaa locations
  Clone ID: PAT_MRT3847_50637C.1.pep
IRVFCTRKRTQLVASFNCMREMHGGSRCKKQVDEGLSXFPRALHTAILGIKVPSKYLVKVVRNAIKKFGIYENALTRVVVFPNEKELKIISXVRFKRGSVLLEACYCQD

SEQ ID NO: 231026 - protein, 380 aa, Glycine max
  Clone ID: PAT_MRT3847_50638C.1.pep
MKELSQTQSVVVHGIAGAGSVALATVFTYPLDSIKVLIQVGSSTGKELDPAQALTRLLSVSGNAGLFNGFGWLLAGRIFGLGARFGVYEILTAFYKDGRENNYLFASEALLAGVVAGAVEAVISSPFELIKLRMQVTAASYVPSSNFALEKGARSPLIARLLHGRYPDKRALDLYVGLISILKTKNTNVTSALLEYPWTMTGSGRPPSVSNVRRPSDIISLEGWRTFWRGLRPGIVRDSVFSGIFFSTWQFLHQAMLDWKAVGMDPPPRLNEEVGPLSPLIVSLTAGFSASVAATASHSFDTTRSRSQCTVLPKYISMERKILKWKRPGTKFERITGIHPSDRGVLFRGIGWRMARSGLASFIIVGSYLFVADQLGSSLT

SEQ ID NO: 231027 - protein, 45 aa, Glycine max
  Clone ID: PAT_MRT3847_50639C.1.pep
LYSRQQSFDRDHNEFVVHDQLPPFNCEELVNRRNNFHSSIELCKG

SEQ ID NO: 231028 - protein, 115 aa, Glycine max
  unsure (1)..(115): unsure at all Xaa locations
  Clone ID: PAT_MRT3847_5063C.1.pep
QQETGASLAISILPVLVLLNLEMRFVSKTRRTWSVACGSHVGVVQMLLIVLVLGQHGCCSMWVQAISIPRXGISINLCXRAQACXXSSSHLLLHHRFSSAGIRSQCKSXXAYAYS

SEQ ID NO: 231029 - protein, 69 aa, Glycine max
  Clone ID: PAT_MRT3847_50640C.1.pep
QFNQKGVNFWQFSLPAFFQKSLKKTNLGKIKKISQMLMFKTSAGEKNKLWRKKKTFKKLIFTLKKREAV

SEQ ID NO: 231030 - protein, 68 aa, Glycine max
  Clone ID: PAT_MRT3847_50641C.1.pep
IAYTLPTRPCRSHNYNYRLSPDLSLLLSPCHPDCDQPEYQVQLHIHYISRLPSRETLGFIDLYPNRLD

SEQ ID NO: 231031 - protein, 84 aa, Glycine max
  Clone ID: PAT_MRT3847_50642C.1.pep
SSTTLALLHCSSVSIIFHDGRARPVDQKNPIHRSPRRRRAHNLSWHSCSYTSLAGCTCTRSPISITTIALSSHHHRRDHAAAPP

SEQ ID NO: 231032 - protein, 103 aa, Glycine max
  unsure (1)..(103): unsure at all Xaa locations
  Clone ID: PAT_MRT3847_50643C.1.pep
MSSLFPKVGCQGRERCADTTPAGLEGQPRRKRKGSVPCLESPWARQHRVEVVSPIDGLPTTTLTGEXSGDCGWDTTGRSGEPETKIKNRELATIHAPWGMHLA

SEQ ID NO: 231033 - protein, 104 aa, Glycine max
  Clone ID: PAT_MRT3847_50644C.1.pep
DGLLFHKISLTIPFTNLFPFSYSKKEKEKLDAGQYSSSSHGKNGLDIVARPNPAPIVTTKLNPTNSCRVPSRYVYTLCTYLPIDQERQKRINFHPLLRRQRKKG

SEQ ID NO: 231034 - protein, 108 aa, Glycine max
  unsure (1)..(108): unsure at all Xaa locations
  Clone ID: PAT_MRT3847_50645C.1.pep
XAXTXXXPXXTSXXXLIXHHSHTFADSXXNNHXXXXXXSLXXXXXXHRXXFXPXXSXXXRSQACXXXXXXDXXTXXNAPXXXXLLKXXTXXRSCXYXXSSXRIPXXLL

SEQ ID NO: 231035 - protein, 61 aa, Glycine max
  unsure (1)..(61): unsure at all Xaa locations
  Clone ID: PAT_MRT3847_50646C.1.pep
MSFSVLKVNHGNLVKLEGFCIDPEEANCYLVYEYVENGSLYSWLHEGKKEKLSWKIRLXIA

SEQ ID NO: 231036 - protein, 117 aa, Glycine max
  Clone ID: PAT_MRT3847_50647C.1.pep
PAELHMCFGKVEFCGDEHPTFPATTTDVRIYQLARPVSSGIGGEDNIELPLAVTGREDYTFYLKEVPGAFVLGDTRNQKSGSIHAAHSSYFIIDEDALPIEAALTAACALSYHSYST

SEQ ID NO: 231037 - protein, 314 aa, Glycine max
  unsure (1)..(314): unsure at all Xaa locations
  Clone ID: PAT_MRT3847_50648C.1.pep
HLRKERLATPANSFCSLFFIYSILLSSFFLAYEAQAYPPVVNGLSYSFYSQTCPKLESIVRNHLEKEFTQASWQAAALLVVFFHDCFVQGCDGSLLLDGNPGERDHPLNRGISLKVLRTIDDLRNVVHNECGRIVSCADITVLAARDAVYLSGGPNFAVPLGRRDSLNFSFEEVNNLPLPYNITSVTLQTFASKNLDVTNVVALVGAHTLGRAHCHTFYNRLSPLDPNMDKTLAKILNTTCPSTYSRNTANLDIRTPKVFDNKYYINLMNRQGLFTSDQDLFTDKRTKGLVEAFAHDQTLFFEXFVDGFIRMSQ

SEQ ID NO: 231038 - protein, 93 aa, Glycine max
  Clone ID: PAT_MRT3847_50649C.1.pep
NKSPVLDPTLLRLLGWLRTMAWDLINRGLCWMQNHHPFFIKSSTFITALVQARFRSQFSRVINLSQEGPKFQMYQFNVIILTISCLKREVSSS

SEQ ID NO: 231039 - protein, 49 aa, Glycine max
  Clone ID: PAT_MRT3847_5064C.1.pep
KNHNHRHQQQQHRNEAWGTCEELLLACAVNRHGFTDCDAVSMQVQSCTT

SEQ ID NO: 231040 - protein, 60 aa, Glycine max
  Clone ID: PAT_MRT3847_50650C.1.pep
ICNTIAPFHHIFRGRTCTKYLLILFPMMILTALAYLGTVTMIWDPFEVSAINACTSSFRL

SEQ ID NO: 231041 - protein, 100 aa, Glycine max
  Clone ID: PAT_MRT3847_50651C.1.pep
MGPPTRQLLNAVLVLLLLLATNHQGTGVVVASELRCQCLTTLPRVDFKNIQSLTVTPPGPHCAQTEVIATLKDGHEVCLNPEALLVQKILQKILNKGKAN

SEQ ID NO: 231042 - protein, 217 aa, Glycine max
  Clone ID: PAT_MRT3847_50652C.1.pep
VVFRRYTLENSMKFETSQNTDHLELRQPLAMEIWESIMQTLEPESKITVLTNGPLTTLAKVVSMKNISSRIEEVYVMGGHISRNVCDKGNIFSVPSNQYAEFNMFLDPLAAKTEFQSEVNITLIPLSVQQKASSFSHMLCWLRRIEQTPETVFSKCVLLRLQRLKQIHHRYHHMDTFLGEILGAIVLADGPSSLKEKFEIKGIKVLAEGDESIDGEM

SEQ ID NO: 231043 - protein, 50 aa, Glycine max
  Clone ID: PAT_MRT3847_50653C.1.pep
QIFVKTLTGKTITLEVESSDTIDHVKAQIQDQEGIPSDQQKVNFAGKQLE

SEQ ID NO: 231044 - protein, 70 aa, Glycine max
  Clone ID: PAT_MRT3847_50654C.1.pep
AMWMSCIWLVFLWLLHLPMLLVSTCWYADTIFSYVMFYTNFQNLSDLSVHLASYYIWTIVYEGVNSLSSI

SEQ ID NO: 231045 - protein, 38 aa, Glycine max
  Clone ID: PAT_MRT3847_50655C.1.pep
LNGMCRSVIIAKILGGCQGVNHIGMWVWQVLLGYGQIE

SEQ ID NO: 231046 - protein, 360 aa, Glycine max
  Clone ID: PAT_MRT3847_50656C.1.pep
MATSTCFLCPSTASLKGRARFRIRIRCSSSVSVNIRREPEPVTTLVKAFAPATVANLGPGFDFLGCAVDGLGDIVSVKVDPQVHPGEICISDISGHAPNKLSKNPLWNCAGIAAIEVMKMLSIRSVGLSLSLEKGLPLGSGLGSSAASAAAAAVAVNELFGKKLSVEELVLASLKSEEKVSGYHADNVAPSIMGGFVLIGSYSPLELMPLKFPAEKELYFVLVTPEFEAPTKKMRAALPTEIGMPHHVWNCSQAGALVASVLQGDVVGLGKALSSDKIVEPRRAPLIPGMEAVKRAAIQAGAFGCTISGAGPTAVAVIDDEQTGHLIAKHMIDAFLHVGNLKASANVKQLDRLGARRIPN

SEQ ID NO: 231047 - protein, 31 aa, Glycine max
  Clone ID: PAT_MRT3847_50657C.1.pep
LRYISRDYQCLHRKLEKTINQSPSTSQPKER

SEQ ID NO: 231048 - protein, 81 aa, Glycine max
  Clone ID: PAT_MRT3847_50658C.1.pep
NLIFTPRSASDSYGTATYYRHVRDPSSDGFAEIMMLQGSLLMGGQLNSHDHFKDWRLDVDNMSYEQLLELGERIGHVNTGL

SEQ ID NO: 231049 - protein, 401 aa, Glycine max
  unsure (1)..(401): unsure at all Xaa locations
  Clone ID: PAT_MRT3847_50659C.1.pep
IPMSNCLNSGINKIFVLTQFNSASLNRHIARTYFGNGINFGDGIVEVLAATQTPGEAGKNWFQGTADAVRQFTWVFEDAKHTNVENVLILAGDHLYRMDYMDLVQSHVDRNADITVSCAAVGDSRASDYGLVKVDDRGRIIQFSEKPNGDDLKAMQADTSLLGLSPQDAXKSPYIASMGVYVFKTDVLLNLLKWRYPTSNDFGSEIMPAAVREHDVQTYFFEDNEXEIEMTKAAXYNYLENTRGDDQLEFYDPKIPIYTSPGFLPPTKIDKCQIVDAIISHGCFLRECTVQHSIVGERSRLDYGVELLDTVMMGADYYQTESEIASLLAEGKVPIGIGRNTKISNCIIDKKAKHRKDVLSGYXIFNSDGCLRSNIPEIGFEIMSGLTFQMEXAAIEEGMIV

SEQ ID NO: 231050 - protein, 129 aa, Glycine max
  Clone ID: PAT_MRT3847_5065C.1.pep
MKALGWWLIAVGTLRLASVWFGFFDIWALRLAVFSNTTMTEVHGRTFGTWTLLTCTLCYICAFNLENKPLYLATFLSFIYAFGHFLTEYLIYHTMEIKNLTTVGIFAGTSIIWMLLQWNAHSKVHLKHS

SEQ ID NO: 231051 - protein, 87 aa, Glycine max
  Clone ID: PAT_MRT3847_50660C.1.pep
AEQAHSMAAVQPYAEARANPRNILRPQSHLKAMNQIGASTGTARIRSPRKSMLSLINPKARSGESRLDYWEQRLSPREIPSALVGSD

SEQ ID NO: 231052 - protein, 85 aa, Glycine max
  Clone ID: PAT_MRT3847_50661C.1.pep
LSVADRDQLAADNSSSKDCDNAENSATNDQTAYGNSADENLQSQTEVNAVSGSATLEASMSNGSINQEQWSEASPMSQSATNELS

SEQ ID NO: 231053 - protein, 232 aa, Glycine max
  Clone ID: PAT_MRT3847_50662C.1.pep
MSDILNKNEAPENQKFEVTFSRKSVVKALNPSLEPFSITLSNLDLLSGRFPVTYLYFYRKLESDNFKAFVDALKNTLAQVLDHYYPFAGQIVQNPKTSEPEIICDNNGALVIEAHTNIPLKSLDFYNLNETLQEKVVSVEPDFPLQIQATEYTCGGISIAFTFDHALGDATSFGKFIASWCEIAQKKPLSSIPDHTRHLRARSSPKYQPSLGSNFYEVHHERVQNMPMNHVL

SEQ ID NO: 231054 - protein, 50 aa, Glycine max
  Clone ID: PAT_MRT3847_50663C.1.pep
RILLDSIQPCCRTKAHGSVICVGARSTFDTCVSYCAHCDWHPRELVPCGG

SEQ ID NO: 231055 - protein, 64 aa, Glycine max
  Clone ID: PAT_MRT3847_50664C.1.pep
PNFAIQALDSDAAHYDSSCVVKNDSYQYWYALTVKVSDAGNFDSLLLRMRHIVLNALNQHLEIY

SEQ ID NO: 231056 - protein, 85 aa, Glycine max
  Clone ID: PAT_MRT3847_50665C.1.pep
PQGARGEEPSRGPCQRKSRPPKGLFRPPGRERGYYQPLLGPRKKKFFPPGGGVEKSPLWEAPGGVVFLKNPLFPPPGGFFFPGAR

SEQ ID NO: 231057 - protein, 75 aa, Glycine max
  Clone ID: PAT_MRT3847_50666C.1.pep
FLKGEFLDKGGVPLGPKGIFSQNRLLYLPAAMVAGNVPRCSGFPLGGGDFGWFCFFPHSPWCFGEKKIAFSFRFF

SEQ ID NO: 231058 - protein, 89 aa, Glycine max
  unsure (1)..(89): unsure at all Xaa locations
  Clone ID: PAT_MRT3847_50667C.1.pep
GLLCAFEPNPSRDISELTCEVADRGSFSGREYHYPSTARLIDAXRTDIEVXYRTRIGRYIDILLSVYITERTGIGFMRRTDHAWATCEC

SEQ ID NO: 231059 - protein, 64 aa, Glycine max
  Clone ID: PAT_MRT3847_50668C.1.pep
FHFRAIRYMESTRSILTPLVLLVLFSLAKGLHNPACDAAYLHDHDGATLQVFHVIQPLFPIHAL

SEQ ID NO: 231060 - protein, 46 aa, Glycine max
  Clone ID: PAT_MRT3847_50669C.1.pep
KEILYFNIFLTSPFSEPSRRITKSRKFTTFCVKYQCLSEYIKKMTF

SEQ ID NO: 231061 - protein, 268 aa, Glycine max
  unsure (1)..(268): unsure at all Xaa locations
  Clone ID: PAT_MRT3847_5066C.1.pep
MNTESSVLDETNSDKQVSRSNELRKLYRRKTLQISTVRPSIVCLKKKLIILDLNGLLVDIVSPPPKYRKPDAMVGKKAMFKRPFYLEFLNFCFEKFEVAVWSSRTKKNIXNVINXXMGNMKERLLFCWDLSYCTKTSFKTLENKQKPLVFKXDLRKIWEKHDSNLPWEKGYFNQSNTLLLDDSPYKALLNPVNKXPYNSVFPRTFTFQNESDNSLAVGGDLRQYLDGLANAENMVKYVEQHPFGQEAINERSQSWNFYLKVIDSLSTC

SEQ ID NO: 231062 - protein, 136 aa, Glycine max
  Clone ID: PAT_MRT3847_50670C.1.pep
GAPPFGFAQCFPFKPRLFDFGGSGKSDPALDVSLLQNLVKLCPNQADFDPNLAPLDPVPPPPFDNMYSKNIVTNLGVLQSDQAFLGDSPPASLVNTYSKWPFMFFRDFGIFMEKMGRIGVLPGSQGQIKTNCRAVN

SEQ ID NO: 231063 - protein, 71 aa, Glycine max
  Clone ID: PAT_MRT3847_50671C.1.pep
TWRPPMKVSCSILRVRIWKVICMKYLLRDKKEPTSQQCKKFKVGGKQKQDKSYNGGLVSQIRARRMQGCSL

SEQ ID NO: 231064 - protein, 103 aa, Glycine max
  unsure (1)..(103): unsure at all Xaa locations
  Clone ID: PAT_MRT3847_50672C.1.pep
WEKRKLRKRXNKKKHVCLLLAHYITQKQQYHIIFYLINQIQLFLNFYGNVSIKQHQERSYILHLFQIPIRHKQHILVQGTFNLQMSIKNYKPSDLTQINSDAW

SEQ ID NO: 231065 - protein, 68 aa, Glycine max
  Clone ID: PAT_MRT3847_50673C.1.pep
PYDEVNRSFVVRLKDQLKHTWYLLNSNDHMHLVTNNQDLVNPTILVGWTKLKDFYGLTGNHQVIMTYF

SEQ ID NO: 231066 - protein, 167 aa, Glycine max
  Clone ID: PAT_MRT3847_50674C.1.pep
IRLESFDALDEQEKCIFLDIACLFVQMEMKREDVVDILNGCNFRGDIALTVLTARCLIKITGDGKLWMHDQVRDMGRQIVHSENLADPGLRSRLWDRDEILIVLKSMKGTRNVQGIVVDCVKRRMSTPRDRSADEITWENFRRKPSCKLALEYIKEKYKKYVRDREE

SEQ ID NO: 231067 - protein, 84 aa, Glycine max
  unsure (1)..(84): unsure at all Xaa locations
  Clone ID: PAT_MRT3847_50675C.1.pep
GWCGXVVWQAARIKAEAMAQVSKFGKSTTPKPMEVKEESLASTREGPRQRQKRHSKKNFYQIRXSTNHTSLCSDMGWXXIXYSP

SEQ ID NO: 231068 - protein, 55 aa, Glycine max
  unsure (1)..(55): unsure at all Xaa locations
  Clone ID: PAT_MRT3847_50676C.1.pep
NIQKESRLQLIQRLSSGIHIFVKTLTGDNITLVVVNSDTIDYVXAKIRVKVCIPP

SEQ ID NO: 231069 - protein, 43 aa, Glycine max
  Clone ID: PAT_MRT3847_50677C.1.pep
KGYKTTKWCRLKVMNVLLEEHSRRCSELSKMVNHYEEKKNVQK

SEQ ID NO: 231070 - protein, 131 aa, Glycine max
  Clone ID: PAT_MRT3847_50678C.1.pep
MGSAFSALFGRGSTVADFKVESLHVLPFHSSERWQLHFNEVKETSKLVVIDFTASWCGPCRFIAPVFNEMAKKFSNAEFVKIDVDELPDVAKDFKVEAMPTFVLCKKGKEVDRVVGARKDELQNKIQKHYQ

SEQ ID NO: 231071 - protein, 547 aa, Glycine max
  Clone ID: PAT_MRT3847_50679C.1.pep
MASITFSLLQFHRAPILLLILLAGFGHCHIPSTLEGPFDPVTVPFDPALRGVAVDLPETDPRVRRRVRGFEPEQISVSLSTSHDSVWISWVTGEFQIGLDIKPLDPKTVSSVVQYGTSRFELVHEARGQSLIYNQLYPFEGLQNYTSGIIHHVQLKGLEPSTLYYYQCGDPSLQAMSDIYYFRTMPISGSKSYPGKVAVVGDLGLTYNTTTTIGHLTSNEPDLLLLIGDVTYANLYLTNGTGSDCYSCSFPLTPIHETYQPRWDYWGRFMQNLVSNVPIMVVEGNHEIEKQAENRTFVAYSSRFAFPSQESGSSSTFYYSFNAGGIHFIMLGAYINYDKTAEQYKWLERDLENVDRSITPWLVVTWHPPWYSSYEAHYREAECMRVEMEDLLYAYGVDIIFNGHVHAYERSNRVYNYNLDPCGPVYITVGDGGNREKMAIKFADEPGHCPDPLSTPDPYMGGFCATNFTFGTKVSKFCWDRQPDYSAFRESSFGYGILEVKNETWALWSWYRNQDSYKEVGDQIYIVRQPDICPIHQRVNIDCIASI

SEQ ID NO: 231072 - protein, 129 aa, Glycine max
  Clone ID: PAT_MRT3847_5067C.1.pep
MKALGWWLIAVGTLRLASVWFGFFDIWALRLAVFCNTTMTEVHGRTFGTWTLLTCTLCYICAFNLENKPLYLATFLSFIYAFGHFLTEYLIYHTMEIKNLTTVGIFAGTSIVWMLLQWNAHSKVHLKHS

SEQ ID NO: 231073 - protein, 73 aa, Glycine max
  Clone ID: PAT_MRT3847_50680C.1.pep
KKKKFFNFFGEKKKYFFPRQKIFQTFFKNRLKRGPLSPPLKKNFPSFISQNFTPPLIFFQFFLHFYRTPFFFF

SEQ ID NO: 231074 - protein, 42 aa, Glycine max
  Clone ID: PAT_MRT3847_50681C.1.pep
NIWCTQYIHNGVSVLLSAQSLTFHSHTRMCCLKFLLNNLFLF

SEQ ID NO: 231075 - protein, 80 aa, Glycine max
  unsure (1)..(80): unsure at all Xaa locations
  Clone ID: PAT_MRT3847_50682C.1.pep
TFRPHKHNLRNXLTSSLSFQLLSLLPHDITLWDLPFQLHFFSSIRFKFEKLLKGTNFSMIQTNNLWIIHFIIYHNYFNHA

SEQ ID NO: 231076 - protein, 37 aa, Glycine max
  Clone ID: PAT_MRT3847_50683C.1.pep
WKTILDRGVNRHLSYFYKRALKSSSNRGPFCCLLATV

SEQ ID NO: 231077 - protein, 85 aa, Glycine max
  unsure (1)..(85): unsure at all Xaa locations
  Clone ID: PAT_MRT3847_50684C.1.pep
LHHSFDGFPIVREKSQDPRNATGGWCLGDSCNNVVSVSRLVXVCMFLLSXFSAGPSHSFSXRRVKELVLHCAHIPIMQLCSITMC

SEQ ID NO: 231078 - protein, 55 aa, Glycine max
  Clone ID: PAT_MRT3847_50685C.1.pep
EIVIAYALRSNHLGLEGASVILNILPLALTYIQTGSLVPVVYAWNLSSNDHYLHH

SEQ ID NO: 231079 - protein, 130 aa, Glycine max
  Clone ID: PAT_MRT3847_50686C.1.pep
MAEEGKPDEQLFQLLSNLLHQVESLTNQEEVELRSKIETLGLEVTKVPSKSTQHLNELEIAEELDKLSARLDNLDEMISSSMASDPQVQSLLSDTADVWMPVITATSEERRNFTAATGDSTLQTDVEKSK

SEQ ID NO: 231080 - protein, 145 aa, Glycine max
  Clone ID: PAT_MRT3847_50687C.1.pep
GQITLPVTFGTWENFRTENICFKVADFETAYHAILEHPALAKFMAVPHYTCMMMNMPGPRGVVSLRSNIKQAVTCDKESCEMAQSREITLAREEIRLAASTATEGEVPATKMSKNGESDPKTKKIPLDPSDPAKTSVIGAQLDCK

SEQ ID NO: 231081 - protein, 130 aa, Glycine max; identical to SEQ ID NO: 231079
  Clone ID: PAT_MRT3847_50688C.1.pep

SEQ ID NO: 231082 - protein, 57 aa, Glycine max
  Clone ID: PAT_MRT3847_50689C.1.pep
SQYTCIASSGNQDSYWITIACWLRYKLKEMLSRFTKDLCQAYFFSRSIDVTNNHVES

SEQ ID NO: 231083 - protein, 43 aa, Glycine max
  Clone ID: PAT_MRT3847_5068C.1.pep
PIPHVRPPFAEIVEMLYYAENEIMPPVRKVRFRCCMPPPMPAA

SEQ ID NO: 231084 - protein, 241 aa, Glycine max
  unsure (1)..(241): unsure at all Xaa locations
  Clone ID: PAT_MRT3847_50690C.1.pep
DNSYSAGAIGSPQLLMLSGXGPANHLQAHGIKVVLDXPLVGQGMADNPLNVLLVPSPVPVEVSLVQTVGITKFGSFIEAASGLSLGHSWSERLQGIFEFVSNQSGQPSMFPPVADTIRSLANPILKGGVLLEKIIGPRSTGHLELINTNPNDNPSVTFNYFKDPEDLRKCVEGMRTIIDVINSKAFSKFRYXXMPVQSLIXLMLHLPVNLRPKHANAAFSLEQYCIDTVLTIWHYHGGCQS

SEQ ID NO: 231085 - protein, 93 aa, Glycine max
  Clone ID: PAT_MRT3847_50691C.1.pep
DHTCSIYISTLRLSRRYSGSLPINDLPSIRTLPTVALLTKAGIMPSAFYSANWHSNVHAYTSCSPLTHPVELECSGKTAILPVRKTLVKLMTL

SEQ ID NO: 231086 - protein, 83 aa, Glycine max
  Clone ID: PAT_MRT3847_50692C.1.pep
MVMSSITFPPNSDDYIGTESCTDLQNIDHVIDNHQSFKSNDAGNKTKVKNNIKMKENKVFPPPIPLLARTQNLASHMPWVLKR

SEQ ID NO: 231087 - protein, 63 aa, Glycine max
  Clone ID: PAT_MRT3847_50693C.1.pep
QWYGTSLILYYIRESLPYSTSTSSNDSFILQSGYILVIKVDVVLRRILSPNPRVRPRVNERKR

SEQ ID NO: 231088 - protein, 58 aa, Glycine max
  Clone ID: PAT_MRT3847_50694C.1.pep
VNLNLTDRKLFKIISCKNVPIGCLCYGGYEEVESQALFTLSLLWWGWENGDGVENPYF

SEQ ID NO: 231089 - protein, 173 aa, Glycine max
  Clone ID: PAT_MRT3847_50695C.1.pep
FPAANVYYNYTGKATCFDLDDNSDPHDLGGWQWQACTEMIMPVGGSNKESIFPEYEWSYEARASWCDFFYNVQPRPHWITTEFGGHAIERVLKRSASNIIFFNGLRDPWSAGGVLKTISKTIVAIVAKKGAHHVDLRYSSKEDPQWLKDVRKQEVNIIASWISQYHQDLQSNS

SEQ ID NO: 231090 - protein, 171 aa, Glycine max
  Clone ID: PAT_MRT3847_50696C.1.pep
MKPFLLFLITFSFLCQTHLLLVLSATTPLSLQLIALLSIKSSLLDPLNNLHDWDPSPSPSNPQHPIWCSWRAITCHSKTSQITTLDLSHLNLSGTISPQIRHLSTLNHLNLSGNDFTGSFQYAIFELTELRTLDISHNSFNSTFPPGISKLRFLRHFNAYSNSFTGPLPKS

SEQ ID NO: 231091 - protein, 189 aa, Glycine max
  unsure (1)..(189): unsure at all Xaa locations
  Clone ID: PAT_MRT3847_50697C.1.pep
DAIXGLDDLRDWTNNVQXHIPIYVAKRDFEVMTKTHYYLVDTSVILPGAKVSELQFNIISEEPFFVHELKFTPLPVWHGQNYRSLGFRFGNICYISDVSDIPEETYPLLKDCEILILDALRPDRSTSTHFGLQRALEEVRKIQPKRTLFTGMMHLMDHEEVNDSLAKLLESEGLDAQLSYDGLRIPIRL

SEQ ID NO: 231092 - protein, 87 aa, Glycine max
  Clone ID: PAT_MRT3847_50698C.1.pep
AKNSNRAWALYYFKTKANAPPLGKLGATQGTFYLDLFRGEINQLGIVMCVMNHLMGEEGEQIVSKQGQKGVDCNTRCLFNWLQDCNH

SEQ ID NO: 231093 - protein, 65 aa, Glycine max
  Clone ID: PAT_MRT3847_50699C.1.pep
REHIYVVVSILECSTIKEIRPVMCSRVRSNAFGRYVVLRWFQCYSGMSFRSRIRGFRPVCSWVHS

SEQ ID NO: 231094 - protein, 135 aa, Glycine max
  unsure (1)..(135): unsure at all Xaa locations
  Clone ID: PAT_MRT3847_5069C.1.pep
ALSSRVRSRCGLTHMTVTPLDLIKCNMQIDPAKYKSISSGFGILLKEQGVKGSFRGWVPTLWXYSAHGACKFGXYEYFKRTYSDLAGPVYTVKYKTLIYLAGXAXAEIIADIALCPFEXVNVRVQTQPGFAWGDV

SEQ ID NO: 231095 - protein, 78 aa, Glycine max
  Clone ID: PAT_MRT3847_506C.1.pep
HCLLEASSMAFHHILLIDMNQMKLLLAGLEICRKRKSSQSGRCYSDISHDKQTSFKWVCSCVARKGLQNCKLCPVNSG

SEQ ID NO: 231096 - protein, 50 aa, Glycine max
  Clone ID: PAT_MRT3847_50700C.1.pep
VFIIFVVCLDLSHFVLTKAYNKKFSRQSFSLKNYFFVKIKHNQTCQNNDI

SEQ ID NO: 231097 - protein, 99 aa, Glycine max
  Clone ID: PAT_MRT3847_50701C.1.pep
HLTSFPSPFYFFCRAFFSRLLQHRKNLLPHFQQSWSFWSHTQYRNPKIVFLRDWKDLGLHPHECLCSLAPLETDKQVQNVNPSFVSPSVVFSQPYGRVG

SEQ ID NO: 231098 - protein, 35 aa, Glycine max
  Clone ID: PAT_MRT3847_50702C.1.pep
PLVNSDGRESYNLYPGDARRIPPGTTYYLVDAPDH

SEQ ID NO: 231099 - protein, 141 aa, Glycine max
  unsure (1)..(141): unsure at all Xaa locations
  Clone ID: PAT_MRT3847_50703C.1.pep
AVFEKHVAHESLKDQITAVXKLINLSRIQLANSRNLYSTKVYRVAKIMNLIHRVVGDLKLLTDEKMCEAQHIPESDIEAGENYVCHIPLMVQVESLSCRASEFRLALSCKNCEPEATVMYVXAIENIIDSTARACRNIGGA

SEQ ID NO: 231100 - protein, 50 aa, Glycine max
  Clone ID: PAT_MRT3847_50704C.1.pep
RSVLPRPNPRPALTDVEAEFNSAHDPCQRTGRLVIPNLATQLDTMSTAVN

SEQ ID NO: 231101 - protein, 60 aa, Glycine max
  Clone ID: PAT_MRT3847_50705C.1.pep
KGETYCNKRVVPKVAYGVKERNKRKKLHISDHAEETEFAEDVTAASGTEKVGIRGIPECL

SEQ ID NO: 231102 - protein, 91 aa, Glycine max
  unsure (1)..(91): unsure at all Xaa locations
  Clone ID: PAT_MRT3847_50706C.1.pep
MGFTPRVRPMATLAPINVPDWSKILRVDSVVSLNADFTAENESEMVPPHEYLGGSQTMVANSVFXGVGRPFKGRNFNRVCYPVWSQTGFAG

SEQ ID NO: 231103 - protein, 234 aa, Glycine max
  unsure (1)..(234): unsure at all Xaa locations
  Clone ID: PAT_MRT3847_50707C.1.pep
MLQPRAFRPYIPISSSTSAPSFSSPNPNDSVTSPSLHGHANNATTSFLSLKNPTSFCHNYRIAIALVPSALFLLDLGGTTVVATLVVGLMISYILDSLNLKPAAFFAVWFSLIFSQLAFFLSASPSLFSAFNSSLAVAVLASFLCAHTTFLLGVWSSLNFKWLLLENPSIAVSLERLLFACLPISASALFAWASIXAVGITNAXYYLAXFNCCFYLLFSVPRVSSFKPNTRHAT

SEQ ID NO: 231104 - protein, 36 aa, Glycine max
  Clone ID: PAT_MRT3847_50708C.1.pep
IRITLVCDQLLQQAIFVVVEVMLKYLSNFTHYVYLS

SEQ ID NO: 231105 - protein, 90 aa, Glycine max
  Clone ID: PAT_MRT3847_50709C.1.pep
QAAMLIDNIGRYIYLHTILMFCCPFGCDVALNAFDVYRRVEQDSRNQERKKVPRRQMPRRGTEHLMARHLFPAWSTPHNLLVDLMTSNTL

SEQ ID NO: 231106 - protein, 68 aa, Glycine max
  Clone ID: PAT_MRT3847_5070C.1.pep
FCPSLCLNHHRAWFPLLSFTSTPWVFRPIFFAFSSTINLFTSFSNSSLLALVSIFIPISPSLQIISYS

SEQ ID NO: 231107 - protein, 77 aa, Glycine max
  Clone ID: PAT_MRT3847_50710C.1.pep
RYYIVKFSQILLSYGSSANWVAQLSNCRKEIRLAQGYWLSTQLSSQYKNFLHYLGLANQPHLATSTYQEDECSSSTG

SEQ ID NO: 231108 - protein, 105 aa, Glycine max
  Clone ID: PAT_MRT3847_50711C.1.pep
PRPFFFFFFFFFGNYSTLSLLLPSLLKYMLQSLNPNYATANATLDYLITHFHTIKTEVKTAGQAYLTLTVLHATPSITHNSVTCQRSTEVTTGSSLNTSKGAHKP

SEQ ID NO: 231109 - protein, 90 aa, Glycine max
  Clone ID: PAT_MRT3847_50712C.1.pep
QDFLFLKENLYKWAKKYFRLKVWFVIQKSIKEGWENSVGFPPESILPEHIPKASPDPLALTCGPPPLIQFPVPPNLEKLGFAPQNNLLVF

SEQ ID NO: 231110 - protein, 171 aa, Glycine max
  unsure (1)..(171): unsure at all Xaa locations
  Clone ID: PAT_MRT3847_50713C.1.pep
LFYGKEKEIWESQLERLKKVQSKKGHDIIKLSYNDLDQDEKKIFLDLACFFDGLNLKVNTIKILLKDHDYSVAAGLERLTDKALISVSQENIATMHNIIQETAWQIARQESIENTRSQSRLLDPDDDYLVLKDNKGNXAIRSIVINLAGIKQLQLNPQAFAKMSKLLFLDF

SEQ ID NO: 231111 - protein, 70 aa, Glycine max
  Clone ID: PAT_MRT3847_50714C.1.pep
GLSEGEKDVPSSRRARMIPTATRVLSDTTRLLSLNNLGDEIEVPAMTRVKAARLDSVNKMCLSRSIPQAL

SEQ ID NO: 231112 - protein, 466 aa, Glycine max
  Clone ID: PAT_MRT3847_50715C.1.pep
IKMAQPDTSLWIKSSDGRNEVLNHDEYARLFSPYIGSKPAAGYVTEATRGTGVVSASSLGLVEILMDADQWSEMFSSMIASAATVEVLSSGTGGTRSGALQVMLAEVQLLSPLVPARQVSFLRFCKKHAEGLWAVVDVSVDIGRNVTNSHPLMSCRRLPSGCVIQDMPNGFSNITWVEHSQYDESVIHQLYRPLVSSGIGFGAQRWIATLLRQCDCLAILRSPQGPSEDPTAQAGRTNMMKLAQRMTECFCSGICASSACKWDILHIGNLADDMRIMARKIDDPTEAPGIVLSASTSVWMPVSRKRVFDFLRDENLRGEWDLLSKDGPMKEMLHIAKGQDRGNCVSILHSANSECNVLYLQESWSDASGSMVVYSPINMQALQMVMSCGDSSFVPLRPSGFAILPDGTSNNGDGSDGGGSCLLTVGLQMLPNGNHQSAKFTMESVDAVNNLISFTIQKVKDALGVA

SEQ ID NO: 231113 - protein, 115 aa, Glycine max
  unsure (1)..(115): unsure at all Xaa locations
  Clone ID: PAT_MRT3847_50716C.1.pep
PTRPPMPTPAXPPPPPPLPSPPPPPPSVINIECPPPPKTPCPDNCEEVPQGQGPVPRPPYPPVLYFPPGTPYPNYVPYNMNTSGGMMRPYSIYFTKSFSLIIYVACLCLTYYLFI

SEQ ID NO: 231114 - protein, 59 aa, Glycine max
  Clone ID: PAT_MRT3847_50717C.1.pep
GSTTTAASGYVHGKLHDSNSKNAKSYKKPTQTFVNVIELLLESICTFVAPPLKDDNASN

SEQ ID NO: 231115 - protein, 115 aa, Glycine max
  Clone ID: PAT_MRT3847_50718C.1.pep
ISTILSSTPGAMVLGDYVLEPNDHAFYSDEYDSDEEYLEDDFFSVRSIGLGRTGHFLPNIRYNQDRAADNFDVDHFGLQSVASTGSAAVSGRGLHRILLGRSRRRRRHRIANARR

SEQ ID NO: 231116 - protein, 403 aa, Glycine max
  Clone ID: PAT_MRT3847_50719C.1.pep
MESGVGSGGSGVVVKSRNSSGCLIVRKKGDGLGATASTSRKLYESKKRPNINVPVSLSDSGSSDELLMPPGRRLGPETIRVCNGLAASERGGSEISRKRDRVERISGNGEGIAAEKGLEQWERKRSKLGVYDFDDYDGMDLENMRRRHLDGHGGGSFMGSVHAARSGIDREFITGSSVRILDKRKNSYGDRPSGLYLGDNVDHSRYKINRDGVWVPLRLQREKFNSDESIRVQGKNGVLKVMVNKKKVGGPSEQDYDHHKPVEGRQRLKTEETAKRLMTEETAKRLMTEETAKRLKTEEAAKRNVPIRPLSYLETKPVEKPGLLKRPENKRVASRKSLSSKDSKGDEGDSDNSDTSLNLGIRNTEARKPAKNVMSEDEQTPVHEKLPTTRTKEGKIKRGSGTE

SEQ ID NO: 231117 - protein, 130 aa, Glycine max
  unsure (1)..(130): unsure at all Xaa locations
  Clone ID: PAT_MRT3847_5071C.1.pep
MLPAVVDPSTVQRFSDRVVDGLSALFLALKRRPVIRYQRTSDIAKRIAQEAAKLMYQEESGLFDFRRMEVSPLLLVIDRRDDPVTPLLNQWTYQAXMVHELIGIQDNKVDLKSVGKFPRVRRRMCCHQNK

SEQ ID NO: 231118 - protein, 265 aa, Glycine max
  unsure (1)..(265): unsure at all Xaa locations
  Clone ID: PAT_MRT3847_50720C.1.pep
MAEGVSSSFVQPAIPRFNGHYDHWAMLMENFLRSKEYWDLIENGILMVADGIEPTEAQCKLIEEQKLKDLKVKNYLFQAIDREVLETILKRDTAKNIWDSMKQKFQGSTRVKRAQLQALRKDFEILQMKEGETVNAYFSRTLTIANKMKAHGESMSETVITAKILRSMISKFDYVVCSIEESNNLDVMTIDELQSSLLVHEQRMRSRGEEEQVLKISHEDKASRGRGRGNGSFRGGXXRGRQSFNKLXFXCFKCHKLGHYQYECP

SEQ ID NO: 231119 - protein, 71 aa, Glycine max
  Clone ID: PAT_MRT3847_50721C.1.pep
FVIFFFFFFFFFCFFLICLKGRTPQTSDNKRKKQKQQQKTKKRETRTTQKKNASNSKASKNKNVKQTAPAF

SEQ ID NO: 231120 - protein, 73 aa, Glycine max
  Clone ID: PAT_MRT3847_50722C.1.pep
MSRKTARTDKTGFVMNRYLGLPMSTSPMSFLTLSCIVSDKKKGEVEEVMLVEEALPCLSLFHLSTVEHSRKRG

SEQ ID NO: 231121 - protein, 307 aa, Glycine max
  unsure (1)..(307): unsure at all Xaa locations
  Clone ID: PAT_MRT3847_50723C.1.pep
INAFTVRALRDTFPPARGAGIMALCATSSYYDITEVATRILPNVVVLTIDPDSDVRTKAFQAVDQFLQIAKQHYEKTNAADTTGVAGVGSSSVPGNASLLGWAMSSLTLKGKPSDHAPVASASSTAITSTSSNGTAGIETPSTAPARVSSTADLAEHPVPTSPTSTDGWGELENGIDEEHGSDXDGWDDLEPLEETKPXLANIQAAQRRPVSQPISHTKQASNLLSKSTPKLNKDEDDDLWGSIAAPAPKTARPLNLKSAQTDDDDPWAAIAAPAPTTKAKPLSTGRGRGAKPAAPKLGAQRINRTS

SEQ ID NO: 231122 - protein, 59 aa, Glycine max
  unsure (1)..(59): unsure at all Xaa locations
  Clone ID: PAT_MRT3847_50724C.1.pep
LAYFLNSSLPEXDRNRTTKVLHQASSGRPEVITSKSGRSVTKYPVPECKCHDDSHHQST

SEQ ID NO: 231123 - protein, 96 aa, Glycine max
  Clone ID: PAT_MRT3847_50725C.1.pep
AGPGIGKASHIFLASSLVFAAYFQIMSALVDIWSRELTKIREKEQSLNSAAQPLQENMDKSSSGFAVVAAKLMQFNKPRFLFSDASISILVECFSP

SEQ ID NO: 231124 - protein, 80 aa, Glycine max
  unsure (1)..(80): unsure at all Xaa locations
  Clone ID: PAT_MRT3847_50726C.1.pep
LFYIYIYIYIYIYIYIYIYIYIFFFFFLYIFFLLILFLLALXTLFFFHEVFCYLNICIIFLLYTCISKVSCYLNIHIYVL

SEQ ID NO: 231125 - protein, 94 aa, Glycine max
  unsure (1)..(94): unsure at all Xaa locations
  Clone ID: PAT_MRT3847_50727C.1.pep
RMAFDEFCAAALSVHQXEALGRWEQHARCAYELFEKDGNRAIVIEELASELGLGPSVPVHAVLHDWIRHTDGKLSFLGFVKLLHGPSRSLAKPH

SEQ ID NO: 231126 - protein, 89 aa, Glycine max
  Clone ID: PAT_MRT3847_50728C.1.pep
LVKGKLPRTHITNETSKRVGLRPQKKKKKKKKKKKKKKKKKKKKKKKKKKKKKKKKKKKKKKKKKKKKKKKKKKKKKKKKKKKKKKKRG

SEQ ID NO: 231127 - protein, 187 aa, Glycine max
  Clone ID: PAT_MRT3847_50729C.1.pep
MVNPLVERATSSMLVGPDWALNMEICDILNRDPGHAKDVVKGLKKRIGSKVPRVQILALTLLETIIKNCGDIIHMHVAERDVLHEMVKIVKKKPDYHVREKILILIDTWQEAFGGPRARYPQYYAAYQELLHAGAAFPQRSKQSAPVFTPLQTQPLSSYPQNIRDTVAQQDAAEPSAESEFPALSLA

SEQ ID NO: 231128 - protein, 48 aa, Glycine max
  unsure (1)..(48): unsure at all Xaa locations
  Clone ID: PAT_MRT3847_5072C.1.pep
QXSDPHVCALXSRQHYPSXGCLLLVTQRRGFSHFSNLYETLSFXGLDP

SEQ ID NO: 231129 - protein, 165 aa, Glycine max
  unsure (1)..(165): unsure at all Xaa locations
  Clone ID: PAT_MRT3847_50730C.1.pep
EGPTPSSEDEVSEIRKLFENECNRRKAAEAEVEHLKILLGKNTHTQAGGDAEVIKVHSILEDEVNQKKKLEEEIIILRSQLLQLNFEAEQMKRCXGSERSVNASSAMDSFMSQVRHSQLKDTGNGQKAYVATLFEQAGLQKILSLLDSDDALGQIHAAKMVGNLA

SEQ ID NO: 231130 - protein, 77 aa, Glycine max
  Clone ID: PAT_MRT3847_50731C.1.pep
GKACSLKLNSLLFYLIISCFCLMHATLGPFNFSTCYPNGLAHLLTALLGYPSFEKGFNYLECWLIRLHAANLKYYNY

SEQ ID NO: 231131 - protein, 91 aa, Glycine max
  Clone ID: PAT_MRT3847_50732C.1.pep
ALERECPAVAPCADFLGLCARDGIVSLGGPHIPLNTGTRDGRRSIADVDEQYLLYHNETVSGMLDESGAMGMDTPDVPALFGSHSVGRTHC

SEQ ID NO: 231132 - protein, 48 aa, Glycine max
  Clone ID: PAT_MRT3847_50733C.1.pep
LCNSHFYSHSEFLGLSSDSLQITVSVIRSSSVIFSANLSLDVYYCSIF

SEQ ID NO: 231133 - protein, 78 aa, Glycine max
  unsure (1)..(78): unsure at all Xaa locations
  Clone ID: PAT_MRT3847_50734C.1.pep
LEIYNEVVNDLLNPAGQNLRIRXDAQGTYVEGIKEEVVLSPAHALSLIAAGEEHRHDRSTNFDLLSSRSHTIFILTIE

SEQ ID NO: 231134 - protein, 138 aa, Glycine max
  Clone ID: PAT_MRT3847_50735C.1.pep
RAEVLSAQQGQVAQPSNVESQNTGDIDPEFLAALPADIRAEVLAQQQAQRLHQSQELEGQPVEMDTVSIIATFPSDLREEVLLTSPDTILANLTPALVAEANMLRERFAHRYSRTLFGMYPRSRRGETSRRESIGSCL

SEQ ID NO: 231135 - protein, 133 aa, Glycine max
  Clone ID: PAT_MRT3847_50736C.1.pep
SSLYYLKTPARLYNPSRYVLWRARAHPLSACFAHKWNIYDVFLSFRGKDTRQNFTGHLYNSLFKNGILTFIDDKGLRRGEEITPALLNAIKNSRIAIIVFSEDYASSTYCLDELVTILESFKEEKGRSNYPIF

SEQ ID NO: 231136 - protein, 83 aa, Glycine max
  unsure (1)..(83): unsure at all Xaa locations
  Clone ID: PAT_MRT3847_50737C.1.pep
ERLSASALASLLKQRLCSYAVNAVTDIQEGASFNISYCATAKAPLMDGKSLDDDGYNPLAXKREDVIRILATTVQVRVQDISG

SEQ ID NO: 231137 - protein, 134 aa, Glycine max
  Clone ID: PAT_MRT3847_50738C.1.pep
SDLMDMREQDKVIEMPSTLGYNNSSSGSKLSSPIGERSSDQLPPHQSHTLVFTDPPQTSSHHHNLYPPSLPPNPLQLPQPHHRPRRDPDPSSIIAPPIISTTPTTAPPQPHTTTTLFKYRECLKNHAASMGGHV

SEQ ID NO: 231138 - protein, 77 aa, Glycine max
  Clone ID: PAT_MRT3847_50739C.1.pep
YIIAPAYIHRYNGSMWTDSGGYHHRLIMQLHRSNYRAPLLLMPPSILHCCGKKVLWHIRRGINLLRKLLYIHLKPIL

SEQ ID NO: 231139 - protein, 61 aa, Glycine max
  Clone ID: PAT_MRT3847_5073C.1.pep
KPPLLGGNKHPPPKVPQKKPPKRENSGPKKTHRLEPPPKDPGLKPQTRPPIGAPPRKKKGP

SEQ ID NO: 231140 - protein, 43 aa, Glycine max
  unsure (1)..(43): unsure at all Xaa locations
  Clone ID: PAT_MRT3847_50740C.1.pep
DSLVIGQVRKVLVEVRAFLNSNXPQFKEITSSTKTFGGQAEVL

SEQ ID NO: 231141 - protein, 72 aa, Glycine max
  Clone ID: PAT_MRT3847_50741C.1.pep
PTMHTLQPFIYQILPPNLIKYCRPSLITESWIQIINLLYQHPPTAVNSTHSSQLQQHLPLCTLPQYLPFPLL

SEQ ID NO: 231142 - protein, 57 aa, Glycine max
  Clone ID: PAT_MRT3847_50742C.1.pep
SSGHHTVAAAVCTNEVVAMYKASGAGATAGETPVATIANMAITGSKNNFIFDAAIVL

SEQ ID NO: 231143 - protein, 50 aa, Glycine max
  Clone ID: PAT_MRT3847_50743C.1.pep
NTFIKPNHYFNKSLYSNSSICTNYTIPLLNLIINLLQPHLPLRILLKVPF

SEQ ID NO: 231144 - protein, 39 aa, Glycine max
  Clone ID: PAT_MRT3847_50744C.1.pep
SLHTYDNQFLVNPQLLKLQVVTASPPHLSGQNDNSRAKS

SEQ ID NO: 231145 - protein, 88 aa, Glycine max
  Clone ID: PAT_MRT3847_50745C.1.pep
CRYYVTKKVKSQLNARRIAEGLSGLMSKAIDRGLYRGFLVGTKKVEVSILQQADDTIFLGEATMENVRAIRAIRAILRAFELAFWLKD

SEQ ID NO: 231146 - protein, 43 aa, Glycine max
  Clone ID: PAT_MRT3847_50746C.1.pep
IMRLDIYTCRVNYKQYAVCIHVVIVRLLDNKLSYAFYYYYNKC

SEQ ID NO: 231147 - protein, 75 aa, Glycine max
  Clone ID: PAT_MRT3847_50747C.1.pep
CFEVFDPGILYVESVVVLEGAVVGTSELGITSSAPGIGFGQIGCCLCIYFMCQHTTNRYAIASSWRTCLFKFSIF

SEQ ID NO: 231148 - protein, 38 aa, Glycine max
  Clone ID: PAT_MRT3847_50748C.1.pep
RTSICISHSVIVCIGLLESCRTIAIVQQTVAWQWNSPT

SEQ ID NO: 231149 - protein, 163 aa, Glycine max
  unsure (1)..(163): unsure at all Xaa locations
  Clone ID: PAT_MRT3847_50749C.1.pep
GSCIAAKLSGIYWWYKTASHAAELTAGYYNPCNRDGYAAIMTMLKTNGSXLNIPCVDLHTFNQQHEGFPETFADPEGIVWQLLNAGWDVDLPVTGQNGFPCLNRVGYNKVLDNAKPMNDPDGRLFSSFTYLRLSPLLMEQQNFVEFERFVKRMHGEAVLDLQV

SEQ ID NO: 231150 - protein, 41 aa, Glycine max
  unsure (1)..(41): unsure at all Xaa locations
  Clone ID: PAT_MRT3847_5074C.1.pep
RNGRSSRLKIPDAHVTSYKPKVNWKDDXFQEVLYTISATET

SEQ ID NO: 231151 - protein, 119 aa, Glycine max
  unsure (1)..(119): unsure at all Xaa locations
  Clone ID: PAT_MRT3847_50750C.1.pep
MIGPTGIDAGIGGDAGDAQPVARALSSTXDCLIYDRNVLKAALLYGPMPNALYVEGYALGRYDTRVMGHYIPVXHQNMLGLGIDAGXRMNSRLDHXQAAEAARTIIGLPDVEYILTNIP

SEQ ID NO: 231152 - protein, 40 aa, Glycine max
  unsure (1)..(40): unsure at all Xaa locations
  Clone ID: PAT_MRT3847_50751C.1.pep
IAPTLVVAKFLRELLNLISNFKTNYEKNLIIFSKIREXRK

SEQ ID NO: 231153 - protein, 56 aa, Glycine max
  Clone ID: PAT_MRT3847_50752C.1.pep
VKLLFIKSLHVGLVEIILEFSKHGCTPGKCDESSTIFGLWKTSILHQTKSRTNTAM

SEQ ID NO: 231154 - protein, 60 aa, Glycine max
  Clone ID: PAT_MRT3847_50753C.1.pep
VSFRDITGKWKLFCEKKNKVFSTLFLKAKNYPLNFTIHFVRPFCPPFAGNASLVLTLWHG

SEQ ID NO: 231155 - protein, 68 aa, Glycine max
  Clone ID: PAT_MRT3847_50754C.1.pep
PDEMCDGQVQVPQGDCITLICVPISRQLGGLSIVPYMTQMTIEVRLNVQASQEELKTRPCTPDVNNHD

SEQ ID NO: 231156 - protein, 65 aa, Glycine max
  Clone ID: PAT_MRT3847_50755C.1.pep
GSIQVDDASFLITLLSLSNSPPFLDFWRLTVFIFNTLLFLNFQCKRTKSIKSFRVSAVKNAYRNG

SEQ ID NO: 231157 - protein, 136 aa, Glycine max
  Clone ID: PAT_MRT3847_50756C.1.pep
RCRAHPDNWTSRSLTAPYESTYFLGDAANAIRLHPKFANIGVNTIGVNTFTGVDITDLSGGVMNGQNLLEGNNFACLAYQFAAQAKPDLLGALSGLTSPLQNLLGPLSCPQLRALDAQLLQQFPGYQRSTREGITR

SEQ ID NO: 231158 - protein, 111 aa, Glycine max
  unsure (1)..(111): unsure at all Xaa locations
  Clone ID: PAT_MRT3847_50757C.1.pep
MAELMASQAYCCFKCQNLVAFHDDIVSKDFQELWLEGKQWQSFFIHAMNIILGPKEDRXQLITGLHTLVDVFCSDCGEELVWKYIKAYEETQKYKEGKCVLDKFKIIKSNG

SEQ ID NO: 231159 - protein, 80 aa, Glycine max
  Clone ID: PAT_MRT3847_50758C.1.pep
TRGPLQKKPPPKTPAFLICRAPNRGVNKKKPFSQGPPGFSPPFGEEKPHSPGGPGGPKKKNPGTWKGKAPPPRYKKGGGL

SEQ ID NO: 231160 - protein, 78 aa, Glycine max
  unsure (1)..(78): unsure at all Xaa locations
  Clone ID: PAT_MRT3847_50759C.1.pep
AMDQIGRYRYFPSTQLHTASGAFRALNVYHRSVIPIPYPXPDGEFTXLVGDWYNTNHKNLYDALDVPDGQSGAVLVTL

SEQ ID NO: 231161 - protein, 143 aa, Glycine max
  unsure (1)..(143): unsure at all Xaa locations
  Clone ID: PAT_MRT3847_5075C.1.pep
RMGHGLSNCTLXLILYLRWTLMRDDDGLHRVXKLTGLDLICNKIAAAKALSQLVANYNSLHALNLLANSCQSNIRDDQRAQSSAEVIXPKLVYLNELSIKTQEGTXILTDSVAKAALGNRERTCYATALTEGDGHGGSTSMVH

SEQ ID NO: 231162 - protein, 27 aa, Glycine max
  Clone ID: PAT_MRT3847_50760C.1.pep
IYTIDFTFYFYALKHYKGHLIGNYRIR

SEQ ID NO: 231163 - protein, 101 aa, Glycine max
  unsure (1)..(101): unsure at all Xaa locations
  Clone ID: PAT_MRT3847_50761C.1.pep
QNNFKTRDLIACGMRXNVQLGAIISFGYNHFQIQTFPITKPNIGRFFFKTQPKRFFFSPKSNSSPLFLFYHGMQRNLFSSDFIGLVPRGFGFRLFWVLLGP

SEQ ID NO: 231164 - protein, 69 aa, Glycine max
  Clone ID: PAT_MRT3847_50762C.1.pep
INIVLSSPARHILYAHKPVRILSMSTQSPISTLIAWVSTSLSHVHIYGTRCLCLRFKIVREFLCSQHRS

SEQ ID NO: 231165 - protein, 55 aa, Glycine max
  Clone ID: PAT_MRT3847_50763C.1.pep
NWEVGGSKKMENILNEYPRTINHHTQELATVLKTLSQTPSEKRGQHFYPSLIKKE

SEQ ID NO: 231166 - protein, 102 aa, Glycine max
  Clone ID: PAT_MRT3847_50764C.1.pep
NPIPTRGPKKKVEKPQGPKMDPSFWEPKDIHRQGPMGHNRGGETQGGGPPRLPYQKKILKEWGSAGQFKADSKKKRGYPPGLGPFEGLPLSSLTWGPRLAEA

SEQ ID NO: 231167 - protein, 99 aa, Glycine max
  Clone ID: PAT_MRT3847_50765C.1.pep
PQKNETSSLFHYLILEVSIEGSTMIQVAVVPIGTVPSNVLRDYYSMLLPLHTIPLSAISCFYTEHQKSPFAVQPWDSGSLLFKFVLGGETPSPWEDFQS

SEQ ID NO: 231168 - protein, 282 aa, Glycine max
  unsure (1)..(282): unsure at all Xaa locations
  Clone ID: PAT_MRT3847_50766C.1.pep
MSHSVSFVKSSACKSYTNIYCLFFYQCLIINNSTFRANNAKTPEFFEDLFCNLVCYEVYRMRTSNRFLREVRTLTLCMLCQMRCPAFAALAPAFFEALLCSLVRSVGXRLRSCNRFLREELFKIEHGVCTNCQFDCHKLVEDIRPLSLERRREYIEKVAPKVAKRKKMFEKLVNEPTEGNAWHADHIVPVYDGGGECKLENLRTLCVACHYDVTAAQCAERRIAKANARKQLKALMNSMKNGIKGATGTNTKDHKLLEEEGSMVEDELLVEVPGSAYSLADS

SEQ ID NO: 231169 - protein, 82 aa, Glycine max
  unsure (1)..(82): unsure at all Xaa locations
  Clone ID: PAT_MRT3847_50767C.1.pep
NLGIIAPMPMGFIVGVNIWLGGAFSEAPMNPLVTFGLAFLRKKXTNHWIYWAGPFIEGEIVGFIYKVVFISHTHEQLPSTDY

SEQ ID NO: 231170 - protein, 67 aa, Glycine max
  Clone ID: PAT_MRT3847_50768C.1.pep
VSNAPFSPPFLSLLLIIYLLKLATSTPVLAFQKPRFKKCSKLPAAICKLCPKMGHLRICCRFSLLSI

SEQ ID NO: 231171 - protein, 73 aa, Glycine max
  Clone ID: PAT_MRT3847_50769C.1.pep
VSDCTKQLLFCKQSLRIHLIMDVQTIWNESNLKLKVSVYLPWTLVPSLFLICYRIIIVNCTTMGVYRLPVCNN

SEQ ID NO: 231172 - protein, 52 aa, Glycine max
  Clone ID: PAT_MRT3847_5076C.1.pep
IATAKSYIFFCLLTPFLNTIILDYNPLKFIIYISLPTGKTILFFFFCLKQFK

SEQ ID NO: 231173 - protein, 89 aa, Glycine max
  unsure (1)..(89): unsure at all Xaa locations
  Clone ID: PAT_MRT3847_50770C.1.pep
KNTVGXTIXRSDXLXXXXTEGNFRASVDLQRXHRIKGMXKMVATVGXPENTGXXLXXXXNSSXRGRASSDIYTXXXXDCEXRSXACTKX

SEQ ID NO: 231174 - protein, 262 aa, Glycine max
  Clone ID: PAT_MRT3847_50771C.1.pep
MALAANATPSLAFASSSLLNHNPQFGAAPKRFVSSSSSSLCLAAGLSSKARAFSFSASAAALDGEELAVEETWKLARPTEVYVCNLPRSCDTEQLLHMFNPHGTVLSAQVCRSAETGESRGSAYVTMASINSARKAIAALDASDFGGREVRVRFSAEMNPKRRNLETMNSSPKRVIYYEGPHKLYVGNLSRSAGPQDLKQLFGRFGIVASVRVLQDLRKGNRRVYAFVSYHSESERDAAMSLNGTEFFGRVLVIREGVERED

SEQ ID NO: 231175 - protein, 57 aa, Glycine max
  Clone ID: PAT_MRT3847_50772C.1.pep
RKNMPLLGNKSTRDLYLSLQPLTMEPQSNWKEKRKKKRKDKQSKATTSDPQDKINRY

SEQ ID NO: 231176 - protein, 313 aa, Glycine max
  Clone ID: PAT_MRT3847_50773C.1.pep
MGSIGVLLVAQVIPYLEQELDKRYKLFRAYDQPQTAQVLSQHASSIRAVVGNSNAGADAELIEALPKLEIVSSFSVGVDRIDLDRCKEKGIRVTNTPDVLTDEVADLAIGLMLALLRRICECDRYVRSGKWKKGDYKLTTKFSGKTVGIIGLGRIGQAIAKRAEGFNCPICYYSRTQKRDSNYKYYPSVVELASNCDILVVACPLTEETHHIINREVINALGPKGYLINIGRGKHVDEAELVPALLEGRLGGAGLDVFENEPTVPEELFGLENVVLLPHVGSGTIETRTAMADLVLGNLDAHFLGNPLLTPLV

SEQ ID NO: 231177 - protein, 77 aa, Glycine max
  Clone ID: PAT_MRT3847_50774C.1.pep
VAFHNIPTFFCCFSVSPTFIIPSTPLSLRLPCVPLSYASCLSSKLIFPNVSVLWPPVFCPIFFYRNLSIFSPPPPQA

SEQ ID NO: 231178 - protein, 102 aa, Glycine max
  Clone ID: PAT_MRT3847_50775C.1.pep
AAHVHSLVPLLLRGGSVILHNFFHPPAFIEKKTVSLHFPLNKGGVFFFFPVGVSPFKKRMGSVSFFRRYFSLQMFYGGVLFVPEKKKNISTSKGVKNKNYKK

SEQ ID NO: 231179 - protein, 47 aa, Glycine max
  Clone ID: PAT_MRT3847_50776C.1.pep
LYFFYKNACIFSDYYIDRFHLTHFHIAINKYSMKWRFPIIYIFIRKY

SEQ ID NO: 231180 - protein, 173 aa, Glycine max
  Clone ID: PAT_MRT3847_50777C.1.pep
RVQYYGFTVDPGYTEWTRYFSQPRKGHNPLQGRAYYQLLECLGVIRIHSPMRSKRMKDWSDIPSREMISEAHAAALRLKRSQAGQGGDLGQFGNCKVWGNVDPDKSGPVSGSPDMSDVRRYSSYSKWEVMPFESLRKEAQDHYNQMQGVSVYKMDGNKLDDLVCVRHSLKSEV

SEQ ID NO: 231181 - protein, 41 aa, Glycine max
  Clone ID: PAT_MRT3847_50778C.1.pep
PMNRTFSFFQYTDKMLLLILLRFFSLYYLSFEERYTIKTIN

SEQ ID NO: 231182 - protein, 169 aa, Glycine max
  unsure (1)..(169): unsure at all Xaa locations
  Clone ID: PAT_MRT3847_50779C.1.pep
YFKFLVLNSNCFHGSIPSSITNITSLVNVSLSFNALTGKIPEGFSRSPNLTFLSLTSNKMTGEIPNDLYNCSNLSTLSLAMNNFSGLIKSDIQNLSKLIRLQMNGNSFIGPIPPEIGNLNQLVTLSLSENTFSGQISPELSRLFHPXGISFYDNELQGTIPDKLSELKD

SEQ ID NO: 231183 - protein, 119 aa, Glycine max
  Clone ID: PAT_MRT3847_5077C.1.pep
NRNHKRNTKKITGQRNRQSSSYKWYYELEDALRDHLLGQSVCIFGAINCASNRSSSLSCWYSSLSYSWSELPCKVDDTEDMADDMVLRDALHDGWDPCLDACLDDSCASSFSAGNLEAD

SEQ ID NO: 231184 - protein, 98 aa, Glycine max
  unsure (1)..(98): unsure at all Xaa locations
  Clone ID: PAT_MRT3847_50780C.1.pep
PSLXXXXXXXXXFXKPFXXXXPXFFLSXXSXXSPPXPPXXYXXXXFXXLFPXQHFXXXFXIXIXXNYXFXHXXHLSIXXTXNKXTSILIPILXTXXFN

SEQ ID NO: 231185 - protein, 58 aa, Glycine max
  unsure (1)..(58): unsure at all Xaa locations
  Clone ID: PAT_MRT3847_50781C.1.pep
LXVLXDXLYTYQXPQLEPRXXXLTRERPVEKLHRYKVLXXXXQXSYXFCKNWQILNAX

SEQ ID NO: 231186 - protein, 123 aa, Glycine max
  Clone ID: PAT_MRT3847_50782C.1.pep
MLGYVKIVFKVLAKRMKKVMSFIVDETQSAFIEGRHLLHSVLIANKVIEEAKRSSQPCLEFKVDYEKAYDSVSWNFLPYLLERTAFSSKWIKWNAGCLKSASISFLSMGGGGESTSESYNNFQ

SEQ ID NO: 231187 - protein, 217 aa, Glycine max
  Clone ID: PAT_MRT3847_50783C.1.pep
MAEDLVLDTAIRDWVLIPLSVVMVLIGVLRYFVSKLMHSSQTPDAKIVKEGQVIVRARNLRAAANFIPSKAFRARKIYFCNEENGLLFVPKGQGQNPQAQMFSDPNMAMDMMKKNLSMIIPQTLTFAWVNFFFSGFVAAKIPFPLTQRFRSMLQNGIDLSTVDVSYVSSRSWYFLNLFGLRGLFSLILGEENAVDDTQRMMQMGGFGFDPSKVQLQI

SEQ ID NO: 231188 - protein, 63 aa, Glycine max
  Clone ID: PAT_MRT3847_50785C.1.pep
FSNLNRYIFKASMMKIRNTSYRVTIKIPYPSYLYIICEYDYCFCLDNAPQTLVTSLLSSSRSR

SEQ ID NO: 231189 - protein, 26 aa, Glycine max
  unsure (1)..(26): unsure at all Xaa locations
  Clone ID: PAT_MRT3847_50786C.1.pep
MYVGXXHKRAXXIYFLXXLVXXGXXL

SEQ ID NO: 231190 - protein, 71 aa, Glycine max
  unsure (1)..(71): unsure at all Xaa locations
  Clone ID: PAT_MRT3847_50787C.1.pep
FPVWXXPCSSXITSXXXLRSXSXXALPGCXRLXXIXXMRNXGXXXLXIXIGIGFGFXNLLEPNSSLRTLXL

SEQ ID NO: 231191 - protein, 96 aa, Glycine max
  unsure (1)..(96): unsure at all Xaa locations
  Clone ID: PAT_MRT3847_50788C.1.pep
EASTIMTERYVQPDHERSILYNFTPLPQMAVIDLSKQLTEDHMEHELYRLHYACKEWXSFQLINHRVDSTLVEKVKRGAQGLFYLPMEEKKKSGQR

SEQ ID NO: 231192 - protein, 113 aa, Glycine max
  Clone ID: PAT_MRT3847_50789C.1.pep
QILLMTLTGKTITLEVESSYTIDYVKATIHDKEGIPPDHHRLIFAGKQLVDCRTLADYNIQKESTLHLFLRFRGGMQIFIKTLTGKTITLEVESFDTIDYVKVKIPDNGGIPS

SEQ ID NO: 231193 - protein, 73 aa, Glycine max
  unsure (1)..(73): unsure at all Xaa locations
  Clone ID: PAT_MRT3847_5078C.1.pep
VXILGSDVTRSAMIDHSLTTLPLLTSHHELAMCTQAPMLTDYMQDLPPFHIFHQPNQAFACKLESFFDPTLQA

SEQ ID NO: 231194 - protein, 59 aa, Glycine max
  Clone ID: PAT_MRT3847_50790C.1.pep
FIKGFLPPLNLLGGLANVFFQFSRFMPLDGCFGSPFSFICHGPLFCNHFAVISKLLAVK

SEQ ID NO: 231195 - protein, 88 aa, Glycine max
  Clone ID: PAT_MRT3847_50791C.1.pep
VYHFLHLFCFIKKRNPAHFIFHICVNLSGYLPYFLPAFFVLLVSFRVLIPFYTCTPLLLSGSSGPQPGFPNVLFPPPPPPPPPPPPPP

SEQ ID NO: 231196 - protein, 105 aa, Glycine max
  Clone ID: PAT_MRT3847_50792C.1.pep
IFRAGSSGDVFFHTRWFLFSNHVSSIKGRLFFVQSLKKPPTSCYCCFQNFVFDQRGQNWFYLSVFPPPVFVGTLETTLFKNKEFFFFAAMGALVYKSQLSICSVP

SEQ ID NO: 231197 - protein, 73 aa, Glycine max
  Clone ID: PAT_MRT3847_50793C.1.pep
ITVTVQKPQTFILWTNAATIATVDCNLNPAYQVLKTGLQVSATAICRINHIYPYFSAISKDHNKTATVAATTM

SEQ ID NO: 231198 - protein, 61 aa, Glycine max
  Clone ID: PAT_MRT3847_50794C.1.pep
EPMAVYNCIQAFHVSCGLFVIIAKPALSLFAKDCDGSLTMLCICWCPQIASYFYSIQYGLA

SEQ ID NO: 231199 - protein, 462 aa, Glycine max
  Clone ID: PAT_MRT3847_50795C.1.pep
VTDKSLELLSRSFMNFKSLVLVSCEGFTTDGLAPTRPKCRFLKELDLQENEVDDHRGQWLSCFPDCCTSLVSLNFACLKGQINLGALERLVARSPNLKSLRLNHTVPLNALQRILRRAPQIVDLGIGSFIPDPNSNVFIKLMNTIIECKSITSLSGFFEVTPRCLPAIYPVCMNLTAMNLSYAAGIQSRELIKLICRCGKLQRLWIMDCIGDFGLHVVASTCKDLQELRVFPSVRVGRNDPAGVTEKGLVAISMGCPKLHSLLYFCQQMTNAALITVAKNCPNFIRFRLCILDPTKPDPDTVQPLDEGFGAIVQSCKQLRRLSLSGQLTDQVFLYIGVYAEQLEMLSIAFAGESDKAMLYVLNGCKKLRKLEIRDSPFGDSALLMDVGKYETMRSLWMSSCDVTIGACKALAKKMPGLNVEIFNGNEKVDRDVDDGQKVKKTYLYRTLVGRRKDAPEHVWTL

SEQ ID NO: 231200 - protein, 40 aa, Glycine max
  Clone ID: PAT_MRT3847_50796C.1.pep
NWTFNLLSTRRVLIYLVLQFHVYMLIGCVKPHVILRRGVS

SEQ ID NO: 231201 - protein, 65 aa, Glycine max
  Clone ID: PAT_MRT3847_50797C.1.pep
SRFFLWGCAGVGGYRWSWTSLRGRPTGAWGGLLVVPPPPKKISNNVEEESVSGKHLGGPGTNSRT

SEQ ID NO: 231202 - protein, 55 aa, Glycine max
  Clone ID: PAT_MRT3847_50798C.1.pep
VSFVSSFPTPLCPVHFQDDNTTLLAGLNLTSIDLTCLWVFCRLIQFNGSSNATWN

SEQ ID NO: 231203 - protein, 81 aa, Glycine max
  Clone ID: PAT_MRT3847_50799C.1.pep
MSKRYFNFLSDKLCSFGLCAVVLMICVTRVAKAALDKALAENEDIDGITSSPDLPIVAEPSADLNQPLIIKIDSSEDSHEK

SEQ ID NO: 231204 - protein, 61 aa, Glycine max
  Clone ID: PAT_MRT3847_5079C.1.pep
IQNITTHHYINQSITLPLLNHHHHHLQQHLFPNLLISIHFNFKNLFLSYHLHLQFQLIHLI

SEQ ID NO: 231205 - protein, 95 aa, Glycine max
  Clone ID: PAT_MRT3847_507C.1.pep
NNWGKLLNLEALTRVIDPPSPIRRHVKWELTRTKKTGHMTSEATWVMTTTFAALDEHASYGSLRAHGRHEVLAAAVGRPQHPSHVHAVRASLTIK

SEQ ID NO: 231206 - protein, 274 aa, Glycine max
  Clone ID: PAT_MRT3847_50800C.1.pep
MSFSWSSTLRITILLLLLAAVIVACFTLPIEKMMKDFLLWVDHDLGPWGPLVLAVAYIPLTVLSVPASVLTLGGGYLFGLPIGFVADSIGATVGAGAAFLLGRTIGKSFVVSRLKDYPQFRSVAIAIRRSGFKISLLLRLVPFVPFNMLNYLLSVTPVSIGEYMLASWLGMMPITLALVYVGTTLKDLSDVTHGWGEFSKTRWAFIILGLVISVVLMICVTRVAKAALDKALAENEDIDGITSSPDLPIVAEPSADLNQPLIIKIDSSEDSHEK

SEQ ID NO: 231207 - protein, 49 aa, Glycine max
  Clone ID: PAT_MRT3847_50801C.1.pep
ANHAYSVSLDDLFVYKVTCDVLQLLIIIKIYLYEPLSLDTRSIRSLRYN

SEQ ID NO: 231208 - protein, 138 aa, Glycine max
  Clone ID: PAT_MRT3847_50802C.1.pep
LPYKPDPSEGNSEKKVTPMEEMKSLDLKTSKGITEALRLQMELQKRLHEQLEIQRKLQIQIEDQGKRLQMMFEKQGEMGDNKVNGSSDTNEEGDKFESIPKAMPEEKDSSTRKQIAGEAEEVINEDEAAPPTKRVKSS

SEQ ID NO: 231209 - protein, 409 aa, Glycine max
  Clone ID: PAT_MRT3847_50803C.1.pep
MSTSSRALPTPLENKYMKPPDSFQLSPVRDLTANSASSNSIRSAGKMFSSPSKCPDDFPFSSVSQHDRQYQDPPFVSQTIGDSVSSEIHSMTFISHPQENEDLSWGPDPCQDILGFPENVSVQHDQVENNGCYINDDNVKRSDFGEWVDQLMSIDDSLHPSWSQLLADDNVAEPKPKASQVPPQQHIPSGEVVGNSASTASQTKARMRWTPELHEAFVEAVNHLGGSEKATPKGVLNQMKVEGLTIYHVKSHLQKYRTARYKPEPSEGTSEKKVTPMEEMKSLDLKTSKGITEALRLQMELQKRLHEQLEIQRKLQIQIEDQGKRLQMMFEKQREMGDSKVNVSLDEPSAAAPSDTVETTNEERHKFESIPKAIPEEKESSTTKQIAGEAEEMIKEDEVAPPTKRVKSS

SEQ ID NO: 231210 - protein, 60 aa, Glycine max
  Clone ID: PAT_MRT3847_50804C.1.pep
SDTLSMVRYSMVRLRCIKILCISNLPTNPRRALLVHLVKDQKGISKFSILTSLKCYATIK

SEQ ID NO: 231211 - protein, 94 aa, Glycine max
  Clone ID: PAT_MRT3847_50805C.1.pep
GLAMEGSIDPATSSLLCLENNDMCFDDFDCNVADESPSLDHKNLNFNNQYLIKDNHHGSEHLLDFSVQSDETVLGLVGREKENLPQDGYLKRLL

SEQ ID NO: 231212 - protein, 53 aa, Glycine max
  Clone ID: PAT_MRT3847_50806C.1.pep
ILVEVTPSSHFTIHAPLMTTRSDRMPESTRPEGLPILCSCPIGAPLGTLFPLH

SEQ ID NO: 231213 - protein, 51 aa, Glycine max
  Clone ID: PAT_MRT3847_50807C.1.pep
SDKQSLLFNILLILKFLLGFNPLLLGIIEYKIGGLLTLSYGRCYRGIIGFA

SEQ ID NO: 231214 - protein, 139 aa, Glycine max
  Clone ID: PAT_MRT3847_50808C.1.pep
QTDKGILHQWISRFDIYPYLERFTQDATAKILEFMEGKPDLVIGNYTDGNLVASLMARKLGITQGTIAHALEKTKYEDSDVKWKELDPKYHFSCQFMADTVAMNASDFIITSTYQEIAGSKDRPGQYESHAAFTLQGCV

SEQ ID NO: 231215 - protein, 82 aa, Glycine max
  unsure (1)..(82): unsure at all Xaa locations
  Clone ID: PAT_MRT3847_50809C.1.pep
LAQWPFLKLLRHTCLHGAGTRIRYRDYTRRYIAIGCVEKVPCMLAXCRVEDSNSDAFKKPLARDPTYLWVLENGMTMQSFGS

SEQ ID NO: 231216 - protein, 71 aa, Glycine max
  Clone ID: PAT_MRT3847_5080C.1.pep
KGPIKRGFSLFKKKQNLVLVYFFLRVNIPLGALTPKTNFPGHEGVRGGEFLKREPQREQQKEFSLFILGKT

SEQ ID NO: 231217 - protein, 83 aa, Glycine max
  unsure (1)..(83): unsure at all Xaa locations
  Clone ID: PAT_MRT3847_50810C.1.pep
IGVEXIAPAALFEAYPSEEQKLWRPHAYEITSGLSEKPIDLDVAAMPELXNLAQTYGIYLSTSHVDRRDMLPMGAPALMMSSH

SEQ ID NO: 231218 - protein, 301 aa, Glycine max
  Clone ID: PAT_MRT3847_50811C.1.pep
MKRDNNIGGVSIEMEQGGDRVGHVNKVIGYGKRVIVKKRKPYHHHHRRIHNKKTVPNKVPKALQELFVSCRETFKGPGGTVPSPQDVQKLCHILDSMKPEDVGLRSDLQFFKPENIVKENQRVTCTTIYSCENFSLCLFFLPAKGVIPLHNHPEMTVFSKLLLGQMHIKSYDWVDSEVSHNLLHQPSQFRLARLKANNVFTAPCDTSVLYPQSGGNIHEFTAITPCAVLDVLGPPYSKDDGRDCSFYRDHPYTAFPTADGESGKVKEENDSYGWLEEIEMPENSQMDGIEYLGPPIIETAL

SEQ ID NO: 231219 - protein, 110 aa, Glycine max
  unsure (1)..(110): unsure at all Xaa locations
  Clone ID: PAT_MRT3847_50812C.1.pep
KEDVEAVHISGGPCWLXEAQLHPLNDLTMVNXELLTLTXELLXQKEAREDSYFRIHFGTKWTMPQSSTLTMNLHDMLNRLAGNSEQAAESDGMIERSVREHSDVMSILDA

SEQ ID NO: 231220 - protein, 739 aa, Glycine max
  unsure (1)..(739): unsure at all Xaa locations
  Clone ID: PAT_MRT3847_50813C.1.pep
QQGRTRSTSNFFFFCATTTITITTTALCCHLHFRHRFSSLKPLLAKGITVMVRAQTSHPLDPLTAAEISVAVATVRAAGATPEVRDGMRFIEVDLVEPEKQVVALADAYFFPPFQPSLLPKTQDGLMIPTKLLPGKAILVVYNKKSNETSTWIVELRXVHATTRGGHHRGKLNXFNVVPDVQTQKDPVEYAECEAVVKDFSSFGSGYNSLVGIWNIALVMDYPWCAGFCTVADIXSCLCAMGLSFARPVCECHLANVYARTVEGIHVLVDMQNMVVLEFEDQNYTSGETQGGVDRSDVKPLQIIQPEGPSFRVNGHFVEWQKWNFRIGFTPREGLVIHSVAYIDGSRGRRPVAHRLSFVEMVVPYGDPNDPHYRKNAFDAGEDGLGKNSHSLKKGCDCLGYIKYFDAHFTNFYGGVETIENCVCLHEEDHGILWKHQDWRTGLAEVRRSRRLTVSFICTVANYEYGFFWHFYQDGKIEAEVKLTGILSLGALQPGETRKYGTTIAPGLYAPVHQHFFVARMDMAVDCKPGEAFNQVVEVNVKVEKPGDNNVHNNAFYAEEKLLKSEMEAMRDCDPLSARHWIVRNXRTVNRTGHLTGYKLVPGSNCLPLAGSKAKFLRKAAFLKHNLWVTPYARDEMHPGGEFPNQNPRVGEGLATWVKQNRSLEEADIVLWYVFGVTHIPRLEDWPVMPVERIGFMLMPHGFFNCSPAVDVPPNPSDLDDKENGLPAKPIQNGLIAKL

SEQ ID NO: 231221 - protein, 37 aa, Glycine max
  Clone ID: PAT_MRT3847_50814C.1.pep
QYLSYQVDSSSHCVVLWHGGLWRIFLVRYLPFSDSEV

SEQ ID NO: 231222 - protein, 67 aa, Glycine max
  Clone ID: PAT_MRT3847_50815C.1.pep
WSLVLQCGLCCHLVPFSWRGRPISYLKVFFLEAYLRVFLLPQPCTFGSNANSYQINTSFCGGLLYNI

SEQ ID NO: 231223 - protein, 96 aa, Glycine max
  Clone ID: PAT_MRT3847_50816C.1.pep
MAAPPTKYTHHTKLLIPPGPEEDPPKHPYPKLLRITVTDTDATDSSSDEEQTNFSTRHRHRKLINEISIARASDTRRGQKFRGVRQRPSGKMVRGD

SEQ ID NO: 231224 - protein, 59 aa, Glycine max
  Clone ID: PAT_MRT3847_50817C.1.pep
VLKHHILRGKLFTENSIILLLHQRPYLFRGLLLQHPAITNHALHNIPLLHADILIQPAA

SEQ ID NO: 231225 - protein, 116 aa, Glycine max
  Clone ID: PAT_MRT3847_50818C.1.pep
LLFFLRGGFFCRGSRIKTCLKFLRGSHLAFFSHPKLWAFAWQGFFKPTAEDPKTGGAQFEPGRLQGGGWHWPVFPPLVAGPLLFGQSSPLFYSVFLIFDLSVIKACSRWLFGLFAM

SEQ ID NO: 231226 - protein, 248 aa, Glycine max
  Clone ID: PAT_MRT3847_50819C.1.pep
MSHTEFGGVIEGKIRMNTLKKWFTSSQAILSMVLVQLFVTGLQLLSRVILVKGSFIGALITYRHIVAAICVAPFALYFERGLTKKFTWKVWFWLFINALMGMTLAQGLFYYGLRDTSATFSVNFLNLVPITTFFTSIICRMEKLRLQTWAGKAKCVGAILCVGGALVNSLYKGKEFYLGHHSHHAQTATAAHKTNMLRGTLFLICSCFSLTAWFIAQVKLLRIFPLRFWGTMIACILAAIQAAIIGAF

SEQ ID NO: 231227 - protein, 193 aa, Glycine max
  Clone ID: PAT_MRT3847_5081C.1.pep
MSDVSNVTSSIGRSASQAWRRFSMVGSANVASPGGSHTKYRSKLSGAHCRPLQEIQPSDLNQSKETLHNAELESSSVSSSFSQEIQPSDLNQSKETLHNAELESSSVSSSFSERQRKWKEELVEELEWKREMMRQAGTGGRSSFSERQRKWKEELVEELDLKREMMRQAGIGGKITSSVFPWEKSCNLAMSSN

SEQ ID NO: 231228 - protein, 80 aa, Glycine max
  Clone ID: PAT_MRT3847_50820C.1.pep
TSRIASTRAPAFTNTIRSYAADAKASPSEVSSILEQRIRGVLEENSLAETGRVLTVGDGIARVHGMNNVQAEELVEFASG

SEQ ID NO: 231229 - protein, 49 aa, Glycine max
  Clone ID: PAT_MRT3847_50821C.1.pep
MAKTSFKLQHPLERRQAEASRIREKYPDRIPVIVEKAERSDIPDIDKKK

SEQ ID NO: 231230 - protein, 53 aa, Glycine max
  Clone ID: PAT_MRT3847_50822C.1.pep
FLRCYSSGSIAFTMRSICAPTKCGVVMVPDRRPRYTQIGRLLSLPTSSFAMPP

SEQ ID NO: 231231 - protein, 76 aa, Glycine max
  Clone ID: PAT_MRT3847_50823C.1.pep
HASGALFSSDDMLRHAIYAWSIYRSKEKRRDTYSEHQERCGRGIRYMLTLPLIRGMHCMMKWTGRGISGHWDGQNE

SEQ ID NO: 231232 - protein, 75 aa, Glycine max
  Clone ID: PAT_MRT3847_50824C.1.pep
KSAGARRSTFPLVYPNFGRSSKIHRASSFFSGFHGLVPPTEPFQSFLWTRGGPQFGSWNFNFGFIYLLNPPLTAL

SEQ ID NO: 231233 - protein, 59 aa, Glycine max
  Clone ID: PAT_MRT3847_50825C.1.pep
KKNKRSLMVKHLKCFSPFKRIKRSFKWSNALNDFCSVKTYLAKKRIKTTLPTFSSQRTK

SEQ ID NO: 231234 - protein, 44 aa, Glycine max
  unsure (1)..(44): unsure at all Xaa locations
  Clone ID: PAT_MRT3847_50826C.1.pep
EQKNDIXPIXAXXNTEXQXPISXSXTXTHKXPANSIIXQXHIPS

SEQ ID NO: 231235 - protein, 73 aa, Glycine max
  Clone ID: PAT_MRT3847_50827C.1.pep
FAYSRRRIFLASELLCQGRTLSNNFWSIYIFCFNRYSSFDVYSWCSHRLSVKFPRWFRLVLSIKMYLATLVRI

SEQ ID NO: 231236 - protein, 61 aa, Glycine max
  Clone ID: PAT_MRT3847_50828C.1.pep
RYSRSQLTSGAFFFSNLHCHRMTEGIGLAIARGPCQGSSCDLGDRDNGEGNRPPGSRGGAC

SEQ ID NO: 231237 - protein, 36 aa, Glycine max
  Clone ID: PAT_MRT3847_50829C.1.pep
QPEHVPLTETAMDSLGARRRSYTPNIETFTTPTSPK

SEQ ID NO: 231238 - protein, 217 aa, Glycine max
  Clone ID: PAT_MRT3847_5082C.1.pep
MLPQTLAIPALLFVVFIFILSAVVLQSKQNEKYPPGPKTLPIIGNLHMLGKLPHRTLQSLAKQYGPIMSLKLGQVTTIVISSPETAELFLKTHDTTFASRPKSISSKYISYGGKGLVFSEYGPYWRNMRKLCTVQLLIASKVEMFSPLRSQQLQELVKCLRKTASSREVVDLSDMVGDLIENINFQMIFGCSKDDRFDVKNLAHEIVNLAGTFNVAD

SEQ ID NO: 231239 - protein, 86 aa, Glycine max
  unsure (1)..(86): unsure at all Xaa locations
  Clone ID: PAT_MRT3847_50830C.1.pep
MYGITRALRTSTPLRLAPRTAAKAYNSGKVSGPVIGIDLGTTNSCVSVYXXGAPKVIENXEGARTTPSVVAXTKDXDLSLGRPPAV

SEQ ID NO: 231240 - protein, 68 aa, Glycine max
  Clone ID: PAT_MRT3847_50831C.1.pep
AASCIQHDNMNGNFYTPCLEIPNFTACVSVYIHKPSRYLFIVRALHYTTYARPEISTNLGMPSIISAP

SEQ ID NO: 231241 - protein, 82 aa, Glycine max
  Clone ID: PAT_MRT3847_50832C.1.pep
KRVSLRVVLAFFSEVYTRTKNIVSSTLSLKLSNKSQKNTPDSSILPEKKQKLSSLNRINNQFTPHSKMKGKKKYIDYRDASI

SEQ ID NO: 231242 - protein, 218 aa, Glycine max
  Clone ID: PAT_MRT3847_50833C.1.pep
MSRISTLYLLAYNSFQAIGWTISLTKILYNLLVTASIKGTYASAASLICFLQCAAFLEVIHGAIGIVPSGVLLPLMQWGGRTHFVLAIVRKLDELQELPSVFITFLAWSMGEVIRYSHYAFGCLGNCPSWMTYLRYTAFIVLYPLGVGPGEIWAMYQALPVIKEKNLYADSFSSLPFSYYDFLKVVLIVYPFLWFKLYLHMFKQRRTKLYKRHDKKRA

SEQ ID NO: 231243 - protein, 100 aa, Glycine max
  Clone ID: PAT_MRT3847_50834C.1.pep
PSRTPNMSFGLPPAGSTPAEEWGNKLLQAVDGALDQAGATASTGGFVDAAPKDQDSTSHDVQQDNLPRLTGGLASSANVQSIANEAKLAKHSEGLTKEEL

SEQ ID NO: 231244 - protein, 94 aa, Glycine max
  Clone ID: PAT_MRT3847_50835C.1.pep
LITRPGPTFKFNLSFSRLVSAQSHTLASRTLPYRRQASISHCYKLIAFASYLNFLTTLGLHRQARLGLSLILLTTPGILRLWHPPHCAPSTPPP

SEQ ID NO: 231245 - protein, 132 aa, Glycine max
  Clone ID: PAT_MRT3847_50836C.1.pep
YEFAKPGTMQIVLATYVTRDVNTVIVHTYANRGDCVLALYLNPFVKAFPLRPVPLARYRVALYKTNPPYAAIAPHPAAWRRPGRTNYHTHPHTYAAVSQQASTHTHTLISYRTHPGVYSSDRTLDSSIEIAR

SEQ ID NO: 231246 - protein, 35 aa, Glycine max
  Clone ID: PAT_MRT3847_50837C.1.pep
PPTPSRLLEDKRRGGNTKTQPHPIKRHSRECMNYN

SEQ ID NO: 231247 - protein, 97 aa, Glycine max
  Clone ID: PAT_MRT3847_50838C.1.pep
DSLYGKLVRVRVPLLNCRADPCVCFPTDAGLWCQSSSATPKYGTVGRQALGQLASLPVLSNRSRMCRLRSECLVWYRHVFFSNAPNFETTPHCSCLY

SEQ ID NO: 231248 - protein, 66 aa, Glycine max
  Clone ID: PAT_MRT3847_50839C.1.pep
RLRPRLRTCQNVSTMVPGGQKNIVFVINNGGYTIEGEIHDGPDNVIKNWNYTGLIDAIHNGERKCW

SEQ ID NO: 231249 - protein, 119 aa, Glycine max
  unsure (1)..(119): unsure at all Xaa locations
  Clone ID: PAT_MRT3847_5083C.1.pep
LYSENDAGLDGGLSSYKSYGMTCFEYHEXNPTFNTGCNSGTGAHSTLTLKGTQETCAAYDGCKXLVEVDPGTGTCAHTCVSEDATIRAVPFDAPTVTGDALCYPSLAHVAGDTVASATE

SEQ ID NO: 231250 - protein, 90 aa, Glycine max
  unsure (1)..(90): unsure at all Xaa locations
  Clone ID: PAT_MRT3847_50840C.1.pep
MDQETLLFTYVSLNDGHPVKLXDQIYDAALDACLDQDPDSQVGCETCTKTNMVIDLGEITTNANVDYEKIVRDTYRNIGFDSDDARLDAY

SEQ ID NO: 231251 - protein, 45 aa, Glycine max
  unsure (1)..(45): unsure at all Xaa locations
  Clone ID: PAT_MRT3847_50841C.1.pep
HGIXNTKKILKKLKNIQTRYQCCTLNTWGLLIDHSFIIFPYALFF

SEQ ID NO: 231252 - protein, 49 aa, Glycine max
  unsure (1)..(49): unsure at all Xaa locations
  Clone ID: PAT_MRT3847_50842C.1.pep
PPDXSVXLVSLSYPSXAASPKTPHXFGHNFXKENRLRPCXLKGTCHDRX

SEQ ID NO: 231253 - protein, 51 aa, Glycine max
  Clone ID: PAT_MRT3847_50843C.1.pep
PHYTPNTSYDHLRGTREPLQHQVGNKSPVNQTNIRRSPPSHFYFINLQIEY

SEQ ID NO: 231254 - protein, 44 aa, Glycine max
  Clone ID: PAT_MRT3847_50844C.1.pep
RSPSYFSSYLFILKVLLKRVTQIGPSFPNWKSQAMNNFIFFLEP

SEQ ID NO: 231255 - protein, 40 aa, Glycine max
  Clone ID: PAT_MRT3847_50845C.1.pep
VNKKKKKKKKKKKKKKKIKKKKKKKKKKKKKGRPLKKSKN

SEQ ID NO: 231256 - protein, 128 aa, Glycine max
  Clone ID: PAT_MRT3847_50846C.1.pep
ETRICVGLFEPPSGLKLSMSQYCDIAAKVVSTSFRVCKSCHACRCWAFPNKSFIGAWSPGHPPNCLALLCGTGYRSYHCLTIPVHGSQASLAVCLLIFSRHGDGRMKSWSLFSSYSKLYFPCMVYFTV

SEQ ID NO: 231257 - protein, 242 aa, Glycine max
  Clone ID: PAT_MRT3847_50847C.1.pep
MARAVSSSCARLTMRLFSTTTTTTTTTAAFAVTLPKPSSLSVSTRRFLFPLSHAIVPPSTRVAGIRCRVNRAGDSAYSPLNSASSSSSSFSDRPPTEMAPLFPGCDYNHWLIVMDHPGGEGATKQQMIDCYIQTLAKVLGSEEEAKKKIYNVSCERYFGFGCEIDEETSNKLEGLPGVLFVLPDSYVDPENKDYGAELFVNGEIVQRSPERQRRVEPQPQRHQDRPRYNDRTRYVRRRENTQ

SEQ ID NO: 231258 - protein, 102 aa, Glycine max
  Clone ID: PAT_MRT3847_50848C.1.pep
VQFPSFPQYTTTHTLIPLHIHLVPISNSFNLLSSVFFSISNNNSDQNDAVSEASKNRNSELHTHIFSSSIPFSSSFSSSLFRVRETIIITLIATRINLYPLR

SEQ ID NO: 231259 - protein, 68 aa, Glycine max
  unsure (1)..(68): unsure at all Xaa locations
  Clone ID: PAT_MRT3847_50849C.1.pep
QRKRKKKNGRKAKIEKKKKNQNKKKKKKNNXLKKKKKKNRKKKKQKTKKKKKGKKLKKNRKKKKIYLT

SEQ ID NO: 231260 - protein, 71 aa, Glycine max
  unsure (1)..(71): unsure at all Xaa locations
  Clone ID: PAT_MRT3847_5084C.1.pep
NNNNXHSSVTDGWEGVGSTHTTTHCLHSXFDLNIPAIPXXXTSVVDDDVESPHPAINKRCWFSIPKIQIPQ

SEQ ID NO: 231261 - protein, 66 aa, Glycine max
  Clone ID: PAT_MRT3847_50850C.1.pep
QIPSQRDVLTTIIFTSEHFRRDLFFFTCSWTELTGIEGRHVIATCLLHWYHLLNLLLVILNIAIEA

SEQ ID NO: 231262 - protein, 132 aa, Glycine max
  unsure (1)..(132): unsure at all Xaa locations
  Clone ID: PAT_MRT3847_50851C.1.pep
MQKLGEFKLPPFFNYPPYFTLQPVRDTREKQIQLWKDLILDFCKTQKIFIIGLEEEFPLFTNHGIERSLTHEAREAFLSALVSEGRAEWMDKGHRKCLILWHRNKDWADFFITVXKDYGLEDGVCTIEKYDQ

SEQ ID NO: 231263 - protein, 54 aa, Glycine max
  Clone ID: PAT_MRT3847_50852C.1.pep
QVVKPLYQIPHGGPQLTPPVNGTAVAKVAVKAATDPVFPSGIMEAYGIQRSSQH

SEQ ID NO: 231264 - protein, 179 aa, Glycine max
  Clone ID: PAT_MRT3847_50853C.1.pep
MQKLGEFKLPPFFNYPPYFTLQPVRDTREKQIQLWKDLILDFCKTQKIFIIGLEEEFPLFTNHGIERSLTHEAREAFLSALVSEGRAEWMDKGHRKCLILWHRIQDWADILIQFAKDNGLEDGVVTIEEIRSGTESQGTDLHGIDRTILNRALKLLEQKGKLVVFKGTSTDDEGVKFSL

SEQ ID NO: 231265 - protein, 142 aa, Glycine max
  unsure (1)..(142): unsure at all Xaa locations
  Clone ID: PAT_MRT3847_50854C.1.pep
MADSSSSSSKRQKQHDDDDDDVEEQQPLIPGLPDHIAELCLSSINHSLLFSISHSCRRLIYSPSFPPFFSLYAILSHSSATIHFHTFDPISALGLPSLXHPPLHHLLXRXHPSFLSRSLSVQCVSFSNRLVLLAVTTHNLSP

SEQ ID NO: 231266 - protein, 109 aa, Glycine max
  Clone ID: PAT_MRT3847_50855C.1.pep
QRVKSKGGGFFLTTKTCKTKSNRNSHRRFSKTKTLCVGQAKTWGFWALPYCSMHVKLYIFWGNRWVLSRYTIFFLSSFPPRGLWGLLFKIYGILLKRKGLEILERVMFF

SEQ ID NO: 231267 - protein, 63 aa, Glycine max
  Clone ID: PAT_MRT3847_50856C.1.pep
EYRQNVTFTNLASLNRCISKILNPAMQHNIYRHINIHQNHHGDPYLIKILYISRYHYSITPTS

SEQ ID NO: 231268 - protein, 45 aa, Glycine max
  Clone ID: PAT_MRT3847_50857C.1.pep
IKRISLFNPKTITFTLDRKIYESHELALKGETIPIIFVKKMRPST

SEQ ID NO: 231269 - protein, 128 aa, Glycine max
  unsure (1)..(128): unsure at all Xaa locations
  Clone ID: PAT_MRT3847_50858C.1.pep
QRHPTSALDKVDSLIVCGGMAFTFKKTIEGVSIGNSLFDEPGSQKVQGIMGKAKKNGVKLVFPVDYVTADKFDKDATVGAATDAEGIKDGLMGLDAGPESCKLFAETIKASQTIXWNGPAGVIEFENF

SEQ ID NO: 231270 - protein, 36 aa, Glycine max
  Clone ID: PAT_MRT3847_50859C.1.pep
ELIPIMHVQYLSCQFYISMFTFVCINIHVAILFLNT

SEQ ID NO: 231271 - protein, 403 aa, Glycine max
  unsure (1)..(403): unsure at all Xaa locations
  Clone ID: PAT_MRT3847_5085C.1.pep
MGSPPASTPPPSPPPTSDASASTSAVKRTRKASRLRSLSTRPPGDERPMVHVDPATGKADGPHMKKLRTYLGIVARDKVDITYENWKEVPSAPQHLIWEDIQAEFDIPEASDSRTKRKLLQTVGERWRQFKSDLTRKWSPCSRPXGVEDTVYDKYGISKEKWAQFCQTRRDPSWEDVRMKAQAIQKHNTAPHVLSRGGYDYLEQKLLAEKTKKKIASSLPADELQQLTQQIRDQLEEFITEKVTRQGVAVPLEPVVGPGPSGPRVSTKGSYVDPSGNDPETGDSDRCGLYIEADPARLVAIGRVYEGSTVVHNTPLLPGQVKVSVEEVRDADAPVPVPTDEVSLVGQALHTFLAWPTHLVKSLSQQVAVSPAKPPPKLDPEVDDPLYLMTLTIPELFLRPLSG

SEQ ID NO: 231272 - protein, 151 aa, Glycine max
  unsure (1)..(151): unsure at all Xaa locations
  Clone ID: PAT_MRT3847_50860C.1.pep
MTYIRNIKDYIILVRKKNIKVDYLLDALLALTSTWVSAYDPRPLHDVRVACKHKXGVFVNSKPCSDPKRGKAEDVFRHVAPVKTDDTTXSDVTAVFDEXLPGLNTLRISVXHIDAAPKGTYAMHTHPWRTVMLMRLDGTLHGGVLTSNLHG

SEQ ID NO: 231273 - protein, 75 aa, Glycine max
  Clone ID: PAT_MRT3847_50861C.1.pep
DLDTDPHNKGIVTTFTVNQNLVLENRVSSMRMMGQHNELTGMQGKNRYNCSARSADNKSLVASVVEHLVHSLIVM

SEQ ID NO: 231274 - protein, 106 aa, Glycine max
  Clone ID: PAT_MRT3847_50862C.1.pep
MELGSYSDQSKSTFSLVDEDHTFANSVRFTLNQDPRVTFCGYSIPHPSDNRVNIRVQTTGDPAREVLKDGCQDLMLMCQHVRSTFDNAMTDFKRTQTNTEQEMDTK

SEQ ID NO: 231275 - protein, 269 aa, Glycine max
  unsure (1)..(269): unsure at all Xaa locations
  Clone ID: PAT_MRT3847_50863C.1.pep
MNRHHDPNPFEEEEVNPFSNGTTAPASKSRIPPLASESLGFGQRHDATVDIPLDTTNDSKKKGQELAAWEADLKRREKEIKRREEAVSRAGVPVDDKNWPPFFPIIHHDIANEIPVHAQRLQYLAFASWLGIVLCLGFNVVAVTVCWIRGGGVKIFFLAVIYALLXCSLSYVLWYRPLYRAMRYDSALKFGWFFMLYLLHIGFCIFAAIAPPIVFHGKSLTGILAAIDVFSDHVLVGIFYLIGFGMFCLEALLSLWVLQKIYMYFRGHK

SEQ ID NO: 231276 - protein, 74 aa, Glycine max
  Clone ID: PAT_MRT3847_50864C.1.pep
MIEMKLSQRNIVFLIKCYCYWKGNLASPTEWKFLIYIRLWKRLFLFLGVPSLLPSLKRLGQPLPKSRTNITQSV

SEQ ID NO: 231277 - protein, 66 aa, Glycine max
  Clone ID: PAT_MRT3847_50865C.1.pep
TREIPGREPAGGQRDPKKSRKKGGGKQGHRGIRGEIASRKKFHPKNKPKKKRGNPGGPKGGAKKNK

SEQ ID NO: 231278 - protein, 269 aa, Glycine max
  unsure (1)..(269): unsure at all Xaa locations
  Clone ID: PAT_MRT3847_50866C.1.pep
MNRHHDPNPFEEEEVNPFSNGGAAPASKSRIPPLASQPLGFGQRHDATVDIPLDTTNDSKKRGQELAAWEADLKRKEKEIKRREEAVSRAGVPVDDKNWPPFFPIIHHDIANEIPVHAQRLQYLAFASWLGIVLCLGFNVVAVTVCWIXGGGVKIFFLAVIYGLLGVPLSYVLWYRPLYRAMRTDSALKFGWFFMLYLLHIGFCIFAAIAPPIVFHGKSLTGILAAIDVFSDHVLVGIFYLIGFGMFCLEALLSFWVLQKIYMYFRGHK

SEQ ID NO: 231279 - protein, 39 aa, Glycine max
  Clone ID: PAT_MRT3847_50867C.1.pep
VLPLKVSGVKCWKNLKFLNQCNTSPKINQLKFIEAPTKM

SEQ ID NO: 231280 - protein, 63 aa, Glycine max
  unsure (1)..(63): unsure at all Xaa locations
  Clone ID: PAT_MRT3847_50868C.1.pep
QTLLXSLLVQLMDMESNNQSWNHACLNTLFHLSHSRYPFQVSRFGGQIVRDDSDNSKLTVAQL

SEQ ID NO: 231281 - protein, 96 aa, Glycine max
  unsure (1)..(96): unsure at all Xaa locations
  Clone ID: PAT_MRT3847_50869C.1.pep
SGGEGTRRRRSPKAGEEDLEGKEGAEKKKKAHRRRAVETYNDLHXSRVLKXGSTPTFGISSKGHGHHXTSFIXRPSSRKARPGKASRLGFATNKEA

SEQ ID NO: 231282 - protein, 156 aa, Glycine max
  unsure (1)..(156): unsure at all Xaa locations
  Clone ID: PAT_MRT3847_5086C.1.pep
GRWGRRVGAYLANHANGLRELCSHSPXEARQLRRKALSLIEWLQKADVPTIAQIEEFHSMQRMMNAPDSNDHIDLLLSIDWWGLQGAMXAFPNKIVFDDRLAQANTQEFFDGNSSVDAWLPICANXLYPVSQYTLXAVVVNVTCGRGHVGLPTTAW

SEQ ID NO: 231283 - protein, 81 aa, Glycine max
  unsure (1)..(81): unsure at all Xaa locations
  Clone ID: PAT_MRT3847_50870C.1.pep
ELIXKXMMHXCFXSVHASDXXVXPYLDPLXPVAFHXIXSIFNFLLQXWXSDVMIAXXGXMXPILTNGCNHILKAXQFNEFE

SEQ ID NO: 231284 - protein, 73 aa, Glycine max
  unsure (1)..(73): unsure at all Xaa locations
  Clone ID: PAT_MRT3847_50871C.1.pep
TRRXLLCGNGTCNLXTXRYRAXLHXRALMTLRXESSVPVHVLLKDDLILLRLPXXSSSXXDXENKEVXPSLLD

SEQ ID NO: 231285 - protein, 78 aa, Glycine max
  Clone ID: PAT_MRT3847_50872C.1.pep
PPPPPHPTPPPPPTTPLPPPSPPPLPPPPAPPPPRPHPPVPPAPPPHPSWPPPLQHQPPRSHPKHGSSPSYSPHLLNT

SEQ ID NO: 231286 - protein, 178 aa, Glycine max
  unsure (1)..(178): unsure at all Xaa locations
  Clone ID: PAT_MRT3847_50873C.1.pep
SQIFKFKFKFRDLWYNEFGSSLLFSCEICQFAKHHRSSYSPKDYKQLCPFTLINSDVWGPCWDPTPNGKTWFITFIDDHTQITWVYLMKTKSEVESIFKTFFSXIQTQFQVKIKVFRSDNGREYFNKHLNKFFLENDIIHQSSCVDTPXQNGVAERKNRHLLEVARALLFQNKAPKYL

SEQ ID NO: 231287 - protein, 51 aa, Glycine max
  unsure (1)..(51): unsure at all Xaa locations
  Clone ID: PAT_MRT3847_50874C.1.pep
WGVANRGASVKVGRDPKKARKGYFXDRRPAFHKDPKVGTSKNADPTLLWEP

SEQ ID NO: 231288 - protein, 102 aa, Glycine max
  unsure (1)..(102): unsure at all Xaa locations
  Clone ID: PAT_MRT3847_50875C.1.pep
MKTNNKAIAMEHDENVEGLERFHDNLLYQVFNHLDAQTLAMAGCVNKQLHQTAHDXEAXELICTHQWANTWCADQHLQSLVLALRGYLRLHALYLLPLSKPK

SEQ ID NO: 231289 - protein, 84 aa, Glycine max
  Clone ID: PAT_MRT3847_50876C.1.pep
RLNCYPLSTLYTLPISSQYPSHPSCDNQKIIKSNFSFHNLGDFILLNMDEIEIPAHFLCPISLQLMSGPFHASFINYFIYSYNF

SEQ ID NO: 231290 - protein, 95 aa, Glycine max
  Clone ID: PAT_MRT3847_50877C.1.pep
TCTVMYRVVSRLKNVQEVHGCYGCKMNKAHIPIVDRPTSENSGEWLEVTYILRVPRQNYGYRSPVIVTLKFYRLWMFLLMTTTSGLSSLTIKVKG

SEQ ID NO: 231291 - protein, 95 aa, Glycine max
  Clone ID: PAT_MRT3847_50878C.1.pep
GLFCPNIAPTLAELSRDAGRLHDLPDIGMRTRPDADTEPTYYHDYLREVRHPRQALCSKNDMYSDDFYIAITTLRKDSVKKGIRARARDVSQQPC

SEQ ID NO: 231292 - protein, 230 aa, Glycine max
  unsure (1)..(230): unsure at all Xaa locations
  Clone ID: PAT_MRT3847_50879C.1.pep
CSGFSIGHFAATFCSHVNISTQFPPAPAAHSERRENHAHPQPGPPPPPTAHPTPXYPHNIPHPPFPSPPPGRTYYKSPTLPPPPAASPPLPPPPPPPPFPPSPPPPPPLPPPPSXPPPPPPPPPPRPPPPSPRPPPSPPPPLSAPPXPPPPPPPPPPVHLSSSPSPPFLPPPPPLPTPPPSPPPPSPSPPLPPRPPILSHPTPPSPPPFFPPSCLFPPPPFPFPPPYLPP

SEQ ID NO: 231293 - protein, 94 aa, Glycine max
  Clone ID: PAT_MRT3847_5087C.1.pep
ACLKLAYLTLFHEQVAVPPAKPPPKPDPEVDDPLYLMTLTIPELFLRPYQVRWDATVFGVFNPDFPLYIKHEDLSKIAHGGQCLSISVLQLWIL

SEQ ID NO: 231294 - protein, 106 aa, Glycine max
  unsure (1)..(106): unsure at all Xaa locations
  Clone ID: PAT_MRT3847_50880C.1.pep
VNVYCGPLQDFTPETGRYDEIFFFWGXGHLTDEDIVCFPQRAKGGLAPRGFFVLKENIARSGFELDSEHRSATXSDLNFRELFSRCGLHAYASKDGKGWPEEIFAV

SEQ ID NO: 231295 - protein, 96 aa, Glycine max
  Clone ID: PAT_MRT3847_50881C.1.pep
GESLGLVHTPPVVLKTFPFKLLHPGASPRTSRGVHLFPKCSKLQGLHRFPAISGHPLVGFARMNILMQTWGGDPAGGFPPFWSVITRKASFEAEIP

SEQ ID NO: 231296 - protein, 89 aa, Glycine max
  Clone ID: PAT_MRT3847_50882C.1.pep
LFTRAEVSGRSCGVLGLPYCVPVRKNGRRFVTTLAKRNESQEKSKGPSFTLRVSKSTIARGAIGLFGLGFVDAGYSGDWSRIGVITPQT

SEQ ID NO: 231297 - protein, 91 aa, Glycine max
  unsure (1)..(91): unsure at all Xaa locations
  Clone ID: PAT_MRT3847_50883C.1.pep
NIKFGKDGRYILSGDYMTLNQSYITMDPGPDATFQAHEYXKPQLCDIYENDKTXDKTRVSLIGDGLLVSTGSYSNIFRPIGRATRSTDAMA

SEQ ID NO: 231298 - protein, 48 aa, Glycine max
  Clone ID: PAT_MRT3847_50884C.1.pep
ELLGFGSFPGLEGKISHWNPKIGLGFGFGIPIGINGFQPRRASFSSKG

SEQ ID NO: 231299 - protein, 73 aa, Glycine max
  Clone ID: PAT_MRT3847_50885C.1.pep
KKIFKVPLGLQKKIGWRGTFPQKKKALLEKRGIGVKRGKKAFNQIGGYLGKKKVFFFGAPQLLFFFPTVKNRG

SEQ ID NO: 231300 - protein, 160 aa, Glycine max
  unsure (1)..(160): unsure at all Xaa locations
  Clone ID: PAT_MRT3847_50886C.1.pep
MLVYQDLLTGDELLSDSFRYKEIENGMLWEVEGKWVVKXXXNININTNPSTKGKRKDKGVDKCSYXIINISNTFRLEEQPAFDNKQLITFMEEFIKNLTPNLNADQQKLFEKHIXRAAKCVLCRIEDCQLFSDENMSNNADWVWCEWENVADNRTFAYIA

SEQ ID NO: 231301 - protein, 149 aa, Glycine max
  unsure (1)..(149): unsure at all Xaa locations
  Clone ID: PAT_MRT3847_50887C.1.pep
IRPRVGTFTGTIVQSEPVMNSRVQLLSTTTNGDFVQGKDLALVKVNVTCAADGWTSSDTTTPLLESGXQKDRRVIVEYYGRMYFVADNADHTQXKELLEGNCSLDFKIRSRKKKGFSTEAQFASGKTSKFETIGAGVHSSQDFSCKGRF

SEQ ID NO: 231302 - protein, 119 aa, Glycine max
  unsure (1)..(119): unsure at all Xaa locations
  Clone ID: PAT_MRT3847_50888C.1.pep
GGFFTSLNXLLXXXKXXXXFXKITFKKPHIIFLDEPSNHLVRCCVSPSLFVASWWASGPMATSLLTYLLQGKYMCLLNLCFCFLSWLCLFSLLKWYANNLCEEKIAERGPMIVSIKLLT

SEQ ID NO: 231303 - protein, 115 aa, Glycine max
  unsure (1)..(115): unsure at all Xaa locations
  Clone ID: PAT_MRT3847_50889C.1.pep
MLVYQDLLTGDELLSDSFHYKEIENGMLWEVEGKWVVKRTVNVYIGANPSAKGGRENEGVNDTXIKRSDIVSTFRLHNQPRFDKKQGMTFVKIFIKNLTGRLYGEQQEVLRSAVE

SEQ ID NO: 231304 - protein, 96 aa, Glycine max
  unsure (1)..(96): unsure at all Xaa locations
  Clone ID: PAT_MRT3847_5088C.1.pep
GFXLRRCDRXARLRNWAXVDVSVHAPTGXXXXGXLYWFAGXXGIXGXWRTGGKGXVXKXIWASGXGACGRXKIVLXSLVVXALXXEXRILXXHKPS

SEQ ID NO: 231305 - protein, 100 aa, Glycine max
  Clone ID: PAT_MRT3847_50890C.1.pep
MECVEMGKGVVSLQLAGLSVGASLRTSFTARISCCLERSEKNSVNMLVYQDLLTGDELLFDSFRYKEIENGMLWEVEGKWLVKGADDVGIVAHAFADGGW

SEQ ID NO: 231306 - protein, 54 aa, Glycine max
  Clone ID: PAT_MRT3847_50891C.1.pep
VMDRFFRYNNGYIENIGEAIKQKLDVNLDPNPNYKPTQLCRKNDTTRRLAHAYV

SEQ ID NO: 231307 - protein, 85 aa, Glycine max
  Clone ID: PAT_MRT3847_50892C.1.pep
LLSLSLSLANEPFSSSPIRNPSLLTPADLPLSTSLHTLHQSLPNFPSLIIPFLLFLSSHLSAIASLGFLRGDGFSNCIRPFNWIE

SEQ ID NO: 231308 - protein, 44 aa, Glycine max
  Clone ID: PAT_MRT3847_50893C.1.pep
SPISGASFLSRTYLHKTICFWFMTQEIKFWSILIFKGFLFMKLL

SEQ ID NO: 231309 - protein, 86 aa, Glycine max
  unsure (1)..(86): unsure at all Xaa locations
  Clone ID: PAT_MRT3847_50894C.1.pep
NKGDLGTAAPTAMGFMGGATITPGGAFHGAPINPPGXFGPPVVSCPWSNLWVYWVGPFAGAAIAAVVSEIFFVSPTTHEQLPVPDY

SEQ ID NO: 231310 - protein, 68 aa, Glycine max
  Clone ID: PAT_MRT3847_50895C.1.pep
TCEDFDRHLLLQVFEERWMAIYMELWIMMPIYYNASVGILRSFIIARRRAAYYELGWPLFDFRTIRAS

SEQ ID NO: 231311 - protein, 45 aa, Glycine max
  Clone ID: PAT_MRT3847_50896C.1.pep
NIIAVTVAWIKGEGLSIWFLSIIYFISGVPASYVMWYRPLYRATR

SEQ ID NO: 231312 - protein, 37 aa, Glycine max
  Clone ID: PAT_MRT3847_50897C.1.pep
GSDHNKNKRDKYEVKMSHLLFLAGKVSLSHYNIAITL

SEQ ID NO: 231313 - protein, 54 aa, Glycine max
  Clone ID: PAT_MRT3847_50898C.1.pep
TVSVVMACKFFKLQLLRTRRSVSRSEEGNHNLGRQKLMLYLCLENLYNAVGLSR

SEQ ID NO: 231314 - protein, 80 aa, Glycine max
  Clone ID: PAT_MRT3847_50899C.1.pep
NVFWDESGMTNGVYVADRGTVSGTDVQYAPTGALIDTYHRKNWSFYTAHIAELTATFIIVNINVLTILWYMHHSVLIENF

SEQ ID NO: 231315 - protein, 230 aa, Glycine max
  Clone ID: PAT_MRT3847_5089C.1.pep
MTSFSQLQSQMQSQGLVVPPEPLVGPGPSGPRVSTNGSCVDPSGSDPKTGDSDRCGLYIEVDPARLVAVGRVYEGSTLVHNTHLLPGQVKVSVDEIKDADAAVPVPTDEVSLVGQALHTFLAWPTHLVKSLSHQVVVSPPKPPPKPDPEVDDPLYLMTLTIPELFLRPYQVRWDATVFGVVNPDFPLYIKHEDLSEIAHGGQCLSISVLQLWILHLTETCMRAGNSDIYG

SEQ ID NO: 231316 - protein, 130 aa, Glycine max
  Clone ID: PAT_MRT3847_508C.1.pep
GFPCCGGGGPGALVFLSWSALSACVCASGFASGPPFGAGFCVSLCLWWLSPPSLGVCCFVRSAGWWSSAVASSFGGPLAVSVGLVCSASAFVCFGLRRLPSFVFLVGVGPPGVCPFTPFCAPCLSRCDPI

SEQ ID NO: 231317 - protein, 158 aa, Glycine max
  unsure (1)..(158): unsure at all Xaa locations
  Clone ID: PAT_MRT3847_50900C.1.pep
LARNSARGGVSAYDVQGTLSLQILDKEDGHIQVQVQTGENQASLFRTHPNXNTDLVANENILRLQDPNMPFPTGQAGGPEGVGLLKWRMQSTDESMVPVTINCWTCFCGNESHVSIDYEALSSFDLLNVVSSVXMAALRDAPSVQQIEGEWKYDFRNS

SEQ ID NO: 231318 - protein, 138 aa, Glycine max
  Clone ID: PAT_MRT3847_50901C.1.pep
SSEERLFAGARPRHTPHICVWGGERNYKHNKTHLFFMCDGPAPRDTKRKKKKTARWCSLTVVFFFLCVPTPPAPRNLRQERARLPLPFPRRCEEGRARGSSLFSHPPTQERCVRRSLFVLAPVFPPPLRCITTSRQGA

SEQ ID NO: 231319 - protein, 57 aa, Glycine max
  Clone ID: PAT_MRT3847_50902C.1.pep
QAAAREDRPQKRSLLDSRLVSRNSYFSGYYFLRERLRVCEPLTDLVTDFVNHSLFHC

SEQ ID NO: 231320 - protein, 43 aa, Glycine max
  Clone ID: PAT_MRT3847_50903C.1.pep
SRLLHSIILCWTHFPTSLCCFCSLIFEVAYGQKFDQIKFNPIY

SEQ ID NO: 231321 - protein, 64 aa, Glycine max
  Clone ID: PAT_MRT3847_50904C.1.pep
KKLVQHPKRTNPHMHDSYITSVHYSMPIPYGAVQLLEVAPAAPLVGDLAILFASQNFSSPDFPV

SEQ ID NO: 231322 - protein, 126 aa, Glycine max
  Clone ID: PAT_MRT3847_50905C.1.pep
ISHFHVQFILERHAEVLLGSPTRLRQQQLEQQQQLGLLSHAASPVGGVRYTCLLTSLCSKWALSLLLFFLFPFGSFSFALLPHLLRFVCDLLESLPLYTTVTLPFVPPPPPQAGGTPHMLARQTSR

SEQ ID NO: 231323 - protein, 59 aa, Glycine max
  unsure (1)..(59): unsure at all Xaa locations
  Clone ID: PAT_MRT3847_50906C.1.pep
QEXXNVXXSSXAXLXTFXXNSHLPVASSRGYILYCMFYXACXKXARSMXXXGTMRFXXL

SEQ ID NO: 231324 - protein, 80 aa, Glycine max
  Clone ID: PAT_MRT3847_50907C.1.pep
KGRKEKKCGHRHLWQGADKDKGFKEGIQVCVGGQAYFEIIPGGHVSVLVFEHKGKRRYMDNDFSTVLPCLPRQNNLLFGT

SEQ ID NO: 231325 - protein, 70 aa, Glycine max
  Clone ID: PAT_MRT3847_50908C.1.pep
NLAPPFPAGVPKKWGFCPKCFFGCSFSPCGGRGKLSFFFTLPCCFPRSKNRFFLTLSPVFVLIPVPNGAP

SEQ ID NO: 231326 - protein, 54 aa, Glycine max
  unsure (1)..(54): unsure at all Xaa locations
  Clone ID: PAT_MRT3847_50909C.1.pep
TMATNSLHXSIQHHXHSXTKRHXXSXXPPXTSXFLXHXTPPXXPXIXISQXXXX

SEQ ID NO: 231327 - protein, 74 aa, Glycine max
  Clone ID: PAT_MRT3847_5090C.1.pep
NGLVNRMLAWIGSPVRGSRRCDVPTLSDSKRATESSRRKHPLTMFLGLTDVSWADLGIGFLFGLGTYFLFPSVL

SEQ ID NO: 231328 - protein, 46 aa, Glycine max
  Clone ID: PAT_MRT3847_50910C.1.pep
LVFIWEMFVCLVLLFGYNVSSYRYCGEKLLSTLYLWIIFFLKKKQK

SEQ ID NO: 231329 - protein, 73 aa, Glycine max
  Clone ID: PAT_MRT3847_50911C.1.pep
MATEPKAAADDVKIDLFEDDDEFEEFEINEEWDDKEEGKEVTQQWEDDWDDDDVSDDFSLQLRRELESNTEKN

SEQ ID NO: 231330 - protein, 141 aa, Glycine max
  Clone ID: PAT_MRT3847_50912C.1.pep
MRSSMLALKAYLSLRSLHLLEMKSEPTSPRSPSGGAANTAAVNGITSEAFGLESASTTSGNFFEDLTSSQLYKNTKVRDISGSFRWAPFLALERSNSFLTMLLLLSKYKMKSIPVVDLGAGRIDNIITQSSVIHMLAECAG

SEQ ID NO: 231331 - protein, 61 aa, Glycine max
  Clone ID: PAT_MRT3847_50913C.1.pep
MNGGDEVVAAPASPPQPLEWKFSQVFGERTAGEEVQEVDIISAIEFDKSGDHLATGDRVVE

SEQ ID NO: 231332 - protein, 81 aa, Glycine max
  Clone ID: PAT_MRT3847_50914C.1.pep
VLRQVFTQSDVFEMALDMRNQFDEVETLKHREVLNPSMLCDSEGWLLGNPMGIRTEREIHAEHEGAKIYRRLYQKPCPCQT

SEQ ID NO: 231333 - protein, 422 aa, Glycine max
  unsure (1)..(422): unsure at all Xaa locations
  Clone ID: PAT_MRT3847_50915C.1.pep
LKLLEGYQAGGVPGGQLMTTTEVENFPGFPDGISGPDLMDRMRRQAERWGAELYQEDVEVIDVKSSPFTVQSSERKVKNHTVIYATGATAKRLTLPRXEDEFWSRGISAXAICDGASPLFKGQVLAVIGGGDTATEEALYLTKYARHVHLLVRRDQLRASKAMQDRVFDNPNVSVHFNTTAIRLQKNTKGQMSGILVRKIDTGEEYVLEAKGLFYGIGHSPNTELLKGQVELDHSGYVQVQEGTAKTSVEGVFAAGDVQDHEWRQAITAAGSGCVAALSVERYLVSNDLLIEFHQPKTEEVKKEQTDRDVHEGFDITLTKHKGQYALRKLYHDSPRLICVLYTSPTCGPCRTLKPILSKVIDEFDQNVHFVEIDIEEDPEIAEAAGIMGTPCVQYFKNKEMLKTVSGVKMKREYREFIEANK

SEQ ID NO: 231334 - protein, 78 aa, Glycine max
  Clone ID: PAT_MRT3847_50916C.1.pep
TKITHNFKNTIQKDTIPIICTDIILTSLTFPNYKIEINNQIIETKNNPKGVCIERMITRETTQLVNQQRHISRAEAGH

SEQ ID NO: 231335 - protein, 121 aa, Glycine max
  unsure (1)..(121): unsure at all Xaa locations
  Clone ID: PAT_MRT3847_50917C.1.pep
YENGSIFDKFECCLSGDGLRVSTGSYNNLFRVFGCVPXSTEATTLEASKNPMRRQVPTPSRPSRSLGNSITRVVRRGXESAGVDANGNSFDFTTKLLHLAWHPTENSIACAAANSLYMYYA

SEQ ID NO: 231336 - protein, 100 aa, Glycine max
  Clone ID: PAT_MRT3847_50918C.1.pep
AYVRHKRRVLQKPLVGAIVDNLMPGGQVFIQSDVIEMALDMRNQFDEVETLKHIEVLDPAMLCDSEGWLLSNPMAIRTEREIHAEHEGAKIYRRLYQKQM

SEQ ID NO: 231337 - protein, 259 aa, Glycine max
  unsure (1)..(259): unsure at all Xaa locations
  Clone ID: PAT_MRT3847_50919C.1.pep
MATEPKAAVSDIIINLFEEESPRSPEAKLGLRVEDLWDIQEPQLSPDEKLNACFESIPVSAFPPPPSNQEVEIKSDATLAEAVKLLAEHSILSAPVVDVDAPEDASWIDRYIGIVEFAGIVXVWILHQSEPTSPRSPSSGAANTAAVTGVAYEALGLESAATTSGNFFEDLTSSQLYKNTKVRDISGSFRWAPFLALERSNSFLTMLLLLSKYKMKSIPVVDLGAGRIDNIITQSSVIHMLAECAGLQWFESWGTNNLS

SEQ ID NO: 231338 - protein, 83 aa, Glycine max
  Clone ID: PAT_MRT3847_5091C.1.pep
RSNSTPISVAFSFLFLFSFSLEESKTSSKSKPLLMAVDSSFQKEHQIREFVDGSGNVAVGLKLHNKPSSDDLNRQFPLGSRCL

SEQ ID NO: 231339 - protein, 298 aa, Glycine max
  Clone ID: PAT_MRT3847_50920C.1.pep
VLSGFKICLSGGAANTTAVNGITSEALRLESASTTSGNFFEDLTSSQLYKNTKVRDISGSFRWAPFLALERSNSFLTMLLLLSKYKMKSIPVVDLGAGRIDNIITQSSVIHMLAECAGLQWFESWGTKKLSEVGLPMVTPNHIIKVYEDEPVLQAFKLMRKKRIGGLPVMDRGSSTAIGNISLKDVQFLLTAPEIYHDYRSITAKDFLTAIRSYLEKHEGAFPMSGDLITCNKDCTIKELIQLLDHEKIHRVYVADNDGNLEGLITLRDIISRLVHEPRGYFGDFFDGVLPMPPNSRV

SEQ ID NO: 231340 - protein, 517 aa, Glycine max
  unsure (1)..(517): unsure at all Xaa locations
  Clone ID: PAT_MRT3847_50921C.1.pep
MNGGDEVVAAPAAPPHPLEWKFSQVFGERTAGEEVQEVDIISAIEFDKSGDHLATGDRGGRVVLFERTDTKDHGGSRRDLERMDYSIGRHPEFRYKTEFQSHEPEFDYLKSLEIEEKINKIRWCQTANGALFLLSTNDKTIKFWKVQEKKVKKISEMNVDPSKSMGNGSIASSSNSSSSRPYLANGGSPDRPYNYISNDFSFPPGGLPSLRLPMVVXSHETSLIARCRRVYAHAHDYHINSISNNSDGETFISADDLRINLWNLEISNQSFNIVDVKPANMEDLTEVITSAEFHPTHCNTLAYSSSKRSRPLVDLRQSALCDSHAKLFEEQEAPGSRSFFTEIIASISDIKFGKDGRYILSRDYMTLKLWDINMDSXGPVATFQVHEYLRPKLCDLYENDSIFDKFECCLSGDGLRVATGSYSNLFRVFGCAPGSAEATTLEASKNPMRRQVPTPSRPSRSLGNSITRVVRRGAEAPGVDANGNSFDFTTKLLHLAWHPSENSIACAAANSLYMYYA

SEQ ID NO: 231341 - protein, 34 aa, Glycine max
  Clone ID: PAT_MRT3847_50922C.1.pep
SLSFPYPYISPNPTVKFPNSTSPKARCASFFSSV

SEQ ID NO: 231342 - protein, 82 aa, Glycine max
  unsure (1)..(82): unsure at all Xaa locations
  Clone ID: PAT_MRT3847_50923C.1.pep
QKGLKPDGYCYDPLIXALCKEGRVDLAIEVLDVMISDGCVPDIVNYNTILACLCKXKRADEAPSIFXKLGEVGCXPNASSYN

SEQ ID NO: 231343 - protein, 65 aa, Glycine max
  Clone ID: PAT_MRT3847_50924C.1.pep
FESVLVGWPPPPETGYSPKGPPFNLGGGFMGAGISFNAGRTGFKKVYSLEASWLLSLRVPSNVGN

SEQ ID NO: 231344 - protein, 53 aa, Glycine max
  Clone ID: PAT_MRT3847_50925C.1.pep
SPRPPAFPGGLSPVRSPFLGPSLVFLFLRLLLCLISAGWCASPGRLGRARPYR

SEQ ID NO: 231345 - protein, 212 aa, Glycine max
  Clone ID: PAT_MRT3847_50926C.1.pep
MGNTFGAKKTTKVMKIDGETFKLKTPVKVGEVLKDHPGLVLLDSEAVKHYGVRAKPLEAHKDLQPKRLYFLVELPKETTPRRVRSGINMSAKDRLESLVLTRRSASDLSIMKQSSNTDNKENSNNGGGVRLKMRLPKAEVEKLIQGCKDEAEAAERIMNLYKANGSRENEGGTKENGEKMVVLDQQSVKESTKKRVSFMPINEGGIEVAVAS

SEQ ID NO: 231346 - protein, 53 aa, Glycine max
  Clone ID: PAT_MRT3847_50927C.1.pep
LNYWLPKYRLSLLLSYYGFFFCLFFIIFCLFFVFFLYLCSPVWASVEACYCHL

SEQ ID NO: 231347 - protein, 63 aa, Glycine max
  unsure (1)..(63): unsure at all Xaa locations
  Clone ID: PAT_MRT3847_50928C.1.pep
FFEGSVGSEDDPSYTGRPGFTDAEEMEEPHCPPGLXQNETIMVLRPNMSKDERLALTQKNEEE

SEQ ID NO: 231348 - protein, 37 aa, Glycine max
  Clone ID: PAT_MRT3847_50929C.1.pep
IEKFSYFFFLINFPQKLSHIRSEHFTFVSLIFLLLRL

SEQ ID NO: 231349 - protein, 328 aa, Glycine max
  Clone ID: PAT_MRT3847_5092C.1.pep
ENIRVQESGYEVGKFEKMNSNLPPPDPSFAGEFDPSTFQVIMNDDLEELKELGSGTFGTVYHGKWRGTDVAIKRIKKICFTGRSSEQERLTVEFWREAEILSKLHHPNVVAFYGVVQDGPGGTMATVAEYMVDGSLRHVLLRKDRYLDRRKRLIIAMDAAFGMEYLHSKNIVHFDLKCDNLLVNLKDPIRPICKVGDFGLSKIKRNTLVTGGVRGTLPWMAPELLNGSSNKVSEKVDVFSFGIVLWEILTGEEPYANMHYGAIIGGIVNNTLRPTIPSNCDHEWRTLMEQCWAPNPGARPSFTEITSRLRIMSAAASQTKTQGNKASK

SEQ ID NO: 231350 - protein, 229 aa, Glycine max
  unsure (1)..(229): unsure at all Xaa locations
  Clone ID: PAT_MRT3847_50930C.1.pep
MALPLLPPLSSIINTLFFFTLFFPKYVSSDVEGYSACEPFSCGEIDIRYPFWSSDHQQSYCGHPKFKLDCQQDNVTIDMMSQRFHVIDIDQTSKVLKMARLDLWDDPCTDEYSNVKLDSDFFNYNSNDDDYTLLYDCGPPVTYTSSVNIKGTISFSCPIDGGFRDAFFVSSTDVGNLKDLGCKHSINVSVLREAVKDALQVENXLEKGFEVXWIGVDERQCDGCIKTGG

SEQ ID NO: 231351 - protein, 214 aa, Glycine max
  Clone ID: PAT_MRT3847_50931C.1.pep
MPRRVQIEDPKYDDVPDADEPEETIRFKSSNSNVSDDQEPFMGIKVRRKASLHRDHKGDYLNVPSHPFLIKILQKQGDNEVLFADRVLKFTGSGKMKRCVLMITDSAIYIVDPEVDALKRRIVLAAVERVCLSELSDNFFAVIVPSEYDLLMASTRKTEIVTVLVEATKAKSATGFELDVVFSNRFEYNAASDLVKEVQFEEVEGGVKTRILRK

SEQ ID NO: 231352 - protein, 43 aa, Glycine max
  Clone ID: PAT_MRT3847_50932C.1.pep
ICFGSFDYTVQDMLEYGPAWTNFYFLAYGRFPIVKPTETSLRQ

SEQ ID NO: 231353 - protein, 211 aa, Glycine max
  Clone ID: PAT_MRT3847_50933C.1.pep
RPRLLLFVTLLVLFPSACRLAPFPGCSFDFSVMSCFHETTEDNVIRLVTGVVIQVLCSYVTLPYALVTQMGSTMRPTIFNQRVASALKNWHNTAKKHVKNSKHTTPFSSRPSTPQYGMSPTHLLHKHLAGRSESAQTSPRTSNYENEQWGVEGSPSPSHHAVAADETQMQVLEPGSGCSGSAPELPISSQLDIRVSSSEFSFEKRHIPGSD

SEQ ID NO: 231354 - protein, 57 aa, Glycine max
  Clone ID: PAT_MRT3847_50934C.1.pep
EHQWPMYQPVIFHQLLLLPRLHSWLASVCRVLQSPQALSLPHSLLGPRTYNSDSDST

SEQ ID NO: 231355 - protein, 92 aa, Glycine max
  unsure (1)..(92): unsure at all Xaa locations
  Clone ID: PAT_MRT3847_50936C.1.pep
DPPVXDGXXDIXHXLSLFLSLPXXQIHGHSNQPHLFNPSPKLPHLLPHRLNWLPPLLPLPYPMHLLPLLLIPSLKPSLPRNLHSPPQTLPHL

SEQ ID NO: 231356 - protein, 241 aa, Glycine max
  unsure (1)..(241): unsure at all Xaa locations
  Clone ID: PAT_MRT3847_50937C.1.pep
VGEKSATVIGATFQWFLRDLTGMLGGILFTFYQGSNLDSNAKMWRLVADLMNDLGMLMDLISPLFPSAFVFVVCLGSISRSFTGVASGATRAALTQHFALQDNAADISAKEGSQETVATMIGMALGMLVARLTIGHPLAIWFSFLSLTVFHMYANYRAVRCLALNSLNPERSSILLQHFMETGQVLSPKQVSSQEHVLPIQFISWSSXKANCLHKKVCLGMRISSFDXMEIKXHALCSTLL

SEQ ID NO: 231357 - protein, 134 aa, Glycine max
  Clone ID: PAT_MRT3847_50938C.1.pep
MSTLNHLFDLPEQICYVQCGFCTTILMVSVPCSILSTVVTVRCGHCTSLLSVNMKKASLVPFHLLASLTHLEPKEGASEDGANKSLSSYNTSTMTNSDCEEENVTQISDFVHKPPEKRQRTPSAYNRFIKERLK

SEQ ID NO: 231358 - protein, 302 aa, Glycine max
  Clone ID: PAT_MRT3847_50939C.1.pep
MTYYETDGGGRREEVVPDVTLTIQSDDGNGDYVKLRANADDGSPPGAAAELSPPTLRAAVWYWVKLVVLFLFLGFLAVVVLVWVGPYFIDKEIIPIINWETETFSTPVLTVLVFASVAIFPTLLLPSTPSMWVAGMTFGYGFGFLLIISAAAIGVSLPFVIGKLFHHKIEGWLEKYPKKASILRSAGGGSWFHQFRAVAFIRISPFPYLIFNYCAVATNVKYGPYIVGSLVGMVPEIFVAIYTGILIRTLADASYEKHSLSAPQIILNVAGFCITVATTIFFTAYARRRLDELQREEDPLLQ

SEQ ID NO: 231359 - protein, 246 aa, Glycine max
  Clone ID: PAT_MRT3847_5093C.1.pep
MAVDSFFQKEHQIREFVDGNGNVAVGLKLHNKPSNDGLNRQFPLEIPPILFEETSLPAGLHGSHTKDVYSISVLPEEDENANCASPLPFLSILGVPNQVKSPMCLDDPINCQNCIDFQMKNEGVYSQCIIDIPSVNGNSVSPESYEEAVEGFKTGNSPTSVLWRESSFKAGKLMQSLVNVSNPRDKPVSEKLHDLPSNRWRKYKRAASFDSRKVALLFSILSSFGTLVLIYLTLRVRQRADGFALI

SEQ ID NO: 231360 - protein, 205 aa, Glycine max
  Clone ID: PAT_MRT3847_50940C.1.pep
MAKEKKNLSNKNKKPSNADEVHFRGVRKRPWGRYAAEIRDPGKKTRVWLGTFDTAEDAARAYDVAARNFRGPKAKTNFPFLPDNNTNVNLNKKNNNVNVKSDSPSQSSTVESSTPEREFTRRAAPAAMDRFPFLPIQQQILVTHPVAPMRPVYFLDRAHFMTQPFPLRFEPGPVQSDSDSSSVVVDCQPKRELNLDLNLAPPNEY

SEQ ID NO: 231361 - protein, 115 aa, Glycine max
  unsure (1)..(115): unsure at all Xaa locations
  Clone ID: PAT_MRT3847_50941C.1.pep
LDPQFMMPTQAGIGSQQQHXSGLRPGGGPMPSLHVPMDXHGQQGQLPGGHPGTXNCXQPQQTMPMMHPQRLPRGRAYQYPPGRNMQDVPLHGASGEMMPAPYDMGGLPMRDAVGQ

SEQ ID NO: 231362 - protein, 65 aa, Glycine max
  Clone ID: PAT_MRT3847_50942C.1.pep
FGYFCSGILIRTLADASHEKHSLSAPQIILNVAGFCITVATTIFFTAYARRRLDELQREEEPLLQ

SEQ ID NO: 231363 - protein, 58 aa, Glycine max
  Clone ID: PAT_MRT3847_50943C.1.pep
AQESIFSQKKLFNFPNYWLVVLVFYQVFKSLQNSQYLSCISRSRIGPCSIEQLCLCFS

SEQ ID NO: 231364 - protein, 126 aa, Glycine max
  unsure (1)..(126): unsure at all Xaa locations
  Clone ID: PAT_MRT3847_50944C.1.pep
RLREDDRRGEWRNFRSASSLFLCLSSNIADQVILLNLQPTPYXMRANIALAQXGLKYEYKEDDLRNKIPLLLQMNPVHKKILVLIHNGKPIFESLIAVQYIEEVLNDTYSFLPSDPYQISHARFWA

SEQ ID NO: 231365 - protein, 72 aa, Glycine max
  Clone ID: PAT_MRT3847_50945C.1.pep
DWSPPHYAVRFPFKFFSASSVVNSKVEPSSVDGNCTRRFLRPGISLGDFSVRLLTPPPMRKGSYNQWVFFSG

SEQ ID NO: 231366 - protein, 69 aa, Glycine max
  Clone ID: PAT_MRT3847_50946C.1.pep
MRSFVPAIYDVTVAIPKSSPAPTMLRLFKGQPSVVKQSKSRFRNNSILSLHQFFLCLYYLSVIEYYNRK

SEQ ID NO: 231367 - protein, 58 aa, Glycine max
  Clone ID: PAT_MRT3847_50947C.1.pep
VIVESGTMSGSQTDHAVYDFNHSILSRACDSNLSRPSPVNSSDQPPPPSNVSMSTMPY

SEQ ID NO: 231368 - protein, 42 aa, Glycine max
  Clone ID: PAT_MRT3847_50948C.1.pep
GDEGLKLLASEEEGEGEREKVRERDEDVQDDNTQDDNVNHES

SEQ ID NO: 231369 - protein, 65 aa, Glycine max
  Clone ID: PAT_MRT3847_50949C.1.pep
AVLLWLVRLELLVPPRDCCLQIPAPCFMIYKRIVSPMCDQPNLDSPVSKVSTDQILILAQSLHPC

SEQ ID NO: 231370 - protein, 101 aa, Glycine max
  unsure (1)..(101): unsure at all Xaa locations
  Clone ID: PAT_MRT3847_5094C.1.pep
LLPLLRWRFWGVVPRVWGGLFLALGLRLWCSAXWXCVCXXVVLCXALALLRFAPVFCXLPGLVWSPLSGLFGVAXPGSSGFRRPFVSCQCSGAGSGPAIRT

SEQ ID NO: 231371 - protein, 71 aa, Glycine max
  unsure (1)..(71): unsure at all Xaa locations
  Clone ID: PAT_MRT3847_50950C.1.pep
ARVDLHXTYRIIGVIKMVAAAXFPDNTGISLACAMNSTFWGRASSDIHTICSHDCQFXNPARTILMTYCHL

SEQ ID NO: 231372 - protein, 200 aa, Glycine max
  Clone ID: PAT_MRT3847_50951C.1.pep
MAEQALEGSQPVDLTKHPSGIVPTLQNIVSTVNLDCKLELKSIALQARNAEYNPKRFAAVIMRIREPKTTALIFASGKMVCTGAKSEQQSKLAARKYARIIQKLGFPAKFKDFKIQNIVGSCDVKFPIRLEGLAYSHSAFSSYEPELFPGLIYRMKQPKIVLLIFVSGKIVLTGAKVRDETYTAFENIYPVLTEFRKNQQ

SEQ ID NO: 231373 - protein, 53 aa, Glycine max
  Clone ID: PAT_MRT3847_50952C.1.pep
SHTFITLLQFKYFFSIPFHSTNHAINIFNRRNIHVIKLITSIYLPSQKSWTLF

SEQ ID NO: 231374 - protein, 273 aa, Glycine max
  Clone ID: PAT_MRT3847_50953C.1.pep
MAEQALEGSQPVDLTKHPSGIVPTLQNIVSTVNLDCKLELKSIALQARNAEYNPKRFAAVIMRIREPKTTALIFASGKMVCTGAKSEQQSKLAARKYARIIQKLGFPAKFKDFKIQNIVGSCDVKFPIRLEGLAYSHGAFSSYEPELFPGLIYRMKQPKIVLLIFVSGKIVLTGAKVRDETYTAFENIYPVLTEFRKNQQWYGSGSFSIAIGYTCCNPWARNIMNQYHCLYYFFFFVQLSEYNCVRCRAEVFLIEMTKFFTQFLFWVIYLYKF

SEQ ID NO: 231375 - protein, 92 aa, Glycine max
  Clone ID: PAT_MRT3847_50954C.1.pep
RWGQTSNLWGRPHTQHYYKTRSTSQLHSLCILFGFHDIYTFACPSPIPDIHMIVNCFTTTTLTLITIIMNQQKHEKLFHEQGEGFSCLSFRP

SEQ ID NO: 231376 - protein, 52 aa, Glycine max
  Clone ID: PAT_MRT3847_50955C.1.pep
SLHLETTHLAPAHTFYFLVLVPTGGTFLSPDVQNYRTKINIVQMNIGPKLYT

SEQ ID NO: 231377 - protein, 74 aa, Glycine max
  Clone ID: PAT_MRT3847_50956C.1.pep
GWFILSSKGEENLDREEDTRLTAPYTKVSPHITKRCHTISRKGFCARMWFLVFYTAKQDDDPVVLGWRHPWEGH

SEQ ID NO: 231378 - protein, 58 aa, Glycine max
  unsure (1)..(58): unsure at all Xaa locations
  Clone ID: PAT_MRT3847_50957C.1.pep
FCKGRKNKRSSHKISNFFNFKTFVYVRPCQNPFPISSIIIXXFXXKFKDLPLKINLNK

SEQ ID NO: 231379 - protein, 51 aa, Glycine max
  Clone ID: PAT_MRT3847_50958C.1.pep
MMPPKHQAPDAMWDPSDQPTMPHQPASAYEVRTLWIGDLQYWMDENYMYTC

SEQ ID NO: 231380 - protein, 115 aa, Glycine max
  unsure (1)..(115): unsure at all Xaa locations
  Clone ID: PAT_MRT3847_50959C.1.pep
VVSARTFVPIVPAFVVSSCLWGAVAWAPRCDLVKTAWCPSPFSASFLLCIASACVLSGASSCALYSVSCXACLHLLLASSCRHCLFWVQIYSLIDACCSVSHRCPQGLPPWCPAS

SEQ ID NO: 231381 - protein, 52 aa, Glycine max
  Clone ID: PAT_MRT3847_5095C.1.pep
KVDIFFFDFLKRRRGKTMNPFLIKRGGVLNLVYYKNSAKPYKLFFNKNRGFI

SEQ ID NO: 231382 - protein, 37 aa, Glycine max
  Clone ID: PAT_MRT3847_50960C.1.pep
SFLCSHCLTNFSQKMNIYIEVFFLLCTISATFRLTTW

SEQ ID NO: 231383 - protein, 55 aa, Glycine max
  Clone ID: PAT_MRT3847_50961C.1.pep
HHKQSQRVNNPKIVPSSDLPEGLINKPQFISLFSCVVPDVLPFPIHFLNQYPINI

SEQ ID NO: 231384 - protein, 27 aa, Glycine max
  Clone ID: PAT_MRT3847_50962C.1.pep
RYHVDQTNEPIKEHCGKLDEGLEPANH

SEQ ID NO: 231385 - protein, 95 aa, Glycine max
  Clone ID: PAT_MRT3847_50963C.1.pep
FPLQSPVSIESIHGNHLVIFMSKVEQPLSQGSHFLRQLLVGLATVSGNYIRKMLPEGQQVIQTLADMTVVILIHQIGLAEKLFKSMHVSVVLLEP

SEQ ID NO: 231386 - protein, 69 aa, Glycine max
  Clone ID: PAT_MRT3847_50964C.1.pep
PSGQKFALSCQSPHIIYIFPLDNGQLVYMIALMTLEIVSSCPNSPCRVYMMYHKIMLHSNLSLINLYPL

SEQ ID NO: 231387 - protein, 44 aa, Glycine max
  Clone ID: PAT_MRT3847_50965C.1.pep
DVIKIVVCELLLNLFCFLTKYHSYLFVMYTLFLFYFHFVDISMI

SEQ ID NO: 231388 - protein, 191 aa, Glycine max
  unsure (1)..(191): unsure at all Xaa locations
  Clone ID: PAT_MRT3847_50966C.1.pep
TAARTTTEGIEYLHTGCVPAVIHRDLKSSNILLDIQMRAKVSDFGLSKLAVDGASHVSSIVRGTVGYLDPEYYIXQQLTDKSDIYSFGVILLELISGQEAISNDSFGANCRNIVQWAKLHIESGDIQGIIDPVLQNNYDLQSMWKIAEKALMCVQPHGHMRPSISEVLKEIQDAIAIEREAESNSDEPSNS

SEQ ID NO: 231389 - protein, 71 aa, Glycine max
  Clone ID: PAT_MRT3847_50967C.1.pep
SFDREGRGSSSLGTHERKISGKGAKSRGSRGRRGGVESRQQAQHRLITLLHNTSRCNLRRPIRYKQQSNGN

SEQ ID NO: 231390 - protein, 62 aa, Glycine max
  Clone ID: PAT_MRT3847_50968C.1.pep
ICGFIRVNSLCLFFSEKVCAGSRGMITLELLVFLILRGRGWVNHYQYLIKKSFSFQMKFTKP

SEQ ID NO: 231391 - protein, 789 aa, Glycine max
  Clone ID: PAT_MRT3847_50969C.1.pep
MQQSDQTVLSLRPGGGRGSRLLAPRFDSSSSSSASPAFGSFSADLPLLRPHAGAPSPFSIKAGDARFEGRERVRYTREQLLQLKEGVEILDDVLKIKQDIEAELFGEDQSWARPENNPTQQFQNRYTEPDNRDWRGRSGQLSGNADERSWDNLKENREFGNTSNRQDQLNSQFARTQISSNQGGGPTPTLVKAEVPWSARRGTLSDKDRVLKTVKGILNKLTPEKFDLLKGQLIDSGITSADILKGVISLIFDKAVLEPTFCPMYAQLCSDLNEKLPPFPSDEPGGKEITFKRVLLNICQEAFEGADKLREELRQMTAPDQEMERRDKERLVKIRTLGNIRLIGELLKQKMVPEKIVHHIVQELLGPPDIKVCPAEENVEAICQFFNTIGKQLDESPKSRRINDMYFIRLKELSTNPQLAPRLRFMVRDVLDLRSNNWIPRREEVKAKTITEIHSEAEKNLGLRPGATASMRNNRVVSGALGNTSPGGFPIARPGTGGLMPGMPGTRRMPGMPGIDNDNWEMPKTRSMPRGDMSGMQTGGHSQSPFLSKTSTVNSRLLPQGSGGIISGRSSALVHGAGAPSAARPPNLGFSAEPTPQIPSPVKAVSAIPAEKPQPPAAKLNFDELQRKTVSLLEEYFNVRLLDEALQCVEELKAPAYYPEFVKEAISLALDKSPPCAEPVANLFEYLFIKKILSARDIGTGCMLFASLLDDIGIDLPKAPNNFGEIIGKLVLAGGLDFKVVTEILKKVEDDRFQKAIFSSALQVITSASGQAVLDAQASDIEACQSLFN

SEQ ID NO: 231392 - protein, 138 aa, Glycine max
  Clone ID: PAT_MRT3847_5096C.1.pep
KVFFYKLGGFKGVSNKFFFVSPGFSPTPPPGGLGPPRYFYLRAFWDFFITPFFLGDFIFFPPPFCLRLGRGVPARVKIPSVNPPLLFFPEWWFVPFLMRGRFWFSLPRKKYLTRFIIFLKKKKKKKKKKKKKKKKKKK

SEQ ID NO: 231393 - protein, 110 aa, Glycine max
  unsure (1)..(110): unsure at all Xaa locations
  Clone ID: PAT_MRT3847_50970C.1.pep
FIHFLFGAVACQRFYEHEGXMQVAQXXPLKPYMDIFAVGCVVAELFLEGQPLFELSQLLAYRRGQYDPSQHLEKIPDLGIRKMILHMIQLEPESRFSAERYLKEYSCRHA

SEQ ID NO: 231394 - protein, 50 aa, Glycine max
  Clone ID: PAT_MRT3847_50971C.1.pep
GWCVREHSLSQMWPQEIMKSKGSYDWIGQEELPSLSQQREFVHSPQPKGG

SEQ ID NO: 231395 - protein, 68 aa, Glycine max
  Clone ID: PAT_MRT3847_50972C.1.pep
HISSLDPGLSQPSLNPPEVPIQCELSLGLDLLPSLILNSGYGKRNCTIYRRKNRSLIGHLNATVLHRG

SEQ ID NO: 231396 - protein, 99 aa, Glycine max
  unsure (1)..(99): unsure at all Xaa locations
  Clone ID: PAT_MRT3847_50973C.1.pep
NFGKKXERKDLFLKNLFDVEWKREXXCRRVPFRRRGVSXXIIFXPNHFKKHTVLGXEYCVQPVFGVPFPRYQIWRNIISWGIVTLRNFNILFAXXNCAH

SEQ ID NO: 231397 - protein, 91 aa, Glycine max
  Clone ID: PAT_MRT3847_50974C.1.pep
KVAKIFRGCKLPLIGLPMNFYSLSNPVCQLLPHIPTPLKKTCFKGEKKKKKELVLSKKSAQKKKKCWVLLLFYYYKNFWPCFLIRIMLVNL

SEQ ID NO: 231398 - protein, 49 aa, Glycine max
  Clone ID: PAT_MRT3847_50975C.1.pep
SHNFFFMLLHFDILNAFSILYAYNQLATILLVRLFLMCESYFKSCYSSY

SEQ ID NO: 231399 - protein, 126 aa, Glycine max
  unsure (1)..(126): unsure at all Xaa locations
  Clone ID: PAT_MRT3847_50976C.1.pep
ERKGEGDPKREEEEALRDQEWRRKKEQAAPIEEEKARMEKKRQRKGEEEAERGEXEARREQEWLRKKXEAVXXEEXTARMEKERERKGQEEAXRXXEEARREQXXRRKKPPAAPERKKXXGWKRRT

SEQ ID NO: 231400 - protein, 540 aa, Glycine max
  unsure (1)..(540): unsure at all Xaa locations
  Clone ID: PAT_MRT3847_50977C.1.pep
MKAFSFSGVWILLFLSSVSAFSPTGSIRHPVKFIIGEEEENLGSWKSEFTQVAPAPGPKGDDVLILAANKTNRPDILRGFRRYRGGWDIADQHYWASVGFTGAAGFILAVLWFISFGLALMIHLCFGWGINIKGKGSNHSQRICLILLISFTFAAATGCILLSAQDKFHASLXIPSIIFNQSDYTQTLRNVTEYLSLARVRNVTRILLPSDVMDGIDKLNVDLNSSADTLSEKTNENSVKIRRVFNDVRLALYVVAAVMLLLALVGLVLSVLGYQHAILIFVITGWLLVATTFVLCGVFIILNNAISDTCVAMGEWVANPHTESALSNVLPCVDQRTTNKTLFQSKQVINNIANVVNTFIYATANINVTQGSPGSYNQSGPRMPTLCYPFDSQFQERQCTDQEVSSANASMVWKNYECEVSESGICTTVGRVTPEIYLQIVAAVNEIYALEHYTPPLLSLQNCNFVRDAFTKITSSYCPPLNHYLKIINVGLGLISVGVLLCLVLWILYANRPRRREVFEKSSLPETTTNLPLSNANSEI

SEQ ID NO: 231401 - protein, 75 aa, Glycine max
  Clone ID: PAT_MRT3847_50978C.1.pep
PIHLGDISPFFFIFIFSLTFFSSFLYGTRIIGGFLSLKLKILGAHEWLLEPEGPLGILGLEVGVGEIARGTLIFL

SEQ ID NO: 231402 - protein, 66 aa, Glycine max
  unsure (1)..(66): unsure at all Xaa locations
  Clone ID: PAT_MRT3847_50979C.1.pep
AEGRVIKESAVMPYPTSSPKLXQCSESCNSQFKTVSPISWLINNVINNFTETRWSGRCWVDXREIP

SEQ ID NO: 231403 - protein, 46 aa, Glycine max
  unsure (1)..(46): unsure at all Xaa locations
  Clone ID: PAT_MRT3847_5097C.1.pep
QGGPXIFYLXVAIXVXGSIEIXHPFQKEXATXTVRXKTXIQKLRAL

SEQ ID NO: 231404 - protein, 54 aa, Glycine max
  Clone ID: PAT_MRT3847_50980C.1.pep
WIHRKTKEVSYCTMTHYILRCLDTLTSIYTCMDGTISTLCAKRHTCATYNISKS

SEQ ID NO: 231405 - protein, 56 aa, Glycine max
  Clone ID: PAT_MRT3847_50981C.1.pep
FNGICGGHYRTVNQKTNLGQKEKLSKGGFKRPKLRNFPISLFMFFPKPPGKNFFFG

SEQ ID NO: 231406 - protein, 56 aa, Glycine max
  Clone ID: PAT_MRT3847_50982C.1.pep
GNFEFQRIDHFLSHQTLNPLLFLLPLNDKVQGTFNNVGGSEPFTSPKSEHLTGRVG

SEQ ID NO: 231407 - protein, 135 aa, Glycine max
  Clone ID: PAT_MRT3847_50983C.1.pep
LGYLMLFQMCLTVEVPTNNEFTWITVSVLPSQAHFAEMMTADESTAFGTSWTWQAHRWIYTIATTKDWVATLQATKTQKWLVVRSMPLLNVLKLSRKKPVRTVWQLHRVAYKIVFQRQLVGESSSSVLYEILGKP

SEQ ID NO: 231408 - protein, 45 aa, Glycine max
  Clone ID: PAT_MRT3847_50984C.1.pep
LYMHWSSKLYNSWHEDYQSSTPFVTPRIIAIVPRTACKRSFTKLV

SEQ ID NO: 231409 - protein, 79 aa, Glycine max
  unsure (1)..(79): unsure at all Xaa locations
  Clone ID: PAT_MRT3847_50985C.1.pep
MAAEAQLPDHFKCPISLQIMSDPVILSSGHTFDRSSIQRWLDAGHRTCPITKTALPAHSLLXPNHALRSLIFNYAPINP

SEQ ID NO: 231410 - protein, 53 aa, Glycine max
  Clone ID: PAT_MRT3847_50986C.1.pep
FHLLRKCQHLMPNLIFHLACRYQNFIQKYHQSFNSRAKDADLKQISKEYKTLP

SEQ ID NO: 231411 - protein, 80 aa, Glycine max
  Clone ID: PAT_MRT3847_50987C.1.pep
KSVRGYIVDANLSVLNLVIVKKGEKDIPGLTDTTVPRRLGPKRASRIRKLFNLSKEDDVRQYVVRQPLNKEGKKPRTKAP

SEQ ID NO: 231412 - protein, 94 aa, Glycine max
  unsure (1)..(94): unsure at all Xaa locations
  Clone ID: PAT_MRT3847_50988C.1.pep
MFTYHLEDIFPITLTITHLILYALLISNIQTYLHTLTITITXTKSQRIXSYHFMHHLLLPQDLIKLLIHYDQYKLLATHPLNEENLIQNLPNDL

SEQ ID NO: 231413 - protein, 133 aa, Glycine max
  unsure (1)..(133): unsure at all Xaa locations
  Clone ID: PAT_MRT3847_50989C.1.pep
AMVHGRSGSTIPRGLGIGVKLTTINSMCSYRLNTGIIRSSLLGTIPQSIXQQTVWNQMATVRTPLNFDSITQSYCQLYIDLLSGGILVDKTGDWITLIQNSTISNLMRDAAWNKGCLMVKIVMSVHATINTSD

SEQ ID NO: 231414 - protein, 81 aa, Glycine max
  unsure (1)..(81): unsure at all Xaa locations
  Clone ID: PAT_MRT3847_5098C.1.pep
KLEYSDQDTHLLVASQIREWSGINTFAPATQSKLLELLGSLKQENVNSLXTLVLGQRRAGKSSTVKSIVGESMVSISTFQS

SEQ ID NO: 231415 - protein, 216 aa, Glycine max
  Clone ID: PAT_MRT3847_50990C.1.pep
MADAAKGTYRASRWSLNGMTALVTGGTRGIGHAIVEDLCGFGATVHTCSRNQAELDKCLTEWRSKGFLVSGSVCDVSSQPHREKFIQEVTSIFNGKLNIYVNNVGVNYRKPTIEYTAEVYSQIMAVNLDSAYHLCQLAYPLLKASGMGSIVFISSIAGVVSLSTGSVYAACKAATNQLTKYLACEWAKDNIRSNCVVPATTNTPLVEHLLRNKKYV

SEQ ID NO: 231416 - protein, 212 aa, Glycine max
  unsure (1)..(212): unsure at all Xaa locations
  Clone ID: PAT_MRT3847_50991C.1.pep
EELEKLNLGCVVISVGKKGNSFFTHSINKKHPFVKVDSFIEIGGFPTAKEAQVIADDVFSLFVSEEVDKVELVYAKFVSLVRFEPVIQNLLPLGEVCDVKDEIFRLSSKEGKLAVERDVVKLKKEGEMCFPLMEFEQDPVMILDAMLPLYLNSQVLRGLQESMASELAARMVAMSNATDNAVDLSKKLSVEYNRERQAKITXXSXLEIVAGA

SEQ ID NO: 231417 - protein, 63 aa, Glycine max
  Clone ID: PAT_MRT3847_50992C.1.pep
GIPGRPTRPENLTRRKNTLILDSSPQVPQDGSYVNFDRQFLHLECPLISNRSDNSLLNLHPLL

SEQ ID NO: 231418 - protein, 71 aa, Glycine max
  unsure (1)..(71): unsure at all Xaa locations
  Clone ID: PAT_MRT3847_50993C.1.pep
KXTLGXXXLXXVXLXDXXLXETFREXWXXHXQPRLXLESLALANLGMPXFLCVXVLIAHXKXXRIXEGHTT

SEQ ID NO: 231419 - protein, 80 aa, Glycine max
  Clone ID: PAT_MRT3847_50994C.1.pep
GFPLRWLTLLEIDTSKLMRSYMQRQGSITRQHTHQMVSLRRYDTEPPVLLHGRRPYTESKNNGQRCCLQPCIYPLLWLPR

SEQ ID NO: 231420 - protein, 83 aa, Glycine max
  unsure (1)..(83): unsure at all Xaa locations
  Clone ID: PAT_MRT3847_50995C.1.pep
VSSSLSASSLSLVSKNHGQKILVGGNWKCNGTTEEVKKIXXLKLKXKSPWGNVVXXVVSPPFVFLPXVKSLLRPDXQSRAXNG

SEQ ID NO: 231421 - protein, 49 aa, Glycine max
  unsure (1)..(49): unsure at all Xaa locations
  Clone ID: PAT_MRT3847_50996C.1.pep
VFFXLXXFLXQCTXSYYSETTYDEXVYMCTIXGILHXPPLRVKXIITPL

SEQ ID NO: 231422 - protein, 50 aa, Glycine max
  Clone ID: PAT_MRT3847_50997C.1.pep
NIVIRVIYESLKMLATMTPYNYARIVLSYEENHQNFACSNPFTLVNTALL

SEQ ID NO: 231423 - protein, 90 aa, Glycine max
  Clone ID: PAT_MRT3847_50998C.1.pep
KKEAEVIEENKEVEVTEQNNEIEVTEEKKEAEVIQEKKELEVTEDKNEIEVAEEKKVAEVTQQKKEGEVTEQTKEVEVTEEKKEPEVILE

SEQ ID NO: 231424 - protein, 51 aa, Glycine max
  Clone ID: PAT_MRT3847_50999C.1.pep
FIVFVCTQVATTKMGAIHMEEKDGLPATTELADPVSYEQTGSGRATQLDIY

SEQ ID NO: 231425 - protein, 154 aa, Glycine max
  unsure (1)..(154): unsure at all Xaa locations
  Clone ID: PAT_MRT3847_5099C.1.pep
SFKYDMNGAGSHSLEDFPDKEDQERPRMIDARLRQRMDAQYXEVQAQMETNLFKLALDDVETPKGCMSDLKIXQSKIALAKNTVGGTILRRDLLANHMTEGIYRASVDWQRTHRIKGMIKMVATVGIPENTGISQACAMNSSFRGRAQSDVYTI

SEQ ID NO: 231426 - protein, 49 aa, Glycine max
  Clone ID: PAT_MRT3847_509C.1.pep
QIQITAILLLFHLKQKLYRDKNEKKKKKRITSESYLALTSTADLPAMMT

SEQ ID NO: 231427 - protein, 304 aa, Glycine max
  Clone ID: PAT_MRT3847_50C.1.pep
SPVEDVEALHKAFKGWGTDEKTVIAILGHRNVHQRQQIRKVYEEIYQEDLIKRLESELSGDFERAVYRWMLEPADRDAVLANVAIKNGSKGYHVIVEIACVLSAEEVLAVKRAYHNRYKRSLEEDVATNTTGDIRQLLVGLVTAYRYGGDEINAKLAKTEADILHESIKEKKGNHEEAIRILTTRSKTQLLATFNRYRDDHGASITKKLLDNASTDFQKALHTAIRCINDHKKYYEKVLRNALKNVGTDEDALTRVVVSRAEKDLRDIKELYYKRNSVHLEDAVAKEISGDYKKFILTLLGKED

SEQ ID NO: 231428 - protein, 79 aa, Glycine max
  Clone ID: PAT_MRT3847_51000C.1.pep
INLCAVHRLLESIMFPLLVYLLNTLLTDIGLIETFNLLIDFFISSLNNYMFKLEITWIITPTFLFGTGIRGYDIPIYNL

SEQ ID NO: 231429 - protein, 124 aa, Glycine max
  Clone ID: PAT_MRT3847_51001C.1.pep
MAATPPPPSFSLHSNKPSHSHSLLRLSSNENRTFFSFNSNLRCEIKGFESHRGWTIERVSDMSKDSANSHITNPSSPFLSVSSVTSASQFPTKNAKRVVLFYCPETKVLAEKIAAQTDSIELRN

SEQ ID NO: 231430 - protein, 90 aa, Glycine max
  Clone ID: PAT_MRT3847_51002C.1.pep
YRQELRRRKMQMRISEEEGRLKRDEEEQKEMWKRKREHEEEWEGTREKRVSSWRDFMKGGKKNKKGEIRPPKLKTEDPNKSYVQRPVKRG

SEQ ID NO: 231431 - protein, 88 aa, Glycine max
  Clone ID: PAT_MRT3847_51003C.1.pep
ASALGRRCHAPRSRGRCSQRHGGGLMRLAVRRVSSVRTAICRVASREISRWFRSWREYKCGVVQGVNRALEGFGYVVKVLLKGGQVVR

SEQ ID NO: 231432 - protein, 62 aa, Glycine max
  unsure (1)..(62): unsure at all Xaa locations
  Clone ID: PAT_MRT3847_51004C.1.pep
KCAKESGDHEEEWEGXTEKRRVSSWRDFMKGEKKNKKGEIRPPKLKTEDPNKSYVQRPVKRG

SEQ ID NO: 231433 - protein, 77 aa, Glycine max
  Clone ID: PAT_MRT3847_51005C.1.pep
MGFWTLLEGFLLFANALAILNEDRFLARRGWTLAEMTGPQRNSLKGQVIGLIYACQFLRLPLILFNVITIIVKLFSG

SEQ ID NO: 231434 - protein, 77 aa, Glycine max; identical to SEQ ID NO: 231433
  Clone ID: PAT_MRT3847_51006C.1.pep

SEQ ID NO: 231435 - protein, 87 aa, Glycine max
  Clone ID: PAT_MRT3847_51007C.1.pep
TYLSSLSVCAHQRQPEAAMATARTVKDVSPHEFVKAYSSHLKRSGKMELPEWTDIVKTARFKELAPYDPDWYYVRAGEFLSFFFGCV

SEQ ID NO: 231436 - protein, 59 aa, Glycine max
  Clone ID: PAT_MRT3847_51008C.1.pep
TFPRRKNNQDKCGLQNTNSTVNTSSLVFNSVYLLKITHYILYRMEQCISPSTMENHTHA

SEQ ID NO: 231437 - protein, 105 aa, Glycine max
  unsure (1)..(105): unsure at all Xaa locations
  Clone ID: PAT_MRT3847_51009C.1.pep
FVLAPSACGGAXAGLCLVVRLSGLLFGVPAGFALAFPLACGFVGLLFGVGVVLGLWVVGALFLAAACVLCFVPLCSLLFWASVSLCAVLPHLLKVAFSLFSAGGL

SEQ ID NO: 231438 - protein, 366 aa, Glycine max
  unsure (1)..(366): unsure at all Xaa locations
  Clone ID: PAT_MRT3847_5100C.1.pep
NQPLRKALSNWFTAVSGKTKLVRAWHLRPSRFWKDGKWIEYPKVGAGDSSTHEGDTPHEKRPKLGSPAVEVKGKDRIPKGTNAVESANPGELRLLDLTENDRVFNIGXYSPTRPKSDAHRMVRTGLQKEGSRVIFGVPKPGKKRKFMEVSKHYVADGTSKINDGTDSVKLSNFLIPQGTGSRGWKNSSKNDTKEKLGADSRPTFKSGKSQSVLGRVVPPKENPLSNSRTNDLTSHAERIKDSSSHFKNVSQSENQVERALYSGSTGAGAGPILFSSLASSADAHPTKRASSSRASKGKLAPAHIKSGKGEMEKALNDNPMKSASDVVEPRRSNRRIQPTSRLLEGLQSSLIISKIPSVSHNRNTKS

SEQ ID NO: 231439 - protein, 81 aa, Glycine max
  Clone ID: PAT_MRT3847_51010C.1.pep
LSVPLITCNVYLFRHSEVRWQLHHPVSLTVSCPLVALIMLPGRFRACNRRSRTIRHPPPRRVCSLVRSCQRPLLPLLPEYC

SEQ ID NO: 231440 - protein, 74 aa, Glycine max
  Clone ID: PAT_MRT3847_51011C.1.pep
CSRGGRGITFFWLVALGTKQLIPNCQILLTVGQVTRPLLLEAETSLRTNCLRTQVPCSRGYVTEHPTYLDLNYP

SEQ ID NO: 231441 - protein, 82 aa, Glycine max
  Clone ID: PAT_MRT3847_51012C.1.pep
GKGKLIRVCLRNCILLLVGFIIMGWGKLNAKTVIHCIGVRYKKFQFIHIGSALRSFSPFTPNRTLKHIKVLILTMKFTLDGK

SEQ ID NO: 231442 - protein, 80 aa, Glycine max
  unsure (1)..(80): unsure at all Xaa locations
  Clone ID: PAT_MRT3847_51013C.1.pep
ENGAVHWNFXKFLXXTLXXSSKPLXLVVMXTLKTXFKFNCPKXSSFPPSYSPLPXLXXCXXXSPFTXSXVXFXFFXFSGV

SEQ ID NO: 231443 - protein, 51 aa, Glycine max
  Clone ID: PAT_MRT3847_51014C.1.pep
HILLEVNDFYIKKLYLCPQTMLKRIRTFCEKKIQKHGLNKLCVVLLLTNKK

SEQ ID NO: 231444 - protein, 39 aa, Glycine max
  Clone ID: PAT_MRT3847_51015C.1.pep
VGHKKLRRLLLKTHRYCKYTMLSYTVTVSIPCFDKLLHK

SEQ ID NO: 231445 - protein, 54 aa, Glycine max
  unsure (1)..(54): unsure at all Xaa locations
  Clone ID: PAT_MRT3847_51016C.1.pep
QCWSPEFHSRFIKALDVPRCSQTSTQNEIKELMTVDXLTTSEVQTHLQNKRLHT

SEQ ID NO: 231446 - protein, 68 aa, Glycine max
  Clone ID: PAT_MRT3847_51017C.1.pep
IGPNPVTLASKFSHMLCTYLRSLTAQLCIRVSIPVYFRLCFCQSGLVVVVSCLLTYVIILTIRKKHTS

SEQ ID NO: 231447 - protein, 173 aa, Glycine max
  unsure (1)..(173): unsure at all Xaa locations
  Clone ID: PAT_MRT3847_51018C.1.pep
MRNGQAGIHGGRNRWLDKAHTLTFETNGRAVLAGEHSPIDALIPTMVMDYASQVPVDRSVYDEEEGSGWSRVDFVVDEALKREIVDCEGRNKAIIEDSDAKELWFGEYGAEWIKKNAKVAPDAYIQQVLQLAWYRDQGYATATYETASTRLMQHGRTDVIRTLSXESRGFVRA

SEQ ID NO: 231448 - protein, 58 aa, Glycine max
  Clone ID: PAT_MRT3847_51019C.1.pep
WFDPTVSEFTTRIWQYSSNRSHTSHRKRSSAHQWSASVPLITTTTTTVSVVTESTIWQ

SEQ ID NO: 231449 - protein, 56 aa, Glycine max
  Clone ID: PAT_MRT3847_5101C.1.pep
FHGYKHLYALSLGDTSIFKIIFLKHGVLLYCPGWSPNSSAQVILLPWPPKVLRLQA

SEQ ID NO: 231450 - protein, 204 aa, Glycine max
  Clone ID: PAT_MRT3847_51020C.1.pep
MVSLQQLLQQQKGKKNSEELSRNSSRSSSNKKPGGWKAMPFILGNETFERLAAFGLFANFMVYLTREFHLDQVYASNILNIWSGITNFFPLIGAFISDAYVGRFWTIAFASFSSLLGMVVVTLTAWLPELHPPPCTPQQQALNQCVKASTPHLGALLTGLCLLSVGSAGIRPCSIPFGVDQFDPSTDEGKKGINSFFNWYYTTF

SEQ ID NO: 231451 - protein, 207 aa, Glycine max
  Clone ID: PAT_MRT3847_51021C.1.pep
EIIRKGGETSELYLIQPDSSVKPYRVYCDMNTENGGWTVIQNRQDGSVDFGRKWDPYKQGFGNVATNTDGKNYCGLPGEYWLGNDKISQLTRMGPTELLIEMEDWKGDKVKAHYGGFTVQNEANKYQISVNKYRGTAGNALMDGASQLMGEHRTMTIHNGMFFSTYDRDNDGWLTSDPRKQCSKEDGGGWWYNRCHAANPNGRYYWG

SEQ ID NO: 231452 - protein, 74 aa, Glycine max
  unsure (1)..(74): unsure at all Xaa locations
  Clone ID: PAT_MRT3847_51022C.1.pep
NTVPHXXLLLCAYXXQIQRXDRXXXXEXVXXXXEXEQSLQSLXGVSPGXGXGATMSDDEDDXAESXANLYEGSL

SEQ ID NO: 231453 - protein, 74 aa, Glycine max
  Clone ID: PAT_MRT3847_51023C.1.pep
LVSTGTNIVSSNTDPSSCTNHVIIIPFFSFCFHTVRKLSNKTNSPQFGLFREWDQICRPTFFIFIFKRERERAV

SEQ ID NO: 231454 - protein, 144 aa, Glycine max
  Clone ID: PAT_MRT3847_51024C.1.pep
METNPRTIRSLVSKLSSVSEAGRVDALSQLRLMSKQSPETRPLIADAGAIPFVAETLYCSSHPPQENAAATLLNLSITQKEPLMSTRGVLDAIAHVISHHNTTFSPAAVQSDVATIHSLLYYVDSYRPVVGSKRETGYSLIDIL

SEQ ID NO: 231455 - protein, 134 aa, Glycine max
  Clone ID: PAT_MRT3847_51025C.1.pep
MEDEPLRAQRPFLIRFFESLGQRYQSLLDAWTPYATGRWIFTAFFFIVYMTRVILLEGWYIVTYALGIYYLNLLIAFLTPKVDPALGDDDLDDGPSLPTSRDEEFRPFIRRLPEFKCWHSATRGTGIALFCTFF

SEQ ID NO: 231456 - protein, 75 aa, Glycine max
  Clone ID: PAT_MRT3847_51026C.1.pep
YLSLSLSLALSLSLVPFPLSCDLVMSKGNASDSLCVYLVVNSSAISLWFGWFVTQLLGLCLSVYYPTHILILASQ

SEQ ID NO: 231457 - protein, 78 aa, Glycine max
  Clone ID: PAT_MRT3847_51027C.1.pep
MLMMADQAQVLFSLESTDHAPVKRVGTHNGSFHCYEVHDCFMISVTNIYSSDEIGGFRNPEVEEDHDAAHDVGGVYDP

SEQ ID NO: 231458 - protein, 61 aa, Glycine max
  Clone ID: PAT_MRT3847_51028C.1.pep
LGSCKAYPPLCALTSTPSVLSGRATCAFHITYRHRFFFERPSVRAFCIFSQLSTWECITNL

SEQ ID NO: 231459 - protein, 60 aa, Glycine max
  Clone ID: PAT_MRT3847_51029C.1.pep
DLLIPYLYLCNIESVMTYTVYVIYSLGEISLLYNLKFHSFSFFRRVLLFDECICQTMYVL

SEQ ID NO: 231460 - protein, 65 aa, Glycine max
  Clone ID: PAT_MRT3847_5102C.1.pep
NIGLFSSTHLILSLLTVGTGSILNIYVIDDAFSIGRVRYLWINPSNVSTAHYAFSVQFIPGYTPN

SEQ ID NO: 231461 - protein, 163 aa, Glycine max
  Clone ID: PAT_MRT3847_51030C.1.pep
NLSSRNLVSWNMMMTGYVKHHQIQYAQYLFDQMPFKDTVSWNIMLSGFHRITNSDGLYRCFLQMGRAGVPPDDYTVSTLLRAVISTELDVLIPQLHARALHLALNLSVFVGSSLIRAYASLRDEEAFKQAFDDILRKDVTSRNASVSGYMEVGSMDDAHTPLI

SEQ ID NO: 231462 - protein, 383 aa, Glycine max
  Clone ID: PAT_MRT3847_51031C.1.pep
ASGIVSPCWRPSEGEISSRHGDASGRANGLLWYKDSGRHANGEFSMAVIQANNLLEDQSQLESGPLSLTEGNPQGTFVGIYDGHGGPEAARFVNDRLFNNIKKFTSENNGMSADVINKAFLATEEEFLSLVEKLWLHKPPIASVGSCCLIGIICSGELYIANAGDSRAVLGRLDEAMKEIKAIQLSVEHNASHASVREELHSLHPNDPQIVVMKHRVWRVKGLIQISRSIGDAYLKKAEFNKAPLLAKFRLSEPFDQPILKAEPAILVQKLCPQDQFLILASDGLWEQMSNQEAVDIVQSCPRNGAAKKLVKTALCEAAKKREMRYSDLRKIDRGVRRHFHDDITVIVLYLDSNFLSHANSRVPLVSIKGGGDSGYDIGIIDA

SEQ ID NO: 231463 - protein, 208 aa, Glycine max
  unsure (1)..(208): unsure at all Xaa locations
  Clone ID: PAT_MRT3847_51032C.1.pep
MRRIQLPEPPSPTSRSGTPDIFESGVHTFVRRAVVIGNGFAASENQSVGLVRALGLSDKHVLYRVTRPKAGINEWLQWLPISLHKKIDYIVRMIRGYSQLMLKSQEKKLMPSPSENGVSAGLLAVLEADVKEIVSFAHETYEKEGPLLVVACGRDTISTGSSIKRLASENVFXVQIPHPRLHLNRFDMGDYTXHDYYPPLTDTADAAK

SEQ ID NO: 231464 - protein, 121 aa, Glycine max
  unsure (1)..(121): unsure at all Xaa locations
  Clone ID: PAT_MRT3847_51033C.1.pep
GPXNSRGRPTRPGLTSILHAFFPILHHLCSNIPTIATVPTTNVSYRHNCTNNGISFTQHIQSSPSSFPAAKEALTLLNLSPARGEDLDLESCLSAMKVNKEKEKELLSVMCADDDCGGDET

SEQ ID NO: 231465 - protein, 207 aa, Glycine max
  Clone ID: PAT_MRT3847_51034C.1.pep
TRPQHVPSSSISSTPERRECQSPSLSPLSLSPKKKQTPDGESVPGLVVLEKTQSFGSSKSKNESGSPRLSNASSNGKSSAFSLPSPVIGMNLHHELDQSPTISDVSDRYRHSPLSSLHLSPTLLSSPERELNSQPQPPPSRKHWEIPDLLTPIGEAPNFSVPQRKQWEIPALSVPIAPSSRHAAFSRHKTPRIGYWVVTRPKKLLSC

SEQ ID NO: 231466 - protein, 238 aa, Glycine max
  unsure (1)..(238): unsure at all Xaa locations
  Clone ID: PAT_MRT3847_51035C.1.pep
RAASRKNWEIPDLLTPIGEAPNFSAPQRKQWEIPVLSVPIAPSSSVLAPPSSSSSPAXPSPLAVPRQRKQWEMPSPLTPVDQPVSRPPSLTPPSRPFVLQTPNTKVSPVELPPASSQNFEEGSEETSKPKLKPLHWDKVRASSDREMVWDQLRSSSFKLNEEMIETLFVVNTPNPKPKDTTPRSVLAPQNQEDRVLDPKKCQNIAILLRALNVTIEEVCEALLEGVTDTLGTELLESL

SEQ ID NO: 231467 - protein, 275 aa, Glycine max
  Clone ID: PAT_MRT3847_51036C.1.pep
NYSADEKTLRSPRVRRLFPREASTTSGAASRKARNTSSTSSEFLYLGTIVNSRGGVDELSDPRAAALNPRKMDSPELQPLPPLARQTSRLREESTATVEDDEEEFYSPRGSLNNGREGSAGAGSGSRRVFNAIAGENLVGRSSSESSTSSYSSSSSASPDRSHSISLSPPVSISPRKSLPKSPENTITHHSPPQEATAIRSSASSSILSSPSPVFGQHVPSSSISSTPERRECQSPSLSPLSLSPKKKQTPDGESVPGLGVLEKDASFGSSKSKT

SEQ ID NO: 231468 - protein, 44 aa, Glycine max
  Clone ID: PAT_MRT3847_51037C.1.pep
YVMSPKLLKSQDFISSIISHMLGLCFMDHLELQLLGDGMRFVVS

SEQ ID NO: 231469 - protein, 55 aa, Glycine max
  unsure (1)..(55): unsure at all Xaa locations
  Clone ID: PAT_MRT3847_51038C.1.pep
WCLPPFXXNTMAXXXHXRTSXQLQHVAVANNFLIMXPLEGXETXLCSRVAYPNXH

SEQ ID NO: 231470 - protein, 121 aa, Glycine max
  Clone ID: PAT_MRT3847_51039C.1.pep
GVLSGSGTVTNVTLRQPASPGAVVTLHGRFEILSLSGSFLPPPAPPAASGLAIYLAGGQGQVVGGSVVGPLVASGPVVIMAASFGNAAYERLPLEEEETPVAVAGNGGLGSPGIPGTQQQP

SEQ ID NO: 231471 - protein, 114 aa, Glycine max
  unsure (1)..(114): unsure at all Xaa locations
  Clone ID: PAT_MRT3847_5103C.1.pep
EKRSPDSDPSPKNPENEFLTTTPGNKQTLNDLTIHKILSQHASDEFYLGQTDGGDYWTSDAGPLQAFKTLAXNLDEIEKNLIENNNNETLINRYGPAKMPYTLHYPSSDDGLTF

SEQ ID NO: 231472 - protein, 75 aa, Glycine max
  unsure (1)..(75): unsure at all Xaa locations
  Clone ID: PAT_MRT3847_51040C.1.pep
ESTAQQSESQIQKLXALKPDNRIESKSGFIETWHPINKPXQCTRVTISICTLRLIEIYRPCYIIGPYDIYIQQGN

SEQ ID NO: 231473 - protein, 78 aa, Glycine max
  unsure (1)..(78): unsure at all Xaa locations
  Clone ID: PAT_MRT3847_51041C.1.pep
QNKRGKTRLAKYYVPLEDSQNLNGLYQGHLLDLYRDLKYTGFVVYRSHKIIYMRYAGLFFSLXGDITDNELAALECIH

SEQ ID NO: 231474 - protein, 75 aa, Glycine max
  Clone ID: PAT_MRT3847_51042C.1.pep
ERPWVQDKHVTVLMYIGMGGGRIHTDEEGPTSHQPHETGPHRHCRFISYKCRRNKHSFCGRVVVSAREFRQYVYR

SEQ ID NO: 231475 - protein, 36 aa, Glycine max
  Clone ID: PAT_MRT3847_51043C.1.pep
RFYYGVCVLDIVSTIPDICLVRNVMRENQAVRVAYR

SEQ ID NO: 231476 - protein, 307 aa, Glycine max
  Clone ID: PAT_MRT3847_51044C.1.pep
MSRALEHDYIGLAENPSMDGKNSSSLNLKETELRLGLPGCESPERKSGSALCLFGKELQNNNNNVCSLKAGAKRGFSDAIDTSSVTEGSQGASALFSPRGGNVGKPLIGLDTQTNTTIKEVGAVPQSAKPVQENNDQFAATNAHAIAPAAKAQVVGWPPIRSFRKNTMASNLTKNNDEAEGKSGFGCLYVKVSMDGAPYLRKVDLKTYNNYMELSSALEKMFSCFTIGQCNSPGLPGKDGLSESSLRDLLHGSEYVLTYEDKDGDWMLVGDVPWEMFTDSCRRLRIMKGSEAIGLAPRAMEKSRSQN

SEQ ID NO: 231477 - protein, 33 aa, Glycine max
  Clone ID: PAT_MRT3847_51045C.1.pep
SDSPLILILLKNCYYLQHQTVLLPPMITINTYT

SEQ ID NO: 231478 - protein, 232 aa, Glycine max
  Clone ID: PAT_MRT3847_51046C.1.pep
LRSVLVQCDTEIELSKLCRTILDDINGSDFTELRMTPYISQFSKHSLRSYSYLIGIGTGTGTYQEVFTTLNNSISKELATNVACDVSLPADNYPFWLAHTSEGHSVYFTVPEDCRLKGMILCVVYLLTPEIMASECLISVLIVNYTKCTIQIHKRDAVISFNDEDWQGIISHLGPGDEVEIFVTFGHRLVVKKTAVYLTYGESIDMEIEPSPEQKENALIRFIKKIVTCDFW

SEQ ID NO: 231479 - protein, 33 aa, Glycine max
  Clone ID: PAT_MRT3847_51047C.1.pep
TMLWVNSLSLAILSSPSFNSRDYFSSLVQLKPS

SEQ ID NO: 231480 - protein, 62 aa, Glycine max
  unsure (1)..(62): unsure at all Xaa locations
  Clone ID: PAT_MRT3847_51048C.1.pep
ARGESSLRDLLHGSEYVLTYEDKDGDWMLXMFTDSCRRLRIMKGSEAIGLAPRAMEKSRSQN

SEQ ID NO: 231481 - protein, 319 aa, Glycine max
  Clone ID: PAT_MRT3847_51049C.1.pep
MSRALEHDYIGLAENPSMDGSSDKLSSEDGKTSSLNLKETELRLGLPGCESPERKSGSALCLFGKELQNNNNVCSVVSPLKAGAKRGFSDVTEGSQGAALFSPRGANVGKPIIGLDTQTNTQQQANTTIKEVGAVLPQSTKPVQEKNDQVAATNGHASAPAAKAQVVGWPPIRSFRKNTMASNLTKNNDDDEGKSGFGCLYVKVSMDGAPYLRKVDLKTYNNYMELSSALEKMFSCFTIGQCNSPGLPGKDGLSESSLRDLLHGSEYVLTYEDKDGDWMLVGDVPWEMFTDSCRRLRIMKGSEAIGLAPRAMEKSRSQN

SEQ ID NO: 231482 - protein, 38 aa, Glycine max
  Clone ID: PAT_MRT3847_5104C.1.pep
VFFNLFYYFFFFFIFFFFFFFFFFFFFFFFFFFNTKIS

SEQ ID NO: 231483 - protein, 43 aa, Glycine max
  Clone ID: PAT_MRT3847_51050C.1.pep
IATLAASVAFMLVFLIPVTFVQGLTQLEKLQKMFPFLTGILKE

SEQ ID NO: 231484 - protein, 64 aa, Glycine max
  Clone ID: PAT_MRT3847_51051C.1.pep
QLERRDIPRGLRIRHYIRLLLSVTTRTKTLYYPIIEQTYAICQSLLTLNDDPHLREIITNQPSY

SEQ ID NO: 231485 - protein, 260 aa, Glycine max
  Clone ID: PAT_MRT3847_51052C.1.pep
MERSLSGSSEEEMSITKGPWTEEEDSVLFNYITVHGEGHWNSVARYTGLKRTGKSCRLRWLNYLRPNVRRGNITLEEQLLILDLHSRWGNRWSKIAEHLPGRTDNEIKNYWRTRVVKQAKQLKCEVNSKQFRDTLRFVWMPRMLERIQAQASSSSSSSSGQAHQTTLISNAQAHSDPCGVMTTNPSLLSEVSSSALDAHAPSLYDSSASYNLMGGGSSSSYSAEYCYYSDIAGNGFGGSDLWTDENICFLQQLLADHDLS

SEQ ID NO: 231486 - protein, 102 aa, Glycine max
  unsure (1)..(102): unsure at all Xaa locations
  Clone ID: PAT_MRT3847_51053C.1.pep
RFPLFTHTXNTGGCFLPHLFLPRFTFQFPPKATNQPTNNTMYPKVKVRHDDNYAELGLKAFLSLYLKPSASSVDGPESCIFGIHCQSTIVICACNYFKSSCY

SEQ ID NO: 231487 - protein, 60 aa, Glycine max
  Clone ID: PAT_MRT3847_51054C.1.pep
CNVLVDLHPCFLIRSSNVLVYVYSTFKKPVEGILFLEEIGYFWGTIWTLPNISHDLKFVK

SEQ ID NO: 231488 - protein, 138 aa, Glycine max
  unsure (1)..(138): unsure at all Xaa locations
  Clone ID: PAT_MRT3847_51055C.1.pep
MGTPVNIIVGSQVWVEDPEDAWIDGEVTQIKGKNATIIATNGKTVVAEISSIYPKDTEAPPAGVDDMTKLAYLHEPGVLHNLATRXSLNEIYTYTGNILIAVNPFRRLPHXYDIHMMEQYKGTAFGELSPHLFAVADT

SEQ ID NO: 231489 - protein, 533 aa, Glycine max
  unsure (1)..(533): unsure at all Xaa locations
  Clone ID: PAT_MRT3847_51056C.1.pep
MEPNEENGGSTSREEQEEALVALIEHRTHEVKNLRHRIAYYKTQLDEAEKRLQDSESKLARLRGQTVSSRSTLDDGIKTLKTERRSNSPIDRNEGSTKNRHQSKPELLIPSANPKISQPVLLPKSFSKASITSSSEATPGVHSSPITGGSSRGKSDKSHSNRLSSEQQKTEVKEKGTKRKFEQKEHKELIPLIRKSSSPSLVTCQTSNHISSQHKRKLRSIALCPVNDQLFVTSALDGVVXXWQVQAKGAGASRLSTTDCASQKQRRWPEDLAWHPEGNSLFSVYSADGGDSQVSITNLNKGPGGERVKFLEDKPHVKGIINGIVHASGENTCFVTGGSDHAVILWSEQDDEKWKPKALHRNLHSSAVMGVAGMQHKQMLLSVGADRRIFGYDVRAGRADFKHQVDSKCMSVLPNPSDFNLFMVQTGTHERQLRLFDIRLRNTELHAFGWKQESSDSQSALINQAWSPDGLYITSGSADPVIHIFDIRYTAHKPSQSIRVHQKRVFRAMWLQSIPLVISISSDLNIGLHKVYS

SEQ ID NO: 231490 - protein, 73 aa, Glycine max
  Clone ID: PAT_MRT3847_51057C.1.pep
LKKKSLKVTLLVSHRETGFCAALVVTSDAQYLYIYKVSFPLLCGYIELFTTLIQPTIFSYPTEKRNVKYQISF

SEQ ID NO: 231491 - protein, 111 aa, Glycine max
  Clone ID: PAT_MRT3847_51058C.1.pep
KTLLQGAQSVFPLGGSGRARLRLKVKLPKRKRGPQRKRGKNLQPFPSPFFKNFSLEVVFPPILDKGANINKLNGGGFFLLKPSLSEVSFLKMGKFKGPPDPLKFLLNLLTP

SEQ ID NO: 231492 - protein, 71 aa, Glycine max
  Clone ID: PAT_MRT3847_51059C.1.pep
LLQPLYQILIFLLQEQQSHIFNSTALLEHQIQCAMISCQPHYAFSQGPAHIKGINMRNCASWTKKTGTQLL

SEQ ID NO: 231493 - protein, 183 aa, Glycine max
  Clone ID: PAT_MRT3847_5105C.1.pep
MRDEVAEEQRIMDEIDSDDFFADFEPIKNSEAKKDSLSKQEKKGKPDSANCSSSLESLADGSEEDAGNMDIDEGYNSEECSEGTQEKMQVLPVKSSENSEKGIEEKDSKAPQENPKMLSTPNERNAGSKTIVTRNLSYSVERADLENLFKPCGEVVDVRLHTDAEGRFRGFGHVEFATAQAAQ

SEQ ID NO: 231494 - protein, 77 aa, Glycine max
  Clone ID: PAT_MRT3847_51060C.1.pep
TTGKIHRNAETREKRQETNPIIENNKSTPPGRKTKRRNGAPIRNWRAARSANQRLHRFDAQIAHIDKRNANNGKEGE

SEQ ID NO: 231495 - protein, 69 aa, Glycine max
  Clone ID: PAT_MRT3847_51061C.1.pep
RAFRGLFTFFSLFAGRLMAGGLVRTSPIFFPRPLKFKAALAEMDWARRITPNRNIGRRYKIILKGMIIL

SEQ ID NO: 231496 - protein, 67 aa, Glycine max
  Clone ID: PAT_MRT3847_51062C.1.pep
MVLCFVGIKKYLPLHTQKNYLLQLFGSFIKILWWFSLLFFLLYAIPINFNEFGFSFRQCCFFPNYSG

SEQ ID NO: 231497 - protein, 73 aa, Glycine max
  Clone ID: PAT_MRT3847_51063C.1.pep
ITTVAREATIGSLVMITMPYSLHSKASRAGPKGVRFKEVFYPYYSEEAYGVLTLAEPILEGPEGTDGEWGEED

SEQ ID NO: 231498 - protein, 436 aa, Glycine max
  Clone ID: PAT_MRT3847_51064C.1.pep
MASTTTTFSLSLRTNQQTPFPKPSFFSNNNHLHFNSNNWAWTSVSTARKSRICVTSSQVLDSLAAKSEPALPTTVEVDLGNRSYPIYIGSGLLNQPDYLQRHVHGKRVLVVTNKTVAPLYLDKVVDALTRGNPNVSVESVILPDGEQYKDMDTLMKVFDKAIELRLDRRCTFVALGGGVIGDMCGCAAALFLRGVNFIQIPTTVMAQVDSSVGGKTGINHRLGKNLIGAFYQPQCVLIDTDTLNTLPDRELASGLAEVIKYGLIRDAEFFEWQEKNMHLLLARDPSAMAYAIKRSCENKAEVVSLDEKESGLRATLNLGHTFGHAIETGVGYGQWLHGEAVAAGTVMAVDMSYRLGWIDDSLVKRVGDILKQAKLPSAPPETVTVDMFKSVMAVDKKVADGLLRLILLKGPLGNCVFTGDYDRKALDDTLRAFCKS

SEQ ID NO: 231499 - protein, 86 aa, Glycine max
  unsure (1)..(86): unsure at all Xaa locations
  Clone ID: PAT_MRT3847_51065C.1.pep
YWVNEDSTYTYFEEIPVDVAHADILNDPTFHWITYPEHIHRDLCGLTSASKXHHGLTWQXHLYHNARSFRWATSKRYNTLSLRRYR

SEQ ID NO: 231500 - protein, 43 aa, Glycine max
  unsure (1)..(43): unsure at all Xaa locations
  Clone ID: PAT_MRT3847_51066C.1.pep
FSHPKXTITYDFHRPIINILCLYLFIFKIVGLKKMLTKNRIFE

SEQ ID NO: 231501 - protein, 67 aa, Glycine max
  Clone ID: PAT_MRT3847_51067C.1.pep
RSLFPKSKSLKVYPRFLNNLFKKALAKQALFLSNNSKKKRNRGGSILQKPLWIPRREKMKGSKKEAL

SEQ ID NO: 231502 - protein, 52 aa, Glycine max
  Clone ID: PAT_MRT3847_51068C.1.pep
LGDGTTFAALVDDAEDFGVLRVQDVDEHGTSWTPKDRWYCISQHDRAAVRAY

SEQ ID NO: 231503 - protein, 78 aa, Glycine max
  Clone ID: PAT_MRT3847_51069C.1.pep
SHSFRPGVSILRCHAKAPVVPRGSPVFKTLSKRRPIREIRIRGVCRIGPREDHWFRGQGKHGPVRIIQLGVAYRNALC

SEQ ID NO: 231504 - protein, 91 aa, Glycine max
  Clone ID: PAT_MRT3847_5106C.1.pep
KENRISELYHVELSLPSSLYVKQFLLSLFFYHHLKCLTRSSTSPIDVQIPSLVMPLVYYIIIGIHSPFSNPHRPFQIFSDLSRISGLFQLR

SEQ ID NO: 231505 - protein, 62 aa, Glycine max
  unsure (1)..(62): unsure at all Xaa locations
  Clone ID: PAT_MRT3847_51070C.1.pep
HIPLVLAIKVLSIDMIQYEDRYALASSYYYTDTIERLYXXMHHMMVQALTFSSAEHGHVLDL

SEQ ID NO: 231506 - protein, 76 aa, Glycine max
  Clone ID: PAT_MRT3847_51071C.1.pep
YGPIYKVNRIFFWWATAGGNTIESFCFFLQQIINWGKSGKEKSIVLFQVSCCSTMGKGSNNLYISLLYAIIVPPPI

SEQ ID NO: 231507 - protein, 72 aa, Glycine max
  Clone ID: PAT_MRT3847_51072C.1.pep
TAGAVYKPSIQMDTWHIEWPCQILHHKFIFMTESDVRSELPRYQMLHMEQTRCLRLYYHDMTQDPISGCCWI

SEQ ID NO: 231508 - protein, 74 aa, Glycine max
  Clone ID: PAT_MRT3847_51073C.1.pep
KSHRCLMLVFVLLAKEEETGDSGGSAATQCKRKIKATAELHGGGREVVSVVANYDTTASMENSLVHIFKKSRSK

SEQ ID NO: 231509 - protein, 186 aa, Glycine max
  unsure (1)..(186): unsure at all Xaa locations
  Clone ID: PAT_MRT3847_51074C.1.pep
MEDYNFSVGQEFPDVKAFRNAIKEAAIAQHFELRTIKSDLIRYFAKCASDGCPWRIRAVKLPNAPTFTIRSIDGTHTCGRNANNGHHQASVDWIVSFIEERLRDNINYKPKDILHDIHKQYGITIPYKQAWRAKEKXLAAIYGSSEXGYYLLPSYCEQIKKTILXSVAEVFTGADYPFQRFFVSFM

SEQ ID NO: 231510 - protein, 575 aa, Glycine max
  Clone ID: PAT_MRT3847_51075C.1.pep
GRRFTVILQRVNLIIPIRVHLGCGLFVQVPSKGASSPSDSRSCVSSIGDASGSVKEVDVDHEYLSTDQGVPYPAGGYYGYYYPGYGGFYGESDNQAYYVGADAVDLQYPVMQADNGSYVYLVPGFQTGYPSYFPLSPAGVEGQYVGHNVYPPGSIFQQPIGSPGYYPASLSYGELQPSTYSWYSPLMTQDGLQGHGYNELAGKPNGRSNLSSQNHTGGVVSKSVPPPNSAEGKGLTPLLEVSSTHVKRNQPKQTNKAPVSVLHSPVVKFPTYNQGKSEFLYPNNLLNVKANTKGWVSTEKLKQRNKVNDSLNEQNQGPRTANAKGALMSGGNSVRGSALVGSGNVTNKIRADQYNLPDFPTKYDHALFFVIKSYSEDDIHKSIKYNVWASTPNGNKRLDGAFQDAQKRMEEKGCKCPVFLFFSVNASGQFCGVAEMTGRVDFNKSMDFWQQDKWNGYFPVKWHIIKDVPNPQLRHIILENNDHKPVTSSRDTQEVSFPQGVEMLNIFKNYVARTSILDDFEFYESRQKVMQEKKTRQSMPHINVQQIEELTILGSLDLSSVKNMEDPKVVKKVND

SEQ ID NO: 231511 - protein, 67 aa, Glycine max
  Clone ID: PAT_MRT3847_51076C.1.pep
WFDIVRGEGLIQEQHTKWRYVEPLTHRKQPKTSADLVANSRVYRVCIEFTENLLKSELHTSQLTEGK

SEQ ID NO: 231512 - protein, 568 aa, Glycine max
  Clone ID: PAT_MRT3847_51077C.1.pep
MRKKLHGDSSTVELNNSNSVPSKGASSPSDARSCVSSIGDASGSVKEVDVDHEYLSTDQGVPYPAGGYYGYYYPGYGGFYGESDNQGYYVGADAVDLQYPVMQADNGSYVYLVPGFQTGYPSYYHPLSPAGIEGQYVGHNVYPPGSIYQQPIGSPGYYPASLSYGELQPTTYSWDSPLINQDGLQGHGYNELAGKPNGRSNLSSQSHTSGVVSKSAPPPNSAEGKGLTSLLEVSSTHVKHNQPKQTNKAPVSVLHSPVAKFPAYNQGKSGFLYPNNLLNVKANTKGWVSTEKLKQRNKVNDSLNEHNQGPRTANAKGALMSGGNSVRGSAPGGSGNVTNKIRTDQYNLPDFPTKYDHALFFVIKSYSEDDIHKSIKYNVWASTPNGNKRLDGAFQDAQKRMEEKGCKCPVFLFFSVNASGQFCGVAEMTGRVDFNKSMDFWQQDKWNGYFSVKWHIIKDVPNPQLRHIILENNDHKPVTNSRDTQEVSFPQGVEMLNIFKNYVARTSILDDFEFYESRQKVLQEKKTRQSMPHTSVQQIEELTTTLGSVDLSSVKNMEDPKVVERVND

SEQ ID NO: 231513 - protein, 111 aa, Glycine max
  Clone ID: PAT_MRT3847_51078C.1.pep
GYHIYISISSLSGSKNLKLLGNSYPTAGAYYQNADQTATNTLISYIPENRCTPIMLRLTWHSAATYDVSSKTGGPLPTIKYPSELSHGANNCLDIPVRILEPLKAHFPIMS

SEQ ID NO: 231514 - protein, 496 aa, Glycine max
  unsure (1)..(496): unsure at all Xaa locations
  Clone ID: PAT_MRT3847_51079C.1.pep
MKLKTWLASVLLLTVAMLTATLGAFVGVNIGTDVSDLPSASNIVDILQANQITHVRLYDANAHLLQALSNTSIEVIVGVTNEEVLRIGESPSAAATWINKNVVAYVPSTNITGIAVGSEVLSTIPNVAPVLVPAMNSLHKALVAANLNFRVKVSTPQSMDIIPKPFPPSTATFNSSWNSTIYQLLQFLKNTNSSYMLNAYPYYGYTKGDGIFPIEYALFRPLPSVKQIVDPNTLFHYNSMFDAMVDATYYSIEALNFNNIPIVVTETGWPSFGGANEPDATEENAELYINNMIQRVMNDSGPPSQPNIAINTYIYELFNEDKRNGPVSEKNWGIFYTNGSTVYPLSFGASDQITXNSSGVFCVAKDGADTDKLQSGLSWACGQGGANCAAIQPGQPCYLPNNVKSHASYAYNDYYQRKHSSGGTCDFDGTATITTKDPSSSSCIFAGSSNSSTGGLSLPPTALGPSGPFGASMNLQVSSLKYLISAVGVFLALAVL

SEQ ID NO: 231515 - protein, 145 aa, Glycine max
  Clone ID: PAT_MRT3847_5107C.1.pep
SFPGRVVPGCLQPAGGSDWQGIWLRSGLMRAGDCRLFQIWILAACGWPAVELHGIRFGGHSWAGPLVVQLVCRPCRTTFWWTMWLAGHCLLGSWQWCCPVSSVASAEGRGPGRSVQCTASAGGGAGVLRWAGFTPCFPRVRQHEN

SEQ ID NO: 231516 - protein, 85 aa, Glycine max
  Clone ID: PAT_MRT3847_51080C.1.pep
ETWALRWSSITYQTRAVYRKHLKRKTVFNPAPTLPIDSLYPPFDDQTLDKQRLESNTVTIQTQPAHCLRALAERCFCTPLLKLLV

SEQ ID NO: 231517 - protein, 68 aa, Glycine max
  Clone ID: PAT_MRT3847_51081C.1.pep
HQQIYIPRMPILKREQCNKDHHIIVSLSKLTTASPLSSYTFHSLLRLQNAYQHNSIKITRYLFFHSLF

SEQ ID NO: 231518 - protein, 75 aa, Glycine max
  unsure (1)..(75): unsure at all Xaa locations
  Clone ID: PAT_MRT3847_51082C.1.pep
AKCLVLDWKLGQAFCPPKKGGVFPKPFGWNSKGVNLAKTPIQIFPKKSWMGYSKXXKKKKXXDRARGSEPTYACM

SEQ ID NO: 231519 - protein, 51 aa, Glycine max
  Clone ID: PAT_MRT3847_51083C.1.pep
FNNSFCFGVLSQVFCFGFSTCPSFEENPVPGMRNPFHRKIPLKKKTLEEKP

SEQ ID NO: 231520 - protein, 36 aa, Glycine max
  Clone ID: PAT_MRT3847_51084C.1.pep
MLVFLPLFCGLMPFASLGQWKEHFTLKGSDFNGSEW

SEQ ID NO: 231521 - protein, 68 aa, Glycine max
  Clone ID: PAT_MRT3847_51085C.1.pep
FQRRSYRNSQTWFLFTQHKLQPKPTDASFRFECPHHRPPLGCYSSPVRLSPLRRRLTPGRTRGSTREF

SEQ ID NO: 231522 - protein, 189 aa, Glycine max
  unsure (1)..(189): unsure at all Xaa locations
  Clone ID: PAT_MRT3847_51086C.1.pep
PRGPTSYPWLLPMLNQCNIPIFDEAFIDCAASNSCFSMPGQSLGHVIASKLVGAKQAGYFIEPTNLSTSNCDALFSLFSDEFFSNDFYYAQEEIEVLRSLPIYKTVVGSYTKLQGQDQCMIPSNSFLKPYDEHCLSYATDSNEXHFFELLGVLELHDQQILVRFGLPGFEGKPQNEQEEILIYIFKNWH

SEQ ID NO: 231523 - protein, 95 aa, Glycine max
  unsure (1)..(95): unsure at all Xaa locations
  Clone ID: PAT_MRT3847_51087C.1.pep
CICSLNSSSSAISIATLYKLSKLSTLWMCTSGLISGGIDFGEIFDDVEDSVEDVIVGVMIVTVCYIGTPWLHXWSGLECHTNFAEHDCHQCHFSL

SEQ ID NO: 231524 - protein, 87 aa, Glycine max
  Clone ID: PAT_MRT3847_51088C.1.pep
AHFFSHSYFVVWCWWCAVDILWPLQSLSTAVYLTSTLVVLSRLSFFPSIAKRYYSYRLTLLHLFFFLLFIMNIHPPPPPKQVVLLHM

SEQ ID NO: 231525 - protein, 74 aa, Glycine max
  Clone ID: PAT_MRT3847_51089C.1.pep
SHSIILDMLTRELSINQHTIYPSHYQQILSLDNHHHQTDLYIHQDQLHDHIPTCPCPNISYINCGSLPVQKPTT

SEQ ID NO: 231526 - protein, 64 aa, Glycine max
  Clone ID: PAT_MRT3847_5108C.1.pep
TLCYLIYDFVPDLNFLCLLSKFIGQIQDQAGRHLGLFAPTLLSGIGHRGWTILYLSFVSLSNCH

SEQ ID NO: 231527 - protein, 44 aa, Glycine max
  Clone ID: PAT_MRT3847_51090C.1.pep
FNCASPSIIRVSRSFQGLGLQISENLQSYPLAMLACKSPRIIIW

SEQ ID NO: 231528 - protein, 49 aa, Glycine max
  Clone ID: PAT_MRT3847_51091C.1.pep
GTHDVLPRSRRFASPGHATALIATDDGMVKHVWDRLVRVHYQQDWGPIG

SEQ ID NO: 231529 - protein, 355 aa, Glycine max
  Clone ID: PAT_MRT3847_51092C.1.pep
MGSSQTPSLKKRFYQVKVKSLGITSLKELGQLMGQLQRQAFCKAYGKIWDLAMAEVSTEAIASLAQYYDQPLRCFTFWGLPAITHGRGEWAPFIDILTLLIFGGVLFPNVDGLVDLAAIDAFLAYHDHKESPIVAMLADLYDTFDRRCEKSSTRIVCCTLALYVWLVSHLFCQEVRHACPLESHRSCTEKGGANWDRLLANKEGAFVNWFPRWKEGRTGVLILCGGFPNVPLMGTMGCISYNPVLAIRQLGYPMRGAPLEEELAPVISRGFNKTNVETLHKVRKAWEVVQKKDKELRGSNNGPIGGYRNWLKAHVQGLDWLLSLRTAKREEFEAPEEDEEMQALRAELEQAQTVK

SEQ ID NO: 231530 - protein, 71 aa, Glycine max
  Clone ID: PAT_MRT3847_51093C.1.pep
PGFVYVYFMGWIMTISDEYLSEGDNRVKSYSFHIIIKLQPFLGSVIWIIRFRKIGVNSGTHVASRIRGSLG

SEQ ID NO: 231531 - protein, 72 aa, Glycine max
  Clone ID: PAT_MRT3847_51094C.1.pep
QFLQLHKRKSTQHNCISKLQQISMRITCICFGFNIPTIPQNMSKHNGAYRWPHQIMMLELNKIIQQNWPHQL

SEQ ID NO: 231532 - protein, 91 aa, Glycine max
  Clone ID: PAT_MRT3847_51095C.1.pep
TIEHQNLTSYLQLHKRKSTQHNCITKLQQISMRITCICFGFNIPTIPQNMSKHNGAYRWSHQIMMLATKQDYTTKLATSTIESRYERLRRR

SEQ ID NO: 231533 - protein, 58 aa, Glycine max
  Clone ID: PAT_MRT3847_51096C.1.pep
PDRERETRGQIKGAALSGVSHRLFGGRGDMSPNRGKSERRTAKDVNQNSSILLGMGPP

SEQ ID NO: 231534 - protein, 70 aa, Glycine max
  Clone ID: PAT_MRT3847_51097C.1.pep
AGSFSPAAEAPTTVPATDCKTVPLGFIRRSHRIGYCGLFVFYLVDVWIQREGGAPLMGALPWIKSLGTHP

SEQ ID NO: 231535 - protein, 53 aa, Glycine max
  Clone ID: PAT_MRT3847_51098C.1.pep
FYIFILQQFFMTSFQIYNGLDGNSKRVFIKYKKKKDDWETRNNLLITFFNGID

SEQ ID NO: 231536 - protein, 107 aa, Glycine max
  unsure (1)..(107): unsure at all Xaa locations
  Clone ID: PAT_MRT3847_51099C.1.pep
CFKKINIKQLITKLVCDLTALTERQTLSLYKLYIQKRKSVEKAAKDXTARAKQSISNLLSSLCFFSFLSIFLFMNSKYLLLPSSFPSLSNVPLLPSNARFKIPKLSL

SEQ ID NO: 231537 - protein, 49 aa, Glycine max
  Clone ID: PAT_MRT3847_5109C.1.pep
RGRFGCEALTSARSFGLALLSIASANVFVEERFDDGWEDRGVKSDWERD

SEQ ID NO: 231538 - protein, 113 aa, Glycine max
  Clone ID: PAT_MRT3847_510C.1.pep
LHQDLEREQMRMAILRQEQTFRQQVHELHRLYHVQKQLMKQMQIAKLNQAQAIAANAETKPKFEITFAENSTNHHHHHQFYSFQSSKIMSPPAAAAAAADQEEEEECDLQLTL

SEQ ID NO: 231539 - protein, 52 aa, Glycine max
  Clone ID: PAT_MRT3847_51100C.1.pep
ARGNIPQTSTSAARHVNSYTLETTMNCWHVYSLSNPESLSAPELSCSRAYSA

SEQ ID NO: 231540 - protein, 152 aa, Glycine max
  Clone ID: PAT_MRT3847_51101C.1.pep
GWVFFFFFFFFFFFWFLTINVQYSVQNFIKLKIKTRNSRIQNMEALSMHSYSIVDTITTVQLPVTSKFTNLFSSPFESALPCVHFKSVRIYRMKIKKKIVTLALNRTFNLRSLVRSESASRESSNCIVLYCNVYTIYMYVYIFIWMHPIIPI

SEQ ID NO: 231541 - protein, 151 aa, Glycine max
  Clone ID: PAT_MRT3847_51102C.1.pep
FAEADTFFCFVELLSRFQDNFCQQLDNSIVGIRSTITRLSQLLKEHDEELWRHLEVTTKVNPQFYAFRWIILLLTQEFNFADILHIWDVILSDPEGPQETLLRICCAMLILVRRRLLAGDFTSNLKMLQSYPSTNISHLLQVADKLHVQSV

SEQ ID NO: 231542 - protein, 95 aa, Glycine max
  Clone ID: PAT_MRT3847_51103C.1.pep
MVEKKRRCYTNKNGRKNFVNWLLMGIPGLSNQNNGQQRLCITEPISLAGPTEDDVIKTRELEKYLQGVGLYESHEEALGREEVLGRLDQVEFDCV

SEQ ID NO: 231543 - protein, 70 aa, Glycine max
  Clone ID: PAT_MRT3847_51104C.1.pep
INCVVSLSLCNIHQFTCIIFDCFLYQQLFSFPYMPILAREGGKTMLCSPSIFLFFGFWGHFSFSSFHPMS

SEQ ID NO: 231544 - protein, 56 aa, Glycine max
  Clone ID: PAT_MRT3847_51105C.1.pep
KIYYSNFNNNNNKEHFTGVGLIQKSPSSGIFDQITPGKQKQEISLNSQKYSLVNLL

SEQ ID NO: 231545 - protein, 529 aa, Glycine max
  Clone ID: PAT_MRT3847_51106C.1.pep
MGEKSRSKGGCCGWFIAFIILALVVGAIVFTVKKKFSHSGSDKPAPVPGPPGAVDQKYSTALKTAMQFFDIQKSGKLVDNKISWRGNSALKDGSQAKLDLTKGMYDAGDNMKFGFPMAFTATVLSWSILEYGDQMDHVGQLDAAQDSLKWITDYLINAHPSENVLYIQVGDPVADHKCWEKPEAITEERPLIQVNASCPGSDVAAETAAAMASASLVFKKTDPTYSSTLLKHAKQLFRFADRNRGSYSENIPEVQRYYNSTGYGDELLWAASWLYHATGDDSYLQFVTGQDGEDYAQWGSPTWFSWDNKLAGTQVLLSRLSFFKAKDISNSYSSGLHSYRKTAEAVMCGLLPDSPTATKSRTDDGLIWVSQWNSLQHPVASAFLAAVYSDYMLTSQTPKLKCGSDSFTPSDLRDFAKSQADYVLGKNPMHMSFLVGYGDKYPQFVHHRGASIPADAKTGCKDGFQWLESSDPNPNVATGALVGGPFLNETFIDSRNNSMQTEPSTYNSAVIVGLLSSLVTTSSAVQSFT

SEQ ID NO: 231546 - protein, 73 aa, Glycine max
  unsure (1)..(73): unsure at all Xaa locations
  Clone ID: PAT_MRT3847_51107C.1.pep
MGEKSRSKGGCCGWFIAFVILALVVGAIVFTVKKKFSHSGSDKPAPGPGPPGAVDQKYSTGLXTAMQFFDVQK

SEQ ID NO: 231547 - protein, 195 aa, Glycine max
  Clone ID: PAT_MRT3847_51108C.1.pep
MATEHEKQLIVAKPNPNTKSPRRSSTSSSLAIIDGIFARKSFFYDRLPSQPLRLTVLKLDGSCFHIQVSKTATVAELKDAVEAVFSHVPHKGPAKISWAHVWGQFCLCYDGQKLVTEKDNLRNYGIKDGDQLRFIRHVTNNCCVQRKRLKKRVVYLKQHRRSSQVDGYQPKGNCDDDEIGSDDEATDNGEDQAPY

SEQ ID NO: 231548 - protein, 44 aa, Glycine max
  Clone ID: PAT_MRT3847_51109C.1.pep
SSFAQLVIVLGCKASGAKVPGVGIRLPASKSVSVRGGTRALDVR

SEQ ID NO: 231549 - protein, 85 aa, Glycine max
  Clone ID: PAT_MRT3847_5110C.1.pep
GGFFPSSNGLVFPFFSQFRHGNSTLFKRVPQLALLVIGLGSIASGPELPFGLLGPTPGSSGPGPSSLKKFFSLFPLFSFSAPPPS

SEQ ID NO: 231550 - protein, 50 aa, Glycine max
  Clone ID: PAT_MRT3847_51110C.1.pep
AKIQDKKGIPPDQKRLIFFGKKLKKGRTPPGFKIQKETTLPLVPGSRGGF

SEQ ID NO: 231551 - protein, 195 aa, Glycine max
  Clone ID: PAT_MRT3847_51111C.1.pep
GTGAGSILIDNINISSIGLHDLRSHLSIIPQDPTLFEGTIRGNLDPLDEHSDKEIWEALDKSQLGDIIRETERKLDMPVLENGDNWSVGQCQLVSLGRALLKQSKILVLDEATASVDTATDNLIQKIIRREFRDCTVCTIAHRIPTVIDSDLVLVLSDGRVAEFDSPSRLLEDKSSMFLKLVTEYSSRSSGIPDI

SEQ ID NO: 231552 - protein, 68 aa, Glycine max
  unsure (1)..(68): unsure at all Xaa locations
  Clone ID: PAT_MRT3847_51112C.1.pep
MSNTCGNCDCADTTSCTNGNSYGVIVXTDKSYIETVVMDVPAAXHDGKCKCGTNCTCNDCTCGYYRIC

SEQ ID NO: 231553 - protein, 111 aa, Glycine max
  unsure (1)..(111): unsure at all Xaa locations
  Clone ID: PAT_MRT3847_51113C.1.pep
SAVLDFAYAKEWSEQPWPYISIFDKDRVSNIIEPSSMVYESLSKXAWDMSIVTDACLTSXPSIRHLYRHVVLALMNPLLNGREEHTRSAAWRSCSARKSWSPPLFGSSKHS

SEQ ID NO: 231554 - protein, 80 aa, Glycine max
  Clone ID: PAT_MRT3847_51114C.1.pep
PEVSPVLSVLSLSSPIDMPAGLDMVRHVQLLASVLPSLGLNSLMAFHRCSSSLYTPCAVSGNTRSVHNEAHSGRFSTCLA

SEQ ID NO: 231555 - protein, 57 aa, Glycine max
  Clone ID: PAT_MRT3847_51115C.1.pep
FVLVKGPPLCMPFIEGDVFLSSQYRCLTRKASFMEPKCVQADPSRKFFLHGHRGPWH

SEQ ID NO: 231556 - protein, 143 aa, Glycine max
  Clone ID: PAT_MRT3847_51116C.1.pep
PLISSVPIMVIEGNHEIEEQAENQTFVAYSSRFAFPSEESGSSSTFYYSFNAGGIHFIMLGAYISYDKSGDQYKWLERDLASVDREVTPWLIATWHAPWYSTYKAHYREAECMRVEMEDLLYKYGVDIVFNGHVHAYERQTGY

SEQ ID NO: 231557 - protein, 56 aa, Glycine max
  Clone ID: PAT_MRT3847_51117C.1.pep
IHTKVTIILQTIIVYPGLSKKEPYLPYPERSLNSLATFHKSFFFSNKSILCMHKIR

SEQ ID NO: 231558 - protein, 154 aa, Glycine max
  unsure (1)..(154): unsure at all Xaa locations
  Clone ID: PAT_MRT3847_51118C.1.pep
GGIPQFIGKLRKLKSLSLSGCGLTGSIPYSFSFLKNLTAXSLGNNSLSGQVPPNLGSLPSLDQQNISHNKLSGVLELPGDFIQKLGKMLDLRGNSELCISDQSKKKNLSSYLEIPSCLNTRQRNDNNYFAGTVATQVHVHHGQKIYMSSYLPWF

SEQ ID NO: 231559 - protein, 145 aa, Glycine max
  unsure (1)..(145): unsure at all Xaa locations
  Clone ID: PAT_MRT3847_51119C.1.pep
YEKRRFGANPFFPPTPVGNGNQDPGLVMAFVHPXNTRQSRLQILKALHLKLEPPGTVPSXRVPYGSHGTFVEAHYSPPGLFQLVGLTVKHISGALHVGPFAPFPIRKNYLRFRESACRLWRERYLVSDSMPPVFCLKKEFAFCLP

SEQ ID NO: 231560 - protein, 43 aa, Glycine max
  Clone ID: PAT_MRT3847_5111C.1.pep
LNVRTHSYYHENSRAILIQIEEKVQARITHKRCIKSMLLRRPT

SEQ ID NO: 231561 - protein, 126 aa, Glycine max
  unsure (1)..(126): unsure at all Xaa locations
  Clone ID: PAT_MRT3847_51120C.1.pep
AVEKTTTRGGIYRKMSCYAHAGHGRFGKHRMHPVGRGNAVGMHHHRILFDKYHPGFFGKVGMRYFHKLTHQSYTYPDSSXHLTSMGFLLLQEAQDKAIVDMAPLLDVTQYXVTFKVLVKGVLSQNQ

SEQ ID NO: 231562 - protein, 50 aa, Glycine max
  Clone ID: PAT_MRT3847_51121C.1.pep
HMFYLVSTLFIPGSELAKGLSTNSDCLDLGGKMILKLVYKLHETHFDIRT

SEQ ID NO: 231563 - protein, 61 aa, Glycine max
  Clone ID: PAT_MRT3847_51122C.1.pep
ALFTFFYQNKGYRLTIFGYMVLPPKGLFLPAMLHGSCLNKLTIVLIFTLELILFKFLLLSF

SEQ ID NO: 231564 - protein, 177 aa, Glycine max
  Clone ID: PAT_MRT3847_51123C.1.pep
KTIVLKRKRKRLMPEIRSTSPESVECSNSSGPNFPSPLNGVIIFVVTTFGGYLQVQFGSKNTSPFDEHYIIMWAVSVALSLYAMMLIAEFTVELHKHSFLSIIKRFTVLMGALVAVLLTIIILPLFGYFKLLLWTICFVKATFVSFEEICNCFWKGLCQTIDMVSSYFGREHASLPV

SEQ ID NO: 231565 - protein, 40 aa, Glycine max
  unsure (1)..(40): unsure at all Xaa locations
  Clone ID: PAT_MRT3847_51124C.1.pep
DPSKNSLNSCTSSIQSMSKSINXSLDEKYSSYKDPHKLAL

SEQ ID NO: 231566 - protein, 76 aa, Glycine max
  Clone ID: PAT_MRT3847_51125C.1.pep
YYSTQILFEFILSLLPFLKLVVSSLPFTIIHVNATQGNKLTRILNIDSLSRIKYLPKQKLIPSIGSPGKHQCVQTA

SEQ ID NO: 231567 - protein, 128 aa, Glycine max
  Clone ID: PAT_MRT3847_51126C.1.pep
TSLHYASHYCNIDCLSDILSAAHATPDGDICGSPIYADNADPNRTAHMHYVALDIMPGLCSCPLRPQASRTTISWWICFLCKHATSYVCTGNLHRLSATIDCFEKQFTNMEVHSENIISTLAGSHSLC

SEQ ID NO: 231568 - protein, 51 aa, Glycine max
  Clone ID: PAT_MRT3847_51127C.1.pep
KNNAIHQNTKLRQELDLLSRETTKSRGGVSMVIVILIGLLGIIMGYLMKKN

SEQ ID NO: 231569 - protein, 61 aa, Glycine max
  Clone ID: PAT_MRT3847_51128C.1.pep
NQRSRERGFPLSFAVKMKNEMCINFYMKRLMHINRFKVSCIYDEHISTYMLATCALVCVAN

SEQ ID NO: 231570 - protein, 54 aa, Glycine max
  Clone ID: PAT_MRT3847_51129C.1.pep
PLFCAIFPAKANTRSTLGTNKYITGQTPAQIQSNSSRRSAYSKWIPQQQNKIIY

SEQ ID NO: 231571 - protein, 181 aa, Glycine max
  Clone ID: PAT_MRT3847_5112C.1.pep
MGNIFANLFKGLFGKKEMRILMVGLDAAGKTTILYKLKLGEIVTTIPTIGFNVETVEYKNISFTVWDVGGQDKIRPLWRHYFQNTQGLIFVVDSNDRERVNEAREELMRMLAEDELRDAVLLVFANKQDLPNAMNAAEITDKLGLHSLRHRNWYIQATCATSGDGLYEGLDWLSNQLRNQK

SEQ ID NO: 231572 - protein, 58 aa, Glycine max
  Clone ID: PAT_MRT3847_51130C.1.pep
ALNLQSMHDNRSSHFPSFHQHKHSLLKPFKRYKLVKKVCQCLYKACNHRVVPPLPLWE

SEQ ID NO: 231573 - protein, 53 aa, Glycine max
  Clone ID: PAT_MRT3847_51131C.1.pep
CYRCFCCLPDFTSGVQYLDTRGELFLNLKVCWSIINNIIRLIDFLIIISICAV

SEQ ID NO: 231574 - protein, 88 aa, Glycine max
  unsure (1)..(88): unsure at all Xaa locations
  Clone ID: PAT_MRT3847_51132C.1.pep
MTKGTSSLXKACNKTHTCXRRCGSKAYHLQKSTCGKCGYPAKRKRKYNWSAKAKRRNTTGTGRMRHLKIVYRRFRHXFREGTTPKPKR

SEQ ID NO: 231575 - protein, 73 aa, Glycine max
  Clone ID: PAT_MRT3847_51133C.1.pep
LGTHIILGRYHHVLRRATWLALQKTPKTHERIINMLALVMKTGTSTLNDKTALTCMKNFTGLLIMITHNCPPL

SEQ ID NO: 231576 - protein, 106 aa, Glycine max
  unsure (1)..(106): unsure at all Xaa locations
  Clone ID: PAT_MRT3847_51134C.1.pep
CGAQAGRIGTAYXKYFPLFSLSLCRLLLILIVASCSLSHLRDVDLVFSLSSAPFPSRLPLLHTHFSSCFRWFSQSATTELRRRGAKRSEATEVRRDRGETTSRSML

SEQ ID NO: 231577 - protein, 117 aa, Glycine max
  Clone ID: PAT_MRT3847_51135C.1.pep
KGHLHLPCSEDEKGGKENTTQKGGEPHFTPFGRGEESEARRENNGEASYLLLAFFFLNHKMADDSTATCIDILLAIILPPLGVFLKYGCKVEFWICLVLTLFGYIPGIIYAVYAITK

SEQ ID NO: 231578 - protein, 110 aa, Glycine max
  Clone ID: PAT_MRT3847_51136C.1.pep
GCEKTTEGDCIKTKQKGFLFDSTHTSSNRHLILSHQPITKTMASAGKFPSPTPPSIIEVKKPPETIISGPSGPSGTSGTSGALYNYAGNGNSKTQTKNGNLLGNRLGNEK

SEQ ID NO: 231579 - protein, 179 aa, Glycine max
  unsure (1)..(179): unsure at all Xaa locations
  Clone ID: PAT_MRT3847_51137C.1.pep
AKLVSSSECSGASHTVAGSYGYIAPEYGYSLRITEKSDVYSYGVVLLEVLTGMEPTENRIPXGAHIAAWVSDEIREKRREFTSILDQQLVLQSGTKTSEMLQVLGVALLCVNPSPEERPTMKDVTAMLKEIRHENDDFEKPNFLHKSMVTTNPKAAVHCSSFSRSCEPLIIESTSSFSV

SEQ ID NO: 231580 - protein, 266 aa, Glycine max
  unsure (1)..(266): unsure at all Xaa locations
  Clone ID: PAT_MRT3847_51138C.1.pep
MLGLFDKSHKIKGTVVLMPKSVLDINDLNSVKNGGVGGVVSGIFGAVADVTGQIVDTATAIFSRNVSFKLISATSTDAKGNGKVGKETFLEKHLPTLPTLGDRRDAYGIHFEWDANFGIPGAIYIRNYTYDEFFLVSVTLEDIPNQGTIHFVCNSWVYNFKDYDKKDRIFFANKTYLPSATPGPLVKYREEELEILRGNGTGERKEHERIYDYDVYNDLGNPDKDVKLARPVLXGSSTYPYSRRVRTGRKATKKXPKSERPASELY

SEQ ID NO: 231581 - protein, 189 aa, Glycine max
  Clone ID: PAT_MRT3847_51139C.1.pep
MGKRRTIRLSSKVHKEVGVDFQSTFLSININLYYVGAFLGRVLFASLFILSAWQMFNEFDANGGPISKELIPKLSVVKNNLSSKLGVALPDIDARQFIATIIFLKGVGGILFVFGSTFGSFLLLLHLAITTPLLYDFYNHSPGKPKYNQLLNDFLLNTALFGALLFFIGMKNSIPRSQLRKKTPKAKTV

SEQ ID NO: 231582 - protein, 47 aa, Glycine max
  Clone ID: PAT_MRT3847_5113C.1.pep
YINFEVDKVINRHLISRTMIHDRFVNITNVSFTFYILEYLIFFYFYF

SEQ ID NO: 231583 - protein, 160 aa, Glycine max
  Clone ID: PAT_MRT3847_51140C.1.pep
LFPPKENNVAPKNLTAMDLLSPQASSYGPSEEIPTLVNSSAIKSVSKGAKTAQMTIFYGGQVVVFDDFPADKASEIMSYATKGGIPQSQNNSVYTYTQSQPSFPPTLIRTSADSSAPIIPSVNITNSIREHPQASSRPVVYLPIARKASLHRFLEKRKDR

SEQ ID NO: 231584 - protein, 114 aa, Glycine max
  Clone ID: PAT_MRT3847_51141C.1.pep
LRPREKGRYIHHSTSITLTRSFFVLCNRVNKGLTCVCRPECEFNTGCIICKSLRNYSRVMHPRSSNWLRLDVCGLVISGHYDLLSQPLAMQPVHGAYSAVAPDHASTCSHNDAS

SEQ ID NO: 231585 - protein, 62 aa, Glycine max
  Clone ID: PAT_MRT3847_51142C.1.pep
TSNSVYTYTQSQPSFPPTLIRTSADSSAPIIPSVNITNSIREHPQASSRPVVCRNFLNSLIL

SEQ ID NO: 231586 - protein, 52 aa, Glycine max
  Clone ID: PAT_MRT3847_51143C.1.pep
RTIFPYRESNKSGPEAGPKKSRGKPGSPPPFPKKGEPKAWGEKPGRPKGGEN

SEQ ID NO: 231587 - protein, 68 aa, Glycine max
  Clone ID: PAT_MRT3847_51144C.1.pep
SMKALFFFSVSRRLFVPEFQLSRGCLKPWCSRDQRIGLERIVILQHGAKHHEGMASLCLNFCVSWLAS

SEQ ID NO: 231588 - protein, 61 aa, Glycine max
  Clone ID: PAT_MRT3847_51145C.1.pep
IMVGAEQFYHGTSSRLHTVEDRLSENIQIVQVNTMQSGINGEAYSWNYLHRLNSSSMDARG

SEQ ID NO: 231589 - protein, 114 aa, Glycine max
  Clone ID: PAT_MRT3847_51146C.1.pep
CPCYSHPLFQCCCHHSTWHSKGLVQQIQLHLWLTTCCCSFYVPIHTPTIQCCLQHAWHKGSSSTPNKTHPLHPSQYPSVSFSSSTIRNSKAEHTEPAEDTQRQDSKQYLTHRKT

SEQ ID NO: 231590 - protein, 53 aa, Glycine max
  Clone ID: PAT_MRT3847_51147C.1.pep
HLCHINSPQAVESALSLPPCHPLLRWFPTIHIRDCVFRDRSCGPHGQLLVFWP

SEQ ID NO: 231591 - protein, 61 aa, Glycine max
  Clone ID: PAT_MRT3847_51148C.1.pep
RKVNSLYLLNTIYKFNIDGNHNKILWCLSNFFFFLGIKNISRLYTFHKRVIALPLAHYLKF

SEQ ID NO: 231592 - protein, 113 aa, Glycine max
  unsure (1)..(113): unsure at all Xaa locations
  Clone ID: PAT_MRT3847_51149C.1.pep
SCKAWQLTGVPCAHAMLVISGIGQSVYDYCSRYCTAESYKLTYSEIVHPILDMXVSASKDSQLVVTVTPPPTKRPPGRPATKRFGSQEVVKRHLHCSRCKGLGHNKSTCKEQL

SEQ ID NO: 231593 - protein, 76 aa, Glycine max
  unsure (1)..(76): unsure at all Xaa locations
  Clone ID: PAT_MRT3847_5114C.1.pep
MSQKGLVRRRTLLAMKTLYTGVNGERYPSRFYEXGLLKVGDIEYALAYVDGAXSGTYPEMQKLRHALVDYALASGE

SEQ ID NO: 231594 - protein, 71 aa, Glycine max
  Clone ID: PAT_MRT3847_51150C.1.pep
GLESLKPSVVCYYKWLRFWVMEVNRERLGKVQFGLMQRYCERVQLCPCGFSSPASPFKYKPLSSQKKKKQQ

SEQ ID NO: 231595 - protein, 45 aa, Glycine max
  Clone ID: PAT_MRT3847_51151C.1.pep
ASRAFGNSLKNSRERASVRNGGFRLGRTPPEFGFSSTISRLEYFS

SEQ ID NO: 231596 - protein, 278 aa, Glycine max
  unsure (1)..(278): unsure at all Xaa locations
  Clone ID: PAT_MRT3847_51152C.1.pep
MLSGRSNFKSSTMATNSITSSSFRLVTTRIPLSLFRKTPPLLSFPTKPFFSKPITFQRLQPTPPPQSSSSSTSASLQPIEDLPPKLQEIVHLFQSVPEPKAIYEQLLFYGKNLKPLEPQFKTNDNKVQGCVSQVWVRAYLDPNRNVVYEADSDSGLTKGLAALLVQGLSGRPVNEIIRVTPDFATLLGLQQSLTPSRNNGFLNMLKLMQRKALMIVREAGEKGXDGETHFNVRVVSKEFEGKSLVKRHRLIYGLLQEELDAGLHALSIVAKTPAEVEG

SEQ ID NO: 231597 - protein, 64 aa, Glycine max
  Clone ID: PAT_MRT3847_51153C.1.pep
YITDLLETRLCSCYNDTDINPFSDVVCDLHRTEHVLGLGFGVETDPHSQTNGDNHHRDRDFDAD

SEQ ID NO: 231598 - protein, 136 aa, Glycine max
  Clone ID: PAT_MRT3847_51154C.1.pep
IIQEDSLSSRLPVYEQMGWEHIVSHWRSAFSRASVVVFPDFTYPMLYSELDTGNFFVIPGSPVDVWAAESYHKTHAKEQLRELSGFGKNDMLVLVVGSSVFFDDLSWDYAVAMHSVGPLLTRYARKYDATDSFKFV

SEQ ID NO: 231599 - protein, 97 aa, Glycine max
  unsure (1)..(97): unsure at all Xaa locations
  Clone ID: PAT_MRT3847_51155C.1.pep
EEVVVAQGDFLHCNECLGAICGAGVVKGSRGKPNXVREWCANLLPXVXQGDXLGAKXLDFGLLNGXPQRAKXXXKFQVPFGTLPWVXAVXLVXXTIP

SEQ ID NO: 231600 - protein, 122 aa, Glycine max
  unsure (1)..(122): unsure at all Xaa locations
  Clone ID: PAT_MRT3847_51156C.1.pep
PPPVRSSGARIEPLGNFPVPAQTVVEFNRLPEPNDLPGAHQLLSWARGLFLQSSKXIRSFSPGLKXTNRALTGQAKANPEKPSRLKKGXPLSPTLAWRTPXRLAKVAFMRKSMNRVSDLPGF

SEQ ID NO: 231601 - protein, 49 aa, Glycine max
  Clone ID: PAT_MRT3847_51157C.1.pep
MGASNGHQNGSICLSSTNGSDPLNWGAAAVAINGSHLDEVKRMVSEYRK

SEQ ID NO: 231602 - protein, 144 aa, Glycine max
  unsure (1)..(144): unsure at all Xaa locations
  Clone ID: PAT_MRT3847_51158C.1.pep
LACNNSTLKWGTVTVLNISVPAHQVDVLQLVSWFCNSEDYWETWLTTGISRISRKENKFITVGCDSYGNLNSVYNDKTYTTRCLTRCYGNALVIDDGTCSGIXCCQVDIPPRMTNITIKAFAFRTSTRNISINNASVISNSTCN

SEQ ID NO: 231603 - protein, 91 aa, Glycine max
  Clone ID: PAT_MRT3847_51159C.1.pep
NRLKFYYNGEYAGFDEDEPTSRQGGKGDVIKMLKKTHRYNSIILIGDGATDPEACPPADAFIGFGGNVVREEVRSRAKWFVSDFKDLIDAL

SEQ ID NO: 231604 - protein, 84 aa, Glycine max
  Clone ID: PAT_MRT3847_5115C.1.pep
MAPVAAASSDSIKPRDVCIVGVARTPMGGFLGTLSSLSATKLGSIAIEAALKRANVDPSLVEEVFFGNVLSPRLPREDDRRGHK

SEQ ID NO: 231605 - protein, 83 aa, Glycine max
  unsure (1)..(83): unsure at all Xaa locations
  Clone ID: PAT_MRT3847_51160C.1.pep
XXXIXAXNXXXXGXAXXXIXXXXXXXXXGETXTPXXXXXXXNXXXXXXXXGXXXFFFFFFFDTSTTHAXCXLEPNSELTYAXV

SEQ ID NO: 231606 - protein, 75 aa, Glycine max
  Clone ID: PAT_MRT3847_51161C.1.pep
DLAMLHNNSEYERPKARRVETHRTRGTTREGRTGTSRRTSTPYRESDESWAQSWAKPTAVGNRETPTAPHNKRAG

SEQ ID NO: 231607 - protein, 86 aa, Glycine max
  unsure (1)..(86): unsure at all Xaa locations
  Clone ID: PAT_MRT3847_51162C.1.pep
ARSLDXATIFMALVIFXIFXXXXXXXXKXAWXWXXRHEXXGLXXXXEALREXWRALXGWVKRXPSXTQXCSHRHRRCSSSIALAXP

SEQ ID NO: 231608 - protein, 96 aa, Glycine max
  Clone ID: PAT_MRT3847_51163C.1.pep
KDYQHKWKRVPASVKSHIIRYHKSIVSRSTDPQRRLFFFLIKNPAWHGQRIKTCPSHAHQHKQIMHCCSGITTWKCQKIAFLRDLILNEWVDDRPA

SEQ ID NO: 231609 - protein, 57 aa, Glycine max
  Clone ID: PAT_MRT3847_51164C.1.pep
ILFKPPFVTFIQTCTSPLRLANCKPSTFILSNTLLCHVYIFTRIKSDIINWYKVVLV

SEQ ID NO: 231610 - protein, 72 aa, Glycine max
  Clone ID: PAT_MRT3847_51165C.1.pep
CRSVYCPSPSPYKQLRRSAAGADTSCAPIQRTPPGRSAWLGGSEIFSACAFFGESRVEEQLLYSYEMQSRQS

SEQ ID NO: 231611 - protein, 57 aa, Glycine max
  Clone ID: PAT_MRT3847_51166C.1.pep
FMCLHGREKMIEGELGEQQKLRKKRKKSGFTKGLSQWIYVHESTYVTQRYSNRANRL

SEQ ID NO: 231612 - protein, 187 aa, Glycine max
  Clone ID: PAT_MRT3847_51167C.1.pep
PTRPPTRPVQLTATLYLPPGYNPSTDGPLPCLVWSYPGEFKSKDAAGQVRGSPNEFAGIGSTSALLWLARRFAILSGPTIPIIGEGDEEANDRYVEQLVASAEAAVEEVIQRGVADPKKIAVGGHSYGAFMTANLLAHAPHFFCCGIARSGAYNRTLTPFGFQNEDRTLWEATNTYVEMSPFMSANK

SEQ ID NO: 231613 - protein, 519 aa, Glycine max
  unsure (1)..(519): unsure at all Xaa locations
  Clone ID: PAT_MRT3847_51168C.1.pep
DSPSWYKTRKIRTWVVSPGSEDVAPPILLAGTQEDVYSDPGSPMMRRTQAGTYIIARIKKESDEGRYIILNGNGATPEGNIPFLDLFDINTGKKMERIWESDKEKYYETVVALMSDQEEGDLYLDKLKILTSKESKTENTQYYFVSWPDKNIVQVTNFPHPYPQLASLQKEMIRYERKDGVQLTATLYLPPGYNPSTDGPLPCLVWSYPGEFKSKDAAGQVRGSPNEFAGIGSTSALLWLARRFAILSGPTIPIIGEGDEEANDGFVEQLVARAEAAVEEVIQRGVSFLWAVPRRRREXXRGXPPLFXXESPRRLXVADPKKIAVGGHSYGAFMTANLLAHAPHLFCCGIARSGAYNRTLTPFGFQNEDRTLWEATNTYVEMSPFMSANKVKKPILLIHGEEDNNPGTLTMQSGRFFNALKGHGALCRLVILPHESHGYTARESIMHVLWETDRWLYKHCVSNSSDAVEDHATGTVKEQVSKGTIDAESKVVATSGGGSGEVSDLEYEEFHSLPRSYLW

SEQ ID NO: 231614 - protein, 120 aa, Glycine max
  Clone ID: PAT_MRT3847_51169C.1.pep
SKDAAGQVRGSPNEFAGIGSTSALLWLARRFAILSGPTIPIIGEGDEEANDRYVEQLVASAEAAVEEVIQRGVADPKKIAVGGHSYGAFMTANLLAHAPHLFCCGIARSGAYNRTLTPFG

SEQ ID NO: 231615 - protein, 407 aa, Glycine max
  Clone ID: PAT_MRT3847_5116C.1.pep
MAPVAAASSDSIKPRDVCIVGVARTPMGGFLGTLSSLSATKLGSIAIEAALKRANVDPSLVEEVFFGNVLSANLGQAPARQAALGAGISNSVICTTVNKVCASGMKAAMLAAQSIQLGTNDVVVAGGMESMSNVPKYLAEARKGSRLGHDSLVDGMLKDGLWDVYKDVGMGVCAELCADNHALTRDDQDNYAIQSFERGIAAQESGAFSWEIAPVEVSGGRGRPSTVVDKDEGLGKFDAAKLRKLRPSFKETGGSVTAGNASSISDGAAALVLVSGEKALKLGLQVIAKITGYADAAQEPELFTTAPSLAIPKAIAKAGLETSQIDFYEINEAFAVVALANQKLLGLNSEKVNVHGGAVALGHPLGCSGARILVTLLGVLKQKNGKYGVGGICNGGGGASALVVELQ

SEQ ID NO: 231616 - protein, 191 aa, Glycine max
  Clone ID: PAT_MRT3847_51170C.1.pep
MDLEGKKFGKGNREFGSTRDLINQNRLWLYYKFFCKKSLPVSISETHYLHNVVGDTKIRKGEGMELDQLCKNMDTSEKKACLCPFDLDVLSEAFHMRDMNPVHLSSKGLPNAVPKLENQSRDHERKNKKVKDKGEKYRKQKHRLHRVNNGSCIENIRIRPHDPHPLLQLKNQRGKKRRAETSNNDPSVCKR

SEQ ID NO: 231617 - protein, 66 aa, Glycine max
  Clone ID: PAT_MRT3847_51171C.1.pep
LSTTPLFFYLPIKKSSTFFPTIGNYLYTPHYYQTQKLIIKISQTHQKFFIRNSENPTKIENFSVCN

SEQ ID NO: 231618 - protein, 61 aa, Glycine max
  Clone ID: PAT_MRT3847_51172C.1.pep
GGKVQLGGPFFFANGFCTSVVQKKVRMNAGFVFFLLPKSNWGELGKGPPSHPHSVWGCVKG

SEQ ID NO: 231619 - protein, 177 aa, Glycine max
  unsure (1)..(177): unsure at all Xaa locations
  Clone ID: PAT_MRT3847_51173C.1.pep
MRKDEAKAPGAMPQQQRSHIQFFVRMMSAGNTIVMXAFPEDTVKSIHERIQSMKGIPLFEQRLIYRGKQLQWEQTLAECFIQNDANLQLVGRMRSTEHPQAWQVINDMVSLVYRLCRGETVHDALKTVKGLMTSYLNMTPRIDNDSASGYFQIXMSSSXPAVLXMLYVSPYAVTRLC

SEQ ID NO: 231620 - protein, 106 aa, Glycine max
  Clone ID: PAT_MRT3847_51174C.1.pep
FQFTFDFKKTCCADVLYKGQKGLPNAVPKLENQFRDHERKNKKVKDKGEKYRKQKHRLHRINNGSCIENIRIRPHDPHPLQLKNQQDKVCSQSFIPLFCVVCLTLN

SEQ ID NO: 231621 - protein, 108 aa, Glycine max
  Clone ID: PAT_MRT3847_51175C.1.pep
LGNQSRIAGSAVASRHRQLTTKEGTARRTVPRGLERTPTRTIAPYPSADSDRSPRPPAAAYHCGLSVEQHNGWCITRFVDFPPTPFRDFSRCRSCFGNLCERSKIRYS

SEQ ID NO: 231622 - protein, 96 aa, Glycine max
  Clone ID: PAT_MRT3847_51176C.1.pep
MMRYKEEKEAKKEAFRKYLETSGAVDALTKVLVSLYEQNDKPSSAVEFIQQKLSCPSISEYEKLQAEFSDLQIKYNDLLAAHQKTCKENCNGMDFQ

SEQ ID NO: 231623 - protein, 53 aa, Glycine max
  Clone ID: PAT_MRT3847_51177C.1.pep
MAASREKRRASLEETLQQLRDVTNSTALNKASIIVDASKYIEELKQKVEGLNS

SEQ ID NO: 231624 - protein, 117 aa, Glycine max
  unsure (1)..(117): unsure at all Xaa locations
  Clone ID: PAT_MRT3847_51178C.1.pep
MQRPPPEDFLLKETKPHLGGGKVSGDRLTSTYDLVEQMQYLYVRVVKAKDLPAKDITGSCDPYVEVKLGNYKGTTRNFAKNTHPEWNQVXAFSXDRLQASMLEVXVIDKDVXEDDLI

SEQ ID NO: 231625 - protein, 81 aa, Glycine max
  Clone ID: PAT_MRT3847_51179C.1.pep
SADTKKKEKRIIRRARVLPQKGFTHLQSASRVEITSEQNLENYYNLQGDKSAWHRFFFICINQGTREFITTQTLFSIETSW

SEQ ID NO: 231626 - protein, 253 aa, Glycine max
  Clone ID: PAT_MRT3847_5117C.1.pep
MISPRQDPLLPHTHFSTMFKLLNKNLRRLLRRLRWPIRRRSKPKVVVINKLGKNAPKAQTEASTNFSAAVHPNAQLGTPKPIRVATFNAALFSMAPALPKPTFEDQNGIASKNPENLNSRSKSTKERPRSILKQSQSVKNRVNDSDNVTRLAKSKMRVSINLPDNEISLLRSRQSSFSEHDKASSWWVGGGAHVSNRTVVEVLKQVDADVLGLQDVKAEEENGMKPLSDLAAALGMNYVFAESWAPEYGNEVM

SEQ ID NO: 231627 - protein, 66 aa, Glycine max
  unsure (1)..(66): unsure at all Xaa locations
  Clone ID: PAT_MRT3847_51180C.1.pep
LFVSSTTETKSLPLPNFLLYXNSLTNIDLSDWKLEGEFPLWLLENNTKMTEALFRNCSFTGTFQLP

SEQ ID NO: 231628 - protein, 60 aa, Glycine max
  Clone ID: PAT_MRT3847_51181C.1.pep
KALTIPRLSVSQPPERRGKKKSLKQALCGLQEADSSIVEEECTPNKEYMRCWCTLRSPCS

SEQ ID NO: 231629 - protein, 58 aa, Glycine max
  Clone ID: PAT_MRT3847_51182C.1.pep
EALPNQEGTFHNMRQNLNNCIRSFCHHSDTSYHHHTSYSVNNLYTTLMPLLLQPYHYS

SEQ ID NO: 231630 - protein, 54 aa, Glycine max
  Clone ID: PAT_MRT3847_51183C.1.pep
SLHSMASTYEPIFTTLEERGKTIPGWLPPIHWRDYSMVVCSNLLLTILAGSASC

SEQ ID NO: 231631 - protein, 64 aa, Glycine max
  Clone ID: PAT_MRT3847_51184C.1.pep
TGCDGTVRKPQRERNVCHTAITNKRRLDEVIVFGSDLRRLVLPSVTDHTAHANELRKILSLSLC

SEQ ID NO: 231632 - protein, 161 aa, Glycine max
  Clone ID: PAT_MRT3847_51185C.1.pep
RADVMPKSQLNQVLNAELGPGWSSKLISFDYEPIAAASIGQVHKAVMKDGMQVAMKIQYPGVGDSINSDIENVKLLLNYTNLIPKGLYLDRAIKGDMPSNLSVAKEELSRECDYKLEAANQKRFRDLLTGTDGFYVPIVVDNISSKRVLTTELVRGITIDK

SEQ ID NO: 231633 - protein, 41 aa, Glycine max
  Clone ID: PAT_MRT3847_51186C.1.pep
LNCTGVPPQLEVCAKHRVATTGLCNMSRHTYQSKHEQDTTL

SEQ ID NO: 231634 - protein, 75 aa, Glycine max
  Clone ID: PAT_MRT3847_51187C.1.pep
GPQWLELKTHIQRGGYECGYYVMHWMWNIIGAELKSDWSVWFGDGSALDPEAITTLRKKWVAYFLKLRTIQCTKL

SEQ ID NO: 231635 - protein, 245 aa, Glycine max
  Clone ID: PAT_MRT3847_51188C.1.pep
MVSQTVELLKNEIPLEQESVVLAEDAVNGLVLVDIINGFCTVGAGNLAPRESNTQISGMISESARLARVFCEKNLPVMAFLDSHHPNKPEDPYPPHCIVGSDESNLVPALRWLENEPNVTIRRKDCFDGYLGSIQEDGSNVFVDWVKKNKITTLLVVGVCTDICVLDFVCSTMSAKNRGFLEPLENVVVYSRACATFNVPLEVARNTKGALAHPQEFMHHVGLYMAKERGAKIANEVLFGAAGKV

SEQ ID NO: 231636 - protein, 100 aa, Glycine max
  Clone ID: PAT_MRT3847_51189C.1.pep
FRVNLCMGKLSIPQGTSRSVKRMPLSIGGGAVAKKAVLMNMPNAALSVWGYYAGHLVCEVAKMTSRYIKGTVGFLIAFGKWADDTSNCEALPHKLVQLGE

SEQ ID NO: 231637 - protein, 283 aa, Glycine max
  Clone ID: PAT_MRT3847_5118C.1.pep
MAEEKDAFYVVRKGDVVGIYKSFSDIQPLLASSVSSDPVSIYKGYSLPQKTEEYLVSHGLKGAPYSISAADVNEGLFGRLVACPYQDPYSSGGRAFNVSSSSRNLQGAIQFDTGKLAGSFSYPPNSLRNHTLGGSQAEWSSCLSCTLHFDGASKGNPGPAGAGAILHDGSKVYRLREGVGIQTNNVAEYRSLILGLKHALKKGYKHIIVQGDSLLVCNQIQGLWKIKNQNMGTLCAEAKELKDKFLSFKISHIPREYNSEADAQANLAINLRACEVQEDCQLL

SEQ ID NO: 231638 - protein, 37 aa, Glycine max
  Clone ID: PAT_MRT3847_51190C.1.pep
VRSLTDLLQACLVFWSLEPGRLVVVYYGSVYFIVRFC

SEQ ID NO: 231639 - protein, 415 aa, Glycine max
  Clone ID: PAT_MRT3847_51191C.1.pep
MKRNHNFPFHHRPRKWAMVIPTVTICFLLLFLPLLPLTKPSSSSSSFSATWSSSSLNLTEELEVGVPRLAYMLTATKGEGAQLKRVLQAVYHPRNYYLLHLDLEASDAERLELAKYVKSETVLAAFGNVLVVGKPDLVTYKGPTMIASTLHGIALLLKRAPHWDWLINLSASDYPLLSQDDILHIFSFLPRDLNFIEHTSNIGWKEHQRARPIIIDPGLYHSKKSGVYWAKEKRSVPSSFKLFTGSAWVVLTKSFLEFCVWGWDNLPRTLLMYYTNFLSSPEGYFHTVICNHKDYQNTTINHDLRYIRWDNPPKQHPVFLKLEHFDDMVHSGAPFARKFTKDDPVLNKIDKELLRRSDGHFTPGGWCIGNPLLGKDPCAVYGNPIVVKPTLQSKKLEKLIVKLLDSENFRPKQCK

SEQ ID NO: 231640 - protein, 116 aa, Glycine max
  Clone ID: PAT_MRT3847_51192C.1.pep
KETFLPPPGTVVLFQAPFKKKTRPKKGPFFHGGGGICSQMWVGFFSQGCRIVLVYNPVHFPGGWFEVKKKFRTPFVTPVPYYIMPHRGFFSLKKKKKNQKKKKKKKKKKKKKKKKK

SEQ ID NO: 231641 - protein, 361 aa, Glycine max
  Clone ID: PAT_MRT3847_51193C.1.pep
IIKVETRSAVADRLSTMCVLPLLLAGVLSAPGKHEQLAEYLRKLLLEENSMQNQSTKHTPEIINAIRFICIYEENHGMIFNILWEMVVSSNASMKINAAKLLKVIVPHIDVLVASTHALPALITLGSDQNLNVKCASIDAFGVVAQRFKNEMIVDKIRVQMGAFLEDGSHEATIAVIRALVVAVPHTTERLRDYLLSKISQLTAVPTAASSDLMLRQERANAFCEAIRALDATDLPANSVRDYLLPAIQNLLKDLDALDPAHKEALEIIMKERSGASVGGGASKSMASHLGIASSVSNFFGDGGLLGKKDSTEAQPQPERVVYPNKAAATSQPQPEDTRLKRIMLGHFSDILRTKGKSQDE

SEQ ID NO: 231642 - protein, 68 aa, Glycine max
  Clone ID: PAT_MRT3847_51194C.1.pep
WLLKNSANARNFVHPAISLHRARISVSCALRLGHFFAVRLTIKMCLKSANVQYLQSKGFYSHNSQPVV

SEQ ID NO: 231643 - protein, 205 aa, Glycine max
  Clone ID: PAT_MRT3847_51195C.1.pep
MQGGFQSFLSHGNVIRNAVLQRVRMVNPLLQPIVSSRFESVTPARIEEHGFESTTISDILNDKGKGADGSWLWCTTDDTVYDAVKSMTQNNVGALVVVKSDANKAIAGIITERDYLRKIIVQGRSSKSTKVGDIMTEENKLITVTPDTKVLQAMQLMTDKRIRHIPVIDEKGMVGMVSIGDVVRAVVREHRQEVERLNAFIQGGY

SEQ ID NO: 231644 - protein, 55 aa, Glycine max
  Clone ID: PAT_MRT3847_51196C.1.pep
NSVIFLIMHTRALNLVTELKILCFHCQNLCSVFFSYVGNGLHNDCLVSCFKVFDS

SEQ ID NO: 231645 - protein, 206 aa, Glycine max
  unsure (1)..(206): unsure at all Xaa locations
  Clone ID: PAT_MRT3847_51197C.1.pep
MQGGMRSFLSHGNVIRNAVLQRVRMVNPLLQTIASSRFESVTPARIEEHGFESTTISDILNDKGKGADGSWLWCTTDDTVYDAVKSMTQNNVGALVVVKSDANKAIAGIITERDYLRKIIVQGRSSKSTKVGDIMTEENKLITVTPDTKVLQAXMQLMTDNRIRHIPVIDEKGMIGMVSIGDVVRAVVREHRQEVERLNAFIQGGY

SEQ ID NO: 231646 - protein, 219 aa, Glycine max
  unsure (1)..(219): unsure at all Xaa locations
  Clone ID: PAT_MRT3847_51198C.1.pep
MAQVLENPTIDAAASGANPSLTTISLYVGDLHHDVNDPQLYDLFNQVAQVVSVRICRDVATQQSLGYGYVNFSNAHDAAKAIDVLNFTPLNGKIIRIMYSIRDPSARKSGAANVFIKNLDKAIDHKALYDTFSAFGNILSCKVATDASGQSKGHGFVQFESEESAQNAIDKLNGMLINDKQVFVGPFLRKQDRXECSQXPKFNYVFVKNLLDSMTEADL

SEQ ID NO: 231647 - protein, 117 aa, Glycine max
  Clone ID: PAT_MRT3847_51199C.1.pep
LGILKEAEAVPMRLLESLLTFVSDTKGQSKQRRWSIICKLMQSDRMTCDSQESETNEFAKVDTTLQSLISHKPLSIENFQCHMENLETCIEDLEVGVEHLSRKLIRTRVSLLNIFSH

SEQ ID NO: 231648 - protein, 60 aa, Glycine max
  Clone ID: PAT_MRT3847_5119C.1.pep
QLTNPLLIMPEGELDNARLYMCECFHYHRSLVQILLLTLQPTFLPQFEKNFEHTYCPTDS

SEQ ID NO: 231649 - protein, 224 aa, Glycine max
  Clone ID: PAT_MRT3847_511C.1.pep
NILTAVRSHIPIAKAIAGHAITRCTEVVTKHKHGTRSLLPWHRRENIDSSSSSKSDNIGEAYGSSETNFESLLTEEHLIMESMSDDDEYNYSSEGSDGDDSDGDKDDLSNQVGKLKLGKEVATNKNIAEEESDCPITTSSRRRLYPPGRIMHIIPIAHSSENPNSNHNGCDEKHVYLYETPRDLYGKLRLSRGMILDHMTNQYLKMLQQLINQLEKDSFKYRGG

SEQ ID NO: 231650 - protein, 27 aa, Glycine max
  Clone ID: PAT_MRT3847_51200C.1.pep
EISCQVLRLLALKGFHSVFNSEMADYI

SEQ ID NO: 231651 - protein, 132 aa, Glycine max
  Clone ID: PAT_MRT3847_51201C.1.pep
MAHIPQTPTNDAAASGANPSMTTISLYVGDLDHDVNDPQLYDLFNQVAQVVSVRICRDVATQQSLGYGYVNFSNARDAAKAMDVLNFTPLNGKTIRIMYSIRDPSARKSGAANVFIKNLDKGIDHKALFDTF

SEQ ID NO: 231652 - protein, 94 aa, Glycine max
  unsure (1)..(94): unsure at all Xaa locations
  Clone ID: PAT_MRT3847_51202C.1.pep
SRRRVGIRQHKGNLGIIAPLPFGFIFGATILLGGAFSXPAMPPAVPFGLAVVSWTWPTPWIXWAGPLLGGGMAGLVXEVVFFSPTPEQLPSPAL

SEQ ID NO: 231653 - protein, 56 aa, Glycine max
  Clone ID: PAT_MRT3847_51203C.1.pep
TTHSLVKNWIKSEGFTIYLQILMNYGIEATVLTYLIFYKSIDEILNASIDIEFFTS

SEQ ID NO: 231654 - protein, 55 aa, Glycine max
  unsure (1)..(55): unsure at all Xaa locations
  Clone ID: PAT_MRT3847_51204C.1.pep
VLEYNYSTVSCLRTIQSNDFEFVVRQAICGTMXXLXKYFVXXIWXGGAFLQKKKK

SEQ ID NO: 231655 - protein, 70 aa, Glycine max
  Clone ID: PAT_MRT3847_51205C.1.pep
EESTGWSNNHSMQFYVKIRFIRPKMKSVCSFLKKPYFPSFFYVLVMFSSTNKSKFLMKLMLQTCSYSYFF

SEQ ID NO: 231656 - protein, 65 aa, Glycine max
  Clone ID: PAT_MRT3847_51206C.1.pep
GGGGKWVFYLKIFGVGIFYLRPLNLTVPQGGVLLTVFDTPSRGWGGFSGLKKRKKKSQSGKTVKG

SEQ ID NO: 231657 - protein, 253 aa, Glycine max
  Clone ID: PAT_MRT3847_51207C.1.pep
HASVHASGAAKNFHEMLEAEKKENAESELRAHSSSVRGNKILDKAPEESMPKTGKLQPFVKEEALVGIYNEVFPCTAEQFFNLLLNDGSNFTSKYRSVRKDTNLLMGQWHTADEYDGQVREITFRSLCNSPMCPPDTAMTEWQHHVLSPDKTNLVFETVQQAHDVPFGSYFEVHCKWSLETINETSCTLDIKVGAHFKKWCVMQSKIKSGAVNEYKKEVDVMLDVARSYIKSNTPNDEDDKASSPPPAATGES

SEQ ID NO: 231658 - protein, 73 aa, Glycine max
  Clone ID: PAT_MRT3847_51208C.1.pep
YVSYAPIQNLVLDQASIHGFLGFNSRARRFILKVAPHLCTVFAISKDTISSVRSAAPTVPHAFPLLKHHTEST

SEQ ID NO: 231659 - protein, 85 aa, Glycine max
  Clone ID: PAT_MRT3847_51209C.1.pep
TSPILNTPQLTSMTINFPLEATISGSNVMIVIFILATPAPHILDIPNSTHILVIVDFSIVIFYSNNTSVFETCIHHLLRNSLIHI

SEQ ID NO: 231660 - protein, 80 aa, Glycine max
  Clone ID: PAT_MRT3847_5120C.1.pep
WCPIPPPPNPPPAPNPPPAPPPNPPPAPPPPPPPPPPPPPPAPPPNPPPTPPPKPPPFPIPPPMPPRMLQRHWHRATTTK

SEQ ID NO: 231661 - protein, 58 aa, Glycine max
  Clone ID: PAT_MRT3847_51210C.1.pep
FFVVSTVNVWWRIPCGCGSGFVYWVPPLSFKSSSARVGSSTTSFFTVSGFCAFTLGLW

SEQ ID NO: 231662 - protein, 254 aa, Glycine max
  unsure (1)..(254): unsure at all Xaa locations
  Clone ID: PAT_MRT3847_51211C.1.pep
MLKGTTKGGEMGGEGGREGDWECSSCNNRNYAFRSFCNRCKQPRLLVDTKTPSDSKWLEGDWICTGYCNNRNYAFKSSCNRCKQPRLLRGTKTPAVSQGAPRVGECYCSCLTTRIHPNRTSLXRRRHNGDWISTIAITTDSFPTQCKKCNAFPPALGTKPLATKDLFYDWDNKRXNIGTTIDQHQIYTRSPSLPLATLLPPQVSTPALIGKGAKQWRSGDWMCSNCNNHNYASRLQCNRCKTQRMAPMQPVNVV

SEQ ID NO: 231663 - protein, 41 aa, Glycine max
  Clone ID: PAT_MRT3847_51212C.1.pep
ALCVSLNTPVSIPVFICYHWFGVSKGLCWISSCERHDPGVQ

SEQ ID NO: 231664 - protein, 56 aa, Glycine max
  Clone ID: PAT_MRT3847_51213C.1.pep
GHYELRDFPYGRGFKIGHLNMGSNLGLGAQHAFERGFVLNYDHPGRMPLPLELIYT

SEQ ID NO: 231665 - protein, 37 aa, Glycine max
  Clone ID: PAT_MRT3847_51214C.1.pep
RICKATKVLISPHSVVLEFQSMPKLLRANIYENYGFE

SEQ ID NO: 231666 - protein, 94 aa, Glycine max
  Clone ID: PAT_MRT3847_51215C.1.pep
ENRNPIVNGSNDSSKFCGSHDHTNNCYIHNPDFASIVIRRKEPKLYRNGCTQRIHAFERSLFDGNMSVSGNLDNVQNENLVSVHEEGKTMTVST

SEQ ID NO: 231667 - protein, 98 aa, Glycine max
  Clone ID: PAT_MRT3847_51216C.1.pep
EKKFPFSKKSKKTRQRAFFQFRWKVISPHPKRAQKVNPNRVAWGLNQLVGVGLQKEPKLAHFQVGSPLEVWFAKYHLSFGGPSWGKKKPFFETPKGLL

SEQ ID NO: 231668 - protein, 58 aa, Glycine max
  Clone ID: PAT_MRT3847_51217C.1.pep
MAAEMKKMKSEKLWKKRNGEEEVEEGSGAGVHLATPRLKPWAESLSPHYNGSNPTIVY

SEQ ID NO: 231669 - protein, 47 aa, Glycine max
  Clone ID: PAT_MRT3847_51218C.1.pep
GTFFSYTKSKSYALFSKKKKKKKKKKKKKKKKKKKRKKKKKKKGGPF

SEQ ID NO: 231670 - protein, 72 aa, Glycine max
  Clone ID: PAT_MRT3847_51219C.1.pep
MITFDRIRSFWWILLVPMPIATLHTSFYYRSCPQLFDTEKRTAQSAISKETRMAASLLRGFSHECFVNECDD

SEQ ID NO: 231671 - protein, 52 aa, Glycine max
  Clone ID: PAT_MRT3847_5121C.1.pep
CCSQVLLNVCSNYDPVLTLKPIVKFLKKKKKKKKKKKKKKKKKKKKGRPLAI

SEQ ID NO: 231672 - protein, 89 aa, Glycine max
  Clone ID: PAT_MRT3847_51220C.1.pep
KFQQKGPRGVKKGQLGPFDFTGGKFGPTTSQFFSFGFLINSPFFTKLNCKGGRNVLFALNWDGPKNSPGGLFHFFCSLFLVALLGTCFV

SEQ ID NO: 231673 - protein, 61 aa, Glycine max
  Clone ID: PAT_MRT3847_51221C.1.pep
KDKKSFIDKCIFDVIVSTSCTLSNCIFTPHVLISMNRPIERSINEYIQNSPIISQLLKTRG

SEQ ID NO: 231674 - protein, 58 aa, Glycine max
  unsure (1)..(58): unsure at all Xaa locations
  Clone ID: PAT_MRT3847_51222C.1.pep
NCGFTHSSIIFLCVVRLTDKCMXIKXXPXLMPLNGNPTYFLFHVLFNGWNMCNGCFSG

SEQ ID NO: 231675 - protein, 166 aa, Glycine max
  unsure (1)..(166): unsure at all Xaa locations
  Clone ID: PAT_MRT3847_51223C.1.pep
MGYFSSSVVLLVAISSAFEFGPVAGRDLAIRDNSIWDQKEPAVRDRSFQFVPSVGIQNSKSLNKTCCLNGGTCILGSFCACPPSFYGRNCEHDVRKEHCGSILHGTWLPKKCSLCRCWHGQLHCLPQTFLPGCDGHVMDQDLKASXRTPCQTPSVTTTFMLAGACL

SEQ ID NO: 231676 - protein, 76 aa, Glycine max
  Clone ID: PAT_MRT3847_51224C.1.pep
AQGIWLINIRRTRARKINALQYCHPQNSRAEPCYGSHMIPRRVWTSYSTRRPFIKYAGMLSDLASYRIIGFLHQSS

SEQ ID NO: 231677 - protein, 63 aa, Glycine max
  Clone ID: PAT_MRT3847_51225C.1.pep
AACLISLIIPALSLPTLIISPTNLINYRDYLSEAFSEHKNPKVKQFRGFLIWSMSAISYKAQT

SEQ ID NO: 231678 - protein, 54 aa, Glycine max
  Clone ID: PAT_MRT3847_51226C.1.pep
RFRYTYSSAYSNLSQTDAPLHQSLLLRIRALTLLISPMSSTSSFINTALSCNPF

SEQ ID NO: 231679 - protein, 269 aa, Glycine max
  unsure (1)..(269): unsure at all Xaa locations
  Clone ID: PAT_MRT3847_51227C.1.pep
MGKQGLNTVEQQSVAPTASKFPLSFWEATVASTVALVFAVGLLGVYLTMPDSDYSFLKLPRTLEDLQLLXGTVFMSLLAGALFGVFKGVALVVFTATAGASSCYFLSKLIGRPILSSLWPEKLKFFQTQVAKRRKGLLNYMLFLRLTPTLPNTFINFASPIVDVPYHIFFLATVIGLIPAAYVTVKAGLALGELQSVGDLYDFNSIATLFLIGVVSVTPTTNKQERIIEFQKPRTFVNEAHILLTAQYLYRSPKQKKEEEKKNCIVILC

SEQ ID NO: 231680 - protein, 259 aa, Glycine max
  Clone ID: PAT_MRT3847_51228C.1.pep
MGNEGVNTVVVEQQPVASTSKFPLSFWETTVASTVALVFAVGLLGVYLTMPDSDYSFLKLPRTLQDLQLLRDNLESYTSDYTAQVLVGYCVVYIFMQTFMIPGTVFMSLLAGALFGVFKGVALVVFTATAGASSCYFLSKLIGRPILSSLWPEKLKFFQTQVAKRRKGLLNYMLFLRLTPTLPNTFINFASPIVDVPYHIFFLATVIGLIPAAYVTVKAGLALGELQSVGDLYDFNSIATLFLIGVVSVTPTLMSKNES

SEQ ID NO: 231681 - protein, 60 aa, Glycine max
  Clone ID: PAT_MRT3847_51229C.1.pep
LSKVHLPTFLTCLFTHFVNSLQLPFSLTYNCSTVSNKNLNSSLSHNNKFTTISSYNKHFF

SEQ ID NO: 231682 - protein, 36 aa, Glycine max
  Clone ID: PAT_MRT3847_5122C.1.pep
GIIKCHSILFFVISILYWSIVEKKKKSNKKKIKKCN

SEQ ID NO: 231683 - protein, 35 aa, Glycine max
  Clone ID: PAT_MRT3847_51230C.1.pep
EVTALIGHRPEGEVKEQSVFLFLNCRAEVDNETFA

SEQ ID NO: 231684 - protein, 39 aa, Glycine max
  Clone ID: PAT_MRT3847_51231C.1.pep
TYPYIYIETNYRIQQLSYDTLPKMHMDYAKSITTTICTV

SEQ ID NO: 231685 - protein, 124 aa, Glycine max
  Clone ID: PAT_MRT3847_51232C.1.pep
RAQPGKLPFNYYQPCFFGLFPPWGPFPPGCPWFSLYPFFFGPLNPAVALVCYSIYFFSGGPWFWEGAPSSKPFFPFFFFFFFLPFSNFFIFFPPLPGFCPHLINPQWGVFPFFGLNIFGPPVPF

SEQ ID NO: 231686 - protein, 57 aa, Glycine max
  Clone ID: PAT_MRT3847_51234C.1.pep
IFMQRRMIVLSLPWLTLRAQAINSLFSTLRTYALSGRGFLLLVNQPPQLGPFWAHSL

SEQ ID NO: 231687 - protein, 102 aa, Glycine max
  Clone ID: PAT_MRT3847_51236C.1.pep
FTHRADAIRKLVHWKGLLHRETVAPLGHDNKRGTFSGYFPTVNLMGKPDNVMTMALPRGAFLAGLCCNHTKAMMTYIWANVPELGPCLWTLLFWGMRQKLKS

SEQ ID NO: 231688 - protein, 55 aa, Glycine max
  Clone ID: PAT_MRT3847_51237C.1.pep
MDWDEIMPIDTSWSITHERYICYILTLIIHSANGLRRETMKTSHSMGRTHLGISL

SEQ ID NO: 231689 - protein, 112 aa, Glycine max
  Clone ID: PAT_MRT3847_51238C.1.pep
FGPKLKEHMQYCVEHPEEISKLAKVKAQVSEVKDVMMENIEKVLDRGEKIELLVDKTENLHHQAQDFRNSGTKIRRKMWLQNMKIKLIVLAILIALILIIVLSVCRGFNCGK

SEQ ID NO: 231690 - protein, 225 aa, Glycine max
  Clone ID: PAT_MRT3847_51239C.1.pep
MGQDQNQRSLIYAFVSRGTVILAEYTEFSGNFNTIAFQCLQKLPASNNKFTYNCDGHTFNYLVDNGFTYCVVADESIGRQVPVAFLERVKDDFVAKYGGGKAATVAANSLNKEFGSKLKEHMQYCVEHPEEISKLAKVKAQVSEVKDVMMENIEKVLDRGEKIELLVDKTENLHHQAQDFRNSGTKIRRKMWLQNMKIKLIVLAILIALILIIVLSVCRGFNCGK

SEQ ID NO: 231691 - protein, 57 aa, Glycine max
  Clone ID: PAT_MRT3847_5123C.1.pep
ESIKVTAANIGASAKAGIEKTIATVHEKADRMTARDPMQKELATQKLEAKMSQAVLD

SEQ ID NO: 231692 - protein, 160 aa, Glycine max
  Clone ID: PAT_MRT3847_51240C.1.pep
LAILITPFETSETNPKSTIMDVSSMLLNMSSSVLGDFNKTTSEDTNTNAASNFGVLQEHCSGYPIPFLRENMQTTFGNQQQQYCDNIYALVKGPNVNVPRVDDPELELETVVQRSIGFPLSVTMPLNIGDAWKSNNLLWDTSSFPCDVPSSYYSTTKCYT

SEQ ID NO: 231693 - protein, 64 aa, Glycine max
  Clone ID: PAT_MRT3847_51241C.1.pep
EDFTCSVWERSLLINLCRSISMMGEKGSYEAKYTPRDCACFLRYIPILKVQGHLYYDCSPFLII

SEQ ID NO: 231694 - protein, 50 aa, Glycine max
  Clone ID: PAT_MRT3847_51242C.1.pep
EGIPSKITSMKFTCYAWLLSFNNLLIRFWPLFPLLINYFLLMLPSLSFAN

SEQ ID NO: 231695 - protein, 78 aa, Glycine max
  Clone ID: PAT_MRT3847_51243C.1.pep
VIMQSHPVFLLRQCLTDESASYNAKCVIGDNLGTCTTTTLHYSRDVSFRTNDSVVTNRFVSGKFGISDLQSADLPETT

SEQ ID NO: 231696 - protein, 60 aa, Glycine max
  Clone ID: PAT_MRT3847_51244C.1.pep
CSILSLVTACICLPGDRLTSVDYPCAANRHMIRDRLLMMCMTIRTCATCTGKDYLLTHIL

SEQ ID NO: 231697 - protein, 94 aa, Glycine max
  Clone ID: PAT_MRT3847_51245C.1.pep
RLVSCLKPYMRQKKSGARVKTQNTVTQSAHKPPRRQTSGELSSKRFVHVYGEESDRYEEMLGLENGISLILSLLFCSVPKPIHLTSPLSLALYL

SEQ ID NO: 231698 - protein, 666 aa, Glycine max
  unsure (1)..(666): unsure at all Xaa locations
  Clone ID: PAT_MRT3847_51246C.1.pep
MAGTGDLDANAVLSDVEDDGGDPFPTATKLPSPEDVSVEKFREALAELDRERQARVAAENTKSELQXVSFNRLKALAHEAIKKXRDEFGRQRDDAIREKEETATQLEETAKERXRAAIGRLXNSSXHDGSPGLVKISAKVSSFAGNALPLPRSQKYTGMAAVAYGVIKRANEIVEELLKQNEATAKARNEAREQMEQRNYEIAIEVSQLEATISGLRDDVAKNASIVEDLERDLAVRDQRLNEVSENLSKEQSEALQLKEFVAECEEKLSNLESRMESQRPLLIDQLSFVSKIHNQICNVVRIIDDGGTDELSESLFVPQETDVEENIRASLAGMESIXELTKIVVQKAKDVLEENDREIKSLHETLARLVREKDQIGSFLRSALSKKVAGDPSSRKSELFQAAEXNGLREAGIDCKFSRLLGAGKVAASNDKSDTTEKKEDEIYSLAGALEDVVKASQLEIIELKHTVGELRAELSLLKQHVEAQGKELDHRMHRVEELEEKERVANENIEGLMMDIAAAEEEINRWKVAAEQEAAAGRGVEQEFVAQLSALKQEFEEAKQSMLESEKKLNFKEETAAAAMAARDAAEKSLKLADLRSSRLRDRVEELTHQLEEFENREDSRSHNRPRYVCWPWQWLGMDFVGFQQRPDTQQEASNEMELSEPLL

SEQ ID NO: 231699 - protein, 142 aa, Glycine max
  unsure (1)..(142): unsure at all Xaa locations
  Clone ID: PAT_MRT3847_51247C.1.pep
VGYSDSDIARCKLNKKXTSGTCHLLGHGLVSWNSKKQACVALSTAEAKYIAARSCCAQILSLKQILSNFGLHLEHIPLRCDNSSAISLTKYLIMHSRIKHIEIRHHFIRDHIHKGDCDIDFXIDSQLVDIFTKPLARTLPPS

SEQ ID NO: 231700 - protein, 90 aa, Glycine max
  unsure (1)..(90): unsure at all Xaa locations
  Clone ID: PAT_MRT3847_51248C.1.pep
VGELKKLVEEGKVRYIGLSEASPDTIRRAHAVHPITAVQXEWSLXXRDIEDEIIPXAELGIGIVLYSPLGRGFFGGGVLGKYACIYNPGE

SEQ ID NO: 231701 - protein, 66 aa, Glycine max
  Clone ID: PAT_MRT3847_51249C.1.pep
SESRSSSSRSSRTDSSSLLSRMYRDCSITCLSRCTRSDYGSLASLNKSFWNIIRSGEIYQWMSLNG

SEQ ID NO: 231702 - protein, 453 aa, Glycine max
  Clone ID: PAT_MRT3847_5124C.1.pep
MEVSVSSPPRKSIAEKVFGGYYNGNNSHKKRGSEAHDDDSDGGMELMEIGAQRTKNVLILMSDTGGGHRASAEAIRDAFQIQFGDEYRIFVKDVWKEYTGWPLNDMEGQYKFMVKHVQLWNVAFHSTSPRWIHSVYLAAIAAYYAREVEAGLMEYKPDIIISVHPLMQHIPLWVLKWQGLQKKVIFVTVITDLSTCHPTWFHPWVNRCYCPSQEVATKASQDGLEESQIRVFGLPIRPSFARAVLVKDQLREELGLDHNLQAVLLMGGGEGMGPVKKTAKALGEALFDKEAEKPIGQLVIICGRNKSLVSTLESLEWKIPVKVRGFETQMAKWMGACDCIITKAGPGTIAEALIRGLPIILNDYIPGQEKGNVPYVVNNGAGVFTRSPKETARIVAEWFTTKSDERKTMSENALKLAQPEAVFDIVRDIHELAEQREPANFPYLLTSSFTSLI

SEQ ID NO: 231703 - protein, 77 aa, Glycine max
  Clone ID: PAT_MRT3847_51250C.1.pep
EINRALRKGIHGMGGIGKTTTNYNNYFYSGRCFTYPSSSIKSSIENELTPSYGKGQKIHNYLINNENREEQHYSHLK

SEQ ID NO: 231704 - protein, 239 aa, Glycine max
  Clone ID: PAT_MRT3847_51251C.1.pep
MASKLFRESRSSISSSSDAPDGQKPPLPPSVQFGRRTSSGRYVSYSRDDLDSELGSTDFMNYTVHIPPTPDNQPMDPSISQKVEEQYVSNSLFTGGFNSVTRAHLMDKVIESEANHPQMAGAKGSSCAIPGCDSKVMSDERGADILPCECDFKICRDCYIDAVKTGGGICPGCKEPYKNTELDEVAVDNGRPLPLPPPSGMSKMERRLSMMKCPLLVGLSRQTGTRRRGVDHGEFRTRY

SEQ ID NO: 231705 - protein, 145 aa, Glycine max
  Clone ID: PAT_MRT3847_51252C.1.pep
MKRTDQSQHCRHKGNQNPRSRVLKRKNKSLKREKNGKPPGAKKDFMKIEKPREKKKGAEKKKNLIMTKKKGENWGQKKKALKKKKGEKSPPFGGEKKGNRKSGGKKTKPKKKPGQKKKQNGKSLKKKRVKGKKKRKKSVQKKKAQ

SEQ ID NO: 231706 - protein, 44 aa, Glycine max
  Clone ID: PAT_MRT3847_51253C.1.pep
YECSHRFVEHIERAMVDLVEISSIVSCREDLYVQQSYLVTTHTK

SEQ ID NO: 231707 - protein, 119 aa, Glycine max
  Clone ID: PAT_MRT3847_51254C.1.pep
MDSFNQSHQTTSFRYNPNSNTVNHTDDNDDDAEFSGILDIYVHHARNIHNICIYDNQDVYAKFSLTYNPDETLSTRIINGGGKHPIFNENLKMKITQMDAVLKCEIWMFSRSRNHLEDQ

SEQ ID NO: 231708 - protein, 48 aa, Glycine max
  Clone ID: PAT_MRT3847_51255C.1.pep
HASVRLREDDRRGHTFLSFFVSEFLDSSDKHLQPSKTSSCLHLEPGFN

SEQ ID NO: 231709 - protein, 132 aa, Glycine max
  Clone ID: PAT_MRT3847_51256C.1.pep
SRLRDHKKHMATTLKKTTTKQETNTTKEQQTNPTPANKKPDPCNRRPPPDERPEQPDNKVQLPNASDKSDPQRKPGLDPSQPTSNLTAKSYTAKNPKDPTKKTVQTSTPHDITNHTPIASTLASHVNKGYHK

SEQ ID NO: 231710 - protein, 54 aa, Glycine max
  Clone ID: PAT_MRT3847_51257C.1.pep
IQTSDCYALTCEKSPLCSRPGFLHKCQALVVISMQPCAHHSSSTAHLLDSSGRV

SEQ ID NO: 231711 - protein, 40 aa, Glycine max
  Clone ID: PAT_MRT3847_51258C.1.pep
RRFSYTYRQEFNSLIMYIKKTLFKEIKVTLVISILQELIS

SEQ ID NO: 231712 - protein, 643 aa, Glycine max
  Clone ID: PAT_MRT3847_51259C.1.pep
MSRKLDSPVQTQMAVAVIRSSPLGREYHGKQPAGRRRVFVQTEKGCVLGMDLDRGDNVHTVKRRLQLALNVPVDESYLTFGDMVFKNDLSAVRNDTPLLLTRGKNNLMPRSSSTPCLSPKGRDIDKSGPIEILGQSNRLDGIKHMIKDIMKAIKMGIEPIPVHSGLGGAYYFRNSKGESVAIVKPTDEEPFAPNNPKGFVGKAPWAPNKPRSVRVGETGFREVAAYLLDYDHFANVPPTALVKITHSVFNVNDGVNGNNLWRKRLFSKIASFQQFIPHDFDASDHGTSSFPVASVHRIGILDIRILNTDRHAGNLLVRKLDGIGSFGQVELIPIDHGLCLPETLEDPYFEWIHWPQASIPFSEDELAYIEDLDPYHDCEMLRRELPMIREACLRVLVLCTIFLKEAAAYGLCLAEIGEMMTREFRRGEEEPSELEVVCLEARKIVVERDREELSPRSEMRDDEFLFDIDYYDEFGSDFTPKMAIDDPLTRATFLPALGNGHSRNPLSKLDECIEEEEEEEEEAEGESPKGFVTSATEEKIPCVSELSVSLKNTMLDGKNQNQQKYSGGKVENGHFANTSSGHKSANEQLPPSISFVDVTEMTEDEWPLFLEKFQELLYPAFAKRKSITLGQRQRQRLGTSCQF

SEQ ID NO: 231713 - protein, 36 aa, Glycine max
  Clone ID: PAT_MRT3847_5125C.1.pep
TKDLYSQSLHVLSKDTLNHLRFNSPTFTQKDSIFSD

SEQ ID NO: 231714 - protein, 81 aa, Glycine max
  Clone ID: PAT_MRT3847_51260C.1.pep
LIIQRRSVNLHVLAQIVNIRFFQPGFVLHKNLAILTTMNLVFQKNSGSYAFLLSNDTLGNTQNRSIPKQAEYAQCIRYRDI

SEQ ID NO: 231715 - protein, 109 aa, Glycine max
  unsure (1)..(109): unsure at all Xaa locations
  Clone ID: PAT_MRT3847_51261C.1.pep
MSRKLDSPVQTQMAVAVIRSSPLGREYHGKQPAGRRRVFVQTEKGCVLGMDLDRGDNVHTVKRRLQLALNVPVDESXLTFGDMVFKNDLSAVRNDTPLLLTRGEKLSNA

SEQ ID NO: 231716 - protein, 136 aa, Glycine max
  Clone ID: PAT_MRT3847_51262C.1.pep
NPLSKLDECIEEEEEEAEGESPKGFVTSSTEEKIPSVSELSVSLKNTMLDGKNQNQQKYGGKVDNGHFANTSSGHKSANEQLPPSISFVDVTEMTEDEWSNFLEKFQELLYPAFAKRKSITLGQRQRQRLGTSCQF

SEQ ID NO: 231717 - protein, 175 aa, Glycine max
  unsure (1)..(175): unsure at all Xaa locations
  Clone ID: PAT_MRT3847_51263C.1.pep
SSSTPCLSPKGRDIDKSGPIEILGQSNRLDGIKQMIKDIMKAIKMGIEPIPVHSGLGGAYYFRNSKGESVAIVKPTDEEPFAPNNPKGFVGKALGQPGLKRSVRVGETGFREVAAYLLDYDHFANVPPTALVKITHSVFNVNDGVNGNHLWRKRLFSKIASFQQXIPYDFDARDH

SEQ ID NO: 231718 - protein, 146 aa, Glycine max
  unsure (1)..(146): unsure at all Xaa locations
  Clone ID: PAT_MRT3847_51264C.1.pep
YXXVVAVLPXVPXYHRKIXXSQGCXIFREIGPVYPPXNQTHFSISYYXINYSXLRIWEFVEYIKIIYFNRDIEVYDNIXHLFYLPDGNFYSVIDFFCEKTLSHTPQYKVGYFHQFPYNVLLPTXLCHPPSLYFNPGMFVFQPNIST

SEQ ID NO: 231719 - protein, 63 aa, Glycine max
  Clone ID: PAT_MRT3847_51265C.1.pep
LFYKALIHSFCIEMCSSFWFQTKMSVVYLVTFCSAITRMFERNKSKKCKFWFANFCGKPLVVK

SEQ ID NO: 231720 - protein, 45 aa, Glycine max
  Clone ID: PAT_MRT3847_51266C.1.pep
MASLATLAAVQPAALNGLAGSSLSGTKLSFKPSSHTVKSNNFMSG

SEQ ID NO: 231721 - protein, 88 aa, Glycine max
  Clone ID: PAT_MRT3847_51267C.1.pep
FDIDGNVPLVLLALHFTVYYISIFIIWDSCFILCTYFFFLSFHFYKNHIPKQLTWNTYNRYSKILIYFQNDHSIIKAGNIRILKHLKV

SEQ ID NO: 231722 - protein, 69 aa, Glycine max
  Clone ID: PAT_MRT3847_51268C.1.pep
ILTGAGPRRGGLLLCLALRFLRKNMPMFLCCLSTKRTITIPKIIKNIFQKICRTRGSRPLYRIRTCMRA

SEQ ID NO: 231723 - protein, 61 aa, Glycine max
  Clone ID: PAT_MRT3847_51269C.1.pep
MPPRGTTYLTASKRAIPLLHQTFSFIITTQIKPLLEHVHGINHSLSKHHNRTRYARLHTPQ

SEQ ID NO: 231724 - protein, 107 aa, Glycine max
  Clone ID: PAT_MRT3847_5126C.1.pep
PLGRWLLWGPLWGCPFPPPLLIPLLRGRPVGLFVCPPVWEAVWFGPLFCFAPFWTFGFFRGVLVGPPLGFSRPFPVNLGLVYRFLVSFLGGLGVACPGCVWARNVWT

SEQ ID NO: 231725 - protein, 87 aa, Glycine max
  unsure (1)..(87): unsure at all Xaa locations
  Clone ID: PAT_MRT3847_51270C.1.pep
FREFFFFFFFAFFFFFFFFFFFFFFKENSPHFFSYKNYIFGIFVWPNTGXXGFKTYSLKATGAPRASAIRATLALPIMLRWGNIHEN

SEQ ID NO: 231726 - protein, 124 aa, Glycine max
  Clone ID: PAT_MRT3847_51271C.1.pep
FPPQRGNSKKKKRGGAPPKGEKKWAKTRGTALFFRGPTQFKLKPLTPILKKLFLKGEKNPLGQKNLGRPRGPIKKTFWGKKNGPPPFPKTPLKKNQGGPKPPPGTKKRPGGKKTPPRGKEPPPF

SEQ ID NO: 231727 - protein, 66 aa, Glycine max
  unsure (1)..(66): unsure at all Xaa locations
  Clone ID: PAT_MRT3847_51272C.1.pep
MXSATLSVAKPALQANGKGFSEFSGLRSSSGFLPFXRXSSEDFLLSMPSQXSXXXXSGXYXXGVTE

SEQ ID NO: 231728 - protein, 81 aa, Glycine max
  Clone ID: PAT_MRT3847_51273C.1.pep
LNTLFRNKGFSMIIMVHVKLHTIRFHMLSLKFEYSNTLFSYHYFSSLSSPLKSFNLSIFSPLELLNKTIKKRGKRNFKRGE

SEQ ID NO: 231729 - protein, 46 aa, Glycine max
  Clone ID: PAT_MRT3847_51274C.1.pep
TRKSKSGPRGNHNYNGNGAGNLNWRGFKCQNKFKARTNWPDENNCG

SEQ ID NO: 231730 - protein, 61 aa, Glycine max
  Clone ID: PAT_MRT3847_51275C.1.pep
TLTWGFLRTPQESVLCPKHQPFAVLAHKRDHWLTTQTAPPPSCFSVRRAAAPASMMSVASL

SEQ ID NO: 231731 - protein, 48 aa, Glycine max
  Clone ID: PAT_MRT3847_51276C.1.pep
KVRYKACTMLLKSLPFSKLVKQLSKSTIRTLYGHSQLCFCTVNIKLAA

SEQ ID NO: 231732 - protein, 86 aa, Glycine max
  Clone ID: PAT_MRT3847_51277C.1.pep
KGRTFMPYIGFASDKLSRQNVMNGFKPSVVRNVKDLKRLMMHHRAYCVEIAPNISSRKRNDILERAAQLYVVVTNGTARLRNQEDE

SEQ ID NO: 231733 - protein, 61 aa, Glycine max
  Clone ID: PAT_MRT3847_51278C.1.pep
IVWTTDIDCYLVLFIRSESRVRENEQGECTTGLKSVIALSGLGLDSCASNMDECSDYRRCL

SEQ ID NO: 231734 - protein, 45 aa, Glycine max
  Clone ID: PAT_MRT3847_51279C.1.pep
QPVWSKVLPTSAGNPCPETPAISDIILRTLCYIILVRVFRVRLEK

SEQ ID NO: 231735 - protein, 107 aa, Glycine max
  unsure (1)..(107): unsure at all Xaa locations
  Clone ID: PAT_MRT3847_5127C.1.pep
ARLLELGYKQQLKRDLXVRAISNFSLSXFTVLSVLTALTTLSNTGLNYGGPVSMHYGGLYYWSAKLAGPTWAPLASWITGWVNIIGXWAGSTSVNFSLAHLIQGYHS

SEQ ID NO: 231736 - protein, 97 aa, Glycine max
  unsure (1)..(97): unsure at all Xaa locations
  Clone ID: PAT_MRT3847_51280C.1.pep
THLSLHTVTMGKEKTHINVVVIGHVDSGKSTTTGHLIYKCGGIDKRTIEKFEKEARVLGKGSFKYAWVLDKLKAERXRCITIDIAXLWKFETPKYYF

SEQ ID NO: 231737 - protein, 150 aa, Glycine max
  unsure (1)..(150): unsure at all Xaa locations
  Clone ID: PAT_MRT3847_51281C.1.pep
MRSLTVSLSHDHNISRHPMLNALSAMADHDDCHLMFLKLNTMRTHRIIVFKIDEQQKQLIKEKLDEPALGYHDYTVSLPADNXRYAVYDPEYLTEGHVPKSRXFIIAWSRDTSRLRSXMIYATCQDRFKRELDGIQDELQATDPTEICLD

SEQ ID NO: 231738 - protein, 189 aa, Glycine max
  Clone ID: PAT_MRT3847_51282C.1.pep
KGDSVVVVESDKADMDVETFYNGILAVIVVAEGQTAPVGAPIGLLAETEAEVAEAMAAANSAPLPFLASDTSPAPAPAPEVSDSPRKAVATPYAKKLAKQHKVNIGSVVGTGPFGRVTPADVEKAAGILPAESNVAPAAVDSAPPKAAAAAPAASSASIPGSSVVGFTTMQSAVAKNMVESLSVPTFRV

SEQ ID NO: 231739 - protein, 54 aa, Glycine max
  Clone ID: PAT_MRT3847_51283C.1.pep
WFTLLHQRLVVCSLSPCRPSLRGSEKHVVYRSRCGLNLLLFLLLRGLVIRSRER

SEQ ID NO: 231740 - protein, 83 aa, Glycine max
  unsure (1)..(83): unsure at all Xaa locations
  Clone ID: PAT_MRT3847_51284C.1.pep
MAPAEADKKPPEKKPAAEKAPTDKNPKAXKKISDEGRREKKKTRTKKSVETYKIYIVKVLTQVHPDIGITSKDMGIMNSFIID

SEQ ID NO: 231741 - protein, 79 aa, Glycine max
  unsure (1)..(79): unsure at all Xaa locations
  Clone ID: PAT_MRT3847_51285C.1.pep
SHSPFTXXXXXSLISLXQGEXEEDAFXRIIXRLXRHHLXDRRWWLHXLXXGQTPLGERLXCXDEDXXXQMXXRXXIXRV

SEQ ID NO: 231742 - protein, 58 aa, Glycine max
  Clone ID: PAT_MRT3847_51286C.1.pep
WNLARLNATFWALKRAQTENPVNSNEGSCLSPLQEGLNEDNQVRTHMKASLKCNILDT

SEQ ID NO: 231743 - protein, 94 aa, Glycine max
  unsure (1)..(94): unsure at all Xaa locations
  Clone ID: PAT_MRT3847_51287C.1.pep
MTTGIATKAKRMGKNKNLKPQVVGGLXLITEGKSKEGKEMPVSNIRGGEIHGDXIPLRAPEENLVSRAREFKTATVKKNSKAXATGMDEGAIEI

SEQ ID NO: 231744 - protein, 83 aa, Glycine max
  Clone ID: PAT_MRT3847_51288C.1.pep
RAQASFSLFSNFQVASQPLSQVFSDSIPTSPTTDTPHPLRSSSSPINLFIIPYVPLPNPTIAHNLVVISNFSTLGTLSPSNIP

SEQ ID NO: 231745 - protein, 49 aa, Glycine max
  Clone ID: PAT_MRT3847_51289C.1.pep
RERSRTLILLKRSGYSYPLLLIIRQQSDVRITVSRRPKQRKPYYDTSSD

SEQ ID NO: 231746 - protein, 70 aa, Glycine max
  Clone ID: PAT_MRT3847_5128C.1.pep
DKLRCEVGINPYSMEWTGLANRLLSKGNDILCCDYARFDGAITKQDMSKRAEMINSLCGGDEKLMREKTH

SEQ ID NO: 231747 - protein, 91 aa, Glycine max
  unsure (1)..(91): unsure at all Xaa locations
  Clone ID: PAT_MRT3847_51290C.1.pep
MVSACVTLKANTHLVKSRKDNTFRQDSGFLGERIKGGLNYSPWIINQLASSLRTQERVKKAKPGVVSAVLTSSNTKESVAFQMPSFLRRKX

SEQ ID NO: 231748 - protein, 33 aa, Glycine max
  Clone ID: PAT_MRT3847_51291C.1.pep
LEFNVVHIRVPLYLESGSVGVEITPDCFIIQFG

SEQ ID NO: 231749 - protein, 95 aa, Glycine max
  Clone ID: PAT_MRT3847_51292C.1.pep
LLKEHLDSASGDIFYDASEDFSGTVSVDDGDDNICRILTVEDSLGTNVGVYTDDTEETTDMLHAPPPSGPNKRRKLMNSFSAGVEVDSYSTAEID

SEQ ID NO: 231750 - protein, 215 aa, Glycine max
  unsure (1)..(215): unsure at all Xaa locations
  Clone ID: PAT_MRT3847_51293C.1.pep
MVSACVTLKANTHLVKSRKDNTFRQDSGFLGERIKGGLNYSPWIINQLASSLRTQERVKKAKPGVVSAVLTSSNTKESVAFQMPSFLRRKADPKNVVSIILGGGPGIQLFPLTKRAATPAVPVGGCYRLIDIPMSNCINSGLNKIFVLTQFNSASLNRHISRTYFGNGINFGDGCVEVLAATXTQGETGKNWFQGTADAVRQFTWVFEDAKHTNI

SEQ ID NO: 231751 - protein, 108 aa, Glycine max
  Clone ID: PAT_MRT3847_51294C.1.pep
APRPLICLGRVLLKRNRILVLDEATASIDSATDVILQQVIRQEFSECTVITVAHRVPTVIDSDMVMVLSYGKVVEYDKPSKLMGTNSSFSMLVAEYWSNCNRNSLPKD

SEQ ID NO: 231752 - protein, 54 aa, Glycine max
  Clone ID: PAT_MRT3847_51295C.1.pep
FGAMTALLIETNRFFSRCIDIPFFFILVMDTERGEEDYTPNKLSKIWNQYVMNL

SEQ ID NO: 231753 - protein, 47 aa, Glycine max
  Clone ID: PAT_MRT3847_51296C.1.pep
YIPYPKGVPFSYHFMNKTCYLIPFYSFLNPNLNQMTARSLLSSSRSR

SEQ ID NO: 231754 - protein, 40 aa, Glycine max
  Clone ID: PAT_MRT3847_51297C.1.pep
AVECLGLSMSKLESRLVCFVRSDVHFSNPLLGPHTSIELS

SEQ ID NO: 231755 - protein, 49 aa, Glycine max
  unsure (1)..(49): unsure at all Xaa locations
  Clone ID: PAT_MRT3847_51298C.1.pep
XLSNIAHRLGRXXLSSAXSWTSSXALXMGCHLXFKGNLNSSVSLXLLVS

SEQ ID NO: 231756 - protein, 74 aa, Glycine max
  unsure (1)..(74): unsure at all Xaa locations
  Clone ID: PAT_MRT3847_51299C.1.pep
SSDTFDNLYANIHDTDGIPPDHPRLIFDGKHLKDRPTLADYIIYNELSLLLVLRLRXGLQIFINTLTGETITLQ

SEQ ID NO: 231757 - protein, 65 aa, Glycine max
  Clone ID: PAT_MRT3847_5129C.1.pep
AYACAFDDECVIYICEGHRWWYNLLTALFWYGLHTATYISGAETSCRVNTPIYAWSSNLTYFFEL

SEQ ID NO: 231758 - protein, 81 aa, Glycine max
  unsure (1)..(81): unsure at all Xaa locations
  Clone ID: PAT_MRT3847_512C.1.pep
MRPAALRGALLGCLCLALLCLGGADKRLRDNHEWKKLIMVQHWPETVCEXPDKSEGCNRSWPFNLEEIKVLTFNYISTAEC

SEQ ID NO: 231759 - protein, 76 aa, Glycine max
  unsure (1)..(76): unsure at all Xaa locations
  Clone ID: PAT_MRT3847_51300C.1.pep
MEGKEQDVSLGANKFPERQPFGTAAQSQDDGKDYQEPAPTILVYPSRLSHXTFSSAGLSHLMPTFPFQEIMDLTVM

SEQ ID NO: 231760 - protein, 50 aa, Glycine max
  Clone ID: PAT_MRT3847_51301C.1.pep
GTFFKETPAFPTRQEEDPNCFLLHGELFLQGKKITLWAGHRLLESLNVPL

SEQ ID NO: 231761 - protein, 96 aa, Glycine max
  Clone ID: PAT_MRT3847_51302C.1.pep
RSMRKVSRSTCELNAADKNPSSLSTNMMIISTLVLFNQNCSIAFKLVTKIIIKLPAFSCTLFKHQKCLDRPSYILNPCIYDFSLCQHIKAKEVKKG

SEQ ID NO: 231762 - protein, 74 aa, Glycine max
  Clone ID: PAT_MRT3847_51303C.1.pep
TWLAPSFADQKIGTTHYDAYAHVKQDPKDRLSLTFERIAGVLSSMHTEKHGPPHTCPNLKSGAYPSEVKGRIAC

SEQ ID NO: 231763 - protein, 54 aa, Glycine max
  Clone ID: PAT_MRT3847_51304C.1.pep
SHHCHRTMNIASHLHASTTPLIKGPSSYLNGLGKVERDNQDGKVKSSNENMKQL

SEQ ID NO: 231764 - protein, 49 aa, Glycine max
  Clone ID: PAT_MRT3847_51305C.1.pep
LLPKPTINLFSHSFINHPFLNTNSNFKVILLHPKGSCPYQYLIKLFFIP

SEQ ID NO: 231765 - protein, 86 aa, Glycine max
  Clone ID: PAT_MRT3847_51306C.1.pep
TFWLPYVLKMSNWNSLRITDIISISYRIGLITEHIIPFHICTCWPPYYLKMWTWNSPRNSDLISCGYRIALYSINSLIPISYIPHL

SEQ ID NO: 231766 - protein, 48 aa, Glycine max
  unsure (1)..(48): unsure at all Xaa locations
  Clone ID: PAT_MRT3847_51307C.1.pep
SXXSSXAFLGTVEXXPITQXSXXXRSSXXRSXXKLELLIALHLLQRXX

SEQ ID NO: 231767 - protein, 185 aa, Glycine max
  Clone ID: PAT_MRT3847_51308C.1.pep
MENHQNHKVESEPDIEKNHHHRHQQQQQQQHRNEVWGTWEELLLACAVNRHGFKDWDAVAMEVQSRTTRLLATAHHCEQKFDDLSRRFADQCNDDVPPSRQNGGAAAISDHVPWLDELRKLRVAELRREVQRSDVSILSLQLEVKRLEEEKTKEKDGKDDKKPDLAVSGELRPENDKTGGEVDEA

SEQ ID NO: 231768 - protein, 69 aa, Glycine max
  Clone ID: PAT_MRT3847_51309C.1.pep
IFCNLRKENVNEKYLLECQFCLLWNILLCLLFYIISGLCTLDCNGSPTLLWSRYRCSCWEIPQVDLWTE

SEQ ID NO: 231769 - protein, 83 aa, Glycine max
  unsure (1)..(83): unsure at all Xaa locations
  Clone ID: PAT_MRT3847_5130C.1.pep
MAEKPKLHYFNARGRMESTRWLLAAAGVEFEEQFIKSAEDLDKLRXDGYLMFQQVPMVEHDGMKLVQTRAILNYIASKYNLLG

SEQ ID NO: 231770 - protein, 59 aa, Glycine max
  Clone ID: PAT_MRT3847_51310C.1.pep
KKKGPIFFFFKGGKLCYKKQETDQPSLILIFNYNNGGGGINNYFGKTPLHFKKVGNIFC

SEQ ID NO: 231771 - protein, 60 aa, Glycine max
  Clone ID: PAT_MRT3847_51311C.1.pep
EGTLVPHPPPCKKVNLNKGYIAENRRGYSIAAVPFPLTFMYRARTTSDLGRARLGKDAGS

SEQ ID NO: 231772 - protein, 61 aa, Glycine max
  Clone ID: PAT_MRT3847_51312C.1.pep
CFGRVRILMDFSFLTHIRPNYLNLINFFIKSNPKPKPDHSKTLFLSWVTRFSVRSVIFAHS

SEQ ID NO: 231773 - protein, 154 aa, Glycine max
  unsure (1)..(154): unsure at all Xaa locations
  Clone ID: PAT_MRT3847_51313C.1.pep
QPQTPGPPHAPNXHPPEGTTPRGAREKNPGGTKNQRPQQEAPDRPPQPTQHARRGHHESPETTERGRGQTPQQAHRKRPRAGHQPTHKQPPQGQPATHTQPTREALAGTTSNPTFRKRKKRRPPKPPPTKTKPTQHRPTPTRKGPTAKTGPPGN

SEQ ID NO: 231774 - protein, 42 aa, Glycine max
  unsure (1)..(42): unsure at all Xaa locations
  Clone ID: PAT_MRT3847_51314C.1.pep
MIGAYLRVNKLFIEYNEAQPDRGXSXYLELNLDEVEPCISGP

SEQ ID NO: 231775 - protein, 124 aa, Glycine max
  Clone ID: PAT_MRT3847_51315C.1.pep
MKKVSGFFVLLLVVGATLSFLNFLSPTCASWFSDLIATNCGDKATLIAVSRKLKESDSSTIKSRSNNKGDIGQVTLNDYNPIDPVPSSSKASINPGPIEHGTPLNPYIIPKPSPPNHPKPGDSN

SEQ ID NO: 231776 - protein, 156 aa, Glycine max
  Clone ID: PAT_MRT3847_51316C.1.pep
EDIPRLREEDRAESCYLLFLDQLNRQKQKDQSSQPSVLRTIILCHWKEILISGFFALLKVVALSSGPLLLNSFILVAEGNESFKYEGFVLAISLFFTKNIESLSQRQWYFRCRLIGVKVRSLLTAAIYRKQLRLSNSARLMHSGGEIMNYVTVDAY

SEQ ID NO: 231777 - protein, 85 aa, Glycine max
  unsure (1)..(85): unsure at all Xaa locations
  Clone ID: PAT_MRT3847_51317C.1.pep
KPTAVLXALQNYXEAYNAXVHXGIHILSAXXTDEYESARRXAASFINAIDXRXIVFTXNAXXAINLXAYSWGLSNLKPDDEIILT

SEQ ID NO: 231778 - protein, 377 aa, Glycine max
  Clone ID: PAT_MRT3847_51318C.1.pep
LLSKSSSSARHDPEIDEGIHNVKLYSYKQLRNATEKFSPANKIGEGGFGSVYKGRLKDGKVAAIKVLSAESRQGVKEFLTEINVISEIEHENLVKLYGCCVEKNNRILVYNYLENNSLSQTLLGGGHNSLYFDWGTRCKICIGVARGLAYLHEEVRPHIVHRDIKASNILLDKDLTPKISDFGLAKLIPANMTHVSTRVAGTLGYLAPEYAIGGKLTRKADIYSFGVLLAEIISGRCNINSRLPIEEQFLLERTWDLYERKELVELVDISLNGEFDAEQACKFLKISLLCTQESPKLRPSMSSVVKMLTGKMDVNDSKITKPALISDFMDLKVRRNEESSIDMKNSSMYTTSSSDNHDSTMSFATTTTFAAIYDESM

SEQ ID NO: 231779 - protein, 55 aa, Glycine max
  Clone ID: PAT_MRT3847_51319C.1.pep
GSVPSLPHLTVLLRITSYRLIFPQLRFARCTVRLAENITLPPIQRFLPLLSPYRL

SEQ ID NO: 231780 - protein, 169 aa, Glycine max
  unsure (1)..(169): unsure at all Xaa locations
  Clone ID: PAT_MRT3847_5131C.1.pep
TTTLLVFAIKLRAVQTRAEFSRXGYGSPFTAYYERSIPSAAVYRNVXAHISSAKGLCGGMNCTSXTISTGWHKLKFWPCSRDIICYIGRXAYAQLERDSRKHIGLCLTEXHNDPLNYTHVSGLAXDLLIQCENDTLTIVATNCILMNNXSPTEESALSTEVIEREAVSG

SEQ ID NO: 231781 - protein, 371 aa, Glycine max
  Clone ID: PAT_MRT3847_51320C.1.pep
MTCFPLLFSIHNVKLYSYKELRNATEDFSPANKIGEGGFGSVYKGRLKDGKVAAIKVLSAESRQGVKEFLTEINVISEIQHENLVKLYGCCVEKNNRILVYNYVENNSLAQTLLGSGHSNIVFDWKTRSRICIGIARGLAYLHEEVIPHIVHRDIKASNILLDQNLTPKISDFGLAKLIPSYMTHVSTRVAGTIGYLAPEYAIRGQLTRKADIYSFGVLLVEIVSGRCHTNSRLPIGEQYLLEMTWELYQKRELVGLVDISLDGHFDAEEACKFLKIGLLCTQDTSKLRPTMSSVVKMLTREMDIDESKITKPGLIPDFNDLKIKEKGSDIDTKASSSFYNASSASDSQSNTMSYAASTTTTFTAKYDQSL

SEQ ID NO: 231782 - protein, 373 aa, Glycine max
  Clone ID: PAT_MRT3847_51321C.1.pep
SSSSARHDPEIDEGIHNVKLYSYKQLRNATENFSPANKIGEGGFGSVYKGRLKDGKVAAIKVLSAESRQGVKEFLTEINVISEIEHENLVKLYGCCVEKNNRILVYNYLENNSLAQTLLGSGHSNIVFDWKTRSRICIGIARGLAYLHEEVIPHIVHRDIKASNILLDQNLTPKISDFGLAKLIPSYMTHVSTRVAGTIGYLAPEYAIRGQLTRKADIYSFGVLLVEIVSGRCHTNSRLPIGEQYLLEMTWELYQKRELVGLVDISLDGHFDAEEACKFLKIGLLCTQESPKLRPSMSSVVKMLTGEMDVNDSKITKPALISDFMDLKVRRNEESSIDMKNSSMYTTSSSDNHDSTMSFATTTTFAAIYDESM

SEQ ID NO: 231783 - protein, 46 aa, Glycine max
  Clone ID: PAT_MRT3847_51322C.1.pep
EGKERPGNGMKIYQKALSLGQQLTKAVFGTIDTCAKNKAGKKVFCF

SEQ ID NO: 231784 - protein, 280 aa, Glycine max
  unsure (1)..(280): unsure at all Xaa locations
  Clone ID: PAT_MRT3847_51323C.1.pep
WKQITKNESEGDGVQRGTQNQKDSSVCLFSVRACHDLPHGPSCIYVGPLHTATQETLEALYSQARDAYYSGDPLILDDMFDRVELKLKWCGSKLVVTYPRCSIIMQXTYAEAERSMSSYPLLYSLPHATIFSPLADPRVFLHFSTQLTSLVTKNANRKQHKLDFREEVXSVINTNFRRNACNLLLFILYXLHIFTVKVLQGLWRNDLAALKGSCPNCGEEVFAFVRTDKANNSPHRADCHVCECLLEFRTEVEQSALRLGRQWVYGPIYLVRRSRRQGDP

SEQ ID NO: 231785 - protein, 170 aa, Glycine max
  Clone ID: PAT_MRT3847_51324C.1.pep
FRGYLAPEYAIGGKLTRKADIYSFGVLLGEIISGRCNTNSRLPIEEQFLLERTWDLYERKELVGLVDMSLNGEFDAEQACKFLKIGLLCTQESPKHRPSMSSVVKMLTGKMDVDDSKITKPALISDLLDLKVRGNEESSIDMKNSSMYTTFSSDNHDTTSSFATTTTFTA

SEQ ID NO: 231786 - protein, 89 aa, Glycine max
  Clone ID: PAT_MRT3847_51325C.1.pep
ATNPQSTSPDQRRRKLGPQSQGGWSSLSSRSRSRHVQATRRCRHEGISLPYRPVDRQCIASSRSAGWQKGPHRDPKKKICMPHARQCSS

SEQ ID NO: 231787 - protein, 126 aa, Glycine max
  unsure (1)..(126): unsure at all Xaa locations
  Clone ID: PAT_MRT3847_51326C.1.pep
MGNISSSGGVGGGNPRRRHSGASRRSHPPPPPPVTPQPEIAANPFVYHGAASPYPNPPLHYPQYHYPGYYPSVPPPMPHHPHHHHHQHHHPHMDPAWIQGRYPCGPMMPNPAPFXEHQKAVTHKND

SEQ ID NO: 231788 - protein, 72 aa, Glycine max
  unsure (1)..(72): unsure at all Xaa locations
  Clone ID: PAT_MRT3847_51327C.1.pep
MTLDAIFDRCHIVAEHDGSEPLSSYAHTYDLIHATSIVXLIRDRXSVRCRCSLRDVRDELDRMIRPEGTDHS

SEQ ID NO: 231789 - protein, 87 aa, Glycine max
  Clone ID: PAT_MRT3847_51328C.1.pep
MTCFPLLFSKSSSSSARHEPEIDEGIHNVKLYSYKELRNATEDFSPANKIGEGGFGSVYKGRLKDGKVAAIKVLSAESRQGVKGVLT

SEQ ID NO: 231790 - protein, 62 aa, Glycine max
  unsure (1)..(62): unsure at all Xaa locations
  Clone ID: PAT_MRT3847_51329C.1.pep
PPQTFKITHLSPNSFTSPYPXRTCKGVYVILGFVHIQIIXXXTEXPRGLXXXLXRXXXXXWS

SEQ ID NO: 231791 - protein, 73 aa, Glycine max
  Clone ID: PAT_MRT3847_5132C.1.pep
HTINTKQHVIMKGPLTISRNDPHNINFFTESFPSDVKSFPSRYSKPFEQPMAYYIYKLIREVSLHCLPAAHIA

SEQ ID NO: 231792 - protein, 89 aa, Glycine max
  Clone ID: PAT_MRT3847_51330C.1.pep
MVHVTLYGNYYRTYRKPFNTYQKECLNAQLNLVCKFGLQCRMELWRDQCTLNRILNNIRNLLTLVVTNAEQISEGVVLVQRMFRYILRY

SEQ ID NO: 231793 - protein, 76 aa, Glycine max
  unsure (1)..(76): unsure at all Xaa locations
  Clone ID: PAT_MRT3847_51331C.1.pep
YLRXSVPTLVGXECPKVEKLPTXXKFLTNLRTRCFTILPMXFSLVVRQKFXSFVRFXXMNRDXLXCQVXXNPYSXE

SEQ ID NO: 231794 - protein, 86 aa, Glycine max
  unsure (1)..(86): unsure at all Xaa locations
  Clone ID: PAT_MRT3847_51332C.1.pep
EIYFNQKTSKVAVVCADNVEARTALFLMELEEKRAIEVXRKSTLRGLCLTFFAGLCFSMFSPACNIAADDLWNTFRKGVPHLTVYT

SEQ ID NO: 231795 - protein, 45 aa, Glycine max
  Clone ID: PAT_MRT3847_51333C.1.pep
NKREWDLIAQLLTRTPRNSVSNSEFAIQHSHGLKDTLLGVDLGPH

SEQ ID NO: 231796 - protein, 82 aa, Glycine max
  Clone ID: PAT_MRT3847_51334C.1.pep
PRVIGSDISPVFAVLRSQCVPVNCLLRGMARLISKQGVRTDDSLVVFLFSPFIHWPWYVLYHPFFLFPLACTLKKRKSDRVG

SEQ ID NO: 231797 - protein, 82 aa, Glycine max
  Clone ID: PAT_MRT3847_51335C.1.pep
DKVEHVRSSWMIPCTGITVRMLRAAGSDQTLHRCVCFRMSKFAHNICAISYRLKVIVHPKGALLVQRVNHVRRITSSYSPDL

SEQ ID NO: 231798 - protein, 41 aa, Glycine max
  Clone ID: PAT_MRT3847_51336C.1.pep
NSIQSTIHTTLTFPCSPNIHLQAQNSTSINITLEYETYMNW

SEQ ID NO: 231799 - protein, 72 aa, Glycine max
  unsure (1)..(72): unsure at all Xaa locations
  Clone ID: PAT_MRT3847_51337C.1.pep
KHWVHNRLYSCTHIISHWKQLRANVIDGGYQMYFPFDKNNLIWCSNDRYIGRPCRYNARTKEWXGLSICNCI

SEQ ID NO: 231800 - protein, 96 aa, Glycine max
  Clone ID: PAT_MRT3847_51338C.1.pep
AVIRHPRQQQYLASKSLFLFSSFIAAYSIRGCVRRVIDSEPDRLYSSYHMRSCHFHWGGFGTASYLSHIHLVDTSTYLNAPKCIGIFTEQSNCYDV

SEQ ID NO: 231801 - protein, 119 aa, Glycine max
  unsure (1)..(119): unsure at all Xaa locations
  Clone ID: PAT_MRT3847_51339C.1.pep
GTQGAFTRVFKFATCSILPAWGLRYVGGPTMAVIELNRPSMELAVADISKYRIAXWNIDQLAIYEPDLDGVAKQCRGKNLFLSTDVXKHVFEAHIVFGSVNTRTKTHGLGACKAADLTY

SEQ ID NO: 231802 - protein, 130 aa, Glycine max
  Clone ID: PAT_MRT3847_5133C.1.pep
KGLAENNFYGTRGEKGPEGPKTAEAGGRTGKKVTTRTGGEPMGAGTSPKAPPGSPKGGAKKNTTPPENGIPAPGNKPRVKGQNSKGRGKNPNKKPLFKRGGERKAPRGPRGNLGNQKGDPRGPKKIKPPH

SEQ ID NO: 231803 - protein, 133 aa, Glycine max
  Clone ID: PAT_MRT3847_51340C.1.pep
RVFTPPRAPCLGIFGPFFAPLPPLDFGSMVLSSPLFPFLFFDISMSQPQFPFACFLLSNSPNIFGWFFFFFFFPLKKKPVLKMFFIRFFKPFSGKFKPGTPPKLHPPQPTFPTFSAFFFLSKRHHFTQSHIFS

SEQ ID NO: 231804 - protein, 47 aa, Glycine max
  Clone ID: PAT_MRT3847_51341C.1.pep
SSTLSFKTKLSISNVSKVGSVKLPLTKSILFQLPLSPRGCLTWTLSS

SEQ ID NO: 231805 - protein, 55 aa, Glycine max
  Clone ID: PAT_MRT3847_51342C.1.pep
FSVSQSNHPLRLVIIKRKHVTLQNTPKVEAFLHRQWELYRYMCPLTHSSPREEEL

SEQ ID NO: 231806 - protein, 61 aa, Glycine max
  Clone ID: PAT_MRT3847_51343C.1.pep
INKYISKIHYKNIYHIVQLNTIHVTSSLYHLKLIFQSSITLHMNPTLDSRRTNTNFIIKNS

SEQ ID NO: 231807 - protein, 70 aa, Glycine max
  Clone ID: PAT_MRT3847_51344C.1.pep
DPSRRAETYHEVCASFADAGEYHVPAASPYSAADVLTHGWLCKEMSAEDIGRNHLPIITAHTVICYTDPE

SEQ ID NO: 231808 - protein, 55 aa, Glycine max
  Clone ID: PAT_MRT3847_51345C.1.pep
QLHNTSLLHNLLTITLFLTLSLTSLHQPSLLQTHTHTTLYTFHYPPSTILFLTYT

SEQ ID NO: 231809 - protein, 441 aa, Glycine max
  Clone ID: PAT_MRT3847_51346C.1.pep
ASLTTRPVLKVADFGLANYVNSGHRQPLTSRLVTLWYRPPELLLRLKDYDPSVDLWSGGLMFGKLLVGKPILQGRTQVEQLHKIFRLCGSPPDEYWKKSKLPHATLFKPEQPYDSCLRQSFKDLPTTSVHLLQTLLSVGPYKRGTATSALSSEYFKTKPYACDPSSLPVYPPSKEIDAKHRDESRKNISGRVRGTATRKPSRKPLGFNKLAPAEGLASQTQTSQKVNGRSFHILEEEKIKIGDKAQKPSSGKPEDASHMKNASQGDIPLSGPLQVSTSSGFAWAKSRKDDTSFRSHCRTISRGHTFNPLEPCTLNSRNNLDTTNQENKEFSGGCPNSRGHDLLEISKLSMQNQWSKFDRPDSFDASDEYHSQELSIALYHREDSASKRSNLSFQDQGEKVEFSGPLLSQMHTVDELLERHERHIRRTVRRSWFQRGKKLGK

SEQ ID NO: 231810 - protein, 42 aa, Glycine max
  Clone ID: PAT_MRT3847_51347C.1.pep
QQRHDSFFIEKNNQRLNKICLKLTSYFKKIKLRKRTIFLKIS

SEQ ID NO: 231811 - protein, 112 aa, Glycine max
  unsure (1)..(112): unsure at all Xaa locations
  Clone ID: PAT_MRT3847_51348C.1.pep
VRKLNPINTISFVQILGTGMDTQDTSPSVLLFFDNQRFIFNAGEGLQRFCTEHKIKLSKIDHIXLXRXCSETAGGLPGLLLTLAGMGEDGMSVNIWGPSDLKYLVDAMRLYP

SEQ ID NO: 231812 - protein, 50 aa, Glycine max
  unsure (1)..(50): unsure at all Xaa locations
  Clone ID: PAT_MRT3847_51349C.1.pep
KFLIXXTKPKTNWKXNXXXXXXVXXPPHLPKSDFCNQRSKPMYVNREIQS

SEQ ID NO: 231813 - protein, 41 aa, Glycine max
  Clone ID: PAT_MRT3847_5134C.1.pep
HRYDMLVFQSCSCANVYCVQIIIFSHRSVYVYIYIDTVFFS

SEQ ID NO: 231814 - protein, 43 aa, Glycine max
  Clone ID: PAT_MRT3847_51350C.1.pep
QTQLSASLGTCWYCICACSISAFTTSLHNATDMNPTVRLAMHT

SEQ ID NO: 231815 - protein, 94 aa, Glycine max
  Clone ID: PAT_MRT3847_51351C.1.pep
CVYKQTATGTQSLHLIASNKDCTEVSDWTSQGATALEGSLSDEKTGRPILPGVPTASRCLPFRKHQAPCKPVTPTCTRISRAILPAMGRLCALR

SEQ ID NO: 231816 - protein, 55 aa, Glycine max
  Clone ID: PAT_MRT3847_51352C.1.pep
MQMFKKPITNITISRAEENTYPDTFEGALDHYIISLVFGIGTFSYCVYYRKVSRY

SEQ ID NO: 231817 - protein, 79 aa, Glycine max
  Clone ID: PAT_MRT3847_51353C.1.pep
PLPPSPLLSPPWAKQGRSGLGVAWMWAKSTVLLGGKSPLKKNQPSLPPILSWNIFGVGTQKTNKKIHSFLGQKKNAKTN

SEQ ID NO: 231818 - protein, 107 aa, Glycine max
  unsure (1)..(107): unsure at all Xaa locations
  Clone ID: PAT_MRT3847_51354C.1.pep
XGGEPPYDYIEFGFENLTNMCSLTFPVPILFKRALVTVGFDHLLIMFFSRELLTDLARVRSNGLDTVKFVANSGPYYEGLRLEVKSCGYHLLFEDHLQRFKSNMMFS

SEQ ID NO: 231819 - protein, 37 aa, Glycine max
  unsure (1)..(37): unsure at all Xaa locations
  Clone ID: PAT_MRT3847_51355C.1.pep
IFLKINGKLLVQIKSRVSTKRTQNLXNVMLQILLYMI

SEQ ID NO: 231820 - protein, 153 aa, Glycine max
  Clone ID: PAT_MRT3847_51356C.1.pep
LFGGLVPLVDKEKQTQQTNASNLRSLLGLLVGIMLFGGLVPLVDFRFGGLVENVPGTGRSNYVSDRVYGQGGGKVWSLNGRRNGSERDEDVGFSNGGRFSVSDRVNYERGRNFREERHDRRKGSDDFGRQGNASEPLVASLYVPRNDKMVKID

SEQ ID NO: 231821 - protein, 323 aa, Glycine max
  Clone ID: PAT_MRT3847_51357C.1.pep
MAGGLVGFSEFEARISDVEAALKKTAKMIQVQVDVVDKKIEDEVRGLRRELNEKIEEKGEILENGLKKMEAKNEELERYLSELKGEDWLSKEEFEKFVDEVRSVKGSGYEGGGLDEIREFARRVIEKEIEKHAADGLGRVDYALASGGGTVVKHSEVFDLGRGNWFLKSARNGVHPNAEKMLKPSFGEPGQCFPLKDSRGFVQIRLRTAIIPEAVTLEHVAKSVAYDRSSAPKDCRVSGWLQEHNADSAINTEKMHLLAEFTYDLEKSNAQTFNVLNSAASGVINTVRLDFTSNHGSPSHTCIYRFRVHGHEPDSVSMLALEL

SEQ ID NO: 231822 - protein, 153 aa, Glycine max
  unsure (1)..(153): unsure at all Xaa locations
  Clone ID: PAT_MRT3847_51358C.1.pep
WCREGDILIERSTNLDWDMGTTVLDALDQISEPKRPCDKPLRLPLQDVYXTGGIVTVPGGRVETXVLKPAMVVTXAPTGLTTEVKYVEMHHESITEAHPGDNDGFNDNNVAXKDLSVAREAHSXKDDPAXDAADFTVQVIIMNHPGQNGNGYA

SEQ ID NO: 231823 - protein, 103 aa, Glycine max
  Clone ID: PAT_MRT3847_51359C.1.pep
YNYHATYHPYTTTPKTASRPQLTFLTFYCQVHSSSPVKSVLCYLIHMRILPVVSTICFNPTSLAYLSTLILPGLLMISSLSPPPPQRRRTSYSHERETFLDPG

SEQ ID NO: 231824 - protein, 89 aa, Glycine max
  unsure (1)..(89): unsure at all Xaa locations
  Clone ID: PAT_MRT3847_5135C.1.pep
XGSXSSXTLXXSTCXXXXAVSQCXXVSXRSXSXNRSTNXVDGXSXGXXDXTXIXXXSVAYXRXEILNXXGEXSMDSEFPIQLTIXXXFS

SEQ ID NO: 231825 - protein, 183 aa, Glycine max
  unsure (1)..(183): unsure at all Xaa locations
  Clone ID: PAT_MRT3847_51360C.1.pep
MSASTVSITAANPGARRRPVIAIEKKTATNLELLANDVAVSPAVATSGDGATGRDLSHHSVRGEALLDRTPRDLAPAKKVAGGNSSSVPPRRARKLAAKAEKPRWLTLVSIFGKNMVLLVVLAXLVQLICRISDVEGLLKKTAKMIQVQVDVVDKKIXDEVRGLRRGLNEXIEEKGEILKNGL

SEQ ID NO: 231826 - protein, 80 aa, Glycine max
  Clone ID: PAT_MRT3847_51361C.1.pep
FGRIKNPRGYTNLAYYCIIGWRGKRMDNGKVFGSDGILINVWKCVEEQCIICFTELFNEILNLRKCQMSEGEILWFLIFI

SEQ ID NO: 231827 - protein, 139 aa, Glycine max
  Clone ID: PAT_MRT3847_51362C.1.pep
RSRFREGFPHVGSLKSGEGGKWGFVSGDGEEMTSIPGTSVEEAYNKLIDELDTRVPTLGGIECPKDEKLPRGKIFDKPKTRCFTMLPMEFNLEVRQKVINIVRIIMKNRDKLSCQVGINPYSMECTGLPNRLLSKGNYI

SEQ ID NO: 231828 - protein, 63 aa, Glycine max
  unsure (1)..(63): unsure at all Xaa locations
  Clone ID: PAT_MRT3847_51363C.1.pep
SFVSIPIEILLFRSEQFVGIWIALTIYMILRMLVGIWRMXTGTGPWYYLSEGPWCYMRGHSLP

SEQ ID NO: 231829 - protein, 131 aa, Glycine max
  unsure (1)..(131): unsure at all Xaa locations
  Clone ID: PAT_MRT3847_51364C.1.pep
LKLQQSDDTLHEVADAETDIADDLETDDALREVVNAVTYDSDDAVETDGPIDSEEDEEREEERGSADLGGGWGRIVFMPVRRGRQVTMNVCRSTKRDXSEGSYDRIVVTRTKNLTLXQQAKRSIWGDLWPC

SEQ ID NO: 231830 - protein, 55 aa, Glycine max
  Clone ID: PAT_MRT3847_51365C.1.pep
QVRPQRCSLMPFRVPRPLIYIALVILLSIGPGFAVADPFHHCQCCDRTRVEPTMD

SEQ ID NO: 231831 - protein, 280 aa, Glycine max
  Clone ID: PAT_MRT3847_51366C.1.pep
LRRLLTAYARHNPSVGYCQAMNFFAGLLLLLMPEENAFWTLMGILDDYFDGYYSEEMIESQVDQLVFEELVRERFPKLANHLDYLGVQVAWVTGPWFLSIFVNMLPWESVLRVWDVLLFEGNRVMLFRTAVALMELYGPALVTTKDAGDAVTLLQSLAGSTFDSSQLVLTACMGYQNINETRLQQLRNKHRPAVIASIEERSKGLKAWKDSQGLASKLADMQVLGNLSRTESGSTNADEILISLTGEGEIDAVPDLQEQVVCLKVELCRLLEEKRSAILR

SEQ ID NO: 231832 - protein, 91 aa, Glycine max
  unsure (1)..(91): unsure at all Xaa locations
  Clone ID: PAT_MRT3847_51367C.1.pep
MHAYSSEFGSSEAAVIDEDVLRYQFVKKKGYVRXHTNKGDLNLELHCDLTPKTCENFIKLCKKQYYDGTIFHRXIRNFVIQGGDPTGTGTG

SEQ ID NO: 231833 - protein, 122 aa, Glycine max
  unsure (1)..(122): unsure at all Xaa locations
  Clone ID: PAT_MRT3847_51368C.1.pep
AXNSARGXYXXCLXCXVXFVXFLXXXXKCXLXDGXSTGXXAXDXXTXMXXXRAXPXRLSXDXITIXLDXXXPXXRXXXSTXEXFRXRXKXXPXXSXSXXXHVAXRMWXCXPAXXIXXDXXDW

SEQ ID NO: 231834 - protein, 50 aa, Glycine max
  Clone ID: PAT_MRT3847_51369C.1.pep
EGRNHHLFPLALRGLITGEPTALFDPHQAKPKPKKRPPGGLGAPPWALPP

SEQ ID NO: 231835 - protein, 221 aa, Glycine max
  unsure (1)..(221): unsure at all Xaa locations
  Clone ID: PAT_MRT3847_5136C.1.pep
MVSETLQSQTKNVCVIGAGPSGLVAARELRKEGHRVVLLEQNHDVGGQWLYESNVEGEDPLGKKPFLKVHSSIYESLRLTSPREIMGFTDFPFLVKKGRDMRRFPSHTELLMYLRDFCEHFGLGEMIRFNTRVDYVGMLDYGVCSNDLKWVVRSXDKKSEKTVEEVFDAVVVATGHYSQPRLPFIQGMDTWEKETMHSHIYRTPEPFRNEIVVVVGNSFER

SEQ ID NO: 231836 - protein, 43 aa, Glycine max
  Clone ID: PAT_MRT3847_51370C.1.pep
ASHGTNSWYNFSHQDVLNQERWTLSQCVSEEDPKKKKGAARDL

SEQ ID NO: 231837 - protein, 80 aa, Glycine max
  Clone ID: PAT_MRT3847_51371C.1.pep
DLWDEQVYLSRFPRPNIICPLELYQAHQPSCLVWALSSSCTFLLALFTLISNRVMSSFLVLFEGVPTAALQKKKKKKKGA

SEQ ID NO: 231838 - protein, 139 aa, Glycine max
  Clone ID: PAT_MRT3847_51372C.1.pep
MFIIWKFFAITFLICYYFGYIQPYCYALSNTFDPYDILEIERISTQDEIRQAYKRLVKKWHPDKNKELNAEQRFLDINKAYKILSNIEKRQIYDKTGITEDQFGDVQGYEHFFRDQQRFQFQYVRWSPPRRQQNDLLHF

SEQ ID NO: 231839 - protein, 48 aa, Glycine max
  Clone ID: PAT_MRT3847_51373C.1.pep
GEKRGSRMVIIRRMRGSIEVETELNIRVVKVKSYNQMGMFGSANKQSG

SEQ ID NO: 231840 - protein, 64 aa, Glycine max
  Clone ID: PAT_MRT3847_51374C.1.pep
LELEGSQHGYTRTTKMSNMDQSSCTKRKKTTKDIVRVNYCFKLENMYNKWKNSTSTFEKRCHPK

SEQ ID NO: 231841 - protein, 109 aa, Glycine max
  unsure (1)..(109): unsure at all Xaa locations
  Clone ID: PAT_MRT3847_51375C.1.pep
STLFGPCTALSPIVDHVCLTPQFYGSRSDWMSXLPVQTSKFLNTPGVCXIIHAGMTPAHCRNATVKRMGREAFIKHRRRIRYTLDEDLQTDGPNIRXSLAQLTKLYGTY

SEQ ID NO: 231842 - protein, 95 aa, Glycine max
  Clone ID: PAT_MRT3847_51376C.1.pep
TNSGYVEDQKASLLSQLIHITVEDRLKVDNIQRNKDKQQAIERAELYEEVRKQLWLAGPLISACMLKYSQQIISVMFVEHLGQLPLSGASMAYFF

SEQ ID NO: 231843 - protein, 156 aa, Glycine max
  Clone ID: PAT_MRT3847_51377C.1.pep
CPCFPTPLASWVALAILDFKSALCFPLSPVLSALILCLLSFPFCLALCCPYLYVLSFSPYRSRCRPVLFSPTFFLPRGFPFFPVGLSFSPWQVSVPGSSALCSLSSLLRSGPSPPSFRRFFLSPPRSCPRRLVALFLFYPPLPLFGVFCPAKTTQT

SEQ ID NO: 231844 - protein, 117 aa, Glycine max
  Clone ID: PAT_MRT3847_51378C.1.pep
QVSSSTVSYYLYSLSLSLLPLIHGSLRSLEKVDVMPKNRIRAFKTRWHLHPQNHNCDNPKASATPADDEESPPQHRRRNRITRLRTTHRLRPPPNGHILRSKRVGLHKLAPKHQSLQ

SEQ ID NO: 231845 - protein, 127 aa, Glycine max
  Clone ID: PAT_MRT3847_51379C.1.pep
EQNIDTHHQGLSVSEKPTLVHTLLWLAFNNTTSSPPISCTLVHNPNKLLLNPPCFPSKPLMFKITLSLNNHPGPMPPLQPLLSFFLAKRVILLLPLTCRTRSPNSHQTRFLVCFGFRMMKMMKIFEF

SEQ ID NO: 231846 - protein, 43 aa, Glycine max
  Clone ID: PAT_MRT3847_5137C.1.pep
IAQGCAQHGHVGPFLVRDMFLHPHPSPLLTIHPMGPSFSGRVE

SEQ ID NO: 231847 - protein, 211 aa, Glycine max
  unsure (1)..(211): unsure at all Xaa locations
  Clone ID: PAT_MRT3847_51380C.1.pep
MGGSVVEDNHDLDHDLDLDDTPLASASSKSHQQFHSFDFEDTSVLDLRRSSIFNITRMSRSIYFVLIKAKINLLLPFGPFAILLHYVTGHHGWVFFFTLLGITPSAERLGYATEQLAFYTGRTARFLLNAACXYATDMIISIYALTSNIATXCQQSLLRSIAFCWRRSRSCAFYTSGLAHXNKVQXFDXAATVVNSGLLLMAVMGILFLLC

SEQ ID NO: 231848 - protein, 162 aa, Glycine max
  Clone ID: PAT_MRT3847_51381C.1.pep
LEDTHSSHQGLLFLIFSLLFPLLWLAFNNTTSSPPISCTLVHNPNKLLLNPPCFPSKPLMFKITLSTNNHQGPMPPLQLLLPLFIAKRVILLLPLTTTTRSPNSHQTLFLGCFGCPKMKMKIVRTLLELSFNSPLRESGLMTLVRSTTWIILDYMNHTVPLD

SEQ ID NO: 231849 - protein, 69 aa, Glycine max
  Clone ID: PAT_MRT3847_51382C.1.pep
ERTDRNIFTRLVLISVHITNTFFQIKPNTFFHFFFIFIPSPISFLIQTNVPSKPTPTITNCTKLNDGYF

SEQ ID NO: 231850 - protein, 83 aa, Glycine max
  unsure (1)..(83): unsure at all Xaa locations
  Clone ID: PAT_MRT3847_51383C.1.pep
LFEYSVFYHHQSAHPXSCTQKQQHPQLINMSDTYKPTEHXGLKQXGPXXKCVGXXAFAXGXXXXTGXXXGRHTLGXGEXXXGG

SEQ ID NO: 231851 - protein, 34 aa, Glycine max
  Clone ID: PAT_MRT3847_51384C.1.pep
RLLHHFLKLLIGFFKQTQCNERQTLKQKKPYNIL

SEQ ID NO: 231852 - protein, 204 aa, Glycine max
  unsure (1)..(204): unsure at all Xaa locations
  Clone ID: PAT_MRT3847_51385C.1.pep
NWRTSVLVKGSMLSLEKWMLQVAEFHANAVVSVKPKKPSFKERKQKLLTFLQEKYEPVCAKWTTERCAVCRWVEDWDYNKIIICNRCQIAVHQECYGARNVQDFTSWVCKACETPDIKQECCLCPVKGGALKPTDVDTLWVHVTCAWFRPEVSFASDEKMEPALGILSIPLNSFVKEIHGSCTQCCKCSTYFHAMCASRAXYRM

SEQ ID NO: 231853 - protein, 120 aa, Glycine max
  Clone ID: PAT_MRT3847_51386C.1.pep
YPLVNIKWTFSRKHGALSDLADLLVQNNLYDMAFTILLRFFKGSGLKRELERVLSAISLKCCLDKVESSWVEEHSHLLTSSKHEMVAHGSPATVSTTPQTDRNSCWATLKLYLVRIFCYH

SEQ ID NO: 231854 - protein, 140 aa, Glycine max
  Clone ID: PAT_MRT3847_51387C.1.pep
PPFGPQGGGKTGGVFPEGPLCARGGKNGGFFFWGLAKGKGFFSFEGGAIIPALCFSPPRVWVWPPPQPGPKILGFESQSFFWGFKVAPQTGGGAPPGGGGPPQKKVFFCPSFYWGGGGSPFFCGFSHGGGQVWGFGRFLV

SEQ ID NO: 231855 - protein, 65 aa, Glycine max
  Clone ID: PAT_MRT3847_51388C.1.pep
WLLLHYCGGALPVAPDFLQKAGIDTSVPNTLLCDLQQCMDHQLFFCMVLVYGSIEFDRESVQLCY

SEQ ID NO: 231856 - protein, 129 aa, Glycine max
  Clone ID: PAT_MRT3847_51389C.1.pep
IEIFVLFLRAVYLVILLSPCIAMAPLVDFFGTQFRKTWIHVVRVTLEKAGPAFIKWGQWAATRPDLFPRDLCDELAEFQTKAPSHKFSYSRKCIENAFGQKLSEIFENFEEEPIASSSIAQVHRATLKY

SEQ ID NO: 231857 - protein, 73 aa, Glycine max
  Clone ID: PAT_MRT3847_5138C.1.pep
VIIAFCTTGVKQFNNFKALLWKKVVLGEASLNVTSLFLARLLACLRHPLSKILCVCRLGIDHIAFIDYKGIKS

SEQ ID NO: 231858 - protein, 163 aa, Glycine max
  Clone ID: PAT_MRT3847_51390C.1.pep
NGRYFAGKQVSCQFVNLTRWKVAICGEYMKSGFKTCSHGTTCNFIHCFRNPGGDYEWADSDKPPPKFWVKKMIALFGYSDDYETSMEQGNMSLSKTDSDRTCHSRRRSRSREMDQLNCGHSGRRKQRDERKHRTPNEDWNGSFKRKSRGRTPDSGAVSDREWL

SEQ ID NO: 231859 - protein, 83 aa, Glycine max
  Clone ID: PAT_MRT3847_51391C.1.pep
YGCEKTTEGVGEGFGKMTLPYHASCQDTLSIFTLFPQLSSCLLAQGTRLIYQSNKAVPQNHLLKLYKPMLVCNQYISALFFIY

SEQ ID NO: 231860 - protein, 87 aa, Glycine max
  Clone ID: PAT_MRT3847_51392C.1.pep
KKTGDPFFKKKNFQLLKSYNWACRGIFCFPNFANKLLANWLKNQKGPLGKYYQPDFPPGEFSPPVKKTFLPKTIFTEGRCSIESTIF

SEQ ID NO: 231861 - protein, 68 aa, Glycine max
  unsure (1)..(68): unsure at all Xaa locations
  Clone ID: PAT_MRT3847_51393C.1.pep
QISXNVKRHEEQRTRNTKDDCDLVPLRSRMSEFSDVHDIMGEGSVSDSGMSSGKRHHFQSKEASNHQK

SEQ ID NO: 231862 - protein, 41 aa, Glycine max
  Clone ID: PAT_MRT3847_51394C.1.pep
ECYVRLSDLADRVILALLTYILTTSSANILNFYVVLHDKSI

SEQ ID NO: 231863 - protein, 159 aa, Glycine max
  unsure (1)..(159): unsure at all Xaa locations
  Clone ID: PAT_MRT3847_51395C.1.pep
MLVYHDLLTGDELVSDSFRYTEIENGTLWEVEGKWIVQGALDVDIGANPYADGGEDEGVDDAAAKVADIADTIRLDEQPAFDKKQHVTFMKRPIKNLTPKLDAENLELHKKLIEGSTINLLSKTNDFQLLVGESMNDDACXVLAYYKDGAADPXYLYFA

SEQ ID NO: 231864 - protein, 31 aa, Glycine max
  Clone ID: PAT_MRT3847_51396C.1.pep
TDSICRELQGFTNLIERLCYVPALDGVAHAP

SEQ ID NO: 231865 - protein, 89 aa, Glycine max
  Clone ID: PAT_MRT3847_51397C.1.pep
RYEGGFWTDHAKHVPLDNERHVAIVTTASLPWMTGTAVNPLFRAAYLSQSAKQKVTLLVPWLCKSDQELVYPSNVTFTSPEEQEAYIRS

SEQ ID NO: 231866 - protein, 52 aa, Glycine max
  Clone ID: PAT_MRT3847_51398C.1.pep
NIPHRQGNGPKPLLLFGKFEIFKTFFPIKTKNSPLQKQTALKFAPRRSKPYF

SEQ ID NO: 231867 - protein, 144 aa, Glycine max
  Clone ID: PAT_MRT3847_51399C.1.pep
RKDAAKIITQQDDRLLVMVGPCSIHDPETAIEYCQRLKALAEKLQDNILIIMRAYLEKPRTTVGWKGLINDPDIDESYQINKGLRVSRKLYIDLTSQGMPIASEMLDTISPQFLADLISLGAIGARTTESQLHRELASGLSFPI

SEQ ID NO: 231868 - protein, 99 aa, Glycine max
  Clone ID: PAT_MRT3847_5139C.1.pep
MGKGETMVLFLQQTPELGLQGPRPRGGGSTGYLVNQAKTFIFFKKKKHPFPCFSNGRPLNFPLTKGGQAQKDFFMPGLPLIRDNETTNPPGRGFAYSQP

SEQ ID NO: 231869 - protein, 70 aa, Glycine max
  Clone ID: PAT_MRT3847_513C.1.pep
SACQPSLLPPSLGGLPWALPCWFQLVIIRRLEALWAGLTAVSLLGSAAVGSSQQRLTSVLDLCTEIPIKR

SEQ ID NO: 231870 - protein, 438 aa, Glycine max
  Clone ID: PAT_MRT3847_51400C.1.pep
MDYDDNDFQNQNLHLAGEGSAKFPPVLRPYALPKFDFDESLQANLRFDSLVETEVFLGIESNEDNQWIDTFSRGGSGIEFSSTAAESCSISRHGNVWSEATSSESVEMLLKSVGQEDYIPRQTVIQESDACDELACLAKQMDTNPKFDDKNEFKHSVSDLHPPGGTHTSFSGLKEDVGMEKPQGGVSQGHDGELSIDGTSSNPELSDICRNIDLPVSEGSLTLDTNDKNNNTNQREVETVDDDSHHGKTQDDSSAVQTNIAESSIKNMGDDKRDPLQAQTYNQDLESSLMDKEAVVDTQTLDRDMVGSDAHHLDKPLCSIPTEENLEGGVVEGLETGISSLESSLRMESVAVSQKVEKSSEDMCFSALSQNIVSEDVMLLNDVVMDDQSVPNTTELPKPSIKDDSISEGQAEVSNLHCENFPNMQQNVDVMEKTTYDV

SEQ ID NO: 231871 - protein, 83 aa, Glycine max
  Clone ID: PAT_MRT3847_51401C.1.pep
MYRPTRLLLRSFWTRGDRLRGAPYDMIPILRETKIKKRGAALTQRHRENQSATQPTSQEKQTHLSRRGKIRKEPNDSTFQQIE

SEQ ID NO: 231872 - protein, 91 aa, Glycine max
  Clone ID: PAT_MRT3847_51402C.1.pep
MDYDDNDFQNQNLHLAGEGSAKFPPVLRPYALPKFDFDESLQANLRFDSLVETEVFLGIESNEDNQWIDAFSRGGSGIEFSSTASETCSIS

SEQ ID NO: 231873 - protein, 129 aa, Glycine max
  Clone ID: PAT_MRT3847_51403C.1.pep
YVTNLIRHRLVAEANFPTATLCLRASLDGPCFNQNRNNRRQVAKPWHSSLCMYFFFNWKIRASYIHSGGFQLHLQTREQIMRHPICLIIVNKPCHHVIDVISFFLCLNLQQVKKLLLIEIRMSILVLLG

SEQ ID NO: 231874 - protein, 204 aa, Glycine max
  Clone ID: PAT_MRT3847_51404C.1.pep
MQENKDPAIKLFGQKIAFAGEVDPPAISAGEIDSPPAMDVDKDEEDDFGDSETEDEKDKDPRAEKVSEKTKEADPPPNAADSKKTPEGIQNPNTPSIDEESAKSKTNKSENNNNNKTLKKPDKILPCPRCNSMDTKFCYYNNYNVNQPRYFCKACQRYWTAGGTMRNVPVGAGRRKNKNSASHYRHITISEALQAARIDAPNGT

SEQ ID NO: 231875 - protein, 98 aa, Glycine max
  Clone ID: PAT_MRT3847_51405C.1.pep
FAQLWGGLKNWKRLFPRPEKKPAGCSPNKQKPPFGRFWGGGPSAEKKEIGGLKGFPPKEYKGGGFLECPPISKSRFFFTPGGGLKAPSHKKGGGKTYF

SEQ ID NO: 231876 - protein, 261 aa, Glycine max
  Clone ID: PAT_MRT3847_51406C.1.pep
MAVGKNKRLTKGKKGGKKKVVDPFTRKDWYDVKAPAIFLERNCGKTLVNRTAGTKIASEGLRGRVFEVCLADLNKDEDQAFRKIRLCAEEIQGNQIITGFHGMDFTRDKLCSLIRKWQTLIEAFVDVKTTDGYLVRLFCIAFTKKRPNQIKKTTYAKTAQIRAIRKKMTSIMTEEASKCDIKDLFLKFVPEIIGKEIEKATQGIYPLQNVYIRKCKILKKPKFDLVRLMELPEGGAQEKGAKVAPEEDQLVESMAGPGGRL

SEQ ID NO: 231877 - protein, 94 aa, Glycine max
  Clone ID: PAT_MRT3847_51407C.1.pep
IIFALSSASTLSTSDISVQFPLTKSQSENFISDTTSHFKSKPVVLVILWPDRKFFSCVPLVKSMLYFSLINLSQLHQLVGKSLKIDGVITQISE

SEQ ID NO: 231878 - protein, 149 aa, Glycine max
  Clone ID: PAT_MRT3847_51408C.1.pep
EWECPQCDFYNYGRNMTCLRCDCKRPGQISLGATNTMPNMGYENGNNPNTSDIDARLAANEEKAQRWFSKVSQLDSSADINSVMADEDFPEIMPLRKGVNRFVVSTRKTPLERRLANAQYKRNLNNDIPGMRILKLGSQSNPMTIWMKC

SEQ ID NO: 231879 - protein, 79 aa, Glycine max
  Clone ID: PAT_MRT3847_51409C.1.pep
TQSAPVSVSLTQRPAQRLILAPLRSSTSTRGTTWRHLSNREPIASVVRYNARPPVVAVQQTRPVALGRTGEPVRHGSSP

SEQ ID NO: 231880 - protein, 56 aa, Glycine max
  Clone ID: PAT_MRT3847_5140C.1.pep
TWLLIFSPNTLKILKMLRASPITTYFTRIRTTFRNRNIYLPSLLCLQFKIGRKFPW

SEQ ID NO: 231881 - protein, 68 aa, Glycine max
  Clone ID: PAT_MRT3847_51410C.1.pep
IVFPSFLWQDFLSSSQVPSFLLFFLIKAPHTFFVQSANTFEPLNQEFKLMWDWGFAMTIDFGENCGQM

SEQ ID NO: 231882 - protein, 191 aa, Glycine max
  Clone ID: PAT_MRT3847_51411C.1.pep
MSRHPSVKWAQTSDVLYLTVELPDAQDVKLKLEPEGKFYFSATAGAEKIPYEVDIDLFDKIDVNNSKASVGSRNICYLVKKAENKWWDRLLKQGGKSPVFLKVDWDKWGDGDEEQDNKPAASDMDFGDIDFSKLGMGGGEGLDSDAAGNDDADESDTEEEFVAEASASKEQDTKDAVSSDAIPKDAPDTKA

SEQ ID NO: 231883 - protein, 307 aa, Glycine max
  Clone ID: PAT_MRT3847_51412C.1.pep
ETELKLPIIDFSIEYLESNSDQWESVKSQVHKALVEYGCFEAVFDKVPLDLRKAIFLEVEELFDLPLQTKQRVVSSKPYHGYVGPLQLYESMGIDDVDVHDKVESLIKILWPQGKPGFSKNLQSFTEQVTRLDQIIRKMILESLGIEKYMDEHMNSTNYLARLMKYQGPQTNEAKVGIREHTDKNILTTLCQNQIDGLEVQTKSGEWIKCKPSTPNSFVVVTGDTLYAWTNGRVHTPAHRVMMSGNETRFSIGLFTVPKPGFIIKAPDELVTEEHPLLFKPFVQSEFMKFLRSSESTKNALKVYCGV

SEQ ID NO: 231884 - protein, 68 aa, Glycine max
  unsure (1)..(68): unsure at all Xaa locations
  Clone ID: PAT_MRT3847_51413C.1.pep
MHGRGGEKGKRTRHMWKSSTRGDSSLNSRXSSSSSSSSASVKSFCKDGRKISVGECALLKPPEDRPPF

SEQ ID NO: 231885 - protein, 56 aa, Glycine max
  Clone ID: PAT_MRT3847_51414C.1.pep
FYKHISLSISTHNGTQTPCVVITSELCAPKTNKYSQSPPPLFSPQLSRTIMHTLVS

SEQ ID NO: 231886 - protein, 66 aa, Glycine max
  Clone ID: PAT_MRT3847_51415C.1.pep
GDTLMFSTPAKKRIISQVMAKCEQMQFPPSLPILVGGTIYCSHVEHKLFMGHHAIPLRKKKPKNDL

SEQ ID NO: 231887 - protein, 113 aa, Glycine max
  Clone ID: PAT_MRT3847_51416C.1.pep
PSSYPRSSRTWGSPYVWWGAPLRGGGFFPHFAPPFLLKRRFFLGFPPLFGGEGIPFFFFLPPIRQKLFSFFFWSSKDFYAFFFFSLRPFLSFSGVKKSNKSPLVLCFFWAPLR

SEQ ID NO: 231888 - protein, 100 aa, Glycine max
  Clone ID: PAT_MRT3847_51417C.1.pep
KLSRAPGREPPTLKHIVQGKIDCMHGLMFLLLLLVVFFYFVHVVELSGRRFMFLGLMSFFRHYVLCHFVTSSILFFKFLKCIILSDPSRPSIIPPQCMCL

SEQ ID NO: 231889 - protein, 54 aa, Glycine max
  unsure (1)..(54): unsure at all Xaa locations
  Clone ID: PAT_MRT3847_51418C.1.pep
XWVSIQLKPEXTLWKIFKSHITMCFLLQKCIHAHLIKNSVNKIKIKIFFEAVIV

SEQ ID NO: 231890 - protein, 70 aa, Glycine max
  Clone ID: PAT_MRT3847_51419C.1.pep
FMPPRESDPSRVRLKSRSGRLVIKNASGLFAKSNLQSFQSYLSTRDAPHSASGSCASVIIRPFFRMAKNK

SEQ ID NO: 231891 - protein, 142 aa, Glycine max
  unsure (1)..(142): unsure at all Xaa locations
  Clone ID: PAT_MRT3847_5141C.1.pep
RLALLKGVSGAFRPGVLTALXGVTGAGKTTLMDVLAGRKTGGYIGGNITISGYPKKQETFARISGYCEQNDIHSPHVTVYESLLYSAWLRLSPEINADTRKMFIEEVMELVELKALRNALVGLPGINGLSTEQRIRLTIAVE

SEQ ID NO: 231892 - protein, 86 aa, Glycine max
  Clone ID: PAT_MRT3847_51420C.1.pep
ILPNWDVIGLRGTGSHDVVVSDVIVPEQWTLIRGGPATLDGPIYRYPSVAFAAQAHAVVGIGIARAAIDEVIAMAGSRASITGAPV

SEQ ID NO: 231893 - protein, 144 aa, Glycine max
  unsure (1)..(144): unsure at all Xaa locations
  Clone ID: PAT_MRT3847_51421C.1.pep
MAVHSYLPYSHVNEGHPDKLCDQIYDAVLNACLEQDPDSKVXLCETCTKTNLVMDFGQITTKGNVDYEKIVRDTSMNIGFDSYDARLDADNCMDLMDIEHQNHDIAQGVHGHLTKKPEEIGAGDQSDMFGYATDETTELMPLIH

SEQ ID NO: 231894 - protein, 61 aa, Glycine max
  Clone ID: PAT_MRT3847_51422C.1.pep
HIRVNNMNPCEPTLIILLKEMFPSKEICEKLIIILTTHGTNMSHPMISDHHKLKRCSLRAL

SEQ ID NO: 231895 - protein, 80 aa, Glycine max
  Clone ID: PAT_MRT3847_51423C.1.pep
IISDIFPKIIIFIVNHLLRKINKLKGLFISFDRLYLYPFLLSERVSIIPLFKYELNKISLVLVEFSDLYLGTSGTPFIIY

SEQ ID NO: 231896 - protein, 151 aa, Glycine max
  unsure (1)..(151): unsure at all Xaa locations
  Clone ID: PAT_MRT3847_51424C.1.pep
WRIHDFCTEVLKKQGGTGEFKGPWFTKMHYLITCDSLNVQHMLCKSFDNYIKGPEFREIFEPFGDGVVTADSETWKYFRTVLHSLIKQRRFETFVDKTVQKKVHTSLLPILDHVQQQGEMVDLQXDVLNRFTFDNICSTIVGHDPKSLPID

SEQ ID NO: 231897 - protein, 72 aa, Glycine max
  Clone ID: PAT_MRT3847_51425C.1.pep
KHIENQSPKPNLGKRTPHKNFKKRKSGSHNNNTISHKLLQCRPALVLSHTTSSGDLSCGTGALAIDNHFSHA

SEQ ID NO: 231898 - protein, 160 aa, Glycine max
  Clone ID: PAT_MRT3847_51426C.1.pep
MAEEHRCQAPEGHRLCSNNCGFFGSPATMNLCSKCYRDIRLKEEEQAKTKSTIETALSGSSSATVAVASAVDSLPAPVESLPQPSVVSSPDVAAPVQANRCGACRKRVGLTGFKCRCGTTFCGTHRYPEKHACGFDFKAVGREEIARANPVIKGEKLRRI

SEQ ID NO: 231899 - protein, 160 aa, Glycine max; identical to SEQ ID NO: 231898
  Clone ID: PAT_MRT3847_51427C.1.pep

SEQ ID NO: 231900 - protein, 76 aa, Glycine max
  Clone ID: PAT_MRT3847_51428C.1.pep
VTLLWCMGIICHLSLPLMLWVAAVLPRENIEQKGLRRVTQKGSESKISECFQMQSFLKSRKSRASRTKMKFNFIVF

SEQ ID NO: 231901 - protein, 164 aa, Glycine max
  Clone ID: PAT_MRT3847_51429C.1.pep
MAEEHRCQAPEGHRLCSNNCGFFGSPATMNLCSKCYRDIRLKEEEQAKTKSTIETALSGSSSATVTATAVVASSVESPSAPVESLPQPPVLISPDIAAPVQANRCGACRKRVGLTGFKCRCGTTFCGSHRYPEKHACGFDFKAVGREEIARANPVIKGEKLRRI

SEQ ID NO: 231902 - protein, 148 aa, Glycine max
  unsure (1)..(148): unsure at all Xaa locations
  Clone ID: PAT_MRT3847_5142C.1.pep
MASSDVEYRCFVGGLAWATDDQALERAFSQYGEIVETKIITDRETGRSRGFGFVTFASEQSMKDAIGAMNGQNLDGRNITVNEAQSRGGGGGGGGGGYNRGGGGYGGRSGGGGGXDGGYGXGGGGGYGGGRDRGYSRGGDGGDGGWRN

SEQ ID NO: 231903 - protein, 284 aa, Glycine max
  Clone ID: PAT_MRT3847_51430C.1.pep
MDELEETLLTQIDWESFLDDIPELNVDDFLQDDNAVPVVTDNHSSPNDDPVLSEIENMLMTQAENDAVVLPETPSSEAGYYKLFEEILVEEPKEGPVSPPSKIESEEGSDKDKTDDAASDEPMSKKLKRQLRNRDAAVRSRERKKLYVKNLEMKSRYLEGECRRLGHLLQCCYAENNALRLCLQLRGTYGASMTMQESAVLLLEPLLLGSLLWCMGIICHLSLPLMLWVAAVLPRENIEQKGLRRVTQKGSESKISECFQMQSFLKSRKSRASRTKMKFNFIVF

SEQ ID NO: 231904 - protein, 47 aa, Glycine max
  unsure (1)..(47): unsure at all Xaa locations
  Clone ID: PAT_MRT3847_51431C.1.pep
KHVGHVSLTVQVPAVDKLYSTNGQMTAKIMNPXHTAGGDLKRLTDGK

SEQ ID NO: 231905 - protein, 53 aa, Glycine max
  Clone ID: PAT_MRT3847_51432C.1.pep
RSRGRTRGRTRDFALNRRDGPCSSTTALNPTSSTSRALIGMTLFTVSYKFEKL

SEQ ID NO: 231906 - protein, 74 aa, Glycine max
  unsure (1)..(74): unsure at all Xaa locations
  Clone ID: PAT_MRT3847_51433C.1.pep
SLIACTTPKKNIHIDMYIKKTTPPPPXXXXXGXQLVTAQHSLEIGLVYKTPSGALHFDGQGNFSWEEGKSLGLM

SEQ ID NO: 231907 - protein, 48 aa, Glycine max
  unsure (1)..(48): unsure at all Xaa locations
  Clone ID: PAT_MRT3847_51434C.1.pep
FKNYXXLFKKRTPIRNQIVFSKSVMASPQSGNGRPPMKIRRIIFYLKG

SEQ ID NO: 231908 - protein, 49 aa, Glycine max
  Clone ID: PAT_MRT3847_51435C.1.pep
GGVGLSKEMARNALSVVCTHVVASGLHHHQLPFSASGVIRFTLCILLGA

SEQ ID NO: 231909 - protein, 114 aa, Glycine max
  Clone ID: PAT_MRT3847_51436C.1.pep
VTLIKIRGTSLETFFPVHVRSWHILYYILFILYMDDIWEQLAQANGLSQLQFTLSTALIATTEEILSDGADPIDCHINRLASLSQVTGDFSLIYQFCMLMYLRRNDEWKSYSIT

SEQ ID NO: 231910 - protein, 52 aa, Glycine max
  Clone ID: PAT_MRT3847_51437C.1.pep
ILTSFFCFFEKKGQNRFGVCLKKVSNVFDSHFPLHIFSFTQKTPPFEGLCFF

SEQ ID NO: 231911 - protein, 49 aa, Glycine max
  Clone ID: PAT_MRT3847_51438C.1.pep
PNDILTQDYNTRSLPYTYSTIFYFCHNKFIQISLEMHTVITVFSNLAPK

SEQ ID NO: 231912 - protein, 75 aa, Glycine max
  Clone ID: PAT_MRT3847_51439C.1.pep
NTDIFLHMSRINYHTCVYVPLLLLDSAPPYFIFTLTFPTHGNMMSLIYTLAFADTPNIRGSKISALWGVPLCLTL

SEQ ID NO: 231913 - protein, 119 aa, Glycine max
  Clone ID: PAT_MRT3847_5143C.1.pep
MASSDVEYRCFVGGLAWATDDQALERAFSQYGEIVETKIINDRETGRSRGFGFVTFASEQSMKDAIEGMNGQNLDGRNITVNEAQSRGGYGGGRDRGYGGGGDRGYSRGGDGGDGGWRN

SEQ ID NO: 231914 - protein, 47 aa, Glycine max
  Clone ID: PAT_MRT3847_51440C.1.pep
LRTLIDESIPCACPALVSSGIRAQGGFFSSGEWQILASFNNANISKK

SEQ ID NO: 231915 - protein, 59 aa, Glycine max
  unsure (1)..(59): unsure at all Xaa locations
  Clone ID: PAT_MRT3847_51441C.1.pep
KRRMKIAHLTHICSRPDVVEVWDATVSHPXLLVSLQSYENTESVPRHYCQNKTCLPGEL

SEQ ID NO: 231916 - protein, 75 aa, Glycine max
  Clone ID: PAT_MRT3847_51442C.1.pep
GGDLYPLTKLITGWAPSIQPRPRIFLTFQVRAKMGHRGNTCGELLPEDAKTEYLKLLDRFDPKWRETFSNLSKHF

SEQ ID NO: 231917 - protein, 74 aa, Glycine max
  Clone ID: PAT_MRT3847_51443C.1.pep
PVSNHLYDVPPSSDKTLKFYPKMWHGLLYGDPPENLQIVFSDIIGWIDQKPHHGNSRLERELKEEHDHLVKSDL

SEQ ID NO: 231918 - protein, 64 aa, Glycine max
  unsure (1)..(64): unsure at all Xaa locations
  Clone ID: PAT_MRT3847_51444C.1.pep
XKDXXXAQXXXXRRLGXVXIXXSXXSKXXMXXXXXCXXXIXXHRLXCVXXRXRSVFLXLDNXXK

SEQ ID NO: 231919 - protein, 64 aa, Glycine max
  unsure (1)..(64): unsure at all Xaa locations
  Clone ID: PAT_MRT3847_51445C.1.pep
RRRRVYGFARVSMVFSSLDSGXSICIRKSCVLLTLGFFRYFLGLGIGGDYPXSSTIISDFATKK

SEQ ID NO: 231920 - protein, 46 aa, Glycine max
  unsure (1)..(46): unsure at all Xaa locations
  Clone ID: PAT_MRT3847_51446C.1.pep
ASKTYAQHAGDMRRTCSINVKSNPCKVVQDSTXTTGKHGHALSDSD

SEQ ID NO: 231921 - protein, 77 aa, Glycine max
  Clone ID: PAT_MRT3847_51447C.1.pep
LEKIVKQGIEWLDSNTTASTDELKDKQKEIEEQVNPIMTKIYSAAGGAPGGMPVGAPGAAPGAAPGGDDGPTVEELD

SEQ ID NO: 231922 - protein, 43 aa, Glycine max
  Clone ID: PAT_MRT3847_51448C.1.pep
YNVSETTMAAASTAGRSVAAAANSLVNSSYFSKGALWVSGALT

SEQ ID NO: 231923 - protein, 66 aa, Glycine max
  Clone ID: PAT_MRT3847_51449C.1.pep
PQNRARTASGIERFMIIRHIRVGRSYLSIFTPLKGSKMEIGQSNLRAKAKTGQPKTISTASFQTLK

SEQ ID NO: 231924 - protein, 149 aa, Glycine max
  Clone ID: PAT_MRT3847_5144C.1.pep
AKIDRLLFGSGFVFSCCFALDLIIVLLSYVQIINDRETGRSRGFGFVTFASEQSMKDAIGAMNGQNLDGRNITVNEAQSRGGGGGGGGGGYNRGGGGYGGRSGGGGGGYRSRDGGYGGGYGGGGGGGYGGGRDRGYSRGGDGGDGGWRN

SEQ ID NO: 231925 - protein, 70 aa, Glycine max
  Clone ID: PAT_MRT3847_51450C.1.pep
IKGFNTKFSKRLRSRQICMLDKEKYRSVAPTRIIYSFLYCSSNINLYKIFQPNHHTELRNSKDKLNFEIV

SEQ ID NO: 231926 - protein, 75 aa, Glycine max
  Clone ID: PAT_MRT3847_51451C.1.pep
ILKPKKIIFKSEKCGPNVAVCRCQKRHRAPSNKKGLRASLVPALPLCFVGCLKVPHAPLSIPEVQLIYCSALIGI

SEQ ID NO: 231927 - protein, 40 aa, Glycine max
  unsure (1)..(40): unsure at all Xaa locations
  Clone ID: PAT_MRT3847_51452C.1.pep
GWKENDKFPYSMFXSLKVREXKIETCSCPKFKQHNAGLRD

SEQ ID NO: 231928 - protein, 99 aa, Glycine max
  Clone ID: PAT_MRT3847_51453C.1.pep
MNVTNKPNPYGSTNGFQSLLQQNGWEQGSSRLRPTKLYPAPTARYQDIVRDANLFWGTLQAFHKTLGTKYKISTVGGTPLDLHRLFVEVTSRGGIEKIL

SEQ ID NO: 231929 - protein, 313 aa, Glycine max
  unsure (1)..(313): unsure at all Xaa locations
  Clone ID: PAT_MRT3847_51454C.1.pep
MNVTNKPNPYGSTNGFQSLLQQNGWEQGSSRLRPTKLYPAPTARYQDIVRDANLFWGTLQAFHKTLGTKYKISTVGGTPLDLHRLLGDVTXREWEEVSLTFNVKDTIXSXSSMVRKSYLLMLLHYEQVYYFGIITLSNSTTIPEVAAVNDSPVQSSPVRAHDDMVSGTIDAKFDVGYVVTVTLGSEQLQGVLFHVPDNVSQSSHAEGTSSSQNLGDDTSNLQSRKRAKYAPRDPFRPKSNRSGYNFFFAENYARLKPSYHGQERAISKRIGFLWNNLSEAERQVYQEKGIRDKERYRTELMEYKSNNSTPNAQ

SEQ ID NO: 231930 - protein, 37 aa, Glycine max
  Clone ID: PAT_MRT3847_51455C.1.pep
RKTPPPCLKKPLAYGRGGKIVFLKSNPPYRKLKGLPP

SEQ ID NO: 231931 - protein, 48 aa, Glycine max
  Clone ID: PAT_MRT3847_51456C.1.pep
PTRPTTRSKTFYKSIILLKQRFQPNSGDTTNYKLKLNTLLLHQQQLKF

SEQ ID NO: 231932 - protein, 54 aa, Glycine max
  Clone ID: PAT_MRT3847_51457C.1.pep
KHYLSVLVLLNDIRGPSVIRIYSEVAISIKYPTINRYCHSLRWLLIVQLFNDFS

SEQ ID NO: 231933 - protein, 39 aa, Glycine max
  Clone ID: PAT_MRT3847_51458C.1.pep
GRPFFFFFFFFFYFFFFYFKQRGHCYLKIWGTTGPYKKS

SEQ ID NO: 231934 - protein, 83 aa, Glycine max
  Clone ID: PAT_MRT3847_51459C.1.pep
GKINGLSSLKKCHFLYMKNQPSPVVLHYINIVRKGIYFSGRAIDASCFGNDNGGNSFVFRRLIPQNGTHCARAENGSMMFTWE

SEQ ID NO: 231935 - protein, 91 aa, Glycine max
  Clone ID: PAT_MRT3847_5145C.1.pep
HFPTILFSSQNNPSYPLYLRCRINLDSTNFLYLPLTAPPPEIGFPPLNDAYPMVPPYSFRSEYWTSLWRRSPPAEDTPQPVSPGLSSPPLP

SEQ ID NO: 231936 - protein, 123 aa, Glycine max
  Clone ID: PAT_MRT3847_51460C.1.pep
HGQTILTATTAIVVLTVLLIGGSTGTMLEALEVVGSDSPVESPLASNFEGNNVYISPDDEEPSSGNKIKMKLQEFQRSAASFTAIDKNYLTPFFTSQNGDEEDEAVPLTLKNVGLDDHDHYSS

SEQ ID NO: 231937 - protein, 82 aa, Glycine max
  unsure (1)..(82): unsure at all Xaa locations
  Clone ID: PAT_MRT3847_51461C.1.pep
QNSKTTTXATRNRRLGVGGAMLKVKTINYGGRWGHEQTRISLPNTLTFHSLYKSAITGKRGISANSQRPGVDHFGENVFLAR

SEQ ID NO: 231938 - protein, 51 aa, Glycine max
  Clone ID: PAT_MRT3847_51462C.1.pep
SIIQRGNHALSIIPFSSPAREGREQDNAYSRCVKNHRWLSGVVPILDWTHL

SEQ ID NO: 231939 - protein, 50 aa, Glycine max
  Clone ID: PAT_MRT3847_51463C.1.pep
LLLLQKRTVAQALGPLKRYPPKRERQAVIHNRTKWTIQSVTCSMIYGTRA

SEQ ID NO: 231940 - protein, 107 aa, Glycine max
  Clone ID: PAT_MRT3847_51464C.1.pep
GGPHPPGFPPTKKPVFFMLKSASVGPFWEKLVFFPQKVSVYKLFGQKKKKSTFLALFFKVGTTGGTQLNFFPGLFFFKGWFVSPLFFPCPYFFSKGWFKLKPSFQHP

SEQ ID NO: 231941 - protein, 197 aa, Glycine max
  Clone ID: PAT_MRT3847_51465C.1.pep
MSGLKLGTTASIYVRTAKTKSKPLLSWRSPPQHPRSRRYMLSPSKNQILGFTPRNKFPCYSLGRAGLVTDFGSSVPQPQPQPQPKPEPEPEPEPSKLLTLPTILTLGRVAAVPLLVATFYMDGWRGTAATTSIFVAASITDWLDGYLARKMKLKSSFGAFLDPVADKLMVAATLVLLCTRPLDGGVFGQAPWLLTIP

SEQ ID NO: 231942 - protein, 47 aa, Glycine max
  Clone ID: PAT_MRT3847_51466C.1.pep
TRAEFPGGSERRRPNRRLIRGEEKKTQALGEEPRRGIRKLRTNPSPH

SEQ ID NO: 231943 - protein, 64 aa, Glycine max
  Clone ID: PAT_MRT3847_51467C.1.pep
RLMHASLSPELGFRLQRNSHLTFSLRTLHRSHALLDPVIHRRMSATIRRTSSSHGERHIWYCCT

SEQ ID NO: 231944 - protein, 41 aa, Glycine max
  Clone ID: PAT_MRT3847_51468C.1.pep
ISERLDSIGGHPHTDTYDRSLLVVSEGRRSLSRAVSLSPFN

SEQ ID NO: 231945 - protein, 100 aa, Glycine max
  Clone ID: PAT_MRT3847_51469C.1.pep
KCNKQKKILNIVAPLITIVGYIFLADFGFAQLADLDLSRLGGKPTTLIGHPHLSVWTQACASPTADTIVIAAGTYQMIASHAKSPCMAPIEVQADGTILA

SEQ ID NO: 231946 - protein, 163 aa, Glycine max
  unsure (1)..(163): unsure at all Xaa locations
  Clone ID: PAT_MRT3847_5146C.1.pep
MASADVEYRCFVGGLAWATDDHALEXRAFSQYGEIVETKIINDRETGRSRGFGFVTFASEQSMKDAIGAMNGQNLDGRNITVNEAQSRGGGGGGGGGGGGYNRGGGGRXYGGRSGGGGGGGGYRSRDGGYGGGYGGGGGGGYGGGRDRGYSRGGDGGDGGWRN

SEQ ID NO: 231947 - protein, 75 aa, Glycine max
  Clone ID: PAT_MRT3847_51470C.1.pep
NVKNPSHKTHLPIRSFLSPLPLLDLLPLHAPSITISNGVLASSPSGVHLFCAKVKPLNPFPNLVPQQGRVWIDSF

SEQ ID NO: 231948 - protein, 37 aa, Glycine max
  unsure (1)..(37): unsure at all Xaa locations
  Clone ID: PAT_MRT3847_51471C.1.pep
FXTXXSXSLXAKDXKXXXVLATAFLITSTGSXPCPLM

SEQ ID NO: 231949 - protein, 60 aa, Glycine max
  Clone ID: PAT_MRT3847_51472C.1.pep
YHSPRFSDYIVNTIVSSCHDLLKNLPPFFPMLTPTSEGKRYFVSGLHFNSLRVENRVASS

SEQ ID NO: 231950 - protein, 64 aa, Glycine max
  Clone ID: PAT_MRT3847_51473C.1.pep
KYHTILHRNNNIDTYLKSRHLDTVNPAFYFNNQNLTSDQQTATTMNSYCITTTTPTINSQHIGT

SEQ ID NO: 231951 - protein, 297 aa, Glycine max
  Clone ID: PAT_MRT3847_51474C.1.pep
MLPYASIPEAVAALGRNLTFAETLWFNYSAAKSDYFLYCHNILFLFLVFSLVPLPLVFLEFKRFSFVSSHKIQPKVRLSLAETFKCYKDVMRMFFLVVGPLQLISYPSIQMIGIRTGLPLPSWREILSQLLVYFLVEDYTNYWIHRFLHNDWGYEKIHRVHHEYHAPIGFAAPYAHWAEILILGIPSFLGPAMVPGHIITFWLWIALRQIEAIDTHSGYDFPRSITKYIPFYGGAEYHDYHHYVGRQSQSNFASVFTYCDYIYGTDKGYRYQKKILQKLKEELANGVEQNGGLYKTD

SEQ ID NO: 231952 - protein, 64 aa, Glycine max
  Clone ID: PAT_MRT3847_51475C.1.pep
ANDHFVSKPLIRDVTLSCQVCKYNFRVTASSGPKHQVSSHLQTVAHQFLLQLWDSRSLLSDFVP

SEQ ID NO: 231953 - protein, 135 aa, Glycine max
  Clone ID: PAT_MRT3847_51476C.1.pep
MLPYGSIPEAAAALGRNLTSAETLWFNYSASKSDYFLYCHNILFLFLVFSLVPLPLVFLELKRFSFVASHKIQPKVRLSLAETFKCYKDVMRIFFLVVGPLQLISYPSIQMIGIRTGLQLPSWREILTQFLVYFL

SEQ ID NO: 231954 - protein, 78 aa, Glycine max
  Clone ID: PAT_MRT3847_51477C.1.pep
SLRPCIYKLDLNGRLVGLTDVLYVLSKRLATDPTLPFIISIPLSLTRNKDTCVCTIHAPLCLWLSRLSFTVLIRHNLS

SEQ ID NO: 231955 - protein, 78 aa, Glycine max
  Clone ID: PAT_MRT3847_51478C.1.pep
NICLWLASGWILVEWSFTICSLVLEEGAREEFLLLSCSGIPTFWFWFHVCQNAPSPMGCKFRIFFCHVLEFKHFGFGS

SEQ ID NO: 231956 - protein, 62 aa, Glycine max
  Clone ID: PAT_MRT3847_51479C.1.pep
IAIYIYEKIFMVTSRSTYIDIPSSLFSYQSKFFISKSTAFPFPSTSFTFLLVCDHLLKSTKN

SEQ ID NO: 231957 - protein, 90 aa, Glycine max
  unsure (1)..(90): unsure at all Xaa locations
  Clone ID: PAT_MRT3847_5147C.1.pep
IINDRETGRSRGFGFVTFASEQSMKDAIEGMNGQNLDGRNITVNEAQSRGGGGGRGXGXGGYGGGRGGGYGGGGRGCGGGYNRIGGGRRY

SEQ ID NO: 231958 - protein, 73 aa, Glycine max
  unsure (1)..(73): unsure at all Xaa locations
  Clone ID: PAT_MRT3847_51480C.1.pep
LGXRLEYGCEKTTEGLKYNFLFFPKHPPLTWWCFLPKGAPFFSLSPSSFSNFYLHIFKYRIIILYNFPIFFFM

SEQ ID NO: 231959 - protein, 287 aa, Glycine max
  Clone ID: PAT_MRT3847_51481C.1.pep
MRTVISRLIHSTPSISRLNATVVSISGRNLCTDSNKVDGPFKVEEAETVNVPPLPTEKLLVLGGNGFVGSHICREALDRDLSVASLSRSGRSSLHDSWATNVAWYKGNLLSTDSLKEALNGVTAVISCVGGFGSNSYMYKINGTANINAIRAASDQGVKRFVYISAADFGVVNYLLRGYYEGKRASETELLTRFPYGGVILRPGFIYGTRSVGSMKIPLGVIGSPLEMVLQVAKPLNQIPLVGPLLTPPVNVTAVAKVAVRAATDPVFPPGIIDAYGIQRYSQHKSN

SEQ ID NO: 231960 - protein, 195 aa, Glycine max
  Clone ID: PAT_MRT3847_51482C.1.pep
LRIILQSSGVHSVISFILAFILDRAAHHHRQFALILEPQSIQRSGQSQFESKSYIKSWIQSSKRDVYLGANLNGGHWQMVVILPKENLVVWFCSLHNRPDNYLKGIINSALKGLDDTPQPKSKAAARWIVVKCNRQKGITECGYYVMHWMSSIILGSFGNNWETYFNEVRPLEVERFKALRIQWAQCYLKVRNLT

SEQ ID NO: 231961 - protein, 87 aa, Glycine max
  unsure (1)..(87): unsure at all Xaa locations
  Clone ID: PAT_MRT3847_51483C.1.pep
MARAKQTXRKYTGGKAPTKQLAXTKAARKSAPTTGGVKKPYRYRTVTVALREIRKYQKRTXLLHRRHPSCALDMQTLQDYQTELWRQ

SEQ ID NO: 231962 - protein, 55 aa, Glycine max
  Clone ID: PAT_MRT3847_51484C.1.pep
EKYVPKLFYLYIYQRAGFKGCYTGLGPTVSRAFPANAATIVAWELALKMLGIKHD

SEQ ID NO: 231963 - protein, 170 aa, Glycine max
  Clone ID: PAT_MRT3847_51485C.1.pep
MSRLGVSQISCVGGFGSNSYMYKINGTANINAIRAASDQGVKRFVYISAADFGVVNYLLQGYYEGKRAAETELLTRFPFGGVILRPGFIYGTRSFGSMKIPLGVVGSPLEMVLQVAKPLNQIPLVGPLLTPPVNVTAVAKVAVRAATDPVFPPGIIDAYGIQRYSQNKSN

SEQ ID NO: 231964 - protein, 197 aa, Glycine max
  Clone ID: PAT_MRT3847_51486C.1.pep
KSTSDSLTYKDAYKKNGFLIKALNSRIQSESLKRKFLCTSLVSQRMDENFDATCKRECSICLRDLHLSAVGCSCSDNFACLDHAKQLCSCTWSNKTLFYRYEINNLNVLCQALDGKLSAVFKWAKEDLGLTLNSVASKRSKQSSKNIIGSTHPSQDLQMNEPVSQTASDESSKGKQRQLLDILNSSKTKENEVVPNS

SEQ ID NO: 231965 - protein, 101 aa, Glycine max
  Clone ID: PAT_MRT3847_51487C.1.pep
MAAFGIGIMLLMAACLLPLSVEAMVRHYKFNVVLKNATRLCSTKPIVTVNGKFPGPTIYAREDDTVLVKVVNHVKYNVSIHWHGVRQLRTGWADGPAYITQ

SEQ ID NO: 231966 - protein, 55 aa, Glycine max
  unsure (1)..(55): unsure at all Xaa locations
  Clone ID: PAT_MRT3847_51488C.1.pep
XTIKFFFFLKKKPGTKPWAWCFFLNMLCSQKSEPSNFNFHTNQYVSLTIMSSTKL

SEQ ID NO: 231967 - protein, 113 aa, Glycine max
  Clone ID: PAT_MRT3847_51489C.1.pep
LVFCSTADFGVVNYLLQGCNIGKRAAETELLTRFPFGGVILRPGLIYGTRIVSAPLEMVLRVAKPSNHIPFVGPLLTPPDAVAKVAVTAATATDPVFPPGIIDANGIQRLLSE

SEQ ID NO: 231968 - protein, 101 aa, Glycine max
  unsure (1)..(101): unsure at all Xaa locations
  Clone ID: PAT_MRT3847_5148C.1.pep
FKCLYNVEHXTLLVKFNSDAIDETDXLEETLKLRVESLGGTLEKVTLSGNHITPCIQEPRWQVGKLYTPADAVAQGLKSLSLNDTKILARTISDWFRRFEG

SEQ ID NO: 231969 - protein, 76 aa, Glycine max
  Clone ID: PAT_MRT3847_51490C.1.pep
IGPGFFFGPRSVASPLEMVLQVAKPSNQIPLVGPLLTPPVSVTAVAKVAVTAATATDPVFPPGIIDAYGIRRLLSE

SEQ ID NO: 231970 - protein, 63 aa, Glycine max
  Clone ID: PAT_MRT3847_51491C.1.pep
TRPLISPDSVNGESAKQSRLRWLAPSLMLTLIGQGVYFLWGGEVCNSQSFISCCRPQHCVRNM

SEQ ID NO: 231971 - protein, 57 aa, Glycine max
  Clone ID: PAT_MRT3847_51492C.1.pep
IFVAETQFSLLVTVEALPKIVLVIQKRPDFYSWGNYWARYTGKHETVNRTIDRHRLM

SEQ ID NO: 231972 - protein, 87 aa, Glycine max
  Clone ID: PAT_MRT3847_51493C.1.pep
LSRNFPTMNSSKACTLLNLVAVVMFVAILISQSRVEARVLSHSEEFAFARANNLQTYTSSAYEQAKKTMGFWMQRLASGPSPKGPGH

SEQ ID NO: 231973 - protein, 37 aa, Glycine max
  Clone ID: PAT_MRT3847_51494C.1.pep
NQAGVFPQHSNIIRKWHRFYPTSCVLRMGHYNPIFRT

SEQ ID NO: 231974 - protein, 175 aa, Glycine max
  unsure (1)..(175): unsure at all Xaa locations
  Clone ID: PAT_MRT3847_51495C.1.pep
MSFIGTQQKCKACEKTVYPVDQLSADGTAYHKACFRCSHCKGTLKLSNYSSMEGVLYCKPHFEQLFKESGSFSKNFQSPAKLADKTTHELTRSPSKAASMFSGTQEKCATCGKTAYPLEKVTVEGQAYHKSCFKCSHGXGCPITPSNYAALEGILYCRXHFSSFLGERSYIILLV

SEQ ID NO: 231975 - protein, 55 aa, Glycine max
  Clone ID: PAT_MRT3847_51496C.1.pep
VTFKKKKCIITFLILIIERIFLHSLRHFIMIHIIVIFLSFQKKKMTINAKSGHSN

SEQ ID NO: 231976 - protein, 26 aa, Glycine max
  Clone ID: PAT_MRT3847_51497C.1.pep
SVNCLFSFYNKVNLSVHYKLEQLILI

SEQ ID NO: 231977 - protein, 230 aa, Glycine max
  unsure (1)..(230): unsure at all Xaa locations
  Clone ID: PAT_MRT3847_51498C.1.pep
MGKKKDRIVLPPELPPEIPDEEVEVSDDDLQFVKENRAYASLLSTLDTRSITKHVTRVADAKDDALEKLYEKRMQKNALKKEKEETGLQVDRVDALPIKTLDGKIHYQTATKTVLENDPSEERTGENVKKDKGMVKLTKAEKRAKLKKMRKDAKQQGKEVAKAEVEETPQAAVLAEVKEDLTAEEAFESKKHKLAELGNALLTDPESNIKILXEMVQISKDNDDTHCKLG

SEQ ID NO: 231978 - protein, 198 aa, Glycine max
  Clone ID: PAT_MRT3847_51499C.1.pep
MSFIGTQQKCKACEKTVYPVDQLSADGTAYHKACFRCSHCKGTLKLSNYSSMEGVLYCKPHYEQLFKESGSFSKNFQSPAKLADKTTPELTRSPSKAASMFSGTQEKCATCGKTAYPLEKVTVEGQAYHKSCFKCSHGGCPITPSNYAALEGILYCKHHFSQLFKEKGSYNHLTKSASVKRAAAATAAATTAASVPES

SEQ ID NO: 231979 - protein, 130 aa, Glycine max
  Clone ID: PAT_MRT3847_5149C.1.pep
MASADVEYRCFVGGLAWATDDHALERAFSQYGEIVETKIINDRETGRSRGFGFVTFASEQSMKDAIGAMNGQNLDGRNITVNEAQSRGGGGGGGGGGYNRGGGGYGGRSGGGKDRGYSRGGDGGNGGWRK

SEQ ID NO: 231980 - protein, 79 aa, Glycine max
  unsure (1)..(79): unsure at all Xaa locations
  Clone ID: PAT_MRT3847_514C.1.pep
SLFLXCHXRSXSNXHARESRDSSGRFXLLLLPXXFSFSIXHSHRXAAISXFXXTXXXLKXXXEALRXXHSXGSKRXILL

SEQ ID NO: 231981 - protein, 172 aa, Glycine max
  Clone ID: PAT_MRT3847_51500C.1.pep
MQQAIPYRSWQPLITHTSTTTTTHFTISPHTLTYSTVSPTGLSPKDNIGLEPNNNNNGNSHFFISSKMVPNMVLENAIIVFASRGCCMSHVVKRLLLGLGANPAVHEVEESDEVGVVRELEAIVGANNGGNKMQFPAVFIGGKLFGGLDRVMATHISGELIPILKEAGALWL

SEQ ID NO: 231982 - protein, 151 aa, Glycine max
  Clone ID: PAT_MRT3847_51501C.1.pep
FYTMFCQSRPTKVVPEVEILAMFIKFVVISNISYCFIVHIIIILNKNLSLSHVMVLLDLILRLENEVSQKSFLPTFVTTKTLLTCSGSFKKLVVGNGLCIPPTLLQKRRFQVFQTSCIRKHWKLFLLHHAFHQQLYNHIKQQSIIVESISP

SEQ ID NO: 231983 - protein, 131 aa, Glycine max
  unsure (1)..(131): unsure at all Xaa locations
  Clone ID: PAT_MRT3847_51502C.1.pep
WSRADVETPNGSRAGPKSSKCKEALAKNTAGGAILRSDLWAKFLSEGNFRASAALQCTHRMKGMSKMVATEGIPENTGISLACAMNTTLRGRASSDMYTICSPDXELWKPACTKAMTMSCKSNPCTDAWRL

SEQ ID NO: 231984 - protein, 42 aa, Glycine max
  Clone ID: PAT_MRT3847_51503C.1.pep
SPSRVAIENGERCCRIYAVEAQIISSLFRLILMGCYLINILY

SEQ ID NO: 231985 - protein, 388 aa, Glycine max
  unsure (1)..(388): unsure at all Xaa locations
  Clone ID: PAT_MRT3847_51504C.1.pep
SHASAFALNLADAEPSVADSELKDDLKPSYHVALGSDNTWYLFTEKWIKTVYGTGFPNVPLAEGDARPREIMSILLDKEDMKWDKLSHSEHGGLWFMEGSLDTWSWSLNVPVLSSLSENDELLLQSQDYKDAIERYKEQRNKVSRLKKKIVRSEGYKEYFKIIDAVKFTEEKIKRLKNRSKRLINRIEQIEPSGWKEFMQVSNVIHEIRALDINTHIIFPLGETAAAIRGENELWLAMVLRNKILLELKXAQLAAVCASLVSAGIKVRPGKNNSYIYEPSATVTKFITLLDEQRSALLAMQDKHEVTISCCLDSQFCGMVEAWASGLTWRELMMDCAMDDGDLARLLRRTIDLLVQIPKLPDIDPLLKHNAKAASSVMDRPPISELVG

SEQ ID NO: 231986 - protein, 307 aa, Glycine max
  Clone ID: PAT_MRT3847_51505C.1.pep
MHLASLINPTSNFPLLSSRTTTTSFIFNHRRKKSQSNCIRSHQSTIQQRWTLQGMTALVTGGTRGIGHAIVEELTGFGARVHTCARNEHDLTKCLKNWNDSGFDVTGSVCDVSVPHQREALMESVSSLFHGKLNILINNVGTNIRKPVTDFTSAEFSTLIDTNLGSVFHLCQLAYPLLKASGMGSVVFVSSVSGFVSLKSMSVQGATKGAINQLTRNLACEWAKDNIRSNAVAPWYIKTSLVEQVLSNKDYLEEVYSRTPLRRLGDPAEVSSLVAFLCLPASSYITGQIICIDGGMSVNGFYPTTQF

SEQ ID NO: 231987 - protein, 86 aa, Glycine max
  unsure (1)..(86): unsure at all Xaa locations
  Clone ID: PAT_MRT3847_51506C.1.pep
GVTLWACQGSPSSFFRFFLRNISPPHYALSGTFFLPSLWGVSPRRSIFCLRNLFSQVEDHHFSNFLKSTMFKELYHSFNSSKVXFK

SEQ ID NO: 231988 - protein, 202 aa, Glycine max
  Clone ID: PAT_MRT3847_51507C.1.pep
MKNNNNNTKLILLHPSLHKQTLTPTTAAAASTLFSSHRNLWLFFFFLLFSTLLFTWTIISTAISSATSTTSSTVTSPLSPSVTKALLHYAAAANSSAKPMSPAEISAVSSTLLRLPPRPNLLILGLTHESLLWAALNHRGGRTVFLDENEYAISKFESSNPGVEAYDIQFTTKVSEYPKLLSQVQSQDHGECKTVQKLLSSE

SEQ ID NO: 231989 - protein, 125 aa, Glycine max
  Clone ID: PAT_MRT3847_51508C.1.pep
MIYMQNQQLHLFSIYSCMIMNSSSIYILVFVQLWLLSLPCRESVCIPSERETLMKFKNNLNDPSNRLWSWNHNNTNCCHWYGVLCHNLTFHVLQLHLHTSDSVFYHYYDSYSHFDEEAYKRWSFG

SEQ ID NO: 231990 - protein, 160 aa, Glycine max
  Clone ID: PAT_MRT3847_51509C.1.pep
EFVFFSGGFVEPCLVGRSTPVSFANPKRPLYGHLSSIDSTGTSMRLTWVSGDKEPQQIQYGNGKTVASAVTTFSQDDMCSSALPSPAKDFGWHDPGYIHSALMTGLKPSSTFSYRYGSGWVGWSEQIKFSTPPAGGSDELRFIAFGDMGKTPLDASEEHY

SEQ ID NO: 231991 - protein, 370 aa, Glycine max
  Clone ID: PAT_MRT3847_5150C.1.pep
FFFFLFFFFFFFFFFFFFTPISDYHFIKSTINNQIYWSKTRTTVTQNHKDTQTQTQLKLLSIIINPNQRHQALVSPASITTVTTTRVTTVTTTTITTVSATAIATATATAISTAAAIASTATATVVSPSTTATTTTISTTATTTISTTSTASAATAATTGKNLKLSPKRFFRKKEPSLVSRSDPPSFGSGSSSVDSSTANHKPSPGNQTPTSVLPDVSGEWSEVATAAVDVRWDLAQALRLIDRDNDGVVTRQDLESLLTRLGASPSPGDVALMLGEVDGDGITVESLMSYVGSGLETGSDPDELKEAFEVFDTDRDGRISAEELLRVFKAIGDERCTLEECRRMIEGVDRNGDGFVCFEDFSRMMDLQR

SEQ ID NO: 231992 - protein, 59 aa, Glycine max
  Clone ID: PAT_MRT3847_51510C.1.pep
PNNAAFSNIGQEGPDMYKSKEGSELYRRKHIVRNMTIVAHTAQHTPQYAQRRTWRRLSE

SEQ ID NO: 231993 - protein, 44 aa, Glycine max
  unsure (1)..(44): unsure at all Xaa locations
  Clone ID: PAT_MRT3847_51511C.1.pep
SLRACKNLVRIQPCDLSHESSHVGYECVFSXIRVSHPRVNQCFR

SEQ ID NO: 231994 - protein, 65 aa, Glycine max
  Clone ID: PAT_MRT3847_51512C.1.pep
HITTIRDLLMYPTCGHHCDPYLYLLAKHYPHFLTDHRYHCSTSYCYLLKRSDYSWVKSSFAHLYR

SEQ ID NO: 231995 - protein, 118 aa, Glycine max
  Clone ID: PAT_MRT3847_51513C.1.pep
RAGDKEETRPYSMEWTGLANRLLSKGNEILSSDYASLDGMRTKQVMSKMAEMINSLCGGEEKMTRERTHPPKAWGSRTGNWKKDVRRAESGNPSGFPLTVICKSNSNEKPIRQSNEKI

SEQ ID NO: 231996 - protein, 75 aa, Glycine max
  Clone ID: PAT_MRT3847_51514C.1.pep
MHTLNQPGPNPFSYLTPNRRFPLHKIARARHSAIWFAPTRPTVKCGYGFESASFSQGVGASRADWQSSCAILASK

SEQ ID NO: 231997 - protein, 94 aa, Glycine max
  Clone ID: PAT_MRT3847_51515C.1.pep
CLAQTTGAKAIQARTLGGEQLFIIDRSGLICAKNQKLYFSRRSLWFWLRKLGHFAYERNVNASIDGLPLSSSDPWADPVNPTSPYACCGYSWAK

SEQ ID NO: 231998 - protein, 57 aa, Glycine max
  Clone ID: PAT_MRT3847_51516C.1.pep
MRKVKGHRRIAIRRRTSKLYSCATRLGRMTLIELTRNHELRITRTKPVILIQLKRPL

SEQ ID NO: 231999 - protein, 110 aa, Glycine max
  unsure (1)..(110): unsure at all Xaa locations
  Clone ID: PAT_MRT3847_51517C.1.pep
PARCRASPVKDQGIQXGDVVRTVPQGSTTSMTTGTLPKQIISICEVYERVQLSSVPPIPVHLAAARVVSHVAHSEPSVPSYVSPDSPAPMHLFESLSNSAHARVPPHDES

SEQ ID NO: 232000 - protein, 105 aa, Glycine max
  Clone ID: PAT_MRT3847_51518C.1.pep
LGGQAASRKNIYPNIGGEVYFLGLKAGTSVLEMVRAFEMASGKKIPLVMAGRRPGDAEIVYASTKKAERELKWKAKYGIDEMCRDQWNWASKNPYGYGDQEDSTV

SEQ ID NO: 232001 - protein, 68 aa, Glycine max
  Clone ID: PAT_MRT3847_51519C.1.pep
KESPIIKHHTHHIIPLPLSGIHKSHATRLANKSPIDNTHQHWAPLWNNSINFQNIKKQSPYACMITRE

SEQ ID NO: 232002 - protein, 63 aa, Glycine max
  unsure (1)..(63): unsure at all Xaa locations
  Clone ID: PAT_MRT3847_5151C.1.pep
LCLPVFHIVAVRGGSCRLRVGLGTVLLAVPLAFSLSPPRSGLSLLSSPFKLFXYXXSPLGCFL

SEQ ID NO: 232003 - protein, 116 aa, Glycine max
  unsure (1)..(116): unsure at all Xaa locations
  Clone ID: PAT_MRT3847_51520C.1.pep
LLLFHPLTLPYPVTPPHHTSYSPSNSLPTLHHXHHHPSHLTYTLPSTTLPFTPPXNPPTTIIPSPYFSYNPPPLSNHPPYKPPVSYHPPVKPPISSYPPFKPPFITVHPPFKPPNF

SEQ ID NO: 232004 - protein, 103 aa, Glycine max
  Clone ID: PAT_MRT3847_51521C.1.pep
MRDKTVLVTGGAGYIGSHTVLQLLLGGFRAVVLENLENSSEVGIHRVTELAGDFVNNLPFHKWDLCPRDSLELLLNSTQFHGVFYSSSLRPFLQDFVIIFLII

SEQ ID NO: 232005 - protein, 207 aa, Glycine max
  Clone ID: PAT_MRT3847_51522C.1.pep
QRELFCAWNPYGRTKLIIEEICRDVHRAEPDWKIILLRYFNPVGAHPSGCIGEDPRGIPNNLMPFVQQVAVGRRPALTVFGNDYNTTDGTGVRDYIHVVDLADGHIAALLKLDDPNIGCEVYNLGTGKGTSVLEMVRAFEMASGKKIPLVMAGRRPGDAEIVYASTKKAERELKWKAKYGIDEMCRDQWNWASKNPYGYGDQEDSTV

SEQ ID NO: 232006 - protein, 39 aa, Glycine max
  Clone ID: PAT_MRT3847_51523C.1.pep
TLTYEYIPLPSHLIAIITMATTNTISILKPITTYKLGFI

SEQ ID NO: 232007 - protein, 233 aa, Glycine max
  Clone ID: PAT_MRT3847_51524C.1.pep
MVSRFSPDRVNTKKQQRSNDTVSMGNCNSEASSQTQPHSDHHPQPRSNSNGITVLPPNSKPSVGRVLGRPMEDVRSTYTFGRELGRGQFGVTYLVTHKHTKQQFACKSIATPKLVHRDDLEDVRREVQIMHHLTGHRNIVELKGAYEDRHSVNLIMELCGGGELFDRIIAKGHYSERAAADLCRQIVTVVHDCHSMGVMHRDLKPENFLFLSKDDDSPLKATDFGLSVFFKPG

SEQ ID NO: 232008 - protein, 441 aa, Glycine max
  Clone ID: PAT_MRT3847_51525C.1.pep
MPSQSVLVTGGAGYIGSHTVLQLLLSGYHVFAVDNFDNSSETAINRVKELAGEFANNLSFSKLDLRDRAALEKIFSTNKFDAVIHFAGLKAVGESVDKPLLYFDNNLIGTIVLFEVMAAHGCKKLVFSSSATVYGWPKEVPCTEEFPLSATNPYGRTKLIIEEICRDIYRADSDWKVILLRYVNESVQQPLLYYNNNLTGTITLLEVMAAHGCKKLVFSSSATVYGWPKEVPCTEEFPLSAMNPYGRTKLIIEEICRDVHRAEPDWKIILLRYFNPVGAHPSGCIGEDPRGIPNNLMPFVQQVAVGRRPALTVFGNDYNTTDGTGVRDYIHVVDLADGHIAALLKLDDPNIGCEVYNLGTGKGTSVLEMVNAFEQASGKKIPLAMAGRRPGDAEIVYASTEKAERELNWKTKYSIDDMCRDQWNWASKNPYGYGASADSSN

SEQ ID NO: 232009 - protein, 391 aa, Glycine max
  Clone ID: PAT_MRT3847_51526C.1.pep
MASRVSIGNLTSSAPYINSPHFRSPLKISNNPSLQNASHKVLMRDKTVLVTGGAGYIGSHTVLQLLLGGFRAVVLDNLENSSEVAIHRVRELAGEFGNNLSFHKVDLRDRAALDQIFSSTQFDAVIHFAGLKAVGESVQKPLLYYNNNLTGTITLLEVMAAHGCKKLVFSSSATVYGWPKEVPCTEEFPLSAMNPYGRTKLIIEEICRDVHCAEPDCKIILLRYFNPVGAHPSGYIGEDPRGIPNNLMPFVQQVAVGRRPALTVFGNDYNTSDGTGVRDYIHVVDLADGHIAALLKLDEPNIGCEVYNLGTGKGTSVLEMVRAFEMASGKKIPLVMAGRRPGDAEIVYASTKKAERELKWKAKYGIDEMCRDQWNWASKNPYGYGDQGSTD

SEQ ID NO: 232010 - protein, 298 aa, Glycine max
  unsure (1)..(298): unsure at all Xaa locations
  Clone ID: PAT_MRT3847_51527C.1.pep
MASRVSIGNLTSSAPYINSPHFRSQLKLSSNSSLHKPLMRDKTVLVTGGAGYIGTHTVLQLLLGGCRTVVVDNLDNSSEVSIHRVRELAGEFGNNLSFHKVDLRDRDALGSHDFQXVIVPVKLLLXIXRYFNPVGAHPSGCIGEDPRGIPNNLMPFVQQVAVGRRPALTVFGNDYNTTDGTGVRDYIHVVDLADGHIAALLKLDDPNIGCEVYNLGTGKGTSVLEMVRAFEMASGKKIPLVMAGRRPGDAEIVYASTKKAERELKWKGKYGIDEMCRDQWNWASKNPYGYGDQEDSTV

SEQ ID NO: 232011 - protein, 167 aa, Glycine max
  unsure (1)..(167): unsure at all Xaa locations
  Clone ID: PAT_MRT3847_51528C.1.pep
QIFVKTLTGATITLDVECSDTIDNVKAEIQDTEGMPPDQQRLIFAGKQLEDGRTLADYDILNESTLHLVLRLRGGMHIFDKTXTGKTITVEVESSDTIDDVYAMIHYKEGIPPDQQRLIIAGEQLEDGRTLADHNIHXEYTLHLVLRVRGGMQMFSRTLTGQTHNLE

SEQ ID NO: 232012 - protein, 55 aa, Glycine max
  Clone ID: PAT_MRT3847_51529C.1.pep
GAGGLQNTGGIHHHSIVFDSYHSCFLGNVGMMYFHNLRTQFYSSHPSSLNSYSLS

SEQ ID NO: 232013 - protein, 79 aa, Glycine max
  Clone ID: PAT_MRT3847_5152C.1.pep
DTTQSSTSLPFSSFNFVLLPLSFSPSFFSSIEASFQASYPRLILVVKLFFSMAYSLMDGASSHLFSFVFRCISMVKNHH

SEQ ID NO: 232014 - protein, 73 aa, Glycine max
  Clone ID: PAT_MRT3847_51530C.1.pep
LLLAIMQIFVKTLTGKTITLEVESSDTIDNVKSKIQDKEGIPPDQQRLIFAGKQLEDGRTLSDYNIHKESTLH

SEQ ID NO: 232015 - protein, 33 aa, Glycine max
  Clone ID: PAT_MRT3847_51531C.1.pep
LDSKTYKVRHVYVCISCNVLDGPTYISRSHVVR

SEQ ID NO: 232016 - protein, 80 aa, Glycine max
  Clone ID: PAT_MRT3847_51532C.1.pep
FPARPKRQTGAKRPPKGERQWQRRYSHTDTLTLRNAHGAFVKTAKKMAELSLGKHTDMVYYEVTRDTLPDKDRSRCRFWS

SEQ ID NO: 232017 - protein, 66 aa, Glycine max
  Clone ID: PAT_MRT3847_51533C.1.pep
GQRNVKSVHRDFRDSSSSSSTSSSTVGLYNRPCSIIMDDRNCVIDVMGLPENDPLFQLNLPPGFQF

SEQ ID NO: 232018 - protein, 46 aa, Glycine max
  Clone ID: PAT_MRT3847_51534C.1.pep
RFSRMTLSQISCEYNPSITILLYIIRRHRYQICPNPAHVNNYYVHT

SEQ ID NO: 232019 - protein, 58 aa, Glycine max
  Clone ID: PAT_MRT3847_51535C.1.pep
KKITPSYKKWGLFLSKTSSPHCSLFTIAFGLFDLYTYETCTPSVCVQNQLQITTLIPF

SEQ ID NO: 232020 - protein, 119 aa, Glycine max
  Clone ID: PAT_MRT3847_51536C.1.pep
SHGRQTRETRGALRKDRPGIHAGTCGSERHGREHGNHPDGMTPRDTQHGQAHDASNTGESETGSGKNARRARNGDRKPTDMDQNQCDTDRQQYHRQQRNTGKEETDNNVARRHDTGSKE

SEQ ID NO: 232021 - protein, 466 aa, Glycine max
  Clone ID: PAT_MRT3847_51537C.1.pep
MNKSILLLLLFFLLNPSLLATSHPLNPIPVTLSVADFGAAGDGLRYDTEAIQSAINSCPEGDPCHVTFPAPGKYLTATVFLKSGVVLNVESGATILGGTRLEDYPEESWRWYVVVAENATDVGIRGGGAVDGQAAKFVVREDPRKNVMVSWNQTGACLGDECRPRLIGFLDCNNVQVSNITLNQPAYWCLHLVRSNNICIQDIAIYGDFNIPNNDGIDIEDSNNTVITRCHIDTGDDAICPKSSTGPVYNLTVTDCWIRSKSSAIKLGSASWFDFKHFVFDNIAIVDSHRGIGFQIRDGGNVSDIVFSNMNISTRYYDSLWWGRAEPIYVTSCPRDSSSKEASISNVLFINITANSENGIFLSGSKRGLLRNLRFIDMDITYRRFTNYAGGLLDYRPGCQELVKHRTAGIMMEHIEGLEVKNVEMRWSNDQLEQWNNPLEFRPSTVNNISFLNFNSGLYTNSKSNY

SEQ ID NO: 232022 - protein, 83 aa, Glycine max
  Clone ID: PAT_MRT3847_51538C.1.pep
ERDYNGVLMNLLKPSRENLFRLCGGKLSLETGLMLTDHVINQIEGGHTKSCVDRNIKPDKFVMGLGRRGNRVDYMNWRVTKRY

SEQ ID NO: 232023 - protein, 69 aa, Glycine max
  Clone ID: PAT_MRT3847_51539C.1.pep
IQHRKNIRLLTLHPLNKNSSISSISREALLTLCLTPLFSVILHSCQSFTSALLLYQFSFSPSRRVSPLV

SEQ ID NO: 232024 - protein, 95 aa, Glycine max
  unsure (1)..(95): unsure at all Xaa locations
  Clone ID: PAT_MRT3847_5153C.1.pep
DEIGFSPDDLXQEVGPSFSYGGQRGPTALFVGGPKSYAPLGATQMGPFFKFGGKFWPFSSHGGFGKPAPPVPPLPKLQGKVLSPMFFFLRICFLG

SEQ ID NO: 232025 - protein, 77 aa, Glycine max
  Clone ID: PAT_MRT3847_51540C.1.pep
TKVQLILNMTGPSILFHTNFHLFNISFFVSTLFLFHKTHLISTLFTPIFTHPSYFHLLYASRLYQTDQKSQRLLSSR

SEQ ID NO: 232026 - protein, 136 aa, Glycine max
  Clone ID: PAT_MRT3847_51541C.1.pep
TWWQPRQKSKRCPQEHRVDVIQVVIEYLMCGSHWTKHAVDHGGAMCGITMPVEGCGASAVAASPEPVQTTAFGPRSAWPIRLQLQLLCRDPRLQYWLQQPPQRFFGASVGCTLDSAAAMALSSTKAVSPVALLLLL

SEQ ID NO: 232027 - protein, 95 aa, Glycine max
  Clone ID: PAT_MRT3847_51542C.1.pep
PRGGVPPRFPLRRTKWSFFPGRRFLIPPTLPPVFAKPPKSVCVPNRSSLLFLGPLHSKGSQSRFFFSFSGFFWGPKLLLLNILEGGFFKGRGYEL

SEQ ID NO: 232028 - protein, 73 aa, Glycine max
  Clone ID: PAT_MRT3847_51543C.1.pep
MAKAISDAEGADRRLKRKGAGAGRKQSTKAAKDSNKPERPPSTFFGFMSEFIEQFKMEHPNNTAVAVVGKAGW

SEQ ID NO: 232029 - protein, 60 aa, Glycine max
  Clone ID: PAT_MRT3847_51544C.1.pep
TKQWLMLLKFQPLLFSPNNYYLNKAMVEILTTSWFILYFVHITSYNLNCWFLNAMAIMYL

SEQ ID NO: 232030 - protein, 340 aa, Glycine max
  Clone ID: PAT_MRT3847_51545C.1.pep
MTSSHNNTLSQKQQPMYNFQCSVSEANLGVPGETVTVSRYPSDFLDSNHSTSLPSFGGSRISAHYNPYASTFEKPLTSKFSSSIFRQENEIIHGNNYASSRLNHTPVNGEDGGVVGSRQSASSSKSARALGQILPRSGGDQYDPIFDSIEPSSSSLKKIDFDQKKEVTGESNISLRPKSSYMSLDSDEKNKQEEVGAVASTTSQNIDEYGETADAEVGAVENESLSDDVDVAKLTSGEVEINQVKSPGKRKKSKDSRSMKLFKVSIANFVKEVLKPSWRQGNMSKVAFKTIVKKTVDKVSGAMKGHRVPKSQTKISQYIDSSQRKLTKLVMGYVDKYVKV

SEQ ID NO: 232031 - protein, 63 aa, Glycine max
  Clone ID: PAT_MRT3847_51546C.1.pep
PTNAKNIKVINAFPRKGQAFIFPFVKINGYKKAIEVSFGTCSCICNERCYVSDLFKVKIKPLA

SEQ ID NO: 232032 - protein, 532 aa, Glycine max
  unsure (1)..(532): unsure at all Xaa locations
  Clone ID: PAT_MRT3847_51547C.1.pep
MKAISPSFLCLIILVTLLAGSIESAPANVKPSHYAAPFNRSVFPSGFLFGIGSAAYQIEGAAAIDGRGPSIWDTYTKQQPGKIWDHSDGXSKIWDHSDGSLAIDFYHRYKSDIKMVKEVGLDSYRFSISWSRIFPKGKGAVNTLGVKFYNDLINEIIANGLKPFVTLFHWDLPQALEDEYGGFLKPEIVEDFRNYADFCFKTFGDRVKHXVTLNEPXWHTCELGIYWLQWWKFSNEVRCSQLTLAKNAHYWMMLRTETYIRYSTHLXLAHGAAVNCYKNKYQGLISKGQIRSHHSDYSSLNQNLIXMLIARTARQSSWYFMFGWFANPITFGDYPESMRSLVGSRLPTFTKAQSESLKGSYDFLGINYYTSNFVEYAPPTTTNKTYFTDMLAKLSSTRNGVPIGTPTPLSWLFIYPEGIYKLMTYIRDNYNNPPVYITENGVAESKNDSLAINEARKDGIRIRYHDGHLKSLLHAIKDRVNVKGYYIWSFSDSFEWDAGYTARFGIIYVDYKNNLSRYPKSSAFWLKKFLLK

SEQ ID NO: 232033 - protein, 40 aa, Glycine max
  Clone ID: PAT_MRT3847_51548C.1.pep
RVIVITVSLFIGAATADNASAEADDSPKLKNLITYCTAHV

SEQ ID NO: 232034 - protein, 81 aa, Glycine max
  Clone ID: PAT_MRT3847_51549C.1.pep
PCLYLNDHPADRLPYGAVPGCHEPILHRTGMVRITYHGTRHRYEGTSDNSQLTAEPQDIINGGHAESCWTKKLTKFLIPHG

SEQ ID NO: 232035 - protein, 107 aa, Glycine max
  Clone ID: PAT_MRT3847_5154C.1.pep
LWCPVIIAPPALLISCPLFFRVLSPVVHLHVLSLGNRFFTYIHTGHRLALFVSAFISFFWYSLCWSYCSMMPDCFLNRCFVTVAPWQRVRYALVLVGIQRPSSAGVV

SEQ ID NO: 232036 - protein, 131 aa, Glycine max
  Clone ID: PAT_MRT3847_51550C.1.pep
PRVRHSSVASLRQLRLGTASSSPSGGWGGYPASAAAYGSPTAGGLYSLPSTPRATPTALATATGSASGYMPNLEPIDVSFGGDEEPVERVESGRALRAKVFERLSREGAVSCYPPAGTGGSDVGWVSDLIN

SEQ ID NO: 232037 - protein, 67 aa, Glycine max
  Clone ID: PAT_MRT3847_51551C.1.pep
NKPKKKNITNNGVCPFKGTTFSFRSFQSFHFFIVKPKFNLLPVILQCRNLKNLGVFKFNGLRKLPFY

SEQ ID NO: 232038 - protein, 99 aa, Glycine max
  unsure (1)..(99): unsure at all Xaa locations
  Clone ID: PAT_MRT3847_51552C.1.pep
MLDFLMLFIISHLAVCIANMDDRYAIATEKSYSYILQXSVSLGQLYGIAVYYITGILEGDDFSASLFYYYAYYILANSPWIVIPSIVAIRCWRKICAAF

SEQ ID NO: 232039 - protein, 44 aa, Glycine max
  Clone ID: PAT_MRT3847_51553C.1.pep
KQKRRGNMMMTTMDGMMDKGVMDYGFRRLHAGTVREIGEFARES

SEQ ID NO: 232040 - protein, 52 aa, Glycine max
  Clone ID: PAT_MRT3847_51554C.1.pep
KNMIMQYLLRSFRKYYDANPFAQSISGTRRVRKILKKLGKEDSFNGSIVQIH

SEQ ID NO: 232041 - protein, 145 aa, Glycine max
  unsure (1)..(145): unsure at all Xaa locations
  Clone ID: PAT_MRT3847_51555C.1.pep
MKFSMTGSSQAASTFWWIWAFWVWIRPGGVDVGKDNFHFGRKMNRQILQAQEHLKKQPEEXSNLERRHKEESEVIRSXIALQSPNSETIKVISELEKEISAFTQNRFVELRKKQLALLLHWGGPYLLFFMENQWYLGFLPKPNLF

SEQ ID NO: 232042 - protein, 96 aa, Glycine max
  Clone ID: PAT_MRT3847_51556C.1.pep
VEDTEGWTALREAIINKQDKIAMIMIKYYWNDYDKKYYRRLPRYIGTVRRMKDFYMEITFHFESSVIPFISRLAPSGAYRICTKGGGMGLCVTWGG

SEQ ID NO: 232043 - protein, 64 aa, Glycine max
  Clone ID: PAT_MRT3847_51557C.1.pep
RKKTKKSHFIHLNKYLNSYAQTILSVKNTMINKTSRTQDEAGKNKNNTEQSIFAIMNYILAYVR

SEQ ID NO: 232044 - protein, 58 aa, Glycine max
  Clone ID: PAT_MRT3847_51558C.1.pep
MSYVSPNRDQPPKKDLVGGNFSFDIKSRSKLGKISSTKAQFGSGKTFKYYIIGAWSHS

SEQ ID NO: 232045 - protein, 69 aa, Glycine max
  Clone ID: PAT_MRT3847_51559C.1.pep
CLLCNSERVLGLVIHCVIAHNYSTHHFDACKWTRSQPHYCKSISAVEVCAPTNGHEMRRSEWANLTTWH

SEQ ID NO: 232046 - protein, 36 aa, Glycine max
  Clone ID: PAT_MRT3847_5155C.1.pep
SIVAVRNTILHTKPPLRENPIYVINLHVLQFKQHMW

SEQ ID NO: 232047 - protein, 93 aa, Glycine max
  Clone ID: PAT_MRT3847_51560C.1.pep
PGGALGPDSLGLPTRPLVGEDDRRGFLGNLFPTPGAIREKMSIDAGGNTKASFMDSKISMGGTFIGLAALVIMVIVTKRAYTLTSKTTICRLF

SEQ ID NO: 232048 - protein, 69 aa, Glycine max
  Clone ID: PAT_MRT3847_51561C.1.pep
SQLLKNRFIVISFSSVLNFAIENHQINSHLYQCHDVSENKTRTSPYLCHLTLYRATLAYCIITVFIQNS

SEQ ID NO: 232049 - protein, 69 aa, Glycine max
  Clone ID: PAT_MRT3847_51562C.1.pep
VLGGSYLIKLHLLIQPILTDRQILGSVPLIGQHWLTHVSKSGQGPSWSSTQDHIFIVIQSFLMRYTLHI

SEQ ID NO: 232050 - protein, 197 aa, Glycine max
  unsure (1)..(197): unsure at all Xaa locations
  Clone ID: PAT_MRT3847_51563C.1.pep
MFLLPSPSSSYLMKHQSHNALWFRGLPYGSGKLIRHIRCAKRTGKQRYPSEKKRLRTKQKELLSDSKEKSKFEGTWRLFKLAVPLDQDPGKDSLHVSDALLQQIATVLKFPVASLLPPEAFTIVRKSFDARKKLKEPKFVHTVDMDVQKLISLEPRCWDFISRLEPKVGLVXNVCMMKEILGDLASIIHDSKEIKLH

SEQ ID NO: 232051 - protein, 237 aa, Glycine max
  Clone ID: PAT_MRT3847_51564C.1.pep
QASQSKYKGDDDLFWGPIEQSKQDTKQSDFPQLASQGSWGSKNGPLKGNSPGLLTRQKSVSGKPTERSLASSPASSQSVLKLKKDAMTRHSEAMDFRDWCENECVRLIGTKDTSFLEFCLKQSRSEAEMLLIENLGSYDPDHEFIDKFLNYKELLPSDVLDIAFQSSRNDKKVTRHGAAGTASANADIQDVDYTEGGSSKGGGKKKGKKGKKVSPSVLGFNVVSNRIMMGEIQSVED

SEQ ID NO: 232052 - protein, 63 aa, Glycine max
  Clone ID: PAT_MRT3847_51565C.1.pep
HVHYRRAIATMRHDVELSEEGCASAREFAEIVRRAGRDSEESFELESLVAQRQGHRSRADSAR

SEQ ID NO: 232053 - protein, 61 aa, Glycine max
  Clone ID: PAT_MRT3847_51566C.1.pep
KVMLMARQNGPSKIMVKFPQMALPLACQLLWFKAPGIALPFNIQFYKPTPQVKNWFFMSNS

SEQ ID NO: 232054 - protein, 59 aa, Glycine max
  Clone ID: PAT_MRT3847_51567C.1.pep
VITVSVFSDNPEIGKQNTWFKKNFCLNLGVVITPGYIAPGICFLVQIVPTKFFFKKNLL

SEQ ID NO: 232055 - protein, 125 aa, Glycine max
  Clone ID: PAT_MRT3847_51568C.1.pep
MFRVDACVLFVADRVSQAAMATFELYRRSTIGMCLTETLDEMVQNGTLSPELAIQVLVQFDKSMTEALETQVKSKVSIKGHLHTYRFCDNVWTFILQDALFKNEDSQENVGRVKIVACDSKLLTQ

SEQ ID NO: 232056 - protein, 208 aa, Glycine max
  Clone ID: PAT_MRT3847_51569C.1.pep
MVKEKKNVVVKNKKPNNNADELHFRGVRKRPWGRYAAEIRDPGKKTRVWLGTFDTAEDAARAYDAAARNFRGPKAKTNFPVPPDDNNNNNVNVNKNKSVNVKSHSPSQSSTVESATPEREATRRSTSAAIDRFPFLPIQQQILMTHPVAAPMRPVFFLDRAHFMTQSFPLRFEPGPVQSDSDSSSVVVDCQPKRELNLDLNLAPPNEY

SEQ ID NO: 232057 - protein, 32 aa, Glycine max
  Clone ID: PAT_MRT3847_5156C.1.pep
VFSQSGMGPKFVLSIKKKNEGRPRRVSSSTRN

SEQ ID NO: 232058 - protein, 166 aa, Glycine max
  Clone ID: PAT_MRT3847_51570C.1.pep
FDLTDEDGTQMQASMFNNAARKFFDKFVLGKVYYISRGTLKVANKQFKTVQNDYEMTLNENSEVEEVVGEASFVPETKFNFVQIDQLGPHVNKSELVDVIGVVKNVSSTMSIRRKSDNESIPKRDITIADDTKKTVVVSLWNELATTTGEELLDIVDKSHVLPLNF

SEQ ID NO: 232059 - protein, 64 aa, Glycine max
  Clone ID: PAT_MRT3847_51571C.1.pep
SAISPTKLFNFLKQGLGVLAFSQVFKNFQNIQCLSCISRSRIGPCSIEQRRRVFFEGVQGDRAF

SEQ ID NO: 232060 - protein, 103 aa, Glycine max
  Clone ID: PAT_MRT3847_51572C.1.pep
FFFFFFFFFFFFFFFFFFFFFFFFFFFFFFFYKKLGTFFLKRKGVFYGGKTGGGGGFFSPGGTFDFYTGGNRKKKTKGGKKKNWVWFLVTPLFLVPEIFFFRD

SEQ ID NO: 232061 - protein, 80 aa, Glycine max
  Clone ID: PAT_MRT3847_51573C.1.pep
AEEERDQKPVQTLKSALVMALFSCVAWVYDAGRIWQDAKNRNLLASLLKKNSGQRPKGLTEEDKLMVLGCKDLERRIVEA

SEQ ID NO: 232062 - protein, 89 aa, Glycine max
  Clone ID: PAT_MRT3847_51574C.1.pep
NKTRLMAVEMNQFDLLIKFYPNINKYLICYILLKYLFFFTKNLINHTENFFIFTKFKSNICLRDSLKYFFYPLNLRHFVFSLLIKFTKF

SEQ ID NO: 232063 - protein, 95 aa, Glycine max
  unsure (1)..(95): unsure at all Xaa locations
  Clone ID: PAT_MRT3847_51575C.1.pep
RNRSLNDIIMIHICHAGSHVDNXCWQLYCLEHGIQPDGLMPCDXFFRVDHNSFNTCYSESRSCKHITCAILLKLEPTVLDEXRSGTYRHLLHRNH

SEQ ID NO: 232064 - protein, 67 aa, Glycine max
  Clone ID: PAT_MRT3847_51576C.1.pep
TPEEANPYTNLNRMPKPFPTHALSGHGTMIAYLYTQKRISGLGRNMHGAMLFLLQDEACTSNYLLTK

SEQ ID NO: 232065 - protein, 282 aa, Glycine max
  Clone ID: PAT_MRT3847_51577C.1.pep
MRQTHGNMSRTRIAIQRFRHTYTALSSSAALTRSQFQCSQQHLTRAPLLFHAPRHYSSSPKQDYPTGDFDFKPITGWKKFTVNLKMLTAFPWERLRYGTLLTIKLRGQISDQLNSRFSPGLSLPQICDNFFKATYDPRISGIYLHIDILNCGWAKVEEIRRHILNFRKSGKFVVAYVPSCREKEYYIACACEEIYAPPSAYFSLFGLTVQAPFLRGVLENLGIEPEVERIGKYKSVGDQLTRKTMSEDHHEMLTALLDNIYTNWLDKVSSARGKKREDIENF

SEQ ID NO: 232066 - protein, 57 aa, Glycine max
  Clone ID: PAT_MRT3847_51578C.1.pep
RPIMALMGPPFLNNPIECSEFQEAVVIGHQNTQGELRLRHPNQSIYSYPAPVCMCKA

SEQ ID NO: 232067 - protein, 315 aa, Glycine max
  Clone ID: PAT_MRT3847_51579C.1.pep
MAAAIEIPTIVFPNSSAQQRMPVVGMGSAPDFTCKKDTKEAIIEAVKQGYRHFDTAAAYGSEQALGEALKEAIHLGLVSRQDLFVTSKLWVTENHPHLVLPALRKSLKTLQLEYLDLYLIHWPLSSQPGKFSFPIEVEDLLPFDVKGVWESMEECQKLGLTKAIGVSNFSVKKLQNLLSVATIRPVVDQVEMNLAWQQKKLREFCKENGIIVTAFSPLRKGASRGPNEVMENDVLKEIAEAHGKSIAQVSLRWLYEQGVTFVPKSYDKERMNQNLHIFDWALTEQDHHKISQISQSRLISGPTKPQLADLWDDQI

SEQ ID NO: 232068 - protein, 105 aa, Glycine max
  Clone ID: PAT_MRT3847_5157C.1.pep
MGGSNFGSPLWLALSLPGKPSKCEVECFNILDAQASLFFCFVTFLNVCQQTSSSSIMKNSSSSSTQRKCAFARKCARLVKEQRARFYIMRHCVIMLICWHEYNDS

SEQ ID NO: 232069 - protein, 81 aa, Glycine max
  unsure (1)..(81): unsure at all Xaa locations
  Clone ID: PAT_MRT3847_51580C.1.pep
KLNPGIKGDKPKTPCFTIIPMEFNLEVLATFLTPVRFIXKKRDKLSCQIGINPYCMEWTGLANRLPDXGNDILCCDYASFD

SEQ ID NO: 232070 - protein, 80 aa, Glycine max
  unsure (1)..(80): unsure at all Xaa locations
  Clone ID: PAT_MRT3847_51581C.1.pep
SVLLLRWLVWSLSSGXLSXXLWWVPXFCPLLVPPLLPRXLACPSPVSLLFAXXXLLRGSVGVSSASVPXRGCFSXCXSSS

SEQ ID NO: 232071 - protein, 269 aa, Glycine max
  Clone ID: PAT_MRT3847_51582C.1.pep
MKPKSEAPSTQRKSQDLNYTRGDGNIASTKEAEFQQKQKHNLQKAVLSTLFNYQGHSEEAPKRTVKDFNKKSRYGHVVFEPPKDFPEEFDFDMDFSRQENIDDPEDEEEYKNVRRAVKEYRGTMNEYYKAAVDSFAKGDQMKAEKLLEQGQFFLRKAHDADEESNKMILETRNTEAQEMVLDLRDHGSKEAIRLLKCHLSSLSGIPSFEYLKVIVDANDKDNTKGSRRRLRVFKLLEQESITWVEGETADTILIRLASIERKRLSFVKT

SEQ ID NO: 232072 - protein, 99 aa, Glycine max
  Clone ID: PAT_MRT3847_51583C.1.pep
MSQQWQWSSAWTLLLFLIFFLSSTTTSTTDYACKFSQAHPFCDTSLPTLTRARSLVALLTLPEKMLLLCNSACSVPRLGVPAYPRWSESLAGVGVGGRG

SEQ ID NO: 232073 - protein, 50 aa, Glycine max
  Clone ID: PAT_MRT3847_51584C.1.pep
FSYELDKKGGMGILCLDSKKGLFFKRTTVYFIFLSMDANILICHFNMHNM

SEQ ID NO: 232074 - protein, 141 aa, Glycine max
  Clone ID: PAT_MRT3847_51585C.1.pep
GWNLLPQAPRLNRPTRGGGGNRFRNPNQGPGGVSRPKKKEKRTPKRENRKGKKKGPGPPMEKKEQPRGGMHTPPPQEKKPPRGPWILSPKKRKKNQGNGQPKSGPPKGKRKRPPPFGGRGGKNQNFLLHPPRARDPNPPPK

SEQ ID NO: 232075 - protein, 74 aa, Glycine max
  Clone ID: PAT_MRT3847_51586C.1.pep
LQSLHNMPLALGIRYAKLVSQSLVAGHGQGGNKGMYECKCSDHGIYKDAWIETQRVKLFIPKYLLMVHGQYTVF

SEQ ID NO: 232076 - protein, 59 aa, Glycine max
  unsure (1)..(59): unsure at all Xaa locations
  Clone ID: PAT_MRT3847_51587C.1.pep
MADSETFAFQXMEINQLRSRINNICYSTNEILLRGLIRNASDAWVKIXFETLTEKMKLD

SEQ ID NO: 232077 - protein, 75 aa, Glycine max
  Clone ID: PAT_MRT3847_51588C.1.pep
TKGALPTPNCACIVSHSTRTLSTPYPWAGHNASSIHGKPHAHTRCRSSSHCGYCCCRHLVDSNGSAISASTLNSG

SEQ ID NO: 232078 - protein, 59 aa, Glycine max
  Clone ID: PAT_MRT3847_51589C.1.pep
KKLWLPNFLDVTFSFFYFFSDINLPLCVIMLINVILLSLYSVMYTDTNTTQMIQRDADI

SEQ ID NO: 232079 - protein, 52 aa, Glycine max
  Clone ID: PAT_MRT3847_5158C.1.pep
LAHTHNKDQSAKESNPNRTTHCHQCLNSSIRMSIRTDMASLHQRRKLAKRNR

SEQ ID NO: 232080 - protein, 397 aa, Glycine max
  unsure (1)..(397): unsure at all Xaa locations
  Clone ID: PAT_MRT3847_51590C.1.pep
RSLRSSSSDNVSSGKLIHTQQFDKTFLFSLGISFGMITSIMANKREIVKLRELLKQNENLVQDLQEELFLKDSMTVKELQNENYGSQDTCDHSSYDKELNEFSPEKHVDNSPRIDSKESYHQKVEQSSESMSKIEAELEAELERLGLDMNASSLEGKLSELVGSXQLDPEFVADFAQGELRVDMVSGKDSVYPKSNEDAGDATPLPANYAVLPHELSLRLHEVIQSQLEQRVKELEIALENSQRKVRLFESKQESYLQKASSFSKENDDCDLMSQPLILNLSGEALDAYNEAYEELIKINDSEENSPLGIHDPQEDSHANDWHALGVQHGGANGSSKVTMMEGSIYELDGTADETCGFDDTEVEQQLIRQIVERTKKGSPVFKNAQRILYSVDEDEQ

SEQ ID NO: 232081 - protein, 39 aa, Glycine max
  Clone ID: PAT_MRT3847_51591C.1.pep
TNYPKLNRLSSQGISIITGFVKICGALEGECNGVQNYPG

SEQ ID NO: 232082 - protein, 77 aa, Glycine max
  unsure (1)..(77): unsure at all Xaa locations
  Clone ID: PAT_MRT3847_51592C.1.pep
ISDRFHQVLKWAQGSTEIFFSDCPLWYGYSRKLKWLQRLAYTNXLVYPFTSIPLXYCTIPAVCLLTGKFIIPTVGAQ

SEQ ID NO: 232083 - protein, 138 aa, Glycine max
  unsure (1)..(138): unsure at all Xaa locations
  Clone ID: PAT_MRT3847_51593C.1.pep
KKGLFEGSEIPPQPLLFVEGWAIYKDPKAWEDPERFFPERFFNCAIDLFGQNFGFFPLGAGGKLCPGIKKAFAALGFKPGNFFFSLGWGLPPGMKKEALFFXGLPGVSPPKKNPLCVVAQGFLLNPKVGTSAGKNKIK

SEQ ID NO: 232084 - protein, 64 aa, Glycine max
  Clone ID: PAT_MRT3847_51594C.1.pep
RILDITKIYQLRFSLAADQIGCLFFHRHNTLVLLFLLDLVASIILRGIGLECRRSNNNQFNNVL

SEQ ID NO: 232085 - protein, 77 aa, Glycine max
  unsure (1)..(77): unsure at all Xaa locations
  Clone ID: PAT_MRT3847_51595C.1.pep
RRQKGINQSFRAREVATLSLSWPPPPQPPPTHSYIAXLFIHSSSTKQRSKLNSALCVYTTYVYIYGRSRATSAVPAG

SEQ ID NO: 232086 - protein, 253 aa, Glycine max
  Clone ID: PAT_MRT3847_51596C.1.pep
MIPNVEIPHWDADGGGPLSPFISSSSNADKCSLLFSSDHFRMFQFKVRICPRGRSHDWTECPYAHPAEKARRRDPRKYHYSGTACPDYQKGNCKRGDTCQFSHGVFECWLHPSRYRTHLCKDGTTCRRRVCFFAHTTEQLRLVVTDSSSSSFVSSPTSVLNSSSFSDSSPYSFVREIVNSTRNVKIEDSGLTRCVFGSPRGGFLSVNGCEEEPAMERVESGKDIRARIYAKLSRENTIGASDPDIGWVSELVK

SEQ ID NO: 232087 - protein, 130 aa, Glycine max
  unsure (1)..(130): unsure at all Xaa locations
  Clone ID: PAT_MRT3847_51597C.1.pep
GRMVLLLKGSQHIPCGASTPDVXTDLGHTCVINPKQVDEMAIHSASYLIPPTLCXGDYYYNYSTRGLDILFDGPTHKINKFVLHTKLTGTADSNSHINRNFVVYELHLGSSSQHVNDNQQRDITPSTQWQ

SEQ ID NO: 232088 - protein, 233 aa, Glycine max
  Clone ID: PAT_MRT3847_51598C.1.pep
MIPNVQIPTWDADGGGALSPSISSNADTCSLFSSDHFRMFQFKVRNCPRGRSHDWTECPYAHPAEKARRRDPRKYHYSGTSCPDYRKGNCKRGDTCQFAHGVFECWLHPSRYRTQLCKDGTNCRRRVCFFAHTSDQLRVVTDSSSSSFVSSPTSVLINSSFSDSSPYSFVRGIVKLDEEGSYSGLTRCVFGSPRGGFMSVNGCEEEPAMERVESGRDIRARIYAKLSRENSIG

SEQ ID NO: 232089 - protein, 26 aa, Glycine max
  Clone ID: PAT_MRT3847_51599C.1.pep
IYSINKYLSVFFIGYIESHNSTMIYL

SEQ ID NO: 232090 - protein, 116 aa, Glycine max
  unsure (1)..(116): unsure at all Xaa locations
  Clone ID: PAT_MRT3847_5159C.1.pep
NIYILVPVDYVSKXGEAINTPKNDAMVVIKXLKVQRALISDGGTHFCNAXLKKFLEYYNVRHKVATPYHPQTNGXAKVSNRELKRILKKTVASSRKDXALKLDDALWLTRYELNKF

SEQ ID NO: 232091 - protein, 240 aa, Glycine max
  unsure (1)..(240): unsure at all Xaa locations
  Clone ID: PAT_MRT3847_515C.1.pep
MRLFPLNEMTSLFPGVALGLLVLVLAASRDHSIRLWWKGSSLRCFRGHNGPVLSLSNKLLGEDGRKVLASGGEDGTVRLWSLGSSGKRGQLALKATLYGHEKPVNLMSVAGAMLWDVRRIKETFXNAIAELDGHCGQVTLLHMDPYKIVTGGPDYAYVNVWEVDTGVQTNSLLCSSTDDAGSGCDAMTVDGCRITTASYYEDLGVLRFRDFNHATNPVTKLENEPSSKFWISMSDDDRDD

SEQ ID NO: 232092 - protein, 129 aa, Glycine max
  unsure (1)..(129): unsure at all Xaa locations
  Clone ID: PAT_MRT3847_51600C.1.pep
DALSKGALEARGRAYCPYSQFRVGAAILIHPSSSSSASSAPEIILGANVENAAYPVGTCAERVAVGTAVTTFGYGRGDIKAVGVATDLADQYCSPCGMCRQFLRGVLELDTPIXMHTRDGKYEVKTMGE

SEQ ID NO: 232093 - protein, 61 aa, Glycine max
  Clone ID: PAT_MRT3847_51601C.1.pep
VTMKPQQVLTSIFTHSLAQMGVFQSSKRIPNRYVALHNCPLPTLQECQPYPPPTHYNLWSN

SEQ ID NO: 232094 - protein, 113 aa, Glycine max
  Clone ID: PAT_MRT3847_51602C.1.pep
AILLVGAKLQMITKMGLRIQDRGEVFKGAPVVEPGDDLFWFNRPRFLLFIIHLVLFQNAFQLAHFAWSTYEFSINSCFHKTTIDTIIRLTMGIRDNTNQADEEIKRTLRDMCH

SEQ ID NO: 232095 - protein, 64 aa, Glycine max
  Clone ID: PAT_MRT3847_51603C.1.pep
YVLQLVSLKPWKFDWCGYNRDRILCRTVGKIHKKISRLRKGLRTWSHRAIMFLYYKIGRNRSIN

SEQ ID NO: 232096 - protein, 484 aa, Glycine max
  Clone ID: PAT_MRT3847_51604C.1.pep
MDSLLHIQKPHVVCVPFPAQGHVNPFMQLAKLLHCVGFHITFVNTEFNHNRFVKSHGPDFVKGLPDFKFETIPDGLPPSDKDATQDVPALCDSTRKTCYGPLKELVMKLNSSSPEMPPVSCIIADGTMGFAGRVARDLGIQEVQLWTASACGFVGYLQFEELVKRGILPFKDENFAIDGTLDKSLNWISEMKDIRLKDLPSFIRTTTLDDTMFDFLGSEARNTLRSSSIIINTFQDLDGEAIDVLRIKNPNIYNIGPLHLIDRHFLEKEKGFKASGSSLWKNDSKCLAWLDKWEPNSVIYVNYGSITVMTEHHLKEFAWGLANSKQHFLWIIRPDVVMGESISLPQEFFDAIKDRGYITSWCVQEKVLSHPSVGAFLTHCGWNSTLESISAGVPMICWPFFAEQQTNCKYACTTWGIGMEINHDVRREEIAKLVKEMMMGEKGMEMKQKSLEWKKKAIRATDVGGSSYNDFYKLIKEVFHHSVL

SEQ ID NO: 232097 - protein, 114 aa, Glycine max
  Clone ID: PAT_MRT3847_51605C.1.pep
RPYASDPVYRTPATRSEKEKALFFFDRERPIITGTGGGSAPILRYRDLYRENVKKGGPVLKNKKRGAAYRQRQTFHLGSRSSYFGRQVKKKGRGKTLGCPNWKTPGGTRFFPWA

SEQ ID NO: 232098 - protein, 76 aa, Glycine max
  Clone ID: PAT_MRT3847_51606C.1.pep
RILILHTALFSPFLGLKAAMYYMDSLNLTVVDHIHLAKSKLYIFFPIKTWRKSYLLLADLMESHTKLSEKYNCISI

SEQ ID NO: 232099 - protein, 172 aa, Glycine max
  unsure (1)..(172): unsure at all Xaa locations
  Clone ID: PAT_MRT3847_51607C.1.pep
MDFRCSVISXTILFSLALAGESHVHASLPEEDYWEAVWPNTPIPTALRELLKPLPAGVEIDELPKQIDDTQYPKTFFYKEDLHPGKTMKVQFTKRPYAQPYGVYTWLTDIKDTSKEGYSFEXDTSGMNHHMLHELMGVDPGTNPVCHFLGSKAILWVPNLSMDTAYQTNVVV

SEQ ID NO: 232100 - protein, 179 aa, Glycine max
  unsure (1)..(179): unsure at all Xaa locations
  Clone ID: PAT_MRT3847_51608C.1.pep
MALRCLVMSLSVLFTLGLARESHARDKDFWHAVWPNTPIPSSLRDLLKPXPASVEINDHPMQIEETQYPKTFFYKEDLHXNKTMKVQFSKPPFQQPWSVDTWLKEIKNTTKXRYSFEELYIKKEAIEEEEXFYTXSLGTVINFTISKLGKNIQILSNFFINKQDQYTVEKIPDRRDEAI

SEQ ID NO: 232101 - protein, 202 aa, Glycine max
  unsure (1)..(202): unsure at all Xaa locations
  Clone ID: PAT_MRT3847_51609C.1.pep
ALHCLVMSIYVLFTLGIARESHAKDXYFWHAVWPNTPIPSSLPDLITPVPASVEIDDHPMQIEETQYPITFFYKEDLHPGKTMKVQFSKPPFQQPWGVGTWLKEIKHTTKEGYSFEELCIKKEAIEGDEKFRAKSLGTVIGSAIAXLGKNMQVLSSSCVNKQDQYTVEGVQNLGYIAVMCHMLEFRTAVFYLHEVRATAAFM

SEQ ID NO: 232102 - protein, 70 aa, Glycine max
  Clone ID: PAT_MRT3847_5160C.1.pep
AIGNNFQNEYAQSLGLIFASLFSVLSLFFKKIRIMLSNINYNKNATKAGVGWGVVIVKWFGYQFSFSNRN

SEQ ID NO: 232103 - protein, 42 aa, Glycine max
  Clone ID: PAT_MRT3847_51610C.1.pep
IYFTLIKTSSFYHSGCYTFLLKTTPTSHLNSNTPFNFPTFLN

SEQ ID NO: 232104 - protein, 112 aa, Glycine max
  unsure (1)..(112): unsure at all Xaa locations
  Clone ID: PAT_MRT3847_51611C.1.pep
MEFRCSVISFTILFSLALAXXSHVHASLPEEDYXQAVCPNTPIPTALLELLKPFTACVEIHELPKQIDDSQYPXTFCYQEYLYSGXTMKVQFTKRSYAQPLRVYTWLTDFKD

SEQ ID NO: 232105 - protein, 94 aa, Glycine max
  Clone ID: PAT_MRT3847_51612C.1.pep
REASFSSPAVKATIEQSLNADPVTVNSGLGFRPSAVAPVNSAPGRNLYLNPRLQQQGSAAQHRGDEVKRILDILHTTKMRNPILVGESEPEAAI

SEQ ID NO: 232106 - protein, 150 aa, Glycine max
  Clone ID: PAT_MRT3847_51613C.1.pep
ALSCLEMYLSALFTLGLARESHARDEDFWHAAWPNTPIPSSLRDLLKPGPACVEIDDHPMQIEETQYPITFFYKEDLHPGKTTKAQLIKPPFQQPWSVATWLKETKDTTKEGYSSEELCIKTEAIEGEEMFCARALRTAIGFAITRAEKE

SEQ ID NO: 232107 - protein, 449 aa, Glycine max
  unsure (1)..(449): unsure at all Xaa locations
  Clone ID: PAT_MRT3847_51614C.1.pep
MELKLRASMASIPRAVFTNSSSFVPFCTYTVPDASRRRNGNTGSRSTHKITPLRKEKHPNEQKLKLDHQNQNPLNVDLVALCEEGNLDQVLELMGQGAVADYRVYLALLNLCEHTRSLESGKRVHEILRRSAFRGDVELSNRLIGMYCKCGSVKNARRVFDQMLDRNMATWHLMIGGYTSNGLGCDGLLVFQQMKQAELPPDGETFELVVPACAQAEAVEEGFLHFESMKEYGIVPSMEHYLEVINILGNTGQLNEAEEFIEKIPIELGVEAWESLRNFAQKHGDLDLEDHAEEVLTCLDPSKAVADKLPPPPRKKQSDMNMLEEKNRVTEYRYSIPYKEEAHEKLGGLSGQMREAGYVPDTRYVLHDIDEEEKEKALQYHSERLAIAYGLISTPPKXTLRIIKNLRICGDCHNAIKIMSNIVGRELIVRDNKRFHHFKDGKCSCGDYW

SEQ ID NO: 232108 - protein, 247 aa, Glycine max
  unsure (1)..(247): unsure at all Xaa locations
  Clone ID: PAT_MRT3847_51615C.1.pep
ALWCLVMYLYVLFTLGLARESHARDEYFWHAVWPNTPIPSSLPDLLKPVPACVEIDDHPIQIEESQYPKTFFYYEDLHLGKSMKVQFIKPPFXQPWGVGTWLKEIKHTTKERYSFEELCIKKEAIEGEEKFCAKSLGTVIGFAISKLGKNIQVLSSSFVNKQDQYTVEGVQNLGDKSXMCHKLNFITAVFYCHEVHKTTSFMIPLMAVDRTKTQALSIYHSHTSEMNHHILHQLITVDLITNSMYHF

SEQ ID NO: 232109 - protein, 62 aa, Glycine max
  Clone ID: PAT_MRT3847_51616C.1.pep
LSFGKDNDCLCWPQTTGINSSRTPGSRACTLLSTILGVGVIWERQSLSALATDLVNHFVFHS

SEQ ID NO: 232110 - protein, 249 aa, Glycine max
  unsure (1)..(249): unsure at all Xaa locations
  Clone ID: PAT_MRT3847_51617C.1.pep
MQFRCSLISFTILFSLALAGESHVHASLPEEDYWEADXPNTPIPTALXQLLKPLPAGVEIHELPNQVDDTQHPXTFFYKEDLHPGKTMKVXFTKRPYAQXPYGGYTWVTDIKDTSKERYSFEQICIKKEAFDVQYNNCAKSLRTVIGFAISKLLKNIQVLSSSFVNKQEQYTVEGTQNLGDKTAICHGLNFRTAVSYCHKDRETTAIMCPLEAGDGTKTQALAVCHSDTAGMNHRMLHELMPDDPGTNP

SEQ ID NO: 232111 - protein, 191 aa, Glycine max
  Clone ID: PAT_MRT3847_51618C.1.pep
MEFRCSVISFTILFSLALARESHVHASLPEEDYWEAVWPNTPIPTALQELLKPLPASVEINELPKQIDDTQYPKTFFYKEDLHPDKTMKVQFTKHPYTQPYSVYTWLTDIKNTSKERYSVKKICIKKETFKGEKKFYTKSLRTVINFTISKLKKNIQVLSNSFINKQKQYTIERIQNLRNQAIMYHKLNFR

SEQ ID NO: 232112 - protein, 72 aa, Glycine max
  Clone ID: PAT_MRT3847_51619C.1.pep
PTHRSLSIGCIEPKPAPPNLLSIYNYNTSAAGKPTHEESFTRQMVDVANASVPAANGCQSNVNYQPTNSQSS

SEQ ID NO: 232113 - protein, 56 aa, Glycine max
  Clone ID: PAT_MRT3847_5161C.1.pep
TNVPQVKLQGFGATIRAFKGAFECNGKNPGPVNPRVNYYKDYCRQFGVSPGGNLYC

SEQ ID NO: 232114 - protein, 105 aa, Glycine max
  unsure (1)..(105): unsure at all Xaa locations
  Clone ID: PAT_MRT3847_51620C.1.pep
MALRCLVMSLSVLFTLGLARESHARDEDFWHAVWPNTPIPSSLRDLLKPGPASVEIDDHPMQIEETQYPKTFFYKEDLHPGKTMKVQFSKPSFHNXWGCCTWLKE

SEQ ID NO: 232115 - protein, 40 aa, Glycine max
  Clone ID: PAT_MRT3847_51621C.1.pep
PGLNTKSASTLFRSINSNCRRNKLCLSYLLRPAHLVKDRV

SEQ ID NO: 232116 - protein, 64 aa, Glycine max
  Clone ID: PAT_MRT3847_51622C.1.pep
PSWKSKAFLAGSLGLAGLRIGKAFFYSLPRIEGMYVLFVVATDGLHSQFLLLEVISQSPGAPLA

SEQ ID NO: 232117 - protein, 131 aa, Glycine max
  Clone ID: PAT_MRT3847_51623C.1.pep
MASFAGTTQKCTACEKKVYWVEQLTADNKVYHKSCFRCHHCKGTLKLSNYCSFEGVLYCKPHFHQLFKMTGSLDKSFEGVPRSVRVERSADQVQTNKVSRLFSGTQEKCVGCKKTVYPIEKVAVDGKSYHK

SEQ ID NO: 232118 - protein, 86 aa, Glycine max
  Clone ID: PAT_MRT3847_51624C.1.pep
TGAQAANILDPDYVIGVWASASRPALRTLVAPDANGNTTGAQTTSGDYVQVSRLGMPLTNEVVNPIGNKDEFNARTPYSENAAFQA

SEQ ID NO: 232119 - protein, 97 aa, Glycine max
  Clone ID: PAT_MRT3847_51625C.1.pep
YGCEKTTEGISSDIVTFIRSQHKDRKLRLLKMEDVSMGMWVERYNNTIAAVQYSHNWKFCQYGCMEGYFTAHYQSPRQMICLWDKLSRGRARCCNFR

SEQ ID NO: 232120 - protein, 178 aa, Glycine max
  unsure (1)..(178): unsure at all Xaa locations
  Clone ID: PAT_MRT3847_51626C.1.pep
MAKPENRTNLASCFVATIFLIFLLIVVFIVYFTVFKPQDPKIAVSAVQIPSFSATNGTVNFTFSQYASVRNPNRGTFSHYDSSLQLLYYGRQVGFMFVPAGRTQYMXATLNVQSFPLGLGPPFVDGPSNVGPTMEIESRIEMAGRVRVLHLFSRHVEAKAQCRVAIAITDGSVLGFRC

SEQ ID NO: 232121 - protein, 35 aa, Glycine max
  Clone ID: PAT_MRT3847_51627C.1.pep
AVLYADTTPRVSRFLSAIVNVTTENVSMSAMVQRR

SEQ ID NO: 232122 - protein, 73 aa, Glycine max
  Clone ID: PAT_MRT3847_51628C.1.pep
TNRWQWWWLALTYTIWKHRNNIIFSNATFNANKLMDDVVFLLWTWLKCLEKNFTLHFNQWSSNLKIGFLRTRI

SEQ ID NO: 232123 - protein, 70 aa, Glycine max
  Clone ID: PAT_MRT3847_51629C.1.pep
LAAQWGHAHGLIISLFLLLLFYLPHIVKYRKLVIDNTICMPHISEFLGHTHKYKHNHVNCEVSTWAEVES

SEQ ID NO: 232124 - protein, 71 aa, Glycine max
  Clone ID: PAT_MRT3847_5162C.1.pep
FNGLRSLKGHPKKKPMRVPHGHSFLPCLVLAKPECDLNKELGVLYFSDRLRMWKEKEAEKPNQPLHVAGQK

SEQ ID NO: 232125 - protein, 174 aa, Glycine max
  Clone ID: PAT_MRT3847_51630C.1.pep
LLFETHPETETQPTENTTLTTETHEEEKTETTKATSETHPETETEAIENTTITAEKHPEEKMKLTETQTEVEKETTPTAIETNETENEMPFEINTAQTEVKETETEENTTETATQQGEVTTTTTTEQETAAKSVEGDTTLYQDGALMVQCVPPAAIRAIFVPSSEFQTTNRSLI

SEQ ID NO: 232126 - protein, 115 aa, Glycine max
  Clone ID: PAT_MRT3847_51631C.1.pep
ARGQAEPDVGYFEEEDILLKANHHFYSLKAKFSNTYTIKVEHDHRFRDFRSILGRVWLLTELDPYDVHGVTKCCDLTADEFRRQCLGLEPIRFPAHAHNAPILGTKDLLRVFYWR

SEQ ID NO: 232127 - protein, 44 aa, Glycine max
  Clone ID: PAT_MRT3847_51632C.1.pep
PLTKTKLKEHIFTKSFHQDGGYHYLGLKNPMFMGYLMVNQKMLM

SEQ ID NO: 232128 - protein, 86 aa, Glycine max
  Clone ID: PAT_MRT3847_51633C.1.pep
MLMDQHDAACRAIARVIKERDEGRYLLAHAERQVPVSAPNAITANARRLSNGKRSDDDEDQAPDAKKTHGGRSASMIAELTDGDAA

SEQ ID NO: 232129 - protein, 194 aa, Glycine max
  Clone ID: PAT_MRT3847_51634C.1.pep
MENTTVTYQTDLNLKATELRLGLPGTEESEEKTLSAGARINNKRPLTETSDECASNGTSSAPHEKTETAPPAKTKIVGWPPIRSYRKNILQESEGAGIYVKVSMDGAPYLRKIDLKVYGSYTQLLKSLENMFKLTISEYSEREGYKGSEYAPTYEDKDGDWMLVGDVPWDMFMTSCKRLRVMKGSEARGLGCGV

SEQ ID NO: 232130 - protein, 99 aa, Glycine max
  Clone ID: PAT_MRT3847_51635C.1.pep
IFGNCLFPVSQFPSKAVVVNSPRGIQRGGFPPPAWIIFPVNNGPPNFPKRFPPPLGKGKKIFFFPKVVPFPGPFRAFFFGVKKKFLGSYPPTPFLAGFF

SEQ ID NO: 232131 - protein, 35 aa, Glycine max
  Clone ID: PAT_MRT3847_51636C.1.pep
VNKASHAAANLGLLPFQSALWSLLYYLLNHIPWIF

SEQ ID NO: 232132 - protein, 78 aa, Glycine max
  Clone ID: PAT_MRT3847_51637C.1.pep
LLLLFFSSLCSLTILAFFFCFEILVYCVASNAGKITTYSGSKWSSLRFLHRTCLTQFIKPLICTCTVLVGKVTDSSVI

SEQ ID NO: 232133 - protein, 73 aa, Glycine max
  Clone ID: PAT_MRT3847_51638C.1.pep
RNKGAKLADPDTPKSIEDYTEPMLARILHEAEGTRRINSKVPYQKIEWTCHDTLHSRRKDQNKVAPIQTKGRK

SEQ ID NO: 232134 - protein, 454 aa, Glycine max
  Clone ID: PAT_MRT3847_51639C.1.pep
SDSNSTSTSMSESLSTSVSDSTSTSTSDSASTSTSVSDSNSASTSLSDSTSTSISDSTSASTSDSASESASESESSSTSVSDSTSTSTSESASTSTSESESTSESTSVSESSSTSVSDSTSTSTSDSASESASESESTSTSVSDSTSASTSTSESESNSTSTSLSESTSTSLSDSTSTSTSDSASTSASESDSNSASTSLSGSLSTSVSDSTSASTSDSTSTSTSESESNSTSTSLSESTSTSLSDSTSTSTSDSASTSTSVSDSNSASTSLSESSSTSVSDSTSTSTSESASTSTSVSDSNSTSTSLSESTSTSLSNSTSTSTSDSASTSTSVSDSNSASTSLSGSLSTNVSDSTSTSTSDSASTSTSESDSNSASTSLSGSLSTSISDSTSTSTSDSASTSTSESASTSTSVSESDSESTSMSVSDSNSTSTSLSDSTSTSVSDSTRTSTSD

SEQ ID NO: 232135 - protein, 41 aa, Glycine max
  unsure (1)..(41): unsure at all Xaa locations
  Clone ID: PAT_MRT3847_5163C.1.pep
PCCEITSVKLLIFSIIILHYSLKLHHNIFLIXKGTDVVIII

SEQ ID NO: 232136 - protein, 167 aa, Glycine max
  Clone ID: PAT_MRT3847_51640C.1.pep
ISSASNSAAEKETVGSRYKWVSRVAFRSTQGCWATKQVQRSDEDPTMFDITYRGNHTCSQGNNAVLPPKSPEKHEKPAHSHNIDIHHAQASQESLAKFRKSNYFPSPTFQMNEFDGIYNRSHSKSDINEIISTNTSATNSPIPDFNFSLDPVEIDPNFPFNTPGFLC

SEQ ID NO: 232137 - protein, 155 aa, Glycine max
  unsure (1)..(155): unsure at all Xaa locations
  Clone ID: PAT_MRT3847_51641C.1.pep
TTGVNIFLITYSSSSWASYQTLYYDQVRTVXRIPLFERQTDDYGXPVHATTVTYAATKXVGGFIDDPNKQHDITGVXMPKKDTFRLYFGRGFYFDTNKQHYSSGVPPGIDIGREHGTTYAYCLNTPPHDGTSGVNLGIHTPTHLHGTTPGYAAYT

SEQ ID NO: 232138 - protein, 33 aa, Glycine max
  Clone ID: PAT_MRT3847_51642C.1.pep
KCAYMNRFHEGFQPCSSGLFKEPNKWYFVSNNL

SEQ ID NO: 232139 - protein, 430 aa, Glycine max
  Clone ID: PAT_MRT3847_51643C.1.pep
MGDVADKLAYFQAITGLEDPELCTEILAAHNWDLELAISTFTSSSNPNNPPPPPALAWKLITLPVSVISASLGLVSAAIGLGLWAAGGVLSYSLGLVGLGSPSAPLVSVTAAASEAMDFVAAFERDYGSGGPNFVGEGFMDALQRSRNSFKLLFVYLHSPDHPDTPSFCQRTLCSETIAPFVNENFVCWGGSIRASEGFKMSNSLKASRFPFCALVMAATNQRIALLQQVEGPKSSEELLVTLQRVLEESSPVLAAARLDAEERRNNMRLREEQDAAYRAALEADQARERQRREEEEHLAWEAAEAERKHKEEEAARERAAQEAAEKQAALAKIRQEKAQSLGEEPEKGPNVTQVLVRFPTGERKERRFNSTATIQSLYDYVDSLGCLEAESYSLVSNFPRTVYGQEKLTLSLKEAGLHPQASLFVELSS

SEQ ID NO: 232140 - protein, 202 aa, Glycine max
  Clone ID: PAT_MRT3847_51644C.1.pep
RSRGPKSSEELLVTLQRVLEESSPVLVAARLDAEERRNNMRLREEQDAAYRAALEADQARERQRREEEERLAREAAEAERKRKEEEEARERAAQEAAEKQAALANIRQEKALSLGEEPAKGPNVTQVLVRFPNGERKERRFNSIVTIQSLYDYVDSLGCLEAESYSLVSNFPRTVYGQEKLTLSLKEAGLHPQASLFVELSS

SEQ ID NO: 232141 - protein, 137 aa, Glycine max
  Clone ID: PAT_MRT3847_51645C.1.pep
MGDVADKLAYFQAITGLEDPDLCTEILAAHNWDLELAISTFTSSSNPSSTDTPLQPHPNDHVPFASNPQPQPQHQHSSTASGLAWKLITLPVSVISGSLGLVSGAIGLGLWAAGGVLSYSLGLVGLGSPSGSGSGSS

SEQ ID NO: 232142 - protein, 60 aa, Glycine max
  Clone ID: PAT_MRT3847_51646C.1.pep
LTRTCRLTQITLKTLSDHLNPIANPKSKSSCFEANTHGYVSAALCSTRRILLKNLNTGFL

SEQ ID NO: 232143 - protein, 36 aa, Glycine max
  Clone ID: PAT_MRT3847_51647C.1.pep
TMTLSAHEGLIAALAVSTVNGLVASASHDKFVKLWK

SEQ ID NO: 232144 - protein, 62 aa, Glycine max
  Clone ID: PAT_MRT3847_51648C.1.pep
KPVKYKSSLNAFSQIVKNEGSKSLFKGAGANIFCAVSGDGVLSGYDKFQVLVLVKKYGSGGD

SEQ ID NO: 232145 - protein, 73 aa, Glycine max
  unsure (1)..(73): unsure at all Xaa locations
  Clone ID: PAT_MRT3847_51649C.1.pep
CQEVGIEYAARTTSSDRGSXCVAWLANARQIGGYHVADSIGRLGSAXLLPYEDPDVHAEKAEDDLAFFPAEVV

SEQ ID NO: 232146 - protein, 66 aa, Glycine max
  unsure (1)..(66): unsure at all Xaa locations
  Clone ID: PAT_MRT3847_5164C.1.pep
MWWLLRTLCXVHVIGSIFCXLNAKPNNPEANMNVSQXISYWGYESXEHXXMTEDGYILLIFRIPHN

SEQ ID NO: 232147 - protein, 264 aa, Glycine max
  Clone ID: PAT_MRT3847_51650C.1.pep
LDCKEINLKKCPRSTLQSQCIKYLGPKEREEYEVIVENGKLAHKKDGRLVDTDEKSKWIFVLSTTRALYAGRKQKGTFQHSSFLSGGATTAAGRLVAHQGALEAIWPYSGHYHPTEENFKEFISCLEEHNVDLTNVKRCAIDDDNPSLIGTNSFTAINESHQINKAINKEIEKKVVAPVLDVPKRLTCKWSTGAGPRIGCVRDYPGHLQTRALEQVNLSPRPASARPYSYGPIPSPRPSPKVRMSPRLAYMGLPSPRISIPAAS

SEQ ID NO: 232148 - protein, 56 aa, Glycine max
  Clone ID: PAT_MRT3847_51651C.1.pep
TSFGSLAANALVMQLLFLSINTISISIILFCFSLLLCGLVIHAYVFRDYSLGNGNV

SEQ ID NO: 232149 - protein, 58 aa, Glycine max
  Clone ID: PAT_MRT3847_51652C.1.pep
LFFPQHYHIPGGFFPNLHHYTPIPNYNMTSSPKLITYSHNQLPKIAFTYLYHYQYSIF

SEQ ID NO: 232150 - protein, 83 aa, Glycine max
  Clone ID: PAT_MRT3847_51653C.1.pep
NGLNLDPPENALRQNDPLGPPLNQLDRIMESYTQSHNVLQTAQTVQSHRLMTFTHLKATWKLHELLSNEDMKQQGWQKLTPNN

SEQ ID NO: 232151 - protein, 206 aa, Glycine max
  Clone ID: PAT_MRT3847_51654C.1.pep
MGITASTTAVATLLLLLFFFISPSAAEIKTLTITSDTRPMILLEKFGFTHTGHVSISVSSVFVVASGGSQPDPSRLGFFLLSEESLLQVLIEIQQNPSFCVLDSRYTTHLFTFRELSPPPSASANHTSPVTIPNEYSLFFANCAPETSVSMLVHTELYNLDADSEHSRDYLSAGQTQLPTLYSLFSFAYFAFLALWIYICYSNKLS

SEQ ID NO: 232152 - protein, 70 aa, Glycine max
  Clone ID: PAT_MRT3847_51655C.1.pep
MRGRTAGEAGTATSNRNRATPRNTGGGPRNQPRGANKRKRKRTHEKPARDKQNRPNEQEKPPHQTRKAPP

SEQ ID NO: 232153 - protein, 86 aa, Glycine max
  Clone ID: PAT_MRT3847_51656C.1.pep
NSHKRHDEFFFSMNTKATRAYSTCHLPIEYTHTSCDYAESYMHWMDCFYQRTRSLYTSLFLTPPMEPSLVNSERLTKKTITYRALR

SEQ ID NO: 232154 - protein, 116 aa, Glycine max
  unsure (1)..(116): unsure at all Xaa locations
  Clone ID: PAT_MRT3847_51657C.1.pep
FELADVAPISTYVDSGERXYFVADERGYDHWLCITADEFLFTSKGRILDNRLKLITVVRDSQYSKSGVTAKTNDGCINHTNPVMLPASIAVLQSDLLALHPPSPVRPFFFVQLSLA

SEQ ID NO: 232155 - protein, 86 aa, Glycine max
  unsure (1)..(86): unsure at all Xaa locations
  Clone ID: PAT_MRT3847_51658C.1.pep
TTYGTIPTSPPPNLEYISRANXRIKAGLGTRRPWKAMFNFRSLKVPGGGVPEAXSRIRINVSYFRMNYAMVTLLILFLSLVWHRSP

SEQ ID NO: 232156 - protein, 45 aa, Glycine max
  Clone ID: PAT_MRT3847_51659C.1.pep
GCKSSAMTPLQRPTIFVFSASEQWTLATRYLAFASFLRQSRLRVG

SEQ ID NO: 232157 - protein, 363 aa, Glycine max
  Clone ID: PAT_MRT3847_5165C.1.pep
MEAKRGHALMCLARVSLFLCALTLSAAHGSTTVQDIARKLKLGDNELLRTEKKFKVFMENYGRSYSTEEEYLRRLGIFAQNMVRAAEHQALDPTAVHGVTQFSLPVSNNAAGGIAPPLEVDGLPENFDWREKGAVTEVKLQGRCGSCWAFSTTGSIEGANFLATGKLVSLSDQQLLDCDNKCDITEKTSCDNGCNGGLMTNAYNYLLESGGLEEESSYPYTGERGECKFDPEKIAVKITNFTNIPADENQIAAYLVKNGPLAMGVNAIFMQTYIGGVSCPLICSKKRLNHGVLLVGYGAKGFSILRLGNKPYWIIKNSWGEKWGEDGYYKLCRGHGMCGINTMVSAAMVPQPQTTPTKNYASY

SEQ ID NO: 232158 - protein, 50 aa, Glycine max
  Clone ID: PAT_MRT3847_51660C.1.pep
RCRKFPGSTHAVRLCVRYSFKRGAWREPSLPWLKSQGTCRFSEIRHHYCS

SEQ ID NO: 232159 - protein, 80 aa, Glycine max
  Clone ID: PAT_MRT3847_51661C.1.pep
IKGDFYLLKGRPVVHKAPLTAWPSQSILATVVLASREPVVVHLTHMSIGFFASDPKEGRRQPLRASQVLLVTFGLGIQRV

SEQ ID NO: 232160 - protein, 127 aa, Glycine max
  Clone ID: PAT_MRT3847_51662C.1.pep
RTIIKARDPPKIEFQHTEFAEIEDISNTKKLYEEENMLYRSLCFDTEKLDMLKKKATEDGVLEKCSTFEALSGFVWRARTAALGMQPDQQTKLLFAVDGRKRSVPPIPKGYFGNAIVLTNSLCNAGE

SEQ ID NO: 232161 - protein, 57 aa, Glycine max
  Clone ID: PAT_MRT3847_51663C.1.pep
RKLIINLTCMITLGSSAIQPLINGRRFFWNDNTEDGSPYTDIRCRRNSILHIVFFYY

SEQ ID NO: 232162 - protein, 51 aa, Glycine max
  Clone ID: PAT_MRT3847_51664C.1.pep
NSARVLPPTQQHSLMMASHSPRILSVRGRALASCSFQGEGVSIVQGASIGI

SEQ ID NO: 232163 - protein, 46 aa, Glycine max
  Clone ID: PAT_MRT3847_51665C.1.pep
RTCCRRYPRSPAPTISLCGLFIHLLLLLLRKQIKPKPSQVITRYYY

SEQ ID NO: 232164 - protein, 114 aa, Glycine max
  unsure (1)..(114): unsure at all Xaa locations
  Clone ID: PAT_MRT3847_51666C.1.pep
MLRLMTCLLFVALSSCCNXPNXHTFLHVVNGEDAHPYSCPWQASLHYDKNGALYPTFGGSLMDHDWVINDGHRMSRYFTYLLLLXSITLLWKRASNXVIRINADDLFVHPLLYF

SEQ ID NO: 232165 - protein, 483 aa, Glycine max
  Clone ID: PAT_MRT3847_51667C.1.pep
MELYSRAREQEEEILSLREQIGIACMKELQLLNEKCKLERQFSELRMAVDEKQNEAISSASNDLVQRKGYLEENLKLAHDLKAVDDERYIFMSSMLGLLAEYGLWPRVMNASSISSCVKHLHDQLQWRIRSSHDRMGELTSVLESRADNGNHVVESPGSGNLTSHTHNDFMFQHNFPQQNLIGNEQSHQPMSNVAGYMHPALHSDVNWGLKTFNYQQTSNADRGISSFPHASIDKIGVQDKNMERNFGNGNFYQHPPDLDETASSVSEDGPGIENFQVSGDAIPGEKLLGCGYPVRGTSLCMFQWVRHLEDGTRQYIEGATNPEYVVTADDVDKLIAVECIPMDDKGRQGELVKLFANDQNKITCDSELALVSGPLLSHPDASPSLLRLRDSSENWEQATLFLRRSGYQIKINGTEATVVDEKFSKELSIKVPCGLSAQFVLTSSNGSSHPLSTYSVRMRDTLVLTMRLFQSKALDDKRKGRA

SEQ ID NO: 232166 - protein, 73 aa, Glycine max
  unsure (1)..(73): unsure at all Xaa locations
  Clone ID: PAT_MRT3847_51668C.1.pep
MGRKFFVGGNWKCNGTTEEVKKIXTXLNEAKSPXEEDVVEVGCEAPPXLVCXPXXVKXLLXPDFPSRPKIVGS

SEQ ID NO: 232167 - protein, 123 aa, Glycine max
  unsure (1)..(123): unsure at all Xaa locations
  Clone ID: PAT_MRT3847_51669C.1.pep
FLFFFXXFFFFLLVFFKFFSGLKNFFFFFFFFLFFWGGPPPGDPVSGPPGGALKKFEFLGPPNPRVCVFPEDQEARPPGPPGNPLPPHGGGKNKFPGQFVWEAYPMVLPQVHLRKPCDHLSFL

SEQ ID NO: 232168 - protein, 382 aa, Glycine max
  Clone ID: PAT_MRT3847_5166C.1.pep
MEAKRGHALMCLARVSLFLCALTLSAAHGSTTVQDIARKLKLGDNELLRTEKKFKVFMENYGRSYSTEEEYLRRLGIFAQNMVRAAEHQALDPTAVHGVTQFSDLTEDEFEKLYTGVNGGFPSSNNAAGGIAPPLEVDGLPENFDWREKGAVTEVKLQIQGRCGSCWAFSTTGSIEGANFLATGKLVSLSEQQLLDCDNKCDITEKTSCDNGCNGGLMTNAYNYLLESGGLEEESSYPYTGERGECKFDPEKIAVKITNFTNIPADENQIAAYLVKNGPLAMGVNAIFMQTYIGGVSCPLICSKKRLNHGVLLVGYGAKGFSILRLGNKPYWIIKNSWGEKWGEDGYYKLCRGHGMCGINTMVSAAMVPQPQTTPTKNYASY

SEQ ID NO: 232169 - protein, 85 aa, Glycine max
  unsure (1)..(85): unsure at all Xaa locations
  Clone ID: PAT_MRT3847_51670C.1.pep
MTSLQGGGISLTPPMQGNKNGMLWEDQGKXLINENVXVNTGANPSGEGGGQDXRDNDALHKVADIGHTCKLEEQPALDKKEFVTL

SEQ ID NO: 232170 - protein, 651 aa, Glycine max
  unsure (1)..(651): unsure at all Xaa locations
  Clone ID: PAT_MRT3847_51671C.1.pep
ITGNRDTFQNGYQSNLSSANPRDQLVELPSNVQGLPTLEALSTVLHRAEQLLGLLLRPWNENLRSSSRGETLSKPEKGQDIPAGRTMLTLRMGQSSAESVVNAGPAVYXSPSGPNPIMVQPFPLQTSSLFGGPVPPSTPATLGTIGIGNAPRNVNIHIHAXGTSLAPIVSAIGSEXNNGEGTRSEHHNEPGSGDSATIPSHPPGVGVSSSTQTGFGISTSQPPSDSASLSSVLAEINSRLRNVVGNMQGDNTVPSGQMESNSRDLSSGSESRPPTVNKQQDNVDVNGFCGISASSVGCTSESEVQKLQIEVVQTSSNVLVDKFVSSSSNQDLQSCSSGETIVKPEIEQDVLAVSERQNVTEPAKAAPLGLGVGGLERKRRTRLQPPVSKGADDGSSSSSVNQNQQTRTDGQHILQTLASHGSGLNSRNANGPSQRPLPSSDRPIDVAGLMSQALHSPALNGLLEGVSQQTGVDSPDGLRNMLHQFTQSPQMMNTVNQIVQQVGSQDVGNMFAGTERGQGGGIDISRMFQQMMPIVSRALGGGNPSSLFSAEEAEPHAPYRDGTVDRDEYSDNQSLQLYLQPLAERIEHLGPSTDIFRAVAEIAVQLSGSGSTSNDLLDELCSNESLAREYVDMLRFDVSKLLEGHSETDNV

SEQ ID NO: 232171 - protein, 92 aa, Glycine max
  Clone ID: PAT_MRT3847_51672C.1.pep
CDGTITRDEYSDNQSLQLDLQPLAERIEHLGPSTDIFRAVAENAVQLSEFRSRSRTSLDELCSNESLAREYVDMLRCDVSKLLKEHSETNNV

SEQ ID NO: 232172 - protein, 46 aa, Glycine max
  Clone ID: PAT_MRT3847_51673C.1.pep
AAPTRTRQGRGGSSRSEVPCGLCPRRQDSRKLAFNPHAAITPNKTG

SEQ ID NO: 232173 - protein, 150 aa, Glycine max
  Clone ID: PAT_MRT3847_51674C.1.pep
MSVSERVVHLAFLPSAGIGHLNPCLRIAALFLRYGCKVTLITPKPTVSLAESNLISRFCSSFPHQVTRTDLNLIPLDPTTVNTSDPFWLQFETIRRSVHLLAPILSSLSTPLSAFIYDVSLISPLIPVTEKLTCPSYIYFTSSARMLSFF

SEQ ID NO: 232174 - protein, 53 aa, Glycine max
  Clone ID: PAT_MRT3847_51675C.1.pep
TIVLSTALFMKSKLSFRRRMPVIQSLDRIDYKNMGLISRFIIEHGKILSKRLN

SEQ ID NO: 232175 - protein, 129 aa, Glycine max
  unsure (1)..(129): unsure at all Xaa locations
  Clone ID: PAT_MRT3847_51676C.1.pep
MGRFTFDAVVSLFVTVHPHETSALLHSFFCFFFILSAYFVVLPLRDEGAISLGLSNLPGLFVGSLVLTLIAAPFSSLIFSLPNLSXRFFSVSLILFFILWHSSSAGYSKSNITGSTPLTFSSRKKGKWC

SEQ ID NO: 232176 - protein, 94 aa, Glycine max
  unsure (1)..(94): unsure at all Xaa locations
  Clone ID: PAT_MRT3847_51677C.1.pep
SCTAFRNQTQIYRTEQSAHKFTGXKAPTKHLATKAARKSAPTTGVVNKPHRIRPGTVALREIRKYHKSTELLIRKLPFHRLIREIAHDFKTDLH

SEQ ID NO: 232177 - protein, 128 aa, Glycine max
  Clone ID: PAT_MRT3847_51678C.1.pep
SSHFDEDGSSAHFRDSTSVSLKDEAFSAPDRESPKELEHSGESSQESSIRKGFPKFEHPMISTSTSSSPPDEGICLIGTVSTPKASSPMLTLTGTRTLCLENARALTFSEWLFNSKFRPIFTNHSNSP

SEQ ID NO: 232178 - protein, 42 aa, Glycine max
  Clone ID: PAT_MRT3847_51679C.1.pep
EASLRSKEGNFLGKIEEVSILDKLEGGYSHPPIAKLTHSMPK

SEQ ID NO: 232179 - protein, 95 aa, Glycine max
  Clone ID: PAT_MRT3847_5167C.1.pep
STAGEPPAAVLHAAIDGQRDVPRSLESPHATAVRTCVPRGPHQRPSIDPAPAPPQSLSHRLANRSTRLLLIDPIMVRHPPRPHPCPRPYLRRRLP

SEQ ID NO: 232180 - protein, 38 aa, Glycine max
  Clone ID: PAT_MRT3847_51680C.1.pep
VEAILQALRDETMNDPRDRIEIAQSHVFYRPSLLGHQP

SEQ ID NO: 232181 - protein, 86 aa, Glycine max
  Clone ID: PAT_MRT3847_51681C.1.pep
EFWYAEGGSQAEGRRDTNSQHSKRWWLPSPQVPKTGLSDTERKRLLHQGRVVRQVFKAAKAINESVLLEMPVPSIIKDALAKVIIL

SEQ ID NO: 232182 - protein, 193 aa, Glycine max
  Clone ID: PAT_MRT3847_51682C.1.pep
SHDQISSMFGLLHSDFHEERAVAVLEYMSSMVASVDPYHHSADGQKRCLESSLYDQNFTKGKFNVRFKRRNGRVRVTCEEFKVEPGGISFLSVSSVDGTVIAGIVPKVQFNLQLSEKERIDRSNVVLPFEHQGNGKPIQIYDGRRSLEESNSEANPISSGKKEDSAMGEIIYFRDSDDEMPDSDEDPDDDLDI

SEQ ID NO: 232183 - protein, 81 aa, Glycine max
  Clone ID: PAT_MRT3847_51683C.1.pep
MGDSKRWTVTYTKHIKQKRKVYQDGFLELHVSTSKVKLYDECEKLLECRLLKNDEIVTSGETLIFNGYLVDIGDPEGGNKP

SEQ ID NO: 232184 - protein, 465 aa, Glycine max
  Clone ID: PAT_MRT3847_51684C.1.pep
SPQHFCVKEKPYAIQHSDIDAMKDKFSKLLLGEDVTGGNTGLSTALALSSAITNLAVTVFGELWKLEPLSEERKRKWQREMDWLLSPTNYMVELVPAKQSSSNGGIFEIMTPKARADIHMNLPALQKLDSMLIETLDLMMNTEFWYAEGGSQAEGRRDTNSQHSKRWWLPSPQVPKTGLSDTERKRLLHQGRVVRQVFKAAKAINESVLLEMPVPSIIKDALAKSGKANLGQELHKVLMAESSSGEDMLKYLNLKSEHLVLETVNRLEAAIFSWKERITGQVSGKSPVRSSWSPFVKDPMSEVDKLELLLDRAETLLQLIKIRYPNLPQTFLDATKVQYGKDIGHSILEAYSRVLGNLAFSIVSRIGDVLQEDSLSNPNSPVSINCSPGINLSQTWVVGSHIRQSLLDKINKADGQYCDSSCYTSDLELSSIDTKSSSVIVTPNRSTVWCISREACKSVSPQNSP

SEQ ID NO: 232185 - protein, 80 aa, Glycine max
  Clone ID: PAT_MRT3847_51685C.1.pep
DNLLQALNHLPRRRWNRRRQRLATALPTHRHCLSLSLSLSHTLSLSHTLCRTTGVARVPPRQQPERRKKTSFAHYSNALR

SEQ ID NO: 232186 - protein, 175 aa, Glycine max
  unsure (1)..(175): unsure at all Xaa locations
  Clone ID: PAT_MRT3847_51686C.1.pep
VDLDRNPMKALTICMISTNSFISSHLYKXLMSKTPHTILALDIYNDKIKHLLKPSNSPXTNHITFHHLNIKHNSHLKSLIKITDLTINLTTIYTPTNYNTRPLNTIYXNFIDALPVIKYYAENNKHLIHFSTYXVYQKTIRXCLPKDSPVRKDPAYYVLKEDDSPYSLSSIKKQK

SEQ ID NO: 232187 - protein, 98 aa, Glycine max
  Clone ID: PAT_MRT3847_51687C.1.pep
TAARRRQKGIDHLLKFMHCMDLAYAAADLIVSRAGAMTCYEISATGKPSILMPSPNFSEGNQFRNASLMADVAGVTVITEDELDSSTLALAIEKIVSM

SEQ ID NO: 232188 - protein, 77 aa, Glycine max
  Clone ID: PAT_MRT3847_51688C.1.pep
CSVGLGIIGEDPFRSLKSSPHLICVSLEEWPWPLTVILMTHDHVALFLSLRSTMLVSGEILPRRASSQCSGETPYEY

SEQ ID NO: 232189 - protein, 81 aa, Glycine max
  Clone ID: PAT_MRT3847_51689C.1.pep
LEWPRLDAGGGVIPRGGPGGKKARAGLLASPGVRAGAGHPSSHPVVLECNWLLLQGGGVWPRSAYVRSHAKRWIYPADRDV

SEQ ID NO: 232190 - protein, 44 aa, Glycine max
  Clone ID: PAT_MRT3847_5168C.1.pep
VKYIDFNISRGIFTSSITSNILLVLVVYKTHNCLLGNSLVNIPR

SEQ ID NO: 232191 - protein, 74 aa, Glycine max
  Clone ID: PAT_MRT3847_51690C.1.pep
KHIPILPRRAVSVTYLKSGNSKRTQIIESEWFRMWTSCCTAWEVSWWRGWHCRWRVRSSWSTSLTFLISASPTP

SEQ ID NO: 232192 - protein, 79 aa, Glycine max
  Clone ID: PAT_MRT3847_51691C.1.pep
CPVGSEKWPSLWLGVLCGVLGSCGMAGSALVWRGAGGERRVALVCAVSWGVRGLLLLGGEFRFACGVFPRLCVCGCFWS

SEQ ID NO: 232193 - protein, 60 aa, Glycine max
  unsure (1)..(60): unsure at all Xaa locations
  Clone ID: PAT_MRT3847_51692C.1.pep
LXAPKLHILRGALYLLILIHTHSTNTKLSKDSINTREKINRCTINNSLIKTSHFSSNILH

SEQ ID NO: 232194 - protein, 112 aa, Glycine max
  unsure (1)..(112): unsure at all Xaa locations
  Clone ID: PAT_MRT3847_51693C.1.pep
MFVVAVREGGEMEEKYSNLEISEESPNSGVFFLILNRPSRPELCMHWITTREVHVIVLSSAGAHCCSGIDISLLGSTAANSGPPGPSSXAMQDAVTALERCRKPVTASIQGA

SEQ ID NO: 232195 - protein, 84 aa, Glycine max
  unsure (1)..(84): unsure at all Xaa locations
  Clone ID: PAT_MRT3847_51694C.1.pep
DPEGMLGPLQTSNLASIEFKSRIERDAHAHEALQRHRXEEKERHQSIAQSXSFTYTLQDLIGYFLGTETYEIETEIARMIPRLN

SEQ ID NO: 232196 - protein, 70 aa, Glycine max
  Clone ID: PAT_MRT3847_51695C.1.pep
FTLEHVKIINLSSDIMSFLIEVSFEMLSSVCTPSATLLSSTAMLCIMTSRCQYSCTYFCHADTLAKILIH

SEQ ID NO: 232197 - protein, 69 aa, Glycine max
  unsure (1)..(69): unsure at all Xaa locations
  Clone ID: PAT_MRT3847_51696C.1.pep
VFTLKTYLFVYVSLLLSISCNRXXKKKKKKKKKKKKKKKKKKKKKKKKKKKKKKKKKKKKKKKKKKKRG

SEQ ID NO: 232198 - protein, 77 aa, Glycine max
  Clone ID: PAT_MRT3847_51697C.1.pep
RDLDGRVGGRVGLTFDMNFNTLSAKNRVYFVIFSYINYYKRKRPNKQESKVMTLIRQGKKSFSESSYRTGRVGGRVG

SEQ ID NO: 232199 - protein, 89 aa, Glycine max
  unsure (1)..(89): unsure at all Xaa locations
  Clone ID: PAT_MRT3847_51698C.1.pep
PTRPVPVKKDASTLQYITQIKRRRALVAENLVLDIGGQFLWVECESSDVSSTYRXPQRSGAAQCSLGTSDSWGNCVSARKAGGRDRRAA

SEQ ID NO: 232200 - protein, 54 aa, Glycine max
  unsure (1)..(54): unsure at all Xaa locations
  Clone ID: PAT_MRT3847_51699C.1.pep
KTEKRGGGGVVXKNENTTKQELKPQFMVPQQRILRTPFVLPYPFYLTVLIHGNK

SEQ ID NO: 232201 - protein, 43 aa, Glycine max
  Clone ID: PAT_MRT3847_5169C.1.pep
FSRCPPRSQVSTMSSGTLENEKPQVEDEQAQAEENHTKQEGDS

SEQ ID NO: 232202 - protein, 176 aa, Glycine max
  unsure (1)..(176): unsure at all Xaa locations
  Clone ID: PAT_MRT3847_516C.1.pep
MVREVSESCIDSLLTEMVACYCNRFYANKPELAARRIEAIGYQVGHQLSERYTMDRPRFTDHLEAIKFICKDFWSELFKKQIDNLKTNHRGTFVLQDNKFRWLARMSIDPSTDNVSPLEDITSPTAESKTAQAMSMHLXYPCGIIRGALSNLGIPCAVSADISNLPACSFVVRIKA

SEQ ID NO: 232203 - protein, 265 aa, Glycine max
  unsure (1)..(265): unsure at all Xaa locations
  Clone ID: PAT_MRT3847_51700C.1.pep
MVQDSLRFTSALSVALAVVFLVIAGLEAVVKIFSGGIAMPRLFPVTTDVASFFRLFTVVPVFVTAYICHYNVHSIDNELEDSSQMRGVVQTALVLCSSVYVMISFFGFLLFGEGTLDDVLANFDTNLGIPFGSVLNDAVRISYAAHLMLVFPVVFFPLRLNIDGLLFSKSRPLVLDNFRFASLTIALIGVIFLGANFIPSIWDAFQFTGATAAVCIGFIFPAAITLRDRYNIATKSDKILCVIMIALRSLLKRXXLYTXDAYALD

SEQ ID NO: 232204 - protein, 359 aa, Glycine max
  Clone ID: PAT_MRT3847_51701C.1.pep
MASFLSLSLPKLNLIKASSAANTTTTTTTTLPTAETLNEKFGRKGIKFLESDNTPIVDLTVRNGSSLRLRIPDAHVTSYKPKVNWKDDGFQEVLYTIPATETGPYKAKGGVGLVMNEVLQPGAKGLLPSTLEWTVNDVDSDSIDALQVELSCTSRFFDITYIVTLYPVSMATAVVAKNIGPKPATLTNAILSHFRFKNRRGTAIKGLRSCSYIPHAPLSSPFQILTPSEATISEPPRWLSFGNETEAKPGTWGQQALSITLLENKMSRVYAAPPKERLKAFYNTPPSKYETIDQGRGLCFRVIRMGFEDIYLSSPGSLSEKYGKDYFICTGPASILVPVTVNPGEEWRGAQVIEHDNLT

SEQ ID NO: 232205 - protein, 466 aa, Glycine max
  Clone ID: PAT_MRT3847_51702C.1.pep
MTIGSLAPKAEKKKSRKNKTVVVNENAPLLPKSHVQESDAGFDDFNGASFSGAVFNLSTTIIGAGIMALPATLKQLGMIPGLLAIIIMALLTEKSIELLIRFTRAGKSASYAGLMGDSFGNYGKALVQICVIINNIGVLIVYMIIIGDVLSGTSSSGDHHYGILEGWFGVQWWTGRTFVVLFTTLAIFVPLASFKRIDSLRFTSALSVALAVVFLVIAVGIAVVKIFSGGIVMPRLFPVTTDVASFFRLFTVVPVFVTAYICHYNVHSIDNELEDSSQMQGVVQTALVLCSSVYVMILDDVLANFDTNPGIDVLSDFDTDLRIPFGSVLNDAVRISYAAHLMLVFPVVFFPLRLNIDGLLFSKSRPLVLDNVRFASLTVALIGVIFLGANFIPSIWDAFQFTGATAAVCIGFIFPAAITLRDRYNIATKSDKILSVIMIVLAVFSNVVAIYSDAYALIKQNKTSRE

SEQ ID NO: 232206 - protein, 48 aa, Glycine max
  Clone ID: PAT_MRT3847_51703C.1.pep
ISSNKNLGLNLSCYKIKKTNLFCYVNYTKFAKMHGMVSDMINGGLRYG

SEQ ID NO: 232207 - protein, 68 aa, Glycine max
  Clone ID: PAT_MRT3847_51704C.1.pep
SASFFGGFLSIILNQGVARHNEYRRVWELSKDRLGTRPRPFLFVPLVSSGFNPGIVTLCSHWKLGGVF

SEQ ID NO: 232208 - protein, 98 aa, Glycine max
  Clone ID: PAT_MRT3847_51705C.1.pep
MFGTYLCSGEGYLGDQSDFPQVELLETLPQFVHHPGRVGPSQLDLLALPLVARCTVGFLGYFVQITLWLYLAWMRCVVRWIRSVQSRRWPSRPPVGGL

SEQ ID NO: 232209 - protein, 113 aa, Glycine max
  Clone ID: PAT_MRT3847_51706C.1.pep
CDGSFTDSSHAIYTRKFDVITNNPLRSYQQLLSFSVNGFKHEAEIGRCVYNIPSPSIPPSEEIADRINNMLAVIEKNILWVNPDCGVKTRKYFVVKPALTNMVAAAKLIRTEL

SEQ ID NO: 232210 - protein, 41 aa, Glycine max
  Clone ID: PAT_MRT3847_51707C.1.pep
TSICGGVAFYFVGRTLGGGEKKGCLQLKAVCLKFVGGRETL

SEQ ID NO: 232211 - protein, 71 aa, Glycine max
  unsure (1)..(71): unsure at all Xaa locations
  Clone ID: PAT_MRT3847_51708C.1.pep
GRQYHSFINSDMPXMKFVVKKAWSNGGCGPVGTLEMGSCPGPIKTPGLLLSTRKGLSYFIFPELINFLPFP

SEQ ID NO: 232212 - protein, 66 aa, Glycine max
  Clone ID: PAT_MRT3847_51709C.1.pep
FQESLNFFLLLCAPLLKGKKNTLCAGHRLCESFSSPLLVYLLNTLLFDIRLHVRFQLHMTLSHVSV

SEQ ID NO: 232213 - protein, 56 aa, Glycine max
  Clone ID: PAT_MRT3847_5170C.1.pep
ISHYFSVYFSSPLKTNTALTIFVLWSYTLLRSESVRVHSGVKLKWRILLSLNDVTS

SEQ ID NO: 232214 - protein, 93 aa, Glycine max
  Clone ID: PAT_MRT3847_51710C.1.pep
RPTRPEIFSLFCCLRSSERELTSLSFSHIMFFVVIFFLYSKNLHLKNLLCFLVFEQELTTYSYGHTIITVPDFHFTELFHMTGNIMSTSCCQN

SEQ ID NO: 232215 - protein, 211 aa, Glycine max
  Clone ID: PAT_MRT3847_51711C.1.pep
MASSSFLCPAAFTFSQKPLQSTFLHSSSLLTLSILPKKLRKPHQLRSLIVAKSNGSDSADVPDRLISALCYFYPFFDGIQYGKYVITQFYPVQAIVQPLVPAIRVFKSFPFNGFLVFLTLYFVVVRNPNFSKYVRFNTMQAVVLDVLLIFPDLLERGFNPKDGLGLDLIMSLDSTVFLFLLVCLIYGSSSCLLGQIPRLPIVAEAADRQVL

SEQ ID NO: 232216 - protein, 95 aa, Glycine max
  unsure (1)..(95): unsure at all Xaa locations
  Clone ID: PAT_MRT3847_51712C.1.pep
HARVRKLGIRLEGSGVEPQILVQYLVLRKDLSQAPFSWPTGALVAQACHAATAALHLHRDHPHTAAYLRELGRMXKVVLEAADETTLKELAETLQ

SEQ ID NO: 232217 - protein, 303 aa, Glycine max
  Clone ID: PAT_MRT3847_51713C.1.pep
RTLAINFDAKRPEWKKMRGRDHFLVSRRIAWDFMRQYDDESYWGSKFRFLPESMNMSMLAVEASSWNNDYAIPYPTSFHPSEDTHVFQWQRKIRHQKRPYLFTFTGAPRPELESSIRGKIIDHCRASSVCKFVDCSYGVQRCDDPISVIKVFGSSVFCLQPPGDSYTRRSIFDSMLAGCVPVFFHPGTAYSQYKWHLPKNRTKYSVYIPVKDVKQWNVNVEQVLRGIPEGEVFAMREEVIKLVPHIIYADLRSKLDCFTDAFDLAVKGMVERIEKVREEMRSGRDPSIGFADEDHYKYTFSQN

SEQ ID NO: 232218 - protein, 110 aa, Glycine max
  Clone ID: PAT_MRT3847_51714C.1.pep
MSPSLDLPPKGGFSFDLCRRNAMLQNKGLKAPTFLKTGTTIVGLVFQDGVILGADTRATEGPIVADKNCEKIHYMAPNIYCCGAGTTADTDAVTDMVSSKLQLHRYHTGR

SEQ ID NO: 232219 - protein, 88 aa, Glycine max
  Clone ID: PAT_MRT3847_51715C.1.pep
IDMEKEPHASLEETTTICNCKVLRHRLKLYWLSRRMNYQILTVQTKWGLLQHAEKNVKSRVALHKQTSRWLLLVFKAAAVPGITSTAI

SEQ ID NO: 232220 - protein, 85 aa, Glycine max
  Clone ID: PAT_MRT3847_51716C.1.pep
GKGPLKFLFKGFYPGEPPPTQREMVIFKGFISFSYKNSFQTPGEGFQKNLDKFPPPTNLHPGKKKNLPKKNPVFKGKKKIPNVFN

SEQ ID NO: 232221 - protein, 81 aa, Glycine max
  Clone ID: PAT_MRT3847_51717C.1.pep
NFSKGSPKTFLKRTLKNPNFGAGSKRFVFTKKKAFFNLGAFTILKNKERKKIYFPPFKKPCLPHFPRVSFFFELKKVPCLQ

SEQ ID NO: 232222 - protein, 271 aa, Glycine max
  Clone ID: PAT_MRT3847_51718C.1.pep
MSPSLDLPPKGGFSFDLCRRNAMLQNKGLKAPTFLKTGTTIVGLVFQDGVILGADTRATEGPIVADKNCEKIHYMAPNIYCCGAGTAADTEAVTDMVSSQLQLHRYHTGRESRVVTALTLLKKHLFNYQGHVSAALVLGGVDITGPHLHTIYPHGSTDTLPFATMGSGSLAAMSVFESKYKESLSRDEGIKLVVEAICAGIFNDLGSGSNVDVCVITKGHKEYLRNHLLPNPRTYVNPKGFDFPKKTEVLLTKITPLKEKVEVIEGDAMEE

SEQ ID NO: 232223 - protein, 187 aa, Glycine max
  unsure (1)..(187): unsure at all Xaa locations
  Clone ID: PAT_MRT3847_51719C.1.pep
MSPSLDLPPKGGFSFDLCRRNAMLQNKGLKAPTFLKTGTTIVGLVFQDGVILGADTRATEGPIVADKNCEKIHYMAPNIYCCGAGTAADTEAVTDMVSSQLQLHRYHTGRESRVVTALTLLKKHLFNYQGHVSAALVLGGVDITGPHLHTXYPHGSTDTXPFATMGSGSLAAMSVFESXYRXSLSRD

SEQ ID NO: 232224 - protein, 74 aa, Glycine max
  unsure (1)..(74): unsure at all Xaa locations
  Clone ID: PAT_MRT3847_5171C.1.pep
SNQIQNIRRGLRRDSVHLIGKNTMRNHTNMMRSXQSQASAYIHLIQLLDGDVTWMFTKSDLEEVIEEGVKHKVG

SEQ ID NO: 232225 - protein, 199 aa, Glycine max
  Clone ID: PAT_MRT3847_51720C.1.pep
MSPSLDLPPKGGFSFDLCRRNAMLQNKGLKAPTFLKTGTTIVGLVFQDGVILGADTRATEGPIVADKNCEKIHYMAPNIYCCGAGTAADTEAVTDMVSSQLQLHRYHTGRESRVVTALTLLKKHLFNYQGHVSAALVLGGVDITGPHLHTIYPHGSTDTLPFATMGSGSLAAMSVFESKYKESLSVSKHTRLTALEECI

SEQ ID NO: 232226 - protein, 58 aa, Glycine max
  Clone ID: PAT_MRT3847_51721C.1.pep
LIIIYVGIGHFKRTKILLKKIIHCKAMWIKILHPDLHFPLRHLFPHHCHVQYWNIRFG

SEQ ID NO: 232227 - protein, 43 aa, Glycine max
  Clone ID: PAT_MRT3847_51722C.1.pep
KGVRCRSINQSSADLIEKHAVVYTYTVRRIIDNKVDLDNTVVY

SEQ ID NO: 232228 - protein, 77 aa, Glycine max
  Clone ID: PAT_MRT3847_51723C.1.pep
LSRKLQICIGPSLTVRKSTTNALWARAIVLLLSQILGLQFDAINDLNGKIIDGREIKVNGVRASGGMSNFGRKRYYL

SEQ ID NO: 232229 - protein, 59 aa, Glycine max
  Clone ID: PAT_MRT3847_51724C.1.pep
TVDWITLIQNAPISHPLRVAARKKGCLMVQIVMSGTAALKTCDWASLVQVCLTNSHHSV

SEQ ID NO: 232230 - protein, 83 aa, Glycine max
  unsure (1)..(83): unsure at all Xaa locations
  Clone ID: PAT_MRT3847_51725C.1.pep
FQFGIFYTPPPGVYGGAPLKAHRVFCMITGSFSVGKVVGGIDHKFFFMAAKSAFAPWNVVXGMGPRFFFAARKDQAALVKAYE

SEQ ID NO: 232231 - protein, 154 aa, Glycine max
  Clone ID: PAT_MRT3847_51726C.1.pep
KTQKPKLKKKKQQKKRGKKNPKKTGGEMKKEKWPKKSKTWHYKKKGTPTPPEKKKPGGPTKGKQGHPQRKNTPFLNGKKPGGGRKNGLDKTRANPKEAKERGFLKKDSRGGIQTGLKNKGGPQKLRPPLTFQKTFLEIPENPGQNSTPHPFARG

SEQ ID NO: 232232 - protein, 53 aa, Glycine max
  Clone ID: PAT_MRT3847_51727C.1.pep
SNSGGLIVCECLIPDFMKFESMSKPYQSGFFFLTLNSFVSSLPCQVYGLIKKR

SEQ ID NO: 232233 - protein, 71 aa, Glycine max
  Clone ID: PAT_MRT3847_51728C.1.pep
TLPQVVDSDIVVHEASHADGHLNVVVVFPSLEAAIKQSRAVEKGILIARATTDDLKEEGVTGSGLVITELL

SEQ ID NO: 232234 - protein, 54 aa, Glycine max
  Clone ID: PAT_MRT3847_51729C.1.pep
TKTLRLCKIGASIRQQIPENLKNCMKMVERKKKSSHTPFFASIGCSSSMWQHNP

SEQ ID NO: 232235 - protein, 72 aa, Glycine max
  Clone ID: PAT_MRT3847_51730C.1.pep
SLSSQNLTPGIVEEAEEAEPDEEFKDAIEEDDEGAPRPAEDELALHDNAFLSKNEVLRNKVSRLTERIPKRY

SEQ ID NO: 232236 - protein, 63 aa, Glycine max
  Clone ID: PAT_MRT3847_51731C.1.pep
ASAASRSASQSWCSVFVSCALFGLHLVCSAWQSSLHRMRHLFGRRGVVVLAPAYVAVYSVEDS

SEQ ID NO: 232237 - protein, 347 aa, Glycine max
  Clone ID: PAT_MRT3847_51732C.1.pep
MALGRGIYVAHNVCFRSELQPMAPDCIGSSTSRQRDLVFVVNPLGANGRTGKEWRKLVPYLRSRLGKECNICESITSGPCHAIDITREAIREGADAVIAVGGDGTLHEVVNGFFWAGKPVVSQVKESTHSTALGLIPLGTGSDFARTFGWKNDPHEAIERVARGLRSRIDVGVITGESCDHHYFINVADIHLSAKAGFYASRYKRFGNLCYVIGALQAFIGHQNQDMRIRFNDGPWETCPQVTALCIGNAKYFGGGMKITPNADPFSRNLEVVTLQNFKWYDFILKLHKLYSGTHLSVKNVSDRSVLSIEVEDISGKGGIYIQSDGEHLGFLPKKISVVPAAIEMIL

SEQ ID NO: 232238 - protein, 40 aa, Glycine max
  Clone ID: PAT_MRT3847_51733C.1.pep
PFLSPNLSNTMPSVQLHSCCTASILYYPSSVIYSCTSVEH

SEQ ID NO: 232239 - protein, 164 aa, Glycine max
  Clone ID: PAT_MRT3847_51734C.1.pep
MESSNEKMTDKRKVLGKNNEETRSYFTWNLEMERVWADVLRDQRNLGNKGDGGWKRSALNAAAAVLSTSFNVNVTSDNVKNRIKLWRSWYGIVSDILGHSGFDWDGTKHMITVENENAWNEYCTSRKSAKSFRFKVLQNWDDIVNLCAKDRATGHGVLWMLMKR

SEQ ID NO: 232240 - protein, 82 aa, Glycine max
  Clone ID: PAT_MRT3847_51735C.1.pep
TYCQLRQHCEILCWRPLAVSVSYARYRYSDCLDIEIRVTICAAGASTYSRHIFVTGAYTDATTCGPRYNTEALQLMETDAID

SEQ ID NO: 232241 - protein, 102 aa, Glycine max
  Clone ID: PAT_MRT3847_51736C.1.pep
PPPPQRRGWEIYDPKRGGGSPSLREFFISPPVKAAPRPPKFIIKWNPGRKTPFLNQEGDHTKITACLPGGGVKFPPIKPPLPCPGKLPLFFLGGPPPGLGGG

SEQ ID NO: 232242 - protein, 37 aa, Glycine max
  Clone ID: PAT_MRT3847_51737C.1.pep
FIINSQLTNAMGITKIRLKATGKGDAIILWFKASLTF

SEQ ID NO: 232243 - protein, 76 aa, Glycine max
  Clone ID: PAT_MRT3847_51738C.1.pep
KSQRLFGIQSSVASSFRAYMIYSIGFVPPLPFYPRGASGIFSFLPTNDASRASFSIFKILYACHLDTVWLSRESPL

SEQ ID NO: 232244 - protein, 54 aa, Glycine max
  Clone ID: PAT_MRT3847_51739C.1.pep
YVYKVSTGKNRHPPLTTLLCHPFVRYHSGLFPKIYILRVNCNVGSSPFPSKVEQ

SEQ ID NO: 232245 - protein, 68 aa, Glycine max
  Clone ID: PAT_MRT3847_51740C.1.pep
FLQPAYSAFSIAALSETRPPLFWRSKKQIVSHEQQKRLGVHVWQSPLPKRHYKHNWPSRTPWQTRRHQ

SEQ ID NO: 232246 - protein, 65 aa, Glycine max
  Clone ID: PAT_MRT3847_51741C.1.pep
LPTQLQGPKQKQHRDRHTGRRGCMTKLPKNSYTPGKHRANSELVSHEPYDREARNYDLKYWKKCL

SEQ ID NO: 232247 - protein, 192 aa, Glycine max
  Clone ID: PAT_MRT3847_51742C.1.pep
MASLSMTQIRTGNCASGFGLNCAGKVKVGPSRVGFKVFASETQATEPDLSVTVNGLHMPNPFVIGSGPPGTNYTVMKRAFDEGWGAVIAKTVSLDAAKVINVTPRYARLRAGADRSAKGEIIGWENIELISDRPLEIMLKEFKQLKEEYPDRILIASIMEEYNKAAWEELIDRVEQTGVDAFEINFSCPHGM

SEQ ID NO: 232248 - protein, 424 aa, Glycine max
  Clone ID: PAT_MRT3847_51743C.1.pep
MASLSMIQIRTGNCASGFGLNCAGKVKVGPSRVGFKVFASETQATEPDLSVTVNGLRMPNPFVIGSGPPGTNYTVMKRAFDEGWGAVIAKTVSLDAAKVINVTPRYARLRAGANGSAKGEIIGWENIELISDRPLETMLKEFKQLKEEYPDRILIASIMEEYNKAAWEELIDRVEQTGVDAFEINFSCPHGMPERKMGAAVGQDCALLEEVCGWINAKATIPVWAKMTPNITDISQPARIALSSGCEGVSAINTIMSVMGINLNTLRPEPCVEGYSTPGGYSARAVHPIALGKVMSIAKMMKSEFDSENYTLSAIGGVETGGDAAEFILLGANTVQVCTGVMMHGYGLVKKLCLELQDFMKKHNFTSIEDFRGVSLEYFTTHTDLVRRQKEAVQKRKAIKKGLQSDKDWTGDGFVQETESMVSN

SEQ ID NO: 232249 - protein, 29 aa, Glycine max
  Clone ID: PAT_MRT3847_51744C.1.pep
LAHKCKKSYTGGSNILTFPTVIPPMNHTH

SEQ ID NO: 232250 - protein, 129 aa, Glycine max
  Clone ID: PAT_MRT3847_51745C.1.pep
MDTKFARRTERIGRTTCSYWRAGRCNRNPCRFLHIETPSPPAACGYGNTAYNYRKKPHSSFENTLKYGSKKAFVRDYGDRGDATRVAKAFKKSSPRICKYWINNNCVHGEQFLYLHSWFRGDGFSTVMK

SEQ ID NO: 232251 - protein, 72 aa, Glycine max
  Clone ID: PAT_MRT3847_51746C.1.pep
YSSGYGWIFFKKKNQPHSFTNMNQNLPLPQNSPIYFSFSLASYKRSFMLKHLPSLLFFYWLNAPKPTSGNYI

SEQ ID NO: 232252 - protein, 183 aa, Glycine max
  unsure (1)..(183): unsure at all Xaa locations
  Clone ID: PAT_MRT3847_51747C.1.pep
MDTKFARRTERIGRTTCSYWRAGKCNTIPCRCLHIETPSPPAACGYGNXHIATEKSPIPKALIPHNGDRGEATRVAKAFKKSSPRICKYWINNNCVHGEQCLYLHSWFCGDGFSTVTKLQEHKKVITGIALPVGSDKLYSGSTDGTVRIWDCHTGQCAKVINLGAXVTSLIXSXGSWIFGGPA

SEQ ID NO: 232253 - protein, 173 aa, Glycine max
  Clone ID: PAT_MRT3847_51748C.1.pep
MDTKFARRTERIGSTTCSYWRAGRAYSHASGFVHIETPSPPAACGYGNTAYSYGKKPHSSSENTPKYGSKKALLGDNGDRGDATRGAKAFKKSSPRICKYWINNNCAHGEQCLYLHSWLHGDGFFTVTKLHEHKKGITGIALSVGSDKLYSGSTDGTSKIWDCHTGQCAKSIN

SEQ ID NO: 232254 - protein, 218 aa, Glycine max
  Clone ID: PAT_MRT3847_51749C.1.pep
IAQTLFQFLQIASNWWMAWANPQTEGDLPKVTPSVLLLVYMALAFGSSWFIFVRAVLVATFGLAAAQKLFLKMLRSVFHAPMSFFDSTPAGRILNRVSIDQSVVDLDIPFRLGGFASTTIQLIGIVGVMTEVTWQVLLLVVPMAVACLWMQKYYMASSRELVRIVSIQKSPIIHLFGESIAGASTIRGFGQEKRFMKRNLYLLDCFARPFFCSLFAIE

SEQ ID NO: 232255 - protein, 63 aa, Glycine max
  unsure (1)..(63): unsure at all Xaa locations
  Clone ID: PAT_MRT3847_5174C.1.pep
GXLNXIGXKGXXXLXPLGXLXKXLXXXQXFLXXCKNXLRYRRXTXEFXKXXQQXXXXQQWEPG

SEQ ID NO: 232256 - protein, 72 aa, Glycine max
  Clone ID: PAT_MRT3847_51750C.1.pep
PPSLASEFASREMGSPYSKFFHLLPIGRCFLEERLVYGPEWDGWGCHHPKGGMGPIGSRGFYQPPPFQTFLF

SEQ ID NO: 232257 - protein, 82 aa, Glycine max
  Clone ID: PAT_MRT3847_51751C.1.pep
VPHPCPIPIVDRLPSWRFRSIKSPGFCLRIGIASAFVARSASLSSAFRFVWTQVVSVERGGKYITGRWLLSRHGTSHVQHSH

SEQ ID NO: 232258 - protein, 66 aa, Glycine max
  Clone ID: PAT_MRT3847_51752C.1.pep
CTLRMASLIHKAPPQDRSIFIKTKLHIVNKETRIPIAEDDTQFHTEGMQKLILPPREIGDICQRNP

SEQ ID NO: 232259 - protein, 80 aa, Glycine max
  Clone ID: PAT_MRT3847_51753C.1.pep
LFRTRASTHTLILSIHNKILGIGYTAIVVLNAFLISRIVFKTPLRKHLHLSLYSVNYLFLIPREFHLLLHIYSGSYFKPL

SEQ ID NO: 232260 - protein, 63 aa, Glycine max
  Clone ID: PAT_MRT3847_51754C.1.pep
EMKVLSHFRFSQHINTANDHIISSFSNIITVHEGQIPGIREYSYYLPMQSTNVPCYQPPSSIF

SEQ ID NO: 232261 - protein, 46 aa, Glycine max
  Clone ID: PAT_MRT3847_51755C.1.pep
GREDHRRDLYWNLLGNLKFPHCMRVKEYWVKSFVNFRVLLLYSIEG

SEQ ID NO: 232262 - protein, 140 aa, Glycine max
  unsure (1)..(140): unsure at all Xaa locations
  Clone ID: PAT_MRT3847_51756C.1.pep
SSRVRLERLEQKFSEQVFKVASSDLVNMGISVVSYTLKDIHDDQDYLHSLGKARTAQVQKDARIGEAEAKRDAGIREAKAKQEKVSAQYLSEIEMAKAQRDYQLKKAAYDIEVNTRRAQADLAYQLQVAQTKQQIEEXRV

SEQ ID NO: 232263 - protein, 159 aa, Glycine max
  Clone ID: PAT_MRT3847_51757C.1.pep
MASRTFSRFASNFRLFGSVMATNLSGRSHCFVAKKSLSTSPLVYATAAAASQPTTPKATVKGKKGRVVAVIGAVVDVQFDEGLPPILNALEVQNRASRLILEVAQHLGDNVVRTIAMDGTEGLIRGQEVVDTGDPIKIPVGPETLGRIINVIGEPIDER

SEQ ID NO: 232264 - protein, 71 aa, Glycine max
  unsure (1)..(71): unsure at all Xaa locations
  Clone ID: PAT_MRT3847_51758C.1.pep
XXKFNXLXQIPXPPXFXFVHXXXXAIXFXXXXXFXVGKXRXXXXXFXRKGLKKXIXLIFLEFXXXXXNKRE

SEQ ID NO: 232265 - protein, 130 aa, Glycine max
  Clone ID: PAT_MRT3847_51759C.1.pep
IRNSAYKKRMIFIFNSNPFDIFIDSGNFEIFRISLKYHLRYWMDLSHQCTMFRLQLIGLIHFKNLVSKTYLCLNEKNTFALNMRMLKTVFSTRYFLICKKMPFYIGEGERINNSILKICRMLLFKCRYIL

SEQ ID NO: 232266 - protein, 89 aa, Glycine max
  unsure (1)..(89): unsure at all Xaa locations
  Clone ID: PAT_MRT3847_5175C.1.pep
GILNHNMFIAAEHQALELTVGHGXAHFFDFTEDEFEKLYTDVNGGFQSXNNASGGIAQPSEVDGMPENSDLREKGAVIEVKLQARRGSC

SEQ ID NO: 232267 - protein, 56 aa, Glycine max
  Clone ID: PAT_MRT3847_51760C.1.pep
QLLPYTSLSLSSYCYHFHWLFVLSSRRILAQVLVFLIGDRLFQNGQMFHCPWGAPL

SEQ ID NO: 232268 - protein, 50 aa, Glycine max
  Clone ID: PAT_MRT3847_51761C.1.pep
LKKTGFVFVNIFIEFQDLNVLSPSPSPPTFIHHLGLLSSPFSILLHFSLV

SEQ ID NO: 232269 - protein, 42 aa, Glycine max
  Clone ID: PAT_MRT3847_51762C.1.pep
TNVPYITHEIIISYISRNMIPPQIMQIDQIHNAYIVLGRVGV

SEQ ID NO: 232270 - protein, 63 aa, Glycine max
  Clone ID: PAT_MRT3847_51763C.1.pep
EVRNEINTFGILAAAVANWLSHKLRLHTDRQFLAFGSTLYLSAHILQFHPPIESYCMCLKTPA

SEQ ID NO: 232271 - protein, 283 aa, Glycine max
  Clone ID: PAT_MRT3847_51764C.1.pep
MSEQPNQTYHHPDQNKPFQQGLMQQLSDHHHLNNNNSPFSLPFLSNNTSNASFSEHFNNANGGGGNNNNNNNNEGTNYFATSSAPSLFSNSVNASALSHMSATALLQKAAQMGATTSNGGTASLLKSFGSASSSSGGGGSKLVNAANYVSGMFGGNNHVNEQSNSNLQDLMNSFAVGGNSSIFEDGFEAYEHSNNNSNRDPKVHAMSGSSSSIGGSDRLTRDFLGVGQIVRGMSGSGGVAQREQQQQHGFNLSSLEAERYNNNSNNAAPSSGQAFGGGGGNFQ

SEQ ID NO: 232272 - protein, 47 aa, Glycine max
  Clone ID: PAT_MRT3847_51765C.1.pep
YNTLNGANLRDDKRRRQKHIFYGFQRWFDQISYINTYSFSCLSSVTT

SEQ ID NO: 232273 - protein, 113 aa, Glycine max
  unsure (1)..(113): unsure at all Xaa locations
  Clone ID: PAT_MRT3847_51766C.1.pep
LLRLCLCPPSPCLCVPPLPSPLLXXSLSSPLRSASPSALXGSPSSPXVXLSSPVXSVSPPLSRAGXXXPSPALVLXFSLVLVLXGXPLGLWRXCXXGSLXXXRFPCPSCPXXG

SEQ ID NO: 232274 - protein, 65 aa, Glycine max
  Clone ID: PAT_MRT3847_51767C.1.pep
ALFVSIKPLVYISYLNGYPKLLLEWIPKIFCHCARTIFSTFLEFGCAPMILFMALLDWLRIEERL

SEQ ID NO: 232275 - protein, 65 aa, Glycine max
  Clone ID: PAT_MRT3847_51768C.1.pep
PLYINKTRPPFVSPFFFLFIPSVKFYHFISVSSLSLFLFFYRFIYAPESSLFMLSERKLSILEPC

SEQ ID NO: 232276 - protein, 85 aa, Glycine max
  Clone ID: PAT_MRT3847_51769C.1.pep
VFQVVAIYEPRIAVEGFIWGINFFDQWGVKLGKSLATQVRKQLNAFCSKGEPVQGFYFSSSTMLAKYFQASSDVPTDLPTVFPKI

SEQ ID NO: 232277 - protein, 142 aa, Glycine max
  Clone ID: PAT_MRT3847_5176C.1.pep
MDYDLAALKLFCSQLKQAREVAMPCQTQSQSQSSFTLGGLLFQRPWLQGVLVSASDAGSLLLDDGTDLVELSLNSEFRHRPWKLGMYVMVVGGYAARPGKLPMIKVHKIVDLSSSPNREAMWYLEVMEAYKLFYQPLVEEFT

SEQ ID NO: 232278 - protein, 85 aa, Glycine max
  Clone ID: PAT_MRT3847_51770C.1.pep
MTMDRLSQSSSDSPTRGDPKVLSIECLKGSSKAHEWTGDMLQTGDIVEKLRIGTSSNALIKLRSPFKNGKSGVNRILQDFYKKKD

SEQ ID NO: 232279 - protein, 100 aa, Glycine max
  Clone ID: PAT_MRT3847_51771C.1.pep
INCFFFLMCIFFLRGFVYFDNGFFSSLLLCLPQGGCKKRICAVNFIQKCCRNTKTFRCGRMPRYYTRTRNGGRKTAFLKGPYSFHYGPARKNPPWRPIFY

SEQ ID NO: 232280 - protein, 59 aa, Glycine max
  Clone ID: PAT_MRT3847_51772C.1.pep
MGKVVLLFLCMVLVVVPLACTDSIQKLEVQKHLKNLNRPPVKSIKSPDGDVIDCIHVTH

SEQ ID NO: 232281 - protein, 406 aa, Glycine max
  Clone ID: PAT_MRT3847_51773C.1.pep
MGKVVLLFLCMVLVVVSLACADSIEKLEVQKHLKNLNRPPVRSIKSPDGDVIDCIHVSHQPAFDHPDLKNHKIQMKPNFHPEGHPFGESKVSSNSKPITQPWHQNGRCPDGTIPVRRTKKDDMLRASSVQHFGKKKDRSFPQPKPAKPLPDIISQSGHQHAIAYVEGDKYYGAKATINVWDPKIQQPNEFSLSQMWILGGSFGQDLNSIEAGWQVSPDLYGDNNTRLFTYWTSDAYQATGCYNLLCSGFIQINSDIALGASISPLSKYSSSQYDISILVWKDPKEGNWWMQFGNDHVMGYWPAPLFSYLSDSASMIEWGGEVVNSESDGQHTSTQMGSGHFPEEGFGKASYFKNIQIVDGDNKLRAPKDLGTYTEQDSCYNVQTGSAGDWGSYFYYGGPGRNPNCP

SEQ ID NO: 232282 - protein, 36 aa, Glycine max
  Clone ID: PAT_MRT3847_51774C.1.pep
TRRDAYSVIELSRNYVRLIKRNMQDFTLVEKLVDPM

SEQ ID NO: 232283 - protein, 39 aa, Glycine max
  Clone ID: PAT_MRT3847_51775C.1.pep
FSSCILHVLHSLFGSTDVLNLFLNQMYKKKVYSVSQFDY

SEQ ID NO: 232284 - protein, 59 aa, Glycine max
  Clone ID: PAT_MRT3847_51776C.1.pep
IAPAILSMFIVYYTLMYTCLGIAKNQIKRRRILIWHYMNCLEMALGYYLLLSHMPALPS

SEQ ID NO: 232285 - protein, 70 aa, Glycine max
  Clone ID: PAT_MRT3847_51777C.1.pep
CISKFRRFPRFKNKKKPNHSFQLQFLHFPITQVNSIHHRHYHSPQAQKNITNQSNKQTQSIKHAPFKNQL

SEQ ID NO: 232286 - protein, 117 aa, Glycine max
  unsure (1)..(117): unsure at all Xaa locations
  Clone ID: PAT_MRT3847_51778C.1.pep
MRERINHSRGIRQCSWGKWAAEIRDPXKGVRVRLGTFNSAEEAARAYDAAAGRFLGKRANVNLTDEPVGAAVYVXRLKENAEAESMKENLNTVKPNMNQMLNSGHNLQGYYSPVDHV

SEQ ID NO: 232287 - protein, 85 aa, Glycine max
  unsure (1)..(85): unsure at all Xaa locations
  Clone ID: PAT_MRT3847_51779C.1.pep
MIWNGPMGVFEFNKFAVDTEAVAKNLANLSEKGVTTIIGRXDSVTXIEKVEVTNIISHISTNNNTNLKLLKSKELPRVLTLNKAI

SEQ ID NO: 232288 - protein, 319 aa, Glycine max
  Clone ID: PAT_MRT3847_5177C.1.pep
LKCICNTFKDYPSTAVKLIETLLSVEPALFRAAAAAPLKSEFFTSEPLPCDPSSLPKYAPSKEIDAKLRDEARRQRAVGGREQKVASGVGQEKGHRANVATKDNADPGLLVQQGRYSSSRNQSELSNPHRGTVSGILVFPHKQSEKEMDNNFSGHIYKRPSHSGPLVPGSVWAKGRKEVDDVPPVSNRVNLSKLSGLVASRTLPEDQEVKPVHSHHRKPIEVRKSVESTNGSESRRRQDQKRIVDLNQIESRRVAAEKSTPGGRESMGNKIYLSGPLMVSSSNMDQMLKDHDRKIQEFSRRARIDKSRARGEKVRALRK

SEQ ID NO: 232289 - protein, 136 aa, Glycine max
  unsure (1)..(136): unsure at all Xaa locations
  Clone ID: PAT_MRT3847_51780C.1.pep
XDEEIHPKVAQDLVEEWFDCVDEEDSIVEASQRAALIGVXGVDYTERIPLATIQGFPYALSXKNGEKGKRRSVSADGEEMTXIPGTTVEEAYNKLKVEXLDKSAPTLGGTECPKDDKLPCGKKHDKLKIGCFTILP

SEQ ID NO: 232290 - protein, 151 aa, Glycine max
  unsure (1)..(151): unsure at all Xaa locations
  Clone ID: PAT_MRT3847_51781C.1.pep
TKYKMDQKMRVMTMVFVSPWDHWKKFHVLKQINYWDEWVNLKIAEDIHVVGLLEILPMRTFSVIVHMDPAVATSWNQLIGKTLNAKFGCPWMTPMQNSSSCDNDDNNYQYVENPNTXGGNNNNRNNDKYTLVASKKMVGSVHKCVDEGKKC

SEQ ID NO: 232291 - protein, 49 aa, Glycine max
  Clone ID: PAT_MRT3847_51782C.1.pep
SSPPNNHMNLKTNSMDEQNFILIFNRILHFNTLCQPNRSSWLVILVSLL

SEQ ID NO: 232292 - protein, 93 aa, Glycine max
  Clone ID: PAT_MRT3847_51783C.1.pep
TAITPNPAVRDPQPFVRIIGLIVSLLRCARRTSAPGLLFLPRISILIVIISPLGALAPMQLFHLPSTPYPISIRLRVNSAWFGSATGVVMVLL

SEQ ID NO: 232293 - protein, 31 aa, Glycine max
  Clone ID: PAT_MRT3847_51784C.1.pep
IFCIRVLINPLPGRKLLLLLLLLAFNGTYQT

SEQ ID NO: 232294 - protein, 79 aa, Glycine max
  Clone ID: PAT_MRT3847_51786C.1.pep
RVNYYESLGRRLNKSSSMVMLCGLTDPDVTVACRCLLDERVRGPISLTLTRSQLLGLFYVVRPSMCSLCAFLNLIYFFK

SEQ ID NO: 232295 - protein, 40 aa, Glycine max
  Clone ID: PAT_MRT3847_51787C.1.pep
KYYASVNIHKLTKAKENILFIYSYNHFVIIKITLKCKTKQ

SEQ ID NO: 232296 - protein, 78 aa, Glycine max
  unsure (1)..(78): unsure at all Xaa locations
  Clone ID: PAT_MRT3847_51788C.1.pep
RASTILFPTTPSQLXAGISGIFSPSQALLVKPVKKQMMGKSKGMRIACQATSIPADRIPDMGKKQLMNLLLLSAISLP

SEQ ID NO: 232297 - protein, 84 aa, Glycine max
  unsure (1)..(84): unsure at all Xaa locations
  Clone ID: PAT_MRT3847_51789C.1.pep
TRPVVSLLTILVCESXTRLGGIPKEKIRCYALAPARCMSLNLAXQDDFLPRTATPLEDIFKSVFWVPLGLCASLSEAPLRPPHP
